United States Patent Application Publication US 2020/0163878 A1 - sequence listing, part 8

SEQ ID NO: 37323 - RNA, 1701 nt, Artificial Sequence
  derived and/or modified CDS sequence (wt) from hemagglutinin__InfluenzaA__ADK87295
augaagacuaucauugcuuugagcuacauucuaugucugguuuucgcucaaaaacuuccuggaaaugacaacagcacggcaacacugugccuugggcaccaugcaguaccaaacggaacgauagugaaaacaaucacgaaugaccaaauugaaguuacuaaugcuacugagcugguucagaguuccucaacaggugaaauaugcgacaguccucaucagauccuugacggaaaaaacugcacacuaauagaugcucuauugggagacccucagugugauggcuuccaaaauaagaaaugggaccuuuuuguugaacgcagcaaagccuacagcaacuguuacccuuaugaugugccagauuaugccucccuuaggucacuaguugccucauccggcucacuggaguuuaacaaugaaagcuucaauuggacuggagucacucaaaacggaacaagcucugcuugcauaaggagaucuaaaaacaguuucuuuaguagauugaauugguugacccacuuaaacuucaaauacccagcauugaacgugacuaugccaaacaaugaacaauuugacaaauuguacauuugggggguucaccacccggguacggacaaagaccaaaucuuccuguaugcucaagcaucaggaagaaucacagucucuaccaaaagaagccaacaaacugcaaucccgaauaucggaucuagacccagaguaaggaauaucccuagcagaauaagcaucuauuggacaauaguaaaaccgggagacauacuuuugauuaacagcacagggaaucuaauugcuccuagggguuacuucaaaauacgaagugggaaaagcucaauaaugagaucagaugcacccauuggcaaaugcaauucugaaugcaucacuccaaauggaagcauucccaaugacaaaccauuccaaaauguaaacaggaucacauacggggccugucccagauauguuaagcaaaacacucugaaauuggcaacagggaugcgaaauguaccagagaaacaaacuagaggcauauuuggcgcaaucgcggguuucauagaaaaugguugggagggaaugguggaugguugguacgguuucaggcaucaaaauucugagggaagaggacaagcagcagaucucaaaagcacucaagcagcaaucgaucaaaucaaugggaagcugaauagauugaucgggaaaaccaacgagaaauuccaucagauugaaaaagaauucucagaagucgaagggagaauucaggaccuugagaaauauguugaggacacuaaaauagaucucuggucauacaacgcagagcuucuuguugcccuggagaaccaacauacaauugaucuaacugacucagaaaugaacaaacuguuugaaaaaacaaagaagcaacugagggaaaaugcugaggauaugggcaaugguuguuucaaaauauaccacaaaugugacaaugccugcauaggaucaaucagaaauggaacuuaugaccacgauguauacagagaugaagcacuaaacaaccgguuucagaucaagggaguugagcugaagucaggguacaaagauuggauccuauggauuuccuuugccauaucauguuuuuugcuuuguguugcuuuguugggguucaucaugugggccugccaaaaaggcaacauuaggcgcaacauuugcauuuga

SEQ ID NO: 37324 - RNA, 1701 nt, Artificial Sequence
  derived and/or modified CDS sequence (wt) from hemagglutinin__InfluenzaA__ADK87296
augaaggcaauacuaguaguucugcuauauacauuugcaaccgcaaaugcagacacauuauguauagguuaucaugcgaacaauucaacagacacuguagacacaguacuagaaaagaauguaacaguaacacacucuguuaaccuucuagaagacaagcauaacgggaaacuaugcaaacuaagagggguagccccauugcauuuggguaaauguaacauugcuggcuggauccugggaaauccagagugugaaucacucuccacagcaagcucaugguccuacauuguggaaacaucuaguucagacaauggaacguguuacccaggagauuucaucgauuaugaggagcuaagagagcaauugagcucagugucaucauuugaaagguuugagauauuccccaagacaaguucauggcccaaucaugacccgaacaaagguguaacggcagcauguccucaugcuggagcaaaaagcuucuacaaaaauuuaauauggcuaguuaaaaaaggaaauucauacccaaagcucagcaaauccuacauuaaugauaaagggaaagaaguccucgugcuauggggcauucaccauccaucuacuagugcugaccaacaaagucucuaucagaaugcugaugcauauguuuuuguggggacaucaagauacagcaagaaguucaagccggaaauagcaauaagacccaaagugagggaucaagaagggagaaugaacuauuacuggacacuaguagagccgggagacaaaauaacauucgaggcaacuggaaaucuagugguaccgagaugugcauucgcaauggaaagaaaugcuggaucugguauuaucauuucagauacaccaguccacgauugcaauacaacuugucagacacccaagggugcuauaaacaccagccucccauuucagaauauacauccgaucacaauugggaaauguccaaaauauguaaaaagcacaaaauugagacuggccacaggauugaggaaugucccgucuauucaaucuagaggccuauuuggggccauugccgguuucauugaagggggguggacagggaugguagauggaugguacgguuaucaccaucaaaaugagcaggggucaggauaugcagccgaccugaagagcacacagaaugccauugacgagauuacuaacaaaguaaauucuguuauugaaaagaugaauacacaguucacagcaguaggcaaagaguucaaccaccuggaaaaaagaauagagaauuuaaauaaaaaaguugaugaugguuuccuggacauuuggacuuacaaugccgaacuguugguucuauuggaaaaugaaagaacuuuggacuaccacgauucaaaugugaagaacuuauaugaaaagguaagaagccaguuaaaaaacaaugccaaggaaauuggaaacggcugcuuugaauuuuaccacaaaugcgauaacacgugcauggaaagugucaaaaaugggacuuaugacuacccaaaauacucagaggaagcaaaauuaaacagagaagaaauagaugggguaaagcuggaaucaacaaggauuuaccagauuuuggcgaucuauucaacugucgccaguucauugguacugguagucucccugggggcaaucaguuucuggaugugcucuaaugggucucuacaguguagaauauguauuuga

SEQ ID NO: 37325 - RNA, 1701 nt, Artificial Sequence
  derived and/or modified CDS sequence (wt) from hemagglutinin__InfluenzaA__ADK87298
augaaggcaauacuaguaguucugcuauauacauuugcaaccgcaaaugcagacacauuauguauagguuaucaugcgaacaauucaacagacacuguagacacaguacuagaaaagaauguaacaguaacacacucuguuaaccuucuagaagacaagcauaacgggaaacuaugcaaacuaagagggguagccccauugcauuuggguaaauguaacauugcuggcuggauccugggaaauccagagugugaaucacucuccacagcaagcucaugguccuacauuguggaaacaucuaguucagacaguggaacguguuacccaggagauuucaucgauuaugaggagcuaagagagcaauugagcucagugucaucauuugaaagguuugagauauuccccaagacaaguucauggcccaaucaugacccgaacaaagguguaacggcagcauguccucaugcuggagcaaaaagcuucuacaaaaauuuaauauggcuaguuaaaaaaggaaauucauacccaaagcucagcaaauccuacauuaaugauaaagggaaagaaguccucgugcuauggggcauucaccauccaucuacuagugcugaccaacaaagucucuaucagaaugcagaugcauauguuuuuguggggacaucaagauacagcaagaaguucaagccggaaauagcaauaagacccaaagugagggaucaagaagggagaaugaacuauuacuggacacuaguagagccgggagacaaaauaacauucgaagcaacuggaaaucuagugguaccgagauaugcauucgcaauggaaagaaaugcuggaucugguaauaucauuucagauacaccaguccacgauugcaauacaacuugucagacacccaagggugcuauaaacaccagccucccauuucagaauauacauccgaucacaauuggaaaauguccaaaauauguaaaaagcacaaaauugagacuggccacaggauugaggaaugucccgucuauucaaucuagaggccuauuuggggccauugccgguuucauugaagggggguggacagggaugguagauggaugguacgguuaucaccaucaaaaugagcaggggucaggauaugcagccgaccugaagagcacacagaaugccauugacgagauuacuaacaaaguaaauccuguuauugaaaagaugaauacacaguucacagcaguagguaaagaguucaaccaccuggaaaaaagaauagagaauuuaaauaaaaaaguugaugaugguuuccuggacauuuggacuuacaaugccgaacuguugguucuauuggaaaaugaaagaacuuuggacuaccacgauucaaaugugaagaacuuauaugaaaagguaagaagccaguuaaaaaacaaugccaaggaaauuggaaacggcugcuuugaauuuuaccacaaaugcgauaacacgugcauggaaagugucaaaaaugggacuuaugacuacccaaaauacucagaggaagcaaaauuaaacagagaagaaauagaugggguaaagcuggaaucaacaaggauuuaccagauuuuggcgaucuauucaacugucgccaguucauugguacugguagucucccugggggcaaucaguuucuggaugugcucuaaugggucucuacaguguagaauauguauuuga

SEQ ID NO: 37326 - RNA, 1701 nt, Artificial Sequence
  derived and/or modified CDS sequence (wt) from hemagglutinin__InfluenzaA__ADK87300
augaagacuaucauugcuuugagcuacauucuauguaugguuuucgcucaaaaacuuccuggaaaugacaacagcacggcaacgcugugccuugggcaccaugcaguaccaaacggaacgauagugaaaacaaucacgaaugaccaaauugaaguuacuaaugcuacugagcugguucagaguuccucaacaggugaaauaugcgacaguccucaucagauccuugauggaaaaaacugcacacuaauagaugcucuauugggagacccucagugugauggcuuccaaaauaagaaaugggaccuuuuuguugaacgcagcaaagccuacagcaacuguuacccuuaugaugugccggauuaugccucccuuaggucacuaguugccucauccggcacacuggaguuuaacaaugaaagcuucaauuggacuggagucacucaaaacggaacaagcucugcuugcauaaggagaucuaaaaacagucucuuuaguagauugaauugguugacccacuuaaacuucaaauacccagcauugaacgugacuaugccaaacaaugaacaauuugacaaauuguacauuugggggguucaccacccggguacggacaaagaccaaaucuuccuguaugcucaagcaucaggaagaaucacagucucuaccaaaagaagccaacaaacugcaaucccgaauaucggaucuagacccagaguaaggaauaucccuagcagaauaagcaucuauuggacaauaguaaaaccgggagacauacuuuugauuaacagcacagggaaucuaaucgcuccgagggguuacuucaaaauacgaagugggaaaagcucaauaaugagaucagaugcacccaucggcaaaugcaauucugaaugcaucgcuccaaauggaagcauucccaaugacaaaucauuccaaaauguaaacaggaucacauacggggccugucccagauauguuaagcaaaacacucugaaauuggcaacagggaugcgaaaugugccagagaaacaaacuagaggcauauuuggcgcaaucgcggguuucauagaaaaugguugggagggaaugguggaugguugguacgguuucaggcaucaaaauucugagggaagaggacaagcagcagaucucaaaagcacucaagcagcaaucgaucaaaucaaugggaagcugaauagauugaucgggaaaaccaacgagaaauuccaucagauugaaaaagaauucucagaagucgaagggagaauucaggaccuugagaaauauguugaggacacuaaaauagaucucuggucauacaacgcggagcuucuuguugcccuggagaaccaacauacaauugaucuaacugacucagaaaugaacaaacuguuugaaaaaacaaagaagcaacugagggaaaaugcugaggauaugggcaaugguuguuucaaaauauaccacaaaugugacaaugccugcauaggaucaaucagaaauggaacuuaugaucacgauguauacagagaugaagcacuaaacaaccgguuucagaucaagggaguugagcugaagucaggguacaaagauuggauccuauggauuuccuuugccauaucauguuuuuugcuuuguguugcuuuguugggguucaucaugugggccugccaaaaaggcaacauuaggugcaacauuugcauuuga

SEQ ID NO: 37327 - RNA, 1701 nt, Artificial Sequence
  derived and/or modified CDS sequence (wt) from hemagglutinin__InfluenzaA__ADK87302
augaagacuaucaucgcuuugagcuacauucuauguaugguuuucgcucaaaaacuuccuggaaaugacaacagcacggcaacgcugugccuugggcaccaugcaguaccaaacggaacgauagugaaaacaaucacgaaugaccaaauugaaguuacuaaugcuacugagcugguucagaguuccucaacaggugaaauaugcgacaguccucaucagauccuugauggaaaaaacugcacacuaauagaugcucuauugggagacccucagugugauggcuuccaaaauaagaaaugggaccuuuuuguugaacgcagcaaagccuacagcaacuguuacccuuaugaugugccggauuaugccucccuuaggucacuaguugccucauccggcacacuggaguuuaacaaugaaagcuucaauuggacuggagucacucaaaacggaacaagcucugcuugcauaaggagaucuaaaaacaguuucuuuaguagauugaauugguugacccacuuaaacuucaaauacccagcauugaacgugacuaugccaaacaaugaacaauuugacaaauuguacauuugggggguucaccacccggguacggacaaagaccaaaucuuccuguaugcucaagcaucaggaagaaucacagucucuaccaaaagaagccaacaaacugcaaucccgaauaucggaucuagacccagaguaaggaauaucccuagcagaauaagcaucuauuggacaauaguaaaaccgggagacauacuuuugauuaacagcacagggaaucuaauugcuccgagggguuacuucaaaauacgaagugggaaaagcucaauaaugagaucagaugcacccaucggcaaaugcaauucugaaugcaucacuccaaauggaagcauucccaaugacaaaccauuccaaaauguaaacaggaucacauacggggccugucccagauauguuaagcaaaacacucugaaauuggcaacagggaugcgaaaugugccagagaaacaaacuagaggcauauuuggcgcaaucgcggguuucauagaaaaugguugggagggaaugguggaugguugguacgguuucaggcaucaaaauucugagggaagaggacaagcagcagaucucaaaagcacucaagcagcaaucgaucaaaucaaugggaagcugaauagauugaucgggaaaaccaacgagaaauuccaucagauugaaaaagaauucucagaagucgaagggagaauucaggaccuugagaaauauguugaggacacuaaaauagaucucuggucauacaacgcggagcuucuuguugcccuggagaaccaacauacaauugaucuaacugacucagaaaugaacaaacuguuugaaaaaacaaagaagcaacugagggaaaaugcugaggauaugggcaaugguuguuucaaaauauaccacaaaugugacaaugccugcauaggaucaaucagaaauggaacuuaugaucacgauguauacagagaugaagcacuaaacaaccgguuucagaucaagggaguugagcugaagucaggguacaaagauuggauccuauggauuuccuuugccauaucauguuuuuugcuuuguguugcuuuguugggguucaucaugugggccugccaaaaaggcaacauuaggugcgacauuugcauuuga

SEQ ID NO: 37328 - RNA, 1701 nt, Artificial Sequence
  derived and/or modified CDS sequence (wt) from hemagglutinin__InfluenzaA__ADK87304
augaagacuaucauugcuuugagcuacauucuaugucugguuuucgcucaaaaaauuccuggaaaugacaacagcacggcaacgcugugccuugggcaccaugcaguaccaaacggaacgauagugaaaacaaucacgaaugaccaaauugaaguuacuaaugcuacugagcugguucagaguuccucaacaggugaaauaugcgacaguccucaucagauccuugauggaaaaaacugcacacuaauagaugcucuauugggagacccucagugugauggcuuccaaaauaagaaaugggaccuuuuuguugaacgcagcaaagccuacagcaacuguuacccuuaugaugugccggauuaugccucccuuaggucacuaguugccucauccggcacacuggaguuuaacaaugaaagcuucaauuggacuggagucacucaaaacggaacaagcucugcuugcauaaggagaucuaaaaacaguuucuuuaguagauugaauugguugacccacuuaaacuucaaauacccagcauugaacgugacuaugccaaacaaugaacaauuugacaaauuguacauuugggggguucaccacccggguacggacaaagaccaaaucuuccuguaugcucaagcaucaggaagaaucacagucucuaccaaaagaagccaacaaacugcaaucccgaauaucggaucuagacccagaguaaggaauaucccuagcagaauaagcaucuauuggacaauaguaaaaccgggagacauacuuuugauuaacagcacagggaaucuaauugcuccuagggguuacuucaaaauacgaagugggaaaagcucaauaaugagaucagaugcacccauuggcaaaugcaauucuggaugcaucacuccaaauggaagcauucccaaugacaaaccauuccaaaauguaaacaggaucacauacggggccugucccagauauguuaagcaaaacacucugaaauuggcaacagggaugcgaaauguaccagagaaacaaacuagaggcauauuuggcgcaaucgcggguuucauagaaaaugguugggagggaaugguggaugguugguacgguuucaggcaucaaaauucugagggaagaggacaagcagcagaucucaaaagcacucaagcagcaaucgaucaaaucaaugggaagcugaauagauugaucgggaaaaccaacgagaaauuccaucagauugaaaaagaauucucagaagucgaagggagaauucaggaccuugagaaauauguugaggacacuaaaauagaucucuggucauacaacgcggagcuucuuguugcccuggagaaccaacauacaauugaucuaacugacucagaaaugaacaaacuguuugaaaaaacaaagaagcaacugagggaaaaugcugaggauaugggcaaugguuguuucaaaauauaccacaaaugugacaaugccugcauaggaucaaucagaaauggaacuuauggccacgauguauacagagaugaagcacuaaacaaccgguuucagaucaagggaguugagcugaagucaggguacaaagauugguuccuauggauuuccuuugccauaucauguuuuuugcuuuguguugcuuuguugggguucaucaugugggccugccaaaaaggcaacauuaggugcaacauuugcauuuga

SEQ ID NO: 37329 - RNA, 1701 nt, Artificial Sequence
  derived and/or modified CDS sequence (wt) from hemagglutinin__InfluenzaA__ADK87306
augaagacuaucauugcuuugagcuacauucuaugucugguuuucgcucaaaaacuuccuggaaaugacaacagcacggcaacgcugugccuugggcaccaugcaguaccaaacggaacgauagugaaaacaaucacgaaugaccaaauugaaguuacuaaugcugcugagcugguucagaguuccucaacaggugaaauaugcgacaguccucaucagauccuugauggaaaaaacugcacacuaauagaugcucuauugggagacccucagugugauggcuuccaaaauaagaaaugggaccuuuuuguuggacgcagcaaagccuacagcaacuguuacccuuaugaugugccggauuaugccucccuuaggucacuaguugccucauccggcacacuggaguuuaacaaugaaagcuucaauuggacuggagucacucaaaacggaacaagcucugcuugcauaaggagaucuaaaaacaguuucuuuaguagauugaauugguugacccacuuaaacuucaaauacccagcauugaacgugacuaugccaaacaaugaacaauuugacaaauuguacauuugggggguucaccacccggguacggacaaagaccaaaucuuccuguaugcucaagcaucaggaagaaucacagucucuaccaaaagaagccaacaaacugcaaucccgaauaucggaucuagacccagaguaaggaauaucccuagcaggauaagcaucuauuggacaauaguaaaaccgggagacauacuuuugauuaacagcacagggaaucuaauugcuccuagggguuacuucaaaauacgaagugggaaaagcucaauaaugagaucagaugcacccauuggcaaaugcaauucugaaugcaucacuccaaauggaagcauucccaaugacaaaccauuccaaaauguaaacaggaucacauacggggccugucccagauauguuaagcaaaacacucugaaauuggcaacaggggugcgaaauguaccagagaaacaaacuagaggcauauuuggcgcaaucgcggguuucauagaaaaugguugggagggaaugguggaugguugguacgguuucaggcaucaaaauucugagggaagaggacaagcagcagaucucaaaagcacucaagcagcaauggaucaaaucaaugggaagcugaauagauugaucgggaaaaccaacgagaaacuccaucagacugaaaaggaauucucagaagucgaagggagaauucaggaccuugagaaauauguugaggacacuaaaauagaucucuggucauacaacgcggagcuucuuguugcccuggagagccaacauacaauugaucuaacugacucagaaaugaacaaacuguuugaaaaaacaaagaagcaacugagggaaaaugcugaggauaugggcaaugguuguuucaaaauauaccacaaaugugacaaugccugcauaggaucaaucagaaauggaacuuaugaccacgauguauacagagaugaagcacuaaacaaccgguuucagaucaagggaguugagcugaagucaggguacaaagauuggauccuauggauuuccuuugccauaucauguuuuuugcuuuguguugcuuuguugggguucaucaugugggccugccaaaaaggcaacauuaggugcaacauuugcauuuga

SEQ ID NO: 37330 - RNA, 1701 nt, Artificial Sequence
  derived and/or modified CDS sequence (wt) from hemagglutinin__InfluenzaA__ADK87308
augaagacuaucauugcuuugagcuacauucuauguaugguuuucgcucaaaaacuuccuggaaaugacaacagcacggcaacgcugugccuugggcaccaugcaguaccaaacggaacgauagugaaaacaaucacgaaugaccaaauugaaguuacuaaugcuacugagcugguucagaguuccucaacaggugaaauaugcgacaguccucaucagauccuugauggaaaaaacugcacacuaauagaugcucuauugggagacccucagugugauggcuuccaaaauaagaaaugggaccuuuuuguugaacgcagcaaagccuacagcaacuguuacccuuaugaugugccggauuaugccucccuuaggucacuaguugccucauccggcacacuggaguuuaacaaugaaagcuucaauuggacuggagucacucaaaacggaacaagcucugcuugcauaaggagaucuaaaaacaguuucuuuaguagauugaauugguugacccacuuaaacuucaaauacccagcauugaacgugacuaugccaaacaaugaacaauuugacaaauuguacauuugggggguucaccacccggguacggacaaagaccaaaucuuccuguaugcucaagcaucaggaagaaucacagucucuaccaaaagaagccaacaaacugcaaucccgaauaucggaucuagacccagaguaaggaauaucccuagcagaauaagcaucuauuggacaauaguaaaaccgggagacauacuuuugauuaacagcacagggaaucuaauugcuccgagggguuacuucaaaauacgaagugggaaaagcucaauaaugagaucagaugcacccauuggcaaaugcaauucugaaugcaucacuccaaauggaagcauucccaaugacaaaccauuccaaaauguaaacaggaucacauacggggccugucccagauauguuaagcaaaacacucugaaauuggcaacagggaugcgaaauguaccagagaaacaaacuagaggcauauuuggcgcaaucgcggguuucauagaaaaugguugggagggaaugguggaugguugguacgguuucaggcaucaaaauucugagggaagaggacaagcagcagaucucaaaagcacucaagcagcaaucgaucaaaucaaugggaagcugaauagauugaucgggaaaaccaacgagaaauuccaucagauugaaaaagaauucucagaagucgaagggagaauucaggaccuugagaaauauguugaggacacuaaaauagaucucuggucauacaacgcggagcuucuuguugcccuggagaaccaacauacaauugaucuaacugacucagaaaugaacaaacuguuugaaaaaacaaagaagcaacugagggaaaaugcugaggauaugggcaaugguuguuucaaaauauaccacaaaugugacaaugccugcauaggaucaaucagaaauggaacuuaugaucacgauguauacagagaugaagcacuaaacaaccgguuucagaucaagggaguugagcugaagucaggguacaaagauuggauccuauggauuuccuuugccauaucauguuuuuugcuucguguugcuuuguugggguucaucaugugggccugccaaaaaggcaacauuaggugcaacauuugcauuuga

SEQ ID NO: 37331 - RNA, 1701 nt, Artificial Sequence
  derived and/or modified CDS sequence (wt) from hemagglutinin__InfluenzaA__ADK87309
augaagacuaucauugcuuugagcuacauucuaugucugguuuucgcucaaaaacuuccuggaaaugacaacagcacggcaacgcugugccuugggcaccaugcaguaccaaacggaacgauagugaaaacaaucacgaaugaccaaauugaaguuacuaaugcuacugagcugguucagaguuccucaacaggugaaauaugcgacaguccucaucagauccuugauggaaaaaacugcacacuaauagaugcucuauugggagacccucagugugauggcuuccaaaauaagaaaugggaccuuuuuguugaacgcagcaaagccuacagcaacuguuacccuuaugaugugccggauuaugccucccuuaggucacuaguugccucauccggcacacuggaguuuaacaaugaaagcuucaauuggacuggagucacucaaaacggaacaagcucugcuugcauaaggagaucuaaaaacaguuucuuuaguagauugaauugguugacccacuuaaacuucaaauacccagcauugaacgugacuaugccaaacaaugaacaauuugacaaauuguacauuugggggguucaccacccggguacggacaaagaccaaaucuuccuguaugcucaagcaucaggaagaaucacagucucuaccaaaagaagccaacaaacugcaaucccgaauaucggaucuagacccagaguaaggaauaucccuagcagaauaagcaucuauuggacaauaguaaaaccgggagacauacuuuugauuaacagcacagggaaucuaauugcuccuagggguuacuucaaaauacgaagugggaaaagcucaauaaugagaucagaugcacccauuggcaaaugcaauucugaaugcaucacuccaaauggaagcauucccaaugacaaaccauuccaaaauguaaacaggaucacauacggggccugucccagauauguuaagcaaaacacucugaaauuggcaacagggaugcgaaauguaccagagaaacaaacuagaggcauauuuggcgcaaucgcggguuucauagaaaaugguugggagggaaugguggaugguugguacgguuucaggcaucaaaauucugagggaagaggacaagcagcagaucucaaaagcacucaagcagcaaucgaucaaaucaaugggaagcugaauagauugaucgggaaaaccaacgagaaauuccaucagauugaaaaagaauucucagaagucgaagggagaauucaggaccuugagaaauauguugaggacacuaaaauagaucucuggucauacaacgcggagcuucuuguugcccuggagaaccaacauacaauugaucuaacugacucagaaaugaacaaacuguuugaaaaaacaaagaagcaacugagggaaaaugcugaggauaugggcaaugguuguuucaaaauauaccacaaaugugacaaugccugcauaggaucgaucagaaauggaacuuaugaccacgauguauacagagaugaagcacuaaacaaccgguuucagaucaagggaguugagcugaagucaggguacaaagauuggauccuauggauuuccuuugccauaucauguuuuuugcuuuguguugcuuugucgggguucaucaugugggccugccaaaaaggcaacauuaggugcaacauuugcauuuga

SEQ ID NO: 37332 - RNA, 1701 nt, Artificial Sequence
  derived and/or modified CDS sequence (wt) from hemagglutinin__InfluenzaA__ADK87310
augaaggcaauacuaguaguucugcuauauacauuugcaaccgcaaaugcagacacauuauguauagguuaucaugcgaacaauucaacagacacuguagacacaguacuagaaaagaauguaacaguaacacacucuguuaaccuucuagaagacaagcauaacgggaaacuaugcaaacuaagagggguagccccauugcauuuggguaaauguaacauugcuggcuggauccugggaaauccagagugugaaucacucuccacagcaagcucaugguccuacauuguggaaacauccaguucagacaauggaacguguuacccaggagauuucaucgauuaugaggagcuaagagagcaauugagcucagugucaucauuugaaagguuugagauauuccccaagacagguucauggcccaaucaugacccgaacaaagguguaacggcagcauguccucaugcuggagcaaaaagcuucuacaaaaauuuaauauggcuaguuaaaaaaggaaauucauacccaaagcucagcaaauccuacauuaaugauaaagggaaagaaguccucgugcuauggggcauucaccauccaucuacuagugcugaccaacaaagucucuaucagaaugcagaugcauauguuuuuguggggacaucaagauacagcaagaaguucaagccggaaauagcaauaagacccaaagugagggaucaagaagggagaaugaacuauuacuggacacuaguagagccgggagacaaaauaacauucgaagcaacuggaaaucuagugguaccgagauaugcauucgcaauggaaagaaaugcuggaucugguauuaucauuucagauacaccaguccacgauugcaauacaacuugucagacacccaagggugcuauaaacaccagccucccauuucagaauauacauccgaucacaauuggaaaauguccaaaauauguaaaaagcacaaaauugagacuggccacaggauugaggaaugucccgucuauucaaucuagaggccuauuuggggccauugccgguuucauugaagggggguggacagggaugguagauggaugguacgguuaucaccaucaaaaugagcaggggucaggauaugcagccgaccugaagagcacacagaaugccauugacgagauuacuaacaaaguaaauucuguuauugaaaagaugaauacacaguucacagcaguagguaaagaguucaaccaccuggaaaaaagaauagagaauuuaaauaaaaaaguugaugaugguuuccuggacauuuggacuuacaaugccgaacuguugguucuauuggaaaaugaaagaacuuuggacuaccacgauucaaaugugaagaacuuauaugaaaagguaagaagccaguuaaaaaacaaugccaaggaaauuggaaacggcugcuuugaauuuuaccacaaaugcgauaacacgugcauggaaagugucaaaaaugggacuuaugacuacccaaaauacucagaggaagcaaaauuaaacagagaagaaauagaugggguaaagcuggaaucaacaaggauuuaccagauuuuggcgaucuauucaacugucgccaguucauugguacugguagucucccugggggcaaucaguuucuggaugugcucuaaugggucucuacaguguagaauauguauuuga

SEQ ID NO: 37333 - RNA, 1701 nt, Artificial Sequence
  derived and/or modified CDS sequence (wt) from hemagglutinin__InfluenzaA__ADK87311
augaaggcaauacuaguaguucuacuauauacauuugcaaccgcaaaugcagacacauuauguauagguuaucaugcggacaauucaacagacacuguagacacaguacuagaaaggaaugugacaguaacacacucuguuaaccuucuagaagacaagcauaacgggaaauuaugcaaacuaagagggguagccccauugcauuuggguaaauguaacauugcuggcuggauccugggaaauccagagugugaaucacucuccacagcaagcucaugguccuacauuguggaaacaucuaguucagacaauggaacguguuacccaggagauuucaucgauuaugaggagcuaagagagcaauugagcucagugucaucauuugaaagguuugagauauuccccaagacaaguucauggcccaaucaugacucgaacaaagguguaacggcagcauguccucaugcuggagcaaaaagcuucuacaaaaauuuaauauggcuaguuaaaaaaggaaauucauacccaaagcucagcaaauccuacauuaaugauaaagggaaagaaguccucgugcuauggggcauucaccauccaucuacuagugcuggccaacaaagucucuaucagaaugcagaugcauauguuuuuguggggacaucaagauacagcaagaaguucaagccggaaauagcaauaagacccaaagugagggaucaagaagggagaaugaacuauuacuggacacuaguagagccgggagacaaaauaacauucgaagcaacuggaaaucuagugguaccgagauaugcauucgcaauggaaagaaaugcuggaucugguauuaucauuucagauacaccaguccacgauugcaauacaacuugucagacacccaagggugcuauaaacaccagccccccauuucagaauauacauccgaucacaauuggaaaauguccaaaauauguaaaaagcacaaaauugagacuggcuacaggauugaggaaugucccuucuauucaaucuagaggccuauuuggggccauugccgguuucauugaagggggguggacagggaugguagauggaugguacgguuaucaccaucaaaaugagcaggggucaggauaugcagccgaccugaagagcacacagaaugccauugacgagaucacuaacaaaguaaauucuguuauugaaaagaugaauacacaguucacagcaguagguaaagaguucaaccaccuggaaaaaagaauagagaauuuaaauaaaaaaguugaugaugguuuccuggacauuuggacuuacaaugccgaacuguugguucuauuggaaaaugaaagaacuuuggacuaccacgauucaaaugugaagaacuuauaugaaaagguaagaagccaguuaaaaaacaaugccaaggaaauuggaaacggcugcuuugaauuuuaccacaaaugcgauaacacgugcauggaaagugucaaaaaugggacuuaugacuacccaaaauacucagaggaagcaaaauuaaacagagaagaaauagaugggguaaagcuggaaucaacaaggauuuaccagauuuuggcgaucuauucaacugucgccaguucauugguacugguagucucccugggggcaaucaguuucuggaugugcucuaaugggucucuacaguguagaauauguauuuga

SEQ ID NO: 37334 - RNA, 1701 nt, Artificial Sequence
  derived and/or modified CDS sequence (wt) from hemagglutinin__InfluenzaA__ADK87313
augaagacuaucauugcuuugagcuacauucuaugucugguuuucgcucagaaaauuccuggaaaugacaacagcacggcaacgcugugccuugggcaccaugcaguaccaaacggaacgauagugaaaacaaucacgaaugaccaaauugaaguuacuaaugcuacugagcugguucagaguuccucaacaggugaaauaugcgacaguccucaucagauccuugauggaaaaaacugcacacuaauagaugcucuauugggagacccucagugugauggcuuccaaaauaagaaaugggaccuuuuuguugaacgcagcaaagccuacagcaacuguuacccuuaugaugugccggauuaugccucccuuaggucacuaguugccucauccggcacacuggaguuuaacaaugaaagcuucaauuggacuggagucacucaaaacggaacaagcucugcuugcauaaggagaucuaaaaacaguuucuuuaguagauugaauugguugacccacuuaaacuucaaauacccagcauugaacgugacuaugccaaacaaugaacaauuugacaaauuguacauuugggggguucaccacccggguacggacaaagaccaaaucuuccuguaugcucaagcaucaggaagaaucgcagucucuaccaaaagaagccaacaaacugcaaucccgaauaucggaucuagacccagaguaaggaauaucccuagcagaauaagcaucuauuggacaauaguaaaaccgggagacauacuuuugauuaacagcacagggaaucuaauugcuccuagggguuacuucaaaauacgaagugggaaaagcucaauaaugagaucagaugcacccauuggcaaaugcaauucuggaugcaucacuccaaauggaagcauucccaaugacaaaccauuccaaaauguaaacaggaucacauacggggccugucccagauauguuaagcaaaacacucugaaauuggcaacagggaugcgaaauguaccagagaaacaaacuagaggcauauuuggcgcaaucgcggguuucauagaaaaugguugggagggaaugguggaugguugguacgguuucaggcaucaaaauuccgagggaagaggacaagcagcagaucucaaaagcacucaagcagcaaucgaucaaaucaaugggaagcugaauagauugaucgggaaaaccaacgagaaauuccaucagauugaaaaagaauucucagaagucgaagggagaauucaggaccuugagaaauauguugaggacacuaaaauagaucucuggucauacaacgcggagcuucuuguugcccuggagaaccaacauacaauugaucuaacugacucagaaaugaacaaacuguuugaaaaaacaaagaagcaacugagggaaaaugcugaggauaugggcaaugguuguuucaaaauauaccacaaaugugacaaugccugcauaggaucaaucagaaauggaacuuaugaccacgauguauacagagaugaagcacuaaacaaccgguuucagaucaagggaguugagcugaagucaggguacaaagauugguuccuauggauuuccuuugccauaucauguuuuuugcuuuguguugcuuuguugggguucaucaugugggccugccaaaaaggcaacauuaggugcaacauuugcauuuga

SEQ ID NO: 37335 - RNA, 1701 nt, Artificial Sequence
  derived and/or modified CDS sequence (wt) from hemagglutinin__InfluenzaA__ADK87315
augaaggcaauacuaguaguucugcuauauacauuugcaaccgcaaaugcagacacauuauguauagguuaucaugcgaacaacucaacagacacuguagacacaguacuagaaaagaauguaacaguaacacacucuguuaaccuucuagaagacaagcauaacgggaagcuaugcaaacuaagagggguagccccauugcauuuggguaaauguaacauugcuggcuggauccugggaaauccagagugugaaucacucuccacagcaagcucaugguccuacauuguggaaacaucuaguucagacaauggaacguguuacccaggagauuucaucgauuaugaggagcuaagagagcaauugagcucagugucaucauuugaaagguuugagauauuccccaagacaaguccauggcccaaucaugacccgaacaaagguguaacggcagcauguccucaugcuggagcaaaaagcuucuacaaaaauuuaauauggcuaguuaaaaaaggaaauucauacccaaagcucagcaaauccuacauuaaugauaaagggaaagaaguccucgugcuauggggcauucaccauccaucuacuagugcugaccaacaaagucucuaucagaaugcagaugcauauguuuuuguggggacaucaagauacagcaagaaguucaagccggaaauagcaauaagacccaaagugagggaucaagaagggagaaugaacuauuacuggacacuaguagagccgggagacaaaauaacauucgaagcaacuggaaaucuagugguaccgagauaugcauucgcaauggaaagaaaugcuggaucugguauuaucauuucagauacaccaguccacgauugcaauacaacuugucagacacccaagggugcuauaaacaccagccucccauuucagaauauacauccgaucacaauuggaaaguguccaaaauauguaaaaagcacaaaauugagacuggccacaggauugaggaaugucccgucuauucaaucuagaggccuauuuggggccauugccgguuucauugaagggggguggacagggaugguagauggaugguacgguuaucaccaucaaaacgagcaggggucaggauaugcagccgaccugaagagcacacagaaugccauugacgagauuacuaacaaaguaaauucuguuauugaaaagaugaauacacaguucacagcaguagguaaagaguccaaccaccuggaaacaagaauagagaauuuaaauaaaaaaguugaugaugguuuccuggacauuuggacuuacaaugccgaacuguugguucuauuggaaaaugaaagaacuuuggacuaccacgauucaaaugugaagaacuuauaugaaaagguaagaagccaguuaaaaaacaaugccaaggaaauuggaaacggcugcuuugaauuuuaccacaaaugcgauagcacgugcauggaaagugucaaaaaugggacuuaugacuacccaaaauacucagaggaagcaaaauuaaacagagaagaaauagaugggguaaagcuggaaucaacaaggauuuaccagauuuuggcgaucuauucaacugucgccaguucauugguacugguagucucccugggggcaaucaguuucuggaugugcucuaaugggucucuacaguguagaauauguauuuga

SEQ ID NO: 37336 - RNA, 1701 nt, Artificial Sequence
  derived and/or modified CDS sequence (wt) from hemagglutinin__InfluenzaA__ADK87317
augaaggcaauacuaguaguucugcuauauacauuugcaaccgcaaaugcagacacauuauguauagguuaucaugcgaacaauucaacagacacuguagacacaguacuagaaaagaauguaacaguaacacacucuguuaaccuucuagaagacaagcauaacgggaagcuaugcaaacuaagagggguagccccauugcauuuggguaaauguaacauugcuggcuggauccugggaaauccagagugugaaucacucuccacagcaagcucaugguccuacauuguggaaacaucuaguucagacaauggaacguguuacccaggagauuucaucgauuaugaggagcuaagggagcaauugagcucagugucaucauuugaaagguuugagauauuccccaagacaaguucauggcccaaucaugacccgaacaaagguguaacggcagcauguccucaugcuggagcaaaaagcuucuacaaaaauuuaauauggcuaguuaaaaaaggaaauucauacccaaagcucagcaaauccuacauuaaugauaaagggaaagaaguccucgugcuauggggcauucaccauccaucuacuagugcugaccaacaaagucucuaucagaaugcagaugcauauguuuuuguggggacaucaagauacagcaagaaguucaagccggaaauagcaauaagacccaaagugagggaucaagaagggagaaugaacuauuacuggacacuaguagagccgggagacaaaauaacauucgaagcaacuggaaaucuagugguaccgagauaugcauucgcaauggaaagaaaugcuggaucugguauuaucauuucagauacaccaguccacgauugcaauacaacuugucagacacccaagggugcuauaaacaccagccucccauuucagaauauacauccgaucacaauuggaaaauguccaaaauauguaaaaagcacaaaauugagacuggccacaggauugaggaaugucccgucuauucaaucuagaggccuauuuggggccauugccgguuucauugaagggggguggacagggaugguagauggaugguacgguuaucaccaucaaaaugagcaggggucaggauaugcagccgaccugaagagcacacagaaugccauugacgagauuacuaacaaaguaaauucuguuauugaaaagaugaauacacaguucacagcaguagguaaagaguucaaccaccuggaaaaaagaauagagaauuuaaauaaaaaaguugaugaugguuuccuggacauuuggacuuacaaugccgaacuguugguucuauuggaaaaugaaagaacuuuggacuaccacgauucaaaugugaagaacuuauaugaaaagguaagaagccaguuaaaaaacaaugccaaggaaauuggaaacggcugcuuugaauuuuaccacaaaugcgauaacacgugcauggaaagugucaaaaaugggacuuaugacuacccaaaauacucagaggaagcaaaauuaaacagagaagaaauagaugggguaaagcuggaaucaacaaggauuuaccagauuuuggcgaucuauucaacugucgccaguucauugguacugguagucucccugggggcaaucaguuucuggaugugcucuaaugggucucuacaguguagaauauguauuuga

SEQ ID NO: 37337 - RNA, 1701 nt, Artificial Sequence
  derived and/or modified CDS sequence (wt) from hemagglutinin__InfluenzaA__ADK87319
augaaggcaauacuaguaguucugcuauauacauuugcaaccgcaaaugcagacacauuauguauagguuaucaugcgaacaauucaacagacacuguagacacaguacuagaaaagaauguaacaguaacacacucuguuaaccuucuagaagacaagcauaacgggaagcuaugcaaacuaagagggguagccccauugcauuuggguaaauguaacauugcuggcuggauccugggaaauccagagugugaaucacucuccacagcaagcucaugguccuacauuguggaaacaucuaguucagacaauggaacguguuacccaggagauuucaucgauuaugaggagcuaagagagcaauugagcucagugucaucauuugaaagguuugagauauuccccaagacaaguucauggcccaaucaugacccgaacaaagguguaacggcagcauguccucaugcuggagcaaaaagcuucuacaaaaauuuaauauggcuaguuaaaaaaggaaauucauacccaaagcucagcaaauccuacauuaaugauaaagggaaagaaguccucgugcuauggggcauucaccauccaucuacuagugcugaccaacaaagucucuaucagaaugcagaugcauauguuuuuguggggacaucaagauacagcaagaaguucaagccggaaauagcaauaagacccaaagugagggaucaagaagggagaaugaacuauuacuggacacuaguagagccgggagacaaaauaacauucgaagcaacuggaaaucuagugguaccgagauaugcauucgcaauggaaagaaaugcuggaucugguauuaucauuucagauacaccaguccacgauugcaauacaacuugucagacacccaagggugcuauaaacaccagccucccauuucagaauauacauccgaucacaauuggaaaauguccaaaauauguaaaaagcacagaauugagacuggccacaggauugaggaaugucccgucuauucaaucuagaggccuauuuggggccauugccgguuucauugaagggggguggacagggaugguagauggaugguacgguuaucaccaucaaaaugagcaggggucaggauaugcagccgaccugaagagcacacagaaugccauugacgagauuacuaacaaaguaaauucuguuauugaaaagaugaauacacaguucacagcaguagguaaagaguucaaccaccuggaaaaaagaauagagaauuuaaauaaaaaaguugaugaugguuuccuggacauuuggacuuacaaugccgaacuguugguucuauuggaaaaugaaagaacuuuggacuaccacgauucaaaugugaagaacuuauaugaaaagguaagaagccaguuaaaaaacaaugccaaggaaauuggaaacggcugcuuugaauuuuaccacaaaugcgauaacacgugcauggaaagugucaaaaaugggacuuaugacuacccaaaauacucagaggaagcaaaauuaaacagagaagaaauagaugggguaaagcuggaaucaacaaggauuuaccggauuuuggcgaucuauucaacugucgccaguucauugguacugguagucucccugggggcaaucaguuucuggaugugcucuaaugggucucuacaguguagaauauguauuuga

SEQ ID NO: 37338 - RNA, 1701 nt, Artificial Sequence
  derived and/or modified CDS sequence (wt) from hemagglutinin__InfluenzaA__ADK87321
augaagacuaucauugcuuugagcuacauucuaugucugguuuucgcucaaaaaauuccuggaaaugacaacagcacggcaacgcugugccuugggcaccaugcaguaccaaacggaacgauagugaaaacaaucacgaaugaccaaauugaaguuacuaaugcuacugagcugguucagaguuccucaacaggugaaauaugcgacaguccucaucagauccuugauggaaaaaacugcacacuaauagaugcucuauugggagacccucagugugauggcuuccaaaauaagaaaugggaccuuuuuguugaacgcagcaaagccuacagcaacuguuacccuuaugaugugccggauuaugccucccuuaggucacuaguugccucauccggcacacuggaguuuaacaaugaaagcuucaauuggacuggagucacucaaaacggaacaagcucugcuugcaugaggagaucuaaaaacaguuucuuuaguagauugaauugguugacccacuuaaacuucaaauacccagcauugaacgugacuaugccaaacaaugaacaauuugacaaauuguacauuugggggguucaccacccggguacggacaaagaccaaaucuuccuguaugcucaagcaucaggaagaaucacagucucuaccaaaagaagccaacaaacugcaaucccgaauaucggaucuagacccagaguaaggaauaucccuagcagaauaagcgucuauuggacaauaguaaaaccgggagacauacuuuugauuaacagcacagggaaucuaauugcuccuagggguuacuucaaaauacgaagugggaaaagcucaauaaugagaucagaugcauccauuggcaaaugcaauucuggaugcaucacuccaaauggaagcauucccaaugacaaaccauuccaaaauguaaacaggaucacauacggggccugucccagauauguuaagcaaaacacucugaaauuggcaacagggaugcgaaauguaccagagaaacaaacuagaggcauauuuggcgcaaucgcggguuucauagaaaaugguugggagggaaugguggaugguugguacgguuucaggcaucaaaauucugagggaagaggacaagcagcagaucucaaaagcacucaagcagcaaucgaucaaaucaaugggaagcugaauagauugaucgggaaaaccaacgagaaauuccaucagauugaaaaagaauucccagaagucgaagggagaauucaggaccuugagaaauauguugaggacacuaaaauagaucucuggucauacaacgcggagccucuuguugcccuggagaaccaacauacaauugaucuaacugacucagaaaugaacaaacuguuugaaaaaacaaagaagcaacugagggaaaaugcugaggauaugggcaaugguuguuucaaaauauaccacaaaugugacaaugccugcauaggaucaaucagaaauggaacuuaugaccacgauguauacagagaugaagcacuaaacaaccgguuucagaucaagggaguugagcugaagucaggguacaaagauugguuccuauggauuuccuuugccauaucauguuuuuugcuuuguguugcuuuguugggguucaucaugugggccugccaaaaaggcaacauuaggugcaacauuugcauuuga

SEQ ID NO: 37339 - RNA, 1701 nt, Artificial Sequence
  derived and/or modified CDS sequence (wt) from hemagglutinin__InfluenzaA__ADK87323
augaagacuaucauugcuuugagcuacauucuaugucugguuuucgcucaaaaacuuccuggaaaugacaacagcacggcaacgcugugccucgggcaccaugcaguaccaaacggaacgauagugaaaacaaucacgaaugaccaaauugaaguuacuaaugcuacugagcugguucagaguuccucaacaggugaaauaugcgacaguccucaucagauccuugauggaaaaaacugcacacuaauagaugcucuauugggagacccucagugugauggcuuccaaaauaagaaaugggaccuuuuuguugaacgcagcaaagccuacagcaacuguuacccuuaugaugugccagauuaugccucccuuaggucacuaguugccucauccggcacacuggaguuuaacaaugaaagcuucaauuggacuggagucacucaaaacggaacaagcucugcuugcauaaggagaucuaaaaacaguuucuuuaguagauugaauugguugacccacuuaaacuucaaauacccagcauugaacgugacuaugccaaacaaugaacaauuugacaaauuguacauuugggggguucaccacccggguacggacaaagaccaaaucuuccuguaugcucaagcaucaggaagaaucacagucucuaccaaaagaagccaacaaacugcaaucccgaauaucggaucuagacccagaguagggaauaucccuagcagaauaagcaucuauuggacaauaguaaaaccgggagacauacuuuugauuaacagcacagggaaucuaauugcuccuagggguuacuucaaaauacgaagugggaaaagcucaauaaugagaucggaugcacccauuggcaaaugcaauucugaaugcaucacuccaaauggaagcauucccaaugacaaaccauuccaaaauguaaacaggaucacauacggggccugucccagauauguuaagcaaaacacucugaaauuggcaacagggaugcgaaauguaccagagaaacaaacuagaggcauauuuggcgcaaucgcggguuucauagaaaaugguugggagggaaugguggaugguugguacgguuucagacaucaaaauucugagggaagaggacaagcagcagaucucaaaagcacucaagcagcaaucgaucaaaucaaugggaagcugaauagauugaucgggaaaaccaacgagaaauuccaucagauugaaaaagaauucucagaagucgaagggagaauucaggaccuugagaaauauguugaggacacuaaaauagaucucuggucauacaacgcggagcuucuuguugcccuggagaaccaacauacaauugaucuaacugacucagaaaugaacaaacuguuugaaaaaacaaagaagcaacugagggaaaaugcugaggauaugggcaaugguuguuucaaaauauaccacaaaugugacaaugccugcauaggaucaaucagaaauggaacuuaugaccacgauguauacagagaugaagcacuaaacaaccgguuucagaucaagggaguugagcugaaaucaggguacaaagauuggauccuauggauuuccuuugccauaucauguuuuuugcuuuguguugcuuuguugggguucaucaugugggccugccaaaaaggcaacauuaggugcaacauuugcauuuga

SEQ ID NO: 37340 - RNA, 1701 nt, Artificial Sequence
  derived and/or modified CDS sequence (wt) from hemagglutinin__InfluenzaA__ADK87325
augaagacuaucauugcuuugagcuacauucuaugucugguuuucgcucaaaaacuuccuggaaaugacaacagcacggcaacgcugugccuugggcaccaugcaguaccaaacggaacgauagugaaaacaaucacgaaugaccaaauugaaguuacuaaugcuacugagcugguucagaguuccucaacaggugaaauaugcgacaguccucaucagauccuugauggaaaaaacugcacacuaauagaugcucuauugggagacccucagugugauggcuuccaaaauaagaaaugggaccuuuuuguugaacgcagcaaagccuacagcaacuguuacccuuaugaugugccagauuaugccucccuuaggucacuaguugccucauccggcacacuggaguuuaacaaugaaagcuucaauuggacuggagucacucaaaacggaacaagcucugcuugcauaaggagaucuaaaaacaguuucuuuaguagauugaauugguugacccacuuaaacuucaaauacccagcauugaacgugacuaugccaaacaaugaacaauuugacaaauuguacauuugggggguucaccacccggguacggacaaagaccaaaucuuccuguaugcucaagcaucaggaagaaucacagucucuaccaaaagaagccaacaaacugcaaucccgaauaucggaucuagacccagaguaaggaauaucccuagcagaauaagcaucuauuggacaauaguaaaaccgggagacauacuuuugauuaacagcacagggaaucuaauugcuccuagggguuacuucaaaauacgaagugggaaaagcucaauaaugagaucagaugcacccauuggcaaaugcaauucugaaugcaucacuccaaauggaagcauucccaaugacaaaccauuccaaaauguaaacaggaucacauacggggccugucccagacauguuaagcaaaacacucugaaauuggcaacagggaugcgaaauguaccagagaaacaaacuagaggcauauuuggcgcaaucgcggguuucauagaaaaugguugggagggaaugguggaugguugguacgguuucaggcaucaaaauucugagggaagaggacaagcagcagaucucaaaagcacucaagcagcaaucgaucaaaucaaugggaagcugaauagauugaucgggaaaaccaacgagaaauuccaucagauugaaaaagaauucucagaagucgaagggagaauucaggaccuugagaaauauguugaggacacuaaaauagaucucuggucauacaacgcggagcuucuuguugcccuggagaaccaacauacaauugaucuaacugacucagaaaugaacaaacuguuugaaaaaacaaagaagcaacugagggaaaaugcugaggauaugggcaaugguuguuucaaaauauaccacaaaugugacaaugccugcauaggaucaaucagaaauggaacuuaugaccacgauguauacagagaugaagcacuaaacaaccgguuucagaucaagggaguugagcugaagucaggguacaaagauuggauccuauggauuuccuuugccauaucauguuuuuugcuuuguguugcuuuguugggguucaucaugugggccugccaaaaaggcaacauuaggugcaacauuugcauuuga

SEQ ID NO: 37341 - RNA, 1701 nt, Artificial Sequence
  derived and/or modified CDS sequence (wt) from hemagglutinin__InfluenzaA__ADK87326
augaagacuaucauugcuuugagcuacauucuaugccugguuuucgcucaaaaacuuccuggaaaugacaacagcacggcaacgcugugccuugggcaccaugcaguaccaaacggaacgauagugaaaacaaucacgaaugaccaaauugaaguuacuaaugcuacugagcugguucagaguuccucaacaggugaaauaugcgacaguccucaucagauccuugauggaaaaaacugcacacuaauagaugcucuauugggagacccucagugugauggcuuccaaaauaagaaaugggaccuuuuuguugaacgcagcaaagccuacagcaacuguuacccuuaugaugugccggauuaugccucccuuaggucacuaguugccucauccggcacacuggaguuuaacaaugaaagcuucaauuggacuggagucacucaaaacggaacaagcucugcuugcauaaggagaucuaaaaacaguuucuuuaguagauugaauugguugacccacuuaaacuucaaauacccagcauugaacgugacuaugccaaacaaugaacaauuugacaaauuguacauuugggggguucaccacccggguacggacaaagaccaaaucuuccuguaugcucaagcaucaggaagaaucacagucucuaccaaaagaagccaacaaacugcaaucccgaauaucggaucuagacccagaguaaggaauaucccuagcaggauaagcaucuauuggacaauaguaaaaccgggagacauacuuuugauuaacagcacagggaaucuaauugcuccuagggguuacuucaaaauacgaagugggaaaagcucaauaaugagaucagaugcacccauuggcaaaugcaauucugaaugcaucacuccaaauggaagcauucccaaugacaaaccauuccaaaauguaaacaggaucacauacggggccugucccagauauguuaagcaaaacacucugaaauuggcaacagggaugcgaaauguaccagagaaacaaacuagaggcauauuuggcgcaaucgcgggguucauagaaaaugguugggagggaaugguggaugguugguacgguuucaggcaucaaaauucugagggaagaggacaagcagcagaucucaaaagcacucaagcagcaaucgaucaaaucaaugggaagcugaauagauugaucgggaaaaccaacgagaaauuccaucagauugaaaaggaauucucagaagucgaagggagaauucaggaccuugagaaauauguugaggacacuaaaauagaucucuggucauacaacgcggagcuucuuguugcccuggagaaccaacauacaauugaucuaacugacucagaaaugaacaaacuguuugaaaaaacaaagaagcaacugagggaaaaugcugaggauaugggcaaugguuguuucaaaauauaccacaaaugugacaaugccugcauaggaucaaucagaaauggaacuuaugaccacgauguauacagagaugaagcacuaaacaaccgguuucagaucaagggaguugagcugaagucagggugcaaagauuggauccuauggauuuccuuugccauaucauguuuuuugcuuuguguugcuuuguugggguucaccaugugggccugccaaaaaggcaacauuaggugcaacauuugcauuuga

SEQ ID NO: 37342 - RNA, 1701 nt, Artificial Sequence
  derived and/or modified CDS sequence (wt) from hemagglutinin__InfluenzaA__ADK87328
augaaggcaauacuaguaguucugcuauauacauuugcaaccgcaaaugcagacacauuauguauagguuaucaugcgaacaauucaacagacacuguagacacaguacuagaaaagaauguaacaguaacacacuccguuaaccuucuagaagacaagcauaacgggaaacuaugcaaacuaagagggguagccccauugcauuuggguaaauguaacauugcuggcuggauccugggaaauccagagugugaaucacucuccacagcaagcucaugguccuacauuguggaaacaucuaguucagacaauggaacguguuacccaggagauuucaucgauuaugaggagcuaagagagcaauugagcucagugucaucauuugaaagguuugagauauuccccaagacaaguucauggcccaaucaugacccgaacaaagguguaacggcagcauguccucaugcuggagcaaaaagcuucuacaaaaauuuaauauggcuaguuaaaaaaggaaauucauacccaaagcucagcaaauccuacauuaaugauaaagggaaagaaguccucgugcuauggggcauucaccauccaucuacuagugcugaccaacaaagucucuaucagaaugcagaugcauauguuuuuguggggacaucaagauacagcaagaaguucaagccggaaauagcaauaagacccaaagugagggaucaagaagggagaaugaacuauuacuggacacuaguagagccgggagacaaaauaacauucgaagcaacuggaaaucuagugguaccgagauaugcauucgcaauggaaagaaaugcuggaucugguauuaucauuucagauacaccaguccacgauugcaauacaacuugucagacacccaagagugcuauaaacaccagccucccauuucagaauauacauccgaucacaauuggaaaauguccaaaauauguaaaaagcacaaaauugagacuggccacaggauugaggaaugucccgucuauucaaucuagaggccuauuuggggccauugccgguuucauugaagggggguggacagggaugguagauggaugguacgguuaucaccaucaaaaugagcaggggucaggauaugcagccgaccugaagagcacacagaaugccauugacgagauuacuaacaaaguaaauucuguuauugaaaagaugaauacacaguucacagcaguagguaaagaguucaaccaccuggaaaaaagaauagagaauuuaaauaaaaaaguugaugaugguuuccuggacauuuggacuuacaaugccgaacuguugguucuauuggaaaaugaaagaacuuuggacuaccacgauucaaaugugaagaacuuauaugaaaagguaagaagccaguuaaagaacaaugccaaggaaauuggaaacggcugcuuugaauuuuaccacaaaugcgauaacacgugcauggaaagugucaaaaaugggacuuaugacuacccaaaauacucagaggaagcaaaauuaaacagagaagaaauagaugggguaaagcuggaaucaacaaggauuuaccagauuuuggcgaucuauucaacugucgccaguucauugguacugguagucucccugggggcaaucaguuucuggaugugcucuaaugggucucuacaguguagaauauguauuuga

SEQ ID NO: 37343 - RNA, 1701 nt, Artificial Sequence
  derived and/or modified CDS sequence (wt) from hemagglutinin__InfluenzaA__ADK87334
augaagacuaucauugcuuugagcuacauucuaugucugguuuucgcucaaaaacuuccuggaaaugacaacagcacggcaacgcugugccuugggcaccaugcaguaccaaacggaacgauagugaaaacaaucacuagugaccaaauugaaguuacuaaugcuacugagcugguucagaguuccucaacaggugaaauaugcgacaguccucaucagauccuugauggaaaaaacugcacacuaauagaugcucuauugggagacccucagugugauggcuuccaaaauaagaaaugggaccuuuuuguugaacgcagcaaagccuacagcaacuguuacccuuaugaugugccggauuaugccucccuuaggucacuaguugccucauccggcacacuggaguuuaacaaugaaagcuucaauuggacuggagucacucaaaacggaacaagcucugcuugcauaaggagaucuaaaaacaguuucuuuaguaaauugaauugguugacccacuuaaacuucaaauacccagcauugaacgugacuaugccaaacaaugaacaauuugacaaauuguacauuugggggguucgccacccggguacggacaaagaccaaaucuuccuguaugcucaagcaucaggaagaaucacagucucuaccaaaagaagccaacaaacuguaaucccgaauaucggaucuagacccagaguaaggaauaucccuagcagaauaagcaccuauuggacaauaguaaaaccgggagacauacuuuuaauuaacagcacagggaaucuaauugcuccuagggguuacuucaaaauacgaagugggaaaagcucaauaaugagaucagauacacccauuggcaaaugcaauucugaaugcaucacuccgaauggaagcauucccaaugacaaaccauuccaaaauguaaacaggaucacauacggggccugucccagauauguuaagcaaaacacucugaaauuggcaacagggaugcgaaauguaccagagaaacaaacuagaggcauauuuggcgcaaucgcggguuucauagaaaaugguugggagggaaugguggaugguugguacgguuucaggcaucaaaauucugagggaagaggacaagcagcagaucucaaaagcacucaagcagcaaucgaucaaaucaaugggaagcugaauagauugaucgggaaaaccaacgagaaauuccaucagauugaaaaagaauucucagaagucgaagggagaauucaggaccuugagaaauacguugaggacacuaaaauagaucucuggucauacaacgcggagcuucuuguugcccuggagaaccaacauacaauugaucuaacugacucagaaaugaacaaacuguuugaaaaaacaaaaaagcaacugagggaaaaugcugaggauaugggcaaugguuguuucaaaauauaccacaaaugugacaaugccugcauaggaucaaucagaaauggaacuuaugaccacgauguauacagagaugaagcauuaaacaaccgguuucagaucaagggaguugagcugaagucaggguacaaagauuggaucuuauggauuuccuuugccauaucauguuuuuugcuuuguguugcuuuguugggguucaucaugugggccugccaaaaaggcaacauuaggugcaacauuugcauuuga

SEQ ID NO: 37344 - RNA, 1701 nt, Artificial Sequence
  derived and/or modified CDS sequence (wt) from hemagglutinin__InfluenzaA__ADK87336
augaagacuaucauugcuuugagcuacauucuaugucugguuuucgcucaaaaacuuccuggaaaugacaacagcacggcaacgcugugccuugggcaccaugcaguaccaaacggaacgauagugaaaacaaucacuaaugaccaaauugaaguuacuaaugcuacugagcugguucagaguuccucaacaggugaaauaugcgacaguccucaucagauccuugauggaaaaaacugcacacuaauagaugcucuauugggagacccucagugugauggcuuccaaaauaagaaaugggaccuuuuuguugaacgcagcaaagccuacagcaacuguuacccuuaugaugugccggauuacgccucccuuaggucacuaguugccucauccggcacacuggaguuuaacaaugaaagcuucaauuggacuggagucacucaaaacggaacaagcucugcuugcauaaggagaucuaaaaacaguuucuuuaguaaauugaauugguugacccacuuaaacuucaaauacccagcauugaacgugacuaugccaaacaaugaacaauuugacaaauuguacauuugggggguucaccacccggguacggacagagaccaaaucuuccuguaugcucaagcaucaggaagaaucacagucucuaccaaaagaagccaacaaacuguaaucccgaauaucggaucuagacccagaguaaggaauaucccuagcagaauaagcaucuauuggacaauaguaaaaccgggagacauacuuuuaauuaacagcacagggaaucuaauugcuccuagggguuacuucaaaauacgaagugggaaaagcucaauaaugagaucagauacacccauuggcaaaagcaauucugaaugcaucacuccaaauggaagcauucccaaugacaaaccauuccaaaauguaaacaggaucacauacggggccugucccagauauguuaagcaaaacacucugaaauuggcaacagggaugcgaaauguaccagagaaacaaacuagaggcauauuuggcgcaaucgcggguuucauagaaaaugguugggagggaaugguggaugguugguacgguuucaggcaucaaaauucugagggaagaggacaagcagcagaucucaaaagcacucaagcagcaaucgaucaaaucaaugggaagcugaauagauugaucgggaaaaccaacgagaaauuccaucagauugaaaaagaauucucagaagucgaagggagaauucaggaccuugagaaauacguugaggacacuaaaauagaucucuggucauacaacgcggagcuucuuguugcccuggagaaccaacauacaauugaucuaacugacucagaaaugaacaaacuguuugaaaaaacaaaaaagcaacugagggaagaugcugaggauaugggcaaugguuguuucaaaauauaccacaaaugugacaaugccugcauaggaucaaucagaaauggaacuuaugaccacgauguauacagagaugaagcauuaaacaaccgguuucagaucaagggaguugagcugaagucaggguacaaagauuggaucuuauggauuuccuuugccauaucauguuuuuugcuuuguguugcuuuguugggguucaucaugugggccugccaaaaaggcaacauuaggugcaacauuugcauuuga

SEQ ID NO: 37345 - RNA, 1701 nt, Artificial Sequence
  derived and/or modified CDS sequence (wt) from hemagglutinin__InfluenzaA__ADK87338
augaaggcaauacuaguaguucugcuauauacauuugcaaccgcaaaugcagacacauuauguauagguuaucaugcgaacaauucaacagacacuguagacacaguacuagaaaagaauguaacaguaacacacucuguuaaccuucuagaagacaagcauaacgggaaacuaugcaaacuaagagggguagccccauugcauuuggguaaauguaacauugcuggcuggauccugggaaauccagagugugaaucacucuccacagcaagcucaugguccuacauuguggaaacaucuaguucagacaauggaacguguuacccaggagauuucaucgauuaugaggagcuaagagagcaauugagcucagugucaucauuugaaagguuugagauauuccccaagacaaguucauggcccaaucaugacucgaacaaagguguaacggcagcauguccucaugcuggagcaaaaagcuucuacaaaaauuuaauauggcuaguuaaaaaaggaaauucauacccaaagcucagcaaauccuacauuaaugauaaagggaaagagguccucgugcuauggggcauucaccauccaucuacuagugcugaccaacaaagucucuaucagaaugcagaugcauauguuuuuguggggacaucaagauacagcaagaaguucaagccggaaauagcaauaagacccaaagugagggaucaagaagggagaaugaacuauuacuggacacuaguagagccgggagacaaaauaacauucgaagcaacuggaaaucuagugguaccgagauaugcauucgcaauggaaagaaaugcuggaucugguauuaucauuucagauacaccaguccacgauugcaauacaacuugucagacacccaagggugcuauaaacaccagccucccauuucagaauauacauccgaucacaauuggaaaauguccaaaauauguaaaaagcacaaaauugagacuggccacaggauugaggaaugucccgucuauucaaucuagaggccuauuuggggccauugccgguuucauugaagggggguggacagggaugguagauggaugguacgguuaucaccaucaaaaugagcaggggucaggauaugcagccgaccugaagagcacacagaaugccauugacgagauuacuaacaaaguaaauucuguuauugaaaagaugaauacacaguucacagcaguagguaaagaguucaaccaccuggaaaaaagaauagagaaucuaaauaaaaaaguugaugaugguuuccuggacauuuggacuuacaaugccgaacuguugguucuauuggaaaaugaaagaacuuuggacuaccacgauucaaaugugaagaacuuauaugaaaagguaagaagccaguuaaaaaacaaugccaaggaaauuggaaacggcugcuuugaauuuuaccacaaaugcgauaacacgugcauggaaagugucaaaaaugggacuuaugacuacccaaaauacucagaggaagcaaaauuaaacagagaagaaauagaugggguaaagcuggaaucaacaaggauuuaccagauuuuggcgaucuacucaacugucgccaguucauugguacugguagucucccugggggcaaucaguuucuggauguguucuaaugggucucuacaguguagaauauguauuuga

SEQ ID NO: 37346 - RNA, 1701 nt, Artificial Sequence
  derived and/or modified CDS sequence (wt) from hemagglutinin__InfluenzaA__ADK90193
augaaggcaauacuaguaguucugcuauauacauuugcaaccgcaaaugcagacacauuauguauagguuaucaugcgaacaauucaacagacacuguagacacaguacuagaaaagaauguaacaguaacacacucuguuaaccuucuagaagacaagcauaacgggaaacuaugcaaacuaagagggguagccccauugcauuuggguaaauguaacauugcuggcuggauccugggaaauccagagugugaaucacucuccacagcaagcucaugguccuacauuguggaaacaucuaguucagacaauggaacguguuacccaggagauuucaucgauuaugaggagcuaagagagcaauugagcucagugucaucauuugaaagguuugagauauuccccaagacaaguucauggcccaaucaugacucgaacaaagguguaacggcagcauguccucaugcuggagcaaaaagcuucuacaaaaauuuaauauggcuaguuaaaaaaggaaauucauacccaaagcucagcaaauccuacauuaaugauaaagggaaaguaguccucgugcuauggggcauucaccauccaucuacuagugcugaccaacaaagucucuaucagaaugcagaugcauauguuuuuguggggacaucaagauacagcaagaaguucaagccggaaauagcaauaagacccaaagugagggaucaagaagggagaaugaacuauuacuggacacuaguagagccgggagacaaaauaacauucgaagcaacuggaaaucuagugguaccgagauaugcauucgcaauggaaagaaaugcuggaucugguauuaucauuucagauacaccaguccacgauugcaauacaacuugucagacacccaagggugcuauaaacaccagccucccauuucagaauauacauccgaucacaauuggaaaauguccaaaauauguaaaaagcacaaaauugagacuggccacaggauugaggaaugucccgucuauucaaucuagaggccuauuuggggccauugccgguuucauugaagggggguggacagggaugguagauggaugguacgguuaucaccaucaaaaugagcaggggucaggauaugcagccgaccugaagagcacacagaaugccauugacgagauuacuaacaaaguaaauucuguuauugaaaagaugaauacacaguucacagcaguagguaaagaguucaaccaccuggaaaaaagaauagagaauuuaaauaaaaaaguugaugaugguuuccuggacauuuggacuuacaaugccgaacuguugguucuauuggaaaaugaaagaacuuuggacuaccacgauucaaaugugaagaacuuauaugaaaagguaagaagccaguuaaaaaacaaugccaaggaaauuggaaacggcugcuuugaauuuuaccacaaaugcgauaacacgugcauggaaagugucaaaaaugggacuuaugacuacccaaaauacucagaggaagcaaaauuaaacagagaagaaauagaugggguaaagcuggaaucaacaaggauuuaccagauuuuggcgaucuauucaacugucgccaguucauugguacugguagucucccugggggcaaucaguuucuggaugugcucuaaugggucucuacaguguagaauauguauuuaa

SEQ ID NO: 37347 - RNA, 1701 nt, Artificial Sequence
  derived and/or modified CDS sequence (wt) from hemagglutinin__InfluenzaA__ADK90194
augaaggcaauacuaguaguucugcuauauacauuugcaaccgcaaaugcagacacauuauguauagguuaucaugcgaacaauucaacagacacuguagacacaguacuagaaaagaauguaacaguaacacacucuguuaaccuucuagaagacaagcauaacgggaaacuaugcaaacuaagagggguagccccauugcauuuggguaaauguaacauugcuggcuggauccugggaaauccagagugugaaucacucuccacagcaagcucaugguccuacauuguggaaacaucuaguucagacaauggaacguguuacccaggagauuucaucgauuaugaggagcuaagagagcaauugagcucagugucaucauuugaaagguuugagauauuccccaagacaaguucauggcccaaucaugacucgaacaaagguguaacggcagcauguccucaugcuggagcaaaaagcuucuacaaaaauuuaauauggcuaguuaaaaaaggaaauucauacccaaagcucagcaaauccuacauuaaugauaaagggaaagaaguccucgugcuauggggcauucaccauccaucuacuagugcugaccaacaaagucucuaucagaaugcagaugcauauguuuuuguggggacaucaaaauacagcaagaaguucaagccggaaauagcaauaagacccaaagugagggaucaagaagggagaaugaacuauuacuggacacuaguagagccgggagacaaaauaacauucgaagcaacuggaaaucuagugguaccgagauaugcauucgcaauggaaagaaaugcuggaucugguauuaucauuucagauacaccaguccacgauugcaauacaacuugucagacacccaagggugcuauaaacaccagccucccauuucagaauauacauccgaucacaauuggaaaauguccaaaauauguaaaaagcacaaaauugagacuggccacaggauugaggaaugucccgucuauucaaucuagaggccuauuuggggccauugccgguuucauugaagggggguggacagggaugguagauggaugguacgguuaucaccaucaaaaugagcaggggucaggauaugcagccgaccugaagagcacacagaaugccauugacgagauuacuaacaaaguaaauucuguuauugaaaagaugaauacacaguucacagcaguagguaaagaguucaaccaccuggaaaaaagaauagagaauuuaaauaaaaaaauugaugaugguuuccuggacauuuggacuuacaaugccgaacuguugguucuauuggaaaaugaaagaacuuuggacuaccacgauucaaaugugaagaacuuauaugaaaagguaagaagccaguuaaaaaacaaugccaaggaaauuggaaacggcugcuuugaauuuuaccacaaaugcgauaacacgugcauggaaagugucaaaaaugggacuuaugacuacccaaaauacucagaggaagcaaaauuaaacagagaagaaauagaugggguaaagcuggaaucaacaaggauuuaccagauuuuggcgaucuauucaacugucgccaguucauugguacugguagucucccugggggcaaucaguuucuggaugugcucuaaugggucucuacaguguagaauauguauuuaa

SEQ ID NO: 37348 - RNA, 1701 nt, Artificial Sequence
  derived and/or modified CDS sequence (wt) from hemagglutinin__InfluenzaA__ADK90195
augaaggcaauacuaguaguucugcuauauacauuugcaaccgcaaaugcagacacauuauguauagguuaucaugcgaacaauucaacagacacuguagacacaguacuagaaaagaauguaacaguaacacacucuguuaaccuucuagaagacaagcauaacgggaaacuaugcaaacuaagagggguagccccauugcauuuggguaaauguaacauugcuggcuggauccugggaaauccagagugugaaucacucuccacagcaagcucaugguccuacauuguggaaacaucuaguucagacaauggaacguguuacccaggagauuucaucgauuaugaggagcuaagagagcaauugagcucagugucaucauuugaaagguuugagauauuccccaagacaaguucauggcccaaucaugacucgaacaaagguguaacggcagcauguccucaugcuggagcaaaaagcuucuacaaaaauuuaauauggcuaguuaaaaaaggaaauucauacccaaagcucagcaaauccuacauuaaugauaaagggaaagaaguccucgugcuauggggcauucaccauccaucuacuagugcugaccaacaaagucucuaucagaaugcagaugcauauguuuuuguggggacaucaagauacagcaagaaguucaagccggaaauagcaauaagacccaaagugagggaucaagaagggagaaugaacuauuacuggacacuaguagagccgggagacaaaauaacauucgaagcaacuggaaaucuagugguaccgagauaugcauucgcaauggaaagaaaugcuggaucugguauugucauuucagauacaccaguccacgauugcaauacaacuugucagacacccaagggugcuauaaacaccagccucccauuucagaauauacauccgaucacaauuggaaaauguccaaaauauguaaaaagcacaaaauugagacuggccacaggauugaggaaugucccgucuauucaaucuagaggccuauuuggggccauugccgguuucauugaagggggguggacagggaugguagauggaugguacgguuaucaccaucaaaaugagcaggggucaggauaugcagccgaccugaagagcacacagaaugccauugacgagauuacuaacaaaguaaauucuguuauugaaaagaugaauacacaguucacagcaguagguaaagaguucaaccaccuggaaaaaagaauagagaauuuaaauaaaaaaauugaugaugguuuccuggacauuuggacuuacaaugccgaacuguugguucuauuggaaaaugaaagaacuuuggacuaccacgauucaaaugugaagaacuuauaugaaaagguaagaagccaguuaaaaaacaaugccaaggaaauuggaaacggcugcuuugaauuuuaccacaaaugcgauaacacgugcauggaaagugucaaaaaugggacuuaugacuacccaaaauacucagaggaagcaaaauuaaacagagaagaaauagaugggguaaagcuggaaucaacaaggauuuaccagauuuuggcgaucuauucaacugucgccaguucauugguacugguagucucccugggggcaaucaguuucuggaugugcucuaaugggucucuacaguguagaauauguauuuaa

SEQ ID NO: 37349 - RNA, 1701 nt, Artificial Sequence
  derived and/or modified CDS sequence (wt) from hemagglutinin__InfluenzaA__ADK90196
augaaggcaauacuaguaguucugcuauauacauuugcaaccgcaaaugcagacacauuauguauagguuaucaugcgaacaauucaacagacacuguagacacaguacuagaaaagaauguaacaguaacacacucuguuaaccuucuagaagacaagcauaacgggaaacuaugcaaacuaagagggguagccccauugcauuuggguaaauguaacauugcuggcuggauccugggaaauccagagugugaaucacucuccacagcaagcucaugguccuacauuguggaaacaucuaguucagacaauggaacguguuacccaggagauuucaucgauuaugaggagcuaagagagcaauugagcucagugucaucauuugaaagguuugagauauuccccaagacaaguucauggcccaaucaugacucgaacaaagguguaacggcagcauguccucaugcuggagcaaaaagcuucuacaaaaauuuaauauggcuaguuaaaaaaggaaauucauacccaaagcucagcaaauccuacauuaaugauaaagggaaagaaguccucgugcuauggggcauucaccauccaucuacuagugcugaccaacaaagucucuaucagaaugcagaugcauauguuuuuguggggucaucaagauacagcaagaaguucaagccggaaauagcaauaagacccaaagugagggaucaagaagggagaaugaacuauuacuggacacuaguagagccgggagacaaaauaacauucgaagcaacuggaaaucuagugguaccgagauaugcauucgcaauggaaagaaaugcuggaucugguauuaucauuucagauacaccaguccacgauugcaauacaacuugucagacacccaagggugcuauaaacaccagccucccauuucagaauauacauccgaucacaauuggaaaauguccaaaauauguaaaaagcacaaaauugagacuggccacaggauugaggaaugucccgucuauucaaucuagaggccuauuuggggccauugccgguuucauugaagggggguggacagggaugguagauggaugguacgguuaucaccaucaaaaugagcaggggucaggauaugcagccgaccugaagagcacacagaaugccauugacgagauuacuaacaaaguaaauucuguuauugaaaagaugaauacacaguucacagcgguaggcaaggaguucaaccaccuggaaaaaagaauagagaauuuaaauaaaaaaguugaugaugguuuccuggacauuuggacuuacaaugccgaacuguugguucuauuggaaaaugaaagaacuuuggacuaccacgauucaaaugugaagaacuuauaugaaaagguaagaagccaguuaaaaaacaaugccaaggaaauuggaaacggcugcuuugaauuuuaccacaaaugcgauaacacgugcauggaaagugucaaaaaugggacuuaugacuacccaaaauacucagaggaagcaaaauuaaacagagaagaaauagaugggguaaagcuggaaucaacaaggauuuaccagauuuuggcgaucuauucaacugucgccaguucauugguacugguagucucccugggggcaaucaguuucuggaugugcucuaaugggucucuacaguguagaauauguauuuaa

SEQ ID NO: 37350 - RNA, 1701 nt, Artificial Sequence
  derived and/or modified CDS sequence (wt) from hemagglutinin__InfluenzaA__ADK90197
augagggcaauacuaggaguucugcuauauacauuugcaaccgcaaaugcagacacauuauguauagguuaucaugcgaacaauucaacagacacuguagacacaguacuagaaaagaauguaacaguaacacacucuguuaaccuucuagaagacaagcauaacgggaaacuaugcaaacuaagagggguagccccauugcauuuggguaaauguaacauugcuggcuggauccugggaaauccagagugugaaucacucuccacagcaagcucaugguccuacauuguggaaacaucuaguucagacaauggaacguguuacccaggagauuucaucgauuaugaggagcuaagagagcaauugagcucagugucaucauuugaaagguuugagauauuccccaagacaaguucauggcccaaucaugacucgaacaaagguguaacggcagcauguccucaugcuggagcaaaaagcuucuacaaaaauuuaauauggcuaguuaaaaaaggaaauucauacccaaagcucagcaaauccuacauuaaugauaaagggaaagaaguccucgugcuauggggcauucaccauccaucuacuagugcugaccaacaaagucucuaucagaaugcagaugcauauguuuuuguggggacaucaagauacagcaagaaguucaagccggaaauagcaauaagacccaaagugagggaucaagaagggagaaugaacuauuacuggacacuaguagagccgggagacaaaauaacauucgaagcaacuggaaaucuagugguaccgagauaugcauucgcaauggaaagaaaugcuggaucugguauuaucauuucagauacaccaguccacgauugcaauacaacuugucagacacccaagggugcuauaaacaccagccucccauuucagaauauacauccgaucacaauuggaaaauguccaaaauauguaaaaagcacaaaauugagacuggccacaggauugaggaaugucccgucuauucaaucuagaggccuauuuggggccauugccgguuucauugaagggggguggacagggaugguagauggaugguacgguuaucaccaucaaaaugagcaggggucaggauaugcagccgaccugaagagcacacagaaugccauugacgagauuacuaacaaaguaaauucuguuauugaaaagaugaauacacaguucacagcaguagguaaagaguucaaccaccuggaaaaaagaauagagaauuuaaauaaaaaaguugaugaugguuuccuggacauuuggacuuacaaugccgaacuguugguucuauuggaaaaugaaagaacuuuggacuaccacgauucaaaugugaagaacuuauaugaaaagguaagaagccaguuaaaaaacaaugccaaggaaauuggaaacggcugcuuugaauuuuaccacaaaugcgauaacacgugcauggaaagugucaaaaaugggacuuaugacuacccaaaauacucagaggaagcaaaauuaaacagagaagaaauagaugggguaaagcuggaaucaacaaggauuuaccagauuuuggcgaucuauucaacugucgccaguucauugguacugguagucucccugggggcaaucaguuucuggaugugcucuaaugggucucuacaguguagaauauguauuuaa

SEQ ID NO: 37351 - RNA, 1701 nt, Artificial Sequence
  derived and/or modified CDS sequence (wt) from hemagglutinin__InfluenzaA__ADK90198
augaaggcaauacuaggaguucugcuauauacauuugcaaccgcaaaugcagacacauuauguauagguuaucaugcgaacaauucaacagacacuguagacacaguacuagaaaagaauguaacaguaacacacucuguuaaccuucuagaagacaagcauaacgggaaacuaugcaaacuaagagggguagccccauugcauuuggguaaauguaacauugcuggcuggauccugggaaauccagagugugaaucacucuccacagcaagcucaugguccuacauuguggaaacaucuaguucagacaauggaacguguuacccaggagauuucaucgauuaugaggagcuaagagagcaauugagcucagugucaucauuugaaagguuugagauauuccccaagacaaguucauggcccaaucaugacucgaacaaagguguaacggcagcauguccucaugcuggagcaaaaagcuucuacaaaaauuuaauauggcuaguuaaaaaaggaaauucauacccaaagcucagcaaauccuacauuaaugauaaagggaaagaaguccucgugcuauggggcauucaccauccaucuacuagugcugaccaacaaagucucuaucagaaugcagaugcauauguuuuuguggggacaucaagauacagcaagaaguucaagccggaaauagcaauaagacccaaagugagggaucaagaagggagaaugaacuauuacuggacacuaguagagccgggagacaaaauaacauucgaagcaacuggaaaucuagugguaccgagauaugcauucgcaauggaaagaaaugcuggaucugguauuaucauuucagauacaccaguccacgauugcaauacaacuugucagacacccaagggugcuauaaacaccagccucccauuucagaauauacauccgaucacaauuggaaaauguccaaaauauguaaaaagcacaaaauugagacuggccacaggauugaggaaugucccgucuauucaaucuagaggccuauuuggggccauugccgguuucauugaagggggguggacagggaugguagauggaugguacgguuaucaccaucaaaaugagcaggggucaggauaugcagccgaccugaagagcacacagaaugccauugacgagauuacuaacaaaguaaauucuguuauugaaaagaugaauacacaguucacagcaguagguaaagaguucaaccaccuggaaaaaagaauagagaauuuaaauaaaaaaguugaugaugguuuccuggacauuuggacuuacaaugccgaacuguugguucuauuggaaaaugaaagaacuuuggacuaccacgauucaaaugugaagaacuuauaugaaaagguaagaagccaguuaaaaaacaaugccaaggaaauuggaaacggcugcuuugaauuuuaccacaaaugcgauaacacgugcauggaaagugucaaaaaugggacuuaugacuacccaaaauacucagaggaagcaaaauuaaacagagaagaaauagaugggguaaagcuggaaucaacaaggauuuaccagauuuuggcgaucuauucaacugucgccaguucauugguacugguagucucccugggggcaaucaguuucuggaugugcucuaaugggucucuacaguguagaauauguauuuaa

SEQ ID NO: 37352 - RNA, 1701 nt, Artificial Sequence; identical to SEQ ID NO: 34681
  derived and/or modified CDS sequence (wt) from hemagglutinin__InfluenzaA__ADK90199

SEQ ID NO: 37353 - RNA, 1701 nt, Artificial Sequence
  derived and/or modified CDS sequence (wt) from hemagglutinin__InfluenzaA__ADK90200
augaaggcaauacuaguaguucugcuauauacauuugcaaccgcaaaugcagacacauuauguauagguuaucaugcgaacaauucaacagacacuguagacacaguacuagaaaagaauguaacaguaacacacucuguuaaccuucuagaagacaagcauaacgggaaacuaugcaaacuaagagggguagccccauugcauuuggguaaauguaacauugcuggcuggauccugggaaauccagagugugaaucacucuccacagcaagcucaugguccuacauuguggaaacaucuaguucagacaauggaacguguuacccaggagauuucaucgauuaugaggagcuaagagagcaauugagcucagugucaucauuugaaagguuugagauauuccccaagacaaguucauggcccaaucaugacucgaacaaagguguaacggcagcauguccucaugcuggagcaaaaagcuucuacaaaaauuuaauauggcuaguuaaaaaaggaaauucauacccaaagcucagcaaauccuacauuaaugauaaagggaaagaaguccucgugcuauggggcauucaccauccaucuacuagugcugaccaacaaagucucuaucagaaugcagaugcguauguuuuuguggggacaucaagauacagcaagaaguucaagccggaaauagcaauaagacccaaagugagggaucaagaggggagaaugaacuauuacuggacacuaguagagccgggagacaaaauagcauucgaagcaacuggaaaucuagugguaccgagauaugcauucgcaauggaaagaaaugcuggaucugguauuaucauuucagauacaccaguccacgauugcaauacaacuugucagacacccaagggugcuauaaacaccagccucccauuucagaauauacauccgaucacaauuggaaaauguccaaaauauguaaaaagcacaaaauugagacuggccacaggauugaggaaugucccgucuauucaaucuagaggccuauuuggggccauugccgguuucauugaagggggguggacagggaugguagauggaugguacgguuaucaccaucaaaaugagcaggggucaggauaugcagccgaccugaagagcacacagaaugccauugacgagauuacuaacaaaguaaauucuguuauugaaaagaugaauacacaguucacagcaguagguaaagaguucaaccaccuggaaaaaagaauagagaauuuaaauaaaaaaguugaugaugguuuccuggacauuuggacuuacaaugccgaacuguugguucuauuggaaaaugaaagaacuuuggacuaccacgauucaaaugugaagaacuuauaugaaaagguaagaagccaguuaaaaaacaaugccaaggaaauuggaaacggcugcuuugaauuuuaccacaaaugcgauaacacgugcauggaaagugucaaaaaugggacuuaugacuacccaaaauacucagaggaagcaaaauuaaacagagaagaaauagaugggguaaagcuggaaucaacaaggauuuaccagauuuuggcggucuauucaacugucgccaguucauugguacugguagucucccugggggcaaucaguuucuggaugugcucuaaugggucucuacaguguagaauauguauuuaa

SEQ ID NO: 37354 - RNA, 1701 nt, Artificial Sequence
  derived and/or modified CDS sequence (wt) from hemagglutinin__InfluenzaA__ADK90201
augaaggcaauacuaguaguucugcuauauacauuugcaaccgcaaaugcagacacauuauguauagguuaucaugcgaacaauucaacagacacuguagacacaguacuagaaaagaauguaacaguaacacacucuguuaaccuucuagaagacaagcauaacgggaaacuaugcaaacuaagagggguagccccauugcauuuggguaaauguaacauugcuggcuggauccugggaaauccagagugugaaucacucuccacagcaagcucaugguccuacauuguggaaacaucuaguucagacaauggaacguguuacccaggagauuucaucgauuaugaggagcuaagagagcaauugagcucagugucaucauuugaaagguuugagauauuccccaagacaaguucauggcccaaucaugacucgaacaaagguguaacggcagcauguccucaugcuggagcaaaaagcuucuacaaaaauuuaauauggcuaguuaaaaaaggaaauucauacccaaagcucagcaaauccuacauuaaugauaaagggaaagaaguccucgugcuauggggcauucaccauccaucuacuagugcugaccaacaaagucucuaucagaaugcagaugcauauguuuuuguggggacaucaagauacagcaagaaguucaagccggaaauagcaguaagacccaaagugagggaucaagaagggagaaugaacuauuacuggacacuaguagagccgggagacaaaauaacauucgaagcaacuggaaaucuagugguaccgagauaugcauucgcaauggaaagaaaugcuggaucugguauuaucauuucagauacaccaguccacgauugcaauacaacuugucagacacccaagggugcuauaaacaccagccucccauuucagaauauacauccgaucacaauuggaaaauguccaaaauauguaaaaagcacaaaauugagacuggccacaggauugaggaaugucccgucuauucaaucuagaggccuauuuggggccauugccgguuucauugaagggggguggacagggaugguagauggaugguacgguuaucaccaucaaaaugagcaggggucaggauaugcagccgaccugaagagcacacagaaugccauugacgagauuacuaacaaaguaaauucuguuauugaaaagaugaauacacaguucacagcaguagguaaagaguucaaccaccuggaaaaaagaauagagaauuuaaauaaaaaaguugaugaugguuuccuggacauuuggacuuacaaugccgaacuguugguucuauuggaaaaugaaagaacuuuggacuaccacgauucaaaugugaagaacuuauaugaaaagguaagaagccaguuaaaaaacaaugccaaggaaauuggaaacggcugcuuugaauuuuaccacaaaugcgauaacacgugcauggaaagugucaaaaaugggacuuaugacuacccaaaauacucagaggaagcaaaauuaaacagagaagaaauagaugggguaaagcuggaaucaacaaggauuuaccagauuuuggcgaucuauucaacugucgccaguucauugguacugguagucucccugggggcaaucaguuucuggaugugcucuaaugggucucuacaguguagaauauguauuuaa

SEQ ID NO: 37355 - RNA, 1701 nt, Artificial Sequence
  derived and/or modified CDS sequence (wt) from hemagglutinin__InfluenzaA__ADK90202
augaaggcaauacuaguaguucugcuauauacauuugcaaccgcaaaugcagacacauuauguauagguuaucaugcgaacaauucaacagacacuguagacacaguacuagaaaagaauguaacaguaacacacucuguuaaccuucuagaagacaagcauaacgggaaacuaugcaaacuaagagggguagccccauugcauuuggguaaauguaacauugcuggcuggauccugggaaauccagagugugaaccacucuccacagcaagcucaugguccuacauuguggaaacaucuaguucagacaauggaacguguuacccaggagauuucaucgauuaugaggagcuaagagagcaauugagcucagugucaucauuugaaaggcuugagauauuccccaagacaaguucauggcccaaucaugacucgaacaaagguguaacggcagcauguccucaugcuggagcaaaaagcuucuacaaaaauuuaauauggcuaguuaaaaaaggaaauucauacccaaagcucagcaaauccuacauuaaugauaaagggaaagaaguccucgugcuauggggcauucaccauccaucuacuagugcugaccaacaaagucucuaucagaaugcagaugcauauguuuuuguggggacaucaagauacagcaagaaguucaagccggaaauagcaauaagacccaaagugagggaucaagaagggagaaugaacuauuacuggacacuaguagagccgggagacaaaauaacauucgaagcaacuggaaaucuagugguaccgagauaugcauucgcaauggaaagaaaugcuggaucugguauuaucauuucagauacaccaguccacgauugcaauacaacuugucagacacccaacggugcuauaaacaccagccucccauuucagaauauacauccgaucacaauuggaaaauguccaaaauauguaaaaagcacaaaauugagacuggccacaggauugaggaaugucccgucuauucaaucuagaggccuauuuggggccauugccgguuucauugaagggggguggacagggaugguagauggaugguacgguuaucaccaucaaaaugagcaggggucaggauaugcagccgaccugaagagcacgcagaaugccauugacgagauuacuaacaaaguaaauucuguuauugaaaagaugaauacacaguucacagcaguagguaaagaguucaaccaccuggaaaaaagaauagagaauuuaaauaaaaaaguugaugaugguuuccuggacauuuggacuuacaaugccgaacuguugguucuauuggaaaaugaaagaacuuuggacuaccacgauucaaaugugaagaacuuauaugaaaagguaagaagccaguuaaaaaacaaugccaaggaaauuggaaacggcugcuuugaauuuuaccacaaaugcgauaacacgugcauggaaagugucaaaaaugggacuuaugacuacccaaaauacucagaggaagcaaaauuaaacagagaagaaauagaugggguaaagcuggaaucaacaaggauuuaccagauuuuggcgaucuauucaacugucgccaguucauugguacugguagucucccugggggcaaucaguuucuggaugugcucuaaugggucucuacaguguagaauauguauuuaa

SEQ ID NO: 37356 - RNA, 1701 nt, Artificial Sequence; identical to SEQ ID NO: 34898
  derived and/or modified CDS sequence (wt) from hemagglutinin__InfluenzaA__ADK90203

SEQ ID NO: 37357 - RNA, 1701 nt, Artificial Sequence
  derived and/or modified CDS sequence (wt) from hemagglutinin__InfluenzaA__ADK90204
augaaggcaauacuaguaguucugcuauauacauuugcaaccgcaaaugcagacacauuauguauagguuaucaugcgaacaauucaacagacacuguagacacaguacuagaaaagaauguaacaguaacacacucuguuaaccuucuagaagacaagcauaacgggaaacuaugcaaacuaagagggguagccccauugcauuuggguaaauguaacauugcuggcuggauccugggaaauccagagugugaaucacucuccacagcaagcucaugguccuacauuguggaaacaucuaguucagacaauggaacguguuacccaggagauuucaucgauuaugaggagcuaagagagcaauugagcucagugucaucauuugaaagguuugagauauuccccaagacaaguucauggcccaaucaugacucgaacaaagguguaacggcagcauguccucaugcuggagcaaaaagcuucuacaaaaauuuaauauggcuaguuaaaaaaggaaauucauacccaaagcucagcaaauccuacauuaaugauaaagggaaagaaguccucgugcuauggggcauucaccauccaucuacuagugcugaccaacaaagucuuuaucagaaugcagaugcauauguuuuuguggggacaucaagauacagcaagaaguucaagccggaaauagcaauaagacccaaagugagggaucaagaagggagaaugaacuauuacuggacacuaguagagccgggagacaaaauaacauucgaagcaacuggaaaucuagugguaccgagauaugcauucgcaauggaaagaaaugcuggaucugguauuaucauuucagauacaccaguccacgauugcaauacaacuugucagacacccaagggugcuauaaacaccagccucccauuucagaauauacauccgaucacaauuggaaaauguccaaaauauguaaaaagcacaaaauugagacuggccacaggauugaggaauaucccgucuauucaaucuagaggccuauuuggggccauugccgguuucauugaagggggguggacagggaugguagauggaugguacgguuaucaccaucaaaaugaacaggggucaggauaugcagccgaccugaagagcacacagaaugccauugacgagauuacuaacaaaguaaauucuguuauugaaaagaugaauacacaguucacagcaguagguaaagaguucaaccaccuggaaaaaagaauagagaauuuaaauaaaaaaguugaugaugguuuccuggacauuuggacuuacaaugccgaacuguugguucuauuggaaaaugaaagaacuuuggacuaccacgauucaaaugugaagaacuuauaugaaaagguaagaagccaguuaaaaaacaaugccaaggaaauuggaaacggcugcuuugaauuuuaccacaaaugcgauaacacgugcauggaaagugucaaaaaugggacuuaugacuacccaaaauacucagaggaagcaaaauuaaacagagaagaaauagaugggguaaagcuggaaucaacaaggauuuaccagauuuuggcgaucuauucaacugucgccaguucauugguacugguagucucccugggggcaaucaguuucuggaugugcucuaaugggucucuacaguguagaauauguauuuaa

SEQ ID NO: 37358 - RNA, 1701 nt, Artificial Sequence
  derived and/or modified CDS sequence (wt) from hemagglutinin__InfluenzaA__ADK94191
augaagacuaucauugcuuugagcuacauucuaugucugguuuucgcucaaaaacuuccuggaaaugacaacagcacggcaacgcugugccuugggcaccaugcaguaccaaacggaacgguagugaaaacaaucacgaaugaccaaauugaaguuacuaaugcuacugagcugguucagaguuccucaacaggugaaauaugcgacaguccucaucagauccuugauggaaaaaacugcacacuaauagaugcucuauugggagacccucagugugauggcuuccaaaauaagaaaugggaccuuuuuguugaacgcagcaaagccuacagcaacuguuacccuuaugaugugccggauuaugccucccuuaggucacuaguugccucauccggcacacuggaguuuaacaaugaaagcuucaauuggacuggagucacucaaaacggaacaagcucugcuugcauaaggagaucuaaaaacaguuucuuuaguagauugaauugguugacccacuuaaacuucaaauacccagcauugaacgugacuaugccaaacaaugaacaauuugacaaauuguacauuugggggguucaccacccggguacggacaaagaccaaaucuuccuguaugcucaagcaucaggaagaaucacagucucuaccaaaagaagccaacaaacuguaaucccgaauaucggaucuagacccagaguaaggaauaucccuagcagaguaagcaucuauuggacaauaguaaaaccgggagacauacuuuugauuaacagcacagggaaucuaauugcuccuagggguuacuucaaaauacgaagugggaaaagcucaauaaugagaucagaugcacccauuggcaaaugcaauucugaaugcaucacuccaaauggaagcauucccaaugacaaaccauuccaaaauguaaacaggaucacauacggggccugucccagauauguuaagcaaaacacucugaaauuggcaacagggaugcgaaauguaccagagaaacaaacuagaggcauauuuggcgcaaucgcggguuucauagaaaaugguugggagggaaugguggaugguugguacgguuucaggcaucaaaauucugagggaagaggacaagcagcagaucucaaaagcacucaagcagcaaucgaucaaaucaaugggaagcugaauagauugaucgggaaaaccaacgagaaauuccaucagauugaaaaagaauucucagaagucgaagggagaauucaggaccuugagaaauauguugaggacacuaaaauagaucucuggucauacaacgcggagcuucuuguugcccuggagaaccaacauacaauugaucuaacugacucagaaaugaacaaacuguuugaaaaaacaaagaagcaacugagggaaaaugcugaggauaugggcaaugguuguuucaaaauauaccacaaaugugacaaugccugcauaggaucaaucagaaauggaacuuaugaccacgauguauacagagaugaagcauuaaacaaccgguuucagaucaagggaguugagcugaagucaggguacaaagauuggauccuauggauuuccuuugccauaucauguuuuuugcuuuguguugcuuuguugggguucaucaugugggccugccaaaaaggcaacauuaggugcaacauuugcauuuga

SEQ ID NO: 37359 - RNA, 1701 nt, Artificial Sequence
  derived and/or modified CDS sequence (wt) from hemagglutinin__InfluenzaA__ADK94202
augaagacuaucauugcuuugagcuacauucuaugucugguuuucgcucaaaaacuuccuggaaaugacaacagcacggcaacgcugugccuugggcaccaugcaguaccaaacggaacgauagugaaaacaaucacgaaugaccaaauugaaguuacuaaugcuacugagcugguucagaguuccucaacaggugaaauaugcgacaguccucaucagauccuugauggagaaaacugcacacuaauagaugcucuauugggagacccucagugugauggcuuccaaaauaagaaaugggaccuuuuuguugaacgcagcaaagccuacagcaacuguuacccuuaugaugugccggauuaugccucccuuaggucacuaauugccucauccggcacacuggaguuuaacaaugaaagcuucaauuggacuggagucacucaaaacggaacaagcucugcuugcauaaggagaucuaauaacaguuucuuuaguagauugaauugguugacccacuuaaaauucaaauacccagcauugaacgugacuaugccaaacaaugaacaauuugacaaauuguacauuugggggguucaccacccggguacggacaaugaccaaaucuuccuguaugcucaagcaucaggaagaaucacagucucuaccaaaagaagucaacaaacuguaaucccgaauaucggaucuagacccagaguaaggaauaucccuagcagaauaagcaucuauuggacaauaguaaaaccgggagacauacuuuugauuaacagcacagggaaucuaauugcuccuagggguuacuucaaaauacgaagugggaaaagcucaauaaugagaucagaugcacccauuggcaaaugcaauucugaaugcaucacuccaaauggaagcauucccaaugacaaaccauuccaaaaugugaacaggaucacauacggggccugucccagauauguuaagcaaaacacucugaaauuggcaacagggaugcgaaauguaccagagaaacaaacuagaggcauauuuggcgcaaucgcggguuucauagaaaaugguugggagggaaugguggaugguugguacgguuucaggcaucaaaauucugagggaagaggacaagcagcagaucucaaaagcacucaagcagcaaucgaucaaaucaaugggaagcugaauagauugaucgggaaaaccaacgagaaauuccaucagauugaaaaagaauucucagaagucgaagggagaauucaggaccuugagaaauauguugaggacacuaaaauagaucucuggucauacaacgcggagcuucuuguugcccuggagaaccaacauacaauugaucugacugacucagaaaugaacaaacuguuugaaaaaacaaagaagcaacugagggaaaaugcugaggauaugggcaaugguuguuucaaaauauaccacaaaugugacaaugccugcauaggaucaaucagaaauggaacuuaugaccacgauguauacagagaugaagcauuaaacaaccgguuccagaucaagggaguugagcugaagucaggguacaaagauuggauccuauggauuuccuuugccauaucauguuuuuugcuuuguguugcuuuguugggguucaucaugugggccugccaaaaaggcaacauuaggugcaacauuugcauuuga

SEQ ID NO: 37360 - RNA, 1701 nt, Artificial Sequence
  derived and/or modified CDS sequence (wt) from hemagglutinin__InfluenzaA__ADK94213
augaagacuaucauugcuuugagcuacauucuaugucugguuuucgcucaaaaacuuccuggaaaugacaacagcacggcaacgcugugccuugggcaccaugcaguaccaaacggaacgauagugaaaacaaucacgaaugaccaaauugaaguuacuaaugcuacugagcugguucagaguuccucaacaggugaaauaugcgacaguccucaucagauccuugauggagaaaacugcacacuaauagaugcucuauugggagacccucagugugauggcuuccaaaauaagaaaugggaccuuuuuguugaacgcagcaaagccuacagcaacuguuacccuuaugaugugccggauuaugccucccuuaggucacuaguugccucauccggcacacuggaguuuaacaaugaaagcuucaauuggacuggagucacucaaaacggaacaagcucugcuugcauaaggagaucuaauaacaguuucuuuaguagauugaauugguugacccacuuaaaauucaaauacccagcauuaaacgugacuaugccaaacaaugaacaauuugacaaauuguacauuugggggguucaccacccggguacggacaaugaccaaaucuuccuguaugcucaagcaucaggaagaaucacagucucuaccaaaagaagccaacaaacuguaaucccgaauaucggaucuagacccagaguaaggaauaucccuagcagaauaagcaucuauuggacaauaguaaaaccgggagacauacuuuugauuaacagcacagggaaucuaauugcuccuagggguuauuuuaaaauacgaagugggaaaagcucaauaaugagaucagaugcacccauuggcaaaugcaauucugaaugcaucacuccaaauggaagcauucccaaugacaaaccauuccaaaauguaaacaggaucacauacggggccugucccagauauguuaagcaaaacacucugaaauuggcaacagggaugcgaaauguaccagagaaacaaacuagaggcauauuuggcgcaaucgcggguuucauagaaaaugguugggagggaaugguggaugguugguacgguuucaggcaucaaaauucugagggaagaggacaagcagcagaucucaaaagcacucaagcagcaaucgaucaaaucaaugggaagcugaauagauugaucgggaaaaccaacgagaaauuccaucagauugaaaaagaauucucagaagucgaagggagaauucaggaccuugagaaauauguugaggacaccaaaauagaucucuggucauacaacgcggagcuucuuguugcccuggagaaccaacauacaauugaucuaacugacucagaaaugaacaaacuguuugaaaaaacaaagaagcaacugagggaaaaugcugaggauaugggcaaugguuguuucaaaauauaccacaaaugugacaaugccugcauaggaucaaucagaaauggaacuuaugaccacgauguauacagagaugaagcauuaaacaaccgguuccagaucaagggaguugagcugaagucaggguacaaagauuggauccuauggauuuccuuugccauaucauguuuuuugcuuuguguugcuuuguugggguucaucaugugggccugccaaaaaggcaacauuaggugcaacauuugcauuuga

SEQ ID NO: 37361 - RNA, 1701 nt, Artificial Sequence
  derived and/or modified CDS sequence (wt) from hemagglutinin__InfluenzaA__ADK94224
augaagacuaucauugcuuugagcuacauucuaugucugguuuucgcucaaaaacuuccuggaaaugacaacagcacggcaacgcugugccuugggcaccaugcaguaccaaacggaacgauagugaaaacaaucacgaaugaccaaauugaaguuacuaaugcuacugagcugguucagaguuccucaacaggugaaauaugcgacaguccucaucagauccuugauggaaaaaacugcacacuaauagaugcucuauugggagacccucagugugauggcuuccaaaauaagaaaugggaccuuuuuguugaacgcagcaaagccuacagcaacuguuacccuuaugaugugccggauuaugccucccuuaggucacuaguugccucauccggcacacuggaguuuaacaaugaaagcuucaauuggacuggagucacucaaaacggaacaagcucugcuugcauaaggagaucuaaaaacaguuucuuuaguagauugaauugguugacccacuuaaacuucaaauacccagcauugaacgugacuaugccaaacaaugaacaauuugacaaauuguacauuugggggguucaccacccggguacggacaaagaccaaaucuuucuguaugcucaagcaucaggaagaaucacagucucuaccaaaagaagccaacaaacugcaaucccgaauaucggaucuagacccagaguaaggaauaucccuagcagaauaagcaucuauuggacaauaguaaaaccgggagacauacuuuugauuaacagcacagggaaucuaauugcuccuagggguuacuucaaaauacgaagugggaaaagcucaauaaugagaucagaugcacccauuggcaaaugcaauucugaaugcaucacuccaaauggaagcauucccaaugacaaaccauuccaaaauguaaacaggaucacauacggggccugucccagauauguuaagcaaaacacucugaaauuggcaacagggaugcgaaauguaccagagaaacaaacuagaggcauauuuggcgcaaucgcggguuucauagaaaaugguugggagggaaugguggaugguugguacgguuucaggcaucaaaauucugagggaagaggacaagcagcagaucucaaaagcacucaagcagcaaucgaucaaaucaaugggaagcugaauagauugaucgggaaaaccaacgagaaauuccaucagauugaaaaagaauucucagaagucgaagggagaauucaggaccuugagaaauauguugaggacacuaaaauagaucucuggucauacaacgcggagcuucuuguugcccuggagaaccaacauacaauugaucuaacugacucagaaaugaacaaacuguuugaaaaaacaaagaagcaacugagggaaaaugcugaggauaugggcaaugguuguuucaaaauauaccacaaaugugacaaugccugcauaggaucaaucagaaauggaacuuaugaccacgauguauacagagaugaagcauuaaacaaccgguuucagaucaagggaguugagcugaagucaggguacaaagauuggauccuauggauuuccuuugccauaucauguuuuuugcuuuguguugcuuuguugggguucaucaugugggccugccaaaaaggcaacauuaggugcaacauuugcauuuga

SEQ ID NO: 37362 - RNA, 1701 nt, Artificial Sequence
  derived and/or modified CDS sequence (wt) from hemagglutinin__InfluenzaA__ADK94257
auggagacuaucauugcuuugagcuacauucuaugucugguuuucgcucaaaaacuuccuggaaaugacaacagcacggcaacgcugugccuugggcaccaugcaguaccaaacggaacgauagugaaaacaaucacgaaugaccaaauugaaguuacuaaugcuacugagcugguucagaguuccucaacaggugaaauaugcgacaguccucaucagauccuugauggaaaaaacugcacacuaauagaugcucuauugggagacccucagugugauggcuuccaaaauaagaaaugggaccuuuuuguugaacgcagcaaagccuacagcaacuguuacccuuaugaugugccggauuaugccucccuuaggucacuaguugccucauccggcacacuggaguuuaacaaugaaagcuucaauuggacuggggucacucaaaacggaacaagcucugcuugcauaaggagaucuaaaaacaguuucuuuaguagauugaauugguugacccacuuaaacuucaaauacccagcauugaacgugacuaugccaaacaaugaacaauuugacaaauuguacauuugggggguucaccacccggguacggacaaagaccaaaucuuccuguaugcucaagcaucaggaagaaucacagucucuaccaaaagaagccaacaaacuguaaucccgaauaucggaucuagacccagaguaaggaauaucccuagcagaauaagcaucuauuggacaauaguaaaaccgggagacauacuuuugauuaacagcacagggaaucuaauugcuccuagggguuacuucaaaauacgaagugggaaaagcucaauaaugagaucagaugcacccauuggcaaaugcaauucugaaugcaucacuccaaauggaagcauucccaaugacaaaccauuccaaaauguaaacaggaucacauacggggccugucccagauauguuaagcaaagcacucugaaauuggcaacagggaugcgaaauguaccagagaaacaaacuagaggcauauuuggcgcaaucgcggguuucauagaaaaugguugggagggaaugguggaugguugguacgguuucaggcaucaaaauucugagggaagagggcaagcagcagaucucaaaagcacucaagcagcaaucgaucaaaucaaugggaagcugaauagauugaucgggaaaaccaacgagaaauuccaucagauugaaaaagaauucucagaagucgaagggagaauucaggaccuugagaaauauguugaggacacuaaaauagaucucuggucauacaacgcggagcuucuuguugcccuggagaaccaacauacaauugaucuaacugacucagaaaugaacaaacuguuugaaaaaacaaagaagcaacugagggaaaaugcugaggauaugggcaaugguuguuucaaaauauaccacaaaugugacaaugccugcauaggaucaaucagaaauggaacuuaugaccacgauguauacagagaugaagcauuaaacaaccgguuucagaucaagggaguugagcugaagucaggguacaaagauuggauccuauggauuuccuuugccauaucauguuuuuugcuuuguguugcuuuguugggguucaucaugugggccugccaaaaaggcaacauuaggugcaacauuugcauuuga

SEQ ID NO: 37363 - RNA, 1701 nt, Artificial Sequence
  derived and/or modified CDS sequence (wt) from hemagglutinin__InfluenzaA__ADK94268
augaagacuaucauugcuuugagcuacauucuaugucugguuuucgcucaaaaacuuccuggaaaugacaacagcacggcaacgcugugccuugggcaccaugcaguaccaaacggaacgauagugaaaacaaucacgaaugaccaaauugaaguuacuaaugcuacugagcugguucagaguuccucaacaggugaaauaugcgacaguccucaucagauccuugauggaaaaaacugcacacuaauagaugcucuauugggagacccucagugugauggcuuccaaaauaagaaaugggaccuuuuuguugaacgcagcaaagccuacagcaacuguuacccuuaugaugugccggauuaugccucccuuaggucacuaguugccucauccggcacacuggaguuuaacaaugaaagcuucaauuggacuggagucacucaaaacggaacaagcucugcuugcauaaggagaucaaaaaacaguuucuuuaguagauugaauugguugacccacuuaaacuucaaauacccagcauugaacgugacuaugccaaacaaugaacaauuugacaaauuguacauuugggggguucaccacccggguacggacaaagaccaaaucuuccuguaugcucaagcaucaggaagaaucacagucucuaccaaaagaagccaacaaacuguaaucccgaauaucggaucuagacccagaguaaggaauaucccuagcagaauaagcaucuauuggacaauaguaaaaccgggagacauacuuuugauuaacagcacagggaaucuaauugcuccuagggguuacuucaaaauacgaagugggaaaagcucaauaaugagaucagaugcacccauuggcaaaugcaauucugaaugcaucacuccaaauggaagcauucccaaugacaaaccauuccaaaauguaaacaggaucacauacggggccugucccagauauguuaagcaaagcacucugaaauuggcaacagggaugcgaaauguaccagagaaacaaacuagaggcauauuuggcgcaaucgcggguuucauagaaaaugguugggagggaaugguggaugguugguacgguuucaggcaucaaaauucugagggaagaggacaagcagcagaucucaaaagcacucaagcagcaaucgaucaaaucaaugggaagcugaauagauugaucgggaaaaccaacgagaaauuccaucagauugaaaaagaauucucagaagucgaagggagaauucaggaccuugagaaauauguugaggacacuaaaauagaucucuggucauacaacgcggagcuucuuguugcccuggagaaccaacauacaauugaucuaacugacucagaaaugaacaaacuguuugaaaaaacaaagaagcaacugagggaaaaugcugaggauaugggcaaugguuguuucaaaauauaccacaaaugugacaaugccugcauaggaucaaucagaaauggaacuuaugaccacgauguauacagagaugaagcauuaaacaaccgguuucagaucaagggaguugagcugaagucaggguacaaggauuggauccuauggauuuccuuugccauaucauguuuuuugcuuuguguugcuuuguugggguucaucaugugggccugccaaaaaggcaacauuaggugcaacauuugcauuuga

SEQ ID NO: 37364 - RNA, 1701 nt, Artificial Sequence
  derived and/or modified CDS sequence (wt) from hemagglutinin__InfluenzaA__ADK94279
augaagacuaucauugcuuugagcuacauucuaugucugguuuucgcucaaaaacuuccuggaaaugacaacagcacggcaacgcuaugccuugggcaccaugcaguaccaaacggaacgauagugaaaacaaucacgaaugaccaaauugaaguuacuaaugcuacugagcugguucagaguuccucaacaggugaaauaugcaacaguccucaucagauccuugauggagaaaacugcacacuaauagaugcucuauugggagacccucagugugauggcuuccaaaauaagaaaugggaccuuuuuguugaacgcagcaaagccuacagcaacuguuacccuuaugaugugccggauuaugccucccuuaggucacuaguugccucauccggcacacuggaguuuaacaaugaaagcuucaauuggacuggagucacucaaaauggaacaagcucugcuugcauaaggagaucuaauaacaguuucuuuaguagauugaauugguugacccacuuaaaauucaaauacccagcauuaaacgugacuaugccaaacaaugaacaauuugacaaauuguacauuugggggguucaccacccggguacggacaaugaccaaaucuuccuguaugcucaagcaucaggaagaaucacagucucuaccaaaagaagccaacaaacuguaaucccgaauaucggaucuagacccagaguaaggaauaucccuagcagaauaagcaucuauuggacaauaguaaaaccgggagacauacuuuugauuaacagcacagggaaucuaauugcuccuagggguuacuucaaaauacgaagugggaaaagcucaauaaugagaucagaugcacccauuggcaaaugcaauucugaaugcaucacuccaaauggaagcauucccaaugacaaaccauuccaaaauguaaacaggaucacauacggggccugucccagauauguuaagcaaaacacucugaaauuggcaacagggaugcgaaauguaccagagaaacaaacuagaggcauauuuggcgcaaucgcggguuucauagaaaaugguugggagggaaugguggaugguugguacgguuucaggcaucaaaauucugagggaagaggacaagcagcagaucucaaaagcacucaagcagcaaucgaucaaaucaaugggaagcugaauagauugaucgggaaaaccaacgagaaauuccaucagauugaaaaagaauucucagaagucgaagggagaauucaggaccuugagaaauauguugaggacaccaaaauagaucucuggucauacaacgcggagcuucuuguugcccuggagaaccaacauacaauugaucuaacugacucagaaaugaacaaacuguuugaaaaaacaaagaagcaacugagggaaaaugcugaggauaugggcaaugguuguuucaaaauauaccacaaaugugacaaugccugcauaggaucaaucagaaauggaacuuaugaccacgauguauacagagaugaagcauuaaacaaccgguuccagaucaagggaguugagcugaagucaggguacaaagauuggauccuauggauuuccuuugccauaucauguuuuuugcuuuguguugcuuuguugggguucaucaugugggccugccaaaaaggcaacauuaggugcaacauuugcauuuga

SEQ ID NO: 37365 - RNA, 1701 nt, Artificial Sequence
  derived and/or modified CDS sequence (wt) from hemagglutinin__InfluenzaA__ADK94290
augaagacuaucauugcuuugagcuacauucuaugucugguuuucgcucaaaaacuuccuggaaaugacaacagcacggcaacgcugugccuugggcaccaugcaguaccaaacggaacgauagugaaaacaaucacgaaugaccaaauugaaguuacuaaugcuacugagcugguucagaguuccucaacaggugaaauaugcgacaguccucaucagauccuugauggaaaaaacugcacacuaauagaugcucuauugggagacccucagugugauggcuuccaaaauaagaaaugggaccuuuuuguugaacgcagcaaagccuacagcaacuguuacccuuaugaugugccggauuaugccucccuuaggucacuaguugccucauccggcacacuggaguuuaacaaugaaagcuucaauuggacuggagucacucaaaacggaacaagcucugcuugcauaaggagaucuaaaaacaguuucuuuaguagauugaauugguugacccacuuaaacuucaaauacccagcauugaacgugacuaugccaaacaaugaacaauuugacaaauuguacauuugggggguucaccacccgggcacggacaaagaccaaaucuuccuguaugcucaagcaucaggaagaaucacagucucuaccaaaagaagccaacaaacugcaaucccgaauaucggaucuagacccagaguaaggaauaucccuagcagaauaagcaucuauuggacaauaguaaaaccgggagacauacuuuugauuaacagcacagggaaucuaauugcuccuagggguuacuucaaaauacgaagugggaaaagcucaauaaugagaucagaugcacccauuggcaaaugcaauucugaaugcaucacuccaaauggaagcauucccaaugacaaaccauuccaaaauguaaacaggaucacauacggggccugucccagauauguuaagcaaaacacucugaaauuggcaacagggaugcgaaauguaccagagaaacaaacuagaggcauauuuggcgcaaucgcggguuucauagaaaaugguugggagggaaugguggaugguugguacgguuucaggcaucaaaauucugagggaagaggacaagcagcagaucucaaaagcacucaagcagcaaucgaucaaaucaaugggaagcugaauagauugaucgggaaaaccaacgagaaauuccaucagauugaaaaagaauucucagaagucgaagggagaauucaggaccuugagaaauauguugaggacacuaaaauagaucucuggucauacaacgcggagcuucuuguugcccuggagaaccaacauacaauugaucuaacugacucagaaaugaacaaacuguuugaaaaaacaaagaagcaacugagggaaaaugcugaggauaugggcaaugguuguuucaaaauauaccacaaaugugacaaugccugcauaggaucaaucagaaauggaacuuaugaccacgauguauacagagaugaagcauuaaacaaccgguuucagaucaagggaguugagcugaagucaggguacaaagauuggauccuauggauuuccuuugccauaucauguuuuuugcuuuguguugcuuuguugggguucaucaugugggccugccaaaaaggcaacauuaggugcaacauuugcauuuga

SEQ ID NO: 37366 - RNA, 1701 nt, Artificial Sequence
  derived and/or modified CDS sequence (wt) from hemagglutinin__InfluenzaA__ADK94301
augaagacuaucauugcuuugagcuacauucuaugucugguuuucgcucaaaaacuuccuggaaaugacaacagcacggcaacgcugugccuugggcaccaugcaguaccaaacggaacgauagugaaaacaaucacgaaugaccaaauugaaguuacuaaugcuacugagcugguucagaguuccucaacaggugaaauaugcgacaguccucaucagauccuugauggaaaaaacugcacacuaauagaugcucuauugggagacccucagugugauggcuuccaaaauaagaaaugggaccuuuuuguugaacgcagcaaagccuacagcaacuguuacccuuaugaugugccggauuaugccucccuuaggucacuaguugccucauccggcacacuggaguuuaacaaugaaagcuucaauuggacuggagucacucaaaauggaacaagcucugcuugcauaaggagaucuaaaaacaguuucuuuaguagauugaauugguugacccacuuaaacuucaaauacccagcauugaacgugacuaugccaaacaaugaacaauuugacaaauuguacauuugggggguucaccacccggguacggacaaagaccaaaucuuccuguaugcucaagcaucaggaagaaucacagucucuaccaaaagaagccaacaaacugcaaucccgaauaucggaucuagacccagaguaaggaauaucccuagcagaauaagcaucuauuggacaauaguaaaaccgggagacauacuuuugauuaacagcacagggaaucuaauugcuccuagggguuacuucaaaauacgaagugggaaaagcucaauaaugagaucagaugcacccauuggcaaaugcaauucugaaugcaucacuccaaauggaagcauucccaaugacaaaccauuccaaaauguaaacaggaucacauacggggccugucccagauauguuaagcaaaacacucugaaauuggcaacagggaugcgaaauguaccagagaaacaaacuagaggcauauuuggcgcaaucgcggguuucauagaaaaugguugggagggaaugguggaugguugguacgguuucaggcaucaaaauucugagggaagaggacaagcagcagaucucaaaagcacucaagcagcaaucgaucaaaucaaugggaagcugaauagauugaucgggaaaaccaacgagaaauuccaucagauugaaaaagaauucucagaagucgaagggagaauucaggaccuugagaaauauguugaggacacuaaaauagaucucuggucauacaacgcggagcuucuuguugcccuggagaaccaacauacaauugaucuaacugacucagaaaugaacaaacuguuugaaaaaacaaagaagcaacugagggaaaaugcugaggauaugggcaaugguuguuucaaaauauaccacaaaugugacaaugccugcauaggaucaaucagaaauggaacuuaugaccacgauguauacagagaugaagcauuaaacaaccgguuucagaucaagggaguugagcugaagucaggguacaaagauuggauccuauggauuuccuuugccauaucauguuuuuugcuuuguguugcuuuguugggguucaucaugugggccugccaaaaaggcaacauuaggugcaacauuugcauuuga

SEQ ID NO: 37367 - RNA, 1701 nt, Artificial Sequence
  derived and/or modified CDS sequence (wt) from hemagglutinin__InfluenzaA__ADK94323
augaagacuaucauugcuuugagcuacauucuaugucugguuuucgcucaaaaacuuccuggaaaugacaacagcacggcaacgcugugccuugggcaccaugcaguaccaaacggaacgauagugaaaacaaucacgaaugaccaaauugaaguuacuaaugcuacugagcugguucagaguuccucaacaggugaaauaugcgacaguccucaucagauccuugauggaaaaaacugcacacuaauagaugcucuauugggagacccucagugugauggcuuccaaaauaagaaaugggaccuuuuuguugaacgcagcaaagccuacagcaacuguuacccuuaugaugugccggauuaugccucccuuaggucacuaguugccucauccggcacacuggaguuuaacaaugaaagcuucaauuggacuggagucacucaaaacggaacaagcucugcuugcauaaggagaucuaaaaacaguuucuuuaguagauugaauugguugacccacuuaaacuucaaauacccagcauugaacgugacuaugccaaacaaugaacaauuugacaaauuguacauuugggggguucaccacccggguacggacaaagaccaaaucuuccuguaugcucaagcaucaggaagaaucacagucucuaccaaaagaagccaacaaacuguaaucccgaauaucggaucuagacccagaauaaggaauaucccuagcagaauaagcaucuauuggacaauaguaaaaccgggagacauacuuuugauuaacagcacagggaaucuaauugcuccuagggguuacuucaaaauacgaagugggaaaagcucaauaaugagaucagaugcacccauuggcaaaugcaauucugaaugcaucacuccaaauggaagcauucccaaugacaaaccauuccaaaauguaaacaggaucacauacggggccugucccagauauguuaagcaaaacacucugaaauuggcaacagggaugcgaaauguaccagagaaacaaacuagaggcauauuuggcgcaaucgcggguuucauagaaaaugguugggagggaaugguggaugguugguacgguuucaggcaucaaaauucugagggaagaggacaagcagcagaucucaaaagcacucaagcagcaaucgaucaaaucaaugggaagcuaaauagauugaucgggaaaaccaaugagaaauuccaucagauugaaaaagaauucucagaagucgaagggagaauucaggaccuugagaaauauguugaggacacuaaaauagaucucuggucauacaacgcggagcuucuuguugcccuggagaaccaacauacaauugaucuaacugacucagaaaugaacaaacuguuugaaaaaacaaagaagcaacugagggaaaaugcugaggauaugggcaaugguuguuucaaaauauaccacaaaugugacaaugccugcauaggaucaaucagaaauggaacuuaugaccacgauguauacagagaugaagcauuaaacaaccgguuucagaucaagggaguugagcugaagucaggguacaaagauuggauccuauggauuuccuuugccauaucauguuuuuugcuuuguguugcuuuguugggguucaucaugugggccugccaaaaaggcaacauuaggugcaacauuugcauuuaa

SEQ ID NO: 37368 - RNA, 1701 nt, Artificial Sequence; identical to SEQ ID NO: 37358
  derived and/or modified CDS sequence (wt) from hemagglutinin__InfluenzaA__ADK94441

SEQ ID NO: 37369 - RNA, 1701 nt, Artificial Sequence
  derived and/or modified CDS sequence (wt) from hemagglutinin__InfluenzaA__ADK94476
augaagacuaucauugcuuugagcuacauucuaugucugguuuucgcucaaaaacuuccuggaaaugacaacagcacggcaacgcugugccuugggcaccaugcaguaccaaacggaacgauagugaaaacaaucacgaaugaccaaauugaaguuacuaaugcuacugagcugguucagaguuccucaacaggugaaauaugcgacaguccucaucagauccuugauggaaaaaacugcacacuaauagaugcucuauugggagacccucagugugauggcuuccaaaauaagaaaugggaccuuuuuguugaacgcagcaaagcccacagcaacuguuacccuuaugaugugccggauuaugccucccuuaggucacuaguugccucauccggcacacuggaguuuaacaaugaaagcuucaauuggacuggagucacucaaaacggaacaagcucugcuugcauaaggagaucuaaaaacaguuucuuuaguagauugaauugguugacccacuuaaacuucaaauacccagcauugaacgugacuaugccaaacaaugaacaauuugacaaauuguacauuuggggggcucaccacccggguacggacaaagaccaaaucuuccuguaugcucaagcaucaggaagaaucacagucucuaccaaaagaagccaacaaacuguaaucccgaauaucggaucuagacccagaguaaggaauaucccuagcagaauaagcaucuauuggacaauaguaaaaccgggagacauacuuuugauuaacagcacagggaaucuaauugcuccuagggguuacuucaaaauacgaagugggaaaagcucaauaaugagaucagaugcacccauuggcaaaugcaauucugaaugcaucacuccaaauggaagcauucccaaugacaaaccauuccaaaauguaaacaggaucacauacggggccugucccagauauguuaagcaaaacacucugaaauuggcaacagggaugcgaaauguaccagagaaacaaacuagaggcauauuuggcgcaaucgcggguuucauagaaaaugguugggagggaaugguggaugguugguacgguuucaggcaucaaaauucugagggaagaggacaagcagcagaucucaaaagcacucaagcagcaaucgaucaaaucaaugggaagcugaauagauugaucgggaaaaccaacgagaaauuccaucagauugaaaaagaauucucagaagucgaagggagaauucaggaccuugagaaauauguugaggacacuaaaauagaucucuggucauacaacgcggagcuucuuguugcccuggagaaccaacauacaauugaucuaacugacucagaaaugaacaaacuguuugaaaaaacaaagaagcaacugagggaaaaugcugaggauaugggcaaugguuguuucaaaauauaccacaaaugugacaaugccugcauaggaucaaucagaaauggaacuuaugaccacgauguauacagagaugaagcauuaaacaaccgguuucagaucaagggaguugagcugaagucaggguacaaagauuggauccuauggauuuccuuugccauaucauguuuuuugcuuuguguugcuuuguugggguucaucaugugggccugccaaaaaggcaacauuaggugcaacauuugcauuuga

SEQ ID NO: 37370 - RNA, 1701 nt, Artificial Sequence; identical to SEQ ID NO: 37361
  derived and/or modified CDS sequence (wt) from hemagglutinin__InfluenzaA__ADK94487

SEQ ID NO: 37371 - RNA, 1701 nt, Artificial Sequence
  derived and/or modified CDS sequence (wt) from hemagglutinin__InfluenzaA__ADK94498
augaagacuaucauugcuuugagcuacauucuaugucugguuuucgcucaaaaacuuccuggaaaugacaacagcacggcaacgcugugccuugggcaccaugcaguaccaaacggaacgguagugaaaacaaucacgaaugaccaaauugaaguuacuaaugcuacugagcugguucagaguuccucaacaggugaaauaugcgacaguccucaucagauccuugauggaaaaaacugcacacuaauagaugcucuauugggggacccucagugugauggcuuccaaaauaagaaaugggaccuuuuuguugaacgcagcaaagccuacagcaacuguuacccuuaugaugugccggauuaugccucccuuaggucacuaguugccucauccggcacacuggaguuuaacaaugaaagcuucaauuggacuggagucacucaaaacggaacaagcucugcuugcauaaggagaucuaaaaacaguuucuuuaguagauugaauugguugacccacuuaaacuucaaauacccagcauugaacgugacuaugccaaacaaugaacaauuugacaaauuguacauuugggggguucaccacccggguacggacaaagaccaaaucuuccuguaugcucaagcaucaggaagaaucacagucucuaccaaaagaagccaacaaacuguaaucccgaauaucggaucuagacccagaguaaggaauaucccuagcagaauaagcaucuauuggacaauaguaaaaccgggagacauacuuuugauuaacagcacagggaaucuaauugcuccuagggguuacuucaaaauacgaagugggaaaagcucaauaaugagaucagaugcacccauuggcaaaugcaauucugaaugcaucacuccaaauggaagcauucccaaugacaaaccauuccaaaauguaaacaggaucacauacggggccugucccagauauguuaagcaaaacacucugaaauuggcaacagggaugcgaaauguaccagagaaacaaacuagaggcauauuuggcgcaaucgcggguuucauagaaaaugguugggagggaaugguggaugguugguacgguuucaggcaucaaaauucugagggaagaggacaagcagcagaucucaaaagcacucaagcagcaaucgaucaaaucaaugggaagcugaauagauugaucgggaaaaccaacgagaaauuccaucagauugaaaaagaauucucagaagucgaagggagaauucaggaccuugagaaauauguugaggacacuaaaauagaucucuggucauacaacgcggagcuucuuguugcccuggagaaccaacauacaauugaucuaacugacucagaaaugaacaaacuguuugaaaaaacaaagaagcaacugagggaaaaugcugaggauaugggcaaugguuguuucaaaauauaccacaaaugugacaaugccugcauaggaucaaucagaaauggaacuuauaaccacgauguauacagagaugaagcauuaaacaaccgguuucagaucaagggaguugagcugaagucaggguacaaagauuggauccuauggauuuccuuugccauaucauguuuuuugcuuuguguugcuuuguugggguucaucaugugggccugccaaaaaggcaacauuaggugcaacauuugcauuuga

SEQ ID NO: 37372 - RNA, 1701 nt, Artificial Sequence
  derived and/or modified CDS sequence (wt) from hemagglutinin__InfluenzaA__ADK94509
augaagacuaucauugcuuugagcuacauucuaugucugguuuucgcucaaaaacuuccuggaaaugacaacagcacggcaacgcugugccuugggcaccaugcaguaccaaacggaacgauagugaaaacaaucacgaaugaccaaauugaaguuacuaaugcuacugagcugguucagaguuccucaacaggugaaauaugcgacaguccucaucagauccuugauggaaaaaacugcacacuaauagaugcucuauugggagacccucagugugauggcuuccaaaauaagaaaugggaccuuuuuguugaacgcagcaaagccuacagcaacuguuacccuuaugaugugccggauuaugccucccuuaggucacuaguugccucauccggcacacuggaguuuaacaaugaaagcuucaauuggacuggagucacucaaaacggaacaagcucugcuugcauaaggagaucuaaaaacaguuucuuuaguagguugaauugguugacccacuuaaacuucaaauacccagcauugaacgugacuaugccaaacaaugaacaauuugacaaauuguacauuugggggguucaccacccggguacggacaaagaccaaaucuuccuguaugcucaagcaucaggaagaaucacagucucuaccaaaagaagccaacaaacugcaaucccgaauaucggaucuagacccagaguaaggaauaucccuagcagaauaagcaucuauuggacaauaguaaaaccgggagacauacuuuugauuaacagcacagggaaucuaauugcuccuagggguuacuucaaaauacgaagugggaaaagcucaauaaugagaucagaugcacccauuggcaaaugcaauucugaaugcaucacuccaaauggaagcauucccaaugacaaaccauuccaaaauguaaacaggaucacauacggggccugucccagauauauuaagcaaaacacucugaaauuggcaacagggaugcgaaauguaccagagaaacaaacuagaggcauauuuggcgcaaucgcggguuucauagaaaaugguugggaggggaugguggaugguugguacgguuucaggcaucaaaauucugagggaagaggacaagcagcagaucucaaaagcacucaagcagcaaucgaucaaaucaaugggaagcugaauagauugaucgggaaaaccaacgagaaauuccaucagauugaaaaagaauucucagaagucgaagggagaauucaggaccuugagaaauauguugaggacacuaaaauagaucucuggucauacaacgcggagcuucuuguugcccuggaaaaccaacauacaauugaucuaacugacucagaaaugaacaaacuguuugaaaaaacaaagaagcaacugagggaaaaugcugaggauaugggcaaugguuguuucaaaauauaccacaaaugugacaaugccugcauaggaucaaucagaaauggaacuuaugaccacgauguauacagagaugaagcauuaaacaaccgguuucagaucaagggaguugagcugaagucaggguacaaagauuggauccuauggauuuccuuugccauaucauguuuuuugcuuuguguugcuuuguugggguucaucaugugggccugccaaaaaggcaacauuaggugcaacauuugcauuuga

SEQ ID NO: 37373 - RNA, 1701 nt, Artificial Sequence
  derived and/or modified CDS sequence (wt) from hemagglutinin__InfluenzaA__ADK94520
augaagacuaucauugcuuugagcuacauucuaugucugguuuucgcucaaaaacuuccuggaaaugacaacagcacggcaacgcugugccuugggcaccaugcaguaccaaacggaacgauagugaaaacaauaacgaaugaccaaauugaaguuacuaaugcuacugagcugguucagaguuccucaacaggugaaauaugcgacaguccucaucagauccuugauggagaaaacugcacacuaauagaugcucuauugggagacccucagugugauggcuuccaaaauaagaaaugggaccuuuuuguugaacgcagcaaagccuacagcaacuguuacccuuaugaugugccggauuaugccucccuuaggucacuaauugccucauccggcacacuggaguuuaacaaugaaagcuucaauuggacuggagucacucaaaauggaacaagcucugcuugcauaaggagaucuaauaacaguuucuuuaguagauuaaauugguugacccacuuaagauucaaguacccagcauugaacgugacuaugccaaacaaugaacaauuugacaaauuguacauuugggggguucaccacccggguacggacaaugaccaaaucuuccuguaugcucaagcaucaggaagaaucacagucucuaccaaaagaagccaacaaacuguaaucccgaauaucggaucuagacccagaguaaggaauaucccuagcagaauaagcaucuauuggacaauaguaaaaccgggagacauacuuuugauuaacagcacagggaaucuaauugcuccuagggguuacuucaaaauacgaagugggaaaagcucaauaaugagaucagaugcacccauuggcaaaugcaauucugaaugcaucacaccaaauggaagcauucccaaugacaaaccauuccaaaauguaaacaggaucacauacggggccugucccagauauguuaagcaaaacacucugaaauuggcaacagggaugcgaaauguaccagagaaacaaacuagaggcauauuuggcgcaaucgcggguuucauagaaaaugguugggagggaaugguggaugguugguacgguuucaggcaucaaaauucugagggaagaggacaagcagcagaucucaaaagcacucaagcagcaaucgaucaaaucaaugggaagcugaauagauugaucggaaaaaccaacgagaaauuccaucagauugaaaaagaauucucagaagucgaagggagaauucaggaccuugagaaauauguugaggacaccaaaauagaucucuggucauacaacgcggagcuucuuguugcccuggagaaccaacauacaauugaucuaacugacucagaaaugaacaaacuguuugaaaaaacaaagaagcaacugagggaaaaugcugaggauaugggcaaugguuguuucaaaauauaccacaaaugugacaaugccugcauaggaucaaucaggaauggaacuuaugaccacgauguauacagagaugaagcauuaaacaaccgguuccagaucaagggaguugagcugaagucaggguacaaagauuggauccuauggauuuccuuugccauaucauguuuuuugcuuuguguugcuuuguugggguucaucaugugggccugccaaaaaggcaacauuaagugcaacauuugcauuuga

SEQ ID NO: 37374 - RNA, 1701 nt, Artificial Sequence
  derived and/or modified CDS sequence (wt) from hemagglutinin__InfluenzaA__ADK94531
augaagacuaucauugcuuugagcuacauucuaugucugguuuucgcucaaaaacuuccuggaaaugacaacagcacggcaacgcugugccuugggcaccaugcaguaccaaacggaacgauagugaaaacaaucacgaaugaccaaauugaaguuacuaaugcuacugagcugguucagaguuccucaacaggugaaauaugcgacaguccucaucagauccuugauggaaaaaacugcacacuaauagaugcucuauugggagacccucagugugauggcuuccaaaauaagaaaugggaccuuuuuguugaacgcagcaaagccuacagcaacuguuacccuuaugaugugccggauuaugccucccuuaggucacuaguugccucauccggcacacuggaguuuaacaaugaaagcuucaauuggacuggagucacucaaaacggaacaagcucugcuugcauaaggagaucuaaaaacaguuucuuuaguagauugaauugguugacccacuuaaacuucaaauacccagcauugaacgugacuaugccaaacaaugaacaauuugacaaauuguacauuugggggguucaccacccggguacggacaaagaccaaaucuuccuguaugcucaagcaucaggaagaaucacagucucuaccaaaagaagccaacaaacugcaaucccgaauauuggaucuagacccagaguaaggaauaucccuagcagaauaagcaucuauuggacaauaguaaaaccgggagacauacuuuugauuaacagcacagggaaucuaauugcuccuagggguuacuucaaaauacgaagugggaaaagcucaauaaugagaucagaugcacccauuggcaaaugcaauucugaaugcaucacuccaaauggaagcauucccaaugacaaaccauuccaaaauguaaacaggaucacauacggggccugucccagauauguuaagcaaaacacucugaaauuggcaacagggaugcgaaaugugccagagaaacaaacuagaggcauauuuggcgcaaucgcggguuucauagaaaaugguugggagggaaugguggaugguugguacgguuucaggcaucaaaauucugagggaagaggacaagcagcagaucucaaaagcacucaagcagcaaucgaucaaaucaaugggaagcugaauagauugaucgggaaaaccaacgagaaauuccaucagauugaaaaagaauucucagaagucgaagggagaauucaggaccuugagaaauauguugaggacacuaaaauagaucucuggucauacaacgcggagcuucuuguugcccuggagaaccaacauacaauugaucuaacugacucagaaaugaacaaacuguuugaaaaaacaaagaagcaacugagggaaaaugcugaggauaugggcaaugguuguuucaaaauauaccacaaaugugacaaugccugcauaggaucaaucagaaauggaacuuaugaccacgauguauacagagaugaagcauuaaacaaccgguuucagaucaagggaguugagcugaagucaggguacaaagauuggauccuauggauuuccuuugccauaucauguuuuuugcuuuguguugcuuuguugggguucaucaugugggccugccaaaaaggcaacauuaggugcaacauuugcauuuga

SEQ ID NO: 37375 - RNA, 1701 nt, Artificial Sequence
  derived and/or modified CDS sequence (wt) from hemagglutinin__InfluenzaA__ADK94542
augaagacuaucauugcuuugagcuacauucuaugucugguuuucgcucaaaaacuuccuggaaaugacaacagcacggcaacgcugugccuugggcaccaugcaguaccaaacggaacgauagugaaaacaaucacgaaugaccaaauugaaguuacuaaugcuacugagcugguucagaguuccucaacaggugaaauaugcgacaguccucaucagauccuugauggagaaaacugcacacuaauagaugcucuauugggagacccucagugugauggcuuccaaaauaagaaaugggaccuuuuuguugaacgcagcaaagccuacagcaacuguuacccuuaugaugugccggauuaugccucccuuaggucacuaguugccucauccggcacacuggaguuuaacaaugaaagcuucaauuggaccggagucacucaaaacgggacaagcucugcuugcauaaggagaucuaauaacaguuucuuuaguagauugaauugguugacccacuuaaaauucaaauacccagcauugaacgugacuaugccaaacaaugaacaauuugacaaauuguacauuugggggguucaccacccggguacggacaaugaccaaaucuucuuguaugcucaagcaucaggaagaaucacagucucuaccaaaagaagccaacaaacuguaaucccgaauaucggaucuagacccagaguaaggaauaucccuagcagaauaagcaucuauuggacaauaguaaaaccgggagacauacuuuugauuaacagcacagggaaucuaauugcuccuagggguuacuucaaaauacgaagugggaaaagcucaauaaugagaucagaugcacccauuggcaaaugcaacucugaaugcaucacuccaaauggaagcauucccaaugacaaaccauuccaaaauguaaacaggaucacauacggggccugucccagauauguuaagcaaaacacucugaaauuggcaacagggaugcgaaauguaccagagaaacaaacuagaggcauauuuggcgcaaucgcggguuucauagaaaaugguugggagggaaugguggaugguugguacgguuucaggcaucaaaauucugagggaagaggacaagcagcagaucucaaaagcacucaagcagcaaucgaucaaaucaaugggaagcugaauagauugaucgguaaaaccaacgagaaauuccaucagauugaaaaagaauucucagaagucgaagggagaauucaggaccuugagaaauauguugaggacacuaaaauagaucucuggucauacaacgcggagcuucuuguugcccuggagaaccaacauacaauugaucuaacugacucagaaaugaacaaacuguuugaaaaaacaaagaagcaacugagggaaaaugcugaggauaugggcaaugguuguuucaaaauauaccacaaaugugacaaugccugcauaggaucaaucagaaauggaacuuaugaccacgauguauacagagaugaagcauuaaacaaccgguuccagaucaagggaguugagcugaagucaggguacaaagauuggauccuauggauuuccuuugccauaucauguuuuuugcuuuguguugcuuuguugggguucaucaugugggccugccaaaaaggcaacauuaggugcaacauuugcauuuga

SEQ ID NO: 37376 - RNA, 1701 nt, Artificial Sequence
  derived and/or modified CDS sequence (wt) from hemagglutinin__InfluenzaA__ADK94553
augaagacuaucauugcuuugagcuacauucuaugucugguuuucgcucaaaaacuuccuggaaaugacaacagcacggcaacgcugugccuugggcaccaugcaguaccaaacggaacgauagugaaaacaaucacgaaugaccaaauugaaguuacuaaugcuacugagcugguucagaguuccucaacaggugaaauaugcgacaguccucaucagauccuugauggaaaaaacugcacacuaauagaugcucuauugggagacccucagugugauggcuuccaaaauaagaaaugggaccuuuuuguugaacgcagcaaagccuacagcaacuguuacccuuaugaugugccggauuaugccucccuuaggucacuaguugccucauccggcacacuggaguuuaacaaugaaagcuucaauuggacuggagucacucaaaacggaacaagcucugcuugcauaaggagaucaaaaaacaguuucuuuaguagauugaauugguugacccacuuaaacuucaaauacccagcauugaacgugacuaugccaaacaaugaacaauuugacaaauuguacauuugggggguucaccacccggguacggacaaagaccaaaucuuccuguaugcucaagcaucaggaagaaucacagucucuaccaaaagaagccaacaaacuguaaucccgaauaucggaucuagacccagaguaaggaauaucccuagcagaauaagcaucuauuggacaauaguaaaaccgggagacauacuuuugauuaacagcacagggaaucuaauugcuccuagggguuacuucaaaauacgaagugggaaaagcucaauaaugagaucagaugcacccauuggcaaaugcaauucugaaugcaucacuccaaauggaagcauucccaaugacaaaccauuccaaaauguaaacaggaucacauacggggccugucccagauauguuaagcaaagcacucugaaauuggcaacagggaugcgaaauguaccagagaaacaaacuagaggcauauuuggcgcaaucgcggguuucauagaaaaugguugggagggaaugguggaugguugguacgguuucaggcaucaaaauucugagggaagaggacaagcagcagaucucaaaagcacucaagcagcaaucgaucaaaucaaugggaagcugaauagauugaucgggaaaaccaacgagaaauuccaucagauugaaaaagaauucucagaagucgaagggagaauucaggaccuugagaaauauguugaggacacuaaaauagaucucuggucauacaacgcggagcuucuuguugcccuggagaaccaacauacaauugaucuaacugacucagaaaugaacaaacuguuugaaaaaacaaagaagcaacugagggaaaaugcugaggauaugggcaaugguuguuucaaaauauaccacaaauguaacaaugcaugcauaggaucaaucagaaauggaacuuaugaccacgauguauacagagaugaagcauuaaacaaccgguuucagaucaagggaguugagcugaagucaggguacaaggauuggauccuauggauuuccuuugccauaucaugcuuuuugcuuuguguugcuuuguugggguucaucaugugggccugccaaaaaggcaacauuaggugcaacauuugcauuuga

SEQ ID NO: 37377 - RNA, 1701 nt, Artificial Sequence; identical to SEQ ID NO: 37374
  derived and/or modified CDS sequence (wt) from hemagglutinin__InfluenzaA__ADK94564

SEQ ID NO: 37378 - RNA, 1701 nt, Artificial Sequence
  derived and/or modified CDS sequence (wt) from hemagglutinin__InfluenzaA__ADK98501
augaaggcaauacuaguaguucugcuauauacauuugcaaccgcaaaugcagacacauuauguauagguuaucaugcgaacaauucaacagacacuguagacacaguacuagaaaagaauguaacaguaacacacucuguuaaccuucuagaagacaagcauaacgggaaacuaugcaaacuaagagggguagccccauugcauuuggguaaauguaacauugcuggcuggauccugggaaauccagagugugaaucacucuccacagcaagcucaugguccuacauuguggaaacaucuaguucaggcaauggaacguguuacccaggagauuucaucgauuaugaggagcuaagagagcaauugagcucagugucaucauuugaaagguuugagauauuccccaagacaaguucauggcccaaucaugacucgaacaaagguguaacggcagcauguccucaugcuggagcaaaaagcuucuacaaaaauuuaauauggcuaguuaaaaaagggaacucauacccaaagcucagcaaauccuacauuaaugauaaagggaaagaaguccucgugcuauggggcauucaccauccaucuacuagugcugaccaacaaagucucuaucagaaugcagaugcauauguuuuuguggggacaucaagauacagcaagaaguucaagccggaaauagcaauaagacccaaagugagggaucaagaagggagaaugaacuauuacuggacacuaguagagccgggagacaaaauaacauucgaaacaacuggaaaucuagugguaccgagauaugcauucgcaauggaaagaaaugcuggaucugguauuaucauuucagauacaccaguccacgauugcaauacaacuugucagacacccaagggugcuauaaacaccagccucccauuucagaauauacauccgaucacaauuggaaaauguccaaaauauguaaaaagcacaaaauugagacuggccacaggauugaggaaugucccgucuauucaaucuagaggccuauuuggggccauugccgguuucauugaagggggguggacagggaugguagauggaugguacgguuaucaccaucaaaaugagcaggggucaggauaugcagccgaccugaagagcacacagaaugccauugacgagauuacuaacaaaguaaauucuguuauugaaaagaugaauacacaguucacagcaguagguaaagaguucaaccaccuggaaaaaagaauagagaauuuaaauaaaaaaguugaugaugguuuccuggacauuuggacuuacaaugccgagcuguugguucuauuggaaaaugaaagaacuuuggacuaccacgauucaaaugugaagaacuuauaugaaaagguaagaagccaguuaaaaaacaaugccaaggaaauuggaaacggcugcuuugaauuuuaccacaaaugcgauaacacgugcauggaaagugucaaaaaugggacuuaugacuacccaaaauacucagaggaagcaaaauuaaacagagaagaaauagaugggguaaagcuggaaucaacaaggauuuaccagauuuuggcgaucuauucaacugucgccaguucauugguacugguagucucccugggggcaaucaguuucuggaugugcucuaaugggucucuacaguguagaauauguauuuaa

SEQ ID NO: 37379 - RNA, 1701 nt, Artificial Sequence
  derived and/or modified CDS sequence (wt) from hemagglutinin__InfluenzaA__ADK98503
augaaggcaauacuaguaguucugcuauauacauuugcaaccgcaaaugcagacacauuauguauagguuaucaugcgaacaauucaacagacacuguagacacaguacuagaaaagaauguaacaguaacacacucuguuaaccuucuagaagacaagcauaacgggaaacuaugcaaacuaagagggguagccccauugcauuuggguaaauguaacauugcuggcuggauccugggaaauccagagugugaaucacucuccacagcaagcucaugguccuacauuguggaaacaucuaguucagacaauggaacguguuacccaggagauuucaucgauuaugaggagcuaagagagcaauugagcucagugucaucauuugaaagguuugagauauuccccaagacaaguucauggcccaaucaugacccgaacaaagguguaacggcagcauguccucaugcuggagcaaaaagcuucuacaaaaauuuaauauggcuaguuaaaaaaggaaauucauacccaaagcucagcaaauccuacauuaaugauaaagggaaagaaguccucgugcuauggggcauucaccauccaucuacuagugcugaccaacaaagucucuaucagaauguagaugcauauguuuuuguggggacaucaagauacagcaagaaguucaagccggaaauagcaauaagacccaaagugagggaucaagaagggagaaugaacuauuacuggacacuaguagagccgggagacaaaauaacauucgaagcaacuggaaaucuagugguaccgagauaugcauucgcaauggaaagaaaugcuggaucugguauuaucauuucagauacaccaguccacgauugcaauacaacuugucagacacccaagggugcuauaaacaccagccucccauuucagaauauacauccgaucacaauuggaaaauguccaaaauauguaaaaagcacaaaauugagacuggccacaggauugaggaaugucccgucuauucaaucuagaggccuauuuggggccauugccgguuucauugaagggggguggacagggaugguagauggaugguacgguuaucaccaucaaaaugagcaggggucaggauaugcagccgaccugaagagcacacagaaugccauugacgagauuacuaacaaaguaaauucuguuauugaaaagaugaauacacaguucacagcaguagguaaagaguucaaccaccuggaaaaaagaauagagaauuuaaauaaaaaaguugaugaugguuuccuggacauuuggacuuacaaugccgaacuguugguucuauuggaaaaugaaagaacuuuggacuaccacgauucaaaugugaagaacuuauaugaaaagguaagaagccaguuaaaaaacaaugccaaggaaauuggaaacggcugcuuugaauuuuaccacaaaugcgauaacacgugcauggaaagugucaaaaaugggacuuaugacuacccaaaauacucagaggaagcaaaauuaaacagagaagaaauagaugggguaaagcuggaaucaacaaggauuuaccagauuuuggcgaucuauucaacugucgccaguucauugguacugguagucucccugggggcaaucaguuucuggaugugcucuaaugggucucuacaguguagaauauguauuuaa

SEQ ID NO: 37380 - RNA, 1701 nt, Artificial Sequence
  derived and/or modified CDS sequence (wt) from hemagglutinin__InfluenzaA__ADK98623
augaagacuaucauugcuuugagcuacauucuaugucugguuuucgcucaaaaacuuccuggaaaugacaacagcacggcaacgcugugccuugggcaccaugcaguaccaaacggaacgauagugaaaacaaucacgaaugaccaaauugaaguuacuaaugcuacugagcugguucagaguuccucaacaggugaaauaugcgacaguccucaucagauccuugauggaaaaaacugcacacuaauagaugcucuauugggagacccucagugugauggcuuccaaaauaagaaaugggaccuuuuuguugaacgcagcaaagccuacagcaacuguuacccuuaugaugugccggauuaugccucccuuaggucacuaguugccucauccggcacacuggaguuuaacaaugaaagcuucaauuggacuggagucacucaaaacggaacaagcucugcuugcauaaggagaucuaaaaacaguuucuuuaguagauugaauugguugacccacuuaaacuucaaauacccagcauugaacgugacuaugccaaacaaugaacaauuugacaaauuguacauuugggggguucaccacccggguacggacaaagaccaaaucuuccuguaugcucaagcaucaggaagaaucacagucucuaccaaaagaagccaacaaacuguaaucccgaauaucggaucuagacccagaguaaggaauaucccuagcagaauaagcaucuauuggacaauaguaaaaccgggagacauacuuuugauuaacagcacagggaaucuaauugcuccuagggguuacuucaaaauacgaagugggaaaagcucaauaaugagaucagaugcacccauuggcaaaugcaauucugaaugcaucacuccaaauggaagcauucccaaugacaaaccauuccaaaauguaaacaggaucacauacggggccugucccagauauguuaagcaaagcacucugaaauuggcaacagggaugcgaaauguaccagagaaacaaacuagaggcauauuuggcgcaaucgcggguuucauagaaaaugguugggagggaaugguggaugguugguacgguuucaggcaucaaaauucugagggaagaggacaagcagcagaucucaaaagcacucaagcagcaaucgaucaaaucaaugggaagcugaauagauugaucgggaaaaccaacgagaaauuccaucagauugaaaaagaauucucagaagucgaagggagaauucaggaccuugagaaauauguugaggacacuaaaauagaucucuggucauacaacgcggagcuucuuguugcccuggagaaccaacauacaauugaucuaacugacucagaaaugaacaaacuguuugaaaaaacaaagaagcaacugagggaaaaugcugaggauaugggcaaugguuguuucaaaauauaccacaaaugugacaaugccugcauaggaucaaucagaaauggaacuuaugaccacgauguauacagagaugaagcauuaaacaaccgguuucagaucaagggaguugagcugaagucaggguacaaggauuggauccuauggauuuccuuugccauaucauguuuuuugcuuuguguugcuuuguugggguucaucaugugggccugccaaaaaggcaacauuaggugcaacauuugcauuuga

SEQ ID NO: 37381 - RNA, 1701 nt, Artificial Sequence
  derived and/or modified CDS sequence (wt) from hemagglutinin__InfluenzaA__ADK98634
augaagacuaucauugcuuugagcuacauucuaugucugguuuucgcucaaaaacuuccuggaaaugacaacagcacggcaacgcugugccuugggcaccaugcaguaccaaacggaacgauagugaaaacaaucacgaaugaccaaauugaaguuacuaaugcuacugagcugguucagaguuccucaacaggugaaauaugcgacaguccucaucagauccuugauggagaaaacugcacacuaauagaugcucuauugggagacccucagugugauggcuuccaaaauaagaaaugggaccuuuuuguugaacgcagcaaagccuacagcaacuguuacccuuaugaugugccggauuaugccucccuuaggucacuaguugccucauccggcacacuggaguuuaacaaugaaagcuucaauuggacuggagucacucaaaacggaacaagcucugcuugcauaaggagaucuaauaacaguuucuuuaguagauugaauugguugacccacuuaaaauucaaauacccagcauuaaacgugacuaugccaaacaaugaacaauuugacaaauuguacauuugggggguucaccacccggguacggacaaugaccaaaucuuccuguaugcucaagcaucaggaagaaucacagucucuaccaaaagaagccaacaaacuguaaucccgaauaucggaucuagacccagaguaaggaauaucccuagcagaauaagcaucuauuggacaauaguaaaaccgggagacauacuuuugauuaacagcacagggaaucuaauugcuccuagggguuacuuuaaaauacgaagugggaaaagcucaauaaugagaucagaugcacccauuggcaaaugcaauucugaaugcaucaccccaaauggaagcauucccaaugacaaaccauuccaaaauguaaacaggaucacauacggggccugucccagauauguuaagcaaaacacucugaaauuggcaacagggaugcgaaauguaccagagaaacaaacuagaggcauauuuggcgcaaucgcggguuucauagaaaaugguugggagggaaugguggaugguugguacgguuucaggcaucaaaauucugagggaagaggacaagcagcagaucucaaaagcacucaagcagcaaucgaucaaaucaaugggaagcugaauagauugaucgggaaaaccaacgagaaauuccaucagauugaaaaagaauucucagaagucgaagggagaauucaggaccuugagaaauauguugaggacaccaaaauagaucucuggucauacaacgcggagcuucuuguugcccuggagaaccaacauacaauugaucuaacugacucagagaugaacaaacuguuugaaaaaacaaagaagcaacugagggaaaaugcugaggauaugggcaaugguuguuucaaaauauaccacaaaugugacaaugccugcauaggaucaaucagaaauggaacuuaugaccacgauguauacagagaugaagcauuaaacaaccgguuccagaucaagggaguugagcugaagucaggguacaaagauuggauccuauggauuuccuucgccauaucauguuuuuugcuuuguguugcuuuguugggguucaucaugugggccugccaaaaaggcaacauuaggugcaacauuugcauuuga

SEQ ID NO: 37382 - RNA, 1701 nt, Artificial Sequence
  derived and/or modified CDS sequence (wt) from hemagglutinin__InfluenzaA__ADK98645
augaagacuaucauugcuuugagcuacauucuaugucugguuuucgcucaaaaacuuccuggaaaugacaacagcacggcaacgcugugccuugggcaccaugcaguaccaaacggaacgauagugaaaacaaucacgaaugaccaaauugaaguuacuaaugcuacugagcugguucagaguuccucaacaggugaaauaugcgacaguccucaucagauccuugauggagaaaacugcacacuaauagaugcucuauugggagacccucagugugauggcuuccaaaauaagaaaugggaccuuuuuguugaacgaagcaaagccuacagcaacuguuacccuuaugaugugccggauuaugccucccuuaggucacuaguugccucauccggcacacuggaguuuaacaaugaaagcuucaauuggacuggagucacucaaaacggaacaagcucugcuugcauaaggagaucuaauaacaguuucuuuaguagauugaauugguugacccacuuaaaauucaaauacccagcauugaacgugacuaugccaaacaaugaacaauuugacaaauuguacauuugggggguucaccacccggguacggacaaugaccaaaucuuccuguaugcucaagcaucaggaagaaucacaguaucuaccaaaagaagccaacaaacuguaaucccgaauaucggaucuagacccagaguaaggaauaucccuagcagaauaagcaucuauuggacaauaguaaaaccgggagacauacuuuugauuaacagcacagggaaucuaauugcuccuagggguuacuucaaaauacgaagugggaaaagcucaauaaugagaucagaugcacccauuggcaaaugcaauucugaaugcaucacuccaaauggaagcauucccaaugacaaaccauuccaaaauguaaacaggaucacauacggggccugucccagauauguuaagcaaaacacucuaaaauuggcaacaggaaugcgaaauguaccagagaaacaaacuagaggcauauuuggcgcaaucgcggguuucauagaaaaugguugggagggaaugguggaugguugguacgguuucaggcaucaaaauucugagggaagaggacaagcagcagaucucaaaagcacucaagcagcaaucgaucaaaucaaugggaagcugaauagauugaucgggaaaaccaacgagaaauuccaucagauugaaaaagaauucucagaagucgaagggagaauccaggaccuugagaaauauguugaggacacuaaaauagaucucuggucauacaacgcggagcuucuuguugcccuggagaaccaacauacaauugaucuaacugacucagaaaugaacaaacuguuugaaaaaacaaagaagcaacugagggaaaaugcugaggauaugggcaaugguuguuucaaaauauaccacaaaugugacaaugccugcauaggaucaaucagaaauggaacuuaugaccacgauguauacagagaugaagcauugaacaaccgguuccagaucaagggaguugagcugaagucaggguacaaagauuggauccuauggauuuccuuugccauaucauguuuuuugcuuuguguugcuuuguugggguucaucaugugggccugccaaaaaggcaacauuaggugcaacauuugcauuuga

SEQ ID NO: 37383 - RNA, 1701 nt, Artificial Sequence; identical to SEQ ID NO: 37309
  derived and/or modified CDS sequence (wt) from hemagglutinin__InfluenzaA__ADK98656

SEQ ID NO: 37384 - RNA, 1701 nt, Artificial Sequence; identical to SEQ ID NO: 37376
  derived and/or modified CDS sequence (wt) from hemagglutinin__InfluenzaA__ADK98667

SEQ ID NO: 37385 - RNA, 1701 nt, Artificial Sequence
  derived and/or modified CDS sequence (wt) from hemagglutinin__InfluenzaA__ADK98678
augaagacuaucauugcuuugagcuacauucuaugucugguuuucgcucaaaaacuuccuggaaaugacaacagcacggcaacgcugugccuugggcaccaugcaguaccaaacggaacgauagugaaaacaaucacgaaugaccaaauugaaguuacuaaugcuacugagcugguucagaguuccucaacaggugaaauaugcgacaguccucaucagauccuugauggagaaaacugcacacuaauagaugcucuauugggagacccucagugugauggcuuccaaaauaagaaaugggaccuuuuuguugaacgcagcaaagccuacagcaacuguuacccuuaugaugugccggauuaugccucccuuaggucacuaguugccucauccggcacacuggaguuuaacaaugaaagcuucaauuggacuggagucacucaaaacggaacaagcucugcuugcauaaggagaucuaauaacaguuucuuuaguagauugaauugguugacccacuuaaaauucaaauacccagcauugaacgugacuaugccaaacaaugaacaauuugacaaauuguacauuugggggguucaccacccggguacggacaaugaccaaaucuuccuguaugcucaagcaucaggaagaaucacagucucuaccaaaagaagccaacaaacuguaaucccgaauaucggaucuagacccagaguaaggaauaucccuagcagaauaagcaucuauuggacaauaguaaaaccgggagacauacuuuugauuaacagcacagggaaucuaauugcuccuagggguuacuucaaaauacgaagugggaaaagcucaauaaugagaucagaugcacccauuggcaaaugcaauucugaaugcaucacucaaaauggaagcauucccaaugauaaaccauuccaaaauguaaacaggaucacauacggggccugucccagauauguuaagcaaaacacucugaaauuggcaacagggaugcgaaauguaccagagaaacaaacuagaggcauauuuggcgcaaucgcggguuucauagaaaaugguugggagggaaugguggaugguugguacggauucaggcaucaaaauucugagggaagaggacaagcagcagaucucaaaagcacucaagcagcaaucgaucaaaucaaugggaagcugaauagauugaucgggaaaaccaacgagaaauuccaucagauugaaaaagaauucucagaagucgaagggagaauucaggaccuugagaaauauguugaggacacuaaaauagaucucuggucauacaacgcggagcuucuuguugcccuggagaaccaacauacaauugaucuaacugacucagaaaugaacaaacuguuugaaaaaacaaagaagcaacugagggaaaaugcugaggauaugggcaaugguuguuucaaaauauaccacaaaugugacaaugccugcauaggaucaaucagaaauggaacuuaugaccacgauguauacagagaugaagcauuaaacaaccgguuccagaucaagggaguugagcugaagucaggguacaaagauuggauccuauggauuuccuuugccauaucauguuuuuugcuuuguguugcuuuguugggguucaucaugugggccugccaaaaaggcaacauuaggugcaacauuugcauuuga

SEQ ID NO: 37386 - RNA, 1701 nt, Artificial Sequence; identical to SEQ ID NO: 37382
  derived and/or modified CDS sequence (wt) from hemagglutinin__InfluenzaA__ADK98689

SEQ ID NO: 37387 - RNA, 1701 nt, Artificial Sequence
  derived and/or modified CDS sequence (wt) from hemagglutinin__InfluenzaA__ADK98700
augaagacuaucauugcuuugagcuacauucuaugucugguuuucgcucaaaaacuuccuggaaaugacaacagcacggcaacgcugugccuugggcaccaugcaguaccaaacggaacgauagugaaaacaaucacgaaugaccaaauugaaguuacuaaugcuacugagcugguucagaguuccucaacaggugaaauaugcgacaguccucaucagauccuugauggagaaaacugcacacuaauagaugcucuauugggagacccucagugugauggcuuccaaaauaagaaaugggaccuuuuuguugaacgcagcaaagccuacagcaacuguuacccuuaugaugugccggauuaugccucccuuaggucacuaguugccucauccggcacacuggaguuuaacaaugaaagcuucaauuggacuggagucacucaaaacggaacaagcucugcuugcauaaggagaucuaauaacaguuucuuuaguagauugaauugguugacccacuuaaaauucaaauacccagcauugaacgugacuaugccaaacaaugaacaauuugacaaauuguacauuugggggguucaccacccggguacggacaaugaccaaaucuuccuguaugcucaagcaucaggaagaaucacagucucuaccaaaagaagccaacaaacuguaaucccgaauaucggaucuagacccagaguaaggaauaucccuagcagaauaagcaucuauuggacaauaguaaaaccgggagacauacuuuugauuaacagcacagggaaucuaauugcuccuagggguuacuucaaaauacgaagugggaaaagcucaauaaugagaucagaugcacccauuggcaaaugcaauucugaaugcaucacuccaaauggaagcauucccaaugauaaaccauuccaaaauguaaacaggaucacauacggggccugucccagauauguuaagcaaaacacucugaaauuggcaacagggaugcgaaauguaccagagaaacaaacuagaggcauauuuggcgcaaucgcggguuucauagaaaaugguugggagggaaugguggaugguugguacggauucaggcaucaaaauucugagggaagaggacaagcagcagaucucaaaagcacucaagcagcaaucgaucaaaucaaugggaagcugaauagauugaucgggaaaaccaacgagaaauuccaucagauugaaaaagaauucucagaagucgaagggagaauucaggaccuugagaaauauguugaggacacuaaaauagaucucuggucauacaacgcggagcuucuuguugcccuggagaaccaacauacaauugaucuaacugacucagaaaugaacaaacuguuugaaaaaacaaagaagcaacugagggaaaaugcugaggauaugggcaaugguuguuucaaaauauaccacaaaugugacaaugccugcauaggaucaaucagaaauggaacuuaugaccacgauguauacagagaugaagcauuaaacaaccgguuccagaucaagggaguugagcugaagucaggguacaaagauuggauccuauggauuuccuuugccauaucauguuuuuugcuuuguguugcuuuguugggguucaucaugugggccugccaaaaaggcaacauuaggugcaacauuugcauuuga

SEQ ID NO: 37388 - RNA, 1701 nt, Artificial Sequence
  derived and/or modified CDS sequence (wt) from hemagglutinin__InfluenzaA__ADK98711
augaagacuaucauugcuuugagcuacauucuaugucugguuuucgcucaaaaacuuccuggaaaugacaacagcacggcaacgcugugccuugggcaccaugcaguaccaaacggaacgauagugaaaacaaucacgaaugaccaaauugaaguuacuaaugcuacugagcugguucagaguuccucaacaggugaaauaugcgacaguccucaucagauccuugauggagaaaacugcacacuaauagaugcucuauugggagacccucagugugauggcuuccaaaauaagaaaugggaccuuuuuguugaacgcagcaaagccuacagcaacuguuacccuuaugaugugccggauuaugccucccuuaggucacuaguugccucauccggcacacuggaguuuaacaaugaaagcuucaauuggacuggagucacucaaaacggaacaagcucugcuugcauaaggagaucuaauaacaguuucuuuaguagauugaauugguugacccacuuaaaauucaaauacccagcauuaaacgugacuaugccaaacaaugaacaauuugacaaauuguacauuugggggguucaccacccggguacggacaaugaccaaaucuuccuguaugcucaagcaucaggaagaaucacagucucuaccaaaagaagccaacaaacuguaaucccgaauaucggaucuagacccagaguaaggaauaucccuagcagaauaagcaucuauuggacaauaguaaaaccgggagacauacuuuugauuaacagcacagggaaucuaauugcuccuagggguuacuuuaaaauacgaagugggaaaagcucaauaaugagaucagaugcacccauuggcaaaugcaauucugaaugcaucacuccaaauggaagcauucccaaugacaaaccauuccaaaauguaaacaggaucacauacggggccugucccagauauguuaagcaaaacacucugaaauuggcaacagggaugcgaaauguaccagagaaacaaacuagaggcauauuuggcgcaaucgcgggcuucauagaaaaugguugggagggaaugguggaugguugguacgguuucaggcaucaaaauucugagggaagaggacaagcagcagaucucaaaagcacucaagcagcaaucgaucaaaucaaugggaagcugaauagauugaucgggaaaaccaacgagaaauuccaucagauugaaaaagaauucucagaagucgaagggagaauucaggaccuugagaaauauguugaggacaccaaaauagaucucuggucauacaacgcggagcuucuuguugcccuggagaaccaacauacaauugaucuaacugacucagagaugaacaaacuguuugaaaaaacaaagaagcaacugagggaaaaugcugaggauaugggcaaugguuguuucaaaauauaccacaaaugugacaaugccugcauaggaucaaucagaaauggaacuuaugaccacgauguauacagagaugaagcauuaaacaaccgguuccagaucaagggaguugagcugaagucaggguacaaagauuggauccuauggauuuccuuugccauaucauguuuuuugcuuuguguugcuuuguugggguucaucaugugggccugccaaaaaggcaacauuaggugcaacauuugcauuuga

SEQ ID NO: 37389 - RNA, 1701 nt, Artificial Sequence
  derived and/or modified CDS sequence (wt) from hemagglutinin__InfluenzaA__ADK98722
augaagacuaucauugcuuugagcuacauucuaugucugguuuucgcucaaaaacuuccuggaaaugacaacagcacggcaacgcugugccuugggcaccaugcaguaccaaacggaacgauagugaaaacaaucacgaaugaccaaauugaaguuacuaaugcuacugagcugguucagaguuccucaacaggugaaauaugcgacaguccucaucagauccuugauggagaaaacugcacacuaauagaugcucuauugggagacccucagugugauggcuuccaaaauaagaaaugggaccuuuuuguugaacgaagcaaagccuacagcaacuguuacccuuaugaugugccggauuaugccucccuuaggucacuaguugccucauccggcacacuggaguuuaacaaugaaagcuucaauuggacuggagucacucaaaacggaacaagcucugcuugcauaaggagaucuaauaacaguuucuuuaguagauugaauugguugacccacuuaaaauucaaauacccagcauugaacgugacuaugccaaacaaugaacaauuugacaaauuguacauuugggggguucaccacccggguacggacaaugaccaaaucuuccuguaugcucaagcaucaggaagaaucacaguaucuaccaaaggaagccaacaaacuguaauuccgaauaucggaucuagacccagaguaaggaauaucccuagcagaauaagcaucuauuggacaauaguaaaaccgggagacauacuuuugauuaacagcacagggaaucuaauugcuccuagggguuacuucaaaauacgaagugggaaaagcucaauaaugagaucagaugcacccauuggcaaaugcaauucugaaugcaucacuccaaauggaagcauucccaaugacaaaccauuccaaaauguaaacaggaucacauacggggccugucccagauauguuaagcaaaacacucuaaaauuggcaacaggaaugcgaaauguaccagagaaacaaacuagaggcauauuuggcgcgaucgcggguuucauagaaaaugguugggagggaaugguggaugguugguacgguuucaggcaucaaaauucugagggaagaggacaagcagcagaucucaaaagcacucaagcagcaaucgaucaaaucaaugggaagcugaauagauugaucgggaaaaccaacgagaaauuccaucagauugaaaaagaauucucagaagucgaagggagaauccaggaccuugagaaauauguugaggacacuaaaauagaucucuggucauacaacgcggagcuucuuguugcccuggagaaccaacauacaauugaucuaacugacucagaaaugaacaaacuguuugaaaaaacaaagaagcaacugagggaaaaugcugaggauaugggcaaugguuguuucaaaauauaccacaaaugugacaaugccugcauaggaucaaucagaaauggaacuuaugaccacgauguauacagagaugaagcauugaacaaccgguuccagaucaagggaguugagcugaagucaggguacaaagauuggauccuauggauuuccuuugccauaucauguuuuuugcuuuguguugcuuuguugggguucaucaugugggccugccaaaaaggcaacauuaggugcaacauuugcauuuga

SEQ ID NO: 37390 - RNA, 1701 nt, Artificial Sequence; identical to SEQ ID NO: 37380
  derived and/or modified CDS sequence (wt) from hemagglutinin__InfluenzaA__ADK98733

SEQ ID NO: 37391 - RNA, 1701 nt, Artificial Sequence; identical to SEQ ID NO: 37382
  derived and/or modified CDS sequence (wt) from hemagglutinin__InfluenzaA__ADK98744

SEQ ID NO: 37392 - RNA, 1701 nt, Artificial Sequence
  derived and/or modified CDS sequence (wt) from hemagglutinin__InfluenzaA__ADK98777
augaagacuaucauugcuuugagcuacauucuaugucugguuuucgcucaaaaacuuccuggaaaugacaacagcacggcaacgcugugccuugggcaccaugcaguaccaaacggaacgauagugaaaacaaucacgaaugaccaaauugaaguuacuaaugcuacugagcugguucagaguuccucaacaggugaaauaugcgacaguccucaucagauccuugauggagaaaacugcacacuaauagaugcucuauugggagacccucagugugauggcuuccaaaauaagaaaugggaccuuuuuguugaacgcagcaaagccuacagcaacuguuacccuuaugaugugccggauuaugccucccuuaggucacuaguugccucauccggcacacuggaguuuaacaaugaaagcuucaauuggacuggagucacucaaaacggaacaagcucugcuugcauaaggagaucuaauaacaguuucuuuaguagauugaauugguuaacccacuuaaaauucaaauacccagcauuaaacgugacuaugccaaacaaugaacaauuugacaaauuguacauuugggggguucaccacccggguacggacaaugaccaaaucuuccuguaugcucaagcaucaggaagaaucacagucucuaccaaaagaagccaacaaacuguaaucccgaauaucggaucuagacccagaguaaggaauaucccuagcagaauaagcaucuauuggacaauaguaaaaccgggagacauacuuuugauuaacagcacagggaaucuaauugcuccuagggguuacuucaaaauacgaagugggaaaagcucaauaaugagaucagaugcacccauuggcaaaugcaauucugaaugcaucacuccaaauggaagcauucccaaugacaaaccauuccaaaauguaaacaggaucacauacggggccugucccagauauguuaagcaaaacacucugaaauuggcaacagggaugcgaaauguaccagagaaacaaacuagaggcauauuuggcgcaaucgcggguuucauagaaaaugguugggagggaaugguggaugguugguacgguuucaggcaucaaaauucugagggaagaggacaagcagcagaucucaaaagcacucaagcagcaaucgaucaaaucaaugggaagcugaauagauugaucgggaaaaccaacgagaaauuccaucagauugaaaaagaauucucagaagucgaagggagaauucaggaccuugagaaauauguugaggacaccaaaauagaucucuggucauacaacgcggagcuucuuguugcccuggagaaccaacauacaauugaucuaacugacucagaaaugaacaaacuguuugaaaaaacaaagaagcaacugagggaaaaugcugaggauaugggcaaugguuguuucaaaauauaccacaaaugugacaaugccugcauaggaucaaucagaaauggaacuuaugaccacgauguauacagagaugaagcauuaaacaaccgguuccagaucaagggaguugagcugaagucaggguacaaagauuggauccuauggauuuccuuugccauaucauguuuuuugcuuuguguugcuuuguugggguucaucaugugggccugccaaaaaggcaacauuaggugcaacauuugcauuuga

SEQ ID NO: 37393 - RNA, 1701 nt, Artificial Sequence
  derived and/or modified CDS sequence (wt) from hemagglutinin__InfluenzaA__ADK98788
augaagacuaucauugcuuugagcuacauucuaugucugguuuucgcucaaaaacuuccuggaaaugacaacagcacggcaacgcugugccuugggcaccaugcaguaccaaacggaacgauagugaaaacaaucacgaaugaccaaauugaaguuacuaaugcuacugagcugguucagaguuccucaacaggugaaauaugcgacaguccucaucagauccuugauggagaaaacugcacacuaauagaugcucuauugggagacccucagugugauggcuuccaaaauaagaaaugggaccuuuuuguugaacgaagcaaagccuacagcaacuguuacccuuaugaugugccggauuaugccucccuuaggucacuaguugccucauccggcacacuggaguuuaacaaugaaagcuucaauuggacuggagucacucaaaacggaacaagcucugcuugcauaaggagaucuaauaacaguuucuuuaguagauugaauugguugacccacuuaaaauucaaauacccagcauugaacgugacuaugccaaacaaugaacaauuugacaaacuguacauuugggggguucaccacccggguacggacaaugaccaaaucuuccuguaugcucaagcaucaggaagaaucacaguaucuaccaaaagaagccaacaaacuguaaucccgaauaucggaucuagacccagaguaaggaauaucccuagcagaauaagcaucuauuggacaauaguaaaaccgggagacauacuuuugauuaacagcacagggaaucuaauugcuccuagggguuacuucaaaauacgaagugggaaaagcucaauaaugagaucagaugcacccauuggcaaaugcaauucugaaugcaucacuccaaauggaagcauucccaaugacaaaccauuccaaaauguaaacaggaucacauacggggccugucccagauauguuaagcaaaacacucugaaauuggcaacaggaaugcgaaauguaccagagaaacaaacuagaggcauauuuggcgcaaucgcggguuucauagaaaaugguugggagggaaugguggaugguugguacgguuucaggcaucaaaauucugagggaagaggacaagcagcagaucucaaaagcacucaagcagcaaucgaucaaaucaaugggaagcugaauagauugaucgggaaaaccaacgagaaauuccaucagauugaaaaagaauucucagaagucgaagggagaauccaggaccuugagaaauauguugaggacacuaaaauagaucucuggucauacaacgcggagcuucuuguugcccuggagaaccaacauacaauugaucuaacugacucagaaaugaacaaacuguuugaaaaaacaaagaagcaacugagggaaaaugcugaggauaugggcaaugguuguuucaaaauauaccacaaaugugacaaugccugcauaggaucaaucagaaauggaacuuaugaccacgauguauacagagaugaagcauugaacaaccgguuccagaucaagggaguugagcugaagucaggguacaaagauuggauccuauggauuuccuuugccauaucauguuuuuugcuuuguguugcuuuguugggguucaucaugugggccugccaaaaaggcaacauuaggugcaacauuugcauuuga

SEQ ID NO: 37394 - RNA, 1701 nt, Artificial Sequence; identical to SEQ ID NO: 35625
  derived and/or modified CDS sequence (wt) from hemagglutinin__InfluenzaA__ADK98799

SEQ ID NO: 37395 - RNA, 1701 nt, Artificial Sequence
  derived and/or modified CDS sequence (wt) from hemagglutinin__InfluenzaA__ADK98810
augaagacuaucauugcuuugagcuacauucuaugucugguuuucgcucaaaaacuuccuggaaaugacaacagcacggcaacgcugugccuugggcaccaugcaguaccaaacggaacgauagugaaaacaaucacgaaugaccaaauugaaguuacuaaugcuacugagcugguucagaguuccucaacaggugaaauaugcgacaguccucaucagauccuugauggagaaaacugcacacuaauagaugcucuauugggagacccucagugugauggcuuccaaaauaagaaaugggaccuuuuuguugaacgcagcaaagccuacagcaacuguuacccuuaugaugugccggauuaugccucccuuaggucacuaguugccucauccggcacacuggaguuuaacaaugaaagcuucaauuggacuggagucacucaaaacggaacaagcucugcuugcauaaggagaucuaauaacaguuucuuuaguagacugaauugguugacccacuuaaaauucaaauacccagcauuaaacgugacuaugccaaacaaugaacaauuugacaaauuguacauuugggggguucaccacccggguacggacaaugaccaaaccuuccuguaugcucaagcaucaggaagaaucacagucucuaccaaaagaagccaacaaacuguaaucccgaauaucggaucuagacccagaguaaggaauaucccuagcagaauaagcaucuauuggacaauaguaaaaccgggagacauacuuuugauuaacagcacagggaaucuaauugcuccuagggguuacuucaaaauacgaagugggaaaagcucaauaaugagaucagaugcacccauuggcaaaugcaauucugaaugcaucacuccaaauggaagcauucccaaugacaaaccauuccaaaauguaaacaggaucacauacggggccugucccagauauguuaagcaaaacacucugaaauuggcaacagggaugcgaaauguaccagagaaacaaacuagaggcauauuuggcgcaaucgcggguuucauagaaaaugguugggagggaaugguggaugguugguacgguuucaggcaucaaaauucugagggaagaggacaagcagcagaucucaaaagcacucaagcagcaaucgaucaaaucaaugggaagcugaauagauugaucgggaaaaccaacgagaaauuccaucagauugaaaaagaauucucagaagucgaagggagaauucaggaccuugagaaauauguugaggacaccaaaauagaucucuggucauacaacgcggagcuucuuguugcccuggagaaccaacauacaauugaucuaacugacucagaaaugaacaaacuguuugaaaaaacaaagaagcaacugagggaaaaugcugaggauaugggcaaugguuguuucaaaauauaccacaaaugugacaaugccugcauaggaucaaucagaaauggaacuuaugaccacaauguauacagagaugaagcauuaaacaaccgguuccagaucaaggaaguugagcugaagucaggguacaaagauuggauccuauggauuuccuuugccauaucauguuuuuugcuuuguguugcuuuguugggguucaucaugugggccugccaaaaaggcaacauuaggugcaacauuugcauuuga

SEQ ID NO: 37396 - RNA, 1701 nt, Artificial Sequence
  derived and/or modified CDS sequence (wt) from hemagglutinin__InfluenzaA__ADK98821
augaagacuaucauugcuuugagcuacauucuaugucugguuuucgcucaaaaacuuccuggaaaugacaacagcacggcaacgcugugccuugggcaccaugcaguaccaaacggaacgauagugaaaacaaucacgaaugaccaaauugaaguuacuaaugcuacugagcugguucagaguuccucaacaggugaaauaugcgacaguccucaucagauccuugauggaaaaaacugcacacuaauagaugcucuauugggagacccucagugugauggcuuccaaaauaagaaaugggaccuuuuuguugaacgcagcaaagccuacagcaacuguuacccuuaugaugugccggauuaugccucccuuaggucacuaguugccucauccggcacacuggaguuuaacaaugaaagcuucaauuggacuggagucacucaaaacggaacaagcucugcuugcauaaggagaucuaaaaacaguuucuuuaguagauugaauugguugacccacuuaaacuucaaauacccagcauugaacgugacuaugccaaacaaugaacaauuugacaaauuguacauuugggggguucaccacccggguacggacaaagaccaaaucuuccuguaugcucaagcaucaggaagaaucacagucucuaccaaaagaagccaacaaacugcaaucccgaauaucggaucuagacccagaguaaggaauaucccuagcagaauaagcaucuauuggacaauaguaaaaccgggagacauacuuuugauuaacagcacagggaaucuaauugcuccuagggguuacuucaaaauacgaagugggaaaagcucaauaaugagaucagaugcacccauuggcaaaugcaauucugaaugcaucacuccaaauggaagcauucccaaugacaaaccauuccaaaauguaaacaggaucacauacggggccugucccagauauguuaagcaaaacacucugaaauuggcaacagggaugcgaaauguaccagagaaacaaacuagaggcauauuuggcgcaaucgcggguuucauagaaaaugguugggagggaaugguggaugguugguacgguuucaggcaucaaaauucugagggaagaggacaagcagcagaucucaaaagcacucaagcagcaaucgaucaaaucaaugggaagcugaauagauugaucgggaaaaccaacgagaaauuccaucagauugaaaaagaauucucagaagucgaagggagaauucaggaccuugagaaauauguugaggacacuaaaauagaucucuggucauacaacgcggagcuucuuguugcccuggagaaccaacauacaauugaucuaacugacucagaaaugaacaaacuguuugaaaaaacaaggaagcaacugagggaaaaugcugaggauaugggcaaugguuguuucaaaauauaccacaaaugugacaaugccugcauaggaucaaucagaaauggaacuuaugaccacgauguauacagagaugaagcauuaaacaaccgguuucagaucaagggaguugagcugaagucaggguacaaagauuggauccuauggauuuccuuugccauaucauguuuuuugcuuuguguugcuuuguugggguucaucaugugggccugccaaaaaggcaacauuaggugcaacauuugcauuuga

SEQ ID NO: 37397 - RNA, 1701 nt, Artificial Sequence
  derived and/or modified CDS sequence (wt) from hemagglutinin__InfluenzaA__ADK98832
augaagacuaucauugcuuugagcuacauucuaugucugguuuucgcucaaaaacuuccuggaaaugacaacagcacggcaacgcugugccuugggcaccaugcaguaccaaacggaacgauagugaaaacaaucacgaaugaccaaauugaaguuacuaaugcuacugagcugguucagaguuccucaacaggugaaauaugcgacaguccucaucagauccuugauggagaaaacugcacacuaauagaugcucuauugggagacccucagugugauggcuuccaaaauaagaaaugggaccuuuuuguugaacgaagcaaagccuacagcaacuguuacccuuaugaugugccggauuaugccucccuuaggucacuaguugccucauccggcacacuggaguuuaacaaugaaagcuucaauuggacuggagucacucaaaacggaacaagcucugcuugcauaaggagaucuaauaacaguuucuuuaguagauugaauugguugacccacuuaaaauucaaauacccagcauugaacgugacuaugccaaacaaugaacaauuugacaaauuguacauuugggggguucaccacccggguacggacaaugaccaaaucuuccuguaugcucaagcaucaggaagaaucacaguaucuaccaaaagaagccaacaaacuguaaucccgaauaucggaucuagacccagaguaaggaauaucccuagcagaauaagcaucuauuggacaauaguaaaaccgggagacauacuuuugauuaacagcacagggaaucuaauugcuccuagggguuacuucaaaauacgaagugggaaaagcucaauaaugagaucagaugcacccauuggcaaaugcaauucugaaugcaucacuccaaauggaagcauucccaaugacaaaccauuccaaaauguaaacaggaucacauacggggccugucccagauauguuaagcaaaacacucugaaauuggcaacaggaaugcgaaauguaccagagaaacaaacuagaggcauauuuggcgcaaucgcggguuucauagaaaaugguugggagggaaugguggaugguugguacgguuucaggcaucaaaauucugagggaagaggacaagcagcagaucucaaaagcacucaagcagcaaucgaucaaaucaaugggaagcugaauagauugaucgggaaaaccaacgagaaauuccaucagauugaaaaagaauucucagaagucgaagggagaauccaggaccuugagaaauauguugaggacacuaaaauagaucucuggucauacaacgcggagcuucuuguugcccuggagaaccaacauacaauugaucuaacugacucagaaaugaacaaacuguuugaaaagacaaagaagcaacugagggaaaaugcugaggauaugggcaaugguuguuucaaaauauaccacaaaugugacaaugccugcauaggaucaaucagaaauggaacuuaugaccacgauguauacagagaugaagcauugaacaaccgguuccagaucaagggaguugagcugaagucaggguacaaagauuggauccuauggauuuccuuugccauaucauguuuuuugcuuuguguugcuuuguugggguucaucaugugggccugccaaaaaggcaacauuaggugcaacauuugcauuuga

SEQ ID NO: 37398 - RNA, 1701 nt, Artificial Sequence; identical to SEQ ID NO: 37376
  derived and/or modified CDS sequence (wt) from hemagglutinin__InfluenzaA__ADK98843

SEQ ID NO: 37399 - RNA, 1701 nt, Artificial Sequence
  derived and/or modified CDS sequence (wt) from hemagglutinin__InfluenzaA__ADK98854
augaagacuaucauugcuuugagcuacauucuaugucugguuuucacucaaaaacuuccuggaaaugacaacagcacggcaacgcugugccuugggcaccaugcaguaccaaacggaacgauagugaaaacaaucacgaaugaccaaauugaaguuacuaaugcuacugagcugguucagaguuccucaacaggugaaauaugcgacaguccucaucagauccuugauggagaaaacugcacacuaauagaugcucuauugggagacccucagugugauggcuuccaaaauaagaaaugggaccuuuuuguugaacgaagcaaagccuacagcaacuguuacccuuaugaugugccggauuaugccucccuuaggucacuaguugccucauccggcacacuggaguuuaacaaugaaagcuucaauuggacuggagucacucaaaacggaacaagcucugcuugcauaaggagaucuaauaacaguuucuuuaguagauugaauugguugacccacuuaaaauucaaauacccagcauugaacgugacuaugccaaacaaugaacaauuugacaaauuguacauuugggggguucaccacccggguacggacaaugaccaaaucuuccuguaugcucaagcaucaggaagaaucacaguaucuaccaaaagaagccaacaaacuguaaucccgaauaucggaucuagacccagaguaaggaauaucccuagcagaauaagcaucuauuggacaauaguaaaaccgggagacauacuuuugauuaacagcacagggaaucuaauugcuccuagggguuacuucaaaauacgaagugggaaaagcucaauaaugagaucagaugcacccauuggcaaaugcaauucugaaugcaucacuccaaauggaagcauucccaaugacaaaccauuccaaaauguaaacaggaucacauacggggccugucccagauauguuaagcaaaacacucuaaaauuggcaacaggaaugcgaaauguaccagagaaacaaacuagaggcauauuuggcgcaaucgcggguuucauagaaaaugguugggagggaaugguggaugguugguacgguuucaggcaucaaaauucugagggaagaggacaagcagcagaucucaaaagcacucaagcagcaaucgaucaaaucaaugggaagcugaauagauugaucgggaaaaccaacgagaaauuccaucagauugaaaaagaauucucagaagucgaagggagaauccaggaccuugagaaauauguugaggacacuaaaauagaucucuggucauacaacgcggagcuucuuguugcccuggagaaccaacauacaauugaucuaacugacucagaaaugaacaaacuguuugaaaaaacaaagaagcaacugagggaaaaugcugaggauaugggcaaugguuguuucaaaauauaccacaaaugugacaaugccugcauaggaucaaucagaaauggaacuuaugaccacgauguauacagagaugaagcauugaacaaccgguuccagaucaagggaguugagcugaagccaggguacaaagauuggauccuauggauuuccuuugccauaucauguuuuuugcuuuguguugcuuuguugggguucaucaugugggccugccaaaaaggcaacauuaggugcaacauuugcauuuga

SEQ ID NO: 37400 - RNA, 1701 nt, Artificial Sequence
  derived and/or modified CDS sequence (wt) from hemagglutinin__InfluenzaA__ADK98865
augaagacuaucauugcuuugagcuacauucuaugucugguuuucgcucaaaaacuuccuggaagugacaacagcacggcaacgcugugccuugggcaccaugcaguaccaaacggaacgauagugaaaacaaucacgaaugaccaaauugaaguuacuaaugcuacugagcugguucagaguuccucaacaggugaaauaugcgacaguccucaucagauccuugauggagaaaacugcacacuaauagaugcucuauugggagacccucagugugaugacuuccaaaauaagaaaugggaccuuuuuguugaacgcagcaaagccuacagcaacuguuacccuuaugaugugccggauuaugccucccuuaggucacuaguugccucauccggcacacuggaguuuaacaaugaaagcuucaauuggacuggagucacucagaacggaacaagcucugcuugcauaaggagaucuaguaacaguuucuuuaguagauugaacugguugacccacuuaagauucaaauacccagcauugaacgugacuaugccaaacaaugaacaauuugacaaauuguacauuugggggguucaccacccggguacggacaaugaccaaaucuuccuguaugcucaagcaucaggaagaaucacagucucuaccaaaagaagccaacaaacuguaaucccgaauaucggaucuagaccaagaguaaggaauaucccuagcagaauaagcaucuauuggacaauaguaaaaccgggagacauacuuuugauuaacagcacagggaaucuaauugcuccuagagguuacuucaaaauacgaagugggaaaagcucaauaaugagaucagaugcacccauuggcaaaugcaauucugaaugcaucacuccaaauggaagcauucccaaugacaaaccauuccaaaauguaaacaggaucacauacggggccugucccagauauguuaagcaaaacacucugaaauuggcaacagggaugcgaaauguaccagagaaacaaacuagaggcauauuuggcgcaaucgcggguuucauagaaaaugguugggagggaaugguggaugguugguacgguuucaggcaucaaaacucugagggaagaggacaagcagcagaucucaaaagcacucaagcagcaaucgaucaaaucaaugggaagcugaacagauugaucgggaaaaccaacgagaaauuccaucagauugaaaaagaauucucagaagucgaagggagaauucaggaccuugagaaauauguugaggacacuaaaauagaucucuggucauacaacgcggagcuucuuguagcccuggagaaccaacauacaauugaucuaacugacucagaaaugaacaaacuguuugaaaaaacaaagaagcaacugagggaaaaugcugaggauaugggcaaugguuguuucaaaauauaccacaaaugugacaaugccugcauaggaucaaucagaaauggaacuuaugaccacgauguauacagggaugaagcauuaaacaaccgguuccagaucaagggaguugagcugaagucaggguacaaagauuggauccuauggauuuccuuugccauaucauguuuuuugcuuuguguugcuuuguugggguucaucaugugggccugccaaaaaggcaacauuaggugcaacauuugcauuuga

SEQ ID NO: 37401 - RNA, 1701 nt, Artificial Sequence
  derived and/or modified CDS sequence (wt) from hemagglutinin__InfluenzaA__ADK98876
augaagacuaucauugcuuugagcuacauucuaugucugguuuucgcucaaaaacuuccuggaaaugacaacagcacggcaacgcugugccuugggcaccaugcaguaccgaacggaacgauagugaaaacaaucacgaaugaccaaauugaaguuacuaaugcuacugagcugguucagaauuccucaacaggugaaauaugcgacaguccccaucagauccuugauggaaaaaacugcacacuaauagaugcucuauugggagacccucagugugauggcuuccaaaauaagaaaugggaccuuuuuguugaacgcagcaaagccuacagcaacuguuacccuuaugaugugccggauuaugccucccuuaggucacuaguugccucauccggcacacuggaguuuaacaaugaaagcuucaauuggacuggagucacucaaaacggaacaagcucugcuugcauaaggagaucuaaaaacaguuucuuuaguagauugaauugguugacccacuuaaacuucaaauacccagcauugaacgugacuaugccaaacaauggacaauuugacaaauuguacauuugggggguucaccacccggguacggacaaagaccaaaucuuccuguaugcucaagcaucaggaagaaucacagucucuaccaaaagaagccaacaaacuguaaucccgaauaucggaucuagacccagaguaaggaauaucccuagcagaauaagcaucuauuggacaauaguaaaaccgggagacauacuuuugauuaacagcacagggaaucuaauugcuccuagggguuacuucaaaauacgaagugggaaaagcucaauaaugagaucagaugcacccauuggcaaaugcaauucugaaugcaucacuccaaauggaagcauucccaaugacaaaccauuccaaaauguaaacaggaucacauacggggccugucccagauauguuaagcaaaacacucugaaauuggcaacagggaugcgaaauguaccagagaaacaaacuagaggcauauuuggcgcaaucgcggguuucauagaaaaugguugggaaggaaugguggaugguugguacgguuucaggcaucaaaauucugagggaagaggacaagcagcagaucucaaaagcacucaagcagcaaucgaucaaaucaaugggaagcugaauagauugaucgggaaaaccaacgagaaauuccaucagauugaaaaagaauucucagaagucgaagggagaauucaggaccuugagaaauauguugaggacacuaaaauagaucucuggucauacaacgcggagcuucuuguugcccuggagaaccaacauacaauugaucuaacugacucagaaaugaacaaacuguuugaaaaaacaaagaagcaacugagggaaaaugcugaggauaugggcaaugguuguuucaaaauauaccacaaaugugacaaugccugcauaggaucaaucagaaauggaacuuaugaccacgauguauacagagaugaagcauuaaacaaccgguuucagaucaagggaguugagcugaagucaggguacaaagauuggauccuauggauuuccuuugccauaucauguuuuuugcuuuguguugcuuuguugggguucaucaugugggccugccaaaaaggcaacauuaggugcaacauuugcauuuga

SEQ ID NO: 37402 - RNA, 1701 nt, Artificial Sequence; identical to SEQ ID NO: 37376
  derived and/or modified CDS sequence (wt) from hemagglutinin__InfluenzaA__ADK98887

SEQ ID NO: 37403 - RNA, 1701 nt, Artificial Sequence; identical to SEQ ID NO: 37382
  derived and/or modified CDS sequence (wt) from hemagglutinin__InfluenzaA__ADK98898

SEQ ID NO: 37404 - RNA, 1701 nt, Artificial Sequence
  derived and/or modified CDS sequence (wt) from hemagglutinin__InfluenzaA__ADK98909
augaagacuaucauugcuuugagcuacauucuaugucugguuuucgcucaaaaacuuccuggaaaugacaacagcacggcaacgcugugccuugggcaucaugcaguaccaaacggaacgauagugaaaacaaucacgaaugaccaaauugaaguuacuaaugcuacugagcugguucagauuuccucaacaggugaaauaugcgacaguccucaucagauccuugauggagaaaacugcacacuaauagaugcucuauugggagacccucagugugauggcuuccaaaauaagaaaugggaccuuuuuguugaacgcagcaaagccuacagcaacuguuacccuuaugaugugccggauuaugccucccuuaggucacuaguugccucauccggcacacuggaguuuaacaaugaaagcuucaauuggacuggagucacucaaaacggaacaagcucugcuugcauaaggagaucuaauaacaguuucuuuaguagauugaauugguugacccacuuaaaauucaaauacccagcauuaaacgugacuaugccaaacaaugaacaauuugacaaauuguacauuugggggguucaccacccggguacggacaaugaccaaaucuuccuguaugcucaagcaucaggaagaaucacagucucuaccaaaagaagccaacaaacuguaaucccgaauaucggaucuagacccagaguaaggaauaucccuagcagaauaagcaucuauuggacaauaguaaaaccgggagacauacuuuugauuaacagcacagggaaucuaauugcuccuagggguuacuucaaaauacgaagugggaaaagcucaauaaugagaucagaugcacccauuggcaaaugcaauucugaaugcaucacuccaaauggaagcauucccaaugacaaaccauuccaaaauguaaacaggaucacauacggggccugucccagauauguuaagcaaaacacucugaaauuggcaacagggaugcgaaauguaccagagaaacaaacuagaggcauauuuggcgcaaucgcggguuucauagaaaaugguugggagggaaugguggaugguugguacgguuucaggcaucaaaauucugagggaagaggacaagcagcagaucucaaaagcacucaagcagcaaucgaucaaaucaaugggaaacugaauagauugaucgggaaaaccaacgagaaauuccaucagauugaaaaagaauucucagaagucgaagggagaauucaggaccuugagaaauauguugaggacaccaaaauagaucucuggucauacaacgcggagcuucuuguugcccuggagaaccaacauacaauugaucuaacugacucagaaaugaacaaacuguuugaaaaaacaaagaagcaacugagggaaaaugcugaggauaugggcaaugguuguuucaaaauauaccacaaaugugacaaugccuguauaggaucaaucagaaauggaacuuaugaccacgauguauacagagaugaagcauuaaacaaccgguuccagaucaagggaguugagcugaagucaggguacaaagauuggauccuauggauuuccuuugccauaucauguuuuuugcuuuguguugcuuuguugggguucaucaugugggccugccaaaaaggcaacauuaggugcaacauuugcauuuga

SEQ ID NO: 37405 - RNA, 1701 nt, Artificial Sequence
  derived and/or modified CDS sequence (wt) from hemagglutinin__InfluenzaA__ADK98920
augaagacuaucauugcuuugagcuacauucuaugucugguuuucgcucaaaaacuuccuggaaaugacaacagcacggcaacgcugugccuugggcaccaugcaguaccaaacggaacgauagugaaaacaaucacgaaugaccaaauugaaguuacuaaugcuacugagcugguucagaguuccucaacaggugaaauaugcgacaguccucaucagauccuugauggaaaaaacugcacacuaauagaugcucuauugggagacccucagugugauggcuuccaaaauaagaaaugggaccuuuuuguugaacgcggcaaagccuacagcaacuguuacccuuaugaugugccggauuaugccucccuuaggucacuaguugccucauccggcacacuggaguuuaacaaugaaagcuucaauuggacuggagucacucaaaacggaacaagcucugcuugcauaaggagaucuaaaaacaguuucuuuaguagauugaauugguugacccacuuaaacuucaaauacccagcauugaacgugacuaugccaaacaaugaacaauuugacaaauuguacauuugggggguucaccacccggguacggacaaagaccaaaucuuccuguaugcucaagcaucaggaagaaucacagucucuaccaaaagaagccaacaaacuguaaucccgaauaucggaucuagacccagaguaaggaauaucccuagcagaauaagcaucuauuggacaauaguaaaaccgggagacauacuuuugauuaacagcacagggaaucuaauugcuccuagggguuacuucaaaauacgaagugggaaaagcucaauaaugagaucagaugcacccauuggcaaaugcaauucugaaugcaucacuccaaauggaagcauucccaaugacaaaccauuccaaaauguaaacaggaucacauacggggccugucccagauauguuaagcaaagcacucugaaauuggcaacagggaugcgaaauguaccagagaaacaaacuagaggcauauuuggcgcaaucgcggguuucauagaaaaugguugggagggaaugguggaugguugguacgguuucaggcaucaaaauucugagggaagaggacaagcagcagaucucaaaagcacucaagcagcaaucgaucaaaucaaugggaagcugaauagauugaucgggaaaaccaacgagaaauuccaucagauugaaaaagaauucucagaagucgaagggagaauucaggaccuugagaaauauguugaggacacuaaaauagaucucuggucauacaacgcggagcuucuuguugcccuggagaaccaacauacaauugaucuaacugacucagaaaugaacaaacuguuugaaaaaacaaagaagcaacugagggaaaaugcugaggauaugggcaaugguuguuucaaaauauaccacaaaugugacaaugccugcauaggaucaaucagaaauggaacuuaugaccacgauguauacagagaugaagcauuaaacaaccgguuucagaucaagggaguugagcugaagucaggguacaaggauuggauccuauggauuuccuuugccauaucauguuuuuugcuuuguguugcuuuguugggguucaucaugugggccugccaaaaaggcaacauuaggugcaacauuugcauuuga

SEQ ID NO: 37406 - RNA, 1701 nt, Artificial Sequence
  derived and/or modified CDS sequence (wt) from hemagglutinin__InfluenzaA__ADK98931
augaagacuaucauugcuuugagcuacauucuaugucugguuuucgcucaaaaacuuccuggaaaugacaacagcacggcaacgcugugccuugggcaccaugcaguaccaaacggaacgauagugaaaacaaucacgaaugaccaaauugaaguuacuaaugcuacugagcugguucagaguuccucaacaggugaaauaugcgacaguccucaucagauccuugauggagaaaacugcacacuaauagaugcucuauugggagacccucagugugauggcuuccaaaauaagaaaugggaccuguuuguugaacgcagcaaagccuacagcaacuguuacccuuaugaugugccggauuaugccucccuuaggucacuaguugccucauccggcacacuggaguuuaacaaugaaagcuucaauuggacuggagucacucaaaacggaacaagcucugcuugcauaaggagaucuaauaacaguuucuuuaguagauugaauugguugacccacuuaaaauucaaauacccagcauuaaacgugacuaugccaaacaaugaacaauuugacaaauuguacauuugggggguucaccacccggguacggacaaugaccaaaucuuccuguaugcucaagcaucaggaagaaucacaguuucuaccaaaagaagccaacaaacuguaaucccgaauaucggaucuagacccagaguaaggaauaucccuagcagaauaagcaucuauuggacaauaguaaaaccgggagacauacuuuugauuaacagcacagggaaucuaauugcuccuagggguuacuucaaaauacgaagugggaaaagcucaauaaugagaucagaugcacccauuggcaaaugcaauucugaaugcaucacuccaaauggaagcauucccaaugacaaaccauuccaaaauguaaacaggaucacauacggggccugucccagauauguuaagcaaaacacucugaaauuggcaacagggaugcgaaauguaccagagaaacaaacuagaggcauauuuggcgcaaucgcggguuucauagaaaaugguugggagggaaugguggaugguugguacgguuucaggcaucaaaauucugagggaagaggacaagcagcagaucucaaaagcacucaagcagcaaucgaucaaaucaaugggaagcugaauagauugaucgggaaaaccaacgagaaauuccaucagauugaaaaagaauucucagaagucgaagggagaauucaggaccuugagaaauauguugaggacaccaaaauagaucucuggucauacaacgcggagcuucuuguugcccuggagaaccaacauacaauugaucuaacugacucagaaaugaacaaacuguuugaaaaaacaaagaagcaacugagggaaaaugcugaggauaugggcaaugguuguuucaaaauauaccacaaaugugacaaugccugcauaggaucaaucagaaauggaacuuaugaccacgauguauacagagacgaagcauuaaacaaccgguuccagaucaagggaguugagcugaagucaggguacaaagauuggauccuauggauuuccuuugccauaucauguuuuuugcuuuguguugcuuuguugggguucaucaugugggccugccaaaaaggcaacauuaggugcaacauuugcauuuga

SEQ ID NO: 37407 - RNA, 1701 nt, Artificial Sequence
  derived and/or modified CDS sequence (wt) from hemagglutinin__InfluenzaA__ADK98942
augaagacuaucauugcuuugagcuacauccuaugucugguuuucgcucaaaaacuuccuggaaaugacaacagcacggcaacgcugugccuugggcaccaugcaguaccaaacggaacgauagugaaaacaaucacgaaugaccaaauugaaguuacuaaugcuacugagcugguucagaguuccucaacaggugaaauaugcgacaguccucaucagauccuugauggagaaaacugcacacuaauagaugcucuauugggagacccucagugugauggcuuccaaaauaagaaaugggaccuuuuuguugaacgcagcaaagccuacagcaacuguuacccuuaugaugugccggauuaugccucccuuaggucacuaguugccucauccggcacacuggaguuuaacaaugaaagcuucaauuggacuggagucacucaaaacggaacaagcucugcuugcauaaggagaucuaauaacaguuucuuuaguagauugaauugguugacccacuuaaaauucaaauacccagcauuaaacgugacuaugccaaacaaugaacaauuugacaaauuguauauuugggggguucaccacccggguacggacaaugaccaaaucuuccuguaugcucaagcaucaggaagaaucacagucucuaccaaaagaagccaacaaacuguaaucucgaauaucggaucuagacccagaguaaggaauaucccuagcagaauaagcaucuauuggacaauaguaaaaccgggagacauacuuuugauuaacagcacagggaaucuaauugcuccuagggguuacuucaaaauacgaagugggaaaagcucaauaaugagaucagaugcacccauuggcaaaugcaauucugaaugcaucacuccaaauggaagcauucccaaugacaaaccauuccaaaauguaaacaggaucacauacggggccugucccagauauguuaagcaaaacacucugaaauuggcaacagggaugcgaaauguaccagagaaacaaacuagaggcauauuuggcgcaaucgcggguuucauagaaaaugguugggagggaaugguggaugguugguacgguuucaggcaucaaaauucugagggaagaggacaagcagcagaucucaaaagcacucaagcagcaaucgaucaaaucaaugggaagcugaauagauugaucgggaaaaccaacgagaaauuccaucagauugaaaaagaauucucagaagucgaagggagaauucaggaccuugagaaauauguugaggacaccaaaauagaucucuggucauacaacgcggagcuucuuguugcccuggagaaccaacauacaauugaucuaacugacucagaaaugaacaaacuguuugaaaaaacaaagaagcaacugagggaaaaugcugaggauaugggcaaugguuguuucaaaauauaccacaaaugugacaaugccugcauaggaucaaucagaaauggaacuuaugaccacaauguauacagagaugaagcauuaaacaaccgguuccagaucaagggaguugagcugaagucaggguacaaagauuggauccuauggauuuccuuugccauaucauguuuuuugcuuuguguugcuuuguugggguucaucaugugggccugccaaaaaggcaacauuaggugcaacauuugcauuuga

SEQ ID NO: 37408 - RNA, 1701 nt, Artificial Sequence
  derived and/or modified CDS sequence (wt) from hemagglutinin__InfluenzaA__ADK98953
augaagacuaucauugcuuugagcuacaugcuaugucugguuuucgcucaaaaacuuccuggaaaugacaacagcacggcaacgcugugccuugggcaccaugcaguaccaaacggaacgauagugaaaacaaucacgaaugaccaaauugaaguuacuaaugcuacggagcugguucagaguuccucaacaggugaaauaugcgacaguccucaucagauccuugauggagaaaacugcacacuaauagaugcucuauugggagacccucagugugauggcuuccaaaauaagaaaugggaccuuuuuguugaacgcagcaaagccuacagcaacuguuacccuuaugaugugccggauuaugccucccuuaggucacuaauugccucauccggcacacuggaguuuaacaaugaaagcuucaauuggacuggagucacucaaaacggaacaagcucugcuugcauaaggagaucuaauaacaguuucuuuaguagauugaauugguugacccacuuaaaauucaaauacccagcauuaaacgugacuaugccaaacaaugaacaauuugacaaauuguacauuugggggguucaccacccggguacggacaaugaccaaaucuuccuguaugcucaagcaucaggaagaaucacagucucuaccaaaagaagccaacaaacuguaaucccgaauaucggaucuagacccagaguaaggaauaucccuagcagaauaagcaucuauuggacaauaguaaaaccgggagacauacuuuugauuaacagcacagggaaucuaauugcuccuagggguuacuucaaaauacgaagugggaaaagcucaauaaugagaucagaugcacccauuggcaaaugcaauucugaaugcaucacuccaaauggaagcauucccaaugacaaaccauuccaaaauguaaacaggaucacauacggggccugucccagauauguuaagcaaaacacucugaaauuggcaacagggaugcgaaauguaccagagaaacaaacuagaggcauauuuggcgcaaucgcggguuucauagaaaaugguugggagggaaugguggaugguugguacgguuucagacaucaaaauucugagggaagaggacaagcagcagaucucaaaagcacucaagcagcaaucgaucaaaucaaugggaagcugaauagauugaucgggaaaaccaacgagaaauuccaucagauugaaaaagaauucucagaagucgaagggagaauucaggaccuugagaaauauguugaggacaccaaaauagaucucuggucauacaacgcggagcuucuuguugcccuggagaaccaacauacaauugaucuaacugacucagaaaugaacaaacuguuugaaaaaacaaagaagcaacugagggaaaaugcugaggauaugggcaaugguuguuucaaaauauaccacaaaugugacaaugccugcauaggaucaaucagaaauggaacuuaugaccacgauguauacagagaugaagcauuaaacaaccgguuccagaucaagggaguugagcugaagucaggguacaaagauuggauccuauggauuuccuuugccauaucauguuuuuugcuuuguguugcuuuguugggguucaucaugugggccugccaaaaaggcaacauuaggugcaacauuugcauuuga

SEQ ID NO: 37409 - RNA, 1701 nt, Artificial Sequence
  derived and/or modified CDS sequence (wt) from hemagglutinin__InfluenzaA__ADK98964
augaagacuaucauugcuuugagcuacauucuaugucugguuuucgcucaaaaacuuccuggaaaugacaacagcacggcaacgcugugccuugggcaccaugcaguaccaaacggaacgauagugaaaacaaucacgaaugaccaaauugaaguuacuaaugcuacugagcugguucagaguuccucaacaggugaaauaugcgacaguccucaucagauccuugauggagaaaacugcacacuaauagaugcucuauugggagacccucagugugauggcuuccaaaauaagaaaugggaccuuuuuguugaacgaagcaaagccuacagcaacuguuacccuuaugaugugccggauuaugccucccuuaggucacuaguugccucauccggcacacuggaguuuaacaaugaaagcuucaauuggacuggagucacucaaaacggaacaagcucugcuugcauaaggagaucuaauaacaguuucuuuaguagauugaauugguugacccacuuaaaauucaaauacccagcauugaacgugacuaugccaaacaaugaacaauuugacaaauuguacauuugggggguucaccacccggguacggacaaugaccaaaucuuccuguaugcucaagcaucaggaagaaucacaguaucuaccaaaagaagccaacaaacuguaaucccgaauaucggaucuagacccagaguaaggaauaucccuagcagaauaagcaucuauuggacaauaguaaaaccgggagacauacuuuugauuaacagcacagggaaucuaauugcuccuagggguuacuucaaaauacgaagugggaaaagcucaauaaugagaucagaugcacccauuggcaaaugcaauucugaaugcaucacuccaaauggaagcauucccaaugacaaaccauuccaaaauguaaacaggaucacauacggggccugucccagauauguuaagcaaaacacucugaaauuggcaacaggaaugcgaaauguaccagagaaacaaacuagaggcauauuuggcgcaaucgcggguuucauagaaaaugguugggagggaaugguggaugguugguacgguuucaggcaucaaaauucugagggaagaggacaagcagcagaucucaaaagcacucaagcagcaaucgaucaaaucaaugggaagcugaauagauugaucgggaaaaccaacgagaaauuccaucagauugaaaaagaauucucagaagucgaagggagaauccaggaccuugagaaauauguugaggacacuaaaauagaucucuggucauacaacgcggagcuucuuguugcccuggagaaccaacauacaauugaucuaacugacucagagaugaacaaacuguuugaaaaaacaaagaagcaacugagggaaaaugcugaggauaugggcaaugguuguuucaaaauauaccacaaaugugacaaugccugcauaggaucaaucagaaauggaacuuaugaccacgauguauacagagaugaagcauugaacaaccgguuccagaucaaaggaguugagcugaagucaggguacaaagauuggauccuauggauuuccuuugccauaucauguuuuuugcuuuguguugcuuuguugggguucaucaugugggccugccaaaaaggcaacauuaggugcaacauuugcauuuga

SEQ ID NO: 37410 - RNA, 1701 nt, Artificial Sequence; identical to SEQ ID NO: 37363
  derived and/or modified CDS sequence (wt) from hemagglutinin__InfluenzaA__ADK98975

SEQ ID NO: 37411 - RNA, 1701 nt, Artificial Sequence; identical to SEQ ID NO: 37408
  derived and/or modified CDS sequence (wt) from hemagglutinin__InfluenzaA__ADK98986

SEQ ID NO: 37412 - RNA, 1701 nt, Artificial Sequence; identical to SEQ ID NO: 35625
  derived and/or modified CDS sequence (wt) from hemagglutinin__InfluenzaA__ADK98997

SEQ ID NO: 37413 - RNA, 1701 nt, Artificial Sequence; identical to SEQ ID NO: 37408
  derived and/or modified CDS sequence (wt) from hemagglutinin__InfluenzaA__ADK99008

SEQ ID NO: 37414 - RNA, 1701 nt, Artificial Sequence
  derived and/or modified CDS sequence (wt) from hemagglutinin__InfluenzaA__ADK99030
augaagacuaucauugcuuugagcuacauucuaugucugguuuucgcucaaaaacuuccuggaaaugacaacagcacggcaacgcugugccuugggcaccaugcaguaccaaacggaacgauagugaaaacaaucacgaaugaccaaauugaaguuacuaaugcuacugagcugguucagaguuccucaacaggugaaauaugcgacaguccucaucagauccuugauggaaaaaacugcacacuaauagaugcucuauugggagacccucagugugauggcuuccaaaauaagaaaugggaccuuuuuguugaacgcagcaaagccuacagcaacuguuacccuuaugaugugccggauuaugccucccuuaggucacuaguugccucauccggcacacuggaguuuaacaaugaaagcuucaauuggacuggagucacucaaaacggaacaagcucugcuugcauaaggagaucuaaaaacaguuucuuuaguagauugaauugguugacccacuuaaacuucaaauacccagcauugaacgugacuaugccaaacaaugaacgauuugacaaauuguacauuugggggguucaccacccggguacggacaaagaccaaaucuuccuguaugcucaagcaucaggaagaaucacagucucuaccaaaagaagccaacaaacuguaaucccgaauaucggaucuagacccagaguaaggaauaucccuagcagaauaagcaucuauuggacaauaguaaaaccgggagacauacuuuugauuaacagcacagggaaucuaauugcuccuagggguuacuucaaaauacgaagugggaaaagcucaauaaugagaucagaugcacccauuggcaaaugcaauucugaaugcaucacuccaaauggaagcauucccaaugacaaaccauuccaaaauguaaacaggaucacauacggggccugucccagauauguuaagcaaaacacucugaaauuggcaacagggaugcgaaauguaccagagaaacaaacuagaggcauauuuggcgcaaucgcggguuucauagaaaaugguugggagggaaugguggaugguugguacgguuucaggcaucaaaauucugagggaagaggacaagcagcagaucucaaaagcacucaagcagcaaucgaucaaaucaaugggaagcugaauagauugaucgggaaaaccaacgagaaauuccaucagauugaaaaagaauucucagaagucgaagggagaauucaggaccuugagaaauauguugaggacacuaaaauagaucucuggucauacaacgcggagcuucuuguugcccuggagaaccaacauacaauugaucuaacugacucagaaaugaacaaacuguuugaaaaaacaaagaagcaacugagggaaaaugcugaggauaugggcaaugguuguuucaaaauauaccacaaaugugacaaugccugcauaggaucaaucagaaauggaacuuaugaccacgauguauacagagaugaagcauuaaacaaccgguuucagaucaagggaguugagcugaagucaggguacaaagauuggauccuauggauuuccuuugccauaucauguuuuuugcuuuguguugcuuuguugggguucaucaugugggccugccaaaaaggcaacauuaggugcaacauuugcauuuga

SEQ ID NO: 37415 - RNA, 1701 nt, Artificial Sequence
  derived and/or modified CDS sequence (wt) from hemagglutinin__InfluenzaA__ADK99041
augaagacuaucauugcuuugagcuacauucuaugucugguuuucgcucaaaaacuuccuggaaaugacaacagcacggcaacgcugugccuugggcaccaugcaguaccaaacggaacgauagugaaaacaaucgcgaaugaccaaauugaaguuacuaaugcuacugagcugguucagaguuccucaacaggugaaauaugcgacaguccucaucagauccuugauggagaaaacugcacacuaauagaugcucuauugggagacccucagugugauggcuuccaaaauaagaaaugggaccuuuuuguugaacgcagcaaagccuacagcaacuguuacccuuaugaugugccggauuaugccucccuuaggucacuaguugccucauccggcacacuggaguuuaacaaugaaagcuucaauuggacuggagucacucaaaacggaacaagcucugcuugcauaaggagaucuaauaacaguuucuuuaguagauugaauugguugacccacuuaaaauucaaauacccagcauuaaacgugacuaugccaaacaaugaacaauuugacaaauuguacauuugggggguucaccacccggguacggacaaugaccaaaucuuccuguaugcucaagcaucaggaagaaucacagucucuaccaaaagaagccaacaaacuguaaucccgaauaucggaucuagacccagaguaaggaauaucccuagcagaauaagcaucuauuggacaauaguaaaaccgggagacauacuuuugauuaacagcacagggaaucuaauugcuccuagggguuacuucaaaauacgaagugggaaaagcucaauaaugagaucagaugcacccauuggcaaaugcaauucugaaugcaucacuccaaauggaagcauccccaaugacaaaccauuccaaaauguaaacaggaucacauacggggccugucccagauauguuaagcaaaacacucugaaauuggcaacagggaugcgaaauguaccagagaaacaaacuagaggcauauuuggugcaaucgcggguuucauagaaaaugguugggagggaaugguggaugguugguacgguuucaggcaucaaaauucugagggaagaggacaagcagcagaucucaaaagcacucaagcagcaaucgaucaaaucaaugggaagcugaauagauugaucgggaaaaccaacgagaaauuccaucagauugaaaaagaauucucagaagucgaggggagaauucaggaccuugagaaauauguugaagacaccaaaauagaucucuggucauacaacgcggagcuucuuguugcccuggagaaccaacauacaauugaucuaacugacucagaaaugaacaaacuguuugaaaaaacaaagaagcaacugagggaaaaugcugaggauaugggcaaugguuguuucaaaauauaccacaaaugugacaaugccugcauaggaucaaucagaaauggaacuuaugaccacgauguauacagagaugaagcauuaaacaaccgguuccagaucaagggaguugagcugaagucaggguacaaagauuggauccuauggauuuccuuugccauaucauguuuuuugcuuuguguugcuuuguugggguucaucaugugggccugccaaaaaggcaacauuaggugcaacauuugcauuuga

SEQ ID NO: 37416 - RNA, 1701 nt, Artificial Sequence; identical to SEQ ID NO: 37380
  derived and/or modified CDS sequence (wt) from hemagglutinin__InfluenzaA__ADK99063

SEQ ID NO: 37417 - RNA, 1701 nt, Artificial Sequence; identical to SEQ ID NO: 37392
  derived and/or modified CDS sequence (wt) from hemagglutinin__InfluenzaA__ADK99085

SEQ ID NO: 37418 - RNA, 1701 nt, Artificial Sequence; identical to SEQ ID NO: 37382
  derived and/or modified CDS sequence (wt) from hemagglutinin__InfluenzaA__ADK99096

SEQ ID NO: 37419 - RNA, 1701 nt, Artificial Sequence; identical to SEQ ID NO: 37382
  derived and/or modified CDS sequence (wt) from hemagglutinin__InfluenzaA__ADK99107

SEQ ID NO: 37420 - RNA, 1701 nt, Artificial Sequence
  derived and/or modified CDS sequence (wt) from hemagglutinin__InfluenzaA__ADK99118
augaagacuaucauugcuuugagcuacauucuaugucugguuuucgcucaaaaacuuccuggaaaugacaacagcacggcaacgcugugccuugggcaccaugcaguaccaaacggaacgauagugaaaacaaucacgaaugaccaaauugaaguuacuaaugcuacugagcugguucagaguuccucaacaggugaaauaugcgacauuccucaucagauccuugauggaaaaaacugcacacuaauagaugcucuauugggagacccucagugugauggcuuccaaaauaagaaaugggaccuuuuuguugaacgcagcaaagccuacagcaacuguuacccuuaugaugugccggauuaugccucccuuaggucacuaguugccucauccggcacacuggaguuuaacaaugaaagcuucaauuggacuggagucacucaaaacggaacaagcucugcuugcauaaggagaucaaaaaacaguuucuuuaguagauugaauugguugacccacuuaaacuucaaauacccagcauugaacgugacuaugccaaacaaugaacaauuugacaaauuguacauuugggggguucaccacccggguacggacaaagaccaaaucuuccuguaugcucaagcaucaggaagaaucacagucucuaccaaaagaagccaacaaacuguaaucccgaauaucggaucuagacccagaguaaggaauaucccuagcagaauaagcaucuauuggacaauaguaaaaccgggagacauacuuuugauuaacagcacagggaaucuaauugcuccuagggguuacuucaaaauacgaagugggaaaagcucaauaaugagaucagaugcacccauuggcaaaugcaauucugaaugcaucacuccaaauggaagcauucccaaugacaaaccauuccaaaauguaaacaggaucacauacggggccugucccagauauguuaagcaaagcacucugaaauuggcaacagggaugcgaaauguaccagagaaacaaacuagaggcauauuuggcgcaaucgcggguuucauagaaaaugguugggagggaaugguggaugguugguacgguuucaggcaucaaaauucugagggaagaggacaagcagcagaucucaaaagcacucaagcagcaaucgaucaaaucaaugggaagcugaauagauugaucgggaaaaccaacgagaaauuccaucagauugaaaaagaauucucagaagucgaagggagaauucaggaccuugagaaauauguugaggacacuaaaauagaucucuggucauacaacgcggagcuucuuguugcccuggagaaccaacauacaauugaucuaacugacucagaaaugaacaaacuguuugaaaaaacaaagaagcaacugagggaaaaugcugaggauaugggcaaugguuguuucaaaauauaccacaaauguaacaaugcaugcauaggaucaaucagaaauggaacuuaugaccacgauguauacagagaugaagcauuaaacaaccgguuucagaucaagggaguugagcugaagucaggguacaaggauuggauccuauggauuuccuuugccauaucaugcuuuuugcuuuguguugcuuuguugggguucaucaugugggccugccaaaaaggcaacauuaggugcaacauuugcauuuga

SEQ ID NO: 37421 - RNA, 1701 nt, Artificial Sequence
  derived and/or modified CDS sequence (wt) from hemagglutinin__InfluenzaA__ADK99129
augaagacuaucauugcuuugagcuacauucuaugucugguuuucgcucaaaaacuuccuggaaaugacaacagcacggcaacgcugugccuugggcaccaugcaguaccaaacggaacgauagugaaaacaaucacgaaugaccaaauugaaguuacuaaugcuacugagcugguucagaguuccucaacaggugaaauaugcgacaguccucaucagauccuugauggaaaaaacugcacacuaauagaugcucuauugggagacccucagugugauggcuuccaaaauaagaaaugggaccuuuuuguugaacgcagcaaagccuacagcaacuguuacccuuaugaugugccggauuaugccucccuuaggucacuaguugccucauccggcacacuggaguuuaacaaugaaagcuucaauuggacuggagucacucaaaacggaacaagcucugcuugcauaaggagaucaaaaaacaguuucuuuaguagauugaauugguugacccacuuaaacuucaaauacccagcauugaacaugacuaugccaaacaaugaacaauuugacaaauuguacauuugggggguucaccacccggguacggacaaagaccaaaucuuccuguaugcucaagcaucaggaagaaucacagucucuaccaaaagaagccaacaaacuguaaucccgaauaucggaucuagacccagaguaaggaauaucccuagcagaauaagcaucuauuggacaauaguaaaaccgggagacauacuuuugauuaacagcacagggaaucuaauugcuccuagggguuacuucaaaauacgaagugggaaaagcucaauaaugagaucagaugcacccauuggcaaaugcaauucugaaugcaucacuccaaauggaagcauucccaaugacaaaccauuccaaaauguaaacaggaucacauacggggccugucccagauauguuaagcaaagcacucugaaauuggcaacagggaugcgaaauguaccagagaaacaaacuagaggcauauuuggcgcaaucgcggguuucauagaaaaugguugggagggaaugguggaugguugguacgguuucaggcaucaaaauucugagggaagaggacaagcagcagaucucaaaagcacucaagcagcaaucgaucaaaucaaugggaagcugaauagauugaucgggaaaaccaacgagaaauuccaucagauugaaaaagaauucucagaagucgaagggagaauucaggaccuugagaaauauguugaggacacuaaaauagaucucuggucauacaacgcggagcuucuuguugcccuggagaaccaacauacaauugaucuaacugacucagaaaugaacaaacuguuugaaaaaacaaagaagcaacugagggaaaaugcugaggauaugggcaaugguuguuucaaaauauaccacaaauguaacaaugcaugcauaggaucaaucagaaauggaacuuaugaccacgauguauacagagaugaagcauuaaacaaccgguuucagaucaagggaguugagcugaagucaggguacaaggauuggauccuauggauuuccuuugccauaucaugcuuuuugcuuuguguugcuuuguugggguucaucaugugggccugccaaaaaggcaacauuaggugcaacauuugcauuuga

SEQ ID NO: 37422 - RNA, 1701 nt, Artificial Sequence; identical to SEQ ID NO: 37363
  derived and/or modified CDS sequence (wt) from hemagglutinin__InfluenzaA__ADK99140

SEQ ID NO: 37423 - RNA, 1701 nt, Artificial Sequence
  derived and/or modified CDS sequence (wt) from hemagglutinin__InfluenzaA__ADK99151
augaagacuaucauugcuuugagcuacauucuaugucugguuuucgcucaaaaacuuccuggaaaugacaacagcacggcaacgcugugccuugggcaccaugcaguaccaaacggaacgauagugaaaacaaucacgaaugaccaaauugaaguuacuaaugcuacugagcugguucagaguuccucaacaggugaaauaugcgacaguccucaucagauccuugauggaaaaaacugcacacuaauagaugcucuauugggagacccucagugugauggcuuacaaaauaagaaaugggaccuuuuuguugaacgcagcaaagccuacagcaacuguuacccuuaugaugugccggauuaugccucccuuaggucacuaguugccucauccggcacacuggaguuuaacaaugaaagcuucaauuggacuggagucacucaaaacggaacaagcucugcuugcauaaggagaucuaaaaacaguuucuuuaguagauugaauugguugacccacuuaaacuucaaauacccagcauugaacgugacuaugccaaacaaugaacaauuugacaaauuguacauuugggggguucaccacccggguacggacaaagaccaaaucuuccuguaugcucaagcaucaggaagaaucacagucucuaccaaaagaagccaacaaacugcaaucccgaauaucggaucuagacccagaguaaggaauaucccuagcagaauaagcaucuauuggacaauaguaaaaccgggagacauacuuuugauuaacagcacagggaaucuaauugcuccuagggguuacuucaaaauacgaagugggaaaagcucaauaaugagaucagaugcacccauuggcaaaugcaauucuaaaugcaucaccccaaauggaagcauucccaaugacaaaccauuccaaaauguaaacaggaucacauacggggccugucccagauauguuaagcaaaacacucugaaauuggcaacagggaugcgaaauguaccagagaaacaaacuagaggcauauuuggcgcaaucgcggguuucauagaaaaugguugggagggaaugguggaugguugguacgguuucaggcaucaaaauucugagggaagaggacaagcagcagaucucaaaagcacucaagcagcaaucgaucaaaucaaugggaagcugaauagauugaucgggaaaaccaacgagaaauuccaucagauugaaaaagaauucucagaagucgaagggagaauucaggaccuugagaaauauguugaggacacuaaaauagaucucuggucauacaacgcggagcuucuuguugcccuggagaaccaacauacaauugaucuaacugacucagaaaugaacaaacuguuugaaaaaacaaagaagcaacugagggaaaaugcugaggauaugggcaaugguuguuucaaaauauaccacaaaugugacaaugccugcauaggaucaaucagaaauggaacuuaugaccacgauguauacagagaugaagcauuaaacaaccgguuucagaucaagggaguugagcugaagucaggguacaaagauuggauccuauggauuuccuuugccauaucauguuuuuugcuuuguguugcuuuguugggguucaucaugugggccugccaaaaaggcaacauuaggugcaacauuugcauuuga

SEQ ID NO: 37424 - RNA, 1701 nt, Artificial Sequence
  derived and/or modified CDS sequence (wt) from hemagglutinin__InfluenzaA__ADK99162
augaagacuaucauugcuuugagcuacauucuaugucugguuuucgcucaaaaacuuccuggaaaugacaacagcacggcaacgcugugccuugggcaccaugcaguaccaaacggaacgauagugaaaacaaucacgaaugaccaaauugaaguuacuaaugcuacugagcugguucagaguuccucaacaggugaaauaugcgacaguccucaucagauccuugauggaaaaaacugcacacuaauagaugcucuauugggagacccucagugugauggcuuccaaaauaagaaaugggaccuuuuuguugaacgcagcaaagccuacagcaacuguuacccuuaugaugugccggauuaugccucccuuaggucacuaguugccucauccggcacacuggaguuuaacaaugaaagcuucaauuggacuggagucacucaaaacggaacaagcucugcuugcauaaggagaucaaaaaacaguuucuuuaguagauugaauugguugacccacuuaaacuucaaauacccagcauugaacgugacuaugccaaacaaugaacaauuugacaaauuguacauuugggggguucaccacccggguacggacaaagaccaaaucuuccuguaugcucaagcaucaggaagaaucacagucucuaccaaaagaagccaacaaacuguaaucccgaauaucggaucuagacccagaguaaggaauaucccuagcagaauaagcaucuauuggacaauaguaaaaccgggagacauacuuuugauuaacagcacagggaaucuaauugcuccuagggguuacuucaaaauacgaagugggaaaagcucaauaaugagaucagaugcacccauuggcaaaugcaauucugaaugcaucacuccaaauggaagcauucccaaugacaaaccauuccaaaauguaaacaggaucacauacggggccugucccagauauguuaagcaaagcacucugaaauuggcaacagggaugcgaaauguaccagagaaacaaacuagaggcauauuuggcgcaaucgcggguuucauagaaaaugguugggagggaaugguggaugguugguacgguuucaggcaucaaaauucugagggaagaggacaagcagcagaucucaaaaguacucaagcagcaaucgaucaaaucaaugggaagcugaauagauugaucgggaaaaccaacgagaaauuccaucagauugaaaaagaauucucagaagucgaagggagaauucaggaccuugagaaauauguugaggacacuaaaauagaucucuggucauacaacgcggagcuucuuguugcccuggagaaccaacauacaauugaucuaacugacucagaaaugaacaaacuguuugaaaaaacaaagaagcaacugagggaaaaugcugaggauaugggcaaugguuguuucaaaauauaccacaaaugugacaaugccugcauaggaucaaucagaaauggaacuuaugaccacgauguauacagagaugaagcauuaaacaaccgguuucagaucaagggaguugagcugaagucaggguacaaggauuggauccuauggauuuccuuugccauaucauguuuuuugcuuuguguugcuuuguugggguucaucaugugggccugccaaaaaggcaacauuaggugcaacauuugcauuuga

SEQ ID NO: 37425 - RNA, 1701 nt, Artificial Sequence
  derived and/or modified CDS sequence (wt) from hemagglutinin__InfluenzaA__ADK99173
augaagacuaucauugcuuugagcuacauucuaugucugguuuucgcucaaaaacuuccuggaaaugacaacagcacggcaacgcugugccuugggcaccaugcaguaccaaacggaacgauagugaaaacaaucacgaaugaccaaauugaaguuacuaaugcuacugagcugauucagaguuccucaacaggugaaauaugcgacaguccucaucagauccuugauggagaaaacugcacacuaauagaugcucuauugggagacccucagugugauggccuccaaaauaagaaaugggaccuuuuuguugaacgaagcaaagccuacagcaacuguuacccuuaugaugugccggauuaugccucccuuaggucacuaguugccucauccggcacacuggaguuuaacaaugaaagcuucaauuggacuggagucacucaaaacggaacaagcucugcuugcauaaggagaucuaauaacaguuucuuuaguagauugaauugguugacccacuuaaaauucaaauacccagcauugaacgugacuaugccaaacaaugaacaauuugacaaauuguacauuugggggguucaccacccggguacggacaaugaccaaaucuuccuguaugcucaagcaucaggaagaaucacaguaucuaccaaaagaagccaacaaacuguaaucccgaauaucggaucuagacccagaguaaggaauaucccuagcagaauaagcaucuauuggacaauaguaaaaccgggagacauacuuuugauuaacagcacagggaaucuaauugcuccuagggguuacuucaaaauacgaagugggaaaagcucaauaaugagaucagaugcacccauuggcaaaugcaauucugaaugcaucacuccaaauggaagcauucccaaugacaaaccauuccaaaauguaaacaggaucacauacggggccugucccagauauguuaagcaaaacacucuaaaauuggcaacaggaaugcgaaauguaccagagaaacaaacuagaggcauauuuggcgcaaucgcggguuucauagaaaaugguugggagggaaugguggaugguugguacgguuucaggcaucaaaauucugagggaagaggacaagcagcagaucucaaaagcacucaagcagcaaucgaucaaaucaaugggaagcugaauagauugaucgggaaaaccaacgagaaauuccaucagauugaaaaagaauucucagaagucgaagggagaauccaggaccuugagaaauauguugaggacacuaaaauagaucucuggucauacaacgcggagcuucuuguugcccuggagaaccaacauacaauugaucuaacugacucagaaaugaacaaacuguuugaaaaaacaaagaagcaacugagggaaaaugcugaggauaugggcaaugguuguuucaaaauauaccacaaaugugacaaugccugcauaggaucaaucagaaauggaacuuaugaccacgauguauacagagaugaagcauugaacaaccgguuccagaucaagggaguugagcugaagucaggguacaaagauuggauccuauggauuuccuuugccauaucauguuuuuugcuuuguguugcuuuguugggguucaucaugugggccugccaaaaaggcaacauuaggugcaacauuugcauuuga

SEQ ID NO: 37426 - RNA, 1701 nt, Artificial Sequence
  derived and/or modified CDS sequence (wt) from hemagglutinin__InfluenzaA__ADK99184
augaagacuaucauugcuuugagcuacauucuaugucugguuuccgcucaaaaacuuccuggaaaugacaacagcacggcaacgcugugccuugggcaccaugcaguaccaaacggaacgauagugaaaacaaucacgaaugaccaaauugaaguuacuaaugcuacugagcugguucagaguuccucaacaggugaaauaugcaacaguccucaucagauccuugauggagaaaacugcacacuaauagaugcucuauugggagacccucagugugauggcuuccaaaauaagaaaugggaccuuuuuguugaacgcagcaaagccuacagcaacuguuacccuuaugaugugccggauuaugccucccuuaggucacuaguugccucauccggcacacuggaguuuaacaaugaaagcuucaauuggacuggagucacucaaaacggaacaagcucugcuugcauaaggagaucuaauaacaguuucuuuaguagauugaauugguugacccacuuaaaauucaaauacccagcauuaaacgugacuaugccaaacaaugaacaauuugacaaauuguacauuugggggguucaccacccggguacggacaaugaccaaaucuuccuguaugcucaagcaucaggaagaaucacagucucuaccaaaagaagccaacaaacuguaaucccgaauaucggaucuagacccagaguaaggaauaucccuagcagaauaagcaucuauuggacaauaguaaaaccgggagacauacuuuugauuaacagcacagggaaucuaauugcuccuagggguuacuucaaaauacgaagugggaaaagcucaauaaugagaucagaugcacccauuggcaaaugcaauucugaaugcaucacuccaaauggaagcauucccaaugacaaaccauuccaaaauguaaacaggaucacauacggggccugucccagauauguuaagcaaaacacucugaaauuggcaacagggaugcgaaauguaccagagaaacaaacuagaggcauauuuggcgcaaucgcggguuucauagaaaaugguugggagggaaugguggaugguugguacgguuucaggcaucaaaauucugagggaagaggacaagcagcagaucucaaaagcacucaagcagcaaucgaucaaaucaaugggaagcugaauagauugaucgggaaaaccaacgagaaauuccaucagauugaaaaagaauucucagaagucgaagggagaauucaggaccuugagaaauauguugaggacaccaaaauagaucucuggucauacaacgcggagcuucuuguugcccuggagaaccaacauacaauugaucuaacugacucagaaaugaacaaacuguuugaaaaaacaaagaagcaacugagggaaaaugcugaggauaugggcaaugguuguuucaaaauauaccacaaaugcgacaaugccugcauaggaucaaucagaaauggaacuuaugaccacgauguauacagagaugaagcauuaaacaaccgguuccagaucaagggaguugagcugaagucaggguacaaagauuggauccuauggauuuccuuugccauaucauguuuuuugcuuuguguugcuuuguugggguucaucaugugggccugccaaaaaggcaacauuaggugcaacauuugcauuuga

SEQ ID NO: 37427 - RNA, 1701 nt, Artificial Sequence; identical to SEQ ID NO: 37393
  derived and/or modified CDS sequence (wt) from hemagglutinin__InfluenzaA__ADK99195

SEQ ID NO: 37428 - RNA, 1701 nt, Artificial Sequence
  derived and/or modified CDS sequence (wt) from hemagglutinin__InfluenzaA__ADK99206
augaagacuaucauugcuuugagcuacauucuaugucugguuuucgcucaaaaacuuccuggaaaugacaacagcacggcaacgcugugccuugggcaccaugcaguaccaaacggaacgguagugaaaacaaucacgaaugaccaaauugaaguuacuaaugcuacugagcugguucagaguuccucaacaggugaaauaugcgacaguccucaucagauccuugauggaaaaaacugcacacuaauagaugcucuauugggagacccucagugugauggcuuccaaaauaagaaaugggaccuuuuuguugaacgcagcaaagccuacagcaacuguuacccuuaugaugugccggauuaugccucccuuaggucacuaguugccucauccggcacacuggaguuuaacaaugaaagcuucaauuggacuggagucacucaaaacggaacaagcucugcuugcauaaggaggucuaaaaacaguuucuuuaguagauugaauugguugacccacuuaaacuucaaauacccagcauugaacgugacuaugccaaacaaugaacaauuugacaaauuguacauuugggggguucaccacccggguacggacaaagaccaaaucuuccuguaugcucaagcaucaggaagaaucacagucucuaccaaaagaagccaacaaacuguaaucccgaauaucggaucuagacccagaguaaggaauaucccuagcagaguaagcaucuauuggacaauaguaaaaccgggagacauacuuuugauuaacagcacagggaaucuaauugcuccuagggguuacuucaaaauacgaagugggaaaagcucaauaaugagaucagaugcacccauuggcaaaugcaauucugaaugcaucacuccaaauggaagcauucccaaugacaaaccauuccaaaauguaaacaggaucacauacggggccugucccagauauguuaagcaaaacacucugaaauuggcaacagggaugcgaaauguaccagagaaacaaacuagaggcauauuuggcgcaaucgcggguuucauagaaaaugguugggagggaaugguggaugguugguacgguuucaggcaucaaaauucugagggaagaggacaagcagcagaucucaaaagcacucaagcagcaaucgaucaaaucaaugggaagcugaauagauugaucgggaaaaccaacgagaaauuccaucagauugaaaaagaauucucagaagucgaagggagaauucaggaccuugagaaauauguugaggacacuaaaauagaucucuggucauacaacgcggagcuucuuguuucccuggagaaccaacauacaauugaucuaacugacucagaaaugaacaaacuguuugaaaaaacaaagaagcaacugagggaaaaugcugaggauaugggcaaugguuguuucaaaauauaccacaaaugugacaaugccugcauaggaucaaucagaaauggaacuuaugaccacgauguauacagagaugaagcauuaaacaaccgguuucagaucaagggaguugagcugaagucaggguacaaagauuggauccuauggauuuccuuugccauaucauguuuuuugcuuuguguugcuuuguugggguucaucaugugggccugccaaaaaggcaacauuaggugcaacauuugcauuuga

SEQ ID NO: 37429 - RNA, 1701 nt, Artificial Sequence; identical to SEQ ID NO: 37363
  derived and/or modified CDS sequence (wt) from hemagglutinin__InfluenzaA__ADK99217

SEQ ID NO: 37430 - RNA, 1701 nt, Artificial Sequence; identical to SEQ ID NO: 37380
  derived and/or modified CDS sequence (wt) from hemagglutinin__InfluenzaA__ADK99228

SEQ ID NO: 37431 - RNA, 1701 nt, Artificial Sequence
  derived and/or modified CDS sequence (wt) from hemagglutinin__InfluenzaA__ADK99239
augaagacuaucauugcuuugagcuacauucuaugucugguuuucgcucaaaaacuuccuggaaaugacaacagcacggcaacgcugugccuugggcaccaugcaguaccaaacggaacgauagugaaaacaaucacgaaugaccaaauugaaguuacuaaugcuacugagcugguucagaguuccucaacaggugaaauaugcgacaguccucaucagauccuugauggaaaaaacugcacacuaauagaugcucuauugggagacccucagugugauggcuuccaaaauaagaaaugggaccuuuuuguugaacgcagcaaagccuacagcaacuguuacccuuaugaugugccggauuaugccucccuuaggucacuaguugccucauccggcacacuggaguuuaacaaugagagcuucaauuggacuggagucacucaaaacggaacaagcucugcuugcauaaggagaucuaaaaacaguuucuuuaguagauugaauugguugacccacuuaaacuucaaauacccagcauugaacgugacuaugccaaacaaugaacaauuugacaaauuguacauuugggggguucaccacccggguacggacaaagaccaaaucuuccuguaugcucaagcaucaggaagaaucacagucucuaccaaaagaagccaacaaacuguaaucccgaauaucggaucuagacccagaguaaggaauaucccuagcagaauaagcaucuauuggacaauaguaaaaccgggagacauacuuuugauuaacagcacagggaaucuaauugcuccuagggguuacuucaaaauacgaagugggaaaagcucaauaaugagaucagaugcacccauuggcaaaugcaauucugaaugcaucacuccaaauggaagcauucccaaugacaaaccauuccaaaauguaaacaggaucacauacggggccugucccagauauguuaagcaaaacacucugaaauuggcaacagggaugcgaaauguaccagagaaacaaacuagaggcauauuuggcgcaaucgcggguuucauagaaaaugguugggagggaaugguggaugguugguacgguuucaggcaucaaaauucugagggaagaggacaagcagcagaucucaaaagcacucaagcagcaaucgaucaaaucaaugggaagcugaauagauugaucgggaaaaccaacgagaaauuccaucagauugaaaaagaauucucagaagucgaagggagaauucaggaccuugagaaauauguugaggacacuaaaauagaucucuggucauacaacgcggagcuucuuguugcccuggagaaccaacauacaauugaucuaacugacucagaaaugaacaaacuguuugaaaaaacaaagaagcaacugagggaaaaugcugaggauaugggcaaugguuguuucaaaauauaccacaaaugugacaaugccugcauaggaucaaucagaaauggaacuuaugaccacgauguauacagagaugaagcauuaaacaaccgguuucagaucaagggaguugagcugaagucaggguacaaagauuggauccuauggauuuccuuugccauaucauguuuuuugcuuuguguugcuuuguugggguucaucaugugggccugccaaaaaggcaacauuaggugcaacauuugcauuuga

SEQ ID NO: 37432 - RNA, 1701 nt, Artificial Sequence
  derived and/or modified CDS sequence (wt) from hemagglutinin__InfluenzaA__ADK99250
augaagacuaucauugcuuugagcuacauucuaugucugguuuucgcucaaaaacuuccuggaaaugacaacagcacggcaacgcugugccuugggcaccaugcaguaccaaacggaacgauagugaaaacaaucacgaaugaccaaauugaaguuacuaaugcuacugagcugguucagaguuccucaacaggugaaauaugcgacaguccucaucagauccuugauggagaaaacugcacacuaauagaugcucuauugggagacccucagugugauggcuuccaaaauaagaaaugggaccuguuuguugaacgcagcaaagccuacagcaacuguuacccuuaugaugugccggauuaugccucccuuaggucacuaguugccucauccggcacacuggaguuuaacaaugaaagcuucaauuggacuggagucacucaaaacggaacaagcucugcuugcauaaggagaucuaauaacaguuucuuuaguagauugaauugguugacccacuuaaaauucaaauacccagcauuaaacgugacuaugccaaacaaugaacaauuugacaaauuguacauuugggggguucaccacccggguacggacaaugaccaaaucuuccuguaugcucaagcaucaggaagaaucacaguuucuaccaaaagaagccaacaaacuguaaucccgaauaucggaucuagacccagaguaaggaauaucccuagcagaauaagcaucuauuggacaauaguaaaaccgggagacauacuuuugauuaacagcacagggaaucuaauugcuccuagggguuacuucaaaauacgaagugggaaaagcucaauaaugagaucagaugcacccauuggcaaaugcaauucugaaugcaucacuccaaauggaagcauucccaaugacaaaccauuccaaaauguaaacaggaucacauacggggccugucccagauauguuaagcaaaacacucugaaauuggcaacagggaugcgaaauguaccagagaaacaaacuagaggcauauuuggcgcaaucgcggguuucauagaaaaugguugggagggaaugguggaugguugguacgguuucaggcaucaaaauucugagggaagaggacaagcagcagaucucaaaagcacucaagcagcaaucgaucaaaucaaugggaagcugaauagauugaucgggaaaaccaacgaaaaauuccaucagauugaaaaagaauucucagaagucgaagggagaauucaggacauugagaaauauguugaggacaccaaaauagaucucuggucauacaacgcggagcuucuuguugcccuggagaaccaacauacaauugaucuaacugacucagaaaugaacaaacuguuugaaaaaacaaagaagcaacugagggaaaaugcugaggauaugggcaaugguuguuucaaaauauaccacaaaugugacaaugccugcauaggaucaaucagaaauggaacuuaugaccacgauguauacagagacgaagcauuaaacaaccgguuccagaucaagggaguugagcugaagucaggguacaaagauuggauccuauggauuuccuuugccauaucauguuuuuugcuuuguguugcuuuguugggguucaucaugugggccugccaaaaaggcaacauuaggugcaacauuugcauuuga

SEQ ID NO: 37433 - RNA, 1701 nt, Artificial Sequence; identical to SEQ ID NO: 37363
  derived and/or modified CDS sequence (wt) from hemagglutinin__InfluenzaA__ADK99261

SEQ ID NO: 37434 - RNA, 1701 nt, Artificial Sequence
  derived and/or modified CDS sequence (wt) from hemagglutinin__InfluenzaA__ADK99283
augaagacuaucauugcuuugagcuacauucuaugucugguuuucgcucaaaaacuuccuggaaaugacaacagcacggcaacgcugugccuugggcaccaugcaguaccaaacggaacgauagugaaaacaaucacgaaugaccaaauugaaguuacuaaugcuacugagcugguucagaguuccucaacaggugaaauaugcgacaguccucaucagauccuugauggaaaaaacugcacacuaauagaugcucuauugggagacccucagugugauggcuuccaaaauaagaaaugggaccuuuuuguugaacgcagcaaagccuacagcaacuguuacccuuaugaugugccggauuaugccucccuuaggucacuaguugccucauccggcacacuggaguuuaacaaugaaagcuucaauuggacuggagucacucaaaacggaacaagcucugcuugcauaaggagaucuaaaaacaguuucuuuaguagauugaauugguugacccacuuaaacuucaaauacccagcauugaacgugacuaugccaaacaaugaacaauuugacaaauuguacauuugggggguucaccacccggguacggacaaagaccaaaucuuccuguaugcucaagcaucaggaagaaucacagucucuaccaaaagaagccaacaaacugugaucccgaauaucggaucuagacccagaguaaggaauaucccuagcagaauaagcaucuauuggacaauaguaaaaccgggagacauacuuuugauuaacagcacagggaaucuaauugcuccuagggguuacuucaaaauacgaagugggaaaagcucaauaaugagaucagaugcacccauuggcaaaugcaauucugaaugcaucacuccaaauggaagcauucccaaugacaaaccauuccaaaauguaaacaggaucacauacggggccugucccagauauguuaagcaaaacacucugaaauuggcaacagggaugcgaaauguaccagagaaacaaacuagaggcauauuuggcgcaaucgcggguuucauagaaaaugguugggagggaaugguggaugguugguacggcuucaggcaucaaaauucugagggaagaggacaagcagcagaucucaaaagcacucaagcagcaaucgaucaaaucaaugggaagcugaauagauugauugggaaaaccaacgagaaauuccaucagauugaaaaagaauucucagaagucgaagggagaauucaggaccuugagagauauguugaggacacuaaaauagaucucuggucauacaacgcggagcuucuuguugcccuggagaaccaacauacaauugaucuaacugacucagaaaugaacaaacuguuugaaaaaacaaagaagcaacugagggaaaaugcugaggauaugggcaaugguuguuucaaaauauaccacaaaugugacaaugccugcauaggaucaaucagaaauggaacuuaugaccacgauguauacagagaugaagcauuaaacaaccgguuucagaucaagggaguugagcugaagucaggauacaaagauuggauccuauggauuuccuuugccauaucauguuuuuugcuuuguguugcuuuguugggguucaucaugugggccugccaaaaaggcaacauuaggugcaacauuugcauuuga

SEQ ID NO: 37435 - RNA, 1701 nt, Artificial Sequence
  derived and/or modified CDS sequence (wt) from hemagglutinin__InfluenzaA__ADK99294
augaagacuaucauugcuuugagcuacauucuaugucugguuuucgcucaaaaacuuccuggaaaugacaacagcacggcaacgcugugccuugggcaccaugcaguaccaaacggaacgauagugaaaacaaucacgaaugaccaaauugaaguuacuaaugcuacugagcugguucagaguuccucaacaggugaaauaugcgacaguccucaucagauccuugauggagaaaacugcacacuaauagaugcucuauugggagacccucagugugauggcuuccaagauaagaaaugggaccuuuuuguugaacgaagcaaagccuacagcaacuguuacccuuaugaugugccggauuaugccucccuuaggucacuaguugccucauccggcacacuggaguuuaacaaugaaagcuucaauuggacuggagucacucaaaacggaacaagcucugcuugcauaaggagaucuaauaauaguuucuuuaguagauugaauugguugacccacuuaaacuucaaauacccagcauugaacgugacuaugccaaacaaugaacaauuugacaaauuguacauuugggggguucaccacccggguacggacaaggaccaaaucuuccuguaugcucaagcaucaggaagaaucacaguaucuaccaaaagaagccaacaagcuguaaucccgaauaucggaucuagacccagaguaaggaauaucccuagcagaauaagcaucuauuggacaauaguaaaaccgggagacauacuuuugauuaacagcacagggaaucuaauugcuccuagggguuacuucaaaauacgaagugggaaaagcucaauaaugagaucagaugcacccauuggcaaaugcaauucugaaugcaucacuccaaauggaagcauucccaaugacaaaccauuccaaaauguaaacaggaucacauacggggccugucccagauauguuaagcaaaacacucugaaauuggcaacaggaaugcgaaauguaccagagaaacaaacuagaggcauauuuggcgcaauagcggguuucauagaaaaugguugggagggaaugguggaugguugguacgguuucaggcaucaaaauucugagggaagaggacaagcagcagaucucaaaagcacucaagcagcaaucgaucaaaucaaugggaagcugaauagauugaucgggaaaaccaacgagaaauuccaucagauugaaaaagaauucucagaagucgaagggagaauucaggaccuugagaaauauguugaggacacuaaaauagaucucuggucauacaacgcggagcuucuuguugcccuggagaaccaacauacaauugaucuaacugacucagaaaugaacaaacuguuugaaaaaacaaagaagcaacugagggaaaaugcugaggauaugggcaaugguuguuucaaaauauaccacaaaugugacaaugccugcauaggaucaaucagaaauggaacuuaugaccacgauguauacagagaugaagcauuaaacaaccgguuccagaucaagggaguugagcugaagucaggguacaaagauuggauccuauggauuuccuuugccauaucauguuuuuugcuuuguguugcuuuguugggguucaucaugugggccugccaaaaaggcaacauuaggugcaacauuugcauuuga

SEQ ID NO: 37436 - RNA, 1701 nt, Artificial Sequence; identical to SEQ ID NO: 37382
  derived and/or modified CDS sequence (wt) from hemagglutinin__InfluenzaA__ADK99305

SEQ ID NO: 37437 - RNA, 1701 nt, Artificial Sequence; identical to SEQ ID NO: 37393
  derived and/or modified CDS sequence (wt) from hemagglutinin__InfluenzaA__ADL27989

SEQ ID NO: 37438 - RNA, 1701 nt, Artificial Sequence
  derived and/or modified CDS sequence (wt) from hemagglutinin__InfluenzaA__ADL28000
augaagacuaucauugcuuugagcuacauucuaugucugguuuucgcucaaaaacuuccuggaaaugacaacagcacggcaacgcugugccuugggcaccaugcaguaccaaacggaacgauggugaaaacaaucacgaaugaccaaauugaaguuacuaaugcuacugagcugguucagaguuccucaacaggugaaauaugcgacaguccucaucagauccuugauggaaaaaacugcacacuaauagaugcucuauugggagacccucagugugauggcuuccaaaauaagaaaugggaccuuuuuguugaacgcagcaaagccuacagcaacuguuacccuuaugaugugccggauuaugccucccuuaggucacuaguugccucauccggcacacuggaguuuaacaaugaaagcuucaauuggacuggagucacucaaaacggaacaagcucugcuugcauaaggagaucuaaaaacaguuucuuuaguagauugaauugguugacccacuuaaacuucaaauacccagcauugaacgugacuaugccaaacaaugaacaauuugacaaauuguacauuugggggguucaccacccggguacggacaaagaccaaaucuuccuguaugcucaagcaucagaaagaaucacagucucuaccaaaagaagccaacaaacuguaaucccgaauaucggaucuagacccagaguaaggaauaucccuagcagaauaagcaucuauuggacaauaguaaaaccgggagacauacuuuugauuaacagcacagggaaucuaauugcuccuagggguuacuucaaaauacgaagugggaaaagcucaauaaugagaucagaugcacccauuggcaaaugcaauucugaaugcaucacuccaaauggaagcauucccaaugacaaaccauuccaaaauguaaacaggaucacauacggggccugucccagauauguuaagcaaagcacucugaaauuggcaacagggaugcgaaauguaccagagaaacaaacuagaggcauauuuggcgcaaucgcggguuucauagaaaaugguugggagggaaugguggaugguugguacgguuucaggcaucaaaauucugagggaagaggacaagcagcagaucucaaaagcacucaagcagcaaucgaucaaaucaaugggaagcugaauagauugaucgggaaaaccaacgagaaauuccaucagauugaaaaagaauucucagaagucgaagggagaauucaggaccuugagaaauauguugaggacacuaaaauagaucucuggucauacaacgcggagcuucuuguugcccuggagaaccaacauacaauugaucuaacugacucagaaaugaacaaacuguuugaaaaaacaaagaagcaacugagggaaaaugcugaggauaugggcaaugguuguuucaaaauauaccacaaaugugacaaugccugcauaggaucaaucagaaauggaacuuaugaccacgauguauacagagaugaagcauuaaacaaccgguuucagaucaagggaguugagcugaagucaggguacaaggauuggauccuauggauuuccuuugccauaucauguuuuuugcuuuguguugcuuuguugggguucaucaugugggccugccaaaaaggcaacauuaggugcaacauuugcauuuga

SEQ ID NO: 37439 - RNA, 1701 nt, Artificial Sequence
  derived and/or modified CDS sequence (wt) from hemagglutinin__InfluenzaA__ADL28011
augaagacuaucauugcuuugagcuacauucuaugucugguuuucgcucaaaaacuuccuggaaaugacaacagcacggcaacgcugugccuugggcaccaugcaguaccaaacggaacgauagugaaaacaaucacgaaugaccaaauugaaguuacuaaugcuacugagcugguucagaguuccucaacaggugaaauaugcgacaguccucaucagauccuugauggagaaaacugcacacuaauagaugcucuauugggagacccucagugugauggcuuccaaaauaagaaaugggaccuuuuuguugaacgcagcaaagccuacagcaacuguuacccuuaugaugugccggauuaugccucccuuaggucacuaguugccucauccggcacacuggaguuuaacaaugaaagcuucaauuggacuggagucacucaaaacggaacaagcucugcuugcauaaggagaucuaauaacaguuucuuuaguagauugaauugguugacccacuuaaaauucaaauacccagcauuaaacgugacuaugccaaacaaugaacaauuugacaaauuguacauuugggggguucaccacccggguacggacaaugaccaaaucuuccuguaugcucaagcaucaggaagaaucacagucucuaccagaagaagccaacaaacuguaaucccgaauaucggaucuagacccagaguaaggaauaucccuagcagaauaagcaucuauuggacaauaguaaaaccgggagacauacuuuugauuaacagcacagggaaucuaauugcuccuagggguuacuucaaaauacgaagugggaaaagcucaauaaugagaucagaugcacccauuggcaaaugcaauucugaaugcaucacuccaaauggaagcauucccaaugacaaaccauuccaaaauguaaacaggaucacauacggggccugucccagauauguuaagcaaaacacucugaaauuggcaacagggaugcgaaauguaccagagaaacaaacuagaggcauauuuggcgcaaucgcggguuucauagaaaaugguugggagggaaugguggaugguugguacgguuucaggcaucaaaauucugagggaagaggacaagcagcagaucucaaaagcacucaagcagcaaucgaucaaaucaaugggaagcugaauagauugaucgggaaaaccaacgagaaauuccaucagauugaaaaagaauucucagaagucgaagggagaauucaggaccuugagaaauauguugaggacaccaaaauagaucucuggucauacaacgcggagcuucuuguugcccuggagaaccaacauacaauugaucuaacugacucagaaaugaacaaacuguuugaaaaaacaaagaagcaacugagggaaaaugcugaggauaugggcaaugguuguuucaaaauauaccacaaaugugacaaugccugcauaggaucaaucagaaauggaacuuaugaccacgauguauacagagaugaagcauuaaacaaccgguuccagaucaagggaguugagcugaagucaggguacaaagauuggauccuauggauuuccuuugccauaucauguuuuuugcuuuguguugcuuuguugggguucaucaugugggccugccaaaaaggcaacauuaggugcaacauuugcauuuga

SEQ ID NO: 37440 - RNA, 1701 nt, Artificial Sequence; identical to SEQ ID NO: 37424
  derived and/or modified CDS sequence (wt) from hemagglutinin__InfluenzaA__ADL28022

SEQ ID NO: 37441 - RNA, 1701 nt, Artificial Sequence; identical to SEQ ID NO: 37382
  derived and/or modified CDS sequence (wt) from hemagglutinin__InfluenzaA__ADL28033

SEQ ID NO: 37442 - RNA, 1701 nt, Artificial Sequence; identical to SEQ ID NO: 35625
  derived and/or modified CDS sequence (wt) from hemagglutinin__InfluenzaA__ADL28044

SEQ ID NO: 37443 - RNA, 1701 nt, Artificial Sequence
  derived and/or modified CDS sequence (wt) from hemagglutinin__InfluenzaA__ADL28055
augaagacuaucguugcuuugagcuacauucuaugucugguuuucgcucaaaaacuuccuggaaaugacaacagcacggcaacgcugugccuugggcaccaugcaguaccaaacggaacgauagugaaaacaaucacgaaugaccaaauugaaguuacuaaugcuacugagcugguucagaguuccucaacaggugaaauaugcgacaguccucaucagauccuugauggagaaaacugcacacuaauagaugcucuauugggagacccucagugugauggcuuccaaaauaagaaaugggaccuuuuuguugaacgcagcaaagccuacagcaacuguuacccuuaugaugugccggauuaugccucccuuaggucacuaguugccucauccggcacacuggaguuuaacaaugaaagcuucaauuggacuggagucacucaaaacggaacaagcucugcuugcauaaggagaucuaauaacaguuucuuuaguagauugaauugguugacccacuuaaaauucaaauacccagcauuaaacgugacuaugccaaacaaugaacaauuugacaaauuguacauuugggggguucaccacccggguacggacaaugaccaaaucuuccuguaugcucaagcaucaggaagaaucacagucucuaccaaaagaagccaacaaacuguaaucccgaauaucggaucuagacccagaguaaggaauaucccuagcagaauaagcaucuauuggacaauaguaaaaccgggagacauacuuuugauuaacagcacagggaaucuaauugcuccuagggguuacuucaaaauacgaagugggaaaagcucaauaaugagaucagaugcacccauuggcaaaugcaauucugaaugcaucacuccaaauggaagcauucccaaugacaaaccauuccaaaauguaaacaggaucacauacggggccugucccagauauguuaagcaaaacacucugaaauuggcaacagggaugcgaaauguaccagagaaacaaacuagaggcauauuuggcgcaaucgcggguuucauagaaaaugguugggagggaaugguggaugguugguacgguuucaggcaucaaaauucugagggaagaggacaagcagcagaucucaaaagcacucaagcagcaaucgaucaaaucaaugggaagcugaauagauugaucgggaaaaccaacgagaaauuccaucagauugaaaaagaauucucagaagucgaagggagaauucaggaccuugagaaauauguugaggacaccaaaauagaucucuggucauacaacgcggagcuucuuguugcccuggagaaccaacauacaauugaucuaacugacucagaaaugaacaaacuguuugaaaaaacaaagaagcaacugagggaaaaugcugaggacaugggcaaugguuguuucaaaauauaccacaaaugugacaaugccugcauaggaucaaucagaaauggaacuuaugaccacgauguauacagagaugaagcauuaaacaaccgguuccagaucaagggaguugagcugaagucaggguacaaagauuggauccuauggauuuccuuugccauaucauguuuuuugcuuuguguugcuuuguugggguucaucaugugggccugccaaaaaggcaacauuaggugcaacauuugcauuuga

SEQ ID NO: 37444 - RNA, 1701 nt, Artificial Sequence; identical to SEQ ID NO: 37382
  derived and/or modified CDS sequence (wt) from hemagglutinin__InfluenzaA__ADL28066

SEQ ID NO: 37445 - RNA, 1701 nt, Artificial Sequence; identical to SEQ ID NO: 37363
  derived and/or modified CDS sequence (wt) from hemagglutinin__InfluenzaA__ADL28077

SEQ ID NO: 37446 - RNA, 1701 nt, Artificial Sequence
  derived and/or modified CDS sequence (wt) from hemagglutinin__InfluenzaA__ADL28088
augaagacuaucauugcuuugagcuacauucuaugucugguuuucgcucaaaaacuuccuggaaaugacaacagcacggcaacgcugugccuugggcaccaugcaguaccaaacggaacgauagugaaaacaaucacgaaugaccaaauugaaguuacuaaugcuacugagcugguucagaguuccucaacaggugaaauaugcgacaguccucaucagauccuugauggagaaaacugcacacuaauagaugcucuauugggagacccucagugugauggcuuccaaaauaagaaaugggaccuuuuuguugaacgaagcaaagccuacagcaacuguuacccuuaugaugugccggauuaugccucccuuaggucacuaguugccucauccggcacacuggaguuuaacaaugaaagcuucaauuggacuggagucacucaaaacggaacaagcucugcuugcauaaggagaucuaauaacaguuucuuuaguagauugaauugguugacccacuuaaaauucaaauacccagcauugaacgugacuaugccaaacaaugaacaauuugacaaauuguacauuugggggguucaccacccggguacggacaaugaccaaaucuuccuguauucucaagcaucaggaagaaucacaguaucuaccaaaagaagccaacaaacuguaaucccgaauaucggaucuagacccagaguaaggaauaucccuagcagaauaagcaucuauuggacaauaguaaaaccgggagacauacuuuugauuaacagcacagggaaucuaauugcuccuagggguuacuucaaaauacgaagugggaaaagcucaauaaugagaucagaugcacccauuggcaaaugcaauucugaaugcaucacuccaaauggaagcauucccaaugacaaaccauuccaaaauguaaacaggaucacauacggggccugucccagauaugucaagcaaaacacucuaaaauuggcaacaggaaugcgaaauguaccagagaaacaaacuagaggcauauuuggcgcaaucgcggguuucauagaaaaugguugggagggaaugguggaugguugguacgguuucaggcaucaaaauucugagggaagaggacaagcagcagaucucaaaagcacucaagcagcaaucgaucaaaucaaugggaagcugaauagauugaucgggaaaaccaacgagaaauuccaucagauugaaaaagaauucucagaagucgaagggagaauccaggaccuugagaaauauguugaggacacuaaaauagaucucuggucauacaacgcggagcuucuuguugcccuggagaaccaacauacaauugaucuaacugacucagaaaugaacaaacuguuugaaaaaacaaagaagcaacugagggaaaaugcugaggauaugggcaaugguuguuucaaaauauaccacaaaugugacaaugccugcauaggaucaaucagaaauggaacuuaugaccacgauguauacagagaugaagcauugaacaaccgguuccagaucaagggaguugagcugaagucaggguacaaagauuggauccuauggauuuccuuugccauaucauguuuuuugcuuuguguugcuuuguugggguucaucaugugggccugccaaaaaggcaacauuaggugcaacauuugcauuuga

SEQ ID NO: 37447 - RNA, 1701 nt, Artificial Sequence
  derived and/or modified CDS sequence (wt) from hemagglutinin__InfluenzaA__ADL28099
augaagacuaucauugcuuugagcuacauucuaugucugguuuucgcucaaaaacuuccuggaaaugacaacagcacggcaacgcugugccuugggcaccaugcaguaccaaacggaacgauagugaaaacaaucacgaaugaccaaauugaaguuacuaaugcuacugaacugguucagaguuccucaacaggugaaauaugcgacaguccucaucagauccuugauggagaaaacugcacacuaauagaugcucuauugggagacccucagugugauggcuuccaaaauaagaaaugggaccuuuuuguugaacgaagcaaagccuacagcaacuguuacccuuaugaugugccggauuaugccucccuuaggucacuaguugccucauccggcacacuggaguuuaacaaugaaagcuucaauuggacuggagucacucaaaacggaacaagcucugcuugcauaaggagaucuaauaacaguuucuuuaguagauugaauugguugacccacuuaaaauucaaauacccagcauugaacgugacuaugccaaacaaugagcaauuugacaaauuguacauuugggggguucaccacccggguacugacaaugaccaaaucuuccuguaugcucaagcaucaggaagaaucacagucucuaccaaaagaagccaacaaacuguaaucccgaauaucggaucuagacccagaguaaggaauaucccuagcagaauaagcaucuauuggacaauaguaaaaccgggagacauacuuuugauuaacagcacagggaaucuaauugcuccuagggguuacuucaaaauacgaagugggaaaagcucaauaaugagaucagaugcacccauuggcaaaugcaauucugaaugcaucacuccaaauggaagcauucccaaugacaaaccauuccaaaauguaaacaggaucacauacggggccugucccagauauguuaagcaaaacacucugaaauuggcaacagggaugcgaaauguaccagagaaacaaacuagaggcauauuuggcgcaaucgcagguuucauagaaaaugguugggagggaaugguggaugguugguacgguuucaggcaucaaaauucugagggaagaggacaagcagcagaucucaaaagcacucaagcagcaaucgaucaaaucaaugggaagcugaauagauugaucgggaaaaccaacgagaaauuccaucagauugaaaaagaauucucagaagucgaagggagaauucaggaccuugagaaauauguugaggacacuaaaauagaucucuggucauacaacgcggagcuucuuguugcccuggagaaccaacauacaauugaucuaacugacucagaaaugaacaaacuguuugaaaaaacaaaaaagcaacugagggaaaaugcugaggauaugggcaaugguuguuucaaaauauaccacaaaugugacaaugccugcauaggaucaaucagaaauggaacuuaugaccacgauguauacagagaugaagcauuaaacaaccgguuccagaucaagggaguugagcugaagucaggguacaaagauuggauccuauggauuuccuuugccauaucauguuuuuugcuuuguguugcuuuguugggguucaucaugugggccugccaaaaaggcaacauuaggugcaacauuugcauuuga

SEQ ID NO: 37448 - RNA, 1701 nt, Artificial Sequence
  derived and/or modified CDS sequence (wt) from hemagglutinin__InfluenzaA__ADL28110
augaagacuaucauugcuuugagcuacauucuaugucugguuuucgcucaaaaacuuccuggaaaugacaacagcacggcaacgcugugcauugggcaccaugcaguaccaaacggaacgauagugaaaacaaucacgaaugaccaaauugaaguuacuaaugcuacugagcugguucagaauuccucaacaggugaaauaugcgacaguccucaucagauccuugauggaaaaaacugcacacuaauagaugcucuauugggagacccucagugugauggcuuccaaaauaagaaaugggaccuuuuuguugaacgcagcaaagccuacagcaacuguuacccuuaugaugugccggauuaugccucccuuaggucacuaguugccucauccggcacacuggaguuuaacaaugaaagcuucaauuggacuggagucacucaaaacggaacaagcucugcuugcauaaggagaucuaaaaacaguuucuuuaguagauugaauugguugacccacuuaaacuucaaauacccagcauugaacgugacuaugccaaacaaugaacaauuugacaaauuguacauuugggggguucaccacccggguacggacaaagaccaaaucuuccuguaugcucaagcaucaggaagaaucacagucucuaccaaaagaagccaacaaacugcaaucccgaauaucggaucuagacccagaguaaggaauaucccuagcagaauaagcaucuauuggacaauaguaaaaccgggagacauacuuuugauuaacagcacagggaaucuaauugcuccuagggguuacuucaaaauacgaagugggaaaagcucaauaaugagaucagaugcacccauugacaaaugcaauucugaaugcaucacuccaaauggaagcauucccaaugacaaaccauuccaaaauguaaacaggaucacauacggggccugucccagauauguuaagcaaaacacucugaaauuggcaacagggaugcgaaauguaccagagaaacaaacuagaggcauauuuggcgcaaucgcggguuucauagaaaaugguugggagggaaugguggaugguugguacgguuucaggcaucaaaauucugagggaagaggacaagcagcagaucucaaaagcacucaagcagcaaucgaucaaaucaaugggaagcugaauagauugaucgggaaaaccaacgagaaauuccaucagauugaaaaagaauucucagaagucgaagggagaauucaggaccuugagaaauauguugaggacacuaaaauagaucucuggucauacaacgcggagcuucuuguugcccuggagaaccaacauacaauugaucuaacugacucagaaaugaacaaacuguuugaaaaaacaaagaagcaacugagggaaaaugcugaggauaugggcaaugguuguuucaaaauauaccacaaaugugacaaugccugcauaggaucaaucagaaauggaacuuaugaccacgauguauacagagaugaagcauuaaacaaccgguuucagaucaagggaguugagcugaagucaggguacaaagauuggauccuauggauuuccuuugccauaucauguuuuuugcuuuguguugcuuuguugggguucaucaugugggccugccaaaaaggcaacauuaggugcaacauuugcauuuga

SEQ ID NO: 37449 - RNA, 1701 nt, Artificial Sequence
  derived and/or modified CDS sequence (wt) from hemagglutinin__InfluenzaA__ADL28126
augaagacuaucauugcuuugagcuacauucuaugucugguuuucgcucaaaaacuuccuggaaaugacaacagcacggcaacgcugugccuugggcaccaugcaguaccaaacggaacgauagugaaaacaaucacgaaugaccaaauugaaguuacuaaugcuacugagcugguucagaguuccucaacaggugaaauaugcgacaguccucaucagauccuugauggagaaaacugcacacuaauagaugcucuauugggagacccucagugugauggcuuccaaaauaagaaaugggaccuuuuuguugaacgaagcaaagccuacagcaacuguuacccuuaugaugugccggauuaugccucccuuaggucacuaguugccucauccggcacacuggaguuuaacaaugaaagcuucaauuggacuggagucaaucaaaacggaacaagcucugcuugcauaaggagaucuaauaacaguuucuuuaguagauugaauugguugacccacuuaaaauucaaauacccagcauugaacgugacuaugccaaacaaugaacaauuugacaaauuguacauuugggggguucaccacccggguacggacaaugaccaaaucuuccuguaugcucaagcaucaggaagaaucacaguaucuaccaaaagaagccaacaaacuguaaucccgaauaucggaucuagacccagaguaagaaauaucccuagcagaauaagcaucuauuggacaauaguaaaaccgggagacauacuuuugauuaacagcacagggaaucuaauugcuccuagggguuacuucaaaauacgaagugggaaaagcucaauaaugagaucagaugcacccauuggcaaaugcaauucugaaugcaucacuccaaauggaagcauucccaaugacaaaccauuccaaaauguaaacaggaucacauacggggccugucccagauauguuaagcaaaacacucuaaaauuggcaacaggaaugcgaaauguaccagagaaacaaacuagaggcauauuuggcgcaaucgcggguuucauagaaaaugguugggagggaaugguggaugguugguacgguuucaggcaucaaaauucugagggaagaggacaagcagcagaucucaaaagcacucaagcagcaaucgaucaaaucaaugggaagcugaauagauugaucgggaaaaccaacgagaaauuccaucagauugaaaaagaauucucagaagucgaagggagaauccaggaccuugagaaauauguugaggacacuaaaauagaucucuggucauacaacgcggagcuucuuguugcccuggagaaccaacauacaauugaucuaacugacucagaaaugaacaaacuguuugaaaaaacaaagaagcaacugagggaaaaugcugaggauaugggcaaugguuguuucaaaauauaccacaaaugugacaaugccugcauaggaucaaucagaaauggaacuuaugaccacgauguauacagagaugaagcauugaacaaccgguuccagaucaagggaguugagcugaagucaggguacaaagauuggauccuauggauuuccuuugccauaucauguuuuuugcuuuguguugcuuuguugggguucaucaugugggccugccaaaaaggcaacauuaggugcaacauuugcauuuga

SEQ ID NO: 37450 - RNA, 1701 nt, Artificial Sequence
  derived and/or modified CDS sequence (wt) from hemagglutinin__InfluenzaA__ADL28137
augaagacuaucauugcuuugagcuacauucuaugucugguuucugcucaaaaacuuccuggaaaugacaacagcacggcaacgcugugccuugggcaccaugcaguaccaaacggaacgauagugaaaacaaucacgaaugaccaaauugaaguuacuaaugcuacugagcugguucagaguuccucaacaggugaaauaugcgacgguccucaucagauccuugauggagaaaacugcacacuaauagaugcucuauugggagacccucagugugauggcuuccaaaauaagaaaugggaccuuuuuguugaacgcagcaaagccuacagcaacuguuacccuuaugaugugccggauuaugccucccuuaggucacuaguugccucauccggcacacuugaguuuaacaaugaaagcuucaauuggacuggagucacucaaaacggaacaagcucugcuugcauaaggagaucuaauaacaguuucuuuaguagauugaauugguugacccacuuaaaauucaaauacccagcauugaacgugacuaugccaaacaaugaacaauuugacaaauuguacauuugggggguccaccacccggguacggacaaugaccaaaucuuccuguaugcucaagcaucaggaagaaucacagucucuaccaaaagaagccaacaaacuguaaucccgaauauuggaucuagacccagaguaaggaauaucccuagcagaauaagcaucuauuggacaauaguaaaaccaggagacauacuuuugauuaacagcacagggaaucuaauugcuccuagggguuacuucaaaauacgaagugggaaaagcucaauaaugagaucagaugcacccauuggcaaaugcaauucugaaugcaucacuccaaauggaagcauucccaaugacaaaccauuccaaaauguaaacaggaucacauacggggccugucccagauauguuaagcaaaacacucugaaauuggcaacagggaugcgaaauguaccagagaaacaaacuagaggcauauuuggcgcaaucgcggguuucauagaaaaugguugggagggaaugguagaugguugguacggcuucaggcaucaaaauucugagggaagaggacaagcagcagaucucaaaagcacucaagcagcaaucgaucaaaucaaugggaagcugaauagauugaucgggaaaaccaacgagaaauuccaucagauugaaaaagaauucucagaagucgaagggagaauucaggaccuugagaaauauguugaggacacuaaaauagaucucuggucauacaacgcggagcuucuuguugcccuggagaaccaacauacaauugaucugacugacucagaaaugaacaaacuguuugaaaaaacaaagaagcaacugagggaaaaugcugaggauaugggcaaugguuguuucaaaauauaccacaaaugugacaaugccugcauaggaucaaucagaaauggaacuuaugaccacgauguauacagagaugaagcauuaaacaaccgguuccagaucaagggaguugagcugaagucaggguacaaagauuggauccuauggauuuccuuugccauaucauguuuuuugcuuuguguugcuuuguugggguucaucaugugggccugccaaaaaggcaacauuaggugcaacauuugcauuuga

SEQ ID NO: 37451 - RNA, 1701 nt, Artificial Sequence; identical to SEQ ID NO: 37393
  derived and/or modified CDS sequence (wt) from hemagglutinin__InfluenzaA__ADL28148

SEQ ID NO: 37452 - RNA, 1701 nt, Artificial Sequence; identical to SEQ ID NO: 37380
  derived and/or modified CDS sequence (wt) from hemagglutinin__InfluenzaA__ADL28170

SEQ ID NO: 37453 - RNA, 1701 nt, Artificial Sequence; identical to SEQ ID NO: 37382
  derived and/or modified CDS sequence (wt) from hemagglutinin__InfluenzaA__ADL28181

SEQ ID NO: 37454 - RNA, 1701 nt, Artificial Sequence
  derived and/or modified CDS sequence (wt) from hemagglutinin__InfluenzaA__ADL28192
augaagacuaucauugcuuugagcuacauucuaugucugguuuucgcucaaaaacuuccuggaaaugacaacagcacggcaacgcugugccuugggcaccaugcaguaccaaacggaacgguagugaaaacaaucacgaaugaccaaauugaaguuacuaaugcuacugagcugguucagaguuccucaacaggugaaauaugcgacaguccucaucagauccuugauggaaaaaacugcacacuaauagaugcucuauugggagacccucagugugauggcuuccaaaauaagaaaugggaccuuuuuguugaacgcagcaaagccuacagcaacuguuacccuuaugaugugccggauuaugccucccuuaggucacuaguugccucauccggcacacuggaguuuaacaaugaaagcuucaauuggacuggagucacucaaaacggaacaagcucugcuugcauaaggaggucuaaaaacaguuucuuuaguagauugaauugguugacccacuuaaacuucaaauacccagcauugaacgugacuaugccaaacaaugaacaauuugacaaauuguacauuugggggguucaccacccggguacggacaaagaccaaaucuuccuguaugcucaagcaucaggaagaaucacagucucuaccaaaagaagccaacaaacuguaaucccgaauaucggaucuagacccagaguaaggaauaucccuagcagaguaagcaucuauuggacaauaguaaaaccgggagacauacuuuugauuaacagcacagggaaucuaauugcuccuagggguuacuucaaaauacgaagugggaaaagcucaauaaugagaucagaugcacccauuggcaaaugcaauucugaaugcaucacuccaaauggaagcauucccaaugacaaaccauuccaaaauguaaacaggaucacauacggggccugucccagauauguuaagcaaaacacucugaaauuggcaacagggaugcgaaauguaccagagaaacaaacuagaggcauauuuggcgcaaucgcggguuucauagaaaaugguugggagggaaugguggaugguugguacgguuucaggcaucaaaauucugagggaagaggacaagcagcagaucucaaaagcacucaagcagcaaucgaucaaaucaaugggaagcugaauagauugaucgggaaaaccaacgagaaauuccaucagauugaaaaagaauucucagaagucgaagggagaauucaggaccuugagaaauauguugaggacacuaaaauagaucucuggucauacaacgcggagcuucuuguugcccuggagaaccaacauacaauugaucuaacugacucagaaaugaacaaacuguuugaaaaaacaaagaagcaacugagggaaaaugcugaggauaugggcaaugguuguuucaaaauauaccacaaaugugacaaugccugcauaggaucaaucagaaauggaacuuaugaccacgauguauacagagaugaagcauuaaacaaccgguuucagaucaagggaguugagcugaagucaggguacaaagauuggauccuauggauuuccuuugccauaucauguuuuuugcuuuguguugcuuuguugggguucaucaugugggccugccaaaaaggcaacauuaggugcaacauuugcauuuga

SEQ ID NO: 37455 - RNA, 1701 nt, Artificial Sequence
  derived and/or modified CDS sequence (wt) from hemagglutinin__InfluenzaA__ADL28203
augaagacuaucauugcuuugagcuacauucuaugucugguuuucgcucaaaaacuuccuggaaaugacaacagcacggcaacgcugugccuugggcaccaugcaguaccaaacggaacgauagugaaaacaaucacgaaugaccaaauugaaguuacuaaugcuacugagcugguucagaguuccucaacaggugaaauaugcaacaguccucaucagauccuugauggagaaaacugcacacuaauagaugcucuauugggagacccucagugugauggcuuccaaaauaagaaaugggaccuuuuuguugaacgcagcaaagccuacagcaacuguuacccuuaugaugugccggauuaugccucccuuaggucacuaguugccucauccggcacacuggaguuuaacaaugaaagcuucaauuggacuggagucacucaaaauggaacaagcucugcuugcauaaggagaucuaauaacaguuucuuuaguagauugaauugguugacccacuuaaaauucaaauacccagcauuaaacgugacuaugccaaacaaugaacaauuugacaaauuguacauuugggggguucaccacccggguacggacaaugaccaaaucuuccuguaugcucaagcaucaggaagaaucacagucucuaccaaaagaagccaacaaacuguaaucccgaauaucggaucuagacccagaguaaggaauaucccuagcagaauaagcaucuauuggacaauaguaaaaccgggagacauacuuuugauuaacagcacagggaaucuaauugcuccuagggguuacuucaaaauacgaagugggaaaagcucaauaaugagaucagaugcacccauuggcaaaugcaauucugaaugcaucacuccaaauggaagcauucccaaugacaaaccauuccaaaauguaaacaggaucacauacggggccugucccagauauguuaagcaaaacacucugaaauuggcaacagggaugcgaaauguaccagagaaacaaacuagaggcauauuuggcgcaaucgcggguuucauagaaaaugguugggagggaaugguggaugguugguacgguuucaggcaucaaaauucugagggaagaggacaagcagcagaucucaaaagcacucaagcagcaaucgaucaaaucaaugggaagcugaauagauugaucgggaaaaccaacgagaaauuccaucagauugaaaaagaauucucagaagucgaagggagaauucaggaccuugagaaauauguugaggacaccaaaauagaucucuggucauacaacgcggagcuucuuguugcccuggagaaccaacauacaauugaucuaacugacucagaaaugaacaaacuguuugaaaaaacaaagaagcaacugagggaaaaugcugaggauaugggcaaugguuguuucaaaauauaccacaaaugugacaaugccugcauaggaucaaucagaaauggaacuuaugaccacgauguauacagagaugaagcauuaaacaaccgguuccagaucaagggaguugagcugaagucaggguacaaagauuggauccuauggauuuccuuugccauaucauguuuuuugcuuuguguugcuuuguugggguucaucaugugggccugccaaaaaggcaacauuaggugcaacauuugcauuuga

SEQ ID NO: 37456 - RNA, 1701 nt, Artificial Sequence; identical to SEQ ID NO: 35611
  derived and/or modified CDS sequence (wt) from hemagglutinin__InfluenzaA__ADL28214

SEQ ID NO: 37457 - RNA, 1701 nt, Artificial Sequence
  derived and/or modified CDS sequence (wt) from hemagglutinin__InfluenzaA__ADL28225
augaagacuaucauugcuuugagcuacauucuaugucugguuuucgcucaaaaacuuccuggaaaugacaacagcacggcaacgcugugccuugggcaccaugcaguaccaaacggaacgauagugaaaacaaucacgaaugaccaaauugaaguuacuaaugcuacugagcugguucagaguuccucaacaggugaaauaugcgacaguccucaucagauccuugauggagaaaacugcacacuaauagaugcucuauugggagacccucagugugauggcuuccaaaauaagaaaugggaccuuuuuguugaacgaagcaaagccuacagcaacuguuacccuuaugaugugccggauuaugccucccuuaggucacuaguugccucauccggcacacuggaguuuaacaaugaaagcuucaauuggacuggagucacucaaaacggaacaagcucugcuugcauaaggagaucuaauaacaguuucuuuaguagauugaauugguugacccacuuaaaauucaaauacccagcauugaacgugacuaugccaaacaaugaacaauuugacaaauuguacauuugggggguucaccacccggguacggacaaugaccaaaucuuccuguauucucaagcaucaggaagaaucacaguaucuaccaaaagaagccaacaaacuguaaucccgaauaucggaucuagacccagaguaaggaauaucccuagcagaauaagcaucuauuggacaauaguaaaaccgggagacauacuuuugauuaacagcacagggaaucuaauugcuccuagggguuacuucaaaauacgaagugggaaaagcucaauaaugagaucagaugcacccauuggcaaaugcaauucugaaugcaucacuccaaauggaagcauucccaaugacaaaccauuccaaaauguaaacaggaucacauacggggccugucccagauaugucaagcaaaacacucuaaaauuggcaacaggaaugcgaaauguaccagagaaacaaacuagaggcauauuuggcgcaaucgcggguuucauagaaaaugguugggagggaaugguggaugguugguacgguuucaggcaucaaaauucugagggaagaggacaagcagcagaucucaaaagcacucaagcagcaaucgaucaaaucaaugggaagcugaauagauugaucgggaaaaccaacgagaaauuccaucagauugaaaaagaauucucagaagucgaagggagaauccaggaccuugagaaauauguugaggacacuaaaacagaucucuggucauacaacgcggagcuucuuguugcccuggagaaccaacauacaauugaucuaacugacucagaaaugaacaaacuguuugaaaaaacaaagaagcaacugagggaaaaugcugaggauaugggcaaugguuguuucaaaauauaccacaaaugugacaaugccugcauaggaucaaucagaaauggaacuuaugaccacgauguauacagagaugaagcauugaacaaccgguuccagaucaagggaguugagcugaagucaggguacaaagauuggauccuauggauuuccuuugccauaucauguuuuuugcuuuguguugcuuuguugggguucaucaugugggccugccaaaaaggcaacauuaggugcaacauuugcauuuga

SEQ ID NO: 37458 - RNA, 1701 nt, Artificial Sequence
  derived and/or modified CDS sequence (wt) from hemagglutinin__InfluenzaA__ADL28236
augaagacuaucauugcuuugagcuacauucuaugucugguuuucgcucaaaaacuuccuggaaaugacaacagcacggcaacgcugugccuugggcaccaugcaguaccaaacggaacgauagugaaaacaaucacgaaugaccaaauugaaguuacuaaugcuacugagcugguucagaguuccucaacaggugaaauaugcgacaguccucaucagauccuugauggaaaaaacugcacacuaauagaugcucuauugggagacccucagugugauggcuuccaaaauaagaaaugggaccuuuuuguugaacgcagcaaagccuacagcaacuguuacccuuaugaugugccggauuaugccucccuuaggucacuaguugccucauccggcacacuggaguuuaacaaugaaagcuucaauuggacuggagucacucaaaacggaacaagcucugcuugcauaaggagaucuaaaaacaguuucuuuaguagauugaauugguugacccacuuaaacuucaaauacccagcauugaacgugacuaugccaaacaaugaacaauuugacaaauuguacauuugggggguucaccacccggguacggacaaagaccaaaucuuccuguaugcucaagcaucaggaagaaucacagucucuaccaaaagaagccaacaaacuguaaucccgaauaucgggucuagacccagaguaaggaauaucccuagcagaauaagcaucuauuggacaauaguaaaaccgggagacauacuuuugauuaacagcacagggaaucuaauugcuccuagggguuacuucaaaauacgaagugggaaaagcucaauaaugagaucagaugcacccauuggcaaaugcaauucugaaugcaucacuccaaauggaagcauucccaaugacaaaccauuccaaaauguaaacaggaucacauacggggccugucccagauauguuaagcaaagcacucugaaauuggcaacagggaugcgaaauguaccagagaaacaaacuagaggcauauuuggcgcaaucgcggguuucauagaaaaugguugggagggaaugguggaugguugguacgguuucaggcaucaaaauucugagggaagaggacaagcagcagaucucaaaagcacucaagcagcaaucgaucaaaucaaugggaagcugaauagauugaucgggaaaaccaacgagaaauuccaucagauugaaaaagaauucucagaagucgaagggagaauucaggaccuugagaaauauguugaggacacuaaaauagaucucuggucauacaacgcggagcuucuuguugcccuggagaaccaacauacaauugaucuaacugacucagaaaugaacaaacuguuugaaaaaacaaagaagcaacugagggaaaaugcugaggauaugggcaaugguuguuucaaaauauaccacaaaugugacaaugccugcauaggaucaaucagaaauggaacuuaugaccacgauguauacagagaugaagcauuaaacaaccgguuucagaucaagggaguugagcugaagucaggguacaaggauuggauccuauggauuuccuuugccauaucauguuuuuugcuuuguguugcuuuguugggguucaucaugugggccugccaaaaaggcaacauuaggugcaacauuugcauuuga

SEQ ID NO: 37459 - RNA, 1701 nt, Artificial Sequence; identical to SEQ ID NO: 37133
  derived and/or modified CDS sequence (wt) from hemagglutinin__InfluenzaA__ADL28247

SEQ ID NO: 37460 - RNA, 1701 nt, Artificial Sequence; identical to SEQ ID NO: 37376
  derived and/or modified CDS sequence (wt) from hemagglutinin__InfluenzaA__ADL28258

SEQ ID NO: 37461 - RNA, 1701 nt, Artificial Sequence; identical to SEQ ID NO: 37409
  derived and/or modified CDS sequence (wt) from hemagglutinin__InfluenzaA__ADL28370

SEQ ID NO: 37462 - RNA, 1701 nt, Artificial Sequence; identical to SEQ ID NO: 34714
  derived and/or modified CDS sequence (wt) from hemagglutinin__InfluenzaA__ADL29672

SEQ ID NO: 37463 - RNA, 1701 nt, Artificial Sequence
  derived and/or modified CDS sequence (wt) from hemagglutinin__InfluenzaA__ADL29682
auggaggcaauacuaguaguucugcuauauacauuugcaaccgcaaaugcagacacauuauguauagguuaucaugcgaacaauucaacagacacuguagacacaguacuagaaaagaauguaacaguaacacacucuguuaaccuucuagaagacaagcauaacgggaaacuaugcaaacuaagagggguagccccauugcauuuggguaaauguaacauugcuggcuggauccugggaaauccagagugugaaucacucuccacagcaagcucaugguccuacauuguggaaacaucuaguucagacaauggaacguguuacccaggagauuucaucgauuaugaggagcuaagagagcaauugagcucagugucaucauuugaaagguuugagauauuccccaagacaaguucauggcccaaucaugacucgaacaaagguguaacggcagcauguccucaugcuggagcaaaaagcuucuacaaaaauuuaauauggcuaguuaaaaaaggaaauucauacccaaagcucagcaaauccuacauuaaugauaaagggaaagaaguccucgugcuauggggcauucaccauccaucuacuagugcugaccaacaaagucucuaucagaaugcagaugcauauguuuuugugggaucaucaagauacagcaagaaguucaagccggaaauagcaauaagacccaaagugagggaucaagaagggagaaugaacuauuacuggacacuaguagagccgggagacaaaauaacauucgaagcaacuggaaaucuagugguaccgagauaugcauucgcaauggaaagaaaugcuggaucugguauuaucauuucagauacaccaguccacgauugcaauacaacuugucagacacccaagggugcuauaaacaccagccucccauuucauaauauacauccgaucacaauuggaaaauguccaaaauauguaaaaagcacaaaauugagacuggccacaggauugaggaaugucccgucuauucaaucuagaggccuauuuggggccauugccgguuucauugaagggggguggacagggaugguagauggaugguacgguuaucaccaucaaaaugagcaggggucaggauaugcagccgaccugaagagcacacagaaugccauugacgagauuacuaacaaaguaaauucuguuauugaaaagaugaauacacaguucacagcaguagguaaagaguucaaccaccuggaaaaaagaauagagaauuuaaauaaaaaaguugaugaugguuuccuggacauuuggacuuacaaugccgaacuguugguucuauuggaaaaugaaagaacuuuggacuaccacgauucaaaugugaagaacuuauaugaaaagguaagaagccaguuaaaaaacaaugccaaggaaauuggaaacggcugcuuugaauuuuaccacaaaugcgauaacacgugcauggaaagugucaaaaaugggacuuaugacuacccaaaauacucagaggaagcaaaauuaaacagagaagaaauagaugggguaaagcuggaaucaacaaggauuuaccagauuuuggcgaucuauucaacugucgccaguucauugguacugguagucucccugggggcaaucaguuucuggaugugcucuaaugggucucuacagugcagaauauguauuuaa

SEQ ID NO: 37464 - RNA, 1701 nt, Artificial Sequence; identical to SEQ ID NO: 37181
  derived and/or modified CDS sequence (wt) from hemagglutinin__InfluenzaA__ADL29692

SEQ ID NO: 37465 - RNA, 1701 nt, Artificial Sequence
  derived and/or modified CDS sequence (wt) from hemagglutinin__InfluenzaA__ADL29702
augaaggcaauacuaguaguucugcuauauacauuugcaaccgcaaaugcagacacauuauguauagguuaucaugcgaacaauucaacagacacuguagacacaguacuagaaaagaauguaacaguaacacacucuguuaaccuucuagaagacaagcauaacgggaaacuaugcaaacuaagagggguagccccauugcauuuggguaaauguaacauugcuggcuggauccugggaaauccagagugugaaucacucuccacagcaagcucaugguccuacauuguggaaacaucuaguucagacaauggaacguguuacccaggagauuucaucgauuaugaggagcuaagagagcaauugagcucagugucaucauuugaaagguuugagauauuccccaagacaaguucauggcccaaucaugacucgaacaaagguguaacggcagcauguccucaugcuggagcaaaaagcuucuacaaaaauuuaauauggcuaguuaaaaaaggaaauucauacccaaagcucagcaaauccuacauuaaugauaaagggaaagaaguccucgugcuauggggcauucaccauccaucuacuagugcugaccaacaaagucucuaucagaaugcagauacauauguuuuuguggggacaucaagauacagcaagaaguucaagccggaaauagcaauaagacccaaagugagggaucaagaagggagaaugaacuauuacuggacacuaguagagccgggagacaaaauaacauucgaagcaacuggaaaucuagugguaccgagauaugcauucgcaauggaaagaaaugcuggaucugguauuaucauuucagauacaccaguccacgauugcaauacaacuugucagacacccaagggugcuauaaacaccagccucccauuucagaauauacauccgaucacaauuggaaaauguccaaaauauguaaaaagcacaaaauugagacuggccacaggauugaggaaugucccgucuauucaaucuagaggccuauuuggggccauugccgguuucauugaagggggguggacagggaugguagauggaugguacgguuaucaccaucaaaaugagcaggggucaggauaugcagccgaccugaagagcacacagaaugccauugacgagauuacuaacaaaguaaauuccguuauugaaaagaugaauacacaguucacagcaguagguaaagaguucaaccaccuggaaaaaagaauagagaauuuaaauaaaaaaauugaugaugguuuccuggacauuuggacuuacaaugccgaacuguugguucuauuggaaaaugaaagaacuuuggacuaccacgauucaaaugugaagaacuuauaugaaaagguaagaaaccaguuaaaaaacaaugccaaggaaauuggaaacggcugcuuugaauuuuaccacaaaugcgauaacacgugcauggaaagugucaaaaaugggacuuaugacuacccaaaauacucagaggaagcaaaauuaaacagagaagaaauagaugggguaaagcuggaaucaacaaggauuuaccagauuuuggcgaucuauucaacugucgccaguucauugguacugguagucucccugggggcaaucaguuucuggaugugcucuaaugggucucuacaguguagaauauguauuuaa

SEQ ID NO: 37466 - RNA, 1701 nt, Artificial Sequence; identical to SEQ ID NO: 37181
  derived and/or modified CDS sequence (wt) from hemagglutinin__InfluenzaA__ADL29730

SEQ ID NO: 37467 - RNA, 1701 nt, Artificial Sequence; identical to SEQ ID NO: 35463
  derived and/or modified CDS sequence (wt) from hemagglutinin__InfluenzaA__ADL29740

SEQ ID NO: 37468 - RNA, 1701 nt, Artificial Sequence
  derived and/or modified CDS sequence (wt) from hemagglutinin__InfluenzaA__ADL29750
augaaggcaauacuaguaguucugcuauauacauuugcaaccgcaaaugcagacacauuauguauagguuaucaugcgaacaauucaacagacacuguagacacaguacuagaaaagaauguaacaguaacacacucuguuaaccuucuagaagacaagcauaacgggaaacuaugcaaacuaagagggguagccccauugcauuuggguaaauguaacauugcuggcuggauccugggaaauccagagugugaaucacucuccacagcaagcucaugguccuacauuguggaaacaucuaguucagacaauggaacguguuacccaggagauuucaucgauuaugaggagcuaagagagcaauugagcucagugucaucauuugaaagguuugagauauuccccaagacaaguucauggcccaaucaugacucgaacaaagguguaacggcagcauguccucaugcuggagcaaaaagcuucuacaaaaauuuaauauggcuaguuaaaaaaggaaauucauacccaaagcucagcaaauccuacauuaaugauaaagggaaagaaguccucgugcuauggggcauucaccauccaucuacuagugcugaccaacaaagucucuaucagaaugcagaugcauauguuuuuguggggacaucaagauacagcaagaaguucaagccggaaauagcaauaagacccaaagugagggaucaagaagggagaaugaauuauuacuggacacuaguagagccgggagacaaaauaacauucgaagcaacuggaaaucuagugguaccgagauaugcauucgcaauggaaagaaaugcuggaucugguauuaucauuucagauacaccaguccacgauugcaauacaacuugucagacacccaagggugcuauaaacaccagccucccauuucagaauauacauccgaucacaauuggaaaauguccaaaauauguaaaaagcacaaaauugagacuggccacaggauugaggaaugucccgucuauucaaucuagaggccuauuuggggccauugccgguuucauugaagggggguggacagggaugguagauggaugguacgguuaucaccaucaaaaugagcaggggucaggauaugcagccgaccugaagagcacacagaaugccauugaugagauuacuaacaaaguaaauucuguuauugaaaagaugaauacacaguucacagcaguagguaaagaguucaaccaccuggaaaaaagaauagagaauuuaaauaaaaaaguugaugaugguuuccuggacauuuggacuuacaaugccgaacuguugguucuauuggaaaaugaaagaacuuuggacuaccacgauucaaaugugaagaacuuauaugaaaagguaagaagccaguuaaaaaacaaugccaaggaaauuggaaacggcugcuuugaauuuuaccacaaaugcgauaacacgugcauggaaagugucaaaaaugggacuuaugacuacccaaaauacucagaggaagcaaaauuaaacagagaagaaauagaugggguaaagcuggaaucaacaaggauuuaccagauuuuggcgaucuauucaacugucgccaguucauugguacugguagucucccugggggcaaucaguuuuuggaugugcucuaaugggucucuacaguguagaauauguauuuaa

SEQ ID NO: 37469 - RNA, 1701 nt, Artificial Sequence
  derived and/or modified CDS sequence (wt) from hemagglutinin__InfluenzaA__ADL29760
augaaggcaauacuaguaguucugcuauauacauuugcaaccgcaaaugcagacacauuauguauagguuaucaugcaaacaauucaacagacacuguagacacaguacuagaaaagaauguaacaguaacacacucuguuaaccuucuagaauacaagcauaacgggaaacuaugcaaacuaagagggguagccccauugcauuuggguaaauguaacauugcuggcuggauccugggaaauccagagugugaaucacucuccacagcaagcucaugguccuacauuguggaaacaucuaguucagacaauggaacguguuacccaggagauuucaucgauuaugaggagcuaagagagcaauugagcucagugucaucauuugaaagguuugagauauuccccaagacaaguucauggcccaaucaugacucgaacaaagguguaacggcagcauguccucaugcuggagcaaaaagcuucuacaaaaauuuaauauggcuaguuaaaaaaggaaauucauacccaaagcucagcaaauccuacauuaaugauaaagggaaagaaguccucgugcuauggggcauucaccauccaucuacuagugcugaccaacaaagucucuaucagaaugcagaugcauauguuuuuguggggacaucaagauacagcaagaaguucaagccggaaauagcaauaagacccaaagugagggaucaagaagggagaaugaacuauuacuggacacuaguagagccgggagacaaaauaacauucgaagcaacuggaaaucuagugguaccgagauaugcauucgcaauggaaagaaaugcuggaucugguauuaucauuucagauacaccaguccacgauugcaauacaacuugucagacacccaagggugcuauaaacaccagccucccauuucagaauauacauccgaucacaauuggaaaauguccaaaauauguaaaaagcacaaaauugagacuggccacaggauugaggaaugucccgucuauucaaucuagaggccuauuuggggccauugccgguuucauugaagggggguggacagggaugguagauggaugguacgguuaucaccaucaaaaugagcaggggucaggauaugcagccgaccugaagagcacacagaaugccauugacgagauuacuaacaaaguaaauucuguuauugaaaagaugaauacacaguucacagcaguagguaaagaguucaaccaccuggaaaaaagaauagagaauuuaaauaaaaaaguugaugaugguuuccuggacauuuggacuuacaaugccgaacuguugguucuauuggaaaaugaaagaacuuuggacuaccacgauucaaaugugaagaacuuauaugaaaagguaagaagccaguuaaaaaacaaugccaaggaaauuggaaacggcugcuuugaauuuuaccacaaaugcgauaacacgugcauggaaagugucaaaaaugggacuuaugacuacccaaaauacucagaggaagcaaaauuaaacagagaagaaauagaugggguaaaacuggaaucaacaaggauuuaccagauuuuggcgaucuauucaacugucgccaguucauugguacugguagucucccugggggcaaucaguuucuggaugugcucuaaugggucucuacaguguagaauauguauuuaa

SEQ ID NO: 37470 - RNA, 1701 nt, Artificial Sequence; identical to SEQ ID NO: 37181
  derived and/or modified CDS sequence (wt) from hemagglutinin__InfluenzaA__ADL29770

SEQ ID NO: 37471 - RNA, 1701 nt, Artificial Sequence
  derived and/or modified CDS sequence (wt) from hemagglutinin__InfluenzaA__ADL29780
augaaggcaauacuaguaguucugcuauauacauuugcaaccgcaaaugcagacacauuauguauagguuaucaugcgaacaauucaacagacacuguagacacaguacuagaaaagaauguaacaguaacacacucuguuaaccuucuagaagacaagcauaacgggaaacuaugcaaacuaagagggguagccccauugcauuuggguaaauguaacauugcuggcuggauccugggaaauccagagugugaaucacucuccacagcaagcucaugguccuacauuguggaaacaucuaguucagacaauggaacguguuacccaggagauuucaucgauuaugaggagcuaagagagcaauugagcucagugucaucauuugaaagguuugagauauuccccaagacaaguucauggcccaaucaugacucgaacaaagguguaacggcagcauguccucaugcuggagcaaaaagcuucuacaaaaauuuaauauggcuaguuaaaaaaggaaauucauacccaaagcucagcaaauccuacauuaaugauaaagggaaagaaguccucgugcuauggggcauucaccauccauccacuagugcugaccaacaaagucucuaucagaaugcagauacauauguuuuuguggggacaucaagauacagcaagaaguucaagccggaaauagcaauaagacccaaagugagggaucaagaagggagaaugaacuauuacuggacacuaguagagccgggagacaaaauaacauucgaagcaacuggaaaucuagugguaccgagauaugcauucgcaauggaaagaaaugcuggaucugguauuaucauuucagauacaccaguccacgauugcaauacaacuugucagacacccaagggugcuauaaacaccagccucccauuucagaauauacauccgaucacaauuggaaaauguccaaaauauguaaaaagcacaaaauugagacuggccacaggauugaggaaugucccgucuauucaaucuagaggccuauuuggggccauugccgguuucauugaagggggguggacagggaugguagauggaugguacgguuaucaccaucaaaaugagcaggggucaggauaugcagccgaccugaagagcacacagaaugccauugacgagauuacuaacaaaguaaauuccguuauugaaaagaugaauacacaguucacagcaguagguaaagaguucaaccaccuggaaaaaagaauagagaauuuaaauaaaaaaauugaugaugguuuccuggacauuuggacuuacaaugccgaacuguugguucuauuggaaaaugaaagaacuuuggacuaccacgauucaaaugugaagaacuuauaugaaaagguaagaagccaguuaaaaaacaaugccaaggaaauuggaaacggcugcuuugaauuuuaccacaaaugcgauaacacgugcauggaaagugucaaaaaugggacuuaugacuacccaaaauacucagaggaagcaaaauuaaacagagaagaaauagaugggguaaagcuggaaucaacaaggauuuaccagauuuuggcgaucuauucaacugucgccaguucauugguacugguagucucccugggggcaaucaguuucuggaugugcucuaaugggucucuacaguguagaauauguauuuaa

SEQ ID NO: 37472 - RNA, 1701 nt, Artificial Sequence
  derived and/or modified CDS sequence (wt) from hemagglutinin__InfluenzaA__ADL29879
augaaggcaauacuaguaguucugcuauauacauuugcaaccgcaaaugcagacacauuauguauagguuaucaugcgaacaauucaacagacacuguagacacaguacuagaaaagaauguaacaguaacacacucuguuaaccuucuagaagacaagcauaacgggaaacuaugcaaacuaagagggguagccccauugcauuuggguaaauguaacauugcuggcuggauccugggaaauccagagugugaaucacucuccacagcaagcucaugguccuacauuguggaaacaucuaguucagacaauggaacguguuacccaggagauuucaucgauuaugaggagcuaagagagcaauugagcucagugucaucauuugaaagguuugagauauuccccaagacaaguucauggcccaaucaugacucgaacaaagguguaacggcagcauguccucaugcuggagcaaaaagcuucuacaaaaauuuaauauggcuaguuaaaaaaggaaauucauacccaaagcucagcaaauccuacauuaaugauaaagggaaagaaguccucgugcuauggggcauucaccauccaucuacuagugcugaccaacaaagucucuaucagaaugcagauucauauguuuuuguggggacaucaaaauacagcaagaaguucaagccggaaauagcaauaagacccaaagugagggaucaagaagggagaaugaauuauuacuggacacuaguagagccgggagacaaaauaacauucgaagcaacuggaaaucuagugguaccgagauaugcauucgcaauggaaagaaaugcuggaucugguauuaucauuucagauacaccaguccacgauugcaauacaacuugucagacacccaagggugcuauaaacaccagccucccauuucagaauauacauccgaucacaauuggaaaauguccaaaauauguaaaaagcacaaaauugagacuggccacaggauugaggaaugucccgucuauucaaucuagaggccuauuuggggccauugccgguuucauugaagggggguggacagggaugguagauggaugguacgguuaucaccaucaaaaugagcaggggucaggauaugcagccgaccugaagagcacacagaaugccauugacgagauuacuaacaaaguaaauucuguuauugaaaagaugaauacacaguucacagcaguagguaaagaguucaaccaccuggaaaaaagaauagagaauuuaaauaaaaaaguugaugaugguuuccuggacauuuggacuuacaaugccgaacuguugguucuauuggaaaaugaaagaacuuuggacuaccacgauucaaaugugaagaacuuauaugaaaagguaagaagccaguuaaaaaacaaugccaaggaaauuggaaacggcugcuuugaauuuuaccacaaaugcgauaacacgugcauggaaagugucaaaaaugggacuuaugacuacccaaaauacucagaggaagcaaaauuaaacagagaagaaauagaugggguaaagcuggaaucaacaaggauuuaccagauuuuggcgaucuauucaacugucgccaguucauugguacugguagucucccugggggcaaucaguuuuuggaugugcucuaaugggucucuacaguguagaauauguauuuaa

SEQ ID NO: 37473 - RNA, 1701 nt, Artificial Sequence
  derived and/or modified CDS sequence (wt) from hemagglutinin__InfluenzaA__ADL32017
augaaggcaauacuaguaguucugcuauauacauuugcaaccgcaaaugcagacacauuauguauagguuaucaugcgaacaauucaacagacacuguagacacaguacuagaaaagaauguaacaguaacacacucuguuaaccuucuagaagacaagcauaacgggaaacuaugccaacuaagagggguagccccauugcauuuggguaaauguaacauugcuggcuggauccugggaaauccagagugugaaucacucuccacagcaagcucaugguccuacauuguggaaacaucuaguucagacaauggaacguguuacccaggagauuucaucgauuaugaggagcuaagagagcaauugagcucagugucaucauuugaaagguuugagauauuccccaagacaaguucauggcccaaucaugacucgaacaaagguguaacggcagcauguccucaugcuggagcaaaaagcuucuacaaaaauuuaauauggcuaguuaaaaaaggaaauucauacccaaagcucagcaaauccuacauuaaugauaaagggaaagaaguccucgugcuauggggcauucaccauccaucuacuagugcugaccaacaaagucucuaucagaaugcagauacauauguuuuuguggggacaucaagauacagcaagaaguucaagccggaaauagcaauaagacccaaagugagggaucaagaagggagaaugaacuauuacuggacacuaguagagccgggagacaaaauaacauucgaagcaacuggaaaucuagugguaccgagauaugcauucgcaauggaaagaaaugcuggaucugguauuaucauuucagauacaccaguccacgauugcaauacaacuugucagacacccaagggugcuauaaacaccagccucccauuucagaauauacauccgaucacaauuggaaaauguccaaaauauguaaaaagcacaaaauugagacuggccacaggauugaggaaugucccgucuauucaaucuagaggccuauuuggggccauugccgguuucauugaagggggguggacagggaugguagauggaugguacgguuaucaccaucaaaaugagcaggggucaggauaugcagccgaccugaagagcacacagaaugccauugacgagauuacuaacaaaguaaauuccguuauugaaaagaugaauacacaguucacagcaguagguaaagaguucaaccaccuggaaaaaagaauagagaauuuaaauaaaaaaauugaugaugguuuccuggacauuuggacuuacaaugccgaacuguugguucuauuggaaaaugaaagaacuuuggacuaccacgauucaaaugugaagaacuuauaugaaaagguaagaagccaguuaaaaaacaaugccaaggaaauuggaaacggcugcuuugaauuuuaccacaaaugcgauaacacgugcauggaaagugucaaaaaugggacuuaugacuacccaaaauacucagaggaagcaaaauuaaacagagaagaaauagaugggguaaagcuggaaucaacaaggauuuaccagauuuuggcgaucuauucaacugucgccaguucauugguacugguagucucccugggggcaaucaguuucuggaugugcucuaaugggucucuacaguguagaauauguauuuaa

SEQ ID NO: 37474 - RNA, 1701 nt, Artificial Sequence
  derived and/or modified CDS sequence (wt) from hemagglutinin__InfluenzaA__ADL32037
augaaggcaauacuaguaguucugcuauauacauuugcaaccgcaaaugcagacacauuauguauagguuaucaugcgaacaauucaacagacacuguagacacaguacuagaaaagaauguaacaguaacacacucuguuaaccuucuagaagacaagcauaacgggaaacuaugcaaacuaagagggguagccccauugcauuuggguaaauguaacauugcuggcuggauccugggaaauccagagugugaaucacucuccacagcaagcucaugguccuacauuguggaaacaucuaguucagacaauggaacguguuacccaggagauuucaucgauuaugaggagcuaagagagcaauugagcucagugucaucauuugaaagguuugagauauuccccaagacaaguucauggcccaaucaugacucgaacaaagguguaacggcagcauguccucaugcuggagcaaaaagcuucuacaaaaauuuaauauggcuaguuaaaaaaggaaauucauacccaaagcucagcaaauccuacauuaaugauaaagggaaagaaguccucgugcuauggggcauucaccauccaucuacuaguguugaccaacaaagucucuaucagaaugcagaugcauauguuuuuguggggacaucaagauacagcaagaaguucaagccggaaauagcaauaagacccaaagugagggaucaagaagggagaaugaacuauuacuggacacuaguagagccgggagacaaaauaacauucgaagcaacuggaaaucuagugguaccgagauaugcauucgcaauggaaagaaaugcuggaucugguauuaucauuucagauacaccaguccacgauugcaacacaacuugucagacacccaagggugcuauaaacaccagccucccauuucagaauauacauccgaucacaauuggaaaauguccaaaauauguaaaaagcacaaaauugagacuggccacaggauugaggaaugucccgucuauucaaucuagaggccuauuuggggccauugccgguuucauugaagggggguggacagggaugguagauggaugguacgguuaucaccaucaaaaugagcaggggucaggauaugcagccgaccugaagagcacacagaaugccauugacgagauuacuaacaaaguaaauucuguuauugaaaagaugaauacacaguucacagcaguagguaaagaguucaaccaccuggaaaaaagaauagagaauuuaaauaaaaaaguugaugaugguuuccuggacauuuggacuuacaaugccgaacuguugguucuauuggaaaaugaaagaacuuuggacuaccacgauucaaaugugaagaacuuauaugaaaagguaagaagccaguuaaaaaacaaugccaaggaaauuggaaacggcugcuuugaauuuuaccacaaaugcgauaacacgugcauggaaagugucaaaaaugggacuuaugacuacccaaaauacucagaggaagcaaaauuaaacagagaagaaauagaugggguaaagcuggaaucaacaaggauuuaccagauuuuggcgaucuauucaacugucgccaguucauugguacugguagucucccugggggcaaucaguuucuggaugugcucuaaugggucucuacaguguagaauauguauuuaa

SEQ ID NO: 37475 - RNA, 1701 nt, Artificial Sequence; identical to SEQ ID NO: 35309
  derived and/or modified CDS sequence (wt) from hemagglutinin__InfluenzaA__ADL32047

SEQ ID NO: 37476 - RNA, 1701 nt, Artificial Sequence
  derived and/or modified CDS sequence (wt) from hemagglutinin__InfluenzaA__ADL32057
augaaggcaauacuaguaguucugcuauauacauuugcaaccgcaaaugcagacacauuauguauagguuaucaugcgaacaauucaacagacacuguagacacaguacuagaaaagaauguaacaguaacacacucuguuaaccuucuagaagacaagcauaacgggaaacuaugcaaacuaagagggguagccccauugcauuuggguaaauguaacauugcuggcuggauccugggaaauccagagugugaaucacucuccacagcaagcucaugguccuacauuguggaaacaucuaguucagacaauggaacguguuacccaggagauuucaucgauuaugaggagcuaagagagcaauugagcucagugucaucauuugaaagguuugagauauuccccaagacaaguucauggcccaaucaugacucgaacaaagguguaacggcagcauguccucaugcuggagcaaaaagcuucuacaaaaauuuaauauggcuaguuaaaaaaggaaauucauacccaaagcucagcaaauccuacauuaaugauaaagggaaagaaguccucgugcuauggggcauucaccauccaucuacuagugcugaccaacaaggucucuaucagaaugcagaugcauauguuuuuguggggacaucaagauacagcaagaaguucaagccggaaauagcaauaagacccaaagugagggaucaagaagggagaaugaacuauuacuggacacuaguagagccgggagacaaaauaacauucgaagcaacuggaaaucuagugguaccgagauaugcauucgcaauggaaagaaaugcuggaucugguauuaucauuucagauacaccaguccacgauugcaauacaacuugucagacacccaagggugcuauaaacaccagccucccauuucagaauauacauccgaucacaauuggaaaauguccaaaauauguaaaaggcacaaaauugagacuggccacaggauugaggaaugucccgucuauucaaucuagaggccuauuuggggccauugccgguuucauugaagggggguggacagggaugguagauggaugguacgguuaucaccaucaaaaugagcaggggucaggauaugcagccgaccugaagagcacacagaaugccauugacgagauuacuaacaaaguaaauucuguuauugaaaagaugaauacacaguucacagcaguagguaaagaguucaaccaccuggaaaaaagaauagagaauuuaaauaaaaaaguugaugaugguuuccuggacauuuggacuuacaaugccgaacuguugguucuauuggaaaaugaaagaacuuuggacuaccacgauucaaaugugaagaacuuauaugaaaagguaagaagccaguuaaaaaacaaugccaaggaaauuggaaacggcugcuuugaauuuuaccacaaaugcgauaacacgugcauggaaagugucaaaaaugggacuuaugacuacccaaaauacucagaggaagcaaaauuaaacagagaagaaauagaugggguaaagcuggaaucaacaaggauuuaccagauuuuggcgaucuauucaacugucgccaguucauugguacugguagucucccugggggcaaucaguuucuggaugugcucuaaugggucucuacaguguagaauauguauuuaa

SEQ ID NO: 37477 - RNA, 1701 nt, Artificial Sequence; identical to SEQ ID NO: 35309
  derived and/or modified CDS sequence (wt) from hemagglutinin__InfluenzaA__ADL32090

SEQ ID NO: 37478 - RNA, 1701 nt, Artificial Sequence; identical to SEQ ID NO: 35463
  derived and/or modified CDS sequence (wt) from hemagglutinin__InfluenzaA__ADL32114

SEQ ID NO: 37479 - RNA, 1701 nt, Artificial Sequence; identical to SEQ ID NO: 35309
  derived and/or modified CDS sequence (wt) from hemagglutinin__InfluenzaA__ADL32344

SEQ ID NO: 37480 - RNA, 1701 nt, Artificial Sequence; identical to SEQ ID NO: 35128
  derived and/or modified CDS sequence (wt) from hemagglutinin__InfluenzaA__ADL32354

SEQ ID NO: 37481 - RNA, 1701 nt, Artificial Sequence
  derived and/or modified CDS sequence (wt) from hemagglutinin__InfluenzaA__ADL32364
augaaggcaauacuaguaguucugcuauauacauuugcaaccgcaaaugcagacacauuauguauagguuaucaugcgaacaauucaacagacacuguagacacaguacuagaaaagaauguaacaguaacacacucuguuaaccuucuagaagacaagcauaacgggaaacuaugcaaacuaagagggguagccccauugcauuuggguaaaugcaacauugcuggcuggauccugggaaauccagagugugaaucacucuccacagcaaucucaugguccuacauuguggaaacaucuaguucagacaauggaacguguuacccaggagauuucaucgauuaugaggagcuaagagagcaauugaguucagugucaucauuugaaagguuugagauauuccccaagacaaguucauggcccaaucaugacucgaacaaagguguaacggcagcauguccucaugcuggagcaaaaagcuucuacaaaaauuuaauauggcuaguuaaaaaaggaaauucauacccaaagcucagcaaauccuacauuaaugauaaagggaaagaaguccucgugcuauggggcauucaccauccaucuacuagugcugaccaacaaagucucuaucagaaugcagauacauauguuuuuguggggacaucaagauacagcaagaaguucaagccggaaauagcaauaagacccaaagugagggaucaagaagggagaaugaacuauuauuggacacuaguagagccgggagacaaaauaacauucgaagcaacuggaaaucuagugguaccgagauaugcauucgcaauggaaagaaaugcuggaucugguauuaucauuucagauacaccaguccacgauugcaauacaacuugucagacacccaagggugcuauaaacaccagccucccauuucagaauauacauccgaucacaauuggaaaauguccaaaauauguaaaaagcacaaaauugagacuggccacaggauugaggaaugucccgucuauucaaucuagaggccuauuuggggccauugccgguuucauugaagggggguggacagggaugguagauggaugguacgguuaucaccaucaaaaugagcaggggucaggauaugcagccgaccugaagagcacacagaaugccauugacgagauuacuaacaaaguaaauuccguuauugaaaagaugaauacacaguucacagcaguagguaaagaguucaaccaccuggaaaaaagaauagagaauuuaaauaaaaaaauugaugaugguuuccuggacauuuggacuuacaaugccgaacuguugguucuauuggaaaaugaaagaacuuuggacuaccacgauucaaaugugaagaacuuauaugaaaagguaagaagccaguuaaaaaacaaugccaaggaaauuggaaacggcugcuuugaauuuuaccacaaaugcgauaacacgugcauggaaagugucaaaaaugggacuuaugacuacccaaaauacucagaggaagcaaaauuaaacagagaagaaauagaugggguaaagcuggaaucaacaaggauuuaccagauuuuggcgaucuauucaacugucgccaguucauugguacugguagucucccugggggcaaucaguuucuggaugugcucuaaugggucucuacaguguagaauauguauuuaa

SEQ ID NO: 37482 - RNA, 1701 nt, Artificial Sequence
  derived and/or modified CDS sequence (wt) from hemagglutinin__InfluenzaA__ADL32374
augaaggcaauacuaguaguucugcuauauacauuugcaaccgcaaaugcagacacauuauguauagguuaucaugcgaacaauucaacagacacuguagacacaguacuagaaaagaauguaacaguaacacacucuguuaaccuucuagaagacaagcauaacgggaaacuaugcaaacuaagagggguagccccauugcauuuggguaaauguaacauugcuggcuggauccugggaaauccagagugugaaucacucuccacagcaagcucaugguccuacauuguggaaacaucuaguucagacaauggaacguguuacccaggagauuucaucgauuaugaggagcuaagagagcaauugagcucagugucaucauuugaaagguuugagauauuccccaagacaaguucauggcccaaucaugacucgaacaaaggcguaacggcagcauguccucaugcuggagcaaaaagcuucuacaaaaauuuaauauggcuaguuaaaaaaggaaauucauacccaaagcucagcaaauccuacauuaaugauaaagggaaagaaguccucgugcuauggggcauucaccauccaucuacuagugcugaccaacaaagucucuaucagaaugcagaugcauauguuuuuguggggacaucaagauacagcaagaaguucaagccggaaauagcaauaagacccaaagugagggaucaagaagggagaaugaacuauuacuggacacuaguagagccgggagacaaaauaacauucgaagcaacuggaaaucuagugguaccgagauaugcauucgcaauggaaagaaaugcuggaucugguauuaucauuucagauacaccaguccacgauugcaauacaacuugucaaacacccaagggugcuauaaacaccagccucccauuucagaauauacauccgaucacaauuggaaaauguccaaaauauguaaaaagcacaaaauugagacuggccacaggauugaggaaugucccgucuauucaaucuagaggccuauuuggggccauugcugguuucauugaagggggguggacagggaugguagauggaugguacgguuaucaccaucaaaaugagcaggggucaggauaugcagccgaccugaagagcacacagaaugccauugacgagauuacuaacaaaguaaauucuguuauugaaaagaugaauacacaguucacagcaguagguaaagaguucaaccaccuggaaaaaagaauagagaauuuaaauaaaaagguugaugaugguuuccuggacauuuggacuuacaaugccgaacuguugguucuauuggaaaaugaaagaacuuuggacuaccacgauucaaaugugaagaacuuauaugaaaagguaagaagccaguuaaaaaacaaugccaaggaaauuggaaacggcugcuuugaauuuuaccacaaaugcgauaacacgugcauggaaaguguaaaaaaugggacuuaugacuacccaaaauacucagaggaagcaaaauuaaacagagaagaaauagaugggguaaagcuggaaucaacaaggauuuaccagauuuuggcgaucuauucaacugucgccaguucauugguacugguagucucccugggggcaaucaguuucuggaugugcucuaaugggucucuacaguguagaauauguauuuaa

SEQ ID NO: 37483 - RNA, 1701 nt, Artificial Sequence
  derived and/or modified CDS sequence (wt) from hemagglutinin__InfluenzaA__ADL32384
augaaggcaauacuaguaguucugcuauauacauuugcaaccgcaacugcagacacauuauguauagguuaucaugcaaacaauucaacagacacuguagacacaguacuagaaaagaauguaacaguaacacacucuguuaaccuucuagaagacaagcauaacgggaaacuaugcaaacuaagagggguagccccauugcauuuggguaaauguaacauugcuggcuggauccugggaaauccagagugugaaucacucuccacagcaagcucaugguccuacauuguggaaacaucuaguucagacaauggaacguguuacccaggagauuucaucgauuaugaggagcuaagagagcaauugagcucagugucaucauuugaaagguuugagauauuccccaagacaaguucauggcccaaucaugacucgaacaaagguguaacggcagcauguccucaugcuggagcaaaaagcuucuacaaaaauuuaauauggcuaguuaaaaaaggaaauucauacccaaagcucagcaaauccuacauuaaugauaaagggaaagaaguccucgugcuauggggcauucaccauccaucuacuagugcugaccaacaaagucucuaucagaaugcagaugcauauguuuuuguggggacaucaagauacagcaagaaguucaagccggaaauagcaauaagacccaaagugagggaucaagaagggagaaugaacuauuacuggacacuaguagagccgggagacaaaauaacauucgaagcaacuggaaaucuagugguaccgagauaugcauucgcaauggaaagaaaugcuggaucugguauuaucauuucagauacaccaguccacgauugcaauacaacuugucagacacccaagggugcuauaaacaccagccucccauuucagaauauacauccgaucacaauuggaaaauguccaaaauauguaaaaagcacaaaauugagacuggccacaggauugaggaaugucccgucuauucaaucuagaggccuauuuggggccauugccgguuucauugaagggggguggacagggaugguagauggaugguacgguuaucaccaucaaaaugagcaggggucaggauaugcagccgaccugaagagcacacagaaugccauugacgagauuacuaacaaaguaaauucuguuauugaaaagaugaauacacaguucacagcaguagguaaagaguucaaccaccuggaaaaaagaauagagaauuuaaauaaaaaaguugaugaugguuuccuggacauuuggacuuacaaugccgaacuguugguucuauuggaaaaugaaagaacuuuggacuaccacgauucaaaugugaagaacuuauaugaaaagguaagaagccaguuaaaaaacaaugccaaggaaauuggaaacggcugcuuugaauuuuaccacaaaugcgauaacacgugcauggaaagugucaaaaaugggacuuaugacuacccaaaauacucagaggaagcaaaauuaaacagagaagaaauagaugggguaaagcuggaaucaacaaggauuuaccagauuuuggcgaucuauucaacugucgccaguucauugguacugguagucucccugggggcaaucaguuucuggaugugcucuaaugggucucuacaguguagaauauguauuuaa

SEQ ID NO: 37484 - RNA, 1701 nt, Artificial Sequence
  derived and/or modified CDS sequence (wt) from hemagglutinin__InfluenzaA__ADL32394
augaaggcaauacuaguaguucugcuauauacauuugcaaccgcaaaugcagacacauuauguauagguuaucaugcgaacaauucaacagacacuguagacacaguacuagaaaagaauguaacaguaacacacucuguuaaccuucuagaagacaagcauaacgggaaacuaugcaaacuaagagggguagccccauugcauuuggguaaauguaacauugcuggcuggauccugggaaauccagagugugaaucauucuccacaacaagcucaugguccuacauuguggaaacaucuaguucagacaauggaacguguuacccaggagauuucaucgauuaugaggagcuaagagagcaauugagcucagugucaucauuugaaagguuugagauauuccccaagacaaguucauggcccaaucaugacucgaacaaagguguaacggcagcauguccucaugcuggagcaaaaagcuucuacaaaaauuuaauauggcuaguuaaaaaaggaaauucauacccaaagcucagcaaauccuacauuaaugauaaagggaaagaaguccucgugcuauggggcauucaccauccaucuacuagugcugaccaacaaagucucuaucagaaugcagauacauauguuuuuguggggacaucaagauacagcaagaaguucaagccggaaauagcaauaagacccaaagugagggaucaagaagggagaaugaacuauuacuggacacuaguagagccgggagacaaaauaacauucgaagcaacuggaaaucuagugguaccgagauaugcauucgcaauggaaagaaaugcuggaucugguauuaucauuucagauacaccaguccacgauugcaauacaacuugucagacacccaagggugcuauaaacaccagccucccauuucagaauauacauccgaucacaauuggaaaauguccaaaauauguaaaaagcacaaaauugagacuggccacaggauugaggaaugucccgucuauucaaucuagaggccuauuuggggccauugccgguuucauugaagggggguggacagggaugguagauggaugguacgguuaucaccaucaaaaugagcaggggucaggauaugcagccgaccugaagagcacacagaaugccauugacgagauuacuaacaaaguaaauuccguuauugaaaagaugaauacacaguucacagcaguagguaaagaguucaaccaccuggaaaaaagaauagagaauuuaaauaaaaaaauugaugaugguuuccuggacauuuggacuuacaaugccgaacuguugguucuauuggaaaaugaaagaacuuuggacuaccacgauucaaaugugaagaacuuauaugaaaagguaagaagccaguuaaaaaacaaugccaaggaaauuggaaacggcugcuuugaauuuuaccacaaaugcgauaacacgugcauggaaagugucaaaaaugggacuuaugacuacccaaaauacucagaggaagcaaaauuaaacagagaagaaauagaugggguaaagcuggaaucaacaaggauuuaccagauuuuggcgaucuauucaacugucgccaguucauugguacugguagucucccugggggcaaucaguuucuggaugugcucuaaugggucucuacaguguagaauauguauuuaa

SEQ ID NO: 37485 - RNA, 1701 nt, Artificial Sequence
  derived and/or modified CDS sequence (wt) from hemagglutinin__InfluenzaA__ADL32404
augaaggcaauacuaguaguucugcuauauacauuugcaaccgcaaaugcagacacauuauguauagguuaucaugcgaacaauucaacagacacuguagacacaguacuagaaaagaauguaacaguaacacacucuguuaaccuucuagaagacaagcauaacgggaaacuaugcaaacuaagagggguagccccauugcauuuggguaaauguaacauugcuggcuggauccugggaaauccagagugugaaucacucuccacagcaagcucaugguccuacauuguggaaacaucuaguucagacaauggaacguguuacccaggagauuucaucgauuaugaggagcuaagagagcaauugagcucagugucaucauuugaaagguuugagauauuccccaagacaaguucauggcccaaucaugacucgaacaaaggcguaacggcagcauguccucaugcuggagcaaaaagcuucuacaaaaauuuaauauggcuaguuaaaaaaggaaauucauacccaaagcucagcaaauccuacauuaaugauaaagggaaagaaguccucgugcuauggggcauucaccauccaucuacuagugcugaccaacaaagucucuaucagaaugcagaugcauauguuuuuguggggacaucaagauacagcaagaaguucaagccggaaauagcaauaagacccaaagugagggaucaagaagggagaaugaacuauuacuggacacuaguagagccgggagacaaaauaacauucgaagcaacuggaaaucuagugguaccgagauaugcauucgcaauggaaagaaaugcuggaucugguauuaucauuucagauacaccaguccacgauugcaauacaacuugucaaacacccaagggugcuauaaacaccagccucccauuucagaauauacauccgaucacaauuggaaaauguccaaaauauguaaaaagcacaaaauugagacuggccacaggauugaggaaugucccgucuauucaaucuagaggccuauuuggggccauugccgguuucauugaagggggguggacagggaugguagauggaugguacgguuaucaccaucaaaaugagcaggggucaggauaugcagccgaccugaagagcacacagaaugccauugacgagauuacuaacaaaguaaauucuguuauugaaaagaugaauacacaguucacagcaguagguaaagaguucaaccaccuggaaaaaagaauagagaauuuaaauaaaaagguugaugaugguuuccuggacauuuggacuuacaaugccgaacuguugguucuauuggaaaaugaaagaacuuuggacuaccacgauucaaaugugaagaacuuauaugaaaagguaagaagccaguuaaaaaacaaugccaaggaaauuggaaacggcugcuuugaauuuuaccacaaaugcgauaacacgugcauggaaaguguaaaaaaugggacuuaugacuacccaaaauacucagaggaagcaaaauuaaacagagaagaaauagaugggguaaagcuggaaucaacaaggauuuaccagauuuuggcgaucuauucaacugucgccaguucauugguacugguagucucccugggggcaaucaguuucuggaugugcucuaaugggucucuacaguguagaauauguauuuaa

SEQ ID NO: 37486 - RNA, 1701 nt, Artificial Sequence
  derived and/or modified CDS sequence (wt) from hemagglutinin__InfluenzaA__ADL32414
augaaggcaauacuaguaguucugcuauauacauuugcaaccgcaaaugcagacacauuauguauagguuaucaugcgaacaauucaacagacacuguagacacaguacuagaaaagaauguaacaguaacacacucuguuaaccuucuagaagacaagcauaacgggaaacuaugcaaacuaagagggguagccccauugcauuuggguaaauguaacauugcuggcuggauccugggaaauccagagugugaaucacucuccacagcaagcucaugguccuacauuguggaaacaucuaguucagacaauggaacguguuacccaggagauuucaucgauuaugaggagcuaagagagcaauugagcucagugucaucauuugaaagguuugagauauuccccaagacaaguucauggcccaaucaugacucgaacaaagguguaacggcagcauguccucaugcuggagcaaaaagcuucuacaaaaauuuaauauggcuaguuaaaaaaggaaauucauacccaaagcucagcaaauccuacauuaaugauaaagggaaagaaguccucgugcuauggggcauucaccauccaucuacuagugcugaccaacaaagucucuaucagaaugcagaugcauauguuuuuguggggacaucaagauacagcaagaaguucaagccggaaauagcaauaagacccaaagugagggcucaagaagggagaaugaacuauuacuggacacuaguagagccgggagacaaaauaacauucgaagcaacuggaaaucuagugguaccgagauaugcauucgcaauggaaagaaaugcuggaucugguauuaucauuucagauacaccaguccacgauugcaauacaacuugucagacacccaagggugcuauaaacaccagccucccauuucagaauauacauccgaucacaauuggaaaauguccaaaauauguaaaaagcacaaaauugagacuggccacaggauugaggaaugucccgucuauucaaucuagaggccuauuuggggccauugccgguuucauugaagggggguggacagggaugguagauggaugguacgguuaucaccaucaaaaugagcaggggucaggauaugcagccgaccugaagagcacacagcaugccauugacgagauuacuaacaaaguaaauucuguuauugaaaagaugaauacacaguucacagcaguagguaaagaguucaaccaccuggaaaaaagaauagagaauuuaaauaaaaaaguugaugaugguuuccuggacauuuggacuuacaaugccgaacuguugguucuauuggaaaaugaaagaacuuuggacuaccacgauucaaaugugaagaacuuauaugaaaagguaagaagccaguuaaaaaacaaugccaaggaaauuggaaacggcugcuuugaauuuuaccacaaaugcgauaacacgugcauggaaagugucaaaaaugggacuuaugacuacccaaaauacucagaggaagcaaaauuaaacagagaagaaauagaugggguaaagcuggaaucaacaaggauuuaccagauuuuggcgaucuauucaacugucgccaguucauugguacugguagucucccugggggcaaucaguuucuggaugugcucuaaugggucucuacaguguagaauauguauuuaa

SEQ ID NO: 37487 - RNA, 1701 nt, Artificial Sequence
  derived and/or modified CDS sequence (wt) from hemagglutinin__InfluenzaA__ADL32424
augaaggcaauacuaguaguucugcuauauacauuugcaaucgcaaaugcagacacauuauguauagguuaucaugcgaacaauucaacagacacuguagacacaguacuagaaaagaauguaacaguaacacacucuguuaaccuucuagaagacaagcauaacgggaaacuaugcaaacuaagagggguagccccauugcauuuggguaaauguaacauugcuggcuggauccugggaaauccagagugugaaucacucuccacagcaagcucaugguccuacauuguggaaacaucuaguucagacaauggaacguguuacccaggagauuucaucgauuaugaggagcuaagagagcaauugagcucagugucaucauuugaaagguuugagauauuccccaagacaaguucauggcccaaucaugacucgaacaaagguguaacggcagcauguccucaugcuggagcaaaaagcuucuacaaaaauuuaauauggcuaguuaaaaaaggaaauucauacccaaagcucagcaaauccuacauuaaugauaaagggaaagaaguccucgugcuauggggaauucaccauccaucuacuagugcugaccaacaaagucucuaucagaaugcagaugcauauguuuuuguggggacaucaagauacagcaagaaguucaagccggaaauagcaauaagacccaaagugagggaucaagaagggagaaugaacuaucacuggacacuaguagagccgggagacaaaauaacauucgaagcaacuggaaaucuagugguaccgagauaugcauucgcaauggaaagaaaugcuggaucugguauuaucauuucagauacaccaguccacgauugcaauacaacuugucagacacccaagggugcuauaaacaccagccucccauuucagaauauacauccgaucacaauuggaaaauguccaaaauauguaaaaagcacaaaauugagacuggccacaggauugaggaaugucccgucuauucaaucuagaggccuauuuggggccauugccgguuucauugaagggggguggacagggaugguagauggaugguacgguuaucaccaucaaaaugagcaggggucaggauaugcagccgaccugaagagcacacagcaugccauugacgagauuacuaacaaaguaaauucuguuauugaaaagaugaauacacaguucacagcaguagguaaagaguucaaccaccuggaaaaaagaauagagaauuuaaauaaaaaaguugaugaugguuuccuggacauuuggacuuacaaugccgaacuguugguucuauuggaaaaugaaagaacuuuggacuaccacgauucaaaugugaagaacuuauaugaaaagguaagaagccaguuaaaaaacaaugccaaggaaauuggaaacggcugcuuugaauuuuaccacaaaugcgauaacacgugcauggaaagugucaaaaaugggacuuaugacuacccaaaauacucagaggaagcaaaauuaaacagagaagaaauaaaugggguaaagcuggaaucaacaaggauuuaccagauuuuggcgaucuauucaacugucgccaguucauugguacugguagucucccugggggcaaucaguuucuggaugugcucuaaugggucucuacaguguagaauauguauuuaa

SEQ ID NO: 37488 - RNA, 1701 nt, Artificial Sequence
  derived and/or modified CDS sequence (wt) from hemagglutinin__InfluenzaA__ADL32434
augaaggcaauacuaguaguucugcuauauacauuugcaaccgcaaaugcagacacauuauguauagguuaucaugcgaacaauucaacagacacuguagacacaguacuagaaaagaauguaacaguaacacacucuguuaaccuucuagaagacaagcauaacgggaaacuaugcaaacuaagagggguagccccauugcauuuggguaaauguaacauugcuggcuggauccugggaaauccagagugugaaucacucuccacagcaagcucaugguccuacauuguggaaacaucuaguucagacaauggaacguguuacccaggagauuucaucgauuaugaggagcuaagagagcaauugagcucagugucaucauuugaaagguuugagauauuccccaagacaaguucauggcccauucaugacucgaacaaagguguaacggcagcauguccucaugcuggagcaaaaagcuucuacaaaaauuuaauauggcuaguuaaaaaaggaaauucauacccaaagcucagcaaauccuacauuaaugauaaagggaaagaaguccucgugcuauggggcauucaccauccaucuacuagugcugaccaacaaagucucuaucagaaugcagaugcauauguuuuuguggggacaucaagauacagcaagaaguucaagccggaaauagcaauaagacccaaagugagggaucaagaagggagaaugaacuauuacuggauacuaguagagccgggagacaaaauaacauucgaagcaacuggaaaucuagugguaccgagauaugcauucgcaauggaaagaaaugcuggaucugguauuaucauuucagauacaccaguccacgauugcaauacaacuugucagacacccaagggugcuauaaacaccagccucccauuucagaauauacauccgaucacaauuggaaaauguccaaaauauguaaaaagcacaaaauugagacuggccacaggauugaggaaugucccgucuauucaaucuagaggccuauuuggggccauugccgguuucauugaagggggguggacagggaugguagauggaugguacgguuaucaccaucaaaaugagcaggggucaggauaugcagccgaccugaagagcacacagcaugccauugacgagauuacuaacaaaguaaauucuguuauugaaaagaugaauacacaguucacagcaguagguaaagaguucaaccaccuggaaaaaagaauagagaauuuaaauaaaaaaguugaugaugguuuccuggacauuuggacuuacaaugccgaacuguugguucuauuggaaaaugaaagaacuuuggacuaccacgauucaaaugugaagaacuuauaugaaaagguaaggagccaguuaaaaaacaaugccaaggaaauuggaaacggcugcuuugaauuuuaccacaaaugcgauaacacgugcauggaaagugucaaaaaugggacuuaugacuacccaaaauacucagaggaagcaaaauuaaacagagaagaaauagaugggguaaagcuggaaucaacaaggauuuaccagauuuuggcgaucuauucaacugucgccaguucauugguacugguagucucccugggggcaaucaguuucuggaugugcucuaaugggucucuacaguguagaauauguauuuaa

SEQ ID NO: 37489 - RNA, 1701 nt, Artificial Sequence; identical to SEQ ID NO: 36102
  derived and/or modified CDS sequence (wt) from hemagglutinin__InfluenzaA__ADL32444

SEQ ID NO: 37490 - RNA, 1701 nt, Artificial Sequence
  derived and/or modified CDS sequence (wt) from hemagglutinin__InfluenzaA__ADL32454
auggaggcaauacuaguaguucugcuauauacauuugcaaccgcaaacgcagacacauuauguauagguuaucaugcgaacaauucaacagacacuguagacacaguacuagaaaagaauguaacaguaacacacucuguuaaccuucuagaagacaagcauaacgggaaacuaugcaaacuaagagggguagccccauugcauuuggguaaauguaacauugcuggcuggauccugggaaauccagagugugaaucacucuccacagcaagcucaugguccuacauuguggaaacaucuaguucagacaauggaacguguuacccaggagauuucaucgauuaugaggagcuaagagagcaauugagcucagugucaucauuugaaagguuugagauauuccccaagacaaguucauggcccaaucaugacucgaacaaagguguaacggcagcauguccucaugcuggagcaaaaagcuucuacaaaaauuuaauauggcuaguuaaaaaaggaaauucauacccaaagcucagcaaauccuacauuaaugauaaagggaaagaaguccucgugcuauggggcauucaccauccaucuacuagugcugaccaacaaagucucuaucagaaugcagaugcauauguuuuuguggggucaucaagauacagcaagaaguucaagccggaaauagcaauaagacccaaagugagggaucaagaagggagaaugaacuauuacuggacacuaguagagccgggagacaaaauaacauucgaagcaacuggaaaucuagugguaccgagauaugcauucgcaauggaaagaaaugcuggaucugguauuaucauuucagauacaccaguccacgauugcaauacaacuugucagacacccaagggugcuauaaacaccagccucccauuucauaauauacauccgaucacaauuggaaaauguccaaaauauguaaaaagcacaaaauugagacuggccacaggauugaggaaugucccgucuauucaaucuagaggccuauuuggggccauugccgguuucauugaagggggguggacagggaugguggauggaugguacgguuaucaccaucaaaaugagcaggggucaggauaugcagccgaccugaagagcacacagaaugccauugacgagauuacuaacaaaguaaauucuguuauugaaaagaugaauacacaguucacagcaguagguaaagaguucaaccaccuggaaaaaagaauagagaauuuaaauaaaaaaguugaugaugguuuccuggacauuuggacuuacaaugccgaacuguugguucuauuggaaaaugaaagaacuuuggacuaccacgauucaaaugugaagaacuuauaugaaaagguaagaagccaguuaaaaaacaaugccaaggaacuuggaaacggcugcuuugaauuuuaccacaaaugcgauaacacgugcauggaaagugucaaaaaugggacuuaugacuacccaaaauacucagaggaagcaaaauuaaacagagaagaaauagaugggguaaagcuggaaucaacaaggauuuaccagauuuuggcgaucuauucaacugucgccaguucauugguacugguagucucccugggggcaaucaguuucuggaugugcucuaaugggucucuacaguguagaauauguauuuaa

SEQ ID NO: 37491 - RNA, 1701 nt, Artificial Sequence; identical to SEQ ID NO: 36848
  derived and/or modified CDS sequence (wt) from hemagglutinin__InfluenzaA__ADL32464

SEQ ID NO: 37492 - RNA, 1701 nt, Artificial Sequence; identical to SEQ ID NO: 37300
  derived and/or modified CDS sequence (wt) from hemagglutinin__InfluenzaA__ADL32484

SEQ ID NO: 37493 - RNA, 1701 nt, Artificial Sequence
  derived and/or modified CDS sequence (wt) from hemagglutinin__InfluenzaA__ADL32504
augaaggcaauacuaguaguucugcuauauacauuugcaaccgcaaaugcagacacauuauguauagguuaucaugcgaacaauucaacagacacuguagacacaguacuagaaaagaauguaacaguaacacacucuguuaaccuucuagaagacaagcauaacgggaaacuaugcaaacuaagagggguagccccauugcauuuggguaaauguaacauugcuggcuggauccugggaaauccagagugugaaucacucuccacagcaagcucaugguccuacauuguggaaacaucuaguucagacaauggaauguguuacccaggagauuucaucgauuaugaggagcuaagagagcaauugagcucagugucaucauuugaaagguuugagauauuccccaagacaaguucauggcccaaucaugacucgaacaaagguguaacggcagcauguccucaugcuggagcaaaaagcuucuacaaaaauuuaauauggcuaguuaaaaaaggaaauucauacccaaagcucagcaaauccuacauuaaugauaaagggaaagaaguccucgugcuauggggaauucaccauccaucuacuagugcugaccaacaaagucucuaucagaaugcagaugcauauguuuuuguggggacaucaagauacagcaagaaguucaagccggaaauagcaauaagacccaaagugagggaucaagaagggagaaugaacuauuacuggacacuaguagagccgggagacaaaauaacauucgaagcaacuggaaaucuagugguaccgagauaugcauucgcaauggaaagaaaugcuggaucugguauuaucauuucagauacaccaguccacgauugcaauacaacuugucagacacccaagggugcuauaaacaccagccucccauuucagaauauacauccgaucacaauuggaaaauguccaaaauauguaaaaagcacaaaauugagacuggccacaggauugaggaaugucccgucuauucaaucuagaggccuauuuggggccauugccgguuucauugaagggggguggacagggaugguagauggaugguacgguuaucaccaucaaaaugagcaggggucaggauaugcagccgaccugaagagcacacagcaugccauugacgagauuacuaacaaaguaaauucuguuauugaaaagaugaauacacaguucacagcaguagguaaagaguucaaccaccuggaaaaaagaauagagaauuuaaauaaaaaaguugaugaugguuuccuggacauuuggacuuacaaugccgaacuguugguucuauuggaaaaugaaagaacuuuggacuaccacgauucaaaugugaagaacuuauaugaaaagguaagaagccaguuaaaaaacaaugccaaggaaauuggaaacggcugcuuugaauuuuaccacaaaugcgauaacacgugcauggaaagugucaaaaaugggacuuaugacuacccaaaauacucagaggaagcaaaauuaaacagagaagaaauagaugggguaaagcuggaaucaacaaggauuuaccagauuuuggcgaucuauucaacugucgccaguucauugguacugguagucucccugggggcaaucaguuucuggaugugcucuaaugggucucuacaguguagaauauguauuuaa

SEQ ID NO: 37494 - RNA, 1701 nt, Artificial Sequence
  derived and/or modified CDS sequence (wt) from hemagglutinin__InfluenzaA__ADL32514
augaaggcaauacuaguaguucugcuauauacauuugcaaccgcaaaugcagacacauuauguauagguuaucaugcgaacaauucaacagacacuguagacacaguacuagaaaagaauguaacaguaacacacucuguuaaccuucuagaagacaagcauaacgggaaacuaugcaaacuaagagggguagccccauugcauuuggguaaauguaacauugcuggcuggauccugggaaauccagagugugaaucacucuccacagcaagcucaugguccuacauuguggaaacaucuaguucagacaauggaacguguuacccaggagauuucaucgauuaugaggagcuaagagagcaauugagcucagugucaucauuugaaagguuugagauauuccccaagacaaguucauggcccaaucaugacucgaacaaagguguaacggcagcauguccucaugcuggagcaaaaagcuucuacaaaaauuuaauauggcuaguuaaaaaaggaaauucauacccaaagcucagcaaauccuacauuaaugauaaagggaaagaaguccucgugcuuuggggcauucaccauccaucuacuagugcugaccaacaaagucucuaucagaaugcagaugcauauguuuuuguggggacaucaagauacagcaagaaguucaagccggaaauagcaauaagacccaaagugagggaucaagaagggagaaugaacuauuacuggacacuaguagagccgggagacaaaauaacauucgaagcaacuggaaaucuagugguaccgagauaugcauucgcaauggaaagaaaugcuggaucugguauuaucauuucagauacaccaguccacgauugcaauacaacuugucagacacccaagggugcuauaaacaccagccucccauuucagaauauacauccgaucacaauuggaaaauguccaaaauauguaaaaagcacaaaauugagacuggccacaggauugaggaaugucccgucuauucaaucuagaggccuauuuggggccauugccgguuucauugaagggggguggacagggaugguagauggaugguacgguuaucaccaucaaaaugagcaggggucaggauaugcagccgaccugaagagcacacagcaugccauugacgagauuacuaacaaaguaaauucuguuauugaaaagaugaauacacaguucacagcaguagguaaagaguucaaccaccuggaaaaaagaauagagaauuuaaauaaaaaaguugaugaugguuuccuggacauuuggacuuacaaugccgaacuguugguucuauuggaaaaugaaagaacuuuggacuaccacgauucaaaugugaagaacuuauaugaaaagguaagaagccaguuaaaaaacaaugccaaggaaauuggaaacggcugcuuugaauuuuaccacaaaugcgauaacacgugcauggaaagugucaaaaaugggacuuaugacuacccaaaauacucagaggaagcaaaauuaaacagagaagaaauagaugggguaaagcuggaaucaacaaggauuuaccagauuuuggcgaucuauucaacugucgccaguucauugguacugguagucucccugggggcaaucaguuucuggaugugcucuaaugggucucuacaguguagaauauguauuuaa

SEQ ID NO: 37495 - RNA, 1701 nt, Artificial Sequence
  derived and/or modified CDS sequence (wt) from hemagglutinin__InfluenzaA__ADL32524
augaaggcaauacuaguaguucugcuauauacauuugcaaccgcaaaugcagacacauuauguauagguuaucaugcgaacaauucaacagacacuguagacacaguacuagaaaagaauguaacaguaacacacucuguuaaccuucuagaagacaagcauaacgggaaacuaugcaaacuaagagggauagccccauugcauuuggguaaauguaacauugcuggcuggauccugggaaauccagagugugaaucacucuccacagcaagcucaugguccuacauuguggaaacaucuaguucagacaauggaacguguuacccaggagauuucaucgauuaugaggagcuaagagagcaauugagcucagugucaucauuugaaagguuugagauauuccccaagacaaguucauggcccaaucaugacucgaacaaagguguaacggcagcauguccucaugcuggagcaaaaagcuucuacaaaaauuuaauauggcuaguuaaaaaaggaaauucauacccaaagcucagcaaaucuuacauuaaugauaaagggaaagaaguccucgugcuauggggcauucaccauccaucuacuagugccgaccaacaaagucucuaucagaaugcagaugcauauguuuuuguggggacaucaagauacagcaagaaguucaagccggaaauagcaauaagacccaaagugagggaucaagaagggagaaugaacuauuacuggacacuaguagagccgggagacaaaauaacauucgaagcaacuggaaaucuagugguaccgagauaugcauucgcaauggaaagaaaugcuggaucugguauuaucauuucagauacaccaguccacgauugcaauacaacuugucagacacccaagggugcuauaaacaccagccucccauuucagaauauacauccgaucacaauuggaaaauguccaaaauauguaaaaagcacaaaauugagacuggccacaggauugaggaaugucccgucuauucaaucuagaggccuauuuggggccauugccgguuucauugaagggggguggacagggaugguagauggaugguacgguuaucaccaucaaaaugagcaggggucaggauaugcagccgaccugaagagcacacagaaugccauugacgagauuacuaacaaaguaaauucuguuauugaaaagaugaauacacaguucacagcaguagguaaagaguucaaccaccuggaaaaaagaauagagaauuuaaauaaaaaaguugaugaugguuuccuggacauuuggacuuacaaugccgaacuguugguucuguuggaaaaugaaagaacuuuggacuaccacgauucaaaugugaagaacuuauaugaaaagguaagaagccaguuaaaaaacaaugccaaggaaauuggaaacggcugcuuugaauuuuaccacaaaugcgauaacacgugcauggaaagugucaaaaaugggacuuaugacuacccaaaauacucagaggaagcaaaauuaaacagagaagaaauagaugggguaaagcuggaaucaacaaggauuuaccagauuuuggcgaucuauucaacugucgccaguucauugguacugguagucucccugggggcaaucaguuucuggaugugcucuaaugggucucuacaguguagaauauguauuuaa

SEQ ID NO: 37496 - RNA, 1701 nt, Artificial Sequence
  derived and/or modified CDS sequence (wt) from hemagglutinin__InfluenzaA__ADL32544
augaaggcaauacuaguaguucugcuauauacauuugcaaccucaaaugcagacacauuauguauagguuaucaugcgaacaauucaacagacacuguagacacaguacuagaaaagaauguaacaguaacacacucuguuaaccuucuagaagacaagcauaacgggaaacuaugcaaacuaagagggguagccccauugcauuuggguaaauguaacauugcuggcuggauccugggaaauccagagugugaaucacucuccacagcaagcucaugguccuacauuguggaaacaucuaguucagacaauggaacguguuacccaggagauuucaucgauuaugaggagcuaagagagcaauugagcucagugucaucauuugaaagguuugagauauuccccaagacaaguucauggcccaaucaugacucgaacaaagguguaacggcagcauguccucaugcuggagcaaaaagcuucuacaaaaauuuaauauggcuaguuaaaaaaggaaauucauacccaaagcucagaaaauccuacauuaaugauaaagggaaagaaguccucgugcuauggggaauucaccauccaucuacuagugcugaccaacaaagucucuaucagaaugcagaugcauauguuuuuguggggacaucaagauacagcaagaaguucaagccggaaauagcaauaagacccaaagugagggaucaagaagggagaaugaacuauuacuggacacuaguagagccgggagacaaaauaacauucgaagcaacuggaaaucuagugguaccgagauaugcauucgcaauggaaagaaaugcuggaucugguauuaucauuucagauacaccaguccacgauugcaauacaacuugucagacacccaagggugcuauaaacaccagccucccauuucagaauauacauccgaucacaauuggaaaauguccaaaauauguaaaaagcacaaaauugagacuggccacaggauugaggaaugucccgucuauucaaucuagaggccuauuuggggccauugccgguuucauugaagggggguggacagggaugguagauggaugguacgguuaucaccaucaaaaugagcaggggucaggauaugcagccgaccugaagagcacacagcaugccauugacgagauuacuaacaaaguaaauucuguuauugaaaagaugaauacacaguucacagcaguagguaaagaguucaaccaccuggaaaaaagaauagagaauuuaaauaaaaaaguugaugaugguuuccuggacauuuggacuuacaaugccgaacuguugguucuauuggaaaaugaaagaacuuuggacuaccacgauucaaaugugaagaacuuauaugaaaagguaagaagccaguuaaaaaacaaugccaaggaaauuggaaacggcugcuuugaauuuuaccacaaaugcgauaacacgugcauggaaagugucaaaaaugggacuuaugauuacccaaaauacucagaggaagcaaaauuaaacagagaagaaauagaugggguaaagcuggaaucaacaaggauuuaucagauuuuggcgaucuauucaacugucgccaguucauugguacugguagucucccugggggcaaucaguuucuggaugugcucuaaugggucucuacaguguagaauauguauuuaa

SEQ ID NO: 37497 - RNA, 1701 nt, Artificial Sequence
  derived and/or modified CDS sequence (wt) from hemagglutinin__InfluenzaA__ADL32554
augaaggcaauacuaguaguucugcuauauacauuuguaaccgcaaaugcagacacauuauguauagguuaucaugcgaacaauucaacagacacuguagacacaguacuagaaaagaauguaacaguaacacacucuguuaaccuucuagaagacaagcauaacgggaaacuaugcaaacuaagagggguagccccauugcauuuggguaaauguaacauugcuggcuggauccugggaaauccagagugugaaucacucuccacagcaagcucaugguccuacauuguggaaacaucuaguucagacaauggaacguguuacccaggagauuucaucgauuaugaggagcuaagagagcaauugagcucagugucaucauuugaaagguuugagauauuccccaagacaaguucauggcccaaucaugacucgaacaaagguguaacggcagcauguccucaugcuggagcaaaaagcuucuacaaaaauuuaauauggcuaguuaaaaaaggaaauucauacccaaagcucagcaaauccuacauuaaugauaaagggaaagaaguccucgugcuauggggaauucaccauccaucuacuagugcugaccaacaaagucucuaucagaaugcagaugcauauguuuuuguggggacaucaagauacagcaagaaguucaagccggaaauagcaauaagacccaaagugagggaucaagaagggagaaugaacuauuacuggacacuaguagagccgggagacaaaauaacauucgaagcaacuggaaaucuagugguaccgagauaugcauucgcaauggaaagaaaugcuggaucugguauuaucauuucagauacaccaguccacgauugcaauacaacuugucagacacccaagggugcuauaaacaccagccucccauuucagaauauacauccgaucacaauuggaaaauguccaaaauauguaaaaagcacaaaauugagacuggccacaggauugaggaaugucccgucuauucaaucuagaggccuauuuggggccauugccgguuucauugaagggggguggacagggaugguagauggaugguacgguuaucaccaucaaaaugagcaggggucaggauaugcagccgaccugaagagcacacagcaugccauugacgagauuacuaacaaaguaaauucuguuauugaaaagaugaauacacaguucacagcaguggguaaagaguucaaccaccuggaaaaaagaauagagaauuuaaauaaaaaaguugaugaugguuuccuggacauuuggacuuacaaugccgaacuguugguucuauuggaaaaugaaagaacuuuggacuaccacgauucaaaugugaagaacuuauaugaaaagguaagaagccaguuaaaaaacaaugccaaggaaauuggaaacggcugcuuugaauuuuaccacaaaugcgauaacacuugcauggaaagugucaaaaaugggacuuaugacuacccaaaauacucagaggaagcaaaauuaaacagagaagaaauagaugggguaaagcuggaaucaacaaggauuuaccagauuuuggcgaucuauucaacugucgccaguucauugguacugguagucucccugggggcaaucaguuucuggaugugcucuaaugggucucuacaguguagaauauguauuuaa

SEQ ID NO: 37498 - RNA, 1701 nt, Artificial Sequence
  derived and/or modified CDS sequence (wt) from hemagglutinin__InfluenzaA__ADL32670
augaaggcaauacuaguaguucugcuauauacauuugcaaccgcaaaugcagacacauuauguauagguuaucaugcgaacaauucaacagacacuguagacacaguacuagaaaagaauguaacaguaacacacucuguuaaccuucuagaagacaagcauaacgggaaacuaugcaaacuaagagggguagccccauugcauuuggguaaauguaacauugcuggcuggauccugggaaauccagagugugaaucacucuccacagcaagcucaugguccuacauuguggaaacaucuaguucagacaauggaacguguuacccaggagauuucaucgauuaugaggagcuaagagagcaauugagcucagugucaucauuugaaagauuugagauauuccccaagacaaguucauggcccaaucaugacucgaacaaagguguaacggcagcauguccucaugcuggagcaaaaagcuucuacaaaaauuuaauauggcuaguuaaaaaaggaaauucauacccaaagcucagcaaauccuacaucaaugauaaagggaaagaaguccucgugcuauggggcauucaccauccaucuacuagugcugaccaacaaagucucuaucagaaugcagauucauauguuuuuguggggacaucaagauacagcaagaaguucaagccggaaauagcaauaagacccaaagugagggaucaagaagggagaaugaacuauuacuggacacuaguagagccgggagacaaaauaacauucgaagcaacuggaaaucuagugguaccgagauaugcauucgcaauggaaagaaaugcuggaucugguauuaucauuucagauacaccaguccacgauugcaauacaacuugucagacacccgagggugcuauaaacaccagccucccauuucagaauauacauccgaucacaauuggaaaauguccaaaauauguaaaaagcacaaaauugagacuggccacaggauugaggaaugucccgucuauucaaucuagaggccuauuuggggccauugccgguuucauugaagggggguggacagggaugguagauggaugguacgguuaucaccaucaaaaugagcaggggucaggauaugcagccgaccugaagagcacacagaaugccauugacgagauuacuaacaaaguaaauucuguuauugaaaagaugaauacacaguucacagcaguagguaaagaguucaaccaccuggaaaaaagaauagagaauuuaaauaaaaaaguugaugaugguuuccuggacauuuggacuuacaaugccgaacuguugguucuauuggaaaaugaaagaacuuuggacuaccacgauucaaaugugaagaacuuauaugaaaagguaagaagccaguuaaaaaacaaugccaaggaaauuggaaacggcugcuuugaauuuuaccacaaaugcgauaacacgugcauggaaagugucaaaaaugggacuuaugacuacccaaaauacucagaggaagcaaaauuaaacagagaagaaauagaugggguaaagcuggaaucaacaaggauuuaccagauuuuggcgaucuauucaacugucgccaguucauugguacugguagucucccugggggcaaucaguuucuggaugugcucuaaugggucucuacaguguagaauauguauuuaa

SEQ ID NO: 37499 - RNA, 1701 nt, Artificial Sequence
  derived and/or modified CDS sequence (wt) from hemagglutinin__InfluenzaA__ADL32690
augaaggcaauacuaguaguucugcuauauacauuugcaaccgcaaaugcagacacauuauguauagguuaucaugcgaacaauucaacagacacuguagacacaguacuagaaaagaauguaacaguaacacacucuguuaacauucuagaagacaagcauaacgggaaacuaugcaaacuaagagggguagccccauugcauuuggguaaauguaacauugcuggcuggauccugggaaauccagagugugaaucacucuccacagcaagcucaugguccuacauuguggaaacaucuaguucagacaauggaacguguuacccaggagauuucaucgauuaugaggagcuaagagagcaauugagcucagugucaucauuugaaagguuugagauauuccccaagacaaguucauggcccaaucaugacucgaacaaagguguaacggcagcauguccucaugcuggagcaaaaagcuucuacaaaaauuuaauguggcuaguuaaaaaaggaaauucauacccaaagcucagcaaauccuacauuaaugauaaagggaaagaaguccucgugcuauggggcauucaccauccaucuacuagugcugaccaacaaagucucuaucagaaugcagaugcauauguuuuuguggggucaucaagauacagcaagaaguucaagccggaaauagcaauaagacccaaagugagggaucaagaagggagaaugaacuauuacuggacacuaguagagccgggagacaaaauaacauucgaagcaacuggaaaucuagugguaccgagauaugcauucgcaauggaaagaaaugcuggaucugguauuaucauuucagauacaccaguccacgauugcaauacaacuugucagacacccaagggugcuauaaacaccagccucccauuucagaauauucauccgaucacaauuggaaaauguccaaaauauguaaaaagcacaaaauugagacuggccacaggauugaggaaugucccgucuauucaaucuagaggccuauuuggggccauugccgguuucauugaagggggguggacagggaugguagaugggugguacgguuaucaccaucaaaaugagcaggggucaggauaugcagccgaccugaagagcacacagaaugccauugacgagauuacuaacaaaguaaauucuguuauugaaaagaugaauacacaguucacagcaguagguaaagaguucaaccaccuggaaaaaagaauagagaauuuaaauaaaaaaguugaugaugguuuccuggauauuuggacuuacaaugccgaacuguugguucuauuggaaaaugaaagaacuuuggacuaccacgauucaaaugugaagaacuuauaugaaaagguaagaagccagcuaaaaaacaaugccaaggaaauuggaaacggcugcuuugaauuuuaccacaaaugcgauaacacgugcauggaaagugucaaaaaugggacuuaugacuacccaaaauacucagaggaagcaaaauuaaacagagaagaaauagaugggguaaagcuggaaucaacaaggauuuaccagauuuuggcgaucuauucaacugucgccaguucauugguacugguagucucccugggggcaaucaguuucuggaugugcucuaaugggucucuacaguguagaauauguauuuaa

SEQ ID NO: 37500 - RNA, 1701 nt, Artificial Sequence
  derived and/or modified CDS sequence (wt) from hemagglutinin__InfluenzaA__ADL32710
augaaggcaauacuaguaguucugcuauauacauuugcaaccgcaaaugcagacacauuauguauagguuaucaugcgaacaauucaacagacacuguagacacaguacuagaaaagaauguaacaguaacacacucuguuaacauucuagaagacaagcauaacgggaaacuaugcaaacuaagagggguagccccauugcauuuggguaaauguaacauugcuggcuggauccugggaaauccagagugugaaucacucuccacagcaagcucaugguccuacauuguggaaacaucuaguucagacaauggaacguguuacccaggagauuucaucgauuaugaggagcuaagagagcaauugagcucagugucaucauuugaaagguuugagauauuccccaagacaaguucauggcccaaucaugacucgaacaaagguguaacggcagcauguccucaugcuggagcaaaaagcuucuacaaaaauuuaauauggcuaguuaaaaaaggaaauucauacccaaagcucagcaaauccuacauuaaugauaaagggaaagaaguccucgugcuauggggcauucaccauccaucuacuagugcugaccaacaaagucucuaucagaaugcagaugcauauguuuuuguggggucaucaagauacagcaagaaguucaagccggaaauagcaauaagacccaaagugagggaucaagaagggagaaugaacuauuacuggacacuaguagagccgggagacaaaauaacauucgaagcaacuggaaaucuagugguaccgagauaugcauucgcaauggaaagaaaugcuggaucugguauuaucauuucagauacaccaguccacgauugcaauacaacuugucagacacccaagggugcuauaaacaccagccucccauuucagaauauucauccgaucacaauuggaaaauguccaaaauauguaaaaagcacaaaauugagacuggccacaggauugaggaaugucccgucuauucaaucuagaggccuauuuggggccauugccgguuucauugaagggggguggacagggaugguagaugggugguacgguuaucaccaucaaaaugagcaggggucaggauaugcagccgaccugaagagcacacagaaugccauugacgagauuacuaacaaaguaaauucuguuauugaaaagaugaauacacaguucacagcaguagguaaagaguucaaccaccuggaaaaaagaauagagaauuuaaauaaaaaaguugaugaugguuuccuggauauuuggacuuacaaugccgaacuguugguucuauuggaaaaugaaagaacuuuggacuaccacgauucaaaugugaagaacuuauaugaaaagguaagaagccagcuaaaaaacaaugccaaggaaauuggaaacggcugcuuugaauuuuaccacaaaugcgauaacacgugcauggaaagugucaaaaaugggacuuaugacuacccaaaauacucagaggaagcaaaauuaaacagagaagaaauagaugggguaaagcuggaaucaacaaggauuuaccagauuuuggcgaucuauucaacugucgccaguucauugguacugguagucucccugggggcaaucaguuucuggaugugcucuaaugggucucuacaguguagaauauguauuuaa

SEQ ID NO: 37501 - RNA, 1701 nt, Artificial Sequence
  derived and/or modified CDS sequence (wt) from hemagglutinin__InfluenzaA__ADL32720
augaaggcaauacuaguaguucugcuauauacauuugcaaccgcaaaugcagacacauuauguauagguuaucaugcgaacaauucaacagacacuguagacacaguacuagaaaagaauguaacaguaacacacucuguuaaccuucuagaagacaagcauaacgggaaacuaugcaaacuaagggggguagccccauugcauuuggguaaauguaacauugcuggcuggauccugggaaauccagagugugaaucacucuccacagcaagcucaugguccuacauuguggaaacaucuaguucagacaauggaacguguuacccaggagauuucaucgauuaugaggagcuaagagagcaauugagcucagugucaucauuugaaagguuugagauauuccccaagacaaguucauggcccaaucaugacucgaacaaagguguaacggcagcauguccucaugcuggagcaaaaagcuucuacaaaaauuuaauauggcuaguuaaaaaaggaaauucauacccaaagcucagcaaauccuacauuaaugauaaagggaaagaaguccucgugcuauggggcauucaccauccaucuacuagugcugaccaacaaagucucuaucagaaugcagaugcauauguuuuuguggggacaucaagauacagcaagaaguucaagccggaaauagcaauaagacccaaagugagggaucaagaagggagaaugaacuauuacuggacacuaguagagccgggagacaaaauaacauucgaagcaacuggaaaucuagugguaccgagauaugcauucgcaauggaaagaaaugcuggaucugguauuaucauuucagauacaccaguccacgauugcaauacaacuugucagacacccaagggugcuauaaacaccagccucccauuucagaauauacauccgaucacaauuggaaaauguccaaaauauguaaaaagcacaaaauugagacuggccacaggauugaggaaugucccgucuauucaaucuagaggccuauuuggggccauugccgguuucauugaagggggguggacagggaugguagauggaugguacgguuaucaccaucaaaaugagcaggggucaggauaugcagccgaccugaagagcacacagaaugccauugacgagauuacuaacaaaguaaauucuguuauugaaaagaugaauacacaguucacagcaguagguaaagaguucaaccaccuggaaaaaagaauagagaauuuaaauaaaaaaguugaugaugguuuccuggacauuuggacuuacaaugccgaacuguugguucuauuggaaaaugaaagaacuuuggacuaccacgauucaaaugugaagaacuuauaugaaaagguaagaagccaguuaaaaaacaaugccaaggaaauuggaaacggcugcuuugaauuuuaccacaaaugcgauaacacgugcauggaaagugucaaaaaugggacuuaugacuacccaaaauacucagaggaagcaaaauuaaacagagaagaaauagaugggguaaagcuggaaucaacaaggauuuaccagauuuuggcgaucuauucaacugucgccaguucauugguacugguagucucccugggggcaaucaguuucuggaugugcucuaaugggucucuacaguguagaauauguauuuaa

SEQ ID NO: 37502 - RNA, 1701 nt, Artificial Sequence
  derived and/or modified CDS sequence (wt) from hemagglutinin__InfluenzaA__ADL32730
augaaggcaauacuaguaguucugcuauauacauuugcaaccgcaaaugcagacacauuauguauagguuaucaugcgaacaauucaacagacacuguagacacaguacuagaaaagaauguaacaguaacacacucuguuaacauucuagaagacaagcauaacgggaaacuaugcaaacuaaaagggguagccccauugcauuuggguaaauguaacauugcuggcuggauccugggaaauccagagugugaaucacucuccacagcaagcucaugguccuacauuguggaaacaucuaguucagacaauggaacguguuacccaggagauuucaucgauuaugaggagcuaagagagcaauugagcucagugucaucauuugaaagguuugagauauuccccaagacaaguucauggcccaaucaugacucgaacaaagguguaacggcagcauguccucaugcuggagcaaaaagcuucuacaaaaauuuaauauggcuaguuaaaaaaggaaauucauacccaaagcucagcaaauccuacauuaaugauaaagggaaagaaguccucgugcuauggggcauucaccauccaucuacuagugcugaccaacaaagucucuaucagaaugcagaugcauauguuuuuguggggucaucaaaauacagcaagaaguucaagccggaaauagcaauaagacccaaagugagggaucaagaagggagaaugaacuauuacuggacacuaguagagccgggagacaaaauaacauucgaagcaacuggaaaucuagugguaccgagauaugcauucgcaauggaaagaaaugcuggaucugguauuaucauuucagauacaccaguccacgauugcaauacaacuugucagacacccaagggugcuauaaacaccagccucccauuucagaauauacauccgaucacaauuggaaaauguccaaaauauguaaaaagcacaaaauugagacuggccacaggauugaggaaugucccgucuauucaaucuagaggccuauuuggggccauugccgguuucauugaagggggguggacagggaugguagauggaugguacgguuaucaccaucaaaaugagcaagggucaggauaugcagccgaccugaagagcacacagaaugccauugacgagauuacuaacaaaguaaauucuguuauugaaaagaugaauacacaguucacagcaguagguaaagaguucaaccaccuggaaaaaagaauagagaauuuaaauaaaaaaguugaugaugguuuccuggacauuuggacuuacaaugccgaacuguugguucuauuggaaaaugaaagaacuuuggacuaccacgauucaaaugugaagaacuuauaugaaaagguaagaagccagcuaaaaaacaaugccaaggaaauuggaaacggcugcuuugaauuuuaccacaaaugcgauaacacgugcauggaaagugucaaaaaugggacuuaugacuacccaaaauacucagaggaagcaaaauuaaacagagaagaaauagaugggguaaagcuggaaucaacaaggauuuaccagauuuuggcgaucuauucaacugucgccaguucauugguacugguagucucccugggggcaaucaguuucuggaugugcucuaaugggucucuacaguguagaauauguauuuaa

SEQ ID NO: 37503 - RNA, 1701 nt, Artificial Sequence
  derived and/or modified CDS sequence (wt) from hemagglutinin__InfluenzaA__ADL32740
augaaggcaauacuaguaguucugcuauauacauuugcaaccgcaaaugcagacacauuauguauagguuaucaugcgaacaauucaacagacacuguagacacaguacuagaaaagaauguaacaguaacacacucuguuaacauucuagaagacaagcauaacgggaaacuaugcaaacuaaaagggguagccccauugcauuuggguaaauguaacauugcuggcuggauccugggaaauccagagugugaaucacucuccacagcaagcucaugguccuacauuguggaaacaucuaguucagacaauggaacguguuacccaggagauuucaucgauuaugaggagcuaagagagcaauugagcucagugucaucauuugaaagguuugagauauuccccaagacaaguucauggcccaaucaugacucgaacaaagguguaacggcagcauguccucaugcuggagcaaaaagcuucuacaaaaauuuaauauggcuaguuaaaaaaggaaauucauacccaaagcucagcaaauccuacauuaaugauaaagggaaagaaguccucgugcuauggggcauucaccauccaucuacuagugcugaccaacaaagucucuaucagaaugcagaugcauauguuuuuguggggucaucaaaauacagcaagaaguucaagccagaaauagcaauaagacccaaagugagggaucaagaagggagaaugaacuauuacuggacacuaguagagccgggagacaaaauaacauucgaagcaacuggaaaucuagugguaccgagauaugcauucgcaauggaaagaaaugcuggaucugguauuaucauuucagauacaccaguccacgauugcaauacaacuugucagacacccaagggugcuauaaacaccagccucccauuucagaauauacauccgaucacaauuggaaaauguccaaaauauguaaaaagcacaaaauugagacuggccacaggauugaggaaugucccgucuauucaaucuagaggccuauuuggggccauugccgguuucauugaagggggguggacagggaugguagauggaugguacgguuaucaccaucaaaaugagcaggggucaggauaugcagccgaccugaagagcacacagaaugccauugacgagauuacuaacaaaguaaauucuguuauugaaaagaugaauacacaguucacagcaguagguaaagaguuuaaccaccuggaaaaaagaauagagaauuuaaauaaaaaaguugaugaugguuuccuggacauuuggacuuacaaugccgaacuguugguucuauuggaaaaugaaagaacuuuggacuaccacgauucaaaugugaagaacuuauaugaaaagguaagaagccagcuaaaaaacaaugccaaggaaauuggaaacggcugcuuugaauuuuaccacaaaugcgauaacacgugcauggaaagugucaaaaaugggacuuaugacuacccaaaauacucagaggaagcaaaauuaaacagagaagaaauagaugggguaaagcuggaaucaacaaggauuuaccagauuuuggcgaucuauucaacugucgccaguucauugguacugguagucucccugggggcaaucaguuucuggaugugcucuaaugggucucuacaguguagaauauguauuuaa

SEQ ID NO: 37504 - RNA, 1701 nt, Artificial Sequence
  derived and/or modified CDS sequence (wt) from hemagglutinin__InfluenzaA__ADL39137
augaagacuaucauugcuuugagcuacauucuaugucugguuuucgcucaaaaacuuccuggaaaugacaacagcacggcaacgcugugccuugggcaccaugcaguaccaaacggaacgauagugaaaacaaucacgaaugaccaaauugaaguuacuaaugcuacugagcugguucagaguuccucaacaggugaaauaugcgacaguccucaucagauccuugauggaaaaaacugcacacuaauagaugcucuauugggagacccucagugugauggcuuccaaaauaagaaaugggaccuuuuuguugaacgcagcaaagccuacagcaacuguuacccuuaugaugugccggauuaugccucccuuaggucccuaguugccucauccggcacacuggaguuuaacaaugaaagcuucaauuggacuggagucacucaaaacggaacaagcucugcuugcauaaggagaucuaaaaacaguuucuuuaguagauugaauugguugacccacuuaaacuucaaauauccagcauugaacgugacuaugccaaacaaugaacaauuugacaaauuguacauuugggggguucaccacccggguacggacaaagaccaaaucuuccuguaugcucaagcaucaggaagaaucacagucucuaccaaaagaagccaacaaacugcaaucccgaauaucggaucuagacccagaguaaggaauaucccuagcagaauaagcaucuauuggacaauaguaaaaccgggagacauacuuuugauuaacagcacagggaaucuaauugcuccuagggguuacuucaaaauacgaagugggaaaagcucaauaaugagaucagaugcacccauuggcaaaugcaauucugaaugcaucacuccaaauggaagcauucccaaugacaaaccauuccaaaauguaaacaggaucacauacggggccugucccagauauguuaagcaaaacacucugaaauuggcaacagggaugcgaaauguaccagagaaacaaacuagaggcauauuuggcgcaaucgcggguuucauagaaaaugguugggagggaaugguggaugguugguacgguuucaggcaucaaaauucugagggaagaggacaagcagcagaucucaaaagcacucaagcagcaaucgaucaaaucaaugggaagcugaauagauugaucgggaaaaccaacgagaaauuccaucagauugaaaaagaauucucagaagucgaagggagaauucaggaccuugagaaauauguugaggacacuaaaauagaucucuggucauacaacgcggagcuucuuguugcccuggagaaccaacauacaauugaucuaacugacucagaaaugaacaaacuguuugaaaaaacaaagaagcaacugagggaaaaugcugaggauaugggcaaugguuguuucaaaauauaccacaaaugugacaaugccugcauaggaucaaucagaaauggaacuuaugaccacgauguauacagagaugaagcauuaaacaaccgguuucagaucaagggaguugagcugaagucaggguacaaagauuggauccuauggauuuccuuugccauaucauguuuuuugcuuuguguugcuuuguugggauucaucaugugggccugccaaaaaggcaacauuaggugcaacauuugcauuuga

SEQ ID NO: 37505 - RNA, 1698 nt, Artificial Sequence
  derived and/or modified CDS sequence (wt) from hemagglutinin__InfluenzaA__ADL39148
augaaaguaaaacuacugguccuguuaugcacauuuacagcuacauaugcagacacaauauguauaggcuaccaugcuaacaacucgaccgacacuguugacacaguacuugaaaagaaugugaccgugacacacucugucaaccugcuugagaacagucacaauggaaaacuaugucuauuaaaaggaauagccccacuacaauuggguaacugcagcguugccggguggaucuuaggaaacccagaaugcgaauuacugauuuccaaggagucaugguccuacauuguagaaaaaccaaauccugagaauggaacauguuacccagggcauuucgcugacuaugaggaacugagggagcaauugaguucaguaucuucauuugagagguucgaaauauuccccaaagaaagcucauggcccaaccacaccguaaccggagugucagcaucaugcucccauaauggggaaagcaguuuuuacagaaauuugcuauggcugacggggaagaaugguuuguacccaaaccugagcaaguccuaugcaaacaacaaagaaaaagaaguccuuguacuaugggguguucaucacccgccaaacauaguugaccaaaagacccucuaucguacagaaaaugcuuauguuucuguagugucuucacauuauagcagaaaauucaccccagaaauagccaaaagacccaaaguaagagaucaagaaggaagaaucaacuacuacuggacucugcuugaacccggggauacaauaauauuugaggcaaauggaaaucuaauagcgccaagauaugcuuucgcacugaguagagauuuuggaucaggaaucaucaacucaaaugcaccaauggauaaaugugaugcgaaaugucaaacaccucagggagcuauaaacagcagucuuccuuuccagaacguacacccagucacaauaggagaguguccaaaguaugucaggagugcaaaauuaaggaugguuacaggacuaaggaacaucccauccauucaauccagagguuuguuuggagccauugccgguuucauugaagggggguggacuggaaugguagaugguugguaugguuaucaucaucagaaugagcaaggaucuggcuaugcugcagaucaaaaaagcacacaaaaugccauuaaugggauuacaaacaaggugaauucuguaauugagaaaaugaacacucaauucacagcagugggcaaagaauucaacaaauuggaaagaaggauggaaaacuugaauaaaaaaguugaugauggguuuauagacauuuggacauauaaugcagaacuguugguucuacuggaaaaugaaaggacuuuggauuuccaugacuccaaugugaagaaucuguaugagaaaguaaaaagccaauuaaagaauaaugcuaaagaaauaggaaauggguguuuugaauucuaucacaaguguaacgaugaaugcauggagaguguaaagaauggaacuuaugacuauccaaaauauuccgaagaaucaaaguuaaacagggagaaaauugauggagugaaauuggaaucaaugggagucuaucagauucuggcgaucuacucaacagucgccaguucucugguucuuuuggucucccugggggcaaucagcuucuggauguguuccaaugggucuuugcaguguagaauaugcaucuaa

SEQ ID NO: 37506 - RNA, 1701 nt, Artificial Sequence
  derived and/or modified CDS sequence (wt) from hemagglutinin__InfluenzaA__ADL39159
augaagacuaucauugcuuugagcuacauucuaugucugguuuucgcucaaaaacuuccuggaaaugacaacagcacggcaacgcugugccuugggcaccaugcaguaccaaacggaacgauagugaaaacaaucacgaaugaccaaauugaagucacuaaugcuacugagcugguucagaguuccucaacaggugaaauaugcgacaguccucaucagaucauugauggagaaaacugcacacuaauagaugcucuauugggagacccucagugugauggcuuccaaaauaagaaaugggaccuuuuuguugaacgaagcaaagccuacagcaacuguuauccuuaugaugugccggauuaugccucccuuaggucacuaguugccucauccggcacacuggaguuuaacaaugaaagcuucaauuggacuggagucacucaaaacggaacaagcucugcuugcauaaggagaucuaauaacaguuucuuuaguagauugaauugguugacccacuuaaaguucaaauacccagcauugaacgugacuaugccaaacaaugaacaauuugacaaauuguacauuugggggguucaccacccggguacggacaaugaccaaaucuuccuguaugcucaagcaucaggaagaaucacagucucuaccaaaagaagccaacaaacuguaaucccgaauaucggaucuagacccagaguaaggaauaucccuagcagaauaagcaucuauuggacaauaguaaaaccgggagacauacuuuugauuaacagcacagggaaucuaauugcuccuagggguuacuucaaaauacgaagugggaaaagcucaauaaugagaucagaugcacccauuggcaaaugcaauucugaaugcaucacuccaaauggaagcauucccaaugacaaaccauuccaaaauguaaacaggaucacauacggggccugucccagauauguuaagcaaaacacucugaaauuggcaacaggaaugcgaaauguaccagagaaacaaacuagaggcauauuuggcgcaaucgcggguuucauagaaaaugguugggagggaaugguggaugguugguacgguuucaggcaucaaaauucugagggaagaggacaagcagcagaucucaaaagcacucaagcagcaaucgaucaaaucaaugggaagcugaauagauugaucgggaaaaccaacgagaaauuccaucagauugaaaaagaauucucagaagucgaagggagaauucaggaccuugagaaauauguugaggacacuaaaauagaucucuggucauacaacgcggagcuucuuguugcccuggagaaccaacauacaauugaucuaacugacucagaaaugaacaaacuguuugaaaaaacaaagaagcaacugagggaaaaugcugaggauaugggcaaugguuguuucaaaauauaccacaaaugugacaaugccugcauaagaucaaucagaaauggaacuuaugaccacgauguauacagagaugaagcauuaaacaaccgguuccagaucaagggaguugagcugaagucaggguacaaagauuggauccuauggauuuccuuugccauaucauguuuuuugcuuuguuuugcuuuguugggguucaucaugugggccugccaaaaaggcaacauuaggugcaacauuugcauuuga

SEQ ID NO: 37507 - RNA, 1701 nt, Artificial Sequence
  derived and/or modified CDS sequence (wt) from hemagglutinin__InfluenzaA__ADL39170
augaagacuaucauugcuuugagcuacauucuaugucugguuuucgcucaaaaacuuccuggaaaugacaacagcacggcaacgcugugccuugggcaccaugcaguaccaaacggaacgauagugaaaacaaucacgaaugaccaaauugaaguuacuaaugcuacugagcugguucagaguuccucaacaggugaaauaugcgacaguccucaucagauccuugauggaaaaaacugcacacuaauagaugcucuauugggagacccucagugugauggcuuccaaaauaagaaaugggaccuuuuuguugaacgcagcaaagccuacagcaacuguuacccuuaugaugugccggauuaugccucccuuaggucacuaguugccucauccggcacacuggaguuuaacaaugaaagcuucaauuggacuggagucacucaaaacggaacaagcucugcuugcauaaggagaucuaaaaacaguuucuuuaguagauugaauugguugacccacuuaaacuucaaauacccagcauugaacgugacugugccaaacaaugaacaauuugacaaauuguacauuugggggguucaccacccggguacggacaaagaccaaaucuuccuguaugcucaagcaucaggaagaaucacagucucuaccaaaagaagccaacaaaccguaaucccgaauaucggaucuagacccagaguaaggaauaucccuagcagaauaagcaucuauuggacaauaguaaaaccgggagacguacuuuugauuaacagcacagggaaucuaauugcuccuagggguuacuucaaaauacgaagugggaaaagcucaauaaugagaucagaugcacccauuggcaaaugcaauucugaaugcaucacuccaaauggaagcauucccaaugacaaaccauuccaaaauguaaacaggaucacauacggggccugucccagauauguuaagcaaaacacucugaaauuggcaacagggaugcgaaauguaccagagaaacaaacuagaggcauauuuggcgcaaucgcggguuucauagaaaaugguugggagggaaugguggaugguugguacgguuucaggcaucaaaauucugaggggagaggacaagcagcagaucucaaaagcacucaagcagcaaucgaucaaaucaaugggaagcugaauagauugaucgggaaaaccaacgagaaauuccaucagauugaaaaagaauucucagaagucgaagggagaauucaggaccuugagaaauauguugaggacacuaaaauagaucucuggucauacaacgcggagcuucuuguugcccuggagaaccaacauacaauugaucuaacugacucagaaaugaacaaacuguuugaaaaaacaaagaagcaacugagggaaaaugcugaggauaugggcaaugguuguuucaaaauauaccacaaaugugacaaugccugcauaggaucaaucagaaauggaacuuaugaccacgauguauacagagaugaagcauuaaacaaccgguuucagaucaagggaguugagcugaagucaggguacaaagauuggauccuauggauuuccuuugccauaucauguuuuuugcuuuguguugcuuuguugggguucaucaugugggccugccaaaaaggcaacauuaggugcaacauuugcauuuga

SEQ ID NO: 37508 - RNA, 1701 nt, Artificial Sequence
  derived and/or modified CDS sequence (wt) from hemagglutinin__InfluenzaA__ADL39203
augaagacuaucauugcuuugagcuacauucuaugucugguuuucgcucaaaaacuuccuggaaaugacaacagcacggcaacgcugugccuugggcaccaugcaguaccaaacggaacgauagugaaaacaaucacgaaugaccaaauugaaguuacuaaugcuacugagcugguucagaguuccucaacaggugaaauaugcgacaguccucaucagauccuugauggaaaaaacugcacacuaauagaugcucuauugggagacccucagugugauggcuuccaaaauaagaaaugggaccuuuuuguugaacgcagcaaagccuacagcaacuguuacccuuaugaugugccggauuaugccucccuuaggucccuaguugccucauccggcacacuggaguuuaacaaugaaagcuucaauuggacuggagucacucaaaacggaacaagcucugcuugcauaaggagaucuaaaaacaguuucuuuaguagauugaauugguugacccacuuaaacuucaaauacccagcauugaacgugacuaugccaaacaaugaacaauuugacaaauuguacauuugggggguucaccacccggguacggacaaagaccaaaucuuccuguaugcucaagcaucaggaagaaucacagucucuaccaaaagaagccaacaaacugcaaucccgaauaucggaucuagacccagaguaaggaauaucccuagcagaauaagcaucuauuggacaauaguaaaaccgggagacauacuuuugauuaacagcacagggaaucuaauugcuccuagggguuacuucaaaauacgaagugggaaaagcucaauaaugagaucagaugcacccauuggcaaaugcaauucugaaugcaucacuccaaauggaagcauucccaaugacaaaccauuccaaaauguaaacaggaucacauacggggccugucccagauauguuaagcaaaacacucugaaauuggcaacagggaugcgaaauguaccagagaaacaaacuagaggcauauuuggcgcaaucgcggguuucauagaaaaugguugggagggaaugguggaugguugguacgguuucaggcaucaaaauucugagggaagaggacaagcagcagaucucaaaagcacucaagcagcaaucgaucaaaucaaugggaagcugaauagauugaucgggaaaaccaacgagaaauuccaucagauugaaaaagaauucucagaagucgaagggagaauucaggaccuugagaaauauguugaggacacuaaaauagaucucuggucauacaacgcggagcuucuuguugcccuggagaaccaacauacaauugaucuaacugacucagaaaugaacaaacuguuugaaaaaacaaagaagcaacugagggaaaaugcugaggauaugggcaaugguuguuucaaaauauaccacaaaugugacaaugccugcauaggaucaaucagaaauggaacuuaugaccacgauguauacagagaugaagcauuaaacaaccgguuucagaucaagggaguugagcugaagucaggguacaaagauuggauccuauggauuuccuuugccauaucauguuuuuugcuuuguguugcuuuguugggguucaucaugugggccugccaaaaaggcaacauuaggugcaacauuugcauuuga

SEQ ID NO: 37509 - RNA, 1701 nt, Artificial Sequence
  derived and/or modified CDS sequence (wt) from hemagglutinin__InfluenzaA__ADL39214
augaagacuaucauugcuuugagcuacauucuaugucugguuuucgcucaaaaacuuccuggaaaugacaacagcacggcaacgcugugccuugggcaccaugcaguaccaaacggaacgauagugaaaacaaucacgaaugaccaaauugaaguuacuaaugcuacugagcugguucagaguuccucaacaggugaaauaugcgacaguccucaucagauccuugauggagaaaacugcacacuaauagaugcucuauugggagauccucagugugauggcuuccaaaauaagaaaugggaccuuuuuguugaacgcagcaaagccuacagcaacuguuacccuuaugaugugccggauuaugccucccuuaggucacuaguugccucauccggcacacuggaguuuaacaaugaaagcuucaauuggacuggagucacucaaaacggaacaagcucugcuugcauaaggagaucuaauaacaguuucuuuaguagauugaauugguugacccacuuaaaauucaaauacccagcauugaacgugacuaugccaaacaaugaacaauuugacaaauuguacauuugggggguucaccacccggguacggacaaugaccaaaucuuccuguaugcucaagcaucaggaagaaucacagucucuaccaaaagaagccaacaaacuguaauuccgaauaucggaucuagacccagaguaaggaauaucccuagcagaauaagcaucuauuggacaauaguaaaaccgggagacauacuuuugauuaacagcacagggaaucuaauugcuccuagggguuacuucaaaauacgaagugggaaaagcucaauaaugagaucagaugcacccauuggcaaaugcaauucugaaugcaucacuccaaauggaagcauucccaaugacaaaccauuccaaaauguaaacaggaucacauacggggccugucccagauauguuaagcaaaacacucugaaauuggcaacagggaugcgaaauguaccagagaaacaaacuagaggcauauuuggcgcaaucgcggguuucauagaaaaugguugggagggaaugguggaugguugguacgguuucaggcaucaaaauucugagggaagaggacaagcagcagaucucaaaagcacucaagcagcaaucgaucaaaucaaugggaagcugaauagauugaucgggaaaaccaacgagaaauuccaucagauugaaaaagaauucucagaagucgaagggagaauucaggaccuugagaaauauguugaggacacuaaaauagaucucuggucauacaacgcggagcuucuuguugcccuggagaaccaacauacaauugaucuaacugacucagaaaugaacaaacuguuugaaaaaacaaagaagcaacugagggaaaaugcugaggauaugggcaaugguuguuucaaaauauaccacaaaugugacaaugccugcauaggaucaaucagaaauggaacuuaugaccacgauguauacagagaugaagcauuaaacaaccgguuccagaucaagggaguugagcugaagucaggguacaaagauuggauccuauggauuuccuuugccauaucauguuuuuugcuuuguguugcuuuguugggguucaucaugugggccugccaaaaaggcaacauuaggugcaacauuugcauuuga

SEQ ID NO: 37510 - RNA, 1698 nt, Artificial Sequence
  derived and/or modified CDS sequence (wt) from hemagglutinin__InfluenzaA__ADL39225
augaaaguaaaacuacugguccuguuaugcacauuuacagcuacauaugcagacacaauauguauaggcuaccaugcuaacaacucgaccgacacuguugacacaguacuugaaaagaaugugacagugacacacucugucaaccugcuugagaacagucacaauggaaaacuaugucuauuaaaaggaauagccccacuacaauuggguaacugcagcguugccggguggaucuuaggaaacccagaaugcgaauuacugauuuccaaggagucaugguccuacauuguagaaaaaccaaauccugagaauggaacauguuacccaggguauuucgccgacuaugaggagcugagagagcaauugaguucaguaucuucauuugagagguucgaaauauuccccaaagaaagcucauggcccaaccacaccguaaccggagcgucagcaucaugcucccauaauggggaaaacaguuuuuacagaaauuugcuauggcugacggggaagaaugguuuguacccaaaccugagcaaguccuaugcaaacaacaaagaaaaagaaguccuuguacuaugggguguucaucacccgccaaacauagcugaccaaaagacccucuaucauacagaaaaugcuuauguuucuguagugucuucacauuauagcagaaaauucaccccagaaauagccaaaagacccaaaguaagagaucaagaaggaagaaucaacuacuacuggacucugcuugaacccggggauacaauaauauuugaggcaaauggaaaucuaauagcgccaagauaugcuuucgcacugaguaggggcuuuggaucaggaaucaucaacucaaaugcaccaauggauaaaugugaugcgaagugccaaacaccucaaggagcuauaaacagcagucuuccuuuccagaacguacacccagucacaauaggagaguguccaaaguaugucaggagugcaaaauuaaggaugguuacaggacuaaggaacaucccauccauucaauccagagguuuguuuggagccauugccgguuucauugaagggggguggacuggaaugguagaugguugguaugguuaucaucaucagaaugagcaaggaucuggcuaugcugcagaucaaaaaagcacacaaaaugccauuaaugggauuacaaacaaggugaauucuguaauugagaaaaugaacacucaauucacagcagugggcaaagaauucaacaaauuggaaagaaggauggaaaacuugaauaaaaaaguugaugauggguuuauagacauuuggacauauaaugcagaacuguugguucuacuggaaaaugaaaggacuuuggauuuccaugacuccaaugugaagaaucuguaugagaaaguaaaaagccaguuaaagaauaaugcuaaagaaauaggaaauggguguuuugaauucuaucacaaguguaacgaugaaugcauggagaguguaaagaauggaacuuaugacuauccaaaauauuccgaagaaucaaaguuaaacagggagaaaauugauggagugaaauuggaaucaaugggagucuaucagauucuggcgaucuacucaacagucgccaguucucugguucuuuuggucucccugggggcaaucagcuucuggauguguuccaaugggucuuugcaguguagaauaugcaucuaa

SEQ ID NO: 37511 - RNA, 1698 nt, Artificial Sequence
  derived and/or modified CDS sequence (wt) from hemagglutinin__InfluenzaA__ADL39236
augaaaguaaaacuacugguccuguuaugcacauuuacagcuacguaugcagacacaauauguauaggcuaccaugcuaacaacucgaccgacacuguugacacaguacuugaaaagaaugugacagugacacacucugucaaccugcuugagaacagucacaauggaaaacuaugucuauuaaaaggaauagccccacuacaauuggguaacugcagcguugccggguggaucuuaggaaacccagaaugcgaauuacugauuuccaaagagucaugguccuacauuguagaaaaaccaaauccugagaauggaacauguuacccaggguauuucgccgacuaugaggagcugagggagcaauugaguucaguaucuucauuugagagguucgaaauauuccccaaagaaagcucauggcccaaccacaccguaaccggagugucagcaucaugcucccauaauggggaaagcaguuuuuacagaaauuugcuauggcugacggggaagaaugguuuguacccaaaccugagcaaguccuauacaaacaacaaagaaaaagaaguccuuguacuaugggguguucaucacccgccaaacauaguugaccaaaagacccucuaccguacagaaaaugcuuauguuucuguagugucuucacauuauagcagaaaauucaccccagaaauagccaaaagacccaaaguaagagaucaagaaggaagaaucaacuacuacuggacucugcuugaacccggggauacaauaauauuugaggcaaauggaaaucuaauagcgccaagauaugcuuucgcacugaguagaggcuuuggaucaggaaucaucaacucaaaugcaccaauggguaaaugugaugcgaagugccaaacaccucagggagcuauaaacagcagucuuccuuuccagaacguacacccagucacaauaggagaguguccaaaguaugucaggagugcaaaauuaaggaugguuacaggacuaaggaacaucccauccauucaauccagagguuuguuuggagccauugccgguuucauugaagggggguggacuggaaugguagaugguugguaugguuaucaucaucagaaugagcaaggaucuggcuaugcugcagaucaaaaaagcacacaaaaugccauuaaugggauuacaaacaaggugaauucuguaauugagaaaaugaacacucaauucacagcagugggcaaagaauucaacaaauuggaaagaaggauggaaaacuugaauaaaaaaguugaugauggguuuauagacauuuggacauauaaugcagaacuguugguucuacuggaaaaugaaaggacuuuggauuuccaugacuccaaugugaagaaucuguaugagaaaguaaaaagccaguuaaagaauaaugcuaaagaaauaggaaauggguguuuugaauucuaucacaaguguaacgaugaaugcauggagaguguaaagaauggaacuuaugacuauccaaaauauuccgaagaaucaaaguuaaacagggagaaaauugauggagugaaauuggaaucaaugggagucuaucagauucuggcgaucuacucaacagucgccaguucucugguucuuuuggucucccugggggcaaucagcuucuggauguguuccaaugggucuuugcaguguagaauaugcaucuaa

SEQ ID NO: 37512 - RNA, 1701 nt, Artificial Sequence
  derived and/or modified CDS sequence (wt) from hemagglutinin__InfluenzaA__ADL39280
augaagacuaucauugcuuugagcuacauucuaugucugguuuucgcucaaaaacuuccuggaaaugacaacagcacggcaacgcugugccuugggcaccaugcaguaccaaacggaacgauagugaaaacaaucacgaaugaccaaauugaaguuacuaaugcuacugagcugguucagaguuccucaacaggugaaauaugcgacaguccucaucagauccuugauggagaaaacugcacacuaauagaugcucuauugggagacccucagugugauggcuuccaaaauaagaaaugggaccuuuuuguugaacgcagcaaagccuacagcaacuguuacccuuaugaugugccggauuaugccucccuuaggucacuaguugccucaucuggcacacuggaguuuaacaaugaaagcuucaauuggacuggagucacucaaaacggaacaagcucugcuugcauaaggagaucuaauaacaguuucuuuaguagauugaauugguugacccacuuaagauucaaauacccagcauugaacgugacuaugccaaacaaugaacaauuugacaaauuguacauuugggggguucaccacccggguacggacaaugaccaaaucuuccuguaugcucaagcaucaggaagaaucacagucucuaccaaaagaagccaacaaacuguaaucccgaauaucggaucuagacccagaguaaggaauaucccuagcagaauaagcaucuauuggacaauaguaaaaccgggagacauacuuuugauuaacagcacagggaaucuaauugcuccuagggguuacuucaaaauacgaagugggaaaagcucaauaaugagaucagaugcacccauuggcaaaugcaauucugaaugcaucacuccaaauggaagcauucccaaugacaaaccauuccaaaauguaaacagaaucacauacggggccugucccagauauguuaagcaaaacacucugaaauuggcaacagggaugcgaaauguaccagagaaacaaacuagaggcauauuuggagcaaucgcggguuucauagaaaaugguugggagggaaugguggaugguugguacgguuucaggcaucaaaauucugagggaagaggacaagcagcagaucucaaaagcacucaagcagcaaucgaucaaaucaaugggaagcugaauagauugaucgggaaaaccaacgagaaauuccaucagauugaaaaagaauucucagaagucgaagggagaauucaggaccuugagaaauauguugaggacacuaaaauagaucucuggucauacaacgcggagcuucuuguugcccuggagaaccaacauacaauugaucuaacugauucagaaaugaacaaacuguuugaaaaaacaaagaagcaacugagggaaaaugcugaagauaugggcaaugguuguuucaaaauauaccacaaaugugacaaugccugcauaggaucaaucagaaauggaacuuaugaccacgauguauacagagaugaagcauuaaacaaccgguuccagaucaagggaguugagcugaagucaggguacaaagauuggauccuauggauuuccuuugccauaucauguuuuuugcuuuguguugcuuuguugggguucaucaugugggccugccaaaaaggcaacauuaggugcaacauuugcauuuga

SEQ ID NO: 37513 - RNA, 1698 nt, Artificial Sequence
  derived and/or modified CDS sequence (wt) from hemagglutinin__InfluenzaA__ADL39291
augaaaguaaaacuacugguccuguuaugcacauuuacagcuacauaugcagacacaauauguauaggcuaccaugcuaacaacucgaccgacacuguugacacaguacuugaaaagaaugugacagugacacacucugucaaccugcuugagaacagucacaauggaaaacuaugucuauuaaaaggaauagccccacuacaauuggguaacugcagcguugccggguggaucuuaggaaacccagaaugcgaauuacugauuuccaaggagucaugguccuacauuguagaaaaaccaaauccugagaauggaacauguuacccagggcauuucgcugacuaugaggaacugagggagcaauugaguucaguaucuucauuugagagguucgaaauauuccccaaagaaagcucauggcccaaccacaccguaaccggagugucagcaucaugcucccauaauggggaaagcaguuuuuacagaaauuugcuauggcugacggagaagaaugguuuguacccaaaccugagcaaguccuaugcaaacaacaaagaaaaagaaguccuuguacuaugggguguucaucacccgccaaacaugggugaccaaaagacccucuaucauacagaaaaugcuuauguuucuguagugucuucacauuauagcagaaaauucaccccagaaauagccaaaagacccaaaguaagagaccaagaaggaagaaucaacuacuacuggacucugcuugaacccggggauacaauaauauuugaggcaaauggaaaucuaauagcgccaagauaugcuuucgcacuaaguagaggcuuuggaucaggaaucaucaacucaaaugcaccaauggauaaaugugaugcgaagugccaaacaccucagggagcuauaaacagcagucuuccuuuccagaacguacacccagucacaauaggagaguguccaaaguaugucaggagugcaaaauuaaggaugguuacaggacuaaggaacaucccauccauucaauccagagguuuguuuggagccauugccgguuucauugaagggggguggacuggaaugguagaugguugguaugguuaucaucaucagaaugagcaaggaucuggcuaugcugcagaucaaaaaagcacacaaaaugccauuaaugggauuacaaacaaggugaauucuguaauugagaaaaugaacacucaauucacagcagugggcaaagaauucaacaaauuggaaagaaggauggaaaacuugaauaaaaaaguugaugauggguuuauagauauuuggacauauaaugcagaacuguugguucuacuggaaaaugaaaggacuuuggauuuccaugacuccaaugugaagaaucuguaugagaaaguaaaaagccaguuaaagaauaaugcuaaagaaauaggaaauggguguuuugaauucuaucacaaguguaacgaugaaugcauggagaguguaaagaauggaacuuaugacuauccaaaauauuccgaagaaucaaaguuaaacagggagaaaauugauggagugaaauuggaaucaaugggagucuaucagauucuggcgaucuacucaacagucgccaguucucugguucuuuuggucucccugggggcaaucagcuucuggauguguuccaaugggucuuugcaguguagaauaugcaucuaa

SEQ ID NO: 37514 - RNA, 1701 nt, Artificial Sequence
  derived and/or modified CDS sequence (wt) from hemagglutinin__InfluenzaA__ADL39302
augaagacuaucauugcuuugagcuacauucuaugucugguuuucgcucaaaaacuuccuggaaaugacaacagcacggcaacgcugugccuugggcaccaugcaguaccaaacggaacgauagugaaaacaaucacgaaugaccaaauugaaguuacuaaugcuacugagcugguucagaguuccucaacaggugaaauaugcgacaguccucaucagauccuugauggagaaaacugcacacuaauagaugcucuauugggagacccucagugugauggcuuccaaaauaagaaaugggaccuuuuuguugaacgcagcaaagccuacagcaacuguuacccuuaugaugugccggauuaugccucccuuaggucacuaguugccucauccggcacacuggaguuuaacaaugaaagcuucaauuggaccggagucacucaaaacggaacaagcucugcuugcauaaggagaucuaauaacaguuucuuuaguagauugaauugguugacccacuuaaaauucaaauacccagcauugaacgugacuaugccaaacaaugaacaauuugacaaauuguacauuugggggguucaccacccggguacggacaaugaccaaaucuuccuguaugcucaagcaucaggaagaaucacagucucuaccaaaagaagccaacaaacuguaaucccgaauaucggaucuagacccagaguaaggaauaucccuagcagaauaagcaucuauuggacaauaguaaaaccgggagacauacuuuugauuaacagcacagggaaucuaauugcuccuagggguuacuucaaaauacgaagugggaaaagcucaauaaugagaucagaugcacccauuggcaaaugcaacucugaaugcaucacuccaaauggaagcauucccaaugacaaaccauuccaaaauguaaacaggaucacauacggggccugucccagauauguuaagcaaaacacucugaaauuggcaacagggaugcgaaauguaccagagaaacaaacuagaggcauauuuggcgcaaucgcggguuucauagaaaaugguugggagggaaugguggaugguugguacgguuucaggcaucaaaauucugagggaagaggacaagcagcagaucucaaaagcacucaagcagcaaucgaucaaaucaaugggaagcugaauagauugaucgguaaaaccaacgagaaauuccaucagauugaaaaagaauucucagaagucgaagggagaauucaggaccuugagaaauauguugaggacacuaaaauagaucucuggucauacaacgcggagcuucuuguugcccuggagaaccaacauacaauugaucuaacugacucagaaaugaacaaacuguuugaaaaaacaaagaagcaacugagggaaaaugcugaggauaugggcaaugguuguuucaaaauauaccacaaaugugacaaugccugcauaggaucaaucagaaauggaacuuaugaccacgauguauacagagaugaagcauuaaacaaccgguuccagaucaagggaguugagcugaagucaggguacaaagauuggauccuauggauuuccuuugccauaucauguuuuuugcuuuguguugcuuuguugggguucaucaugugggccugccaaaaaggcaacauuaggugcaacauuugcauuuga

SEQ ID NO: 37515 - RNA, 1701 nt, Artificial Sequence
  derived and/or modified CDS sequence (wt) from hemagglutinin__InfluenzaA__ADL39313
augaagacuaucauugcuuugagcuacauucuaugucugguuuucgcucaaaaacuuccuggaaaugacaacagcacggcaacgcugugccuugggcaccaugcaguaccaaacggaacaauagugaaaacaaucacgaaugaccaaauugaaguuacuaaugcuacugagcugguucagaguuccucaacaggugaaauaugcgacaguccucaucagauccuugauggagagaacugcacacuaauagaugcucuauugggagacccucaaugugauggcuuccaaaauaagaaaugggaccuuuuuguugaacgcagcaaagccuacagcaacuguuacccuuaugaugugccggauuaugccucccuuaggucacuaguugccucauccggcacacuggaguuuaacaaugaaagcuucaauuggacuggagucacucaaaacggaacaagcucugcuugcauaaggagaucuaauaacaguuucuuuaguagauugaauugguugacccacuuaagauucaaauacccagcauugaacgugacuaugccaaacaaugaacaauuugacaaauuguacauuugggggguucaccacccggguacggacaaugaccaaaucuuccuguaugcucaagcaucaggaagaaucacagucucuaccaaaagaagccaacaaacuguaaucccgaauaucggaucuagacccagaguaaggaauauuccuagcagaauaagcaucuauuggacaauaguaaaaccaggagacauacuuuugauuaacagcacagggaaucuaauugcuccuagggguuacuucaaaauacgaagugggaaaagcucaauaaugagaucagaugcacccauuggcaaaugcaauucugaaugcaucacuccaaauggaagcauucccaaugacaaaccauuccaaaauguuaacaggaucacauacggggccugucccagauauguuaagcaaaacacucugaaauuggcaacagggaugcgaaauguaccagagaaacaaacuagaggcauauuuggcgcaaucgcggguuucauagaaaaugguugggagggaaugguggaugguugguacgguuucaggcaucaaaauucugaaggaagaggacaagcagcagaucucaaaagcacucaagcagcaaucgaucaaaucaaugggaagcugaauagauugaucgggaaaaccaacgagaaauuccaucagauugaaaaagaauucucagaagucgaagggagaauucaggaccuugagaaauauguugaggacaccaaaauagaucucuggucauacaacgcggagcuucuuguugcccuggagaaccaacauacaauugaucuaacugacucagaaaugaacaaacuguuugaaaaaacaaagaagcaacugagggaaaaugcugaggauaugggcaaugguuguuucaaaauauaccacaaaugugacaaugccugcauaggaucaaucagaaauggaacuuaugaccacgauguauacagagaugaagcauuaaacaaccgguuccagaucaagggaguugagcugaagucaggauacaaagauuggauccuauggauuuccuuugccauaucauguuuuuugcuuuguguugcuuuguugggguucaucaugugggccugccaaaaaggcaacauuaggugcaacauuugcauuuga

SEQ ID NO: 37516 - RNA, 1701 nt, Artificial Sequence
  derived and/or modified CDS sequence (wt) from hemagglutinin__InfluenzaA__ADL39335
augaagacuaucauugcuuugagcuacauucuaugucugguuuucgcucaaaaacuuccuggaaaugacaacagcacggcaacgcugugccuugggcaccaugcaguaccaaacggaacgauagugaaaacaaucacgaaugaccaaauugaaguuacuaaugcuacugagcugguucagaguuccucaacaggugaaauaugcgacaguccucaucagauccuugauggagaaaacugcacacuaauagaugcucuauugggagacccucagugugauggcuuccaaaauaagaaaugggaccuuuuuguugaacgcagcaaagccuacagcaacuguuacccuuaugaugugccggauuaugccucccuuaggucacuaguugccucaucuggcacacuggaguuuaacaaugaaagcuucaauuggacuggagucacucaaaacggaacaagcucugcuugcauaaggagaucuaauaacaguuucuuuaguagauugaauugguugacccacuuaagauucaaauacccagcauugaacgugacuaugccaaacaaugaacaauuugacaaauuguacauuugggggguucaccacccggguacggacaaugaccaaaucuuccuguaugcucaagcaucaggaagaaucacagucucuaccaaaagaagccaacaaacuguaaucccgaauaucggaucuagacccagaguaaggaauaucccuagcagaauaagcaucuauuggacaauaguaaaaccgggagacauacuuuugauuaacagcacagggaaucuaauugcuccuagggguuacuucaaaauacgaagugggaaaagcucaauaaugagaucagaugcacccauuggcaaaugcaauucugaaugcaucacuccaaauggaagcauucccaaugacaaaccauuccaaaauguaaacagaaucacauacggggccugucccagauauguuaagcaaaacacucugaaauuggcaacagggaugcgaaauguaccagagaaacaaacuagaggcauauuuggagcaaucgcggguuucauagaaaaugguugggagggaaugguggaugguugguacgguuucaggcaucaaaauucugagggaagaggacaagcagcagaucucaaaagcacucaagcagcaaucgaucaaaucaaugggaagcugaauagauugaucgggaaaaccaacgagaaauuccaucagauugaaaaagaauucucagaagucgaagggagaauucaggaccuugagaaauauguugaggacacuaaaauagaucucuggucauacaacgcggagcuucuuguugcccuggagaaccaacauacaauucaucuaacugacucagaaaugaacaaacuguuugaaaaaacaaagaagcaacugagggaaaaugcugaagauaugggcaaugguuguuucaaaauauaccacaaaugugacaaugccugcauaggaucaaucagaaauggaacuuaugaccacgauguauacagagaugaagcauuaaacaaccgguuccagaucaagggaguugagcugaagucaggguacaaagauuggauccuauggauuuccuuugccauaucauguuuuuugcuuuguguugcuuuguugggguucaucaugugggccugccaaaaaggcaacauuaggugcaacauuugcauuuga

SEQ ID NO: 37517 - RNA, 1701 nt, Artificial Sequence
  derived and/or modified CDS sequence (wt) from hemagglutinin__InfluenzaA__ADL39368
augaagacuaucauugcuuugagcuacauucuaugccuaguuuucgcucaaaaacuuccuggaaaugacaacagcacggcaacgcugugccuugggcaccaugcaguaccaaacggaacgauagugaaaacaaucacgaaugaccaaauugaaguuacuaaugcuacugagcugguucagaguuccucaacaggugaaauaugcgacaguccucaucagauccuugauggagaaaacugcacacuaauagaugcucuauugggagacccucagugugauggcuuccaaaauaagaaaugggaccuuuuuguugaacgcagcaaagccuacagcaacuguuacccuuaugaugugccggauuaugccucccuuaggucacuaguugccucauccggcacacuggaguuuaacaaugaaagcuucaauuggacuggagucacucaaaacggaacaagcucugcuugcauaaggagaucuaauaacaguuucuuuaguagauugaauugguugacccacuuaaaauucaaauacccagcauuaaacgugacuaugccaaacaaugaacaauuugacaaauuguacauuugggggguucaccacccggguacggacaaugaccaaaucuuccuguaugcucaagcaucaggaagaaucacagucucuacaaaaagaagccaacaaacuguaaucccgaauaucggaucuagacccagaguaaggaauaucccuagcagaauaagcaucuauuggacaauaguaaaaccgggagacauacuuuugauuaacagcacagggaaucuaauugcuccuagggguuacuucaaaauacgaagugggaaaagcucaauaaugagaucagaugcacccauuggcaaaugcaauucugagugcaucacuccaaauggaagcauucccaaugacaaaccauuccaaaauguaaacaggaucacauacggggccugucccagauauguuaagcaaaacacucugaaauuggcaacagggaugcgaaauguaccagagaaacaaacuagaggcauauuuggcgcaaucgcgggcuucauagaaaaugguugggagggaaugguggaugguugguacgguuucaggcaucaaaauucugagggaagaggacaagcagcagaucucaaaagcacucaagcagcaaucgaucaaaucaaugggaagcugaauagauugaucgggaaaaccaacgagaaauuccaucagauugaaaaagaauucucagaagucgaagggagaauucaggaccuugagaaauauguugaggacaccaaaauagaucucuggucauacaacgcggagcuucuuguugcccuggagaaccaacauacaauugaucuaacugacucagaaaugaacaaacuguuugaaaaaacaaagaagcaacugagggaaaaugcugaggauaugggcaaugguuguuucaaaauauaccacaaaugugacaaugccugcauaggaucaaucagaaauggaacuuaugaccacgauguauacagagaugaagcauuaaacaaccgguuccagaucaagggaguugagcugaagucaggguacaaagauuggauccuauggauuuccuuugccauaucauguuuuuugcuuuguguugcuuuguugggguucaucaugugggccugccaaaaaggcaacauuaggugcaacauuugcauuuga

SEQ ID NO: 37518 - RNA, 1698 nt, Artificial Sequence
  derived and/or modified CDS sequence (wt) from hemagglutinin__InfluenzaA__ADL39390
augaaaguaaaacuacugguccuguuaugcacauuuacagcuacauaugcagacacaauauguauaggcuaccaugcuaacaacucgaccgacacuguugacacaguacuugaaaagaaugugacagugacacacucugucaaccugcuugagaacagucacaauggaaaacuaugucuauuaaaaggaauagccccacuacaauuggguaacugcagcguugccggguggaucuuaggaaacccagaaugcgaauuacugauuuccaaagagucaugguccuacauuguagaaaaaccaaauccugagaauggaacauguuacccagggcauuucgcugacuaugaggaacugagggagcaauugaguucaguaucuucauuugagagguucgaaauauuccccaaagaaagcucauggcccaaccacaccguaaccggagugucagcaucaugcucacauaauggggaaagcaguuuuuacagaaauuugcuauggcugacggggaagaaugguuuguacccaagccugagcaaguccuaugcaaacaacaaagaaaaagaaguccuuguacuaugggguguucaucacccgccaaacauaguugaccaaaagacccucuaccguacagaaaaugcuuauguuucuguagugucuucacauuauagcagaaaauucaccccagaaauagccaaaagacccaaaguaagagaucaagaaggaagaaucaacuacuacuggacucugcuugaacccggggauacaauaauauuugaggcaaauggaaaucuaauagcgccaagauaugcuuucgcacugaguagaggcuuuggaucaggaaucaucaacucaaaugcaccaauggguaaaugugaugcgaagugucaaacaccucagggagcuauaaacagcagucuuccuuuccagaacguacacccagucacaauaggagaguguccaaaguaugucaggagugcaaaauuaaggaugguuacaggacuaaggaacaucccauccauucaauccagagguuuguuuggagccauugccgguuucauugaagggggguggacuggaaugguagaugguugguaugguuaucaucaucagaaugagcaaggaucuggcuaugcugcagaucaaaaaagcacacaaaaugccauuaaugggauuacaaacaaggugaauucuguaauugagaaaaugaacacucaauucacagcagugggcaaagaauucaacaaauuggaaagaaggauggaaaacuugaauaaaaaaguugaugauggguuuauagacauuuggacauauaaugcagaacuguugguucuacuggaaaaugaaaggacuuuggauuuccaugacuccaaugugaagaaucuguaugagaaaguaaaaagccaguuaaagaauaaugcuaaagaaauaggaaauggguguuuugaauucuaucacaaguguaacgaugaaugcauggagaguguaaagaauggaacuuaugacuauccaaaauauuccgaagaaucaaaguuaaacagggagaaaauugauggagugaaauuggaaucaaugggagucuaucagauucuggcgaucuacucaacagucgccaguucucugguucuuuuggucucccugggggcaaucagcuucuggauguguuccaaugggucuuugcaguguagaauaugcaucuaa

SEQ ID NO: 37519 - RNA, 1701 nt, Artificial Sequence
  derived and/or modified CDS sequence (wt) from hemagglutinin__InfluenzaA__ADL39401
augaagacuaucauugcuuugagcuacauucuaugucugguuuucgcucaaaaacuuccuggaaaugacaacagcacggcaacgcugugccuugggcaccaugcaguaccaaacggaacgauagugaaaacaaucacgaaugaccaaauugaaguuacuaaugcuacugagcugguucagaguuccucaacaggugaaauaugcgacaguccucaucagauccuugauggagaaaacugcacacuaauagaugcucuauugggagacccucagugugauggcuuccaaaauaagaaaugggaccuuuuuguugaacgcagcaaagccuacagcaacuguuacccuuaugaugugccggauuaugccucccuuaggucacuaguugccucauccggcacacuggaguuuaacaaugaaagcuucaauuggacuggagucacucaaaacggaacaagcucuucuugcaugaggagaucuaauaacaguuucuuuaguagauugaauugguugacccacuuaaaauucaaauacccagcauuaaacgugacuaugccaaacaaugaacaauuugacaaauuguacauuugggggguucaccacccggguacggacaaugaccaaaucuuccuguaugcucaagcaucaggaagaaucacagucucuacaaaaagaagccaacaaacuguaaucccgaauaucggaucuagacccagaguaaggaauaucccuagcagaauaagcaucuauuggacaauaguaaaaccgggagacauacuuuugauuaacagcacagggaaucuaauugcuccuagggguuacuucaaaauacgaagugggaaaagcucaauaaugagaucagaugcacccauuggcaaaugcaauucugaaugcaucacuccaaauggaagcauucccaaugacaaaccauuccaaaauguaaacaggaucacauacggggccugucccagauauguuaagcaaaacacucugaaauuggcaacagggaugcgaaauguaccagagaaacaaacuagaggcauauuuggugcaaucgcggguuucauagaaaaugguugggagggaaugguggaugguugguacgguuucaggcaucaaaauucugagggaagaggacaagcagcagaucucaaaagcacucaagcagcaaucgaucaaaucaaugggaagcugaauagauugaucgggaaaaccaacgagaaauuccaucagauugaaaaagaauucucagaagucgaagggagaauucaggaccuugagaaauauguugaggacaccaaaauagaucucuggucauacaacgcggagcuucuuguugcccuggagaaccaacauacaauugaucuaacugacucagaaaugaacaaacuguuugaaaaaacaaagaagcaacugagggaaaaugcugaggauaugggcaaugguuguuucaaaauauaccacaaaugugacaaugccugcauaggaucaaucagaaauggaacuuaugaccacgauguauacagagaugaagcauuaaacaaccgguuccagaucaagggaguugagcugaagucaggguacaaagauuggauccuauggauuuccuuugccauaucauguuuuuugcuuuguguugcuuuguugggguucaucaugugggccugccaaaaaggcaacauuaggugcaacauuugcauuuga

SEQ ID NO: 37520 - RNA, 1701 nt, Artificial Sequence
  derived and/or modified CDS sequence (wt) from hemagglutinin__InfluenzaA__ADL39412
augaagacuaucauugcuuugagcuacauucuaugucugguuuucgcucaaaaacuuccuggaaaugacaacagcacggcaacgcugugccuugggcaccaugcaguaccaaacggaacgauagugaaaacaaucacgaaugaccaaauugaaguuacuaaugcuacugagcugguucagaguuccucaacaggugaaauaugcgacaguccucaucagauccuugauggagaaaacugcacacuaauagaugcucuauugggagacccucagugugauggcuuccaaaauaagaaaugggaccuuuuuguugaacgcagcaaagccuacagcaacuguuacccuuaugaugugccggauuaugccucccuuaggucacuaguugccucauccggcacacuggaguuuaacaaugaaagcuucaauuggacuggagucacucaaaacggaacaagcucugcuugcauaaggagaucuaauaacaguuucuuuaguagauugaauugguugacccacuuaaaauucaaauacccagcauuaaacgugacuaugccaaacaaugaacaauuugacaaauuguacauuugggggguucaccacccggguacggacaaugaccaaaucuuccuguaugcucaagcaucaggaagaaucacagucucuaccaaaagaagccaacaaacuguaaucccgaauaucggaucuagacccagaguaaggaauaucccuagcagaauaagcaucuauuggacaauaguaaaaccgggagacauacuuuugauuaacagcacagggaaucuaauugcuccuagggguuacuucaaaauacgaagugagaaaagcucaauaaugagaucagaugcacccauuggcaaaugcaauucugaaugcaucacuccaaauggaagcauucccaaugacaaaccauuccaaaauguaaacaggaucacauacggggccugucccagauauguuaagcaaaacacucugaaauuggcaacagggaugcgaaauguaccagagaaacaaacuagaggcauauuuggcgcaaucgcggguuucauagaaaaugguugggagggaaugguggaugguugguacgguuucaggcaucaaaauucugagggaagaggacaagcagcagaucucaaaagcacucaagcagcaaucgaucaaaucaaugggaagcugaauagauugaucgggaaaaccaacgagaaauuccaucagauugaaaaagaauucucagaagucgaagggagaauucaggaccuugagaaauauguugaggacaccaaaauagaucucuggucauacaacgcggagcuucuuguugcccuggagaaccaacauacaauugaucuaacugacucagaaaugaacaaacuguuugaaaaaacaaagaagcaacugagggaaaaugcugaggauaugggcaaugguuguuucaaaauauaccacaaaugugacaaugccugcauaggaucaaucagaaauggaacuuaugaccacgauguauacagagaugaagcauuaaacaaccgguuccagaucaagggaguugagcugaagucaggguacaaagauuggauccuauggauuuccuuugccauaucauguuuuuugcuuuguguugcuuuguugggguucaucaugugggccugccaaaaaggcaacauuaggugcaacauuugcauuuga

SEQ ID NO: 37521 - RNA, 1698 nt, Artificial Sequence
  derived and/or modified CDS sequence (wt) from hemagglutinin__InfluenzaA__ADL39423
augaaaguaaaacuacugguccuguuaugcacauuuacagcuacauaugcagacacaauauguauaggcuaccaugcuaacaacucgaccgacacuguugacacaguacuugaaaagaaugugacagugacacacucugucaaccugcuugagaacagucacaauggaaaacuaugucuauuaaaaggaauagccccacuacaauuggguaacugcagcguugccggguggaucuuaggaaacccagaaugcgaauuacugauuuccaaggagucaugguccuacauuguagaaaaaccaaauccugagaauggaacauguuacccaggacauuucgcugacuaugaggaacugagggagcaauugaguucaguaucuucauuugagagguucgaaauauuccccaaagaaagcucauggcccagccacaccguaaccggagugucagcaucaugcucccauaauggggaaaacaguuuuuacagaaauuugcuauggcugacggggaagaaugguuuguacccaaaccugagcaaguccuaugcaaacaacaaagaaaaagaaguccuuguacuaugggguguucaucacccgccaaacauagcugaccaaaagacccucuaccauacagaaaaugcuuauguuucuguagugucuucacauuauagcagaaaauucaccccagaaauagccaaaagacccaaaguaagagaucaagaaggaagaaucaacuacuacuggacucugcuugaacccggggauacaauaauauuugaggcaaaugggaaucuaauagcgccaagauaugcuuucgcacugaguagaggcuuuggaucaggaaucaucaacucaaaugcaccaauggauaaaugugaugcgaagugucaaacaccucagggagcuauaaacagcagucuuccuuuccagaacguacacccagucacaauaggagaguguccaaaguaugucaggagugcaaaauuaaggaugguuacaggacuaaggaacaucccauccauucaauccagagguuuguuuggagccauugccgguuucauugaagggggguggacuggaaugguagaugguugguaugguuaucaucaucagaaugagcaaggaucuggcuaugcugcagaucaaaaaagcacacaaaaugccauuaaugggauuacaaacaaggugaauucuguaauugagaaaaugaacacucaauucacagcagugggcaaagaauucaacaaauuggaaagaaggauggaaaacuugaauaaaaaaguugaugauggguuuauagacauuuggacauauaaugcagaacuguugguucuacuggaaaaugaaaggacuuuggauuuccaugacuccaaugugaagaaucuguaugagaaaguaaaaaaccaguuaaagaauaaugcuaaagaaauaggaaauggguguuuugaauucuaucacaaguguaacgaugaaugcauggagaguguaaagaauggaacuuaugacuauccaaaauauuccgaagaaucaaaguuaaacagggagaaaauugauggagugaaauuggaaucaaugggagucuaucagauucuggcgaucuacucaacagucgccaguucucugguucuuuuggucucccugggggcaaucagcuucuggauguguuccaaugggucuuugcaguguagaauaugcaucuaa

SEQ ID NO: 37522 - RNA, 1701 nt, Artificial Sequence
  derived and/or modified CDS sequence (wt) from hemagglutinin__InfluenzaA__ADL39434
augaagacuaucauugcuuugagcuacauucuaugucugguuuucgcucaaaaacuuccuggaaaugacaacagcacggcaacgcugugccuugggcaccaugcaguaccaaacggaacaauagugaaaacaaucacgaaugaccaaauugaaguuacuaaugcuacugagcugguucagaguuccucaacaggugaaauaugcgacaguccucaucagauccuugauggagagaacugcacacuaauagaugcucuauugggagacccucaaugugauggcuuccaaaauaagaaaugggaccuuuuuguugaacgcagcaaagccuacagcaacuguuacccuuaugaugugccggauuaugccucccuuaggucacuaguugccucauccggcacacuggaguuuaacaaugaaagcuucaauuggacuggagucacucaaaacggaacaagcucugcuugcauaaggagaucuaauaacaguuucuuuaguagauugaauugguugacccacuuaagauucaaauacccagcauugaacgugacuaugccaaacaaugaacaauuugacaaauuguacauuugggggguucaccacccggguacggacaaugaccaaaucuuccuguaugcucaagcaucaggaagaaucacagucucuaccaaaagaagccaacaaacuguaaucccgaauaucggaucuagacccagaguaagggauauuccuagcagaauaagcaucuauuggacaauaguaaaaccaggagacauacuuuugauuaacagcacagggaaucuaauugcuccuagggguuacuucaaaauacgaagugggaaaagcucaauaaugagaucagaugcacccauuggcaaaugcaauucugaaugcaucacuccaaauggaagcauucccaaugacaaaccauuccaaaauguuaacaggaucacauacggggccugucccagauauguuaagcaaaacacucugaaauuggcaacagggaugcgaaauguaccagagaaacaaacuagaggcauauuuggcgcaaucgcggguuucauagaaaaugguugggagggaaugguggaugguugguacgguuucaggcaucaaaauucugaaggaagaggacaagcagcagaucucaaaagcacucaagcagcaaucgaucaaaucaaugggaagcugaauagauugaucgggaaaaccaacgagaaauuccaucagauugaaaaagaauucucagaagucgaagggagaauucaggaccuugagaaauauguugaggacaccaaaauagaucucuggucauacaacgcggagcuucuuguugcccuggagaaccaacauacaauugaucuaacugacucagaaaugaacaaacuguuugaaaaaacaaagaagcaacugagggaaaaugcugaggauaugggcaaugguuguuucaaaauauaccacaaaugugacaaugccugcauaggaucaaucagaaauggaacuuaugaccacgauguauacagagaugaagcauuaaacaaccgguuccagaucaagggaguugagcugaagucaggauacaaagauuggauccuauggauuuccuuugccauaucauguuuuuugcuuuguguugcuuuguugggguucaucaugugggccugccaaaaaggcaacauuaggugcaacauuugcauuuga

SEQ ID NO: 37523 - RNA, 1698 nt, Artificial Sequence
  derived and/or modified CDS sequence (wt) from hemagglutinin__InfluenzaA__ADL39445
augaaaguaaaacuacugguccuguuaugcacauuuacagcuacauaugcagacacaauauguauaggcuaccaugcuaacaacucgaccgacacuguugacacaguacuugaaaagaaugugacagugacacacucugucaaccugcuugagaacagucacaauggaaaacuaugucuauuaaaaggaauagccccacuacaauuggguaacugcagcguugccggguggaucuuaggaaacccagaaugcgaauuacugauuuccaaagagucauggucauacauuguagaaaaaccaaauccugagaauggaacauguuacccagggcauuucgcugacuaugaggaacugagggagcaauugaguucaguaucuucauuugagagguucgaaauauuccccaaagaaagcucauggcccaaccacaccguaaccggagugucagcaucaugcucccauaauggggaaagcaguuuuuacagaaauuugcuauggcugacggggaagaaugguuuguacccaacccugagcaaguccuaugcaaacaacaaagaaaaagaaguccuuguacuaugggguguucaucacccgccaaacauaguugaccaaaagacccucuaucguacagaaaaugcuuauguuucuguagugucuucacauuauagcagaaaauucaccccagaaauagccaaaagacccaaaguaagagaucaagaaggaagaaucaacuacuacuggacucugcuugaacccggagauacaauaauauuugaggcaaauggaaaucuaauagcgccaagauaugcuuucgcacugaguagaggcuuuggaucaggaaucaucaacucaaaugcaccaauggauaaaugugaugcgaagugucaaacaccucagggagcuauaaacagcagucuuccuuuccagaacguacacccagucacaauaggagaguguccaaaguaugucaggagugcaaaauuaaggaugguuacaggacuaaggaacaucccauccauucaauccagagguuuguuuggagccauugccgguuucauugaagggggguggacuggaaugguagaugguugguaugguuaucaucaucagaaugagcaaggaucuggcuaugcugcagaucaaaaaagcacacaaaaugccauuaaugggauuacaaacaaggugaauucuguaauugagaaaaugaacacucaauucacagcagugggcaaagaauucaacaaauuggaaagaaggauggaaaacuugaauaaaaaaguugaugauggguuuauagacauuuggacauauaaugcagaacuguugguucuacuggaaaaugaaaggacuuuggauuuccaugacuccaaugugaagaaucuguaugagaaaguaaaaagccaguuaaagaauaaugcuaaagaaauaggaaauggguguuuugaauucuaucacaaguguaacgaugaaugcauggagaguguaaagaauggaacuuaugacuauccaaaauauuccgaagaaucaaaguuaaacagggagaaaauugauggagugaaauuggaaucaaugggagucuaucagauucuggcgaucuacucaacagucgccaguucucugguucuuuuggucucccugggggcaaucagcuucuggauguguuccaaugggucuuugcaguguagaauaugcaucuaa

SEQ ID NO: 37524 - RNA, 1698 nt, Artificial Sequence
  derived and/or modified CDS sequence (wt) from hemagglutinin__InfluenzaA__ADL39456
augaaaguaaaacuacugguccuguuaugcacauuuacagcuacauaugcagacacaauauguauaggcuaccaugcuaacaacucgaccgauacuguugacacaguacuugaaaagaaugugacagugacacacucugucaaccugcuugagaacagucacaauggaaaacuaugucuauuaaaaggaauagccccacuacaauuggguaacugcagcguugccggguggaucuuaggaaacccagaaugcgaauuacugauuuccaaggagucaugguccuacauuguagaaaaaccaaauccugagaauggaacauguuacccagggcauuucgcugacuaugaggaacugagggagcaauugaguucaguaucuucauuugagagguucgaaauauuccccaaagaaagcucauggcccagccacaccguaaccggagugucagcaucaugcucccauaauggggaaaacaguuuuuacagaaauuugcuauggcugacggggaagaaugguuuguacccaaaccugagcaaguccuaugcaaacaacaaagaaaaagaaguccuuguacuaugggguguucaucacccgccaaacauagcugaccaaaagacccucuaucauacagaaaaugcuuauguuucuguagugucuucacauuauagcagaaaauucaccccagaaauagccaaaagacccaaaguaagagaucaagaaggaagaaucaacuacuacuggacucugcuugaacccggggauacaauaauauuugaggcaaauggaaaucuaauagcgccaagauaugcuuucgcacugaguagaggcuuuggaucaggaaucaucaacucaaaugcaccaauggauaaaugugaugcgaagugucaaacaccucagggagcuauaaacagcagucuuccuuuccagaacguacacccagucacaauaggagaguguccaaaguaugucaggagugcaaaauuaaggaugguuacaggacuaaggaacaucccauccauucaauccagagguuuguuuggagccauugccgguuucauugaagggggguggacuggaaugguagaugguugguaugguuaucaucaucagaaugagcaaggaucuggcuaugcugcagaucaaaaaagcacacaaaaugccauuaaugggauuacaaacaaggugaauucuguaauugagaaaaugaacacucaauucacagcagugggcaaagaauucaacaaauuggaaagaaggauggaaaacuugaauaaaaaaguugaugauggguuuauagacauuuggacauauaaugcagaacuguugguucuacuggaaaaugaacggacuuuggauuuccaugacuccaaugugaagaaucuguaugagaaaguaaaaagccaguuaaagaauaaugcuaaagaaauaggaaauggguguuuugaauucuaucacaaguguaacgaugaaugcauggagaguguaaagaauggaacuuaugacuauccaaaauauuccgaagaaucaaaguuaaacagggagaaaauugauggagugaaauuggaaucaaugggagucuaucagauucuggcgaucuacucaacagucgccaguucucugguucuuuuggucucccugggggcaaucagcuucuggauguguuccaaugggucuuugcaguguagaauaugcaucuaa

SEQ ID NO: 37525 - RNA, 1698 nt, Artificial Sequence
  derived and/or modified CDS sequence (wt) from hemagglutinin__InfluenzaA__ADL39467
augaaaguaaaacuacugguccuguuaugcacauuuacagcuacauacgcagacacaauauguauaggcuaccaugcuaacaacucgaccgacacuguugacacaguacuugaaaagaaugugacagugacacacucugucaaccugcuugagaacagucacaauggaaaacuaugucuauuaaaaggaauagccccacuacaauuggguaacugcagcguugccggguggaucuuaggaaacccagaaugcgaauuacugauuuccaaagagucaugguccuacauuguagaaaaaccaaauccugagaauggaacauguuacccagggcauuucgcugacuaugaggaacugagggagcaauugaguucaguaucuucauuugagagguucgaaauauuccccaaagaaagcucauggcccaaccacaccguaaccggagugucagcaucaugcucccauaauggggaaagcaguuuuuacagaaauuugcuauggcugacggggaagaaugguuuguacccaaaccugagcaaguccuaugcaaacaacaaagaaaaagaaguccuuguacuaugggguguucaucacccgccaaacauaguugaccaaaagacccucuaccguacagaaaaugcuuauguuucuguagugucuucacauuauagcagaaaauucaccccagaaauagccaaaagacccaaaguaagagaucaagaaggaagaaucaacuacuacuggacucugcuugaacccggggauacaauaauauuugaggcaaauggaaaucuaauagcgccaagauaugcuuucgcacugaguagaggcuuuggaucaggaaucaucaacucaaaugcaccaauggguaaaugugaugcgaagugucaaacaccucagggagcuauaaacagcagucuuccuuuccagaacguacacccagucacaauaggagaguguccaaaguaugucaggagugcaaaauuaaggaugguuacaggacuaaggaacaucccauccauucaauccagagguuuguuuggagccauugccgguuucauugaagggggguggacuggaaugguagaugguugguaugguuaucaucaucagaaugagcaaggaucuggcuaugcugcagaucaaaaaagcacacaaaaugccauuaaugggauuacaaacaaggugaauucuguaauugagaaaaugaacacucaauucacagcagugggcaaagaauucaacaaauuggaaagaaggauggaaaacuugaauaaaaaaguugaugauggguuuauagacauuuggacauauaaugcagaacuguugguucuacuggaaaaugaaaggacuuuggauuuccaugacuccaaugugaagaaucuguaugagaaaguaaaaagccaguuaaagaauaaugcuaaagaaauaggaaauggguguuuugaauucuaucacaaguguaacgaugaaugcauggagaguguaaagaauggaacuuaugacuauccaaaauauuccgaagaaucaaaguuaaacagggagaaaauugauggagugaaauuggaaucaaugggagucuaucagauucuggcgaucuacucaacagucgccaguucucugguucuuuuggucucccugggggcaaucagcuucuggauguguuccaaugggucuuugcaguguagaauaugcaucuaa

SEQ ID NO: 37526 - RNA, 1701 nt, Artificial Sequence; identical to SEQ ID NO: 34714
  derived and/or modified CDS sequence (wt) from hemagglutinin__InfluenzaA__ADL41164

SEQ ID NO: 37527 - RNA, 1701 nt, Artificial Sequence; identical to SEQ ID NO: 34774
  derived and/or modified CDS sequence (wt) from hemagglutinin__InfluenzaA__ADL41173

SEQ ID NO: 37528 - RNA, 1698 nt, Artificial Sequence
  derived and/or modified CDS sequence (wt) from hemagglutinin__InfluenzaA__ADL60242
augaaaguaaaacuacugguccuguuaugcacauuuacagcuacauaugcagacacaauauguauaggcuaccaugcuaacaacucgaccgacacuguugacacaguacuugaaaagaaugugacagugacacacucugucaaccugcuugagaacagucacaauggaaaacugugucuauuaaaaggaauagccccacuacaauuggguaacugcagcguugccggguggaucuuaggaaacccagaaugcgaauuacugauuuccaaggagucaugguccuacauuguagaaaaaccaaauccugagaauggaacauguuacccagggcauuucgcugacuaugaggagcugagggagcaauugaguucaguaucuucauuugagagguucgaaauauuccccaaagaaagcucauggcccaaccacaccguaaccggagugucagcaucaugcucccauaauggggaaagaaguuuuuacagaaauuugcuauggcugacggggaagaaugguuuguacccaaaccugagcaaguccuaugcaaacaacaaagaaaaagaaguccuuguacuaugggguguucaucacccgccagacauagguaaccaaaagacccucuaucauacagaaaaugcuuauguuucuguagugucuucacauuauagcagaaaauucaccccagaaauagccaaaagacccaaaguaagagaucaagaaggaagaaucaacuacuacuggacucugcuugaacccggggauacaauaauauuugaggcaaauggaaaucuaauagcgccaagauaugcuuucgcacugaguagaggcuuuggaucaggaaucaucaacucaaaugcaccaauggauaaaugugaugcgaagugucaaacaccucagggagcuauaaacagcagucuuccuuuccagaacguacacccagucacaauaggagaguguccaaaguaugucaggagugcaaaauuaaggaugguuacaggacuaagaaacaucccauccauucaauccagagguuuguuuggagccauugccgguuucauugaagggggguggacuggaaugguagaugguugguaugguuaucaucaucagaaugagcaagggucuggcuaugcugcagaucaaaaaagcacacaaaaugccaucaaugggauuacaaacaaggugaauucuguaauugagaaaaugaacacucaauucacagcagugggcaaagaauucaacaaauuggaaagaaggauggaaaacuugaauaaaaaaguugaugauggguuuauagacauuuggacauauaaugcagaacuguugguucuacuggaaaaugaaaggacuuuggauuuccaugauuccaaugugaagaaucuguaugagaaaguaaaaagccaguuaaagaauaaugcuaaagaaauaggaaauggguguuuugaauucuaucacaaguguaacgaugagugcauggagaguguaaagaauggaacuuaugacuauccaaaauauuccgaagaaucaaaguuaaacagggagaaaauugauggagugaaauuggaaucaaugggagucuaucagauucuggcgaucuacucaacagucgccaguucucugguucuuuuggucucccugggggcaaucagcuucuggauguguuccaaugggucuuugcaguguagaauaugcaucuaa

SEQ ID NO: 37529 - RNA, 1698 nt, Artificial Sequence
  derived and/or modified CDS sequence (wt) from hemagglutinin__InfluenzaA__ADL60253
augaaaguaaaacuacugguccuguuaugcacauuuacagcuacauaugcagacacaauauguauaggcuaccaugcuaacaacucaaccgacacuguugacacaguacuugaaaagaaugugacagugacacauucugucaaccugcuugagaacagucacaauggaaaacuaugucuauuaaaaggaauagccccacuacaauuggguaauugcagcguugccggauggaucuuaggaaacccagaaugcggauuacugauuuccaaggagucaugguccuacauuguagaaaaaccaaacccugagaauggaacauguuacccaggguauuucgccgacuaugaggagcugagggagcaauugaguucaguaucuucauuugagagguucgaaauauuccccaaagaaagcucauggcccaaccacaccguaaccggagugucagcaucaugcucccauaauggagaaagcaguuuuuacagaaauuugcuauggcugacggggaagaaugguuuguacccaaaccugagcaaguccuaugcaaacaacaaagaaaaagaaguccuuguacuaugggguguucaucacccgccaaacauagguaaccaaaaggcccucuaucauacagaaaaugcuuauguuucuguagugucuucacauuauagcagaaaauucaccccagaaauagccaaaagacccaaaguaagagaucaagaaggaagaaucaacuacuacuggacucuacuugaacccggggauacaauaauauuugaggcaaauggaaaucuaauagcgccaagauaugcuuucgcacugaguagaggcuuuggaucaggaaucaucaacucaaaugcaccaauggauaaaugugaugcgaagugucaaacaccucagggagcuauaaacagcagucuuccuuuccagaacguacacccagucacaauaggagaguguccaaaguaugucaggagugcaaaauuaaggaugguuacaggacuaaggaacaucccauccauucaauccagagguuuguuuggagccauugccgguuucauugaagggggguggacuggaaugguagaugguugguaugguuaucaucaucagaaugagcaaggaucuggcuaugcugcagaucaaaaaagcacacaaaaugccauuaaugggauuacaaacaaggugaauucuguaauugagaaaaugaacacucaauucacagcagugggcaaagaauucaacaaauuggaaagaaggauggaaaacuugaauaaaaaaguugaugauggguuuauagacauuuggacauauaaugcagaacuguugguucuacuggaaaaugaaaggacuuuggauuuccaugacuccaaugugaagaaucuguaugagaaaguaaaaagccaguuaaagaauaaugcuaaagaaauaggaaauggguguuuugaauucuaucacaaguguaacgaugaaugcauggagaguguaaagaauggaacuuaugacuauccaaaauauuccgaagaaucaaaguuaaacagggagaaaauugauggggugaaauuggaaucaaugggagucuaucagauucuggcgaucuacucaacagucgccaguucucugguucuuuuggucucccugggggcaaucagcuucuggauguguuccaaugggucuuugcaguguagaauaugcaucuaa

SEQ ID NO: 37530 - RNA, 1698 nt, Artificial Sequence
  derived and/or modified CDS sequence (wt) from hemagglutinin__InfluenzaA__ADL60264
augaaaguaaaacuacugguccuguuaugcacauuuacagcuacauaugcagacacaauauguauaggcuaccaugcuaacaacucgaccgacacuguugacacaguacuugaaaagaaugugacagugacacacucugucaaccugcuugagaacagucacaauggaaaacugugucuauuaaaaggaauagccccacuacaauuggguaacugcagcguugccggguggaucuuaggaaacccagaaugcgaauuacugauuuccaaggagucaugguccuacauuguagaaaaaccaaauccugagaauggaacauguuacccagggcauuucgcugacuaugaggagcugagggagcaauugaguucaguaucuucauuugagagguucgaaauauuccccaaagaaagcucauggcccaaccacaccguaaccggagugucagcaucaugcucccauaauggggaaagaaguuuuuacagaaauuugcuauggcugacggggaagaaugguuuguacccaaaccugagcaaguccuaugcaaacaacaaagaaaaagaaguccuuguacuaugggguguucaucacccgccagacauagguaaccaaaagacccucuaucauacagaaaaugcuuauguuucuguagugucuucacauuauagcagaaaauucaccccagaaauagccaaaagacccaaaguaagagaucaagaaggaagaaucaacuacuacuggacucugcuugaacccggggauacaauaauauuugaggcaaauggaaaucuaauagcgccaagauaugcuuucgcacugaguagaggcuuuggaucaggaaucaucaacucaaaugcaccaauggauaaaugugaugcgaagugucaaacaccucagggagcuauaaacagcagucuuccuuuccagaacguacacccagucacaauaggagaguguccaaaguaugucaggagugcaaaauuaaggaugguuacaggacuaaggaacaucccauccauucaauccagagguuuguuuggagccauugccgguuucauugaagggggguggacuggaaugguagaugguugguaugguuaucaucaucagaaugagcaagggucuggcuaugcugcagaucaaaaaagcacacaaaaugccaucaaugggauuacaaacaaggugaauucuguaauugagaaaaugaacacucaauucacagcagugggcaaagaauucaacaaauuggaaagaaggauggaaaacuugaauaaaaaaguugaugauggguuuauagacauuuggaccuauaaugcagaacuguugguucuacuggaaaaugaaaggacuuuggauuuccaugauuccaaugugaagaaucuguaugagaaaguaaaaagccaguuaaagaauaaugcuaaagaaauaggaaacggguguuuugaauucuaucacaaguguaacgaugagugcauggagaguguaaagaauggaacuuaugacuauccaaaauauuccgaagaaucaaaguuaaacagggagaaaauugauggagugaaauuggaaucaaugggagucuaucagauucuggcgaucuacucaacagucgccaguucucugguucuuuuggucucccugggggcaaucagcuucuggauguguuccaaugggucuuugcaguguagaauaugcaucuaa

SEQ ID NO: 37531 - RNA, 1698 nt, Artificial Sequence
  derived and/or modified CDS sequence (wt) from hemagglutinin__InfluenzaA__ADL60275
augaaaguaaaacuacugguccuguuaugcacauuuacagcuacauaugcagacacaauauguauaggcuaccaugcuaacaacucgaccgacacuguugacacaguacuugaaaagaaugugacagugacacacucugucaaccugcuugagaacagucacaauggaaaacugugucuauuaaaaggaauagccccacuacaguuggguaacugcagcguugccggguggaucuuaggaaacccagaaugcgaauuacugauuuccaaggagucaugguccuacauuguagaaaaaccaaauccugagaauggaacauguuacccagggcauuucgcugacuaugaggaacugagggagcaauugaguucaguaucuucauuugagagguucgaaauauuccccaaagaaagcucauggcccaaccacaccguaaccggagugucagcaucaugcucccauaauggggaaagaaguuuuuacagaaauuugcuauggcugacggggaagaaugguuuguacccaaaccugagcaaguccuaugcaaacaacaaagaaaaagaaguccuuguacuaugggguguucaucacccgccagacauagguaaccaaaagacccucuaucauacagaaaaugcuuauguuucuguagugucuucacauuauagcagaaaauucaccccagaaauagccaaaagacccaaaguaagagaucaagaaggaagaaucaacuacuacuggacucugcuugaacccggggauacaauaauauuugaggcaaauggaaaucuaauagcgccaagauaugcuuucgcacugaguagaggcuuuggaucaggaaucaucaacucaaaugcaccaauggauaaaugugaugcgaagugucaaacaccucagggagcuauaaacagcagucuuccuuuccagaacguacacccagucacaauaggagaguguccaaaguaugucaggagugcaaaauuaaggaugguuacaggacuaaggaacaucccauccauucaauccagagguuuguuuggagccauugccgguuucauugaagggggguggacuggaaugguagaugguugguaugguuaucaucaucagaaugagcaaggaucuggcuaugcugcagaucaaaaaagcacacaaaaugccaucaaugggauuacaaacaaggugaauucuguaauugagaaaaugaacacucaauucacagcagugggcaaagaauucaacaaauuggaaagaaggauggaaaacuugaauaaaaaaguugaugauggguuuauagacauuuggacauauaaugcagaacuguugguucuacuggaaaaugaaaggacuuuggauuuccaugauuccaaugugaagaaucuguaugagaaaguaaaaagccaguuaaagaauaaugcuaaagaaauaggaaauggguguuuugaauucuaucacaaguguaacgaugagugcauggagaguguaaagaauggaacuuaugacuauccaaaauauuccgaagaaucaaaguuaaacagggagaaaauugauggagugaaauuggaaucaaugggagucuaucagauucuggcgaucuacucaacagucgccaguucucugguucuuuuggucucccugggggcaaucagcuucuggauguguuccaaugggucuuugcaguguagaauaugcaucuaa

SEQ ID NO: 37532 - RNA, 1698 nt, Artificial Sequence
  derived and/or modified CDS sequence (wt) from hemagglutinin__InfluenzaA__ADL60286
augaaaguaaaacuacugguccuguuaugcacauuuacagcuacauaugcagacacaauauguauaggcuaccaugcuaacaacucgaccgacacuguugacacaguacuugaaaagaaugugacagugacacacucugucaaccugcuugagaacagucacaauggaaaacuaugucuauuaaaaggaauagccccacuacaauuggguaacugcagcguugccggguggaucuuaggaaacccagaaugcgaauuacugauuuccaaggagucaugguccuacauuguagaaaaaccaaauccugagaauggaacauguuacccagggcauuucgcugacuaugaggagcugagggagcaauugaguucaguaucuucauuugagagguucgaaauauuccccaaagaaagcucauggcccaaccacaccguaaccggagugucagcaucaugcucccauaauggggaaagcaguuuuuacagaaauuugcuauggcugacggggaagaaugguuuguacccaaaccugagcaaguccuaugcaaacaacaaagaaaaagaaguccuuguacuaugggguguucaucacccgccaagcauaaguaaucaaaagacccucuaucauacagaaaaugcuuauguuucuguagugucuucacauuauagcagaaaauucaccccagaaguagccaaaagacccaaaguaagagaucaagaaggaagaaucaacuacuacuggacucugcuugaacccggggauacaauaauauuugaggcaaauggaaaucuaauagcgccaagauaugcuuucgcacugaguagaggcuuuggaucaggaaucaucaacucaaaugcaccaauggauaaaugugaugcgaagugucaaacaccucagggagcuauaaacagcagucuuccuuuccagaacguacacccagucacaauaggagaguguccaaaguaugucaggagugcaaaauuaaggaugguuacaggacuaaggaacaucccauccauucaauccagagguuuguuuggagccauugccgguuucauugaagggggguggacuggaaugguagacgguugguaugguuaucaucaucagaaugagcaaggaucuggcuaugcugcagaucaaaaaagcacacaaaaugccauuaaugggauuacaaacaaggugaauucuguaauugagaaaaugaacacucaauucacagcagugggcaaagaauucaacaaauuggaaagaaggauggaaaacuugaauaaaaaaguugaugauggguuuauagacauuuggacauauaacgcagaacuguugguucuacuggaaaaugaaaggacuuuggauuuccaugacuccaaugugaagaaucuguaugagaaaguaaaaagccaguuaaagaauaaugcuaaagaaauaggaaacggguguuuugaauucuaucacaaguguaacgaugaaugcauggagaguguaaagaauggaacuuaugacuauccaaaauauuccgaagaaucaaaguuaaacagggagaaaauugauggagugaaauuggaaucaaugggagucuaucagauucuggcgaucuacucaacagucgccaguucucugguucuuuuggucucccugggggcaaucagcuucuggauguguuccaaugggucuuugcaguguagaauaugcaucuaa

SEQ ID NO: 37533 - RNA, 1698 nt, Artificial Sequence
  derived and/or modified CDS sequence (wt) from hemagglutinin__InfluenzaA__ADL60297
augaaaguaaaacuacugguccuguuaugcacauuuacagcuacauaugcagacacaauauguauaggcuaccaugcuaacaacucgaccgacacuguugacacaguacuugaaaagaaugugacagugacacacucugucaaccugcuugagaacagucacaauggaaaacuaugucuauuaaaaggaauagccccacuacaauuggguaacugcagcgucgccggguggaucuuaggaaacccagaaugcgaauuacugauuuccaaggagucaugguccuacauuguagaaaaaccaaauccugagaauggaacauguuacccagggcauuucgcugacuaugaggagcugagggagcaauugaguucaguaucuucauuugagagguucgaaauauuccccaaagaaagcucauggcccaaccacaccguaaccggagugucagcaucaugcucccauaauggggaaagcaguuuuuacagaaauuugcuauggcugacgaggaagaaugguuuguacccaaaccugagcaaguccuaugcaaacaacaaggaaaaagaaguccuuguacuaugggguguucaucacccgccaaacauaggugaccaaaagacccucuaucauacagaaaaugcuuauguuucuguagugucuucacauuauagcagaaaauucaccccagaaauagccaaaagacccaaaguaagagaucaagaaggaaggaucaacuacuacuggacucugcuugaacccggggauacaauaauauuugaggcaaauggaaaucuaauagcgccaagauaugcuuucgcacugaguagaggcuuuggaucaggaaucaucaacucaaaugcaccaauggauaaaugugaugcgaagugucaaacaccucagggagcuauaaacagcagucuuccuuuccagaacguacacccagucacaauaggagaguguccaaaguaugucaggagugcaaaauuaaggaugguuacaggacuaaggaacaucccauccauucaauccagagguuuguuuggagccauugccgguuucauugaagggggguggacuggaaugguagaugguugguaugguuaucaucaucagaaugagcaaggaucuggcuaugcugcagaucaaaaaagcacacaaaaugccauuaaugggauuacaaacaaggugaauucuguaauugagaaaaugaacacucaauucacagcagugggcaaagaauucaacaaauuggaaagaaggauggaaaacuugaauaaaaaaguugaugauggguuuauagacauuuggaccuauaacgcagaacuguugguucuacuggaaaaugaaaggacuuuggauucccaugacuccaaugugaagaaucuguaugagaaaguaaaaagccaguuaaagaauaaugcuaaagaaauaggaaauggguguuuugaauucuaucacaaguguaacgaugaaugcauggagaguguaaagaauggaacuuaugacuauccaaaauauuccgaagaaucaaaguuaaacagggagaaaauugauggagugaaauuggaaucaaugggagucuaucagauucuggcgaucuacucaacggucgccaguucucugguucuuuuggucucccugggggcaaucagcuucuggauguguuccaaugggucuuugcaguguagaauaugcaucuaa

SEQ ID NO: 37534 - RNA, 1698 nt, Artificial Sequence
  derived and/or modified CDS sequence (wt) from hemagglutinin__InfluenzaA__ADL60308
augaaaguaaaacuacugguccuguuaugcacauuugcagcuacauaugcagacacaauauguauaggcuaccaugcuaacaacucgaccgacacuguugacacaguacuugaaaagaaugugacagugacacacucugucaaccugcuugagaacagucacaauggaaaacuaugucuauuaaaaggaauagccccacuacaauuggguaauugcagcguugccggguggaucuuaggaaacccagaaugcgaauugcugauuuccaaggagucaugguccuacauuguagaaaaaccaaauccugagaauggaacauguuacccagggcauuucgcugacuaugaggagcugagggagcaauugaguucaguaucuucauuugagagguucgaaauauuccccaaagaaagcucauggcccaaccacaccguaaccggagugucagcaucaugcucccauaauggggaaagcaguuuuuacagaaauuugcuauggcugacgggaaagaaugguuuguacccaaaccugagcaaguccuaugcaaacaacaaagaaaaagaaguccuuguacuaugggguguucaucacccgccaaacauagguguccaaaaggcccucuaucauacagaaaaugcuuaugucucuguagugucuucacauuauagcagaaaauucaccccagaaauagccaaaagacccaaaguaagagaucaagaaggaagaaucaauuacuacuggacucugcuugaacccggggauacaauaauauuugaggcaaauggaaaucuaauagcgccaagauaugcuuucgcacugaguagaggcuuuggaucaggaaucaucaacucaaaugcaccaauggauaaaugugaugcgaagugucaaacaccucagggagcuauaaacagcagucuuccuuuccagaacguacacccagucacaauaggagaguguccaaaguaugucaggagugcaaaauuaaggaugguuacaggacuaaggaacaucccauccauucaauccagagguuuguuuggagccauugccgguuucauugaagggggguggacuggaaugguagaugguugguaugguuaucaucaucagaaugagcaaggaucuggcuaugcugcagaucaaaaaagcacacaaaaugccauuaaugggauuacaaacaaggugaauucuguaauugagaaaaugaacacucaauucacagcagugggcaaagaauucaacaaauuggaaagaaggauggaaaacuugaauaaaaaaguugaugauggguuuauagacauuuggacauauaaugcagaacuguugguucuacuggaaaaugaaaggacuuuggauuuccaugacuccaaugugaagaaucuguaugagaaaguaaaaagccaguuaaagaauaaugcuaaagaaauaggaaauggguguuuugaauucuaucacaaguguaacgaugaaugcauggagaguguaaagaauggaacuuaugacuauccaaaauacuccgaagaaucaaaguuaaacagggagaaaauugauggagugaaauuggaaucaaugggagucuaucagauucuggcgaucuacucaacagucgccaguucucugguucuuuuggucucccugggggcaaucagcuucuggauguguuccaaugggucuuugcaguguagaauaugcaucuaa

SEQ ID NO: 37535 - RNA, 1698 nt, Artificial Sequence
  derived and/or modified CDS sequence (wt) from hemagglutinin__InfluenzaA__ADL60341
augaaaguaaaacuacugguccuguuaugcacauuuacagcuacauaugcagacacaauauguauaggcuaccaugcuaacaacucgaccgacacuguugacacaguacuugaaaagaaugugacagugacacacucugucaaccugcuugagaacagucacaauggaaaacuaugucuauuaaaaggaauagccccacuacaauuggguaauugcagcguugccggguggaucuuaggaaacccagaaugcgaauuacugauuuccaaggagucaugguccuacauuguagaaaaaccaaauccugagaauggaacauguuacccagggcauuucgcugacuaugaggaacugagggagcaauugaguucaguaucuucguuugagagguucgaaauauuccccaaagaaagcucauggcccaaccacaccguaaccggagugucagcaucaugcucccauaauggggaaagcaguuuuuacagaaauuugcuauggcugacggggaagaaugguuuguacccaaaccugagcaaguccuaugcaaacaacaaagaaaaagaaguccuuguacuaugggguguucaucacccgccaaacauagguguccaaaaggcccucuaucauacagaaauugcuuaugucucuguagugucuucacauuauagcagaaaauucaccccagaaauagccaagagacccaaaguaagagaucaagaaggaagaaucaacuacuacuggacuauacuugaacccggggauacuauaauauuugaggcaaauggaaaucuaauagcgccaagauaugcuuucgcacugaguagaggcuuuggaucaggaaucaucaacucaaaugcuccaauggauaaaugugaugcgaagugucaaacaccucagggagcuauaaacagcagucuuccuuuccagaacguacacccagucacaauaggagaguguccaaaguaugucaggagugcaaaauuaaggaugguuacaggacuaaggaacaucccauccauucaauccagagguuuguuuggagccauugccgguuucauugaagggggguggacuggaaugguagaugguugguaugguuaucaucaucagaaugagcaaggaucuggcuaugcugcagaucaaaaaagcacacaaaaugccauuaaugggauuacaaacaaggugaauucuguaauugagaaaaugaacacucaauucacagcagugggcaaagaauucaacaaauuggaaagaaggauggaaaacuugaauaaaaaaguugaugauggguuuauagacauuuggacauauaaugcagaacuguugguucuacuggaaaaugaaaggacuuuggauuuccaugacuccaaugugaagaaucuguaugagaaaguaaaaagccaguuaaagaauaaugcuaaagaaauaggaaauggguguuuugaauucuaucacaaguguaacgaugaaugcauggagaguguaaagaauggaacuuaugacuauccaaaauauuccgaagaaucaaaguuaaacagggagaaaauugauggagugaaauuggaaucaaugggagucuaucagauucuagcgaucuacucaacagucgccaguucucugguucuuuuggucucccugggggcaaucagcuucuggauguguuccaaugggucuuugcaguguagaauaugcaucuaa

SEQ ID NO: 37536 - RNA, 1698 nt, Artificial Sequence
  derived and/or modified CDS sequence (wt) from hemagglutinin__InfluenzaA__ADL60352
augaaaguaaaacuacugguccuguuaugcacauuuacagcuacauaugcagacacaauauguauaggcuaccaugcuaacaacucgaccgacacuguugacacaguacuugaaaagaaugugacagugacacacucugucaaccugcuugagaacagucacaauggaaaacugugucuauuaaaaggaauagccccacuacaauuggguaacugcagcguugccggguggaucuuaggaaacccagaaugcgaauuacugauuuccaaggagucaugguccuacauuguagaaaaaccaaauccugagaauggaacauguuacccagggcauuucgccggcuaugaggagcugagggagcaauugaguucaguaucuucauuugagagguucgaaauauuccccaaagaaagcucauggcccaaccacaccguaaccggagugucagcaucaugcucccauaauggggaaagaaguuuuuacagaaauuugcuauggcugacggggaagaaugguuuguacccaaaccugagcaaguccuaugcaaacaacaaagaaaaagaaguccuuguacuaugggguguucaucacccgccagacauagguaaccaaaagacccucuaucauacagaaaaugcuuauguuucuguagugucuucacauuauagcagaaaauucaccccagaaauagccaaaagacccaaaguaagagaucaagaaggaagaaucaacuacuacuggacucugcuugaacccggggauacaauaauauuugaggcaaauggaaaucuaauagcgccaagauaugcuuucgcacugaguagaggcuuuggaucaggaaucaucaacucaaaugcaccaauggauaaaugugaugcgaagugucaaacaccucagggagcuauaaacagcagucuuccuuuccagaacguacacccagucacaauaggagaguguccaaaguaugucaggagugcaaaauuaaggaugguuacaggacuaaggaacaucccauccauucaauccagagguuuguuuggagccauugccgguuucauugaagggggguggacuggaaugguagaugguugguaugguuaucaucaucagaaugagcaagggucuggcuaugcugcagaucaaaaaagcacacaaaaugccaucaaugggauuacaaacaaggugaauucuguaauugagaaaaugaacacucaauucacagcagugggcaaagaauucaacaaauuggaaagaaggauggaaaacuugaauaaaaaaguugaugauggguuuauagacauuuggaccuauaacgcagaacuguugguucuacuggaaaaugaaaggacuuuggauuuccaugauuccaaugugaagaaucuguaugagaaaguaaaaagccaguuaaagaauaaugcuaaagaaauaggaaacggguguuuugaauucuaucacaaguguaacgaugagugcauggagaguguaaagaauggaacuuaugacuauccaaaauauuccgaagaaucaaaguuaaacagggagaaaauugauggagugaaauuggaaucaaugggagucuaucagauucuggcgaucuacucaacagucgccaguucucugguucuuuuggucucccugggggcaaucagcuucuggauguguuccaaugggucuuugcaguguagaauaugcaucuaa

SEQ ID NO: 37537 - RNA, 1701 nt, Artificial Sequence
  derived and/or modified CDS sequence (wt) from hemagglutinin__InfluenzaA__ADL60363
augaagacuaucauugcuuugagcuacauucuaugucugguuuucgcucaaaaauuuccuggaaaugacaacagcacggcaacgcugugccuugggcaccaugcagugccaaacggaacgauagugaaaacaaucacgaaugaccaaauugaaguuacuaaugcuacugagcugguucagaguuccucaacaggugaaauaugcgacaguccucaucagauccuugauggagaaaacugcacacuaauagaugcucuauugggagacccucagugugauggcuuccaaaauaagaauugggaccuuuuuguugaacgcagcaaagccuacagcaacuguuacccuuaugaugugccggauuaugccucccuuaggucacuaauugccucauccggaacacuggaguuuaacaaugaaagcuucaauuggacuggagucacucaaaacggaacaagcucugcuugcauaaggagaucuaauaacaguuucuuuaguagauugaauugguugacccacucaaaauucaaauacccagcacugaacgugacuaugccaaacaaugaaaauuuugacaaauuguacauuugggggguucaccacccggguacggacaaugaccaaaucuuccuguaugcucaagcaucaggacgaaucacaaucucuaccaaaagaagccaacaaacuguaaucccgaauaucggaucuagacccagaguaagggauaucccuagcagaauaagcaucuauuggacaauaguaaaaccgggagacauacuuuugauuaacagcacagggaaucuaauugcuccuagggguuacuucaaaauacgaagugggaaaagcucaauaaugagaucagaugcacccauuggcaaaugcaauucugaaugcaucacuccaaauggaagcauucccaaugacaaaccauuccaaaauguaaacaggaucacauacggggccugucccagauauguuaagcaaaacacucugaaauuggcaacaggaaugcgaaauguaccagagaaacaaacuagaggcauauuuggcgcaaucgcugguuucauagaaaaugguugggagggaaugguggaugguugguacgguuucaggcaucaaaauucugagggaguaggacaagcagcagaucucaaaagcacucaagcagcaaucgaucaaaucaaugggaagcugaauagguugaucgggaaaaccaacgagaaauuccaucagauugaaaaagaauucucagaagucgaagggagaauucaggaccuugagaaauauguugaggacaccaaaauagaucucuggucauacaacgcggagcuucuuguugcccuggagaaccaacauacaauugaucuaacugauucagaaaugaacaaacuguuugaaaaaacaaagaagcaacugagggaaaaugcugaggauaugggcaaugguuguuucaaaaucuaccacaaaugugacaaugccugcauaggaucaaucagaaauggaacuuaugaccacgaugucuacagagaugaagcauuaaacaaccgguuccagaucaagggcguugagcugaagucaggauacaaagauuggauccuauggauuuccuuugccauaucauguuuuuugcuuugcauugcuuuguugggguucaucaugugggccugccaaaaaggcaacauuaggugcaacauuugcauuuga

SEQ ID NO: 37538 - RNA, 1698 nt, Artificial Sequence
  derived and/or modified CDS sequence (wt) from hemagglutinin__InfluenzaA__ADL60374
augaaaguaaaacuacugguccuguuaugcacauuuacagcuacauaugcagacacaauauguauaggcuaccaugcuaacaacucgaccgacacuguugacacaguacuugaaaagaaugugacagugacacacucugucaaccugcuugagaacagucacaauggaaaacuaugucuauuaaaaggaauagccccacuacaauuggguaacugcagcguugccggguggaucuuaggaaacccagaaugcgaauuacugauuuccaaggagucaugguccuacauuguagaaaaaccaaauccugagaauggaacauguuacccagggcauuucgcugacuaugaggaacugagggagcaauugaguucaguaucuucauuugagagguucgaaauauuccccaaagaaagcucauggcccaaccacaccguaaccggagugucagcaucaugcucccaugauggggaaaguaguuuuuacagaaauuuacuauggcugacggggaagaaugguuuguacccaaaccugagcaaguccuaugcaaacaacaaagaaaaagaaguccuuguacuaugggguguucaucacccgccaaacauaggugaccaaaaggcccucuaucauacagaaaaugcuuauguuucuguggugucuucacauuauagcagaaaauucaccccagaaauagccaaaagacccaaaguaagagaucaagaaggaagaaucaacuacuacuggacucugcuugaacccggggauacaauaauauuugaggcaaauggaaaucuaauagcgccaagauaugcuuucgcacugaguagaggcuuuggaucaggaaucaucaacucaaaugcaccaauggauaaaugugaugcgaagugucaaacaccucagggagcuauaaacagcagucuuccuuuccagaacguacacccagucacaauaggagaguguccaaaguaugucaggagugcaaaauuaagggugguuacaggacuaaggaacauuccauccauucaauccagagguuuguuuggagccauugccgguuucauugaagggggguggacuggaaugguagaugguugguaugguuaucaucaucagaaugagcaaggaucuggcuaugcugcagaucaaaaaagcacacaaaaugccauuaaugggauuacaaacaaggugaauucuguaauugagaaaaugaacacucaauucacagcugugggcaaagaauucaacaaauuggaaagaaggauggaaaacuugaauaaaaaaguugaugauggguuuauagacaucuggacauauaaugcagaacuguugguucuacuggaaaaugaaaggacuuuggauuuccaugacuccaaugugaagaaucuguaugagaaaguaaaaagccaguuaaagaauaaugcuaaagaaauaggaaauggguguuuugaauucuaucacaaguguaacgaugaaugcauggagaguguaaagaauggaacuuaugacuauccaaaauauuccgaagaaucaaaguuaaacagggagaaaauugauggagugaaauuggaaucaaugggagucuaucagauucuggcgaucuacucaacagucgccaguucucugguucuuuuggucucccugggggcaaucagcuucuggauguguuccaaugggucuuugcaguguagaauaugcaucuaa

SEQ ID NO: 37539 - RNA, 1701 nt, Artificial Sequence
  derived and/or modified CDS sequence (wt) from hemagglutinin__InfluenzaA__ADM07135
augaaggcaauacuaguaguucugcuauauacauuugcaaccgcaaaugcagacacauuauguauagguuaucaugcgaacaauucaacagacacuguagacacaguacuagaaaagaauguaacaguaacacacucuguuaaccuucuagaagacaagcauaacgggaaacuaugcaaacuaagagggguagccccauugcauuuggguaaauguaacauugcuggcuggauccugggaaauccagagugugaaucacucuccacagcaagcucaugguccuacauuguggaaacaucuaguucagacaauggaacguguuacccaggagauuucaucgauuaugaggagcuaagagagcaauugagcucagugucaucauuugaaagguuugagauauuccccaagacaaguucauggcccaaucaugaaucgaacaaagguguaacggcagcauguccucaugcuggagcaaaaagcuucuacaaaaauuuaauauggcuaguuaaaaaaggaaauucauacccaaagcucagcaaauccuacauuaaugauaaagggaaagaaguccucgugcuauggggcauucaccauccaucuacuagugcugaccaacaaagucucuaucagaaugcagaugcauauguuuuuguggggacaucaagauacagcaagaaguucaagccggaaauagcaauaagacccaaagugagggaucaagaagggagaaugaacuauuacuggacacuaguagagccgggggacaaaauaacauucgaagcaacuggaaaucuagugguaccgagauaugcauucgcaauggaaagaaaugcuggaucugguauuaucauuucagauacaccaguccacgauugcaauacaacuugucagacacccaagggugcuauaaacaccagccucccauuucagaauauacauccgaucacaauuggaaaauguccaaaauauguaaaaagcacaaaauugagacuggccacaggauugaggaaugucccgucuauucaaucuagaggccuauuuggggccauugccgguuucauugaagggggguggacagggaugguagauggaugguacgguuaucaccaucaaaaugagcaggggucaggauaugcagccgaccugaagagcacacagaaugccauugacgagauuacuaacaaaguaaauucuguuauugaaaagaugaauacacaguucacagcaguagguaaagaguucaaccaccuggaaaaaagaauagagaauuuaaauaaaaaaguugaugaugguuuccuggacauuuggacuuacaaugccgaacuguugguucuauuggaaaaugaaagaacuuuggacuaccacgauucaaaugugaagaacuuauaugaaaagguaagaagccaguuaaaaaacaaugccaaggaaauuggaaacggcugcuuugaauuuuaccacaaaugcgauaacacgugcauggaaagugucaaaaaugggacuuaugacuacccaaaauacucagaggaagcaaaauuaaacagagaagaaauagaugggguaaagcuggaaucaacaaggauuuaccagauuuuggcgaucuauucaacugucgccaguucauugguacugguagucucccugggggcaaucaguuucuggaugugcucuaaugggucucuacaguguagaauauguauuuaa

SEQ ID NO: 37540 - RNA, 1701 nt, Artificial Sequence; identical to SEQ ID NO: 35166
  derived and/or modified CDS sequence (wt) from hemagglutinin__InfluenzaA__ADM07144

SEQ ID NO: 37541 - RNA, 1701 nt, Artificial Sequence
  derived and/or modified CDS sequence (wt) from hemagglutinin__InfluenzaA__ADM07154
augaaggcaauacuaguaguucugcuauauacauuugcaaccgcaaaugcagacacauuauguauagguuaucaugcgaacaauucaacagacacuguagacacaguacuagaaaagaauguaacaguaacacacucuguuaaccuucuagaagacaagcauaacgggaaacuaugcaaacuaagagggguagccccauugcauuuggguaaauguaacauugcuggcuggauccugggaaauccagagugugaaucacucuccacagcaagcucaugguccuacauuguggaaacaucuaguucagacaauggaacguguuacccaggagauuucaucgauuaugaggagcuaagagagcaauugagcucagugucaucauuugaaagguuugagauauuccccaagacaaguucauggcccaaucaugacucgaacaaagguguaacggcagcauguccucaugcuggagcaaaaagcuucuacaaaaauuuaauauggcuaguuaaaaaaggaaauucauacccaaagcucagcaaauccuacauuaaugauaaagggaaagaaguccucgugcuauggggcauucaccauccaccuacuagugcugaccaacaaagucucuaucagaaugcagaugcauauguuuuuguggggacaucaagauacagcaagaaguucaagccggaaauagcaauaagacccaaagugagggaucaagaagggagaaugaacuauuacuggacacuaguagagccgggagacaaaauaacauucgaagcaacuggaaaucuagugguaccgagauaugcauucgcaaugguaagaaaugcuggaucugguauuaucauuucagauacaccaguccacgauugcaauacaacuugucagacacccaagggugcuauaaacaccagccucccauuucagaauauacauccgaucacaauuggaaaauguccaaaauauguaaaaagcacaaaauugagacuggccacaggauugaggaaugucccgucuauucaaucuagaggccuauuuggggccauugccgguuucauugaagggggguggacagggaugguagauggaugguacgguuaucaccaucaaaaugagcaggggucaggauaugcagccgaccugaagagcacacagaaugccauugacgagauuacuaacaaaguaaauucuguuauugaaaagaugaauacacaguucacagcaguagguaaagaguucaaccaccuggaaaaaagaauagagaauuuaaauaaaaaaguugaugaugguuuccuggacauuuggacuuacaaugccgaacuguugguucuauuggaaaaugaaagaacuuuggacuaccacgauucaaaugugaagaacuuauaugaaaagguaagaagccaguuaaaaaacaaugccaaggaaauuggaaacggcugcuuugaauuuuaccacaaaugcgauaacacgugcauggaaagugucaaaaaugggacuuaugacuacccaaaauacucagaggaagcaaaauuaaacagagaagaaauagaugggguaaagcuggaaucaacaaggauuuaccagauuuuggcgaucuauucaacugucgccaguucauugguacugguagucucccugggggcaaucaguuucuggaugugcucuaaugggucucuacaguguagaauauguauuuaa

SEQ ID NO: 37542 - RNA, 1701 nt, Artificial Sequence; identical to SEQ ID NO: 35166
  derived and/or modified CDS sequence (wt) from hemagglutinin__InfluenzaA__ADM07163

SEQ ID NO: 37543 - RNA, 1698 nt, Artificial Sequence
  derived and/or modified CDS sequence (wt) from hemagglutinin__InfluenzaA__ADM07460
augaaaguaaaacuacugguccuguuaugcacauuuacagcuacauaugcagacacaauauguauaggcuaccaugcuaacaacucgaccgacacuguugacacaguacuugaaaagaaugugacagugacacacucugucaaccugcuugagaacagucacaauggaaaacuaugucuauuaaaaggaauagccccacuacaauuggguaacugcagcguugccggguggaucuuaggaaacccagaaugcgaauuacugauuuccaaagagucaugguccuacauuguagaaaaaccaaauccugagaauggaacauguuacccagggcauuucgcugacuaugaggaacugagggagcaauugaguucaguaucuucauuugagagguucgaaauauuccccaaagaaagcucauggcccaaccacaccguaaccggagugucagcaucaugcucccauaauggggaaagcaguuuuuacagaaauuugcuauggcugacggggaagaaugguuuguacccaaaccugagcaaguccuaugcaaacaacaaagaaaaagaaguccuuguacuaugggguguucaucacccgccaaacauaguugaccaaaagacccucuaccguacagaaaaugcuuauguuucuguagugucuucacauuauagcagaaaauucaccccagaaauagccaaaagacccaaaguaagagaucaagaaggaagaaucaacuacuacuggacucugcuugaacccggggauacaauaauauuugaggcaaauggaaaucuaauagcgccaagauaugcuuucgcacugaguagaggcuuuggaucaggaaucaucaacucaaaugcaccaauggguaaaugugaugcgaagugccaaacaccucagggagcuauaaacagcagucuuccuuuccagaacguacacccagucacaauaggagaguguccaaaguaugucaggagugcaaaauuaaggaugguuacaggacuaaggaacaucccauccauucaauccagagguuuguuuggagccauugccgguuucauugaagggggguggacuggaaugguagaugguugguaugguuaucaucaucagaaugagcaaggaucuggcuaugcugcagaucaaaaaagcacacaaaaugccauuaaugggauuacaaacaaggugaauucuguaauugagaaaaugaacacucaauucacagcagugggcaaagaauucaacaaauuggaaagaaggauggaaaacuugaauaaaaaaguugaugauggguuuauagacauuuggacauauaaugcagaacuguugguucuacuggaaaaugaaaggacuuuggauuuccaugacuccaaugugaagaaucuguaugagaaaguaaaaagccaguuaaagaauaaugcuaaagaaauaggaaauggguguuuugaauucuaucacaaguguaacgaugaaugcauggagaguguaaagaauggaacuuaugacuauccaaaauauuccgaagaaucaaaguuaaacagggagaaaauugauggagugaaauuggaaucaaugggagucuaucagauucuggcgaucuacucaacagucgccaguucucugguucuuuuggucucccugggggcaaucagcuucuggauguguuccaaugggucuuugcaguguagaauaugcaucuaa

SEQ ID NO: 37544 - RNA, 1701 nt, Artificial Sequence
  derived and/or modified CDS sequence (wt) from hemagglutinin__InfluenzaA__ADM07504
augaagacuaucauugcuuugagcuacauucuaugucugguuuucgcucaaaaacuuccuggaaaugacaacagcacggcaacgcugugccuugggcaccaugcaguaccaaacggaacgauagugaaaacaaucacgaaugaccaaauugaaguuacuaaugcuacugagcugguucagaguuccucaacaggugaaauaugcgacaguccucaucagauccuugauggagaaaacugcacacuaauagaugcucuauugggagacccucagugugauggcuuccaaaauaagaaaugggaccuuuuuguugaacgaagcaaagccuacagcaacuguuacccuuaugaugugccggauuaugccucccuuaggucacuaguugccucauccggcacacuggaguuuaacaaugaaagcuucaauuggacuggagucacucaaaacggaacaagcucugcuugcauaaggagaucuaauaauaguuucuuuaguagauugaauugguugacccacuuaaauuucaaauacccagcauugaacgugacuaugccaaacaaugaacaauuugacaaacuguacauuugggggguucaccacccggguacggacaaggaccaaaucuuccuguaugcucaagcaucaggaagaaucacaguaucuaccaaaagaagccaacaagcuguaaucccgaauaucggaucuagacccagaguaaggaauaucccuagcagaauaagcaucuauuggacaauaguaaaaccgggagacauacuuuugauuaacagcacagggaaucuaauugcuccuagggguuacuucaaaauacgaaaugggaaaagcucaauaaugagaucagaugcacccauuggcaagugcaauucugaaugcaucacuccaaauggaagcauucccaaugacaaaccauuccaaaauguaaacaggaucacauacggggccugucccagauauguuaagcaaaacacucugaaauuggcaacaggaaugcgaaauguaccagagaaacaaacuagaggcauauuuggcgcaauagcggguuucauagaaaaugguugggagggaaugguggaugguugguacgguuucaggcaucaaaauucugagggaagaggacaagcagcagaucucaaaagcacucaagcagcaaucgaucaaaucaaugggaagcugaauagauugaucggaaaaaccaacgagaaauuccaucagauugaaaaagaauucucagaagucgaagggagaauucaggaccuugagaaauauguugaggacacuaaaauagaucucuggucauacaacgcggagcuucuuguugcccuugagaaccaacauacaauugaucuaacugacucagaaaugaacaaacuguuugaaaaaacaaagaagcaacugagggaaaaugcugaggauaugggcaaugguuguuucaaaauauaccacaaaugugacaaugccugcauaggaucaaucagaaauggaacuuaugaccacgauguauacagagaugaagcauuaaacaaccgguuccagaucaagggaguugagcugaagucaggguacaaagauuggauccuauggauuuccuuugccauaucauguuuuuugcuuuguguugcuuuguugggguucaucaugugggccugccaaaaaggcaacauuaggugcaacauuugcauuuga

SEQ ID NO: 37545 - RNA, 1701 nt, Artificial Sequence
  derived and/or modified CDS sequence (wt) from hemagglutinin__InfluenzaA__ADM12806
augaagacuaucauugcuuugagcuacauucuaugucugguuuucgcucaaaaacuuccuggaaaugacaacagcacggcaacgcugugccuugggcaccaugcaguaccaaacggaacgauagugaaaacaaucacgaaugaccaaauugaaguuacuaaugcuacugagcugguucagaguuccucaacaggugaaauaugcgacaguccucaucagauccuugauggagaaaacugcacacuaauagaugcucuauugggagacccucagugugauggcuuccaaaauaagaaaugggaccuuuuuguugaacgaagcaaagccuacagcaacuguuacccuuaugaugugccggauuaugccucccuuaggucacuaguugccucauccggcacacuggaguuuaacaaugaaagcuucaauuggacuggagucacucaaaacggaacaagcucugcuugcauaaggagaucuaauaauaguuucuuuaguagauugaauugguugacccacuuaaacuucaaauacccagcauugaacgugacuaugccaaacaaugaacaauuugacaaauuguacauuugggggguucaccacccggguacggacaaggaccaaaucuuccuguaugcucaagcaucaggaagaaucacaguaucuaccaaaagaagccaacaagcuguaaucccgaauaucggaucuagacccagaguaaggaauaucccuagcagaauaagcaucuauuggacaauaguaaaaccgggagacauacuuuugauuaacagcacagggaaucuaauugcuccuagggguuacuucaaaauacgaaguggaaaaagcucaauaaugagaucagaugcacccauuggcaaaugcaauucugaaugcaucacuccaaauggaagcauucccaaugacaaaccauuccaaaauguaaacaggaucacauacggggccugucccagauauguuaagcaaagcacucugaaauuggcaacaggaaugcgaaauguaccagagaaacaaacuagaggcauauuuggcgcaauagcggguuucauagaaaaugguugggagggaaugguggaugguugguacgguuucaggcaucaaaauucugagggaagaggacaagcagcagaucucaaaagcacucaagcagcaaucgaucaaaucaaugggaagcugaauagauugaucgggaaaaccaacgagaaauuccaucagauugaaaaagaauucucagaagucgaagggagaauucaggaccuugagaaauauguugaggacacuaaaauagaucucuggucauacaacgcggagcuucuuguugcccuggagaaccaacauacaauugaucuaacugacucagaaaugaacaaacuguuugaaaaaacaaagaagcaacugagggaaaaugcugaggauaugggcaaugguuguuucacaauauaccacaaaugugacaaugccugcauaggaucaaucagaaauggaacuuaugaccacaauguauacagagaugaagcauuaaacaaccgguuccagaucaagggaguugagcugaagucaggguacaaagauuggauccuauggauuuccuuugccauaucauguuuuuugcuuuguguugcuuuguugggguucaucaugugggccugccaaaaaggcaacauuaggugcaacauuugcauuuga

SEQ ID NO: 37546 - RNA, 1701 nt, Artificial Sequence; identical to SEQ ID NO: 37545
  derived and/or modified CDS sequence (wt) from hemagglutinin__InfluenzaA__ADM12817

SEQ ID NO: 37547 - RNA, 1701 nt, Artificial Sequence
  derived and/or modified CDS sequence (wt) from hemagglutinin__InfluenzaA__ADM12828
augaagacuaucauugcuuugagcuacauucuaugucugguuuucgcucaaaaacuuccuggaaaugacaacagcacggcaacgcugugccuugggcaccaugcaguaccaaacggaacgauagugaaaacaaucacgaaugaccaaauugaaguuacuaaugcuacugagcugguucagaguuccucaacaggugaaauaugcgacaguccucaucagauccuugauggagaaaacugcacacuaauagaugcucuauugggagacccucagugugauggauuccaaaauaagaaaugggaccuuuuuguugaacgaagcaaagccuacagcaacuguuacccuuaugaugugccggauuaugccucccuuaggucacuaguugccucauccggcacacuggaguuuaacaaugaaagcuucaauuggacuggagucacucaaaacggaacaagcucugcuugcauaaggagaucuaauaauaguuucuuuaguagauugaauugguugacccacuuaaacuucaaauacccagcauugaacgugacuaugccaaacaaugaacaauuugacaaauuguacauuugggggguucaccacccggguacggacaaggaccaaaucuuccuguaugcucaagcaucaggaagaaucacaguaucuaccaaaagaagccaacaagcuguaaucccgaauaucggaucuagacccagaguaaggaauaucccuagcagaauaagcaucuauuggacaauaguaaaaccgggagacauacuuuugauuaacagcacagggaaucuaauugcuccuagggguuacuucaaaauacgaaguggaaaaagcucaauaaugagaucagaugcacccauuggcaaaugcaauucugaaugcaucacuccaaauggaagcauucccaaugacaaaccauuccaaaauguaaacaggaucacauacggggccugucccagauauguuaagcaaagcacucugaaauuggcaacaggaaugcgaaauguaccagagaaacaaacuagaggcauauuuggcgcaauagcggguuucauagaaaaugguugggagggaaugguggaugguugguacgguuucaggcaucaaaauucugagggaagaggacaagcagcagaucucaaaagcacucaagcagcaaucgaucaaaucaaugggaagcugaauagauugaucgggaaaaccaacgagaaauuccaucagauugaaaaagaauucucagaagucgaagggagaauucaggaccuugagaaauauguugaggacacuaaaauagaucucuggucauacaacgcggagcuucuuguugcccuggagaaccaacauacaauugaucuaacugacucagaaaugaacaaacuguuugaaaaaacaaagaagcaacugagggaaaaugcugaggauaugggcaaugguuguuucacaauauaccacaaaugugacaaugccugcauaggaucaaucagaaauggaacuuaugaccacaauguauacagagaugaagcauuaaacaaccgguuccagaucaagggaguugagcugaagucaggguacaaagauuggauccuauggauuuccuuugccauaucauguuuuuugcuuuguguugcuuuguugggguucaucaugugggccugccaaaaaggcaacauuaggugcaacauuugcauuuga

SEQ ID NO: 37548 - RNA, 1701 nt, Artificial Sequence; identical to SEQ ID NO: 37545
  derived and/or modified CDS sequence (wt) from hemagglutinin__InfluenzaA__ADM12839

SEQ ID NO: 37549 - RNA, 1701 nt, Artificial Sequence
  derived and/or modified CDS sequence (wt) from hemagglutinin__InfluenzaA__ADM12850
augaaggcuaucauugcuuugagcuacauucuaugucugguuuucgcucaaaaacuuccuggaaaugacaacagcacggcaacgcugugccuugggcaccaugcaguaccaaacggaacgauagugaaaacaaucacgaaugaccaaauugaaguuacuaaugcuacugagcugguucagaguuccucaacaggugaaauaugcgacaguccucaucagauccuugauggagaaaacugcacacuaauagaugcucuauugggagacccucagugugauggcuuccaaaauaagaaaugggaccuuuuuguugaacgaagcaaagccuacagcaacuguuacccuuaugaugugccggauuaugccucccuuaggucacuaguugccucauccggcacacuggaguuuaacaaugaaagcuucaauuggacuggagucacucaaaacggaacaagcucugcuugcauaaggagaucuaauaauaguuucuuuaguagauugaauugguugacccacuuaaacuucaaauacccagcauugaacgugacuaugccaaacaaugaacaauuugacaaauuguacauuugggggguucaccacccggguacggacaaggaccaaaucuuccuguaugcucaagcaucaggaagaaucacaguaucuaccaaaagaagccaacaagcuguaaucccgaauaucggaucuagacccagaguaaggaauaucccuagcagaauaagcaucuauuggacaauaguaaaaccgggagacauacuuuugauuaacagcacagggaaucuaauugcuccuagggguuacuucaaaauacgaaguggaaaaagcucaauaaugagaucagaugcacccauuggcaaaugcaauucugaaugcaucacuccaaauggaagcauucccaaugacaaaccauuccaaaauguaaacaggaucacauacggggccugccccagauauguuaagcaaagcacucugaaauuggcaacaggaaugcgaaauguaccagagaaacaaacuagaggcauauuuggcgcaauagcggguuucauagaaaaugguugggagggaaugguggaugguugguacgguuucaggcaucaaaauucugagggaagaggacaagcagcagaucucaaaagcacucaagcagcaaucgaucaaaucaaugggaagcugaauagauugaucgggaaaaccaacgagaaauuccaucagauugaaaaagaauucucagaagucgaagggagaauucaggaccuugagaaauauguugaggacacuaaaauagaucucuggucauacaacgcggagcuucuuguugcccuggagaaccaacauacaauugaucuaacugacucagaaaugaacaaacuguuugaaaaaacaaagaagcaacugagggaaaaugcugaggauaugggcaaugguuguuucacaauauaccacaaaugugacaaugccugcauaggaucaaucagaaauggaacuuaugaccacaauguauacagagaugaagcauuaaacaaccgguuccagaucaagggaguugagcugaagucaggguacaaagauuggauccuauggauuuccuuugccauaucauguuuuuugcuuuguguugcuuuguugggguucaucaugugggccugccaaaaaggcaacauuaggugcaacauuugcauuuga

SEQ ID NO: 37550 - RNA, 1701 nt, Artificial Sequence; identical to SEQ ID NO: 35463
  derived and/or modified CDS sequence (wt) from hemagglutinin__InfluenzaA__ADM12861

SEQ ID NO: 37551 - RNA, 1701 nt, Artificial Sequence; identical to SEQ ID NO: 35463
  derived and/or modified CDS sequence (wt) from hemagglutinin__InfluenzaA__ADM12871

SEQ ID NO: 37552 - RNA, 1701 nt, Artificial Sequence
  derived and/or modified CDS sequence (wt) from hemagglutinin__InfluenzaA__ADM12881
augaaggcaauacuaguaguucugcuauauacauuugcaaccgcaaaugcagacacauuauguauagguuaucaugcgaacaauucaacagacacuguagacacaguacuagaaaagaauguaacaguaacacacucuguuaaccuucuagaagacaagcauaacgggaaacuaugcaaacuaagagggguagccccauugcauuuggguaaauguaacauugcuggcuggauccugggaaauccagagugugaaucacucuccacagcaagcucaugguccuacauuguggaaacaucuaguucagacaauggaacguguuacccaggagauuucaucgauuaugaggagcuaagagagcaauugagcucagugucaucauuugaaagguuugagauauuccccaagacaaguucauggcccaaucaugacucgaacaaagguguaacggcagcauguccucaugcuggagcaaaaagcuucuacaaaaauuuaauauggcuaguuaaaaaaggaaauucauacccaaagcucagcaaauccuacauuaaugauaaagggaaagaaguccucgugcuauggggcauucaccauccaucuacuagugcugaccaacaaagucucuaucagaaugcagaugcauauguuuuuguggggacaucaagauacagcaagaaguucaagccggaaauagcaauaagacccaaagugagggaucaagaggggagaaugaacuauuacuggacacuaguagagccgggagacaaaauaacauucgaagcaacuggaaaucuagugguaccgagauaugcauucgcaauggaaagaaaugcuggaucugguauuaucauuucagauacaccaguccacgauugcaacacaacuugucagacacccaagggugcuauaaacaccagccucccauuucagaauauacauccgaucacaauuggaaaauguccaaaauauguaaaaagcacaaaauugagacuggccacaggauugaggaaugucccgucuauucaaucuagaggccuauuuggggccauugccgguuucauugaagggggguggacagggaugguagauggaugguacgguuaucaccaucaaaaugagcaggggucaggauaugcagccgaccugaagagcacacagaaugccauugacgagauuacuaacaaaguaaauucuguuauugaaaagaugaauacacaguucacagcaguagguaaagaguucaaccaccuggaaaaaagaauagagaauuuaaauaaaaaaguugaugaugguuuccuggacauuuggacuuacaaugccgaacuguugguucuauuggaaaaugaaagaacuuuggacuaccacgauucaaaugugaagaacuuauaugaaaagguaagaagccaguuaaaaaacaaugccaaggaaauuggaaacggcugcuuugaauuuuaccacaaaugcgauaacacgugcauggaaagugucaaaaaugggacuuaugacuacccaaaauacucagaggaagcaaaauuaaacagagaagaaauagaugggguaaagcuggaaucaacaaggauuuaccagauuuuggcgaucuauucaacugucgccaguucauugguacugguagucucccugggggcaaucaguuucuggaugugcucuaaugggucucuacaguguagaauauguauuuaa

SEQ ID NO: 37553 - RNA, 1701 nt, Artificial Sequence; identical to SEQ ID NO: 36001
  derived and/or modified CDS sequence (wt) from hemagglutinin__InfluenzaA__ADM12891

SEQ ID NO: 37554 - RNA, 1701 nt, Artificial Sequence; identical to SEQ ID NO: 35309
  derived and/or modified CDS sequence (wt) from hemagglutinin__InfluenzaA__ADM12901

SEQ ID NO: 37555 - RNA, 1701 nt, Artificial Sequence
  derived and/or modified CDS sequence (wt) from hemagglutinin__InfluenzaA__ADM12911
augaaggcaauacuaguaguucugcuauauacauuugcaaccgcaaaugcagacacauuauguauagguuaucaugcgaacaauucaacagacacuguagacacaguacuagaaaagaauguaacaguaacacacucuguuaaccuucuagaagacaagcauaacgggaaacuaugcaaacuaagagggguagccccauugcauuuggguaaauguaacauugcuggcuggauccugggaaauccagagugugaaucacucuccacagcaagcucaugguccuacauuguggaaacaucuaguucaggcaauggaacguguuacccaggagauuucaucgauuaugaggagcuaagagagcaauugagcucagugucaucauuugaaagguuugagauauuccccaagacaaguucauggcccaaucaugacucgaacaaagguguaacggcagcauguccucaugcuggagcaaaaagcuucuacaaaaauuuaauauggcuaguuaaaaaaggaaacucauacccaaagcucagcaaauccuacauuaaugauaaagggaaagaaguccucgugcuauggggcauucaccauccaucuacuagugcugaccaacaaagucucuaucagaaugcagaugcauauguuuuuguggggacaucaagauacagcaagaaguucaagccggaaauagcaauaagacccaaagugagggaucaagaagggagaaugaacuauuacuggacacuaguagaaccgggagacaaaauaacauucgaagcaacuggaaaucuagugguaccgagauaugcauucgcaauggaaagaaaugcuggaucugguauuaucauuucagauacaccaguccacgauugcaauacaacuugucagacacccaagggugcuauaaacaccagccucccauuucagaauauacauccgaucacaauuggaaaauguccaaaauauguaaaaagcacaaaauugagacuggccacaggauugaggaaugucccgucuauucaaucuagaggccuauuuggggccauugccgguuucauugaagggggguggacagggaugguagauggaugguacgguuaucaccaucaaaaugagcaggggucaggauaugcagccgaccugaagagcacacagaaugccauugacgagauuacuaacaaaguaaauucuguuauugaaaagaugaauacacaguucacagcaguagguaaagaguucaaccaccuggaaaaaagaauagagaauuuaaauaaaaaaguugaugaugguuuccuggacauuuggacuuacaaugccgaacuguugguucuauuggaaaaugaaagaacuuuggacuaccacgauucaaaugugaagaacuuauaugaaaagguaagaagccaguuaaaaaacaaugccaaggaaauuggaaacggcugcuuugaauuuuaccacaaaugcgauaacacgugcauggaaagugucaaaaaugggacuuaugacuacccaaaauacucagaggaagcaaaauuaaacagagaagaaauagaugggguaaagcuggaaucaacaaggauuuaccagauuuuggcgaucuauucaacugucgccaguucauugguacugguagucucccugggggcaaucaguuucuggaugugcucuaaugggucucuacaguguagaauauguauuuaa

SEQ ID NO: 37556 - RNA, 1701 nt, Artificial Sequence; identical to SEQ ID NO: 34681
  derived and/or modified CDS sequence (wt) from hemagglutinin__InfluenzaA__ADM12921

SEQ ID NO: 37557 - RNA, 1701 nt, Artificial Sequence; identical to SEQ ID NO: 34681
  derived and/or modified CDS sequence (wt) from hemagglutinin__InfluenzaA__ADM12931

SEQ ID NO: 37558 - RNA, 1701 nt, Artificial Sequence
  derived and/or modified CDS sequence (wt) from hemagglutinin__InfluenzaA__ADM12941
augaaggcaauacuaguaguucugcuauauacauuugcaaccgcaaaugcagacacauuauguauagguuaucaugcgaacaauucaacagacacuguagacacaguacuagaaaagaauguaacaguaacacacucuguuaaccuucuagaagacaagcauaacgggaaacuaugcaaacuaagagggguagccccauugcauuuggguaaauguaacauugcuggcuggauccugggaaauccagagugugaaucacucuccacagcaagcucaugguccuacauuguggaaacaucuaguucagacaauggaacguguuacccaggagauuucaucgauuaugaggagcuaagagagcaauugagcucagugucaucauuugaaagguuugagauauuccccaagacaaguucauggcccaaucaugacucgaacaaagguguaacggcagcauguccucaugcuggagcaaaaagcuucuacaaaaauuuaauauggcuaguuaaaaaaggaaauucauacccaaagcucagcaaauccuacauuaaugauaaagggaaagaaguccucgugcuauggggcauucaccauccaucuacuagugcugaccaacaaagucucuaucagaaugcagaugcauauguuuuuguggggacaucaagauacagcaagaaguucaagccggaaauagcaauaagacccaaagugagggaucaagaagggagaaugaacuauuacuggacacuaguagagccgggagacaaaauaacauucgaagcaacuggaaaucuagugguaccgagauaugcauucgcaauggaaagaaaugcuggaucugguauuaucauuucagauacaccaguccacgauugcaauacaacuugucagacacccaagggugcuauaaacaccagccucccauuucagaauauacauccgaucacaauuggaaaauguccaaaauauguaaaaagcacaaaauugagacuggccacaggauugaggaaugucccgucuauucaaucuagaggccuauuuggggccauugccgguuucauugaagggggguggacagggaugguagauggaugguacgguuaucaccaucaaaaugagcaggggucaggauaugcagccgaccugaagagcacacagaaugccauugacgagauuacuaacaaaguaaauucuguuauugaaaagaugaauacacaguucacagcaguagguaaagaguucaaccaccuggaaaaaagaauagagaauuuaaauaaaaaaguugaugaugguuuccuggacauuuggacuuacaaugccgaacuguugguucuauuggaaaaugaaagaacuuuggacuaccacgauucaaaugugaagaacuuauaugaaaagguaagaagccaguuaaaaaacaaugccaaggaaauuggaaacggcugcuuugaauuuuaccacaaaugcgauaacacgugcauggaaagugucaaaaaugggacuuaugacuacccaaaauacucagaggaagcaaaauuaaacagagaagaaauagaugggguaaagcuggaaucaacaaggauuuaccagauuuuggcgaucuauucaacugucgccaguucauugguacugguagucucccugggggcaaucaguuucuggaugugcucuaaugggucucuacaguguagaauauguaucuaa

SEQ ID NO: 37559 - RNA, 1701 nt, Artificial Sequence
  derived and/or modified CDS sequence (wt) from hemagglutinin__InfluenzaA__ADM12951
augaaggcaauacuaguaguucugcuauauacauuugcaaccgcaaaugcagacacauuauguauagguuaucaugcgaacaauucaacagacacuguagacacaguacuagaaaagaauguaacaguaacacacucuguuaaccuucuagaagacaagcauaacgggaaacuaugcaaacuaagagggguagccccauugcauuuggguaaauguaacauugcuggcuggauccugggaaauccagagugugaaucacucuccacagcaagcucaugguccuacauuguggaaacaucuaguucagacaauggaacguguuacccaggagauuucaucgauuaugaggagcuaagagagcaauugagcucagugucaucauuugaaagguuugagauauuccccaagacaaguucauggcccaaucaugacucgaacaaagguguaacggcagcauguccucaugcuggagcaaaaagcuucuacaaaaauuuaauauggcuaguuaaaaaaggaaauucauacccaaagcucagcaaauccuacauuaaugauaaagggaaagaaguccucgugcuauggggcauucaccauccaucuacuagugcugaccaacaaagucucuaucagaaugcagaugcauauguuuuuguggggacaucaagauacagcaagaaguucaagccggaaauagcaauaagacccaaagugagggaucaagaagggagaaugaacuauuacuggacacuaguagagccgggagacaaaauaacauucgaagcaacuggaaaucuagugguaccgagauaugcauucgcaauggaaagaaaugcuggaucugguauuaucauuucagauacaccaguccacgauugcaauacaacuugucagacacccaagggagcuauaaacaccagccucccauuucagaauauacauccgaucacaauuggaaaauguccaaaauauguaaaaagcacaaaauugagacuggccacaggauugaggaaugucccgucuauucaaucuagaggccuauuuggggccauugccgguuucauugaagggggguggacagggaugguagauggaugguacgguuaucaccaucaaaaugagcaggggucaggauaugcagccgaccugaagagcacacagaaugccauugacgagauuacuaacaaaguaaauucuguuauugaaaagaugaauacacaguucacagcaguagguaaagaguucaaccaccuggaaaaaagaauagagaauuuaaauaaaaaaguugaugaugguuuccuggacauuuggacuuacaaugccgaacuguugguucuauuggaaaaugaaagaacuuuggacuaccacgauucaaaugugaagaacuuauaugaaaagguaagaagccaguuaaaaaacaaugccaaggaaauuggaaacggcugcuuugaauuuuaccacaaaugcgauaacacgugcauggaaagugucaaaaaugggacuuaugacuacccaaaauacucagaggaagcaaaauuaaacagagaagaaauagaugggguaaagcuggaaucaacaaggauuuaccagauuuuggcgaucuauucaacugucgccaguucauugguacugguagucucccugggggcaaucaguuucuggaugugcucuaaugggucucuacaguguagaauauguaucuaa

SEQ ID NO: 37560 - RNA, 1701 nt, Artificial Sequence
  derived and/or modified CDS sequence (wt) from hemagglutinin__InfluenzaA__ADM12961
augaaggcaguacuaguaguucugcuauauacauuugcaaccgcaaaugcagacacauuauguauagguuaucaugcgaacaauucaacagacacuguagacacaguacuagaaaagaauguaacaguaacacacucuguuaacauucuagaagacaagcauaacgggaaacuaugcaaacuaggagggguagccccauugcauuuggguaaauguaacauugcuggcuggauccugggaaauccagagugugaaucacucuccacagcaagcucaugguccuacauuguggaaacaucuaguucagacaauggaacguguuacccaggagauuucaucgauuaugaggagcuaagagagcaauugagcucagugucaucauuugaaagguuugagauauuccccaagacaaguucauggcccaaucaugacucgaacaaagguguaacggcagcauguccucaugcuggagcaaaaagcuucuacaaaaauuuaauauggcuaguuaaaaaaggaaauucauacccaaagcucagcaaauccuacauuaaugauaaagggaaagaaguccucgugcuauggggcauucaccauccaucuacuagugcugaccaacaaagucucuaucagaaugcagaugcauauguuuuuguggggacaucaagauacagcaagaaguucaagccggaaauagcaauaagacccaaagugagggaucaagaagggagaaugaacuauuacuggacacuaguagagccgggagacaaaauaacauucgaagcaacuggaaaucuagugguaccgagauaugcauucgcaauggaaagaaaugcuggaucugguauuaucauuucagauacaccaguccacgauugcaauacaacuugucagacacccaagggugcuauaaacaccagccucccauuucagaauauacauccgaucacaauuggaaaauguccaaaauauguaaaaagcacaaaauugagacuggccacaggauugaggaaugucccgucuauucaaucuagaggccuauuuggggccauugccgguuucauugaagggggguggacagggaugguagauggaugguacgguuaucaccaucaaaaugagcaggggucaggauaugcagccgaccugaagagcacacagaaugccauugacgagauuacuaacaaaguaaauucuguuauugaaaagaugaauacacaguucacagcaguagguaaagaguucaaccaccuggaaaaaagaauagagaauuuaaauaaaaaaguugaugaugguuuccuggacauuuggacuuacaaugccgaacuguugguucuauuggaaaaugaaagaacuuuggacuaccacgauucaaaugugaagaacuuauaugaaaagguaagaagccaguuaaaaaacaaugccaaggaaauuggaaacggcugcuuugaauuuuaccacaaaugcgauaacacgugcauggaaagugucaaaaaugggacuuaugacuaccccaaauacucagaggaagcaaaauuaaacagagaagaaauagaugggguaaagcuggaaucaacaaggauuuaccagauuuuggcgaucuauucaacugucgccaguucauugguacugguagucucccugggggcaaucaguuucuggaugugcucuaaugggucucuacaguguagaauauguauuuaa

SEQ ID NO: 37561 - RNA, 1701 nt, Artificial Sequence
  derived and/or modified CDS sequence (wt) from hemagglutinin__InfluenzaA__ADM12971
augaaggcaauacuaguaguucugcuauauacauuugcaaccgcaaaugcagacacauuauguauagguuaucaugcgaacaauucaacagacacuguagacacaguacuagaaaagaauguaacaguaacacacucuguuaaccuucuagaagacaagcauaacgggaaacuaugcaaacuaagagggguagccccauugcauuuggguaaauguaacauugcuggcuggauccugggaaauccagagugugaaucacucuccacagcaagcucaugguccuacauuguggaaacaucuaguucagacaauggaacguguuacccaggagauuucaucgauuaugaggagcuaagagagcaauugagcucagugucaucauuugaaagguuugagauauuccccaagacaaguucauggcccaaucaugacucgaacaaagguguaacggcagcauguccucaugcuggagcaaaaagcuucuacaaaaauuuaauauggcuaguuaaaaaaggaaauucauacccaaagcucagcaaauccuacauuaaugauaaagggaaagaaguccucgugcuauggggcauucaccauccaucuacuagugcugaccaacaaagucucuaucagaaugcagaugcauauguuuuuguggggacaucaagauacagcaagaaguucaagccggaaauagcaauaagacccaaagugagggaucaagaagggagaaugaacuauuacuggacacuaguagagccgggagacaaaauaacauucgaagcaacuggaaaucuagugguaccgagauaugcauucgcaauggaaagaaaugcuggaucugguauuaucauuucagauacaccaguccacgauugcaauacaacuugucagacacccaagggugcuauaaacaccagccucccauuucagaauauacauccgaucacaauuggaaaauguccaaaauauguaaaaagcacgaaauugagacuggccacaggauugaggaauaucccgucuauucaaucuagaggccuauuuggggccauugccgguuucauugaagggggguggacagggaugguagauggaugguacgguuaucaccaucaaaaugagcaggggucaggauaugcagccgaccugaagagcacacagaaugccauugacaagauuacuaacaaaguaaauucuguuauugaaaagaugaauacacaguucacagcaguagguaaagaguucaaccaccuggaaaaaagaauagagaauuuaaauaaaaaaguugaugaugguuuccuggacauuuggacuuacaaugccgaacuguugguucuauuggaaaaugaaagaacuuuggacuaccacgauucaaaugugaagaacuuauaugaaaagguaagaagccaguuaaaaaacaaugccaaggaaauuggaaacggcugcuuugaauuuuaccacaaaugcgauaacacgugcauggaaaguguaaaaaaugggacuuaugacuacccaaaauacucagaggaagcaaaauuaaacagagaagaaauagaugggguaaagcuggaaucaacaaggauuuaccagauuuuggcgaucuauucaacugucgccaguucauugguacugguagucucccugggggcaaucaguuucuggaugugcucuaaugggucucuacaguguagaauauguauuuaa

SEQ ID NO: 37562 - RNA, 1701 nt, Artificial Sequence
  derived and/or modified CDS sequence (wt) from hemagglutinin__InfluenzaA__ADM12981
augaaggcaauacuaguaguucugcuauauacauuugcaaccgcaaaugcagacacauuauguauagguuaucaugcgaacaauucaacagacacuguagacacaguacuagaaaagaauguaacaguaacacacucuguuaaccuucuagaagacaagcauaacgggaaacuaugcaaacuaagagggguagccccauugcauuuggguaaauguaacauugcuggcuggaucuugggaaauccagagugcgaaucacucuccacagcaagcucaugguccuacauuguggaaacaucuaguucagacaauggaacguguuacccaggagauuucaucgauuaugaggagcuaagagagcaauugagcucagugucaucauuugaaagguuugagauauuccccaagacaaguucauggcccaaucaugacucgaacaaagguguaacggcagcauguccucaugcuggagcaaaaagcuucuacaaaaauuuaauauggcuaguuaaaaaaggaaauucauacccaaagcucagcaaauccuacauuaaugauaaagggaaagaaguccucgugcuauggggcauucaccauccaucuacuagugcugaccaacaaagucucuaucagaaugcagaugcauauguuuuuguggggacaucaagauacagcaagaaguucaagccggagauagcaauaagacccaaagugagggaucaagaagggagaaugaacuauuacuggacacuaguagagccgggagacaaaauaacauucgaagcaacuggaaaucuagugguaccgagauaugcauucgcaauggaaagaaaugcuggaucugguauuaucauuucagauacaccaguccacgauugcaauacaacuugucagacacccaagggugcuauaaacaccagccucccauuucagaauauacauccgaucacaauuggaaaauguccaaaauauguaaaaagcacaaaauugagacuggccacaggauugaggaauaucccgucuauucaaucuagaggccuauuuggggccauugccgguuucauugaagggggguggacagggaugguagauggaugguacgguuaucaccaucaaaaugagcaggggucaggauaugcagccgaccugaagagcacacagaaugccauugacgagauuacuaacaaaguaaauucuguuauugaaaagaugaauacacaguucacagcaguagguaaagaguucaaccaccuggaaaaaagaauagagaauuuaaauaaaaagguugaugaugguuuccuggacauuuggacuuacaaugccgaacuguugguucuauuggaaaaugaaagaacuuuggacuaccacgauucaaaugugaagaacuuauaugaaaagguaagaagccaguuaaaaaacaaugccaaggaaauuggaaacggcugcuuugaauuuuaccacaaaugcgauaacacgugcauggaaagugucaaaaaugggacuuaugacuacccaaaauacucagaggaagcaaaauuaaacagagaagaaauagaugggguaaagcuggaaucaacaaggauuuaccagauuuuggcgaucuauucaacugucgccaguucauugguacugguagucucccugggggcaaucaguuucuggaugugcucuaaugggucucuacaguguagaauauguauuuaa

SEQ ID NO: 37563 - RNA, 1701 nt, Artificial Sequence
  derived and/or modified CDS sequence (wt) from hemagglutinin__InfluenzaA__ADM12991
augaaggcaauacuaguaguucugcuauauacauuugaaaccgcaaaugcagacacauuauguauagguuaucaugcgaacaauucaacagacacuguagacacaguacuagaaaagaauguaacaguaacacacucuguuaaccuucuagaagacaagcauaacgggaaacuaugcaaacuaagagggguagccccauugcauuuggguaaauguaacauugcuggcuggauccugggaaauccagagugugaaucacucuccacagcaagcucaugguccuacauuguggaaacaucuaguucagacaauggaacguguuacccaggagauuucaucgauuaugaggagcuaagagagcaauugagcucagugucaucauuugaaagguuugagauauuccccaagacaaguucauggcccaaucaugacucgaacaaagguguaacggcagcauguccucaugcuggagcaaaaagcuucuacaaaaauuuaauauggcuaguuaaaaaaggaaauucauacccaaagcucagcaaauccuacauuaaugauaaagggaaagaaguccucgugcuauggggaauucaccauccaucuacuagugcugaccaacaaagucucuaucagaaugcagaugcauauguuuuuguggggacaucaagauacagcaagaaguucaagccggaaauagcaauaagacccaaagugagggaucaagaagggagaaugaacuauuacuggacacuaguagagccgggagacaaaauaacauucgaagcaacuggaaaucuagugguaccgagauaugcauucgcaauggaaagaaaugcuggaucugguauuaucauuucagauacaccaguccacgauugcaauacaacuugucagacacccaagggugcuauaaacaccagccucccauuucagaauauacauccgaucacaauuggaaaauguccaaaauauguaaaaagcacaaaauugagacuggccacaggauugaggaaugucccgucuauucaaucuagaggccuauuuggggccauugccgguuucauugaagggggguggacagggaugguagauggaugguacgguuaucaccaucaaaaugagcaggggucaggauaugcagccgaccugaagagcacacagcaugccauugacgagaucacuaacaaaguaaauucuguuauugaaaagaugaauacacaguucacagcaguagguaaagaguucaaccaccuggaaaaaagaauagagaauuuaaauaaaaaaguugaugaugguuuccuggacauuuggacuuacaaugccgaacuguugguucuauuggaaaaugaaagaacuuuggacuaccacgauucaaaugugaagaacuuauaugaaaagguaagaagccaguuaaaaaacaaugccaaggaaauuggaaacggcugcuuugaauuuuaccacaaaugcgauaacacaugcauggaaagugucaaaaaugggacuuaugacuacccaaaauacucagaggaagcaaaauuaaacagagaagaaauagaugggguaaagcuggaaucaacaaggauuuaccagauuuuggcgaucuauucaacugucgccaguucauugguacugguagucucccugggggcaaucaguuucuggaugugcucuaaugggucucuacaguguagaauauguauuuaa

SEQ ID NO: 37564 - RNA, 1701 nt, Artificial Sequence
  derived and/or modified CDS sequence (wt) from hemagglutinin__InfluenzaA__ADM13001
augaaggcaauacuaguaguucugcuauauacauuugcaaccgcaaaugcagacacauuauguauagguuaucaugcgaacaauucaacagacacuguagacacaguacuagaaaagaauguaacaguaacacacucuguuaaccuucuagaagacaagcauaacgggaaacuaugcaaacuaagagggguagccccauugcauuuggguaaauguaacauugcuggcuggauccugggaaauccagagugugaaucacucuccacagcaagcucaugguccuacauuguggaaacaucuaguucagacaauggaacguguuacccaggagauuucaucgauuaugaggagcuaagagagcaauugagcucagugucaucauuugaaagguuugagauauuccccaagacaaguucauggcccaaucaugacucgaacaaagguguaacggcagcauguccucaugcuggagcaaaaagcuucuacaaaaauuuaauauggcuaguuaaaaaaggaaauucauacccaaagcucagcaaauccuacauuaaugauaaagggaaagaaguccucgugcuauggggaauucaccauccaucuacuagugcugaccaacaaagucucuaucagaaugcagaugcauauguuuuuguggggacaucaagauacagcaagaaguucaagccugaaauagcaauaagacccaaagugagggaucaagaagggagaaugaacuauuacuggacacuaguagagccgggagacaaaauaacauucgaagcaacuggaaaucuagugguaccgagauaugcauucgcaauggaaagaaaugcuggaucugguauuaucauuucagauacaccaguccacgauugcaauacaacuugucagacacccaagggugcuauaaacaccagccucccauuucagaauauacauccgaucacaauuggaaaauguccaaaauauguaaaaagcacaaaauugagacuggccacaggauugaggaauaucccgucuauucaaucuagaggccuauuuggggccauugccgguuucauugaagggggguggacagggaugguagauggaugguacgguuaucaccaucaaaaugagcaggggucaggauaugcagccgaccugaagagcacacagcaugccauugacgagauuacuaacaaagugaauucuguuauugaaaagaugaauacacaguucacagcaguagguaaagaguucaaccaccuggaaaaaagaauagagaauuuaaauaaaaaaguugaugaugguuuccuggacauuuggacuuacaaugccgaacuguugguucuauuggaaaaugaaagaacuuuggacuaccacgauucaaaugugaagaacuuauaugaaaagguaagaagccaguuaaaaaacaaugccaaggaaauuggaaacggcugcuuugaauuuuaccacaaaugcgauaacacgugcauggaaagugucaaaaaugggacuuaugacuacccaaaauacucagaggaagcaaaauuaaacagagaagaaauagaugggguaaagcuggaaucaacaaggauuuaccagauuuuggcgaucuauucaacugucgccaguucauugguacugguagucucccugggggcaaucaguuucuggaugugcucuaaugggucucuacaguguagaauauguauuuaa

SEQ ID NO: 37565 - RNA, 1701 nt, Artificial Sequence
  derived and/or modified CDS sequence (wt) from hemagglutinin__InfluenzaA__ADM13011
augaaggcaauacuaguaguucugcuauauacauuugcaaccgcaaaugcagacacauuauguauagguuaucaugcgaacaauucaacagacacuguagacacaguacuagaaaagaauguaacaguaacacacucuguuaaccuucuagaagacaagcauaacgggaaacuaugcaaacuaagagggguagccccauugcauuuggguaaauguaacauugcuggcuggauccugggaaauccagagugugaaucacucuccacagcaagcucaugguccuacauuguggaaacaucuaguucagacaauggaacguguuacccaggagauuucaucgauuaugaggagcuaagagagcaacugagcucagugucaucauuugaaagguuugagauauuccccaagacaaguucauggcccaaucaugacucgaacaaagguguaacggcagcauguccucaugcuggagcaaaaagcuucuacaaaaauuuaauauggcuaguuaaaaaaggaaauucauacccaaagcucagcaaauccuacauuaaugauaaagggaaagaaguccucgugcuauggggcauucaccauccaucuacuagugcugaccaacaaagucucuaucagaaugcagaugcauauguuuuuguggggacaucaagauacagcaagaaguucaagccggaaauagcaauaagacccaaagugagggaucaagaagggagaaugaacuauuacuggacacuaguagagccgggagacaaaauaacauucgaagcaacuggaaaucuagugguaccgagauaugcauucgcaauggaaagaaaugcuggaucugguauuaucauuucagauacaccaguccacgauugcaauacaacuugucagacacccaagggugcuauaaacaccagccucccauuucagaauauacauccgaucacaauuggaaaauguccaaaauauguaaaaagcacaaaauugagacuggccacaggauugaggaaugucccgucuauucaaucuagaggccuauuuggggccauugccgguuucauugaagggggguggacagggaugguagauggaugguacgguuaucaccaucaaaaugagcaggggucaggauaugcagccgaccugaagagcacacagaaugccauugacaagauuacuaacaaaguaaauucuguuauugaaaagaugaauacacaguucacagcaguagguaaagaguucaaccaccuggaaaaaagaauagagaauuuaaauaaaaaaguugaugaugguuuccuggacauuuggacuuacaaugccgaacuguugguucuauuggaaaaugaaagaacuuuggacuaccacgauucaaaugugaagaacuuauaugaaaagguaagaagccaguuaaaaaacaaugccaaggaaauuggaaacggcugcuuugaauuuuaccacaaaugcgauaacacgugcauggaaagugucaaaaaugggacuuaugacuacccaaaauacucagaggaagcaaaauuaaacagagaagaaauagaugggguaaagcuggaaucaacaaggauuuaccagauuuuggcgaucuauucaacugucgccaguucauugguacugguagucucccugggggcaaucaguuucuggaugugcucuaaugggucucuacaguguagaauauguauuuaa

SEQ ID NO: 37566 - RNA, 1701 nt, Artificial Sequence
  derived and/or modified CDS sequence (wt) from hemagglutinin__InfluenzaA__ADM13021
augaaggcaauacuaguaguucugcuauauacauuugcaaccgcaaaugcagacacauuauguauagguuaucaugcgaacaauucaacagacacuauagacacaguacuagaaaagaauguaacaguaacacacucuguuaaccuucuagaagacaagcauaacgggaaacuaugcaaacuaagagggguagccccauugcauuuggguaaauguaacauugcuggcuggauccugggaaauccagagugugaaucacucuccacagcaagcucaugguccuacauuguggaaacaucuaguucagacaauggaacguguuacccaggagauuucaucgauuaugaggagcuaagagagcaauugagcucagugucaucauuugaaagguuugagauauuucccaagacaaguucauggcccaaucaugacucgaacaaagguguaacggcagcauguccucaugcuggagcaaaaagcuucuacaaaaauuuaauauggcuaguuaaaaaaggaaauucauacccaaagcucagcaaauccuacauuaaugauaaagggaaagaaguccucgugcuauggggcauucaccauccaucuacuagugcugaccaacaaagucucuaucagaaugcagaugcauauguuuuuguggggacaucaagauacagcaagaaguucaagccggaaauagcaauaagacccaaagugagggaucaagaagggagaaugaacuauuacuggacacuaguagagccgggagacaaaauaacauucgaagcaacuggaaaucuagugguaccgagauaugcauucgcaauggaaagaaaugcuggaucugguauuaucauuucagauacaccaguccacgauugcaauacaacuugucagacacccaagggugcuauaaacaccagccucccauuucagaauauacauccgaucacaauuggaaaauguccaaaauauguaaaaagcacaaaauugagacuggccacaggauugaggaaugucccgucuauucaaucuagaggccuauuuggggccauugccgguuucauugaagggggguggacagggaugguagauggaugguacgguuaucaccaucaaaaugagcaggggucaggauaugcagccgaucugaagagcacacagaaugccauugacaagauuacuaacaaaguaaauucuguuauugaaaagaugaauacacaguucacagcaguagguaaagaguucaaccaccuggaaaaaagaauagagaauuuaaauaaaaaaguugaugaugguuuccuggacauuuggacuuacaaugccgaacuguugguucuauuggaaaaugaaagaacuuuggacuaccacgauucaaaugugaagaacuuauaugaaaagguaagaagccaguuaaaaaacaaugccaaggaaauuggaaacggcugcuuugaauuuuaccacaaaugcgauaacacgugcauggaaagugucaaaaaugggacuuaugacuacccaaaauacucagaggaagcaaaauuaaacagagaagaaauagaugggguaaagcuggaaucaacaaggauuuaccagauuuuggcgaucuauucaacugucgccaguucauugguacugguagucucccugggggcaaucaguuucuggaugugcucuaaugggucucuacaguguagaauauguauuuaa

SEQ ID NO: 37567 - RNA, 1701 nt, Artificial Sequence; identical to SEQ ID NO: 36772
  derived and/or modified CDS sequence (wt) from hemagglutinin__InfluenzaA__ADM13031

SEQ ID NO: 37568 - RNA, 1701 nt, Artificial Sequence
  derived and/or modified CDS sequence (wt) from hemagglutinin__InfluenzaA__ADM13041
augaaggcaauacuaguaguucugcuauauacauuugcaaccgcaaaugcagacacauuauguauagguuaucaugcgaacaauucaacagacacuguagacacaguacuagaaaagaauguaacaguaacacacucuguuaaccuucuagaagacaagcauaacgggaaacuaugcaaacuaagagggguagccccauugcauuuggguaaauguaacauugcuggcuggauccugggaaauccagagugugaaucacucuccacagcaagcucaugguccuacauuguggaaacaucuaguucagacaauggaacguguuacccaggagauuucaucgauuaugaggagcuaagagagcaauugagcucagugucaucauuugaaagguuugagauauuccccaagacaaguucauggcccaaucaugacucgaacaaagguguaacggcagcauguccucaugcuggagcaaaaagcuucuacaaaaauuuaauauggcuaguuaaaaaaggaaauucauacccaaagcucagcaaauccuacauuaaugauaaagggaaagaaguccucgugcuauggggcauucaccauccaucuacuagugcugaccaacaaagucucuaucagaaugcagaugcauauguuuuuguggggacaucaagauacagcaagaaguucaagccggaaauagcaauaagacccaaagugagggaacaagaagggagaaugaacuauuacuggacacuaguagagccgggagacaaaauaacauucgaagcaacuggaaaucuagugguaccgagauaugcauucgcaauggaaagaaaugcuggaucugguauuaucauuucagauacaccaguccacgauugcaauacaacuugucagacacccaaaggugcuauaaacaccagccucccauuucagaauguacauccgaucacaauuggaaaauguccaaaauauguaaaaagcacaaaauugagacuggccacaggauugaggaaugucccgucuauucaaucuagaggccuauuuggggccauugccgguuucauugaagggggguggacagggaugguagauggaugguacgguuaucaccaucaaaaugagcaggggucaggauaugcagccgaccugaagagcacacagaaugccauugacgagauuacuaacaaaguaaauucuguuauugaaaagaugaauacacaguucacagcaguagguaaagaguucaaccaccuggaaaaaagaauagagaauuuaaauaaaaaaguugaugaugguuuccuggacauuuggacuuacaaugccgaacuguugguucuauuggaaaaugaaagaacuuuggacuaccacgauucaaaugugaagaacuuauaugaaaagguaagaagccaguuaaaaaacaaugccaaggaaauuggaaacggcugcuuugaauuuuaccacaaaugcgauaacacgugcauggaaagugucaaaaaugggacuuaugacuacccaaaauacucagaggaagcaaaauuaaacagagaagaaauagaugggguaaagcuggaaucaacaaggauuuaccagauuuuggcgaucuauucaacugucgccaguucauugguacugguagucucccugggggcaaucaguuucuggaugugcucuaaugggucucuacaguguagaauauguauuuaa

SEQ ID NO: 37569 - RNA, 1701 nt, Artificial Sequence
  derived and/or modified CDS sequence (wt) from hemagglutinin__InfluenzaA__ADM13051
augaaggcaauacuaguaguucugcuauauacauuugcaaccacaaaugcagacacauuauguauagguuaucaugcgaacaauucaacagacacuguagacacaguacuagaaaagaauguaacaguaacacacucuguuaaccuucuagaagacaagcauaacgggaaacuaugcaaacuaagagggguagccccauugcauuuggguaaauguaacauugcuggcuggauccugggaaauccagagugugaaucacucuccacagcaagcucaugguccuacauuguggaaacgucuaguucagacaauggaacguguuacccaggagauuucaucgauuaugaggagcuaagagagcaauugagcucagugucaucauuugaaagguuugagauauuccccaagacaaguucauggcccaaucaugacucgaacaaagguguaacggcagcauguccucaugcuggagcaaaaagcuucuacaaaaauuuaauauggcuaguuaaaaaaggaaauucauacccaaagcucagcaaauccuacauuaaugauaaagggaaagaaguccucgugcuauggggcauucaccauccaucuacuagugcugaccaacaaagucucuaucagaaugcagaugcauauguuuuuguggggacaucaagauacagcaagaaguucaagccggaaauagcaauaagacccaaagugagggaucaagaagggagaaugaacuauuacuggacacuaguagagccgggagacaaaauaacauucgaagcaacuggaaaucuagugguaccgagauaugcauucgcaauggaaagaaaugcuggaucugguauuaucauuucagauacaccaguccacgauugcaauacaacuugucagacacccaagggugcuauaaacaccagccucccauuucagaauauacauccgaucacaauuggaaaauguccaaaauauguaaaaagcacaaaauugagacuggccacaggauugaggaaugucccgucuauucaaucuagaggccuauuuggggccauugccgguuucauugaagggggguggacagggaugguagauggaugguacgguuaucaccaucaaaaugagcaggggucaggauaugcagccgaccugaagagcacacagaaugccauugacaagauuacuaacaaaguaaauucuguuauugaaaagaugaauacacaguucacagcaguagguaaagaguucaaccaccuggaaaaaagaauagagaauuuaaauaaaaaaguugaugaugguuuccuggacauuuggacuuacaaugccgaacuguugguucuauuggaaaaugaaagaacuuuggacuaccacgauucaaaugugaagaacuuauaugaaaagguaagaagccaguuaaaaaacaaugccaaggaaauuggaaacggcugcuuugaauuuuaccacaaaugcgauaacacgugcauggaaagugucaaaaaugggacuuaugacuacccaaaauacucagaggaagcaaaauuaaacagagaagaaauagaugggguaaagcuggaaucaacaaggauuuaccagauuuuggcgaucuauucaacugucgccaguucauugguacugguagucucccugggggcaaucaguuucuggaugugcucuaaugggucucuacaguguagaauauguauuuaa

SEQ ID NO: 37570 - RNA, 1701 nt, Artificial Sequence
  derived and/or modified CDS sequence (wt) from hemagglutinin__InfluenzaA__ADM13061
augaaggcaauacuaguaguucugcuauauacauuugcaaccgcaaaugcagacacauuauguauagguuaucaugcgaacaauucaacagacacuguagacacaguacuagaaaagaauguaacaguaacacacucuguuaaccuucuagaagacaagcauaacgggaaacuaugcaaacuaagagggauagccccauugcauuuggguaaauguaacauugcuggcuggauccugggaaauccagagugugaaucacucuccacagcaagcucaugguccuacauuguggaaacaucuaguucagacaauggaacguguuacccaggagauuucaucgauuaugaggagcuaagagagcaauugagcucagugucaucauuugaaagguuugagauauuccccaagacaaguucauggcccaaucaugacucgaacaaagguguaacggcagcauguccucaugcuggagcaaaaagcuucuacaaaaauuuaauauggcuaguuaaaaaaggaaauucauacccaaagcucagcaaauccuacauuaaugauaaagggaaagaaguccucgugcuauggggcauucaccauccaucuacuagugcugaccaacaaagucucuaucagaaugcagaugcauauguuuuuguggggacaucaagauacagcaagaaguucaagccggaaauagcaauaagacccaaagugagggaucaagaagggagaaugaacuauuacuggacacuaguagagccgggagacaaaauaacauucgaagcaacuggaaaucuagugguaccgagauaugcauucgcaauggaaagaaaugcuggaucugguauuaucauuucagauacaccaguccacgauugcaauacaucuugucagacacccaagggugcuauaaacaccagccucccauuucagaauauacauccgaucacaauuggaaaauguccaaaauauguaaaaagcacaaaauugagacuggccacaggauugaggaaugucccguccauucaaucuagaggccuauuuggggccauugccgguuucauugaagggggguggacagggaugguagauggaugguacgguuaucaccaucaaaaugagcaggggucaggauaugcagccgaccugaagagcacacagaaugccauugacgagauuacuaacaaaguaaauucuguuauugaaaagaugaauacacaguucacagcaguagguaaagaguucaaccaccuggaaaaaagaauagagaauuuaaauaaaaaaguugaugaugguuuccuggacauuuggacuuacaaugccgaacuguugguucuauuggaaaaugaaagaacuuuggacuaccacgauucaaaugugaagaacuuauaugaaaagguaagaagccaguuaaaaaacaaugccaaggaaauuggaaacggcugcuuugaauuuuaccacaaaugcgauaacacgugcauggaaagugucaaaaaugggacuuaugacuacccaaaauacucagaggaagcaaaauuaaacagagaagaaauagaugggguaaagcuggaaucaacaaggauuuaccagauuuuggcgaucuauucaacugucgccaguucauugguacugguagucucccugggggcaaucaguuucuggaugugcucuaaugggucucuacaguguagaauauguauuuaa

SEQ ID NO: 37571 - RNA, 1701 nt, Artificial Sequence
  derived and/or modified CDS sequence (wt) from hemagglutinin__InfluenzaA__ADM13071
augaaggcaauacuaguaguucugcuauauacauuugcaaccgcaaaugcagacacauuauguauagguuaucaugcgaacaauucaacagacacuguagacacaguacuagaaaagaauguaacaguaacacacucuguuaaccuucuagaagacaagcauaacgggaaacuaugcaaacuaagagggauagccccauugcauuuggguaaauguaacauugcuggcuggauccugggaaauccagagugugaaucacucuccacagcaagcucaugguccuacauuguggaaacaucuaguucagacaauggaacguguuacccaggagauuucaucgauuaugaggagcuaagagagcaauugagcucagugucaucauuugaaagguuugagauauuccccaagacaaguucauggcccaaucaugacucgaacaaagguguaacggcagcauguccucaugcuggagcaaaaagcuucuacaaaaauuuaauauggcuaguuaaaaaaggaaauucauacccaaagcucagcaaauccuacauuaaugauaaagggaaagaaguucucgugcuauggggcauucaccauccaucuacuagugcugaccaacaaagucucuaucagaaugcagaugcauauguuuuuguggggacaucaagauacagcaagaaguucaagccggaaauagcaauaagacccaaagugagggaucaagaagggagaaugaacuauuacuggacacuaguagagccgggagacaaaauaacauucgaagcaacuggaaaucuagugguaccgagauaugcauucgcaauggaaagaaaugcuggaucugguauuaucauuucagauacaccaguccacgauugcaauacaacuugucagacacccaagggugcuauaaacaccagccucccauuucagaauauacauccgaucacaauuggaaaauguccaaaauauguaaaaagcacaaaauugagacuggccacaggauugaggaaugucccgucuauucaaucuagaggccuauuuggggccauugccgguuucauugaagggggguggacagggaugguagauggaugguacgguuaucaccaucaaaaugagcaggggucaggauaugcagccgaccugaagagcacacagaaugccauugacgagauuacuaacaaaguaaauucuguuauugaaaagaugaauacacaguucacagcaguagguaaagaguucaaccaccuggaaaaaagaauagagaauuuaaauaaaaaaguugaugaugguuuccuggacauuuggacuuacaaugccgaacuguugguucuauuggaaaaugaaagaacuuuggacuaccacgauucaaaugugaagaacuuauaugaaaagguaagaagccaguuaaaaaacaaugccaaggaaauuggaaacggcugcuuugaauuuuaccacaaaugcgauaacacgugcauggaaagugucaaaaaugggacuuaugacuacccaaaauacucagaggaagcaaaauuaaacagagaagaaauagaugggguaaagcuggaaucaacaaggauuuaccagauuuuggcgaucuauucaacugucgccaguucauugguacugguagucucccugggggcaaucaguuucuggaugugcucuaaugggucucuacaguguagaauauguauuuaa

SEQ ID NO: 37572 - RNA, 1701 nt, Artificial Sequence
  derived and/or modified CDS sequence (wt) from hemagglutinin__InfluenzaA__ADM13081
augaaggcaauacuaguaguucugcuauauacauuugcaaccgcaaaugcagacacauuauguauagguuaucaugcgaacaauucaacagacacuguagacacaguacuagaaaagaauguaacaguaacacacucuguuaaccuucuagaagacaagcauaacgggaaacuaugcaaacuaagagggauagccccauugcauuuggguaaauguaacauugcuggcuggauccugggaaauccagagugugaaucacucuccacagcaagcucaugguccuacauuguggaaacaucugguucagacaauggaacguguuacccaggagauuucaucgauuaugaggagcuaagagagcaauugagcucagugucaucauuugaaagguuugagauauuccccaagacaaguucauggcccaaucaugacucgaacaaagguguaacggcagcauguccucaugcuggagcaaaaagcuucuacaaaaauuuaauauggcuaguuaaaaaaggaaauucauacccaaagcucagcaaauccuacauuaaugauaaagagaaagaaguccucgugcuauggggcauucaccauccaucuacuagugcugaccaacaaagucucuaucagaaugcagaugcauauguuuuuguggggacaucaagauacagcaagaaguucaagccggaaauagcaauaagacccaaagugagggaucaagaagggagaaugaacuauuacuggacacuaguagagccgggagacaaaauaacauucgaagcaacuggaaaucuagugguaccgagauaugcauucgcaauggaaagaaaugcuggaucugguauuaucauuucagauacaccaguccacgauugcaauacaacuugucagacacccaagggugcuauaaacaccagccucccauuucagaauauacauccgaucacaauuggaaaauguccaaaauauguaaaaagcacaaaauugagacuggccacaggauugaggaaugucccgucuauucaaucuagaggccuauuuggggccauugccgguuucauugaagggggguggacagggaugguagauggaugguacgguuaucaccaucaaaaugagcaggggucaggauaugcagccgaccugaagagcacacagaaugccauugacgagauuacuaacaaaguaaauucuguuauugaaaagaugaauacacaguucacagcaguagguaaagaguucaaccaccuggaaaaaagaauagagaauuuaaauaaaaaaguugaugaugguuuccuggacauuuggacuuacaaugccgaacuguugguucuauuggaaaaugaaagaacuuuggacuaccacgauucaaaugugaagaacuuauaugaaaagguaagaagccaguuaaaaaacaaugccaaggaaauuggaaauggcugcuuugaauuuuaccacaaaugcgauaacacgugcauggaaagugucaaaaaugggacuuaugacuacccaaaauacucagaggaagcaaaauuaaacagagaagaaauagaugggguaaagcuggaaucaacaaggauuuaccagauuuuggcgaucuauucaacugucgccaguucauugguacugguagucucccugggggcaaucaguuucuggaugugcucuaaugggucucuacaguguagaauauguauuuaa

SEQ ID NO: 37573 - RNA, 1701 nt, Artificial Sequence
  derived and/or modified CDS sequence (wt) from hemagglutinin__InfluenzaA__ADM13091
augaaggcaauacuaguaguucugcuauauacauuugcaaccgcaaaugcagacacauuauguauagguuaucaugcgaacaauucaacagacacuguagacacaguacuagaaaagaauguaacaguaacacacucuguuaaccuucuagaagacaagcauaacgggaaacuaugcaaacuaagagggguagccccauugcauuuggguaaauguaacauugcuggcuggauccugggaaauccagagugugaaucacucuccacagcaagcucaugguccuacauuguggaaacaucuaguucagacaauggaacguguuacccaggagauuucaucgauuaugaggagcuaagagagcaauugagcucagugucaucauuugaaagguuugagauauuccccaagacaaguucauggcccaaucaugacucgaacaaagguguaacggcagcauguccucaugcuggagcaaaaagcuucuacaaaaauuuaauauggcuaguuaaaaaaggaaauucauacccaaagcucagcaaauccuacauuaaugauaaagggaaagaaguccucgugcuauggggaauucaccauccaucuacuagugcugaccaacaaagucucuaucagaacgcagaugcauauguuuuuguggggacaucaagauacagcaagaaguucaagccggaaauagcaauaagacccaaagugagggaucaagaagggagaaugaacuauuacuggacacuaguagagccgggagacaaaauaacauucgaagcaacuggaaaucuagugguaccgagauaugcauucgcaauggaaagaaaugcuggaucugguauuaucauuucagauacaccaguccacgauugcaauacaacuugucagacacccaagggugcuauaaacaccagccucccauuucagaauauacauccgaucacaauuggaaaauguccaaaauauguaaaaagcacaaaauugagacuggccacaggauugaggaaugucccgucuauucaaucuagaggccuauuuggggccauugccgguuucauugaagggggguggacagggaugguagauggaugguacgguuaucaccaucaaaaugagcaggggucaggauaugcagccgaccugaagagcacacagcaugccauugacgagauuacuaacaaaguaaauucuguuauugaaaagaugaauacacaguucacagcaguagguaaagaguucaaccaccuggaaaaaagaauagagaauuuaaauaaaaaaguugaugaugguuuccuggacauuuggacuuacaaugccgaacuguugguucuauuggaaaaugaaagaacuuuggacuaccacgauucaaaugugaagaacuuauaugaaaagguaagaagccaguuaaaaaacaaugccaaggaaauuggaaacggcugcuuugaauuuuaccacaaaugcgauaacacgugcauggaaagugucaaaaaugggacuuaugacuacccaaaauacucagaggaagcaaaauuaaacagagaagaaauagaugggguaaagcuggaaucaacaaggauuuaccagauuuuggcgaucuauucaacugucgccaguucauugguacugguagucucccugggggcaaucaguuucuggaugugcucuaaugggucucuacaguguagaauauguauuuaa

SEQ ID NO: 37574 - RNA, 1701 nt, Artificial Sequence; identical to SEQ ID NO: 36851
  derived and/or modified CDS sequence (wt) from hemagglutinin__InfluenzaA__ADM13101

SEQ ID NO: 37575 - RNA, 1701 nt, Artificial Sequence
  derived and/or modified CDS sequence (wt) from hemagglutinin__InfluenzaA__ADM13111
augaaggcaauacuaguaguucugcuauauacauuugaaaccgcaaaugcagacacauuauguauagguuaucaugcgaacaauucaacagacacuguagacacaguacuagaaaagaauguaacaguaacacacucuguuaaccuucuagaagacaagcauaacgggaaacuaugcaaacuaagagggguagccccauugcauuuggguaaauguaacauugcuggcuggauccugggaaauccagagugugaaucacucuccacagcaagcucaugguccuacauuguggaaacaucuaguucagacaauggaacguguuacccaggagauuucaucaauuaugaggagcuaagagagcaauugagcucagugucaucauuugaaagguuugagauauuccccaagacaaguucauggcccaaucaugacucgaacaaagguguaacggcagcauguccucaugcuggagcaaaaagcuucuacaaaaauuuaauauggcuaguuaaaaaaggaaauucauacccaaagcucagcaaauccuacauuaaugauaaagggaaagaaguccucgugcuauggggcauucaccauccaucuacuagugcugaccaacaaagucucuaucagaaugcagaugcauaugucuuuguggggacaucaagauacagcaagaaguucaagccggaaauagcaauaagacccaaagugagggaucaagaagggagaaugaacuauuacuggacacuaguagauccgggagacaaaauaacauucgaagcaacuggaaaucuagugguaccgagauaugcauucgcaauggaaagaaaugcuggaucugguauuaucaucucagauacaccaguccacgauugcaauacaacuugucagacacccaauggugcuauaaacaccagccucccauuucagaauauacauccgaucacaauuggaaaauguccaaaauauguaaaaagcacaaaauugagacuggccacaggauugaggaaugucccgucuauucaaucuagaggccuauuuggggccauugccgguuucauugaagggggguggacagggaugguagauggaugguacgguuaucaccaucaaaaugagcaggggucaggauaugcagccgaccugaagagcacacagaaugccauugacaagauuacuaacaaaguaaauucuguuauugaaaagaugaauacacaguucacagcaguagguaaagaguucaaccaccuggaaaaaagaauagagaauuuaaauaaaaaaguugaugaugguuuccuggacauuuggacuuacaaugccgaacuguugguucuauuggaaaaugaaagaacuuuggacuaccacgauucaaaugugaagaacuuauaugaaaagguaagaagccaguuaaaaaacaaugccaaggaaauuggaaacggcugcuuugaauuuuaccacaaaugcgauaacacgugcauggaaagugucaaaaaugggacuuaugacuacccaaaauacucagaggaagcaaaauuaaacagagaagaaauagaugggguaaagcuggaaucaacaaggauuuaccagauuuuggcgaucuauucaacugucgccaguucauugguacugguagucucccugggggcaaucaguuucuggaugugcucuaaugggucucuacaguguagaauauguauuuaa

SEQ ID NO: 37576 - RNA, 1701 nt, Artificial Sequence
  derived and/or modified CDS sequence (wt) from hemagglutinin__InfluenzaA__ADM13121
augaaggcaauacuaguaguucugcuauauacauuugcaaccgcaaaugcagacacauuauguauagguuaucaugcgaacaauucaacagacacuguagacacaguacuagaaaagaauguaacaguaacacacucuguuaaccuucuagaagacaagcauaacgggaaacuaugcaaacuaagagggguagccccauugcauuuggguaaauguaacauugcuggcuggauccugggaaauccagagugugaaucacucuccacagcaagcucaugguccuacauuguggaaacaucuaguucagacaauggaacguguuacccaggagauuucaucgauuaugaggagcuaagagagcaauugagcucagugucaucauuugaaagguuugagauauuccccaagacaaguucauggcccaaucaugacucgaacaaagguguaacggcagcaugcccucaugcuggagcaaaaagcuucuacaaaaauuuaauauggcuaguuaaaaaaggaaauucauacccaaagcucagcaaauccuacauuaaugauaaagggaaagaaguccucgugcuauggggcauucaccauccaucuacuagugcugaccaacaaagucucuaucagaaugcagaugcauauguuuuuguggggacaucaagauacagcaagaaguucaagccggaaauagcaauaagacccaaagugagggaucaagaagggagaaugaacuauuacuggacacuaguagagccgggagacaaaauaacauucgaagcaacuggaaaucuagugguaccgagauaugcauucgcaauggaaagaaaugcuggaucugguauuaucauuucagauacaccaguccacgauugcaauacaacuugucagacacccaagggugcuauaaacaccagccucccauuucagaauauacauccgaucacaauuggaaaauguccaaaauauguaaaaagcacaaaauugagacuggccacaggauugaggaaugucccgucuauucaaucuagaggccuauuuggggccauugccgguuucauugaagggggguggacagggaugguagauggaugguacgguuaucaccaucaaaaugagcaggggucaggauaugcagccgaccugaagagcacacagaaugccauugacgagauuacuaacaaaguaaauucuguuauugaaaagaugaauacacaguucacagcaguagguaaagaguucaaccaccuggaaaaaagaauagagaauuuaaauaaaaaaguugaugaugguuuccuggacauuuggacuuacaaugcugaacuguugguucuauuggaaaaugaaagaacuuuggacuaccacgauucaaaugugaagaacuuauaugaaaagguaagaagccaguuaaaaaacaaugccaaggaaauuggaaacggcugcuuugaauuuuaccacaaaugcgauaacacgugcauggaaagugucaaaaaugggacuuaugacuacccaaaauacucagaggaagcaaaauuaaacagagaagaaauagaugggguaaagcuggaaucaacaaggauuuaccagauuuuggcgaucuauucaacugucgccaguucauugguacugguagucucccugggggcaaucaguuucuggaugugcucuaaugggucucuacaguguagaauauguauuuaa

SEQ ID NO: 37577 - RNA, 1701 nt, Artificial Sequence
  derived and/or modified CDS sequence (wt) from hemagglutinin__InfluenzaA__ADM13131
augaaggcaauacuaguaguucugcuauauacauuugcaaccgcaaaugcagacacauuauguauagguuaucaugcgaacaauucaacagacacuguagacacaguacuagaaaagaauguaacaguaacacacucuguuaaccuucuagaagacaagcauaacgggaaacuaugcaaacuaagagggguagccccauugcauuuggguaaauguaacauugcuggcuggauccugggaaauccagagugugaaucacucuccacagcaagcucaugguccuacauuguggaaacaucuaguucagacaauggaacguguuacccaggagauuucaucgauuaugaggagcuaagagagcaauugagcucagugucaucauuugaaagguuugagauauuccccaagacaaguucauggcccaaucaugacucgaacaaagguguaacggcagcauguccucaugcuggagcaaaaagcuucuacaaaaauuuaauauggcuaguuaaaaaaggaaauucauacccaaagcucagcaaauccuacauuaaugauaaagggaaagaaguccucgugcuauggggcauucaccauccaucuacuagugcugaccaacaaagucucuaucagaaugcagaugcauauguuuuuguggggacaucaagauacagcaagaaguucaagccggaaauagcaauaagacccaaagugagggaucaagaagggagaaugaacuauuacuggacacuaguagagccgggagacaaaauaacauucgaagcaacuggaaaucuagugguaccgagauaugcauucgcaauggaaagaaaugcuggaucugguauuaucauuucagauacaccaguccacgauugcaauacaacuugucagacacccaagggugcuauaaacaccagccucccauuucagaauauacauccgaucacaauuggaaaauguccaaaauauguaaaaagcacgaaauugagacuggccacaggauugaggaaugucccgucuauucaaucuagaggccuauuuggggccauugccgguuucauugaagggggguggacagggaugguagauggaugguacgguuaucaccaucaaaaugagcaggggucaggauaugcagccgaccugaagagcacacagaaugccauugacaagauuacuaacaaaguaaauucuguuauugaaaagaugaauacacaguucacagcaguagguaaagaguucaaccaccuggaaaaaagaauagagaauuuaaauaaaaaaguugaugaugguuuccuggacauuuggacuuacaaugccgaacuguugguucuauuggaaaaugaaagaacuuuggacuaccacgauucaaaugugaagaacuuauaugaaaagguaagaagccaguuaaaaaacaaugccaaggaaauuggaaacggcugcuuugaauuuuaccacaaaugcgauaacacgugcauggaaagugucaaaaaugggacuuaugacuacccaaaauacucagaagaagcaaaauuaaacagagaagaaauagaugggguaaagcuggaaucaacaaggauuuaccagauuuuggcgaucuauucaacugucgccaguucauugguacugguagucucccugggggcaaucaguuucuggaugugcucuaaugggucucuacaguguagaauauguauuuaa

SEQ ID NO: 37578 - RNA, 1701 nt, Artificial Sequence
  derived and/or modified CDS sequence (wt) from hemagglutinin__InfluenzaA__ADM13141
augaaggcaauacuaguaguucugcuauauacauuugcaaccgcaaaugcagacacauuauguauagguuaucaugcgaacaauucaacagacacuguagacacaguacuagaaaagaauguaacaguaacacacucuguuaaccuucuagaagacaagcauaacgggaaacuaugcaaacuaagagggguagccccauugcauuuggguaaauguaacauugcuggcuggauccugggaaauccagagugugaaucacucuccacagcaagcucaugguccuacauuguggaaacaucuaguucagacaauggaacguguuacccaggagauuucaucaauuaugaggagcuaagagagcaauugagcucagugucaucauuugaaagguuugagauauuccccaagacaaguucauggcccaaucaugacucgaacaaagguguaacggcagcauguccucaugcuggagcaaaaagcuucuacaaaaauuuaauauggcuaguuaaaaaaggaaauucauacccaaagcucagcaaauccuacauuaaugauaaagggaaagaaguccucgugcuauggggcauucaccauccaucuacuagugcugaccaacaaagucucuaucagaaugcagaugcauauguuuuuguggggacaucaagauacagcaagaaguucaagccggaaauagcaauaagacccaaagugagggaucaagaagggagaaugaacuauuacuggacacuaguagagccgggagacaaaauaacauucgaagcaacuggaaaucuagugguaccgagauaugcauucgcaauggaaagaaaugcuggaucugguauuaucaucucagauacaccaguccacgauugcaauacaacuugucagacacccaauggugcuauaaacaccagccucccauuucagaauauacauccgaucacaauuggaaaauguccaaaauauguaaaaagcacaaaauugagacuggccacaggauugaggaaugucccgucuauucaaucuagaggccuauuuggggccauugccgguuucauugaagggggguggacagggaugguagauggaugguacgguuaucaccaucaaaaugagcaggggucaggauaugcagccgaccugaagagcacacagaaugccauugacaagaucacuaacaaaguaaauucuguuauugaaaagaugaauacacaguucacagcaguagguaaagaguucaaccaccuggaaaaaagaauagagaauuuaaauaaaaaaguugaugaugguuuccuggacauuuggacuuacaaugccgaacuguugguucuauuggaaaaugaaagaacuuuggacuaccacgauucaaaugugaagaacuuauaugaaaagguaagaagccaguuaaaaaacaaugccaaggaaauuggaaacggcugcuuugaauuuuaccacaaaugcgauaacacgugcauggaaagugucaaaaaugggacuuaugacuacccaaaauacucagaggaagcaaaauuaaacagagaagaaauagaugggguaaagcuggaaucaacaaggauuuaccagauuuuggcgaucuauucaacugucgccaguucauugguacugguagucucccugggggcaaucaguuucuggaugugcucuaaugggucucuacaguguagaauauguauuuaa

SEQ ID NO: 37579 - RNA, 1701 nt, Artificial Sequence
  derived and/or modified CDS sequence (wt) from hemagglutinin__InfluenzaA__ADM13151
augaaggcaauacuaguaguucugcuauauacauuugcaaccgcaaaugcagacacauuauguauagguuaucaugcgaacaauucaacagacacuguagacacaguacuagaaaagaauguaacaguaacacacucuguuaaccuucuagaagacaagcauaacgggaaacuaugcaaacuaagagggguagccccauugcauuuggguaaauguaacauugcuggcuggauccugggaaauccagagugugaaucacucuccacagcaagcucaugguccuacauuguggaaacaucuaguucagacaauggaacguguuacccaggagauuucaucaauuaugaggagcuaagagagcaauugagcucagugucaucauuugaaagguuugagauauuccccaagacaaguucauggcccaaucaugacucgaacaaagguguaacggcagcauguccucaugcuggagcaaaaagcuucuacaaaaauuuaauauggcuaguuaaaaaaggaaauucauacccaaagcucagcaaauccuacauuaaugauaaagggaaagaaguccucgugcuauggggcauucaccauccaucuacuagugcugaccaacaaagucucuaucagaaugcagaugcauauguuuuuguggggacaucaagauacagcaagaaguucaagccggaaauagcaauaagacccaaagugagggaucaagaagggagaaugaacuauuacuggacacuaguagagccgggagacaaaauaacauucgaagcaacuggaaaucuagugguaccgagauaugcauucgcaauggaaagaaaugcuggaucugguauuaucaucucagauacaccaguccacgauugcaauacaacuugucagacacccaauggugcuauaaacaccagccucccauuucagaauauacauccgaucacaauuggaaaauguccaaaauauguaaaaagcacaaaauugagacuggccacaggauugaggaaugucccgucuauucaaucuagaggccuauuuggggccauugccgguuucauugaagggggguggacagggaugguagauggaugguacgguuaucaccaucaaaaugagcaggggucaggauaugcagccgaccugaagagcacacagaaugccauugacaagaucacuaacaaaguaaauucuguuauugaaaagaugaauacacaguucacagcaguagguaaagaguucaaccaccuggaaaaaagaauagagaauuuaaauaaaaaaguugaugaugguuuccuggacauuuggacuuacaaugccgaacuguugguucuauuggaaaaugaaagaacuuuggacuaccacgauucaaaugugaagaacuuauaugaaaagguaagaagccaguuaaaaaacaaugccaaggaaauuggaaacggcugcuuugaauuuuaccacaaaugcgauaacacgugcauggaaagugucaaaaaugggacuuaugacuacccaaaauacucagaggaagcaaaauuaaacagagaagaaauagaugggguaaagcuggaaucaacaaggauuuaccagauuuuggcgaucuauucaacugucgccaguucauugguacugguagucuccuugggggcaaucaguuucuggaugugcucuaaugggucucuacaguguagaauauguauuuaa

SEQ ID NO: 37580 - RNA, 1701 nt, Artificial Sequence
  derived and/or modified CDS sequence (wt) from hemagglutinin__InfluenzaA__ADM13161
augaaggcaauacuaguaguucugcuauauacauuugcaaccgcaaaugcagacacauuauguauagguuaucaugcgaacaauucaacagacacuguagacacaguacuagaaaagaauguaacaguaacacacucuguuaaccuucuagaagacaagcauaacgggaaacuaugcaaacuaagagggguagccccauugcauuuggguaaauguaacauugcuggcuggauccugggaaauccagagugugaaucacucuccacagcaagcucaugguccuacauuguggaaacaucuaguucagacaauggaacguguuacccaggagauuucaucgauuaugaggagcuaagagagcaauugagcucagugucaucauuugaaagguuugagauauuccccaagacaaguucauggcccaaucaugacucgaacaaagguguaacggcagcauguccucaugcuggagcaaaaagcuucuacaaaaauuuaauauggcuaguuaaaaaaggaaauucauacccaaagcucagcaaauccuacauuaaugauaaagggaaagaaguccuagugcuauggggcauucaccauccaucuacuagugcugaccaacaaagucucuaucagaaugcagaugcauauguuuuuguggggacaucaagauacagcaagaaguucaagccggaaauagcaauaagacccaaagugagggaucaagaagggagaaugaacuauuacuggacacuaguagagccgggagacaaaauaacauucgaagcaacuggaaaucuagugguaccgagauaugcauucgcaauggaaagaaaugcuggaucugguauuaucauuucagauacaccaguccacgauugcaauacaacuugucagacacccaagggugcuauaaacaccagccucccauuucagaauauacauccgaucacaauuggaaaauguccaaaauauguaaaaagcacaaaauugagacuggccacaggauugaggaauaucccgucuauucaaucuagaggccuauuuggggccauugccgguuucauugaagggggguggacagggaugguagauggaugguacgguuaucaccaucaaaaugagcaggggucaggauaugcagccgaccugaagagcacacagaaugccauugacgagauuacuaacaaaguaaacucuguuauugaaaagaugaauacacaguucacagcaguagguaaagaguucaaccaccuggaaaaaagaauagagaauuuaaauaaaaagguugaugaugguuuccuggacauuuggacuuacaaugccgaacuguugguucuauuggaaaaugaaagaacuuuggacuaccacgauucaaaugugaagaacuuauaugaaaagguaagaagccaguuaaaaaacaaugccaaggaaauuggaaacggcugcuuugaauuuuaccacaaaugcgauaacacgugcauggaaagugucaaaaaugggacuuaugacuacccaaaauacucagaggaagcaaaauuaaacagagaagagauagaugggguaaagcuggaaucaacaaggauuuaccagauuuuggcgaucuauucaacugucgccaguucauugguacugguagucucccugggggcaaucaguuucuggaugugcucuaaugggucucuacaguguagaauauguauuuaa

SEQ ID NO: 37581 - RNA, 1701 nt, Artificial Sequence; identical to SEQ ID NO: 36330
  derived and/or modified CDS sequence (wt) from hemagglutinin__InfluenzaA__ADM13171

SEQ ID NO: 37582 - RNA, 1701 nt, Artificial Sequence; identical to SEQ ID NO: 36330
  derived and/or modified CDS sequence (wt) from hemagglutinin__InfluenzaA__ADM13181

SEQ ID NO: 37583 - RNA, 1701 nt, Artificial Sequence
  derived and/or modified CDS sequence (wt) from hemagglutinin__InfluenzaA__ADM13191
augaaggcaauacuaguaguucugcuauauacacuugcaaccgcaaaugcagacacauuauguauagguuaucaugcgaacaauucaacagacacuguagacacaguacuagaaaagaauguaacaguaacacacucuguuaaccuucuagaagacaagcauaacgggaaacuaugcaaacuaagagggguagccccauugcauuuggguaaauguaacauugcuggcuggauccugggaaauccagagugugaaucacucuccacagcaagcucaugguccuacauuguggaaacaucuaguucagacaauggaacguguuacccaggagauuucaucgauuaugaggagcuaagagagcaauuaagcucagugucaucauuugaaagguuugagauauuccccaagacaaguucauggcccaaucaugacucgaacaaagguguaacggcagcauguccucaugcuggagcaaaaagcuucuacaaaaauuuaauauggcuaguuaaaaaaggaaauucauacccaaagcucagcaaauccuacauuaaugauaaagggaaagaaguccucgugcuauggggaauucaccauccaucuacuagugcugaccaacaaagucucuaucagaaugcagaugcauauguuuuuguggggacaucaagauacagcaagaaguucaagccggaaauagcaauaagacccaaagugagggaucaagaagggagaaugaacuauuacuggacacuaguagagccgggagacaaaauaacauucgaagcaacuggaaaucuagugguaccgagauaugcauucgcaauggaaagaaaugcuggaucugguauuaucauuucagauacaccaguccacgauugcaauacaacuugucagacacccaagggugcuauaaacaccagccucccauuucagaauauacauccgaucacaauuggaaaauguccaaaauauguaaaaagcacaaaauugaggcuggccacaggauugaggaaugucccgucuauucaaucuagaggccuauuuggggccauugccgguuucauugaagggggguggacagggaugguagauggaugguacgguuaucaccaucaaaaugagcaggggucaggauaugcagccgaccugaagagcacacagcaugccauugacgagauuacuaacaaaguaaauucuguuauugaaaagaugaauacacaguucacagcaguagguaaagaguucaaccaccuggaaaaaagaauagagaauuuaaauaaaaaaguugaugaugguuuccuggacauuuggacuuacaaugccgaacuguugguucuauuggaaaaugaaagaacuuuggacuaccacgauucaaaugugaagaacuuauaugaaaagguaagaagccaguuaaaaaacaaugccaaggaaauuggaaacggcugcuuugaauuuuaccacaaaugcgauaacacgugcauggaaagugucaaaaaugggacuuaugacuacccaaaauacucagaggaagcaaaauuaaacagagaagaaauagaugggguaaagcuggaaucaacaaggauuuaccagauuuuggcgaucuauucaacugucgccaguucauugguacugguagucucccugggggcaaucaguuucuggaugugcucuaaugggucucuacaguguagaauauguauuuaa

SEQ ID NO: 37584 - RNA, 1701 nt, Artificial Sequence
  derived and/or modified CDS sequence (wt) from hemagglutinin__InfluenzaA__ADM13211
augaaggcaauacuaguaguucugcuauauacacuugcaaccgcaaaugcagacacauuauguauagguuaucaugcgaacaauucaacagacacuguagacacaguacuagaaaagaauguaacaguaacacacucuguuaaccuucuagaagacaagcauaacgggaaacuaugcaaacuaagagggauagccccauugcauuuggguaaauguaacauugcuggcuggauccugggaaauccagagugugaaucacucuccacagcaagcucaugguccuacauuguggaaacaucuaguucagacaauggaacguguuacccaggagauuucaucgauuaugaggagcuaagagagcaauugagcucagugucaucauuugaaagguuugagauauuccccaagacaaguucauggcccaaucaugacucgaacaaagguguaacggcagcauguccucaugcuggagcaaaaagcuucuacaaaaauuuaauauggcuaguuaaaaaaggaaauucauacccaaagcucagcaaauccuacauuaaugauaaagggaaagaaguccucgugcuauggggcauucaccauccaucuacuagugcugaccaacaaagucucuaucagaaugcagaugcauauguuuuuguggggacaucaagauacagcaagaaguucaagccggaaauagcaauaagacccaaagugagggaucaagaagggagaaugaacuauuacuggacacuaguagagccgggagacaaaauaacauucgaagcaacuggaaaucuagugguaccgagauaugcauucgcaauggaaagaaaugcuggaucugguauuaucauuucagauacaccaguccacgauugcaauacaacuugucagacacccaagggugcuauaaacaccagccucccauuucagaauauacauccgaucacaauuggaaaauguccaaaauauguaaaaagcacaaaauugagacuggccacaggauugaggaaugucccgucuauucaaucuagaggccuauuuggggccauugccgguuucauugaagggggguggacagggaugguagauggaugguacgguuaucaccaucaaaaugagcaggggucaggauaugcagccgaccugaagagcacacagaaugccauugacgagauuacuaacaaaguaaauucuguuauugaaaagaugaauacacaguucacagcaguagguaaagaguucaaccaccuggaaaaaagaauagagaauuuaaauaaaaaaguugaugaugguuuccuggacauuuggacuuacaaugccgaacuguugguucuauuggaaaaugaaagaacuuuggacuaccacgauucaaaugugaagaacuuauaugaaaagguaagaagccaguuaaaaaacaaugccaaggaaauuggaaacggcugcuuugaauuuuaccacaaaugcgauaacacgugcauggaaagugucaaaaaugggacuuaugacuacccaaaauacucagaggaagcaaaauuaaacagagaagaaauagaugggguaaagcuggaaucaacaaggauuuaccagauuuuggcgaucuauucaacugucgccaguucauugguacugguagucucccugggggcaaucaguuucuggaugugcucuaaugggucucuacaguguagaauauguauuuaa

SEQ ID NO: 37585 - RNA, 1701 nt, Artificial Sequence; identical to SEQ ID NO: 37584
  derived and/or modified CDS sequence (wt) from hemagglutinin__InfluenzaA__ADM13221

SEQ ID NO: 37586 - RNA, 1701 nt, Artificial Sequence
  derived and/or modified CDS sequence (wt) from hemagglutinin__InfluenzaA__ADM13231
augaaggcaauacuaguaguucugcuauauacauuugaaaccgcaaaugcagacacauuauguauagguuaucaugcgaacaauucaacagacacuguagacacaguacuagaaaagaauguaacaguaacacacucuguuaaccuucuagaagacaagcauaacgggaaacuaugcaaacuaagagggguagccccauugcauuuggguaaauguaacauugcuggcuggauccugggaaauccagagugugaaucacucuccacagcaagcucaugguccuacauuguggaaacaucuaguucagacaauggaacguguuacccaggagauuucaucaauuaugaggagcuaagagagcaauugagcucagugucaucauuugaaagguuugagauauuccccaagacaaguucauggcccaaucaugacucgaacaaagguguaacggcagcauguccucaugcuggagcaaaaagcuucuacaaaaauuuaauauggcuaguuaaaaaaggaaauucauacccaaagcucagcaaauccuacauuaaugauaaagggaaagaaguccucgugcuauggggcauucaccauccaucuacuagugcugaccaacaaagucucuaucagaaugcagaugcauauguuuuuguggggacaucaagauacagcaagaaguucaagccggaaauagcaauaagacccaaagugagggaucaagaagggagaaugaacuauuacuggacacuaguagagccgggagacaaaauaacauucgaagcaacuggaaaucuagugguaccgagauaugcauucgcaauggaaagaaaugcuggaucugguauuaucaucucagauacaccaguccacgauugcaauacaacuugucagacacccaauggugcuauaaacaccagccucccauuucagaauauacauccgaucacaauuggaaaauguccaaaauauguaaaaagcacaaaauugagacuggccacaggauugaggaaugucccgucuauucaaucuagaggccuauuuggggccauugccgguuucauugaagggggguggacagggaugguagauggaugguacgguuaucaccaucaaaaugagcaggggucaggauaugcagccgaccugaagagcacacagaaugccauugacaagauuacuaacaaaguaaauucuguuauugaaaagaugaauacacaguucacagcaguagguaaagaguucaaccaccuggaaaaaagaauagagaauuuaaauaaaaaaguugaugaugguuuccuggacauuuggacuuacaaugccgaacuguugguucuauuggaaaaugaaagaacuuuggacuaccacgauucaaaugugaagaacuuauaugaaaagguaagaagccaguuaaaaaacaaugccaaggaaauuggaaacggcugcuuugaauuuuaccacaaaugcgauaacacgugcauggaaagugucaaaaaugggacuuaugacuacccaaaauacucagaggaagcaaaauuaaacagagaagaaauagaugggguaaagcuggaaucaacaaggauuuaccagauuuuggcgaucuauucaacugucgccaguucauugguacugguagucucccugggggcaaucaguuucuggaugugcucuaaugggucucuacaguguagaauauguauuuaa

SEQ ID NO: 37587 - RNA, 1701 nt, Artificial Sequence; identical to SEQ ID NO: 36851
  derived and/or modified CDS sequence (wt) from hemagglutinin__InfluenzaA__ADM13241

SEQ ID NO: 37588 - RNA, 1701 nt, Artificial Sequence
  derived and/or modified CDS sequence (wt) from hemagglutinin__InfluenzaA__ADM13251
augaaggcaauacuaguaguucugcuauauacauuugcaaccacaaaugcagacacauuauguauagguuaucaugcgaacaauucaacagacacuguagacacaguacuagaaaagaauguaacaguaacacacucuguuaaccuucuagaagacaagcauaacgggaaacuaugcaaacuaagagggguagccccauugcauuuggguaaauguaacauugcuggcuggauccugggaaauccagagugugaaucacucuccacagcaagcucaugguccuacauuguggaaacgucuaguucagacaauggaacguguuacccaggagauuucaucgauuaugaggagcuaagagagcaauugagcucagugucaucauuugaaagguuugagauauuccccaagacaaguucauggcccaaucaugacucgaacaaagguguaacggcagcauguccucaugcuggagcaaaaagcuucuacaaaaauuuaauauggcuaguuaaaaaaggaaauucauacccaaagcucagcaaauccuacauuaaugauaaagggaaagaaguccucgugcuauggggcauucaccauccaucuacuagugcugaccaacaaagucucuaucagaaugcagaugcauauguuuuuguggggacaucaagauacagcaagaaguucaagccggaaauagcaauaagacccaaagugagggaucaagaagggagaaugaacuauuacuggacacuaguagagccgggagacaaaauaacauucgaagcaacuggaaaucuagugguaccgagauaugcauucgcaauggaaagagaugcuggaucugguauuaucauuucagauacaccaguccacgauugcaauacaacuugucagacacccaagggugcuauaaacaccagccucccauuucagaauauacauccgaucacaauuggaaaauguccaaaauauguaaaaagcacaaaauugagacuggccacaggauugaggaaugucccgucuauucaaucuagaggccuauuuggggccauugccgguuucauugaagggggguggacagggaugguagauggaugguacgguuaucaccaucaaaaugagcaggggucaggauaugcagccgaccugaagagcacacagaaugccauugacaagauuacuaacaaaguaaauucuguuauugaaaagaugaauacacaguucacagcaguagguaaagaguucaaccaccuggaaaaaagaauagagaauuuaaauaaaaaaguugaugaugguuuccuggacauuuggacuuacaaugccgaacuguugguucuauuggaaaaugaaagaacuuuggacuaccacgauucaaaugugaagaacuuauaugaaaagguaagaagccaguuaaaaaacaaugccaaggaaauuggaaacggcugcuuugaauuuuaccacaaaugcgauaacacgugcauggaaagugucaaaaaugggacuuaugacuacccaaaauacucagaggaagcaaaauuaaacagagaagaaauagaugggguaaagcuggaaucaacaaggauuuaccagauuuuggcgaucuauucaacugucgccaguucauugguacugguagucucccugggggcaaucaguuucuggaugugcucuaaugggucucuacaguguagaauauguauuuaa

SEQ ID NO: 37589 - RNA, 1701 nt, Artificial Sequence
  derived and/or modified CDS sequence (wt) from hemagglutinin__InfluenzaA__ADM13261
augaaggcaauacuaguaguucugcuauauacauuugcaaccgcaaaugcagacacauuauguauagguuaucaugcgaacaauucaacagacacuguagacacaguacuagaaaagaauguaacaguaacacacucuguuaaccuucuagaagacaagcauaacgggaaacuaugcaaacuaagagggauagccccauugcauuuggguaaauguaacauugcuggcuggauccugggaaauccagagugugaaucacucuccacagcaagcucaugguccuacauuguggaaacaucugguucagacaauggaacguguuacccaggagauuucaucgauuaugaggagcuaagagagcaauugagcucagugucaucauuugaaagguuugagauauuccccaagacaaguucauggcccaaucaugacucgaacaaagguguaacggcagcauguccucaugcuggagcaaaaagcuucuacaaaaauuuaauauggcuaguuaaaaaaggaaauucauacccaaagcucagcaaauccuacauuaaugauaaagggaaagaaguccucgugcuauggggcauucaccauccaucuacuagugcugaccaacaaagucucuaucagaaugcagaugcauauguuuuuguggggacaucaagauacagcaagaaguucaagccggaaauagcaauaagacccaaagugagggaucaagaagggagaaugaacuauuacuggacacuaguagagccgggagacaaaauaacauucgaagcaacuggaaaucuagugguaccgagauaugcauucgcaauggaaagaaaugcuggaucuggcauuaucauuucagauacaccaguccacgauugcaauacaacuugucagacacccaagggugcuauaaacaccagccucccauuucagaauauacauccgaucacaauuggaaaauguccaaaauauguaaaaagcacaaaauugagacuggccacaggauugaggaaugucccgucuauucaaucuagaggccuauuuggggccauugccgguuucauugaagggggguggacagggaugguagauggaugguacgguuaucaccaucaaaaugagcaggggucaggauaugcagccgaccugaagagcacacagaaugccauugacgagauuacuaacaaaguaaauucuguuauugaaaagaugaauacacaguucacagcaguagguaaagaguucaaccaccuggaaaaaagaauagagaauuuaaauaaaaaaguugaugaugguuuccuggacauuuggacuuacaaugccgaacuguugguucuauuggaaaaugaaagaacuuuggacuaccacgauucaaaugugaagaacuuauaugaaaagguaagaagccaguuaaaaaacaaugccaaggaaauuggaaauggcugcuuugaauuuuaccacaaaugcgauaacacgugcauggaaagugucaaaaaugggacuuaugacuacccaaaauacucagaggaagcaaaauuaaacagagaagaaauagaugggguaaagcuggaaucaacaaggauuuaccagauuuuggcgaucuauucaacugucgccaguucauugguacugguagucucccugggggcaaucaguuucuggaugugcucuaaugggucucuacaguguagaauauguauuuaa

SEQ ID NO: 37590 - RNA, 1701 nt, Artificial Sequence
  derived and/or modified CDS sequence (wt) from hemagglutinin__InfluenzaA__ADM13271
augaaggcaauacuaguaguucugcuauauacauuugcaaccgcaaaugcagacacauuauguauagguuaucaugcgaacaauucaacagacacuguagacacaguacuagaaaagaauguaacaguaacacacucuguuaaccuucuagaagacaagcauaacgggaaacuaugcaaacuaagagggguagccccauugcauuuggguaaauguaacauugcuggcuggauccugggaaauccagagugugaaucacucuccacagcaagcucaugguccuacauuguggaaacgucuaguucagacaauggaacguguuacccaggagauuucaucgauuaugaggagcuaagagagcaauugagcucagugucaucauuugaaagguuugagauauuccccaagacaaguucauggcccaaucaugacucgaacaaagguguaacggcagcauguccucaugcuggagcaaaaagcuucuacaaaaauuuaauauggcuaguuaaaaaaggaaauucauacccaaagcucagcaaauccuacauuaaugauaaagggaaagaaguccucgugcuauggggcauucaccauccaucuacuagugcugaccaacaaagucucuaucagaaugcagaugcauauguuuuuguggggacaucaagauacagcaagaaguucaagccggaaauagcaauaagacccaaagugagggaucaagaagggagaaugaacuauuacuggacacuaguagagccgggagacaaaauaacauucgaagcaacuggaaaucuagugguaccgagauaugcauucgcaauggaaagaaaugcuggaucugguauuaucauuucagauacaccaguccacgauugcaauacaacuugucagacacccaagggugcuauaaacaccagccucccauuucagaauauacauccgaucacaauuggaaaauguccaaaauauguaaaaagcacaaaauugagacuggccacaggauugaggaaugucccgucuauucaaucuagaggccuauuuggggccauugccgguuucauugaagggggguggacagggaugguagauggaugguacgguuaucaccaucaaaaugagcaggggucaggauaugcagccgaccugaagagcacacagaaugccauugacaagauuacuaacaaaguaaauucuguuauugaaaagaugaauacacaguucacagcaguagguaaagaguucaaccaccuggaaaaaagaauagagaauuuaaauaaaaaaguugaugaugguuuccuggacauuuggacuuacaaugccgaacuguugguucuauuggaaaaugaaagaacuuuggacuaccacgauucaaaugugaagaacuuauaugaaaagguaagaagccaguuaaaaaacaaugccaaggaaauuggaaacggcugcuuugaauuuuaccacaaaugcgauaacacgugcauggaaagugucaaaaaugggacuuaugacuacccaaaauacucagaggaagcaaaauuaaacagagaagaaauagaugggguaaagcuggaaucaacaaggauucaccagauuuuggcgaucuauucaacugucgccaguucauugguacugguagucucccugggggcaaucaguuucuggaugugcucuaaugggucucuacaguguagaauauguauuuaa

SEQ ID NO: 37591 - RNA, 1701 nt, Artificial Sequence; identical to SEQ ID NO: 37586
  derived and/or modified CDS sequence (wt) from hemagglutinin__InfluenzaA__ADM13281

SEQ ID NO: 37592 - RNA, 1701 nt, Artificial Sequence
  derived and/or modified CDS sequence (wt) from hemagglutinin__InfluenzaA__ADM13291
augaaggcaauacuaguaguucugcuauauacauuugcaaccgcaaaugcagacacauuauguauagguuaucaugcgaacaauucaacagacacuguagacacaguacuagaaaagaauguaacaguaacacacucuguuaaccuucuagaagacaagcauaacgggaaacuaugcaaacuaagagggguagccccauugcauuuggguaaauguaacauugcuggcuggauccugggaaauccagagugugaaucacucuccacagcaagcucaugguccuacauuguggaaacaucuaguucagacaauggaacguguuacccaggagauuucaucgauuaugaggagcuaagagagcaauugagcucagugucaucauuugaaagguuugagauauuccccaagacaaguucauggcccaaucaugacucgaacaaagguguaacggcagcauguccucaugcuggagcaaaaagcuucuacaaaaauuuaauauggcuaguuaaaaaaggaaauucauacccaaagcucagcaaauccuacauuaaugauaaaggcaaagaaguccucgugcuauggggcauucaccauccaucuacuagugcugaccaacaaagucuuuaucagaaugcagaugcauauguuuuuguggggacaucaagauacagcaagaaguucaagccggaaauagcaauaagacccaaagugagggaucaagaagggagaaugaacuauuacuggacacuaguagagccgggagacaaaauaacauucgaagcaacuggaaaucuagugguaccgagauaugcauucgcaauggaaagaaaugcuggaucugguauuaucauuucagauacaccaguccacgauugcaauacaacuugucagacacccaagggugcuauaaacaccagccucccauuucagaauauacauccgaucacaauuggaaaauguccaaaauauguaaaaagcacaaaauugagacuggccacaggauugaggaauaucccgucuauucaaucuagaggccuauuuggggccauugccgguuucauugaagggggguggacagggaugguagauggaugguacgguuaucaccaucaaaaugagcaggggucaggauaugcagccgaccugaagagcacacagaaugccauugacgagauuacuaacaaaguaaauucuguuauugaaaagaugaauacacaguucacagcaguagguaaagaguucaaccaccuggaaaaaagaauagagaauuuaaauaaaaaaguugaugaugguuuccuggacauuuggacuuacaaugccgaacuguugguucuauuggaaaaugaaagaacuuuggacuaccacgauucaaaugugaagaacuuauaugaaaagguaagaagccaguuaaaaaacaaugccaaggaaauuggaaacggcugcuuugaauuuuaccacaaaugcgauaacacgugcauggaaagugucaaaaaugggacuuaugacuacccaaaauacucagaggaagcaaaauuaaacagagaagaaauagaugggguaaagcuggaaucaacaaggauuuaccagauuuuggcgaucuauucaacugucgccaguucauugguacugguagucucccugggggcaaucaguuucuggaugugcucuaaugggucucuacaguguagaauauguauuuaa

SEQ ID NO: 37593 - RNA, 1701 nt, Artificial Sequence
  derived and/or modified CDS sequence (wt) from hemagglutinin__InfluenzaA__ADM13301
augaaggcaauacuaguaguucugcuauauacauuugcaaccgcaaaugcagacacauuauguauagguuaucaugcgaacaauucaacagacacuguagacacaauacuagaaaagaauguaacaguaacacacucuguuaaccuucuagaagacaagcauaacgggaaacuaugcaaacuaagagggguagccccauugcauuuggguaaauguaacauugcuggcuggauccugggaaauccagagugugaaucacucuccacagcaagcucaugguccuacauuguggaaacaucuaguucagacaauggaacguguuacccaggagauuucaucgauuaugaggagcuaagagagcaauugagcucagugucaucauuugaaagguuugagauauuccccaagacaaguucauggcccaaucaugacucgaacaaagguguaacggcagcauguccucaugcuggagcaaaaagcuucuacaaaaauuuaauauggcuaguuaaaaaagaaaauucauacccaaagcucagcaaauccuacauuaaugacaaagggaaagaaguccucgugcuauggggcauucaccauccaucuacuagugcugaccaacaaagucucuaucagaauguagaugcauauguuuuuguggggacaucaagauacagcaagaaguucaagccggaaauagcaauaagacccaaagugagggaucaagaagggagaaugaacuauuacuggacacuaguagagccgggagacaaaauaacauucgaagcaacuggaaaucuagugguaccgagauaugcauuugcaauggaaagaaaugcuggaucugguauuaucauuucagauacaccaguccacgauugcaauacaacuugucagacacccaagggugcuauaaacaccagccucccauuucagaauauacauccgaucacaauuggaaaauguccaaaauauguaaaaagcacaaaauugagacuggccacaggauugaggaaugucccgucuauucaaucuagaggccuauuuggggccauugccgguuucauugaagggggguggacagggaugguagauggaugguacgguuaucaccaucaaaaugagcaggggucaggauaugcagccgaccugaagagcacacagaaugccauugacgagauuacuaacaaaguaaauucuguuauugaaaagaugaauacacaguucacagcaguagguaaagaguucaaccaccuggaaaaaagaauagagaauuuaaauaaaaagguugaugaugguuuccuggacauuuggacuuacaaugccgaacuguugguucuauuggaaaaugaaagaacuuuggacuaccacgauucaaaugugaagaauuuauaugaaaagguaagaagccaguuaaaaaacaaugccaaggaaauuggaaacggcugcuuugaauuuuaccacaaaugcgauaacacgugcauggaaagugucaaaaaugggacuuaugacuacccaaaauacucagaggaagcaaaauuaaauagagaagaaauagaugggguaaagcuggaaucaacaaggauuuaccagauuuuggcgaucuauucaacugucgccaguucauugguacugguagucucccugggggcaaucaguuucuggaugugcucuaaugggucuuuacaguguagaauauguauuuaa

SEQ ID NO: 37594 - RNA, 1701 nt, Artificial Sequence
  derived and/or modified CDS sequence (wt) from hemagglutinin__InfluenzaA__ADM13311
augaaggcaauacuaguaguucugcuauauacauuugcaaccgcaaaugcagacacauuauguauagguuaucaugcgaacaauucaacagacacuguagacacaauacuagaaaagaauguaacaguaacacacucuguuaaccuucuagaaaacaagcauaacgggaaacuaugcaaacuaagagggguauccccauugcauuuggguaaauguaacauugcuggcuggauccugggaaauccagagugugaaucacucuccacagcaagcucaugguccuacauuguggaaacaucuaguucagacaauggaacguguuacccaggagauuucaucgauuaugaggagcuaagagagcaauugagcucagugucaucauuugaaagguuugagauauuccccaagacaaguucauggcccaaucaugacucgaacaaagguguaacggcagcauguccucaugcuggagcaaaaagcuucuacaaaaauuuaauauggcuaguuaaaaaaggaaauucauacccaaagcucagcaaauccuacauuaaugauaaagggaaagaaguccucgugcuauggggcauucaccauccaucuacuagugcugaccaacaaagucucuaucagaaugcagaugcauauguuuuuguggggacaucaagauacagcaagaaguucaagccggaaauagcaauaagacccaaagugagggaucaagaagggagaaugaacuauuacuggacacuaguagagccgggagacaaaauaacauucgaagcaacuggaaaucuagugguaccgagauaugcauucgcaauggaaagaaaugcuggaucugguauuaucauuucagauacaccaguccacgauugcaauacaacuugucagacacccaagggugcuauaaacaccagccucccauuucagaauauacauccgaucacaauuggaaaauguccaaaauauguaaaaagcacaaaauugagacuggccacaggauugaggaaugucccgucuauucaaucuagaggccuauuuggggccauugccgguuucauugaagggggauggacagguaugguagauggaugguacgguuaucaccaucaaaaugagcaggggucaggauaugcagccgaccugaagagcacacagaaugccauugacgagauuacuaacaaaguaaauucuguuauugaaaagaugaauacacaguucacagcaguagguaaagaguucaaccaccuggaaaaaagaauagagaauuuaaauaaaaagguugaugaugguuuccuggacauuuggacuuacaaugccgaacuguugguucuauuggaaaaugaaagaacuuuggacuaccacgauucaaaugugaagaacuuauaugaaaagguaagaagccaguuaaaaaacaaugccaaggaaauuggaaacggcugcuuugaauuuuaccacaaaugcgauaacacgugcauggaaagugucaaaaaugggacuuaugacuacccaaaauacucagaggaagcaaaauuaaacagagaagaaauagaugggguaaagcuggaaucaacaaggauuuaccagauuuuggcgaucuauucaacugccgccaguucauugguacugguagucucccugggggcaaucaguuucuggaugugcucuaaugggucucuacaguguagaauauguauuuaa

SEQ ID NO: 37595 - RNA, 1701 nt, Artificial Sequence
  derived and/or modified CDS sequence (wt) from hemagglutinin__InfluenzaA__ADM13321
augaaggcaauacuaguaguucugcuauauacauuugcaacagcaaaugcagacacauuauguauagguuaucaugcgaacaauucaacagacacuguagacacaguacuagaaaagaauguaacaguaacacacucuguuaaccuucuagaagacaagcauaacgggaaacuaugcaaacuaagagggguagccccauugcauuuggguaaauguaacauugcuggcuggauccugggaaauccagagugugaaucacucuccacagcaagcucaugguccuacauuguggaaacaucuaguucagacaauggaacguguuacccaggagauuucaucgauuaugaggagcuaagagagcaauugagcucagugucaucauuugaaagguuugagauauuccccaagacaaguucauggcccaaucaugacucgaacaaagguguaacggcagcauguccucaugcuggagcaaaaagcuucuacaaaaauuuaauauggcuaguuaaaaaaggaaauucauacccaaagcucagcaaauccuacauuaaugauaaagggaaagaaguccucgugcuauggggcauucaccauccaucuacuagugcugaccaacaaagucucuaucagaaugcagaugcauauguuuuuguggggacaucaagauauagcaagaaguucaagccggaaauagcaauaagacccaaagugagggaucaagaagggagaaugaacuacuacuggacacuaguagagccgggagacaaaauaacauucgaagcaacuggaaaucuagugguaccgagauaugcauucgcaauggaaagaaaugcuggaucugguauuaucauuucagauacaccaguccacgauugcaauacaacuugucagacacccaagggugcuauaaacaccagccucccauuucagaauauacauccgaucacaauuggaaaauguccaaaauauguaaaaagcacaaaauugagacuggccacaggauugaggaaugucccgucuauucaaucuagaggccuauuuggggccauugccgguuucauugaagggggguggacagggaugguagauggaugguacgguuaucaccaucaaaaugagcaggggucaggauaugcagccgaccugaagagcacacagaaugccauugacaagauuacuaacaaaguaaauucuguuauugaaaagaugaauacacaguucacagcaguagguaaagaguucaaccaccuggaaaaaagaauagagaauuuaaauaaaaaaguugaugaugguuuccuggacauuuggacuuacaaugccgaacuguugguucuauuggaaaaugaaagaacuuuggacuaccacgauucaaaugugaagaacuuauaugaaaagguaagaagccaguuaaaaaacaaugccaaggaaauuggaaacggcugcuuugaauuuuaccacaaaugcgauaacacgugcauggaaagugucaaaaaugggacuuaugacuaccccaaauacucagaggaagcaaaauuaaacagagaagaaauagauggggugaagcuggaaucaacaaggauuuaccagauuuuggcgaucuauucaacugucgccaguucauugguacugguagucucccugggggcaaucaguuucuggaugugcucuaaugggucucuacaguguagaauauguauuuaa

SEQ ID NO: 37596 - RNA, 1701 nt, Artificial Sequence
  derived and/or modified CDS sequence (wt) from hemagglutinin__InfluenzaA__ADM13331
augaaggcaauacuaguaguucugcuauauacauuugcaaccgcaaaugcagacacauuauguauagguuaucaugcgaacaauucaacagacacuguagacacaguacuagaaaagaauguaacaguaacacacucuguuaaccuucuagaagacaagcauaacgggaaacuaugcaaacuaagagggguagccccauugcauuuggguaaauguaacauugcuggcuggauccugggaaauccagagugugaaucacucuccacagcaagcucaugguccuacauuguggaaacaucuaguucagacaauggaacguguuacccaggagauuucaucgauuaugaggagcuaagagagcaauugagcucagugucaucauuugaaagguuugagauauuccccaagacaaguucauggcccgaucaugacucgaacaaagguguaacggcagcauguccucaugcuggagcaaaaagcuucuacaaaaauuuaauauggcuaguuaaaaaaggaaauucauacccaaagcucagcaaauccuauauuaaugauaaagggaaagaaguccucgugcuauggggcauucaccauccaucuacuagugcugaccaacaaagucucuaucagaaugcagaugcauauguuuuuguggggacaucaagauacagcaagaaguucaagccggaaauagcaauaagacccaaagugagggaucaagaagggagaaugaacuauuacuggacacuaguagagccgggagacaaaauaacauucgaagcaacuggaaaucuagugguaccgagauaugcauucgcaauggaaagaaaugcuggaucugguauuaucauuucagauacaccaguccacgauugcaauacaacuugucagacacccaagggugcuauaaacaccagccucccauuucagaauauacauccgaucacaauuggaaaauguccaaaauauguaaaaagcacaaaauugagacuggccacaggauugaggaaugucccgucuauucaaucuagaggccuauuuggggccauugccgguuucauugaagggggguggacagggaugguagauggaugguacgguuaucaccaucaaaaugagcaggggucaggauaugcagccgaccugaagagcacacagaaugccauugacaagauuacuaacaaaguaaauucuguuauugaaaagaugaauacacaguucacagcaguagguaaagaguucaaccaccuggaaaaaagaauagagaauuuaaauaaaaaaguugaugaugguuuccuggacauuuggacuuacaaugccgaacuguugguucuauuggaaaaugaaagaacuuuggacuaccacgauucaaaugugaagaacuuauaugaaaagguaagaagccaguuaaaaaacaaugccaaggaaauuggaaacggcugcuuugaauuuuaccacaaaugcgauaacacgugcauggaaagugucaaaaaugggacuuaugacuacccaaaauacucagaggaagcaaaauuaaacagagaagaaauagaugggguaaagcuggaaucaacaaggauuuaccagauuuuggcgaucuauucaacugucgccaguucauugguacugguagucucccugggggcaaucaguuucuggaugugcucuaaugggucucuacaguguagaauauguauuuaa

SEQ ID NO: 37597 - RNA, 1701 nt, Artificial Sequence
  derived and/or modified CDS sequence (wt) from hemagglutinin__InfluenzaA__ADM13341
augaaggcaauacuaguaguucugcuauauacauuugcaaccgcaaaugcagacacauuauguauagguuaucaugcgaacaauucaacagacacuguagacacaguacuagaaaagaauguaacaguaacacacucuguuaaccuucuagaagacaagcauaacgggaaacuaugcaaacuaagagggguagccccauugcauuuggguaaauguaacauugcuggcuggauccugggaaauccagagugugaaucacucuccacagcaagcucaugguccuacauuguggaaacaucuaguucagacaauggaacguguuacccaggagauuucaucgauuaugaggagcuaagagagcaauugagcucagugucaucauuugaaagguuugagauauuccccaagacaaguucauggcccaaucaugacucgaacaaagguguaacggcagcauguccucaugcuggagcaaaaagcuucuacaaaaauuuaauauggcuaguuaaaaaaggaaauucauacccaaagcucagcaaauccuacaucaaugauaaagggaaagaaguccucgugcuauggggcauucaccauccaucuacuagugcugaccaacaaagucucuaucagaaugcagauucauauguuuuuguggggacaucaagauacagcaagaaauucaaaccggaaauagcaauaagacccaaagugagggaucaagaagggagaaugaacuauuacuggacacuaguagagccgggagacaaaauaacauucgaagcaacuggaaaucuagugguaccgagauaugcauucgcaauggaaagaaaugcuggaucugguauuaucauuucagauacaccaguccacgauugcaauacaacuugucagacacccgagggugcuauaaacaccagccucccauuucagaauauacauccgaucacaauuggaaaauguccaaaauauguaaaaagcacaaaauugagacuggccacaggauugaggaaugucccgucuauucaaucuagaggccuauuuggggccauugccgguuucauugaagggggguggacagggaugguagauggaugguacgguuaucaccaucaaaaugagcaggggucaggauaugcagccgaccugaagagcacacagaaugccauugacgagauuacuaacaaaguaaauucuguuauugaaaagaugaauacacaguucacagcaguagguaaagaguucaaccaccuggaaaaaagaauagagaauuuaaauaaaaaaguugaugaugguuuccuggacaucuggacuuacaaugccgaacuguugguucuauuggaaaaugaaagaacuuuggacuaccacgauucaaaugugaagaacuuauaugaaaagguaagaagccaguuaaaaaacaaugccaaggaaauuggaaacggcugcuuugaauuuuaccacaaaugcgauaacacgugcauggaaagugucaaaaaugggacuuaugacuacccaaaauacucagaggaagcaaaauuaaacagagaagaaauagaugggguaaagcuggaaucaacaaggauuuaccagauuuuggcgaucuauucaacugucgccaguucauugguacugguagucucccugggggcaaucaguuucuggaugugcucuaaugggucucuacaguguagaauauguauuuaa

SEQ ID NO: 37598 - RNA, 1701 nt, Artificial Sequence
  derived and/or modified CDS sequence (wt) from hemagglutinin__InfluenzaA__ADM13351
augaaggcaauacuaguaguucugcuauauacauuugcaaccgcaaaugcagacacauuauguauagguuaucaugcgaacaauucaacagacacuguagacacaguacuagaaaagaauguaacaguaacacacucuguuaaccuucuagaagacaagcauaacgggaaacuaugcaaacuaagagggguagccccauugcauuuggguaaauguaacauugcuggcuggauccugggaaauccagagugugaaucacucuccacagcaagcucaugguccuacauuguggaaacaucuaguucagacaauggaacguguuacccaggagauuucaucgauuaugaggagcuaagagagcaauugagcucagugucaucauuugaaagguuugagauauuccccaagacaaguucauggcccaaucaugacucgaacaaagguguaacggcagcaugcccucaugcuggagcaaaaagcuucuacaaaaauuuaauauggcuaguuaaaaaaggaaauucauacccaaagcucagcaaauccuacauuaaugauaaagggaaagaaguccucgugcuauggggcauucaccauccaucuacuagugcugaccaacaaagucucuaucagaaugcagaugcauaugcuuuuguggggacaucaagauacagcaagaaguucaagccggaaauagcaauaagacccaaagugagggaucaagaagggagaaugaacuauuacuggacacuaguagagccgggagacaaaauaacauucgaagcaacuggaaaucuagugguaccgagauaugcauucgcaauggaaagaaaugcuggaucugguauuaucauuucagauacaccaguccacgauugcaauacaacuugucagacacccaagggugcuauaaacaccagccucccauuucagaauauacauccgaucacaauuggaaaauguccaaaauauguaaaaagcacaaaauugagacuggccacaggauugaggaaugucccgucuauucaaucuagaggccuauuuggggccauugccgguuucauugaagggggguggacagggaugguagauggaugguacgguuaucaccaucaaaaugagcaggggucaggauaugcagccgaccugaagagcacacagaaugccauugacgagauuacuaacaaaguaaauucuguuauugaaaagaugaauacacaguucacagcaguagguaaagaguucaaccaccuggaaaaaagaauagagaauuuaaauaaaaaaguugaugaugguuuccuggacauuuggacuuacaaugccgaacuguugguuuuauuggaaaaugaaagaacuuuggacuaccacgauucaaaugugaagaacuuauaugaaaagguaagaagccaguuaaaaaacaaugccaaggaaauuggaaacggcugcuuugaauuuuaccacaaaugcgauaacacgugcauggaaagugucaaaaaugggacuuaugacuacccaaaauacucagaggaagcaaaauuaaacagagaagagauagaugggguaaagcuggaaucaacaaggauuuaccagauuuuggcgaucuauucaacugucgccaguucuuugguacugguagucucccugggggcaaucaguuucuggaugugcucuaaugggucucuacaguguagaauauguauuuaa

SEQ ID NO: 37599 - RNA, 1701 nt, Artificial Sequence; identical to SEQ ID NO: 34419
  derived and/or modified CDS sequence (wt) from hemagglutinin__InfluenzaA__ADM13442

SEQ ID NO: 37600 - RNA, 1701 nt, Artificial Sequence; identical to SEQ ID NO: 34417
  derived and/or modified CDS sequence (wt) from hemagglutinin__InfluenzaA__ADM13443

SEQ ID NO: 37601 - RNA, 1701 nt, Artificial Sequence; identical to SEQ ID NO: 34416
  derived and/or modified CDS sequence (wt) from hemagglutinin__InfluenzaA__ADM13444

SEQ ID NO: 37602 - RNA, 1701 nt, Artificial Sequence; identical to SEQ ID NO: 35288
  derived and/or modified CDS sequence (wt) from hemagglutinin__InfluenzaA__ADM13445

SEQ ID NO: 37603 - RNA, 1701 nt, Artificial Sequence; identical to SEQ ID NO: 34412
  derived and/or modified CDS sequence (wt) from hemagglutinin__InfluenzaA__ADM13446

SEQ ID NO: 37604 - RNA, 1701 nt, Artificial Sequence
  derived and/or modified CDS sequence (wt) from hemagglutinin__InfluenzaA__ADM13447
augaagaccaucauugcuuugagcuacauuuucugucuggcucucggccaagaccuuccaggaaaugacaacagcacagcaacgcugugccugggacaucaugcggugccaaacggaacacuagugaaaacaaucacagaugaucagauugaagugacuaaugcuacugagcuaguucagagcuccucaacggggaaaauaugcaacaauccucaucgaauccuugauggaauagacugcacacugauagaugcucuauugggggacccucauugugauguuuuucaaaaugagacaugggaccuuuucguugaacgcagcaaagcuuucagcaacuguuacccuuaugaugugccagauuaugccucccuuaggucacuaguugccucgucaggcacucuggaguuuaucacugaggguuucacuuggacuggggucacucagaaugggggaagcaaugcuugcaaaaggggaccugguagcgguuuuuucaguagacugaacugguugaccaaaucaggaagcacauauucagugcugaacgugacuaugccaaacaaugacaauuuugacaaacuauacauuugggggguucaccacccgagcacgaaccaagaacaaaccagccuguauguucaagcaucagggagagucacagucucuaccagaagaagccagcaaacuauaaucccgaauaucggguccagacccuggguaaggggucugucuaguagaauaagcaucuauuggacaauaguuaagccgggagacguacugguaauuaauaguaaugggaaccuaaucgcuccucgggguuauuucaaaaugcgcacugggaaaagcucaauaaugaggucagaugcaccuauugauaccuguauuucugaaugcaucacuccaaauggaagcauucccaaugacaagcccuuucaaaacguaaacaagaucacauauggagcaugccccaaguauguuaagcaaaacacccugaaguuggcaacagggaugcggaauguaccagagaaacaaacuagaggccuauucggcgcaauagcagguuucauagaaaaugguugggagggaaugauagacgguugguacgguuucaggcaucaaaauucugagggcacaggacaagcagcagaucuuaaaagcacucaagcagccaucgaccaaaucaaugggaaauugaacaggguaaucgagaagacgaacgagaaauuccaucaaaucgaaaaggaauucucagaaguagaagggagaauucaggaccucgagaaauacguugaagacacuaaaauagaucucuggucuuacaaugcggagcuucuugucgcucuggagaaucaacauacaauugaccugacugacucggaaaugaacaagcuguuugaaaaaacaaggaggcaacugagggaaaaugcugaagacaugggcaaugguugcuucaaaauauaccacaaaugugacaacgcuugcauagagucaaucagaaaugggacuuaugaccaugauguauacagagacgaagcauuaaacaaccgguuucagaucaaagguguugaacugaagucuggauacaaagacuggauccuguggauuuccuuugccauaucaugcuuuuugcuuuguguuguuuugcugggguucaucaugugggccugccagagaggcaacauuaggugcaacauuugcauuuga

SEQ ID NO: 37605 - RNA, 1701 nt, Artificial Sequence; identical to SEQ ID NO: 34411
  derived and/or modified CDS sequence (wt) from hemagglutinin__InfluenzaA__ADM13448

SEQ ID NO: 37606 - RNA, 1701 nt, Artificial Sequence
  derived and/or modified CDS sequence (wt) from hemagglutinin__InfluenzaA__ADM13449
augaagaccaucauugcuuugagcuacauuuucugucuggcuuucggccaagaccuuccaggaaaugacaacagcacagcaacgcugugccugggacaucaugcggugccaaacggaacacuagugaaaacaaucacagaugaucagauugaagugacuaaugcuacugagcuaguucagagcuccucaacggggaaaauaugcaacaauccucaucgaauccuugauggaauagacugcacacugauagaugcucuauugggggacccucauugugauguuuuucaaaaugagacaugggaccuuuucguugaacgcagcaaagcuuucagcaacuguuacccuuaugaugugccagauuaugccucccuuaggucacuaguugccucgucaggcacucuggaguuuaucacugaggguuucacuuggacuggggucacucagaaugggggaagcaaugcuugcaaaaggggaccugguagcgguuuuuucaguagacugaacugguugaccaaaucaggaagcacauauccagugcugaacgugacuaugccaaacaaugacaauuuugacaaacuauacauuugggggguucaccacccgagcacgaaccaagaacaaaccagccuguauguucaagcaucagggagagucacagucucuaccaggagaagccagcaaacuauaaucccgaauaucgaguccagacccuggguaaggggucugucuaguagaauaagcaucuauuggacaauaguuaauccgggagacguacugguaauuaauaguaaugggaaccuaaucgcuccucgggguuauuucaaaaugcgcacugggaaaagcucaauaaugaggucagaugcaccuauugauaccuguauuucugaaugcaucacuccaaauggaagcauucccaaugacaagcccuuucaaaacguaaacaagaucacauauggagcaugccccaaguauguuaagcaaaacacccugaaguuggcaacagggaugcggaauguaccagagaaacaaacuagaggccuauucggcgcaauagcagguuucauagaaaaugguugggagggaaugauagacgguugguacgguuucaggcaucaaaauucugagggcacaggacaagcagcagaucuuaaaagcacucaagcagccaucgaccaaaucaaugggaaauugaacaggguaaucgagaagacgaacgagaaauuccaucaaaucgaaaaggaauucucagaaguagaagggagaauucaggaccucgagaaauacguugaagacacuaaaauagaucucuggucuuacaaugcggagcuucuugucgcucuggagaaucaacauacaauugaccugacugacucggaaaugaacaagcuguuugaaaaaacaaggaggcaacugagggaaaaugcugaagacaugggcaaugguugcuucaaaauauaccacaaaugugacaacgcuugcauagagucaaucagaaaugggacuuaugaccaugauguauacagagacgaagcauuaaacaaccgguuucagaucaaagguguugaacugaagucuggauacaaagacuggauccuguggauuuccuuugccauaucaugcuuuuugcuuuguguuguuuugcugggguucaucaugugggccugccagagaggcaacauuaggugcaacauuugcauuuga

SEQ ID NO: 37607 - RNA, 1701 nt, Artificial Sequence; identical to SEQ ID NO: 34443
  derived and/or modified CDS sequence (wt) from hemagglutinin__InfluenzaA__ADM13450

SEQ ID NO: 37608 - RNA, 1701 nt, Artificial Sequence
  derived and/or modified CDS sequence (wt) from hemagglutinin__InfluenzaA__ADM13451
augaagaccaucauugcuuugagcuacauuuucugucuggcucucggccaagaccuuccaggaaaugacaacagaacagcaacgcugugccugggacaucaugcggugccaaacggaacacuagugaaaacaaucacagaugaucagauugaagugacuaaugcuacugagcuaguucagagcuccucaacggggaaaauaugcaacaauccucaucgaauccuugauggaauagacugcacacugauagaugcucuauugggggacccucauugugauguuuuucaaaaugagacaugggaccuuuucguugaacgcagcaaagcuuucagcaacuguuacccuuaugaugugccagauuaugccucccuuaggucacuaguugccucgucaggcacucuggaguuuaucacugaggguuucacuuggacuggggucacucagaaugggggaagcaaugcuugcaaaaggggaccugguagugguuuuuucaguagacugaacugguugaccaaaucaggaagcacauauccagugcugaacgugacuaugccaaacaaugacaauuuugacaaacuauacauuugggggguucaccacccgagcacgaaccaagaacaaaccagccuguauguucaagcaucagggagagucacagucucuaccaggagaagccagcaaacuauaaucccgaauaucggguccagacccuggguaaggggucugucuaguagaauaagcaucuauuggacaauaguuaagccgggagacguacugguaauuaauaguaaugggaaccuaaucgcuccucgggguuauuucaaaaugcgcacugggaaaagcucaauaaugaggucagaugcaccuauugauaccuguauuucugaaugcaucacuccaaauggaagcauucccaaugacaagcccuuucaaaacguaaacaagaucacauauggagcaugccccaaguauguuaagcaaaacacccugaaguuggcaacagggaugcggaauguaccagagaaacaaacuagaggccuauucggcgcaauagcagguuucauagaaaaugguugggagggaaugauagacgguugguacgguuucaggcaucaaaauucugagggcacaggacaagcagcagaucuuaaaagcacucaagcaaccaucgaccaaaucaaugggaaauugaacaggguaaucgagaagacgaacgagaaauuccaucaaaucgaaaaggaauucucagaaguagaagggagaauucaggaccucgagaaauacguugaagacacuaaaauagaucucuggucuuacaaugcggagcuucuugucgcucuggagaaucaacauacaauugaccugacugacucggaaaugaacaagcuguuugaaaaaacaaggaggcaacugagggaaaaugcugaagacaugggcaaugguugcuucaaaauauaccacaaaugugacaacgcuugcauagagucaaucagaaaugggacuuaugaccaugauguauacagagacgaagcauuaaacaaccgguuucagaucaaagguguugaacugaagucuggauacaaagacuggauccuguggauuuccuuugccauaucaugcuuuuugcuuuguguuguuuugcugggguucaucaugugggccugccagagaggcaacauuaggugcaacauuugcauuuga

SEQ ID NO: 37609 - RNA, 1701 nt, Artificial Sequence; identical to SEQ ID NO: 35172
  derived and/or modified CDS sequence (wt) from hemagglutinin__InfluenzaA__ADM13452

SEQ ID NO: 37610 - RNA, 1701 nt, Artificial Sequence
  derived and/or modified CDS sequence (wt) from hemagglutinin__InfluenzaA__ADM14467
augaaggcaauacuaguaguucugcuauauacauuugcaaccgcaaaugcagacacauuauguauagguuaucaugcgaacaauucaacagacacuguagacacaguacuagaaaagaauguaacaguaacacacucuguuaaccuucuagaagacaagcauaacgggaaacuaugcaaacuaagagggguagccccauugcauuuggguaaauguaacauugcuggcuggauccugggaaauccagagugugaaucacucuccacagcaagcucaugguccuacauuguggaaacaucuaguucagacaauggaacguguuacccaggagauuucaucgauuaugaggagcuaagagagcaauugagcucagugucaucauuugaaagguuugagauauuccccaagacaaguucauggcccaaucaugacucgaacaaagguguaacggcagcauguucucaugcuggagcaaaaagcuucuacaaaaauuuaauauggcuaguuaaaaaaggaaauucauacccaaagcucagcaaauccuacauuaaugauaaagggaaagaaguccucgugcuauggggcauucaccauccaucuacuagugcugaccaacaaagucucuaucagaaugcagaugcauauguuuuuguggggacaucaagauacagcaagaaguucaagccggaaauagcaauaagacccaaagugagggaucaagaagggagaaugaacuauuacuggacacuaguagagccgggagacaaaauaacauucgaagcaacuggaaaucuagugguaccgagauaugcauucgcaauggaaagaaaugcuggaucugguauuaucauuucagauacaccaguccacgauugcaauacaacuugucagacacccaagggugcuauaaacaccagccucccauuucagaguauacauccgaucacaauuggaaaauguccaaaauauguaaaaagcacaaaauugagacuggccacaggauugaggaaugucccgucuauucaaucuagaggccuauuuggggccauugccgguuucauugaagggggguggacagggaugguagauggaugguacgguuaucaccaucaaaaugagcaggggucaggauaugcagccgaccugaagagcacacagaaugccauugacaagauuacuaacaaaguaaauucuguuauugaaaagaugaauacacaguucacagcaguagguaaagaguucaaccaccuggaaaaaagaauagagaauuuaaauaaaaagguugaugaugguuuccuggacauuuggacuuacaaugccgaacuguugguucuauuggaaaaugaaagaacuuuggacuaccacgauucaaaugugaaaaacuuauaugaaaagguaagaagccaguuaaaaaacaaugccaaggaaauuggaaacggcugcuuugaauuuuaccacaaaugcgauaacacgugcauggaaagugucaaaaaugggacuuaugacuacccaaaauacucagaggaagcaaaauuaaacagagaagaaauagaugggguaaagcuggaaucaacaaggauuuaccagauuuuggcgaucuauucaacugucgccaguucauugguacugguagucucccugggggcaaucaguuucuggaugugcucuaaugggucucuacaguguagaauauguauuuaa

SEQ ID NO: 37611 - RNA, 1695 nt, Artificial Sequence
  derived and/or modified CDS sequence (wt) from hemagglutinin__InfluenzaA__ADM14516
augaaggcaauacuaguaguucugcuauauacauuugcaaccgcaaaugcagacacauuauguauagguuaucaugcgaacaauucaacagacacuguaaacacaguacuagaaaagaauguaacaguaacacacucuguuaaucuucuagaagacaagcauaacgggaaacuaugcaaacuaagagggguagccccauugcauuuggguaaauguaacauugcuggcuggauccugggaaauccagagugugaaucacucuccacagcaagcucaugguccuacauuguggaaacaucuaguucagacaauggaacguguuacccaggagauuucaucgauuaugaggagcuaagagagcaauugagcucagugucaucauuugaaagguuugagauauuccccaagacaaguucauggcccaaucaugacucgaacaaagguguaacggcagcauguccucaugcuggagcaaaaagcuucuacaaaaauuuaauauggcuaguuaaaaaaggaaauucauacccaaagcucagcaaauccuacauuaaugauaaagggaaagaaguccucgugcuauggggcauucaccauccaucuacuaguacugaccaacaaagucucuaucagaaugcagaugcauauguuuuuguggggacaucaagauacagcaagaaguucaagccggaaauagcaauaagacccaaagugagggaucaagaagggagaaugaacuauuacuggacacuaguagagccgggagacaaaauaacauucgaagcaacuggaaaucuagugguaccgagauaugcauucgcaauggaaagaaaugcuggaucugguauuaucauuucagauacaccaguccacgauugcaauacaacuugucagacacccaagggugcuauaaacaccagccucccauuucagaauauacauccgaucacaauuggaaaauguccaaaauauguaaaaagcacaaaauugagacuggccacaggauugaggaaugucccgucuauucaaucuagaggccuauuuggggccauugccgguuucauugaagggggguggacagggaugguagauggaugguacgguuaucaccaucaaaaugagcaggggucaggauaugcagccgaccugaagagcacacagaaugccauugacgagauuacuaacaaaguaaauucuguuauugaaaagaugaauacacaguucacagcaguagguaaagaguucaaccaccuggaaaaaagaauagagaauuuaaauaaaaagguugaugaugguuuccuggacauuuggacuuacaaugccgaacuguugguucuauuggaaaaugaaagaacuuuggacuaccacgauucaaaugugaagaacuuauaugaaaagguaagaagccaguuaaaaaacaaugccaaggaaauuggaaacggcugcuuugaauuuuaccacaaaugcgauaacacgugcauggaaagugucaaaaaugggacuuaugacuacccaaaauacucagaggaagcaaaauuaaacagagaagaaauagaugggguaaagcuggaaucaacaaggauuuaccagauuuuggcgaucuauucaacugucgccaguucauugguacugguagucucccugggggcaaucaguuucuggaugugcucuggucauagcuguagaauauguauuuaa

SEQ ID NO: 37612 - RNA, 1701 nt, Artificial Sequence
  derived and/or modified CDS sequence (wt) from hemagglutinin__InfluenzaA__ADM14525
augaaggcaacacuaguaguucugcuauauacauuugcaaccgcaaaugcagacacauuauguauagguuaucaugcgaacaauucaacagacacuguagacacaguacuagaaaagaauguaacaguaacacacucuguuaaccuucuagaagacaagcauaacgggaaacuaugcaaacuaagagggguagccccauugcauuuggguaaauguaacauugcuggcuggauccugggaaauccagagugugaaucacucuccacagcaagcucaugguccuacauuguggaaacaucuaguucagacaauggaacguguuacccaggagauuucaucgauuaugaggagcuaagagagcaauugagcucauugucaucauuugaaagguuugagauauuccccaagacaaguucauggcccaaucaugacucaaacaaagguguaacggcagcauguccucaugcuggagcaaaaagcuucuacaaaaauuuaauauggcuaguuaaaaaaggaaauucauacccaaagcucagcaaauccuacauuaaugauaaagggaaagacguccucgugcuauggggcauucaccauccaucuacuagugcugaccaacaaagucucuaucagaaugcagaugcauauguuuuuguggggacaucaagauacagcaagaaguucaagccggaaauagcaauaagacccaaagugagggaucaagaagggagaaugaacuauuacuggacacuaguagagccgggagacaaaauaacauucgaagcaacuggaaaucuagugguaccgagauaugcauucgcaauggaaagaaaugcuggaucugguauuaucauuucagauacaccaguccacgauugcaauacaacuugucagacacccaagggugcuauaaacaccagccucccauuucagaauauacauccgaucacaauuggaaaauguccaaaauauguaaaaagcacaaaauugagacuggccacaggauugaggaaugucccgucuauucaaucuagaggccuauuuggggccauugccgguuucauugaagggggguggacagggaugguagauggaugguacgguuaucaccaucaaaaugagcaggggucaggauaugcagccgaccugaagagcacacagaaugccauugacgagauuacuaacaaaguaaauucuguuauugaaaagaugaacacacaguucacagcaguagguaaagaguucaaccaccuggaaaaaagaauagagaauuuaaauaaaaaaguugaugaugguuuccuggacauuuggacuuacaaugccgaacuguugguucuauuggaaaaugaaagaacuuuggacuaccacgauucaaaugugaagaacuuauaugaaaagguaagaagccaguuaaaaaacaaugccaaggaaauuggaaacggcugcuuugaauuuuaccacaaaugcgauaacacgugcauggaaagugucaaaaaugggacuuaugacuacccaaaauacucagaggaagcaaaauuaaacagagaagaaauagaugggguaaagcuggaaucaacaaggauuuaccagauuuuggcgaucuauucaacugucgccaguucauugguacugguagucucccugggggcaaucaguuucuggaugugcucuaaugggucucuacaguguagaauauguauuuaa

SEQ ID NO: 37613 - RNA, 1695 nt, Artificial Sequence
  derived and/or modified CDS sequence (wt) from hemagglutinin__InfluenzaA__ADM14553
augaaggcaauacuaguaguucugcuauauacauuugcaaccgcaaaugcagacacauuauguauagguuaucaugcgaacaauucaacagacacuguagacacaauacuagaaaagaauguaacaguaacacacucuguuaaccuucuagaagacaagcauaacgggaaacuaugcaaacuaagagggguagccccauugcauuuggguaaauguaacauugcuggcuggauccugggaaauccagagugugaaucacucuccacagcaagcucaugguccuacauuguggaaacaucuaguucagacaauggaacguguuacccaggagauuucaucgauuaugaggagcuaagagagcaauugagcucagugucaucauuugaaagguuugagauauuccccaagacaaguucauggcccaaucaugacucgaacaaagguguaacggcagcauguccucaugcuggagcaaaaagcuucuacaaaaauuuaauauggcuaguuaaaaaaggaaauucauacccaaagcucagcaaauccuacauuaaugauaaagggaaagaaguccucgugcuauggggcauucaccauccaucuacuagugcugaccaacaaagucucuaucagaaugcagaugcauauguuuuuguggagacaucaagauacagcaagaaguucaagccggaaauagcaauaagacccaaagugagggaucaagaagggagaaugaacuauuacuggacacuaguagagccgggagacaaaauaacauucgaagcaacuggaaaucuagugguaccgagauaugcauucgcaauggaaagaaaugcuggaucugguauuaucauuucagauacaucaguccacgauugcaauacaacuugucagacacccaagggugcuauaaacaccagccucccauuucagaauauacauccgaucacaauuggaaaauguccaaaauauguaaaaagcacaaaauugagacuggccacaggauugaggaaugucccgucuauucaaucuagaggccuauuuggggccauugccgguuucauugaagggggguggacaggaaugguagauggaugguacgguuaucaccaucaaaaugagcaggggucaggauaugcagccgaccugaagagcacacagaaugccauugacgagauuacuaacaaaguaaauucuguuauugaaaagaugaauacacaguucacagcaguagguaaagaguucaaccaccuggaaaaaagaauagagaauuuaaauaaaaaaguugaugaugguuuccuggacauuuggacuuacaaugccgaacuguugguucuauuggaaaaugaaagaacuuuggacuaccacgauucaaaugugaagaacuuauaugaaaagguaagaagccaguuaaaaaacaaugccaaggaaauuggaaacggcugcuuugaauuuuaccacaaaugcgauaacacgugcauggaaagugucaaaaaugggacuuaugacuacccaaaauacucagaggaagcaaaauuaaacagagaagaaauagaugggguaaagcuggaaucaacaaggauuuaccagauuuuggcgaucuauucaacugucgccaguucauugguacugguagucucccugggggcaaucaguuucuggaugugcucuggucauagcuguagaauauguauuuaa

SEQ ID NO: 37614 - RNA, 1701 nt, Artificial Sequence
  derived and/or modified CDS sequence (wt) from hemagglutinin__InfluenzaA__ADM14562
augaaggcaauacuaguaguucugcuauauacauuugcaaccgcaaaugcagacacauuauguauagguuaucaugcgaacaauucaacagacacuguagacacaguacuagaaaagaauguaacaguaacacacucuguuaaccuucuagaagacaagcauaacgggaaacuaugcaaacuaagagggguagccccauugcauuuggguaaauguaacauugcuggcuggauccugggaaauccagagugugaaucacucuccacagcaagcucaugguccuacauuguggaaacaucuaguucagacaauggaacguguuacccaggagauuucaucgauuaugaggagcuaagagagcaauugagcucagugucaucauuugaaagguuugagauauuccccaagacaaguucauggcccaaucaugacucgaacaaagguguaacggcagcauguccucaugcuggagcaaaaagcuucuacaaaaauuuaauauggcuaguuaaaaaaggaaauucauacccaaagcucagcaaauccuacauuaaugauaaagggaaagaaguccucgugcuauggggcauucaccauccaucuacuagugcugaccaacaaagucucuaucagaaugcagaugcauauguuuuuguggggacaucaagauacagcaagaaguucaagccggaaauagcaauaagacccaaagugagggaacaagaagggagaaugaacuauuacuggacacuaguagagccgggagacaaaauaacauucgaggcaacuggaaaucuagugguaccgagauaugcauucgcaauggaaagaaaugcuggaucugguauuaucauuucagauacaccaguccacgauugcaauacaacuugucagacacccaagggugcuauaaacaccagccucccauuucagaauauacauucgaucacaauuggaaaauguccaaaauauguaaaaagcacaaaauugagacuggccacaggauugaggaaugucccgucuauucaaucuagaggccuauuuggggccauugccgguuucauugaagggggguggacagggaugguagauggaugguacgguuaucaccaucaaaaugagcaggggucaggauaugcagccgaccugaagagcacacagaaugccauugacgagauuacuaacaaaguaaauucuguuauugaaaagaugaauacacaguucacagcaguagguaaagaguucaaccaccuggaaaaaagaauagagaauuuaaauaaaaaaguugaugaugguuuccuggacauuuggacuuacaaugccgaacuguugguucuauuggaaaaugaaagaacuuuggacuaccacgauucaaaugugaagaacuuauaugaaaagguaagaagccaguuaaaaaacaaugccaaggaaauuggaaacggcugcuuugaauuuuaccacaaaugcgauaacacgugcauggaaagugucaaaaaugggacuuaugacuacccaaaauacucagaggaagcaaaauuaaacagagaagaaauagaugggguaaagcuggaaucaacaaggauuuaccagauuuuggcgaucuauucaacugucgccaguucauugguacugguagucucccugggggcaaucaguuucuggaugugcucuaaugggucucuacaguguagaauauguauuuaa

SEQ ID NO: 37615 - RNA, 1701 nt, Artificial Sequence; identical to SEQ ID NO: 34681
  derived and/or modified CDS sequence (wt) from hemagglutinin__InfluenzaA__ADM14571

SEQ ID NO: 37616 - RNA, 1701 nt, Artificial Sequence
  derived and/or modified CDS sequence (wt) from hemagglutinin__InfluenzaA__ADM14580
augaaggcaauacuaguaguucugcuauauacauuugcaaccgcaaaugcagacacauuauguauagguuaucaugcgaacaauucaacagacacuguagacacaguacuagaaaagaauguaacaguaacacacucuguuaaccuucuagaagacaagcauaacgggaaacuaugcaaacuaagagggguagccccauugcauuuggguaaauguaacauugcuggcuggauccugggaaauccagagugugaaucacucuccacagcaagcucaugguccuacauuguggaaacaucuaguucagacaauggaacguguuacccaggagauuucaucgauuaugaggagcuaagagagcaauugagcucagugucaucauuugaaagguuugagauauuccccaagacaaguucauggcccaaucaugacucgaacaaagguguaacggcagcauguccucaugcuggagcaaaaagcuucuacaaaaauuuaauauggcuaguuaaaaaaggaaauucauacccaaagcucagcaaauccuacauuaaugauaaagggaaagaaguccucgugcuauggggcauucaccauccaucuacuagugcugaccaacaaagucucuaucagaaugcagaugcauauguuuuuguggggacaucaagauacagcaagaaguucaagccggaaauagcaauaagacccaaagugagggaucaagaagggagaaugaacuauuacuggacacuaguagagccgggagacaaaauaacauucgaagcaacuggaaaucuagugguaccgagauaugcauucgcaauggaaaaaaaugcuggaucugguauuaucauuucagauacaccaguccacgauugcaauacaacuugucagacacccaagggugcuauaaacaccagccucccauuucagaauauacauccgaucacaauuggaaaauguccaaaauauguaaaaagcacaaaauugagacuggccacaggauugaggaaugucccgucuauucaaucuagaggccuauuuggggccauugccgguuucauugaagggggguggacagggaugguagauggaugguacgguuaucaccaucaaaaugagcaggggucaggauaugcagccgaccugaagagcacacagaaugccauugacgagauuacuaacaaaguaaauucuguuauugaaaagaugaauacacaguucacagcaguagguaaagaguucaaccaccuggaaaaaagaauagagaauuuaaauaaaaaaguugaugaugguuuccuggacauuuggacuuacaaugccgaacuguugguucuauuggaaaaugaaagaacuuuggacuaccacgauucaaaugugaagaacuuauaugaaaagguaagaagccaguuaaaaaacaaugccaaggaaauuggaaacggcugcuuugaauuuuaccacaaaugcgauaacacgugcauggaaagugucaaaaaugggacuuaugacuacccaaaauacucagaggaagcaaaauuaaacagagaagaaauaaaugggguaaagcuggaaucaacaaggauuuaccagauuuuggcgaucuauucaacugucgccaguucauugguacugguagucucccugggggcaaucaguuucuggaugugcucuaaugggucucuacaguguagaauauguauuuaa

SEQ ID NO: 37617 - RNA, 1701 nt, Artificial Sequence
  derived and/or modified CDS sequence (wt) from hemagglutinin__InfluenzaA__ADM14589
augaaggcaauacuaguaguucugcuauauacauuugcaaccgcaaaugcagacacauuauguauagguuaucaugcgaacaauucaacagacacuguagacacaguacuagaaaagaauguaacaguaacacacucuguuaaccuucuagaagacaagcauaacgggaaacuaugcaaacuaagagggguagccccauugcauuuggguaaauguaacauugcuggcuggauccugggaaauccagagugugaaucacucuccacagcaagcucaugguccuacauuguggaaacaucuaguucagacaauggaacguguuacccaggagauuucaucgauuaugaggagcuaagagagcaauugagcucagugucaucauuugaaagguuugagauauuccccaagacaaguucauggcccaaucaugacucgaacaaagguguaacggcagcauguccucaugcuggagcaaaaagcuucuacaaaaauuuaauauggcuaguuaaaaaaggaaauucauacccaaagcucagcaaauccuacauuaaugauaaagggaaagaaguccucgugcuauggggcauucaccauccaucuacuagugcugaccaacaaagucucuaucagaaugcagaugcauauguuuuuguggggacaucaagauacagcaagaaguucaagccggaaauagcaauaagacccaaagugagggaucaagaagggagaaugaacuauuacuggacacuaguagagccgggagacaaaauaacauucgaagcaacuggaaaucuagugguaccgagauaugcauucgcaauggaaaaaaaugcuggaucugguauuaucauuucagauacaccaguccacgauugcaauacaacuugucagacacccaagggugcuauaaacaccagccucccauuucagaauauacauccgaucacaauuggaaaauguccaaaauauguaaaaagcacaaaauugagacuggccacaggauugaggaaugucccgucuauucaaucuagaggccuauuuggggccauugccgguuucauugaagggggguggacagggaugguagauggaugguacgguuaucaccaucaaaaugggcaggggucaggauaugcagccgaccugaagagcacacagaaugccauugacgagauuacuaacaaaguaaauucuguuauugaaaagaugaauacacaguucacagcaguagguaaagaguucaaccaccuggaaaaaagaauagagaauuuaaauaaaaaaguugaugaugguuuccuggacauuuggacuuacaaugccgaacuguugguucuauuggaaaaugaaagaacuuuggacuaccacgauucaaaugugaagaacuuauaugaaaagguaagaagccaguuaaaaaacaaugccaaggaaauuggaaacggcugcuuugaauuuuaccacaaaugcgauaacacgugcauggaaagugucaaaaaugggacuuaugacuacccaaaauacucagaggaagcaaaauuaaacagagaagaaauaaaugggguaaagcuggaaucaacaaggauuuaccagauuuuggcgaucuauucaacugucgccaguucauugguacugguagucucccugggggcaaucaguuucuggaugugcucuaaugggucucuacaguguagaauauguauuuaa

SEQ ID NO: 37618 - RNA, 1701 nt, Artificial Sequence
  derived and/or modified CDS sequence (wt) from hemagglutinin__InfluenzaA__ADM14599
augaaggcaauacuaguaguucugcuauauacauuugcaaccgcaaaugcagacacauuauguauagguuaucaugcgaacaauucaacagacacuguagacacaguacuagaaaagaauguaacaguaacacacucuguuaaccuucuagaagacaagcauaacgggaaacuaugcaaacuaagagggguagccccauugcauuuggguaaauguaacauugcuggcuggauccugggaaauccagagugugaaucacucuccacagcaagcucaugguccuacauuguggaaacaucuaguucagacaauggaacguguuacccaggagauuucaucgauuaugaggagcuaagagagcaauugagcucagugucaucauuugaaagguuugagauauuccccaagacaaguucauggcccaaucaugacucgaacaaagguguaacggcagcauguccucaugcuggagcaaaaagcuucuacaaaaauuuaauauggcuaguuaaaaaaggaaauucauacccaaagcucagcaaauccuacauuaaugauaaagggaaagaaguccucgugcuauggggcauucaccauccaucuacuagugcugaccaacaaagucucuaucagaaugcagaugcauauguuuuuguggggacaucaagauacagcaagaaguucaagccggaaauaguaauaagacccaaagugagggaucaagaagggagaaugaacuauuacuggacacuaguagagccgggagacaaaauaacauucgaagcaacuggaaaucuagugguaccgagauaugcauucgcaauggaaagaaaugcuggaucugguauuaucauuucagauacaccaguccacgauugcaauacaacuugucagacacccaagggugcuauaaacaccagccucccauuucagaauauacauccgaucacaauuggaaaauguccaaaauauguaaaaagcacaaaauugagacuggccacaggauugaggaaugucccgucuauucaaucuagaggccuauuuggggccauugccgguuucauugaagggggguggacagggaugguagauggaugguacgguuaucaccaucaaaaugagcaggggucaggauaugcagccgaccugaagagcacacagaaugccauugacgagauuacuaacaaaguaaauucuguuauugaaaagaugaauacacaguucacagcaguagguaaagaguucaaccaccuggaaaaaagaauagagaauuuaaauaaaaaaguugaugaugguuuccuggacauuuggacuuacaaugccgaacuguugguucuauuggaaaaugaaagaacuuuggacuaccacgauucaaaugugaagaacuuauaugaaaagguaagaagccaguuaaaaaacaaugccaaggaaauuggaaacgguugcuuugaauuuuaccacaaaugcgauaacacgugcauggaaagugucaaaaaugggacuuaugacuacccaaaauacucagaggaagcaaaauuaaacagagaagaaauagaugggguaaagcuggaaucaacaaggauuuaccagauuuuggcgaucuauucaacugucgccaguucauugguacugguagucucccugggggcaaucaguuucuggaugugcucuaaugggucucuacaguguagaauauguauuuaa

SEQ ID NO: 37619 - RNA, 1701 nt, Artificial Sequence
  derived and/or modified CDS sequence (wt) from hemagglutinin__InfluenzaA__ADM14609
augaaggcaauacuaguaguucugcuauauacauuugcaaccgcaaaugcagacacauuauguauagguuaucaugcgaacaauucaacagacacuguagacacaguacuagaaaagaauguaacaguaacacacucuguuaaccuucuagaagacaagcauaacgggaaacuaugcaaacuaagagggguagccccauugcauuuggguaaauguaacauugcuggcuggauccugggaaauccagagugugaaucacucuccacagcaagcucaugguccuacauuguggaaacaucuaguucagacaauggaacguguuacccaggagauuucaucgauuaugaggagcuaagagagcaauugagcucagugucaucauuugaaagguuugagauguuccccaagacaaguucauggcccaaucaugacucgaacaaagguguaacggcagcauguccucaugcuggagcaaaaagcuucuacaaaaauuuaauauggcuaguuaaaaaaggaaauucauacccaaagcucagcaaauccuacauuaaugauaaagggaaagaaguccucgugcuauggggcauucaccauccaucuacuagugcugaccaacaaagucucuaucagaaugcagaugcauauguuuuuguggggacaucaagauacagcaagaaguucaagccggaaauagcaauaagacccaaagugagggaucaagaagggagaaugaacuauuacuggacacuaguagagccgggagacaaaauaacauucgaagcaacuggaaaucuagugguaccgagauaugcauucgcaauggaaagaaaugcuggaucugguauuaucauuucagauacaccaguccacgauugcaauacaacuugucaaacacccaagggugcuauaaacaccagccucccauuucagaauauacauccgaucacaauuggaaaauguccaaaauauguaaaaagcacaaaauugagacuggccacaggauugaggaaugucccgucuauucaaucuagaggccuauuuggggccauugccgguuucauugaagggggguggacagggaugguagauggaugguacgguuaucaccaucaaaaugagcaggggucaggauaugcagccgaccugaagagcacacagaaugccauugacgagauuacuaacaaaguaaauucuguuauugaaaagaugaauacacaguucacagcaguagguaaagaguucaaccaccuggaaaaaagaauagagaauuuaaauaaaaaaguugaugaugguuuccuggacauuuggacuuacaaugccgaacuguugguucuauuggaaaaugaaagaacuuuggacuaccacgauucaaaugugaagaacuuauaugaaaagguaagaagccaguuaaaaaacaaugccaaggaaauuggaaacggcugcuuugaauuuuaccacaaaugcgauaacacgugcauggaaagugucaaaaaugggacuuaugacuacccaaaauacucagaggaagcaaaauuaaacagagaagaaauagaugggguaaagcuggaaucaacaaggauuuaccagauuuuggcgaucuauucaacugucgccaguucauugguacugguagucucccugggggcaaucaguuucuggaugugcucuaaugggucucuacaguguagaauauguauuuaa

SEQ ID NO: 37620 - RNA, 1701 nt, Artificial Sequence
  derived and/or modified CDS sequence (wt) from hemagglutinin__InfluenzaA__ADM14618
augaaggcaauacuaguaguucugcuauauacauuugcaaccgcaaaugcagacacauuauguauagguuaucaugcgaacaauucaacagacacuguagacacaguacuagaaaagaauguaacaguaacacacucuguuaaccuucuagaagacaagcauaacgggaaacuaugcaaacuaagagggguagccccauugcauuuggguaaauguaacauugcuggcuggauccugggaaauccagagugugaaucacucuccacagcaagcucaugguccuacauuguggaaacaucuaguucagacaauggaacguguuacccaggagauuucaucgauuaugaggagcuaagagagcaauugagcucagugucaucauuugaaagguuugagauauuccccaagacaaguucauggcccaaucaugacucgaacaaagguguaacggcagcauguccucaugcuggagcaaaaagcuucuacaaaaauuuaauauggcuaguuaaaaaaggaaauucauacccaaagcucagcaaauccuacauuaaugauaaagggaaagaaguccucgugcuauggggcauucaccauccaucuacuagugcugaccaacaaagucucuaucagaaugcagaugcauauguuuuuguggggacaucaagauacagcaagaaguucaagccggaaauagcaauaagacccaaagugagggaucaagaagggagaaugaacuauuacuggacacuaguagagccgggagacaaaauaacauucgaagcaacuggaaaucuagugguaccgagauaugcauucgcaauggaaagaaaugcuggaucugguauuaucauuucagauacaccaguccacgauugcaauacaacuugucagacacccaagggugcuauaaacaccagccucccauuucagaauaaccauccgaucacaauuggaaaauguccaaaauauguaaaaagcacaaaauugagacuagccacaggauugaggaaugucccgucuauucaaucuagaggccuauuuggggccauugccgguuucauugaagggggguggacagggaugguagauggaugguacgguuaucaccaucaaaaugagcaggggucaggauaugcagccgaccugaagagcacacagaaugccauugacgagauuacuaacaaaguaaauucuguuauugaaaagaugaauacacaguucacagcaguagguaaagaguucaaccaccuggaaaaaagaauagagaauuuaaauaaaaaaguugaugaugguuuccuggacauuuggacuuacaaugccgaacuguugguucuauuggaaaaugaaagaacuuuggacuaccacgauucaaaugugaagaacuuauaugaaaagguaagaagccaguuaaaaaacaaugccaaggaaauuggaaacgguugcuuugaauuuuaccacaaaugcgauaacacgugcauggaaagugucaaaaaugggacuuaugacuacccaaaauacucagaggaagcaaaauuaaacagagaagaaauagaugggguaaagcuggaaucaacaaggauuuaccagauuuuggcgaucuauucaacugucgccaguucauugguacugguagucucccugggggcaaucaguuucuggaugugcucuaaugggucucuacaguguagaauauguauuuaa

SEQ ID NO: 37621 - RNA, 1701 nt, Artificial Sequence
  derived and/or modified CDS sequence (wt) from hemagglutinin__InfluenzaA__ADM14627
augaaggcaauacuaguaguucugcuauauacauuugcaaccgcaaaugcagacacauuauguauagguuaucaugcgaacaauucaacagacacuguagacacaguacuagaaaagaauguaacaguaacacacucuguuaaccuucuagaagacaagcauaacgggaaacuaugcaaacuaagagggguagccccauugcauuuggguaaauguaacauugcuggcuggauccugggaaauccagagugugaaucacucuccacagcaagcucaugguccuacauuguggaaacaucuaguucagacaauggaacguguuacccaggagauuucaucgauuaugaggagcuaagagagcaauugagcucagugucaucauuugaaagguuugagauauuccccaagacaaguucauggcccaaucaugacucgaacaaagguguaacggcagcauguccucaugcuggagcaaaaagcuucuacaaaaauuuaauauggcuaguuaaaaagggaaauucauacccaaagcucagcaaauccuacauuaaugauaaagggaaagaaguccucgugcuauggggcauucaccauccaucuacuagugcugaccaacaaagucucuaucagaaugcagaugcauauguuuuuguggggacaucaagauacagcaagaaguucaagccggaaauagcaauaagacccaaagugagggaucaagaagggagaaugaacuauuacuggacacuaguagagccgggagacaaaauaacauucgaagcaacuggaaaucuagugguaccgagauaugcauucgcaauggaaagaaaugcuggaucugguauuaucauuucagauacaccaguccacgauugcaauacaacuugucagacacccaagggugcuauaaacaccagccucccauuucagaauauacauccgaucacaauuggaaaauguccaaaauauguaaaaagcacaaaauugagacuggccacaggauugaggaaugucccgucuauucaaucuagaggccuauuuggggccauugccgguuucauugaagggggguggacagggaugguagauggaugguacgguuaucaccaucaaaaugagcaggggucaggauaugcagccgaccugaagagcacacagaaugccauugacgagauuacuaacaaaguaaauucuguuauugaaaagaugaauacacaguucacagcaguagguaaagaguucaaccaccuggaaaaaagaauagagaauuuaaauaaaaaaguugaugaugguuuccuggacauuuggacuuacaaugccgaacuguugguucuauuggaaaaugaaagaacuuuggacuaccacgauucaaaugugaagaacuuauaugaaaagguaagaagccaguuaaaaaacaaugccaaggaaauuggaaacggcugcuuugaauuuuaccacaaaugcgauaacacgugcauggaaagugucaaaaaugggacuuaugacuacccaaaauacucagaggaagcaaaauuaaacagagaagaaauagaugggguaaagcuggaaucaacaaggauuuaccagauuuuggcgaucuauucaacugucgccaguucauugguacugguagucucccugggggcaaucaguuucuggaugugcucuaaugggucucuacaguguagaauauguauuuaa

SEQ ID NO: 37622 - RNA, 1701 nt, Artificial Sequence
  derived and/or modified CDS sequence (wt) from hemagglutinin__InfluenzaA__ADM14655
augaaggcaauacuaguaguucugcuauauacauuugcaaccgcaaaugcagacacguuauguauagguuaucaugcgaacaauucaacagacacuguagacacaguacuagaaaagaauguaacaguaacacacucuguuaaccuucuagaagacaagcauaacgggaaacuaugcaaacuaagagggguagccccauugcauuuggguaaauguaacauugcuggcuggauccugggaaauccagagugugaaucacucuccacagcaagcucaugguccuacauuguggaaacaucuaguucagacaauggaacguguuacccaggagauuucaucgauuaugaggagcuaagagagcaauugagcucagugucaucauuugaaagguuugagauauuccccaagacaaguucauggcccaaucaugacucgaacaaagguguaacggcagcauguccucaugcuggagcaaaaagcuucuacaaaaauuuaauauggcuaguuaaaaaaggaaauucauacccaaagcucagcaaauccuacauuaaugauaaagggaaagaaguccucgugcuauggggcauucaccauccaucuacuagugcugaccaacaaagccucuaucagaaugcagaugcauauguuuuuguggggacaucaagauacagcaagaaguucaagccggaaauagcaauaagacccaaagugagggaucaagaagggagaaugaacuauuacuggacacuaguagagccgggagacaaaauaacauucgaagcaacuggaaaucuagugguaccgagauaugcauucgcaauggaaagaaaugcuggaucugguauuaucauuucagauacaccaguccacgauugcaauacaacuugucagacacccaagggugcuauaaacaccagccucccauuucagaauauacauccgaucacaauuggaaaauguccaaaauauguaagaagcacaaaauugagacuggccacaggauugaggaaugucccgucuauucaaucuagaggccuauuuggggccauugccgguuucauugaagggggguggacagggaugguagauggaugguacgguuaucaccaucaaaaugagcaggggucaggauaugcagccgaccugaagagcacacagaaugccauugacgagauuacuaacaaaguaaauucuguuauugaaaagaugaauacacaguucacagcaguagguaaagaguucaaccaccuggaaaaaagaauagagaauuuaaauaaaaaaguugaugaugguuuccuggacauuuggacuuacaaugccgaacuguugguucuauuggaaaaugaaagaacuuuggacuaccacgauucaaaugugaagaacuuauaugaaaagguaagaagccaguuaaaaaacaaugccaaggaaauuggaaacggcugcuuugaauuuuaccacaaaugcgauaacacgugcauggaaagugucaaaaaugggacuuaugacuacccaaaauacucagaggaagcaaaauuaaacagagaagaaauagaugggguaaagcuggaaucaacaaggauuuaccagauuuuggcgaucuauucaacugucgccaguucauugguacugguagucucccugggggcaaucaguuucuggaugugcucuaaugggucucuacaguguagaauauguauuuaa

SEQ ID NO: 37623 - RNA, 1701 nt, Artificial Sequence
  derived and/or modified CDS sequence (wt) from hemagglutinin__InfluenzaA__ADM14664
augaaggcaauacuaguaguucugcuauauacauuugcaaccgcaaaugcagacacauuauguauagguuaucaugcgaacaauucaacagacacuguagacacaguacuagaaaagaauguaacaguaacacacucuguuaaccuucuagaagacaagcauaacgggaaacuaugcaaacuaagagggguagccccauugcauuuggguaaauguaacauugcuggcuggauccugggaaauccagagugugaaucacucuccacagcaagcucaugguccuacauuguggaaacaucuaguucagacaauggaacguguuacccaggagauuucaucgauuaugaggagcuaagagagcaauugagcucagugucaucauuugaaagguuugagauauuccccaagacaaguucauggcccaaucaugacucgaacaaagguguaacggcagcauguccucaugcuggagcaaaaagcuucuacaaaaauuuaauauggcuaguuaaaaaaggaaauucauacccaaagcucagcaaauccuacauuaaugauaaagggaaagaaguccucgugcuauggggcauucaccauccaucuacuagugcugaccaacaaagucuuuaucagaaugcagaugcauauguuuuuguggggacaucaagauacagcaagaaguucaagccggaaauagcaauaagacccaaagugagggaucaagaagggagaaugaacuauuacuggacacuaguagagccgggagacaaaauaacauucgaagcaacuggaaaucuagugguaccgagauaugcauucgcaauggaaagaaaugcuggaucugguauuaucauuucagauacaccgguccacgauugcaauacaacuugucagacacccaauggugcuauaaacaccagccucccauuucagaauauacauccgaucacaauuggaaaauguccaaaauauguaaaaagcacaaaauugagacuggccacaggauugaggaauaucccgucuauucaaucuagaggccuauuuggggccauugccgguuucauugaagggggguggacagggaugguagauggaugguacgguuaucaccaucaaaacgagcaggggucaggauaugcagccgaccugaagagcacacagaaugccauugacgagaucacuaacaaaguaaauucuguuauugaaaagaugaauacacaguucacagcaguagguaaagaguucaaccaccuggaaaaaagaauagagaauuuaaauaaaaaaguugaugaugguuuccuggacauuuggacuuacaaugccgaacuguugguucuauuggaaaaugaaagaacuuuggacuaccacgauucaaaugugaagaacuuauaugaaaagguaagaagccaguuaaaaaacaaugccaaggaaauuggaaacggcugcuuugaauuuuaccacaaaugcgauaacacgugcauggaaagugucaaaaaugggacuuaugacuacccaaaauacucagaggaagcaaaauuaaacagagaagaaauagaugggguaaagcuggaaucaacaaggauuuaccagauuuuggcgaucuauucaacugucgccaguucauugguacugguagucucccugggggcaaucaguuucuggaugugcucuaaugggucucuacaguguagaauauguauuuaa

SEQ ID NO: 37624 - RNA, 1701 nt, Artificial Sequence; identical to SEQ ID NO: 34681
  derived and/or modified CDS sequence (wt) from hemagglutinin__InfluenzaA__ADM14673

SEQ ID NO: 37625 - RNA, 1701 nt, Artificial Sequence; identical to SEQ ID NO: 34681
  derived and/or modified CDS sequence (wt) from hemagglutinin__InfluenzaA__ADM14682

SEQ ID NO: 37626 - RNA, 1701 nt, Artificial Sequence; identical to SEQ ID NO: 34681
  derived and/or modified CDS sequence (wt) from hemagglutinin__InfluenzaA__ADM14691

SEQ ID NO: 37627 - RNA, 1701 nt, Artificial Sequence
  derived and/or modified CDS sequence (wt) from hemagglutinin__InfluenzaA__ADM14700
augaaggcaauacuaguaguucugcuauauacauuugcaaccgcaaaugcagacacauuauguauagguuaucaugcgaacaauucaacagacacuguagacacaguacuagaaaagaauguaacaguaacacacucuguuaaccuucuagaagacaagcauaacgggaaacuaugcaaacuaagagggguagccccauugcauuuggguaaauguaacauugcuggcuggauccugggaaauccagagugugaaucacucuccacagcaagcucaugguccuacauuguugaaacaucuaguucagacaauggaacguguuacccaggagauuucaucgauuaugaggagcuaagagagcaauugagcucagugucaucauuugaaagguuugagauauuccccaagacaaguucauggcccaaucaugacucgaacaaagguguaacggcagcauguccucaugcuggagcaaaaagcuucuacaaaaauuuaauauggcuaguuaaaaaaggaaauucauacccaaagcucagcaaauccuacauuaaugauaaagggaaagaaguccucgugcuauggggcauucaccauccaucuacuagugcugaccaacaaagucucuaucagaaugcagaugcauauguuuuuguggggacaucaagauacagcaagaaguucaagccggaaauagcaauaagacccaaagugagggaucaagaagggagaaugaacuauuacuggacacuaguagagccgggagacaaaauaacauucgaagcaacuggaaaucuagugguaccgagauaugcauucgcaauggaaagaaaugcuggaucugguauuaucauuucagauacaccaguccacgauugcaauacaacuugucagacacccaagggugcuauaaacaccagccucccauuucagaauauacauccgaucacaauuggaaaauguccaaaauauguaaaaagcacaaaauugagacuggccacaggcuugaggaaugucccgucuauucaaucuagaggccuauuuggggccauugccgguuucauugaagggggguggacaggaaugguagauggaugguacgguuaucaccaucaaaaugagcaggggucaggauaugcagccgaccugaagagcacacagaaugccauugacaagauuacuaacaaaguaaauucuguuauugaaaagaugaauacacaguucacagcaguagguaaagaguucaaccaccuggaaaaaagaauagagaauuuaaauaaaaaaguugaugaugguuuccuggacauuuggacuuacaaugccgaacuguugguucuauuggaaaaugaaagaacuuuggacuaccacgauucaaaugugaagaacuuauaugaaaagguaagaagccaguuaaaaaacaaugccaaggaaauuggaaacggcugcuuugaauuuuaccacaaaugcgauaacacgugcauggaaagugucaaaaaugggacuuaugacuacccaaaauacucagaggaagcaaaauuaaacagagaagaaauagauggggugaagcuggaaucaacaaggauuuaccagauuuuggcgaucuauucaacugucgccaguucauugguacugguagucucccugggggcaaucaguuucuggaugugcucuaaugggucucuacaguguagaauauguauuuaa

SEQ ID NO: 37628 - RNA, 1695 nt, Artificial Sequence
  derived and/or modified CDS sequence (wt) from hemagglutinin__InfluenzaA__ADM14709
augaaggcaauacuaguaguucugcuauauacauuugcaaccgcaaaugcagacacauuauguauagguuaucaugcgaacaauucaacagacacuguagacacaguacuagaaaagaaugucacagugacacacucuguuaaccuucuagaagacaagcauaacgggaaacuaugcaaacuaagagggguagccccauugcauuuggguaaauguaacauugcuggcuggauccugggaaauccagagugugaaucacucuccacagcaagcucaugguccuacauuguggaaacaucuaguucagacaauggaacguguuacccaggagauuucaucgauuaugaggagcuaagagagcaauugagcucagugucaucauuugaaagguuugagauauuccccaagacaaauucauggcccaaucaugacucgaacaaagguguaacggcagcauguccucaugcuggagcaaaaagcuucuacaaaaauuuaauauggcuaguuaaaaaaggaaauucauacccaaagcucagcaaauccuacauuaaugauaaagggaaagaaguccucgugcuauggggcauucaccauccaucuacuagugcugaccaacaaagucucuaucagaaugcagaugcauauguuuuuguggggacaucaaaauacagcaagaaguucaagccggaaauagcaauaagacccaaagugagggaucaagaagggagaaugaacuauuacuggacacuaguagagccgggagacaaaauaacauucgaagcaacuggaaaucuagugguaccgagauaugcauucgcaauggaaagaaaugcuggaucugguauuaucauuucagauacaccaguccacgauugcaauacaacuugucagacacccaagggugcuauaaacaccagccucccauuucagaauauacauccgaucacaauuggaaaauguccaaaauauguaaaaagcacaaaauugagacuggccacaggauugaggaaugucccgucuauucaaucuagaggccuauuuggggccauugccgguuucauugaagggggguggacagggaugguagauggaugguacgguuaucaccaucaaaaugagcaggggucaggauaugcagccgaccugaagagcacacagaaugccauugacgggauuacuaacaaaauaaauucuguuauugaaaagaugaauacacaguucacagcaguagguaaagaguucaaccaccuggaaaaaagaauagagaauuuaaauaaaaaaguugaugaugguuuccuggacauuuggacuuacaaugccgaacuguugguucuauuggaaaaugaaagaacuuugaacuaccacgauucaaaugugaagaacuuauaugaaaagguaagaagccaguuaaaaaacaaugccaaggaaauuggaaacggcugcuuugaauuuuaccacaaaugcgauaacacgugcauggaaagugucaaaaaugggacuuaugacuacccaaaauacucagaggaagcaaaauuaaacagagaagaaauagaugggguaaagcuggaaucaacaaggauuuaccagauuuuggcgaucuauucaacugucgccaguucauugguacugguagucucccugggggcaaucaguuucuggaugugcucuggucauagcuguagaauauguauuuaa

SEQ ID NO: 37629 - RNA, 1701 nt, Artificial Sequence
  derived and/or modified CDS sequence (wt) from hemagglutinin__InfluenzaA__ADM14718
augaaggcaauacuaguaguucugcuauauacauuugcaaccgcaaaugcagacacauuauguauagguuaucaugcgaacaauucaacagacacuguagacacaguacuagaaaagaauguaacaguaacacacucuguuaaccuucuagaagacaagcauaaugggaaacuaugcaaacuaagagggguagccccauugcauuuggguaaauguaacauugcuggcuggauccugggaaauccagagugugaaucacucuccacagcaagcucaugguccuacauuguggaaacaucuaguucagacaauggaacguguuacccaggagauuucaucgauuaugaggagcuaagagagcaauugagcucaaugucaucauuugaaagguuugagauauuccccaagacaaguucauggcccaaucaugacucgaacaaagguguaacggcagcauguccucaugcuggagcaaaaagcuucuacaaaaauuuaauauggcuaguuaaaaaaggaaauucauacccaaagcucagcaaauccuacauuaaugauaaagggaaagaaguccucgugcuauggggcauucaccauccaucuacuagugcugaccaacaaagccucuaucagaaugcagaugcauauguuuuuguggggacaucaagauacagcaagaaguucaagccggaaauagcaauaagacccaaagugagggaucaagaagggagaaugaacuauuacuggacacuaguagagccgggagacaaaauaacauucgaagcaacuggaaaucuagugguaccgagauaugcauucgcaauggaaagaaaugcuggaucugguauuaucauuucagauacaccaguccacgauugcaauacaacuugucagacacccaagggugcuauaaacaccagccucccauuucagaauauacauccgaucacaauuggaaaauguccaaaauauguaaaaagcacaaaauugagacuggccacaggauugaggaaugucccgucuauucaaucuagaggccuauuuggggccauugccgguuucauugaagggggguggacagggaugguagauggaugguacgguuaucaccaucaaaaugagcaggggucaggauaugcagccgaccugaagagcacacagaaugccauugacaagauuacuaacaaaguaaauucuguuauugaaaagaugaauacacaguucacagcaguagguaaagaguucaaccaccuggaaaaaagaauagagaauuuaaauaaaaaaguugaugaugguuuccuggacauuuggacuuacaaugccgaacuguugguucuauuggaaaaugaaagaacuuuggacuaccacgauucaaaugugaagaacuuauaugaaaagguaagaagccaguuaaaaaacaaugccaaggaaauuggaaacggcugcuuugaauuuuaccacaaaugcgauaacacgugcauggaaagugucaaaaaugggacuuaugacuacccaaaauacucagaggaagcaaaauuaaacagagaagaaauagaugggguaaagcuggaaucaacaaggauuuaccagauuuuggcgaucuauucaacugucgccaguucauugguacugguagucucccugggggcaaucaguuucuggaugugcucuaaugggucucuacaguguagaauauguauuuaa

SEQ ID NO: 37630 - RNA, 1695 nt, Artificial Sequence
  derived and/or modified CDS sequence (wt) from hemagglutinin__InfluenzaA__ADM14728
augaaggcaauacuaguaguucugcuauauacauuugcaaccgcaaaugcagacacauuauguauagguuaucaugcgaacaauucaacagacacuguagacacaguacuagaaaagaauguaacaguaacacacucuguuaaccuucuagaagacaagcauaacgggaaacuaugcaaacuaagagggguagccccauugcauuuggguaaauguaacauugcuggcuggauccuggggaauccagagugugaaucacucuccacagcaagcucaugguccuacauuguggaaacaucuaguucagacaauggaacguguuacccaggagauuucaucgauuaugaggagcuaagagagcaauugagcucagugucaucauuugaaagguuugagauauuccccaagacaaguucauggcccaaucaugacucgaacaaagguguaacggcagcauguccucaugcuggagcaaaaagcuucuacaaaaauuuaauauggcuaguuaaaaaaggaaauucauacccaaagcucagcaacuccuacauuaaugauaaagggaaagaaguccucgugcuauggggcauucaccauccaucuacuagugcugaccaacaaagucucuaucagaaugcagaugcauauguuuuuguggggacaucaagauacagcaagaaguucaagccggaaauagcaauaagacccaaagugagggaucaagaagggagaaugaacuauuacuggacacugguagagccgggagacaaaauaacauucgaagcaacuggaaaucuagugguaccgagauaugcauucgcaauggaaagaaaugcuggaucugguauuaucauuucagauacaccagcccacgauugcaauacaacuugucagacacccaagggugcuauaaacaccagccucccauuucagaauauacauccgaucacaauuggaaaauguccaaaauauguaaaaagcacaaaauugagacuggccacaggauugaggaaugucccgucuauucaaucuagaggccuauuuggggccauugccgguuucauugaagggggguggacagggaugguagauggaugguacgguuaucaccaucaaaaugagcaggggucaggauaugcagccgaccugaagagcacacagaaugccauugacgagauuacuaacaaaguaaauucuguuauugaaaagaugaauacacaguucacagcaguagguaaagaguucaaccaccuggaaaaaagaauagagaauuuaaauaaaaaaguugaugaugguuuccuggacauuuggacuuacaaugccgaacuguugguucuauuggaaaaugaaagaacuuuggacuaccacgauucaaaugugaagaacuuauaugaaaagguaagaagccaguuaaaaaacaaugccaaggaaauuggaaacggcugcuuugaauuuuaccacaaaugcgauaacacgugcauggaaagugucaaaaaugggacuuaugacuacccaaaauacucagaggaagcaaaauuaaacagagaagaaauagaugggguaaagcuggaaucaacaaggauuuaccagauuuuggcgaucuauucaacugucgccaguucauugguacugguagucucccugggggcaaucaguuucuggaugugcucuggucauagcuguagaauauguauuuaa

SEQ ID NO: 37631 - RNA, 1701 nt, Artificial Sequence
  derived and/or modified CDS sequence (wt) from hemagglutinin__InfluenzaA__ADM14737
augaaggcaauacuaguaguucugcuauauacauuugcaaccgcaaaugcagacacauuauguauagguuaucaugcgaacaauucaacagacacuguaaacacaguacuagaaaagaauguaacaguaacacacucuguuaaucuucuagaagacaagcauaacgggaaacuaugcaaacuaagagggguagccccauugcauuuggguaaauguaacauugcuggcuggauccugggaaauccagagugugaaucacucuccacagcaagcucaugguccuacauuguggaaacaucuaguucagacaauggaacguguuacccaggagauuucaucgauuaugaggagcuaagagagcaauugagcucagugucaucauuugaaagguuugagauauuccccaagacaaguucauggcccaaucaugacucgaacaaagguguaacggcagcauguccucaugcuggagcaaaaagcuucuacaaaaauuuaauauggcuaguuaaaaaaggaaauucauacccaaagcucagcaaauccuacauuaaugauaaagggaaagaaguccucgugcuauggggcauucaccauccaucuacuagugcugaccaacaaagucucuaucagaaugcagaugcauauguuuuuguggggacaucaagauacagcaagaaguucaagccggaaauagcaauaagaccaaaagugagggaucaagaagggagaaugaacuauuacuggacacuaguagagccgggagacaaaauaacauucgaagcaacuggaaaucuagugguaccgagauaugcauucgcaauggaaaaaaaugcuggaucugguauuaucauuucagauacaccaguccacgauugcaauacaacuugucagacacccaagggugcuauaaacaccagccucccauuucagaauauacauccgaucacaauuggaaaauguccaaaauauguaaagagcacaaaauugagacuggccacaggauugaggaaugucccgucuauucaaucuagaggccuauuuggggccauugccgguuucauugaagggggguggacagggaugguagauggaugguacgguuaucaccaucaaaaugagcaggggucaggauaugcagccgaccugaagagcacacagaaugccauugacgagauuacuaacaaaguaaauucuguuauugaaaagaugaauacacaguucacagcaguagguaaagaguucaaccaccuggaaaaaagaauagagaauuuaaauaaaaaaguugaugaugguuuccuggacauuuggacuuacaaugccgaacuguugguucuauuggaaaaugaaagaacuuuggacuaccacgauucaaaugugaagaacuuauaugaaaagguaagaagccaguuaaaaaacaaugccaaggaaauuggaaacggcugcuuugaauuuuaccacaaaugcgauaacacgugcauggaaagugucaaaaaugggacuuaugacuacccaaaauacucagaggaagcaaaauuaaacagagaagaaauagaugggguaaagcuggaaucaacaaggauuuaccagauuuuggcgaucuauucaacugucgccaguucauugguacugguagucucccugggggcaaucaguuucuggaugugcucuaaugggucucuacaguguagaauauguauuuaa

SEQ ID NO: 37632 - RNA, 1701 nt, Artificial Sequence
  derived and/or modified CDS sequence (wt) from hemagglutinin__InfluenzaA__ADM14746
augaaggcaauacuaguaguucugcuauauacauuugcaaccgcaaaugcagacacauuauguauagguuaucaugcgaacaauucaacagacacuguagacacaguacuagaaaagaauguaacaguaacacacucuguuaaccuucuagaagacaagcauaacgggaaacuaugcaaacuaagagggguagccccauugcauuuggguaaauguaacauugcuggcuggguccugggaaauccagagugugaaucacucuccacagcaagcucaugguccuacauuguggaaacaccuaguucagacaauggaacguguuacccaggagauuucaucgauuaugaagagcuaagagagcaauugagcucagugucaucauuugaaagguuugagauauuccccaagacaaguucauggcccaaucaugacucgaacaaagguguaacggcagcauguccucaugcuggagcaaaaagcuucuacaaaaauuuaauauggcuaguuaaaaaaggaaauucauacccaaagcucagcaaauccuacauuaaugauaaagggaaagaaguccucgugcuauggggcauucaccauccaucuacuagugcugaccaacaaagucucuaucagaaugcagaugcauauguuuuuguggggacaucaagauacagcaagaaguucaagccggaaauagcaauaagacccaaagugagggaucaagaagggagaaugaacuauuacuggacacuaguagagccgggagacaaaauaacauucgaagcaacuggaaaucuagugguaccgagauaugcauucgcaauggaaagaaaugcuggaucugguauuaucauuucagauacaccaguccacgauugcaauacaacuugucagacacccaagggugcuauaaacaccagccucccauuucagaauauacauccgaucacaauuggaaaauguccaaaauauguaaaaagcaaaaaauugagacuggccacaggauugaggaaugucccgucuauucaaucuagaggccuauuuggggccauugccgguuucauugaagggggguggacagggaugguagauggaugguacgguuaucaccaucaaaaugagcaggggucaggauaugcagccgaccugaagagcacacagaaugccauugacgagauuacuaacaaaguaaauucuguuauugaaaagaugaauacacaguucacagcaguagguaaagaguucaaccaccuggaaaaaagaauagagaauuuaaauaaaaaaguugaugaugguuuccuggacauuuggacuuacaaugccgaacuguugguucuauuggaaaaugaaagaacuuuggacuaccacgauucaaaugugaagaacuuauaugaaaagguaagaagccaguuaaaaaacaaugccaaggaaauuggaaacggcugcuuugaauuuuaccacaaaugcgauaacacgugcauggaaagugucaaaaaugggacuuaugacuacccaaaauacucagaggaagcaaaauuaaacagagaagaaauagaugggguaaagcuggaaucaacaaggauuuaccagauuuuggcgaucuauucaacugucgccaguucauugguacugguagucucccugggggcaaucaguuucuggaugugcucuaaugggucucuacaguguagaauauguauuuaa

SEQ ID NO: 37633 - RNA, 1695 nt, Artificial Sequence
  derived and/or modified CDS sequence (wt) from hemagglutinin__InfluenzaA__ADM14756
augaaggcaauacuaguaguucugcuauauacauuugcaaccgcaaaugcagacacauuauguguagguuaucaugcgaacaauucaacagacacuguagacacaguacuagaaaagaauguaacaguaacacacucuguuaaccuucuagaagacaagcauaacgggaaacuaugcaaacuaagagggguagccccauugcauuuggguaaauguaacauugcuggcuggauccugggaaauccagagugugaaucacucuccacagcaagcucaugguccuacauuguggaaacaucuaguucagacaauggaacguguuacccaggagauuucaucgauuaugaggagcuaagagagcaauugagcucagugucaucauuugaaagguuugagauauuccccaagacaaguucauggcccaaucaugacucgaacaaagguguaacggcagcauguccucaugcuggagcaaaaagcuucuacaaaaauuuaauauggcuaguuaaaaaaggaaauucauacccaaagcucagcaaauccuacauuaaugauaaagggaaagaaguccucgugcuauggggcauucaccauccaucuacuagugcugaccaacaaagucucuaucagaaugcagaugcauauguuuuuguggggacaucaagauacagcaagaaguucaagccggaaauagcaauaagacccaaagugagggaucaagaagggagaaugaacuauuacuggacacuaguagagccgggagacaaaauaacauucgaagcaacuggaaaucuagugguaccgagauaugcauucgcaauggaaagaaaugcuggaucugguauuaucauuucagauacaccaguccacgauugcaauacaacuugucagacacccaagggugcuauaaacaccagccucccauuucagaauauacauccgaucacaauuggaaaauguccaaaauauguaaaaagcacaaaauugagacuggccacaggauugaggaaugucccgucuauucaaucuagaggccuauuuggggccauugccgguuucauugaagggggguggacagggaugguagauggaugguacgguuaucaccaucaaaaugagcaggggucaggauaugcagccgaccugaagagcacacagaaugccauugacaagauuacuaacaaaguaaauucuguuauugaaaagaugaauacacaguucacagcaguagguaaagaguucaaccaccuggaaaaaagaauagagaauuuaaauaaaaaaguugaugaugguuuccuggacauuuggacuuacaaugccgaacuguugguucuauuggaaaaugaaagaacuuuggacuaccacgauucaaaugugaagaacuuauaugaaaagguaagaagccaguuaaaaaacaaugccaaggaaauuggaaacggcugcuuugaauuuuaccacaaaugcgauaacacgugcauggaaagugucaaaaaugggacuuaugacuacccaaaauacucagaggaagcaaaauuaaacagagaagaaauagaugggguaaagcuggaaucaacaaggauuuaccagauuuuggcgaucuauucaacugucgccaguucauugguacugguagucucccugggggcaaucaguuucuggaugugcucuggucauagcuguagaauauguauuuaa

SEQ ID NO: 37634 - RNA, 1701 nt, Artificial Sequence; identical to SEQ ID NO: 35845
  derived and/or modified CDS sequence (wt) from hemagglutinin__InfluenzaA__ADM14765

SEQ ID NO: 37635 - RNA, 1695 nt, Artificial Sequence
  derived and/or modified CDS sequence (wt) from hemagglutinin__InfluenzaA__ADM14775
augaaggcaauauuaguaguucugcuauauacauuugcaaccgcaaaugcagacacauuauguauagguuaucaugcgaacaauucaacagacacuguagacacaguacuagaaaagaauguaacaguaacacacucuguuaaccuucuagaagacaagcauaacgggaaacuaugcaaacuaagagggguagccccauugcauuuggguaaauguaacauugcuggcuggauccugggaaauccagagugugaaucacucuccacagcaagcucaugguccuacauuguggaaacaucuaguucagacaauggaacguguuacccaggagauuucaucgauuaugaggagcuaagagagcaauugagcucagugucaucauuugaaagguuugagauauuccccaagacaaguucauggcccaaucaugacucgaacaaagguguaacggcagcauguccucaugcuggagcaaaaagcuucuacaaaaauuuaauauggcuaguuaaaaaaggaaauucauacccaaagcucaacaaauccuacauuaaugauaaagggaaagaaguccucgugcuauggggcauucaccauccaucuacuagugcugaccaacaaagucucuaucagaaugcagaugcauauguuuuuguggggacaucaagauacagcaagaaguucaagccggaaauagcaauaagacccaaagugagggaucaagaagggagaaugaacuauuacuggacacuaguagagccgggagacaaaauaacauucgaagcaacuggaaaucuagugguaccgagauaugcauucgcaauggaaagaaaugcuggaucugguauuaucauuucagauacaccaguccacgauugcaauacaacuugucagacacccaagggugcuauaaacaccagccucccauuucagaauauacauccgaucacaauuggagaauguccaaaauauguaaaaagcacaaaauugagacuggccacaggauugaggaaugucccgucuauucaaucuagaggccuauuuggggccauugccgguuucauugaagggggguggacagggaugguagauggaugguacgguuaucaccaucaaaaugagcaggggucaggauaugcagccgaccugaagagcacacagaaugccauugacaagauuacuaacaaaguaaauucuguuauugaaaagaugaauacacaguucacagcaguagguaaagaguucaaccaccuggaaaaaagaauagagaauuuaaauaaaaaaguugaugaugguuuccuggacauuuggacuuacaaugccgaacuguugguucuauuggaaaaugaaagaacuuuggacuaccacgauucaaaugugaagaacuuauaugaaaagguaagaagccaguuaaaaaacaaugccaaggaaauuggaaacggcugcuuugaauuuuaccacaaaugcgauaacacgugcauggaaagugucaaaaaugggacuuaugacuacccaaaauacucagaggaagcaaaauuaaacagagaagaaauagaugggguaaagcuagaaucaacaaggauuuaccagauuuuggcgaucuauucaacugucgccaguucauugguacugguagucucccugggggcaaucaguuucuggaugugcucuggucauagcuguagaauaugcauuuaa

SEQ ID NO: 37636 - RNA, 1695 nt, Artificial Sequence
  derived and/or modified CDS sequence (wt) from hemagglutinin__InfluenzaA__ADM14802
augaaggcaauacuaguaguucugcuauauacauuugcaaccgcaaaugcagacacauuauguauagguuaucaugcgaacaauucaacagacacuguagacacaguacuagaaaagaauguaacaguaacacacucuguuaaccuucuagaagacaagcauaacgggaaacuaugcaaaauaagagggguagccccauugcauuuggguaaauguaacauugcuggcuggauccugggaaauccagagugugaaucacucuccacagcaagcucaugguccuacauuguggaaacaucuaguucagacaauggaacguguuacccaggagauuucaucgauuaugaggagcuaagagagcaauugagcucagugucaucauuugaaagguuugagauauuccccaagacaaguucauggcccaaucaugacucgaacaaagguguaacggcagcauguccucaugcuggagcaaaaagcuucuacaaaaauuuaauauggcuaguuaaaaaaggaaauucauacccaaagcucagcaaauccuacaucaaugauaaagggaaagaaguccucgugcuauggggcauucaccauccaucuacuagugcugaccaacaaagucucuaucagaaugcagaugcauauguuuuuguggggacaucaagauacagcaagaaguucaagccggaaauagcaauaagacccaaagugagggaucaagaagggagaaugaacuauuacuggacacuaguagagccgggagacaaaauaacauucgaagcaacuggaaaucuagugguaccgagauaugcauucgcaauggaaagaaaugcuggaucugguauuaucauuucagauacaccaguccacgauugcaauacaacuugucagacacccaagggugcuauaaacaccagccucccauuucagaauauacauccgaucacaauuggaaaauguccaaaauauguaaaaagcacaaaauugagacuggccacaggauugaggaaugucccgucuauucaaucuagaggccuauuuggggccauugccgguuucauugaagggggguggacagggaugguagauggaugguacgguuaucaccaucaaaaugagcaggggucaggauaugcagccgaccugaagagcacacagaaugccauugacgagauuacuaacaaaguaaauucuguuauugaaaagaugaauacacaguucacagcaguagguaaagaguucaaccacuuggaaaaaagaauagagaauuuaaauaaaaaaguugaugaugguuuccuggacauuuggacuuacaaugccgaacuguugguucuauuggaaaaugaaagaacuuuggacuaccacgauucaaaugugaagaacuuauaugaaaagguaagaagccaguuaaaaaacaaugccaaggaaauuggaaacggcugcuuugaauuuuaccacaaaugcgauaacacgugcauggaaagugucaaaaaugggacuuaugacuacccaaaauacucagaggaagcaaaauuaaacagagaagaaauagaugggguaaagcuggaaucaacaaggauuuaccagauuuuggcgaucuauucaacugucgccaguucauugguacugguagucucccugggggcaaucaguuucuggaugugcucuggucauagcuguagaauauguauuuaa

SEQ ID NO: 37637 - RNA, 1704 nt, Artificial Sequence
  derived and/or modified CDS sequence (wt) from hemagglutinin__InfluenzaA__ADM14830
augaaggcaauacuaguaguucugcuauauacauuugcaaccgcaaaugcagacacauuauguauagguuaucaugcgaacaauucaacagacacuguagacacaguacuagaaaagaauguaacaguaacacacucuguuaaccuucuagaagacaagcauaacgggaaacuaugcaaacuaagagggguagccccauugcauuuggguaaauguaacauugcuggcuggauccugggaaauccagagugugaauuacucuccacagcaagcucaugguccuacauuguggaaacaucuaguucagacaauggaacguguuacccaggagauuucaucgauuaugaggagcuaagagagcaauugagcucagugucaucauuugaaagguuugagauauuccccaagacaaguucauggcccaaucaugacucgaacaaagguguaacggcagcauguccucaugcuggagcaaaaagcuucuacaaaaauuuaauauggcuaguuaaaaaaggaaauucauacccaaagcucagcaaauccuacauuaaugauaaagggaaagaaguccucgugcuauggggcauucaccauccaucuacuagugcugaccaacaaagucucuaucagaaugcagaugcauauguuuuuguggggacaucaagauacagcaagaaguucaagccggaaauagcaauaagacccaaagugagggaucaagaagggagaaugaacuauuacuggacacuaguagagccgggagacaaaauaacauucgaagcaacuggaaaucuagugguaccgagauaugcauucgcaauggaaagaaaugcugaaucugguauuaucauuucagauacaccaguccacgauugcaauacaacuugucagacacccaagggugcuauaaacaccagccucccauuucagaauauacauccgaucacaauuggaaaauguccaaaauauguaaaaagcacaaaauugagacuggccacaggauugaggaaugucccgucuauucaaucuagaggccuauuuggggccauugccgguuucauugaagggggguggacagggaugguagauggaugguacgguuaucaccaucaaaaugagcaggggucaggauaugcagccgaccugaagagcacacagaaugccauugacgagauuacuaacaaaguaaauucuguuauugaaaagaugaauacacaguucacagcaguagguaaagaguucaaccaccuggaaaaaagaauagagaauuuaaauaaaaaaguugaugaugguuuccuggacauuuggacuuacaaugccgaacuguugguucuauuggaaaaugaaagaacuuuggacuaccacgauucaaaugugaagaaauuauaugaaaagguaagaagccaguuaaaaaacaaugccaaggaaauuggaaacggcugcuuugaauuuuaccacaaaugcgauaacacgugcauggaaagugucaaaaaugggacuuaugacuacccaaaauacucagaggaagcaaaauuaaacagagaagaaauagaugggguaaagcuggaaucaacaaggauuuaccagauuuuggcgaucuauucaacugucgccaguucauugguacugguagucucccugggggcaaucaguuucuggaugugcucuggucauagcugucuacaguguagaauauguauuuaa

SEQ ID NO: 37638 - RNA, 1695 nt, Artificial Sequence
  derived and/or modified CDS sequence (wt) from hemagglutinin__InfluenzaA__ADM14848
augaaggcaauacuaguaguucugcuauauacauuugcaaccgcaaaugcagacacauuauguauagguuaucaugcgaacaauucaacagacacuguagacacaguacuggaaaagaauguaacaguaacacacucuguuaaccuucuagaagacaagcauaacgggaaacuaugcaaacuaagagggguagccccauugcauuuggguaaauguaacauugcuggcuggauccugggaaauccagagugugaaucacucuccacagcaagcucaugguccuacauuguggaaacaucuaguucagacaauggaacguguuacccaggagauuucaucgauuaugaggagcuaagagagcaauugagcucagugucaucauuugaaagguuugagauauuccccaagacaaguucauggcccaaucaugacucgaacaaagguguaacggcagcauguccucaugcuggagcaaaaagcuucuacaaaaauuuaauauggcuaguuaaaaaaggaaauucauacccaaagcucagcaaauccuacauuaaugauaaagggaaagaaguucucgugcuauggggcauucaccauccaucuacuagugcugaccaacaaagucucuaucagaaugcagaugcauauguuuuuguggggucaucaagauacagcaagaaguucaagccggaaauagcaauaagacccaaagugagggaucaagaagggagaaugaacuauuacuggacacuaguagagccgggagacaaaauaacauucgaagcaacuggaaaucuagugguaccgagauaugcauucgcaauggaaagaaaugcuggaucugguauuaucauuucagauacaccaguccacgauugcaauacaacuugucagacacccaagggugcuauaaacaccagccucccauuucagaauauacauccgaucacaauuggaaaauguccaaaauauguaaaaagcacaaaauugagacuggccacaggauugaggaaugucccgucuauucaaucuagaggccuauuuggggccauugccgguuucauugaagggggguggacagggaugguagauggaugguacgguuaucaccaucaaaaugagcaggggucaggauaugcagccgaccugaagagcacacagaaugccauugacgagauuacuaacaaaguaaauucuguuauugaaaagaugaauacacaguucacagcaguagguaaagaguucaaccaccuggaaaaaagaauagagaauuuaaauaaaaaaguugaugaugguuuccuggacauuuggacuuacaaugccgaacuguugguucuauuggaaaaugaaagaacuuuggacuaccacgauucaaaugugaagaacuuauaugaaaagguaagaagucaguuaaaaaacaaugccaaggaaauuggaaacggcugcuuugaauuuuaccacaaaugcgauaacacaugcauggaaagugucaaaaaugggacuuaugacuacccaaaauacucagaggaagcaaaauuaaacagagaagaaauagaugggguaaagcuggaaucaacaaggauuuaccagauuuuggcgaucuauucaacugucgccaguucauugguacugguagucucccugggggcaaucaguuucuggaugugcucuggucauagcuguagaauauguauuuaa

SEQ ID NO: 37639 - RNA, 1695 nt, Artificial Sequence
  derived and/or modified CDS sequence (wt) from hemagglutinin__InfluenzaA__ADM14866
augaaggcaauacuaguaguucugcuauauacauuugcaaccgcaaaugcagacacauuauguauagguuaucaugcgaacaauucaacagacacuguagacacaguacuagaaaagaauguaacaguaacacacucuguuaaccuucuagaagacaagcauaacgggaaacuaugcaaacuaagagggguagccccauugcauuuggguaaauguaacauugcuggcuggauccugggaaauccagagugugaaucacucuccacagcaagcucaugguccuacauuguggaaacaucuaguucagacaauggaacguguuacccaggagauuucaucgauuaugaggagcuaagagagcaauugagcucagugucaucauuugaaagguuugagauauuccccaagacaaguucauggcccaaucaugacucggacaaagguguaacggcagcauguccucaugcuggagcaaaaagcuucuacaaaaauuuaauauggcuaguuaaaaaaggaaauucauacccaaagcucagcaaauccuacauuaaugauaaagggaaagaaguccucgugcuauggggcauucaccauccaucuacuagugcugaccaacaaagucucuaucagaaugcagaugcauauguuuuuguggggacaucaagauacagcaagaaguucaagccggaaauagcaauaagacccaaagugagggaucaagaagggagaaugaacuauuacuggacacuaguagagccgggagacaaaauaacauucgaagcaacuggaaaucuagugguaccgagauaugcauucgcaauggaaagaaaugcuggaucugguauuaucauuucagauacaccaguccacgauugcaauacaacuugucagacacccaagggugcuauaaacaccagccucccauuucagaauauacauccgaucacaauuggaaaauguccaaaauauguaaaaagcauaaaauugagacuggccacaggauugaggaaugucccgucuauucaaucuagaggccuauuuggggccauugccgguuucauugaagggggguggacagggaugguagauggaugguacgguuaucaccaucaaaaugagcaggggucaggauaugcagccgaccugaagagcacacagaaugccauugacgagauuacuaacaaaguaaauucuguuauugaaaagaugaauacacaguucacagcaguagguaaagaguucaaccaccuggaaaaaagaauagagaauuuaaauaaaaaaguugaugaugguuuccuggacauuuggacuuacaaugccgaacuguugguucuauuggaaaaugaaagaacuuuggacuaccacgauucaaaugugaagaacuuauaugaaaagguaagaagccaguuaaaaaacaaugccaaggaaauuggaaacggcugcuuugaauuuuaccacaaaugcgauaacacgugcauggaaagugucaaaaaugggacuuaugacuacccaaaauacucagaggaagcaaaauuaaacagagaagaaauagaugggguaaagcuggaaucaacaaggauuuaccagauuuuggcgaucuauucaacugucgccaguucauugguacugguagucucccugggggcaaucaguuucuggaugugcucuggucauagcuguagaauauguauuuaa

SEQ ID NO: 37640 - RNA, 1695 nt, Artificial Sequence
  derived and/or modified CDS sequence (wt) from hemagglutinin__InfluenzaA__ADM14876
augaaggcaauacuaguaguucugcuauauacauuugcaaccgcaaaugcagacacauuauguauagguuaucaugcgaacaauucaacagacacuguagacacaguacuagaaaagaauguaacaguaacacacucuguuaaccuucuagaagacaagcauaacgggaaacuaugcaaacuaagagggguagccccauugcauuuggguaaauguaacauugcuggcuggauccugggaaauccagagugugaaucacucuccacagcaagcucaugguccuacauuguggaaacaucuaguucagacaauggaacguguuacccaggagauuucaucgauuaugaggagcuaagagagcaauugagcucagugucaucauuugaaagguuugagauauuccccaagacaaguucauggcccaaucaugacucaaacaaagguguaacggcagcauguccucaugcuggagcaaaaagcuucuacaaaaauuuaauauggcuaguuaaaaaaggaaauucauacccaaagcucagcaaauccuacauuaaugauaaagagaaagaaguccucgugcuauggggcauucaccauccaucuacuagugcugaccaacaaagucucuaucagaaugcagaugcauauguuuuuguggggacaucaagauacagcaagaaguucaagccggaaauagcaauaagacccaaagugagggaucaagaagggagaaugaacuauuacuggacacuaguagagccgggagacaaaauaacauucgaagcaacuggaaaucuagugguaccgagauaugcauucgcaauggaaagaaaugcuggaucugguauuaucauuucagauacaccaguccacgauugcaauacaacuugucagacacccaagggugcuauaaacaccagccucccauuucagaauauacauccgaucacaauuggaaaauguccaaaauauguaaaaagcacaaaauugagacuggccacaggauugaggaaugucccgucuauucaaucuagaggccuauuuggggccauugccgguuucauugaagggggguggacagggaugguagauggaugguacgguuaucaccaucaaaaugagcaggggucaggauaugcagccgaccugaagagcacacagaaugccauugacgagauuacuaacaaaguaaauucuguuauugaaaagaugaauacacaguucacagcaguagguaaagaguucaaccaccuggaaaaaagaauagagaauuuaaauaaaaaaguugaugaugguuuccuggacauuuggacuuacaaugccgaacuguugguucuauuggaaaaugaaagaacuuuggacuaccacgauucaaaugugaagaacuuauaugaaaagguaagaagccaguuaaaaaacaaugccaaggaaauuggaaacggcugcuuugaauuuuaccacaaaugcgauaacacgugcauggaaagugucaaaaaugggacuuaugacuacccaaaauacucagaggaagcaaaauuaaacagagaagaaauagaugggguaaagcuggaaucaacaaggauuuaccagauuuuggcgaucuauucaacugucgccaguucauugguacugguagucucccugggggcaaucaguuucuggaugugcucuggucauagcuguagaauauguauuuaa

SEQ ID NO: 37641 - RNA, 1704 nt, Artificial Sequence
  derived and/or modified CDS sequence (wt) from hemagglutinin__InfluenzaA__ADM14885
augaaggcaauacuaguaguucugcuauauacauuugcaaccgcaaaugcagacacauuauguauagguuaucaugcgaacaauucaacagacacuguagacacaguacuagaaaagaauguaacaguaacacacucuguuaaccuucuagaagacaagcauaacgggaaacuaugcaaacuaagagggguagccccauugcauuuggguaaauguaacauugcuggcuggauccugggaaauccagagugugaauuacucuccacagcaagcucaugguccuacauuguggaaacaucuaguucagacaauggaacguguuacccaggagauuucaucgauuaugaggagcuaagagagcaauugagcucagugucaucauuugaaagguuugagauauuccccaagacaaguucauggcccaaucaugacucgaacaaagguguaacggcagcauguccucaugcuggagcaaaaagcuucuacaaaaauuuaauauggcuaguuaaaaaaggaaauucauacccaaagcucagcaaauccuacauuaaugauaaagagaaagaaguccucgugcuauggggcauucaccauccaucuacuagugcugaccaacaaagucucuaucagaaugcagaugcauauguuuuuguggggacaucaagauacagcaagaaguucaagccggaaauaguaauaagacccaaagugagggaucaagaagggagaaugaacuauuacuggacacuaguagagccgggagacaaaauaacauucgaagcaacuggaaaucuagugguaccgagauaugcauucgcaauggaaagaaaugcugaaucugguauuaucauuucagauacaccaguccacgauugcaauacaacuugucagacacccaagggugcuauaaacaccagccucccauuucagaauauacauccgaucacaauuggaaaauguccaaaauauguaaaaagcacaaaauugagacuggccacaggauugaggaaugucccgucuauucaaucuagaggccuauuuggggccauugccgguuucauugaagggggguggacagggaugguagauggaugguacgguuaucaccaucaaaaugagcaggggucaggauaugcagccgaccugaagagcacacagaaugccauugacgagauuacuaacaaaguaaauucuguuauugaaaagaugaauacacaguucacagcaguagguaaagaguucaaccaccuggaaaaaagaauagagaauuuaaauaaaaaaguugaugaugguuuccuggacauuuggacuuacaaugccgaacuguugguucuauuggaaaaugaaagaacuuuggacuaccacgauucaaaugugaagaaauuauaugaaaagguaagaagccaguuaaaaaacaaugccaaggaaauuggaaacggcugcuuugaauuuuaccacaaaugcgauaacacaugcauggaaagugucaaaaaugggacuuaugacuacccaaaauacucagaggaagcaaaauuaaacagagaagaaauagaugggguaaagcuggaaucaacaaggauuuaccagauuuuggcgaucuauucaacugucgccaguucauugguacugguagucucccugggggcaaucaguuucuggaugugcucuggucaugggucucuacaguguagaauauguauuuaa

SEQ ID NO: 37642 - RNA, 1695 nt, Artificial Sequence
  derived and/or modified CDS sequence (wt) from hemagglutinin__InfluenzaA__ADM14894
augaaggcaauacuaguaguucugcuauauacauuugcaaccgcaaaugcagacacauuauguauagguuaucaugcgaacaauucaacagacacuguggacacaguacuagaaaagaauguaacaguaacacacucuguuaaccuucuagaagacaagcauaacgggaaacuaugcaaacuaagagggguagccccauugcauuuggguaaauguaacauugcuggcuggauccugggaaauccagagugugaaucacucuccacagcaagcucaugguccuacauuguggaaacaucuaguucagacaauggaacguguuacccaggagauuucaucgauuaugaggagcuaagagagcaauugagcucagugucaucauuugaaagguuugagauauuccccaagacaaguucauggcccaaucaugacucgaacaaagguguaacggcagcauguccucaugcuggagcaaaaagcuucuacaaaaauuuaauauggcuaguuaaaaaaggaaauucauacccaaagcucagcaaauccuacauuaaugauaaagagaaagaaguccucgugcuauggggcauucaccauccaucuacuagugcugaccaacaaagucucuaucagaaugcagaugcauauguuuuuguggggacaucaagauacagcaagaaguucaagccggaaauaguaauaagacccaaagugagggaucaagaagggagaaugaacuauuacuggacacuaguagagccgggagacaaaauaacauucgaagcaacuggaaaucuagugguaccgagauaugcauucgcaauggaaagaaaugcuggaucugguauugucauuucagauacaccaguccacgauugcaauacaacuugucagacacccaagggugcuauaaacaccagccucccauuucagaauauacauccgaucacaauuggaaaauguccaaaauauguaaaaagcacaaaauugagacuggccacgggauugaggaaugucccgucuauucaaucuagaggccuauuuggggccauugccgguuucauugaagggggguggacagggaugguagauggaugguacgguuaucaccaucaaaaugagcaggggucaggauaugcagccgaccugaagagcacacagaaugccauugacgagauuacuaacaaaguaaauucuguuauugaaaagaugaauacacaguucacagcaguagguaaagaguucaaccaccuggaaaaaagaauagagaauuuaaauaaaaaaguugaugaugguuuccuggacauuuggacuuacaaugccgaacuguugguucuauuggaaaaugaaagaacuuuggacuaccacgauucaaaugugaagaaauuauaugaaaagguaagaagccaguuaaaaaacaaugccaaggaaauuggaaacggcugcuuugaauuuuaccacaaaugcgauaacacgugcaugaaaagugucaaaaaugggacuuaugacuacccaaaauacucagaggaagcaaaauuaaacagagaagaaauagaugggguaaagcuggaaucaacaaggauuuaccagauuuuggcgaucuauucaacugucgccaguucauugguacugguagucucccugggggcaaucaguuucuggaugugcucuggucauagcuguagaauauguauuuaa

SEQ ID NO: 37643 - RNA, 1695 nt, Artificial Sequence
  derived and/or modified CDS sequence (wt) from hemagglutinin__InfluenzaA__ADM14903
augaaggcaauacuaguaguucugcuauguacauuugcaaccgcaaaugcagacacauuauguauagguuaucaugcgaacaauucaacagacacuguagacacaguacuagaaaagaauguaacaguaacacacucuguuaaccuucuagaagacaagcauaacgggaaacuaugcaaacuaagagggguagccccauugcauuuggguaaauguaacauugcuggcuggauccugggaaacccagagugugaaucacucuccacagcaagcucaugguccuacauuguggaaacaucuaguucagacaauggaacguguuacccaggagauuucaucgauuaugaggaguuaagagagcaauugagcucagugucaucauuugaaagguuugagauauuccccaagacaaguucauggcccaaucaugacucgaacaaagguguaacggcagcauguccucaugcuggagcaaaaagcuucuacaaaaauuuaauauggcuaguuaaaaaaggaaauucauacccaaagcucagcaaauccuacauuaaugauaaagggaaagaaguccucgugcuauggggcauucaccauccaucuacuagugcugaccaacaaagucucuaucagaaugcagaugcauauguuuuuguggggacaucaagauacagcaagaaguucaagccggaaauagcaauaagacccaaagugagggaucaagaagggagaaugaacuauuacuggacacuaguagagccgggagacaaaauaacauucgaagcaacuggaaaucuagugguaccgagauaugcauucgcaauggaaagaaaugcuggaucugguauuaucauuucagauacaccaguccacgauugcaauacaacuugucagacacccaagggugcuauaaacaccagccucccauuucagaauauacauccgaucacaauuggaaaauguccaaaauauguaaaaagcacaaaauugagacuggccacaggauugaggaaugucccgucuauucaaucuagaggccuauuuggggccauugccgguuucauugaagggggguggacagggaugguagauggaugguacgguuaucaccaucaaaaugagcaggggucaggauaugcagccgaccugaagagcacacagaaugccauugacaagauuacuaacaaaguaaauucuguuauugaaaagaugaauacacaguucacagcaguagguaaagaguucaaccaccuggaaaaaagaauagagaauuuaaauaaaaaaguugaugaugguuuccuggacauuuggacuuacaaugccgaacuguugguucuauuggaaaaugaaagaacuuuggacuaccacgauucaaaugugaagaacuuauaugaaaagguaagaagccaguuaaaaaacaaugccaaggaaauuggaaacggcugcuuugaauuuuaccacaaaugcgauaacacgugcauggaaagugucaaaaaugggacuuaugacuacccaaaauacucagaggaagcaaaauuaaacagagaagaaauagaugggguaaagcuggaaucaacaaggauuuaccagauuuuggcgaucuauucaacugucgccaguucauugguacugguagucucccugggggcaaucaguuucuggaugugcucuggucauagcuguagaauauguauuuaa

SEQ ID NO: 37644 - RNA, 1695 nt, Artificial Sequence
  derived and/or modified CDS sequence (wt) from hemagglutinin__InfluenzaA__ADM14912
augaaggcaauacuaguaguucugcuauauacauuugcaaccgcaaaugcagacacauuauguauagguuaucaugcgaacaauucaacagacacuguagacacaguacuagaaaagaauguaacaguaacacacucuguuaaccuucuagaagacaagcauaacgggaaacuaugcaaacuaagagggguagccccauugcauuuggguaaauguaacauugcuggcuggauccugggaaauccagagugugaaucacucuccacagcaagcucaugguccuacauuguggaaacaucuaguucagacaauggaacguguuacccaggagauuucaucgauuaugaggagcuaagagagcaauugagcucagugucaucauuugaaagguuugagauauuccccaagacaaguucauggcccaaucaugacucgaacaaagguguaacggcagcauguccucaugcuggagcaaaaagcuucuacaaaaauuuaauauggcuaguuaaaaaaggaaauucauacccaaagcucagcaaauccuacauuaaugauaaagggaaagaaguccucgugcuauggggcauucaccauccaucuacuagugcugaccaacaaagucucuaucagaaugcagaugcauauguuuuuguggggacaucaagauacagcaagaaguucaagccggaaauagcuauaagacccaaagugagagaucaagaagggagaaugaacuauuacuggacacuaguagagccgggagacaaaauaacauucgaagcaacuggaaaucuagugguaccgagauaugcauucgcaauggaaagaaaugcuggaucugguauuaucauuucagauacaccaguccacgauugcaauacaacuugucagacacccgagggugcuauaaacaccagccucccauuucagaauauacauccgaucacaauuggaaaauguccaaaauauguaaaaagcacaaaauugagacuggccacaggauugaggaaugucccgucuauucaaucuagaggccuauuuggggccauugccgguuucauugaagggggguggacagggaugguagauggaugguacgguuaucaccaucaaaaugagcaggggucaggauaugcagccgaccugaagagcacgcagaaugccauugacgagauuacuaacaaaguaaauucuguuauugaaaagaugaauacacaguucacagcaguagguaaagaguucaaccaccuggaaaaaagaauagagaauuuaaauaaaaaaguugaugaugguuuccuggacauuuggacuuacaaugccgaacuguugguucuauuggaaaaugaaagaacuuuggacuaccacgauucaaaugugaagaacuuauaugaaaagguaagaagccaguuaaaaaacaaugccaaggaaauuggaaacggcugcuuugaauuuuaccacaaaugcgauaacacgugcauggaaagugucaaaaaugggacuuaugacuacccaaaauacucagaggaagcaaaauuaaacagagaagaaauagaugggguaaagcuggaaucaacaaggauuuaccagauuuuggcgaucuauucaacugucgccaguucauugguacugguagucucccugggggcaaucaguuucuggaugugcucuggucauagcuguagaauauguauuuaa

SEQ ID NO: 37645 - RNA, 1695 nt, Artificial Sequence
  derived and/or modified CDS sequence (wt) from hemagglutinin__InfluenzaA__ADM14921
augaaggcaauacuaguaguucugcuauauacauuugcaaccgcaaaugcagacacauuauguauagguuaucaugcgaacaauucaacagacacuguagacacaguacuagaaaagaauguaacaguaacacacucuguuaaccuucuagaagacaagcauaacgggaaacuaugcaaacuaagagggguagccccauugcauuuggguaaauguaacauugcuggcuggauccugggaaauccagagugugaaucacucuccacagcaagcucaugguccuacauuguggaaacaucuaguucagacaauggaacguguuacccaggagauuucaucgauuaugaggagcuaagagaacaauugagcucagugucaucauuugaaagguuugagauauuccccaagacaaguucauggcccaaucaugacucgaacaaagguguaacggcagcauguccucaugcuggagcaaaaagcuucuacaaaaauuuaauauggcuaguuaaaaaaggaaauucauacccaaagcucagcaaauccuacauuaaugauaaagggaaagaaguccucgugcuauggggcauucaccauccaucuacuagugccgaccaacaaagucucuaucagaaugcagaugcauauguuuuuguggggacaucaagauacagcaagaaguucaagccggaaauagcaauaagacccaaagugagggaucaagaagggagaaugaacuauuacuggacacuaguagagccgggagacaaaauaacauucgaagcaacuggaaaucuagugguaccgagauaugcauucgcaauggaaagaaaugcuggaucugguauuaucauuucagauacaccaguccacgauugcaauacaacuugucagacacccaagggugcuauaaacaccagccucccauuucagaauauacauccgaucacaauuggaaaauguccaaaauauguaaaaagcacaaaauugagacuggccacaggauugaggaaugucccgucuauucaaucuagaggccuauuuggggccauugccgguuucauugaagggggguggacagggaugguagauggaugguacgguuaucaccaucaaaaugagcaggggucaggauaugcagccgaccugaagagcacacagaaugccauugacgagauuacuaacaaaguaaauucuguuauugaaaagaugaauacacaguucacagcaguagguaaagaguucaaccaccuggaaaaaagaauagagaauuuaaauaaaaaaguugaugaugguuuccuggacauuuggacuuacaaugccgaacuguugguucuauuggaaaaugaaagaacuuuggacuaccacgauucaaaugugaagaacuuauaugaaaagguaagaagccaguuaaaaaacaaugccaaggaaauuggaaacggcugcuuugaauuuuaccacaaaugcgauaacacgugcauggaaagugucaaaaaugggacuuaugacuacccaaaauacucagaggaagcaaaauuaaacagagaagaaauagaugggguaaagcuggaaucaacaaggauuuaccagauuuuggcgaucuauucaacugucgccaguucauugguacugguagucucccugggggcaaucaguuucuggaugugcucuggucauagcuguagaauauguauuuaa

SEQ ID NO: 37646 - RNA, 1701 nt, Artificial Sequence
  derived and/or modified CDS sequence (wt) from hemagglutinin__InfluenzaA__ADM14930
augaaggcaauacuaguaguucugcuauauacauuugcaaccgcaaaugcagacacauuauguauagguuaucaugcgaacaauucaacagacacuguagacacaguacuagaaaagaauguaacaguaacacacucuguuaaccuucuagaagacaagcauaacgggaaacuaugcaaacuaagagggguagccccauugcauuuggguaaaugcaacauugcuggcuggauccugggaaauccagagugugaaucacucuccacagcaagcucaugguccuacauuguggaaacaucuaguucagacaauggaacguguuacccaggagauuucaucgauuaugaggagcuaagagagcaauugagcucagugucaucauuugaaagguuugagauauuccccaagacaaguucauggcccaaucaugacucgaacaaagguguaacggcagcauguccucaugcuggagcaaaaagcuucuacaaaaauuuaauauggcuaguuaaaaaaggaaauucauacccaaagcucagcaaauccuacauuaaugauaaagggaaagaaguccucgugcuauggggcauucaccauccaucuacuagugcugaccaacaaagucucuaucagaaugcagaugcauauguuuuuguggggacaucaagauacagcaagaaguucaagccggaaauagcaauaagacccaaagugagggaucaagaagggagaaugaacuauuacuggacacuaguagagccgggagacaaaauaacauucgaagcaacuggaaaucuagugguaccgagauaugcauucgcaauggaaagaaaugcugggucugguauuaucauuucagauacaccaguccacgauugcaauacaacuugucagacacccaagggugcuauaaacaccagccucccauuucagaauauacauccgaucacaauuggaaaauguccaaaauauguaaaaagcacaaaauugagacuggccacaggauugaggaaugucccgucuauucaaucuagaggccuauuuggggccauugccgguuucauugaagggggguggacagggaugguagauggaugguacgguuaucaccaucaaaaugagcaggggucaggauaugcagccgaccugaagagcacacagaaugccauugacaagauuacuaacaaaguaaauucuguuauugaaaagaugaauacacaguucacagcaguagguaaagaguucaaccaccuggaaaaaagaauagagaauuuaaauaaaaaaguugaugaugguuuccuggacauuuggacuuacaaugccgaacuguugguucuauuggaaaaugaaagaacuuuggacuaccacgauucaaaugugaagaacuuauaugaaaagguaagaagccaguuaaaaaacaaugccaaggaaauuggaaacggcugcuuugaauuuuaccacaaaugcgauaacacgugcauggaaagugucaaaaaugggacuuaugacuacccaaaauacucagaggaagcaaaauuaaacagagaagaaauagaugggguaaagcuggaaucaacaaggauuuaccagauuuuggcgaucuauucaacugucgccaguucauugguacugguagucucccugggggcaaucaguuucuggaugugcucuaaugggucucuacaguguagaauauguauuuaa

SEQ ID NO: 37647 - RNA, 1701 nt, Artificial Sequence
  derived and/or modified CDS sequence (wt) from hemagglutinin__InfluenzaA__ADM14948
augaaggcaauacuaguaguucugcuauauacauuugcaaccgcaaaugcagacacauuauguauagguuaucaugcgaacaauucaacagacacuguagacacaguacuagaaaagaauguaacaguaacacacucuguuaaccuucuagaagacaagcauaacgggaaacuaugcaaacuaagagggguagccccauugcauuuggguaaauguaacauugcuggcuggauccugggaaauccagagugugaaucacucuccacagcaagcucaugguccuacauuguggaaacaucuaguucagacaauggaacguguuacccaggagauuucaucgauuaugaggagcuaagagagcaauugagcucagugucaucauuugaaagguuugagauauuccccaagacaaguucauggcccaaucaugacucgaacaaagguguaacggcagcauguccucaugcuggagcaaaaggcuucuacaaaaauuuaauauggcuaguuaaaaaaggaaauucauacccaaagcucagcaaauccuacauuaaugauaaagggaaagaaguccucgugcuauggggcauucaccauccaucuacuagugcugaccaacaaagucucuaucagaaugcagaugcauauguuuuuguggggacaucaagauacagcaggaaguucaagccggaaauagcaauaagacccaaagugagggaucaagaagggagaaugaacuauuacuggacacuaguagagccgggagacaaaauaacauucgaagcaacuggaaaucuagugguaccgagauaugcauucgcaauggaaagaaaugcuggaucugguauuaucauuucagauacaccaguccacgauugcaauacaacuugucagacacccgagggugcuauaaacaccagccucccauuucagaauauacauccgaucacaauuggaaaauguccaaaauauguaaaaagcacaaaauugagacuggccacaggauugaggaaugucccgucuauucaaucuagaggccuauuuggggccauugccgguuucauugaagggggguggacagggaugguagauggaugguacgguuaucaccaucaaaaugagcaggggucaggauaugcagccgaccugaagagcacacagaaugccauugacgagauuacuaacaaaguaaauucuguuauugaaaagaugaauacacaguucacagcaguagguaaagaguucaaccaccuggaaaaaagaauagagaauuuaaauaaaaaaguugaugaugguuuccuggacauuuggacuuacaaugccgaacuguugguucuauuggaaaaugaaagaacuuuggacuaccacgauucaaaugugaagaacuuauaugaaaagguaagaagccaguuaaaaaacaaugccaaggaaauuggaaacggcugcuuugaauuuuaccacaaaugcgauaacacgugcauggaaagugucaaaaaugggacuuaugacuacccaaaauacucagaggaggcaaaauuaaacagagaagaaauagaugggguaaagcuggaaucaacaaggauuuaccagauuuuggcgaucuauucaacugucgccaguucauugguacugguagucucccugggggcaaucaguuucuggaugugcucuaaugggucucuacaguguagaauauguauuuaa

SEQ ID NO: 37648 - RNA, 1695 nt, Artificial Sequence
  derived and/or modified CDS sequence (wt) from hemagglutinin__InfluenzaA__ADM14966
augaaggcaauacuaguaguucugcuauauacauuugcaaccgcaaaugcagacacauuauguauagguuaucaugcgaacaauucaacagacacuguagacacaguacuagaaaagaauguaacaguaacacacucuguuaacauucuagaagacaagcauaacgggaaacuaugcaaacuaagagggguagccccauugcauuuggguaaauguaacauugcuggcuggauccugggaaauccagagugugaaucacucuccacagcaagcucaugguccuacauuguggaaacaucuaguucagacaauggaacguguuacccaggagauuucaucgauuaugaggagcuaagagagcaauugagcucagugucaucauuugaaagguuugagauauuccccaagacaaguucauggcccaaucaugacucgaacaaagguguaacggcagcauguccucaugcuggagcaaaaagcuucuacaaaaauuuaauauggcuaguuaaaaaaggaaauucauacccaaagcucagcaaauccuacauuaaugauaaagggaaagaaguccucgugcuauggggcauucaccauccaucuacuagugcugaccaacaaagucucuaucagaaugcagaugcauauguuuuuguggggucaucaagauacagcaagaaguucaagccggaaauagcaauaagacccaaagugagggaucaagaagggagaaugaacuauuacuggacacuaguagagccgggagacaaaauaacauucgaagcaacuggaaaucuagugguaccgagauaugcauucgcaauggaaagaaaugcuggaucugguauuaucauuucagauacaccaguccacgauugcaauacaacuugucagacacccaagggugcuauaaacaccagccucccauuucagaauauacauccgaucacaauuggaaaauguccaaaauauguaaaaagcacaaaauugagacuggccacaggauugaggaaugucccuucuauucaaucuagaggccuauuuggggccauugccgguuucauugaagggggguggacagggaugguagauggaugguacgguuaucaccaucaaaaugagcaggggucaggauaugcagccgaccugaagagcacacagaaugccauugacgagauuacuaacaaaguaaauucuguuauugaaaagaugaauacacaguucacagcaguagguaaagaguucaaccacuuggaaaaaagaauagagaauuuaaauaaaaaaguugaugaugguuuccuagacauuuggacuuacaaugccgaacuguugguucuauuggaaaaugaaagaacuuuggacuaccacgauucaaaugugaagaacuuauaugaaaagguaagaagccagcuaaaaaacaaugccaaggaaauuggaaacggcugcuuugaauuuuaccacaaaugcgauaacacgugcauggaaagugucaaaaaugggacuuaugacuacccaaaauacucagaggaagcaaaauuaaacagagaagaaauagaugggguaaagcuggaaucaacaaggauuuaccagauuuuggcgaucuauucaacugucgccaguucauugguacugguagucucccugggggcaaucaguuucuggaugugcucuggucauagcuguagaauauguauuuaa

SEQ ID NO: 37649 - RNA, 1701 nt, Artificial Sequence
  derived and/or modified CDS sequence (wt) from hemagglutinin__InfluenzaA__ADM14975
augaaggcaauacuaguaguucugcuauauacauuugcaaccgcaaaugcagacacauuauguauagguuaucaugcgaacaauucaacagacacuguagacacaguacuagaaaagaauguaacaguaacacacucuguuaacauucuagaagacaagcauaacgggaaacuaugcaaacuaagagggguagccccauugcauuuggguaaauguaacauugcuggcuggauccugggaaauccagagugugaaucacucuccacagcaagcucaugguccuacauuguggaaacaucuaguucagacaauggaacguguuacccaggagauuucaucgauuaugaggagcuaagagagcaauugagcucagugucaucauuugaaagguuugagauauuccccaagacaaguucauggcccaaucaugacucgaacaaagguguaacggcagcauguccucaugcuggagcaaaaagcuucuacaaaaauuuaauauggcuaguuaaaaaaggaaauucauacccaaagcucagcaaauccuacauuaaugauaaagggaaagaaguccucgugcuauggggcauucaccauccaucuacuagugcugaccaacaaagucucuaucagaaugcagaugcauauguuuuuguggggucaucaagauacagcaagaaguucaagccggaaauagcaauaagacccaaagugagggaucaagaagggagaaugaacuauuacuggacacuaguagagccgggagacaaaauaacauucgaagcaacuggaaaucuagugguaccgagauaugcauucgcaauggaaagaaaugcuggaucugguauuaucauuucagauacaccaguccacgauugcaauacaacuugucagacacccaagggugcuauaaacaccagccucccauuucagaauauacauccgaucacaauuggaaaauguccaaaauauguaaaaagcacaaaauugagacuggccacaggauugaggaaugucccuucuauucaaucuagaggccuauuuggggccauugccgguuucauugaagggggguggacagggaugguagauggaugguacgguuaucaccaucaaaaugagcaggggucaggauaugcagccgaccugaagagcacacagaaugccauugacgagauuacuaacaaaguaaauucuguuauugaaaagaugaauacacaguucacagcaguagguaaagaguucaaccaccuggaaaaaagaauagagaauuuaaauaaaaaaguugaugaugguuuccuagacauuuggacuuacaaugccgaacuguugguucuauuggaaaaugaaagaacuuuggacuaccacgauucaaaugugaagaacuuauaugaaaagguaagaagccagcuaaaaaacaaugccaaggaaauuggaaacggcugcuuugaauuuuaccacaaaugcgauaacacgugcauggaaagugucaaaaaugggacuuaugacuacccaaaauacucagaggaagcaaaauuaaacagagaagaaauagaugggguaaagcuggaaucaacaaggauuuaccagauuuuggcgaucuauucaacugucgccaguucauugguacugguagucucccugggggcaaucaguuucuggaugugcucuaaugggucucuacaguguagaauauguauuuaa

SEQ ID NO: 37650 - RNA, 1701 nt, Artificial Sequence
  derived and/or modified CDS sequence (wt) from hemagglutinin__InfluenzaA__ADM14985
augaaggcaauacuaguaguucugcuauauacauuugcaaccgcaaaugcagacacauuauguauagguuaucaugcgaacaauucaacagacacuguagacacaguacuagaaaagaauguaacaguaacacacucuguuaaccuucuagaagacaagcauaacgggaaacuaugcaaacuaagagggguagccccauugcauuuggguaaauguaacauugcuggcuggauccugggaaauccagagugugaaucacucuccacagcaagcucaugguccuacauuguggaaacaucuaguucagacaauggaacguguuacccaggagauuucaucgauuaugaggagcuaagagagcaauugagcucagugucaucauuugaaagguuugagauauuccccaagacaaguucauggcccaaucaugacucaaacaaagguguaacggcagcauguccucaugcuggagcaaaaagcuucuacaaaaauuuaauauggcuaguuaaaaaaggaaauucauacccaaagcucagcaaauccuacauuaaugauaaagagaaagaaguccucgugcuauggggcauucaccauccaucuacuagugcugaccaacaaagucucuaucagaaugcagaugcauauguuuuuguggggacaucaagauacagcaagaaguucaagccggaaauagcaauaagacccaaagugaggggacaagaagggagaaugaacuauuacuggacacuaguagagccgggagacaaaauaacauucgaagcaacuggaaaucuagugguaccgagauaugcauucgcaauggaaagaaaugcuggaucugguauugucauuucagauacaccaguccacgauugcaauacaacuugucagacacccaagggugcuauaaacaccagccucccauuucagaauauacauucgaucacaauuggaaaauguccaaaauauguaaaaagcacaaaauugagacuggccacaggauugaggaaugucccgucuauucaaucuagaggccuauuuggggccauugccgguuucauugaagggggguggacagggaugguagauggaugguacgguuaucaccaucaaaaugagcaggggucaggauaugcagccgaccugaagagcacacagaaugccauugacgagauuacuaacaaaguaaauucuguuauugaaaagaugaauacacaguucacagcaguagguaaagaguucaaccaccuggaaaaaagaauagagaauuuaaauaaaaaaguugaugaugguuuccuggacauuuggacuuacaaugccgaacuguugguucuauuggaaaaugaaagaacuuuggacuaccacgauucaaaugugaagaacuuauaugaaaagguaagaagccaguuaaaaaacaaugccaaggaaauuggaaacggcugcuuugaauuuuaccacaaaugcgauaacacgugcauggaaagugucaaaaaugggacuuaugacuacccaaaauacucagaggaagcaaaauuaaacagagaagaaauagaugggguaaagcuggaaucaacaaggauuuaccagauuuuggcgaucuauucaacugucgccaguucauugguacugguagucucccugggggcaaucaguuucuggaugugcucuaaugggucucuacaguguagaauauguauuuaa

SEQ ID NO: 37651 - RNA, 1701 nt, Artificial Sequence
  derived and/or modified CDS sequence (wt) from hemagglutinin__InfluenzaA__ADM23841
augaaggcaauacuaguaguucugcuauauacauuugcaaccgcaaaugcagacacauuauguauagguuaucaugcgaacaauucaacagacacuguagacacaguacuagaaaagaauguaacaguaacacacucuguuaaccuucuagaagacaagcauaacgggaaacuaugcaaacuaagagggguagccccauugcauuuggguaaauguaacauugcuggcuggauccugggaaauccagagugugaaucacucuccacagcaagcucaugguccuacauuguggaaacaucuaguucagacaauggaacguguuacccaggagauuucaucgauuaugaggagcuaagagagcaauugagcucagugucaucauuugaaagguuugagauauuccccaagacaaguucauggcccaaucaugacucgaacaaagguguaacggcagcauguccucaugcuggagcaaaaagcuucuacaaaaauuuaauauggcuaguuaaaaaaggaaauucauacccaaagcucagcaaauccuacauuaaugauaaagggaaagaaguccucgugcuauggggcauucaccaucaaucuacuagugcugaccaacaaagucucuaucagaaugcagaugcauauguuuuuguggggacaucaagauacagcaagaaguucaagccggaaauagcaauaagacccaaagugagggaucaagaagggagaaugaacuauuacuggacacuaguagagccgggagacaaaauaacauucgaagcaacuggaaaucuagugguaccgagauaugcauucgcaauggaaagaaaugcuggaucugguauuaucauuucagauacaccaguccacgauugcaauacaacuugucagacacccaagggugcuauaaacaccagccucccauuucagaauauacauccgaucacaauuggaaaauguccaaaauauguaaaaagcacaaaauugagacuggccacaggauugaggaaugucccgucuauucaaucuagaggccuauuuggggccauugccgguuucauugaagggggguggacagggaugguagauggaugguacgguuaucaccaucaaaaugagcaggggucaggauaugcagccgaccugaagagcacacagaaugccauugacgagauuacuaacaaaguaaauucuguuauugaaaagaugaauacacaguucacagcaguagguaaagaguucaaccaccuggaaaaaagaauagagaauuuaaauaaaaaaguugaugaugguuuccuggacauuuggacuuacaaugccgaacuguugguucuauuggaaaaugaaagaacuuuggacuaccacgauucaaaugugaagaacuuauaugaaaagguaagaagccaguuaaaaaacaaugccaaggaaauuggaaacggcugcuuugaauuuuaccacaaaugcgauaacacgugcauggaaagugucaaaaaugggacuuaugacuacccaaaauacucagaggaagcaaaauuaaacagagaagaaauagaugggguaaagcuggaaucaacaaggauuuaccagauuuuggcgaucuauucaacugucgccaguucauugguacugguagucucccugggggcaaucaguuucuggaugugcucuaaugggucucuacaguguagaauauguauuuaa

SEQ ID NO: 37652 - RNA, 1701 nt, Artificial Sequence; identical to SEQ ID NO: 35845
  derived and/or modified CDS sequence (wt) from hemagglutinin__InfluenzaA__ADM23843

SEQ ID NO: 37653 - RNA, 1701 nt, Artificial Sequence
  derived and/or modified CDS sequence (wt) from hemagglutinin__InfluenzaA__ADM23844
augaaggcaauacuaguaguucugcuauauacauuugcaaccgcaaaugcagacacauuauguauagguuaucaugcgaacaauucaacagacacuguagacacaguacuagaaaagaauguaacaguaacacacucuguuaaccuucuagaagacaagcauaacgggaaacuaugcaaacuaagagggguagccccauugcauuuggguaaauguaacauugcuggcuggauccugggaaauccagagugugaaucacucuccacagcaagcucaugguccuacauuguggaaacaucuauuucagacaauggaacguguuacccaggagauuucaucgauuaugaggagcuaagagagcaauugagcucagugucaucauuugaaagguuugagauauuccccaagacaaguucauggcccaaucaugacucgaacaaagguguaacgacagcauguccucaugcuggagcaaaaggcuucuacaaaaauuuaauauggcuaguuaaaaaaggaaauucauacccaaagcucagcaaauccuacauuaaugauaaagggaaagaaguccucgugcuauggggcauucaccaucaaucuacuagugcugaccaacaaagucucuaucagaaugcagaugcauauguuuuuguggggacaucaagauacagcaagaaguucaagccggaaaucgcaauaagacccaaagugagggaucaagaagguagaaugaacuauuacuggacacuaguagagccgggagacaaaauaacauucgaagcaacuggaaaucuagugguaccgagauaugcauucgcaauggaaagaaaugcuggaucugguauuaucauuucagauacaccaguccacgauugcaauacaacuugucagacacccaagggugcuauaaacaccagccucccauuucagaauauacauccgaucacaauuggaaaauguccaaaauauguaaaaagcacaaaauugagacuggccacaggauugaggaaugucccgucuauucaaucuagaggccuauuuggggccauugccgguuucauugaagggggguggacagggaugguagauggaugguacgguuaucaccaucaaaaugagcaggggucaggauaugcagccgaccugaagagcacacagaaugccauugacaagauuacuaacaaaguaaauucuguuauugaaaagaugaauacacaguucacagcaguagguaaagaguucaaccaccuggaaaaaagaauagagaauuuaaauaaaaaaguugaugaugguuuccuggacauuuggacuuacaaugccgaacuguugguucuauuggaaaaugaaagaacuuuggacuaccacgauucaaaugugaagaacuuauaugaaaagguaagaagccaguuaaaaaacaaugccaaggaaauuggaaacggcugcuuugaauuuuaccacaaaugcgauaacacgugcauggaaagugucaaaaaugggacuuaugacuacccaaaauacucagaggaagcaaaauuaaacagagaagaaauagaugggguaaagcuggaaucaacaaggauuuaccagauuuuggcgaucuauucaacugucgccaguucauugguacugguagucucccugggggcaaucaguuucuggaugugcucuaaugggucucuacaguguagaauauguauuuaa

SEQ ID NO: 37654 - RNA, 1701 nt, Artificial Sequence
  derived and/or modified CDS sequence (wt) from hemagglutinin__InfluenzaA__ADM23845
augaaggcaauacuaguaguucugcuauauacauuugcaaccgcaaaugcagacacauuauguauagguuaucaugcgaacaauucaacagacacuguagacacaguacuagaaaagaauguaacaguaacacacucuguuaaccuucuagaagacaagcauaacgggaaacuaugcaaacuaagagggguagccccauugcauuuggguaaauguaacauugcuggcuggauccugggaaauccagagugugaaucacucuccacagcaagcucaugguccuacauuguggaaacaucuauuucagacaauggaacguguuacccaggagauuucaucgauuaugaggagcuaagagagcaauugagcucagugucaucauuugaaagguuugagauauuccccaagacaaguucauggcccaaucaugacucgaacaaagguguaacgacagcauguccucaugcuggagcaaaaagcuucuacaaaaauuuaauauggcuaguuaaaaaaggaaauucauacccaaagcucagcaaauccuacauuaaugauaaagggaaagaaguccucgugcuauggggcauucaccaucaaucuacuagugcugaccaacaaagucucuaucagaaugcagaugcauauguuuuuguggggacaucaagauacagcaagaaguucaagccggaaauagcaauaagacccaaagugagggaucaagaagggagaaugaacuauuacuggacacuaguagagccgggagacaaaauaacauucgaagcaacuggaaaucuagugguaccgagauaugcauucgcaauggaaagaaaugcuggaucugguauuaucauuucagauacaccaguccacgauugcaauacaacuugucagacacccaagggugccauaaacaccagccucccauuucagaauauacauccgaucacaauuggaaaauguccaaaauauguaaaaagcacaaaauugagacuggccacaggauugaggaaugucccgucuauucaaucuagaggccuauuuggggccauugccgguuucauugaagggggguggacagggaugguagauggaugguacgguuaucaccaucaaaaugagcaggggucaggauaugcagccgaccugaagagcacacagaaugccauugacaagauuacuaacaaaguaaauucuguuauugaaaagaugaauacacaguucacagcaguagguaaagaguucaaccaccuggaaaaaagaauagagaauuuaaauaaaaaaguugaugaugguuuccuggacauuuggacuuacaaugccgaacuguugguucuauuggaaaaugaaagaacuuuggacuaccacgauucaaaugugaagaacuuauaugaaaagguaagaagccaguuaaaaaacaaugccaaggaaauuggaaacggcugcuuugaauuuuaccacaaaugcgauaacacgugcauggaaagugucaaaaaugggacuuaugacuacccaaaauacucagaggaagcaaaauuaaacagagaagaaauagaugggguaaagcuggaaucaacaaggauuuaccagauuuuggcgaucuauucaacugucgccaguucauugguacugguagucucccugggggcaaucaguuucuggaugugcucuaaugggucucuacaguguagaauauguauuuaa

SEQ ID NO: 37655 - RNA, 1701 nt, Artificial Sequence
  derived and/or modified CDS sequence (wt) from hemagglutinin__InfluenzaA__ADM23846
augaaggcaauacuaguaguucugcuauauacauuugcaaccgcaaaugcagacacauuauguauagguuaucaugcgaacaauucaacagacacuguagacacagugcuagaaaagaauguaacaguaacacacucuguuaaccuucuagaagacaagcauaacgggaaacuaugcaaacuaagagggguagccccauugcauuuggguaaauguaacauugcuggcuggauccugggaaauccagagugugaaucacucuccacagcaagcucaugguccuacauuguggaaacaucuauuucagacaauggaacguguuacccaggagauuucaucgauuaugaggagcuaagagagcaauugagcucagugucaucauuugaaagguuugagauauuccccaagacaaguucauggcccaaucaugacucgaacaaagguguaacgacagcauguccucaugcuggagcaaaaagcuucuacaaaaauuuaauauggcuaguuaaaaaaggaaauucauacccaaagcucagcaaauccuacauuaaugauaaagggaaagaaguccucgugcuauggggcauucaccauccaucuacuagugcugaccaacaaagucucuaucagaaugcagaugcauauguuuuuguggggacaucaagauacagcaagaaguucaagccggaaauagcaauaagacccaaagugagggaucaagaagggagaaugaacuauuacuggacacuaguagagccgggagacaaaauaacauucgaagcaacuggaaaucuagugguaccgagauaugcauucgcaauggaaagaaaugcuggaucugguauuaucauuucagauacaccaguccacgauugcaauacaacuugucagacacccaagggugcuauaaacaccagccucccauuucagaauauacauccgaucacaauuggaaaauguccaaaauauguaaaaagcacaaaauugagacuggccacaggauugaggaaugucccgucuauucaaucuagaggccuauuuggggccauugccgguuucauugaagggggguggacagggaugguagauggaugguacgguuaucaccaucaaaaugagcaggggucaggauaugcagccgaccugaagagcacacagaaugccauugacaagauuacuaacaaaguaaauucuguuauugaaaagaugaauacacaguucacagcaguagguaaagaguucaaccaccuggaaaaaagaauagagaauuuaaauaaaaaaguugaugaugguuuccuggacauuuggacuuacaaugccgaacuguugguucuauuggaaaaugaaagaacuuuggacuaccacgauucaaaugugaagaacuuauaugaaaagguaagaagccaguuaaaaaacaaugccaaggaaauuggaaacggcugcuuugaauuuuaccacaaaugcgauaacacgugcauggaaagugucaaaaaugggacuuaugacuacccaaaauacucagaggaagcaaaauuaaacagagaagaaauagaugggguaaagcuggaaucaacaaggauuuaccagauuuuggcgaucuauucaacugucgccaguucauugguacugguagucucccugggggcaaucaguuucuggaugugcucuaaugggucucuacaguguagaauauguauuuaa

SEQ ID NO: 37656 - RNA, 1701 nt, Artificial Sequence
  derived and/or modified CDS sequence (wt) from hemagglutinin__InfluenzaA__ADM23847
augaaggcaauacuaguaguucugcuauauacauuugcaaccgcaaaugcagacacauuauguauagguuaucaugcgaacaauucaacagacacuguagacacaguacuagaaaagaauguaacaguaacacacucuguuaaccuucuagaagacaagcauaacgggaaacuaugcaaacuaagagggguagccccauugcauuuggguaaauguaacauugcuggcuggauccugggaaauccagagugugaaucacucuccacagcaagcucaugguccuacauuguggaaacaucuauuucagacaauggaacguguuacccaggagauuucaucgauuaugaggagcuaagagagcaauugagcucagugucaucauuugaaagguuugagauauuccccaagacaaguucauggcccaaucaugacucgaacaaagguguaacgacagcauguccucaugcuggagcaaaaggcuucuacaaaaauuuaauauggcuaguuaaaaaaggaaauucauacccaaagcucagcaaauccuacauuaaugauaaagggaaagaaguccucgugcuauggggcauucaccaucaaucuacuagugcugaccaacaaagucucuaucagaaugcagaugcauauguuuuuguggggacaucaagauacagcaagaaguucaagccggaaaucgcaauaagacccaaagugagggaucaagaagggagaaugaacuauuacuggacacuaguagagccgggagacaaaauaacauucgaagcaacuggaaaucuagugguaccgagauaugcauucgcaauggaaagaaauguuggaucugguauuaucauuucagauacaccaguccacgauugcaauacaacuugucagacacccaagggugcuauaaacaccagccucccauuucagaauauacauccgaucacaauuggaaaauguccaaaauauguaaaaagcacaaaauugagacuggccacaggauugaggaaugucccgucuauucaaucuagaggccuauuuggggccauugccgguuucauugaagggggguggacagggaugguagauggaugguacgguuaucaccaucaaaaugagcaggggucaggauaugcagccgaccugaagagcacacagaaugccauugacaagauuacuaacaaaguaaauucuguuauugaaaagaugaauacacaguucacagcaguagguaaagaguucaaccaccuggaaaaaagaauagagaauuuaaauaaaaaaguugaugaugguuuccuggacauuuggacuuacaaugccgaacuguugguucuauuggaaaaugaaagaacuuuggacuaccacgauucaaaugugaagaacuuauaugaaaagguaagaagccaguuaaaaaacaaugccaaggaaauuggaaacggcugcuuugaauuuuaccacaaaugcgauaacacgugcauggaaagugucaaaaaugggacuuaugacuacccaaaauacucagaggaagcaaaauuaaacagagaagaaauagaugggguaaagcuggaaucaacaaggauuuaccagauuuuggcgaucuauucaacugucgccaguucauugguacugguagucucccugggggcaaucaguuucuggaugugcucuaaugggucucuacaguguagaauauguauuuaa

SEQ ID NO: 37657 - RNA, 1701 nt, Artificial Sequence
  derived and/or modified CDS sequence (wt) from hemagglutinin__InfluenzaA__ADM23849
augaaggcaauacuaguaguucugcuauauacauuugcaaccgcaaaugcagacacauuauguauagguuaucaugcgaacaauucaacagacacuguagacacaguacuagaaaagaauguaacaguaacacacucuguuaaccuucuagaagacaagcauaacgggaaacuaugcaaacuaagagggguagccccauugcauuuggguaaauguaacauugcuggcuggauccugggaaauccagagugugaaucacucuccacagcaagcucaugguccuacauuguggaaacaucuaguucagacaauggaacguguuacccaggagauuucaucgauuaugaggagcuaagagagcaauugagcucagugucaucauuugaaagguuugagauauuccccaagacaaguucauggcccaaucaugacucgaacaaagguguaacggcagcauguccucaugcuggagcaaaaagcuucuacaaaaauuuaauauggcuaguuaaaaaaggaaauucauacccaaagcucagcaaauccuacauuaaugauaaagggaaagaaguccucgugcuauggggcauucaccaucaaucuacuagugcugaccaacaaagucucuaucagaaugcagaugcauauguuuuuguggggacaucaagauacagcaagaaguucaagccggaaauagcaauaagacccaaagugagggaucaagaagggagaaugaacuauuacuggacacuaguagagccgggagacaaaauaacauucgaagcaacuggaaaucuagugguaccgagauaugcauucgcaauggaaagaaaugcuggaucugguauuaucauuucagauacaccaguccacgauugcaauacaacuugucagacacccaagggugcuauaaacaccagccucccauuucagaauauacauccgaucacaauuggaaaauguccaaaauauguaaaaagcacaaaauugagacuggccacaggauugaggaaugucccgucuauucaaucuagaggccuauuuggggccauugccgguuucauugaagggggguggacagggaugguagauggaugguacgguuaucaccaucaaaaugagcaggggucaggauaugcagccgaccugaagagcacacagaaugccauugacaagauuacuaacaaaguaaauucuguuauugaaaagaugaauacacaguucacagcaguagguaaagaguucaaccaccuggaaaaaagaauagagaauuuaaauaaaaaaguugaugaugguuuccuggacauuuggacuuacaaugccgaacuguugguucuauuggaaaaugaaagaacuuuggacuaccacgauucaaaugugaagaacuuauaugaaaagguaagaagccaguuaaaaaacaaugccaaggaaauuggaaacggcugcuuugaauuuuaccacaaaugcgauaacacgugcauggaaagugucaaaaaugggacuuaugacuacccaaaauacucagaggaagcaaaauuaaacagagaagaaauagaugggguaaagcuggaaucaacaaggauuuaccagauuuuggcgaucuauucaacugucgccaguucauugguacugguagucucccugggggcaaucaguuucuggaugugcucuaaugggucucuacaguguagaauauguauuuaa

SEQ ID NO: 37658 - RNA, 1701 nt, Artificial Sequence
  derived and/or modified CDS sequence (wt) from hemagglutinin__InfluenzaA__ADM23851
auggaggcaauacuaguaguucugcuauauacauuugcaaccgcaaaugcagacacauuauguauagguuaucaugcgaacaauucaacagacacuguagacacaguacuagaaaagaauguaacaguaacacacucuguuaaccuucuagaagacaagcauaacgggaaacuaugcaaacuaagagggguagccccauugcauuuggguaaauguaacauugcuggcuggauccugggaaauccagagugugaaucacucuccacagcaagcucaugguccuacauuguggaaacaucuaguucagacaaugguacguguuacccaggagauuucaucgauuaugaggagcuaagagagcaauugagcucagugucaucauuugaaagguuugagauauuccccaagacaaguucauggcccaaucaugacucgaacaaagguguaacggcagcauguccucaugcuggagcaaaaagcuucuacaaaaauuuaauauggcuaguuaaaaaaggaaauucauacccaaagcucagcaaauccuacauuaaugauaaagggaaagaaguccucgugcuauggggcauucaccaucaaucuacuagugcugaccaacaaagucucuaucagaaugcagaugcauauguuuuuguggggucaucaagauacagcaagaaguucaagccggaaauagcaauaagacccaaagugagggaucaagaagguagaaugaacuauuacuggacacuaguagagccgggagacaaaauaacauucgaagcaacuggaaaucuagugguaccgagauaugcauucgcaauggaaagaaaugcuggaucugguauuaucauuucagauacaccaguccacgauugcaauacaacuugucagacacccaagggugcuauaaacaccagccucccauuucauaauauacauccgaucacaauuggaaaauguccuaaauauguaaaaagcacaaaauugagacuggccacaggauugaggaaugucccgucuauucaaucuagaggccuauuuggggccauugccgguuucauugaagggggguggacagggaugguagacggaugguacgguuaucaccaucaaaaugagcaggggucaggauaugcagccgaccugaagagcacacagaaugccauugacgagauuacuaacaaaguaaauucuguuauugaaaagaugaauacacaguucacagcaguagguaaagaguucaaccaccuggaaaaaagaauagaaaauuuaaauaaaaaaguugaugaugguuuccuggacauuuggacuuacaaugccgaacuguuaguucuauuggaaaaugaaagaacuuuggacuaccacgauucaaaugugaagaacuuauaugaaaagguaagaagccaguuaaaaaacaaugccaaggaaauuggaaacggcugcuuugaauuuuaccacaaaugcgauaacacgugcauggaaagugucaaaaaugggacuuaugacuacccaaaauacucagaggaagcaaaauuaaacagagaaaaaauagaugggguaaagcuggaaucaacaaggauuuaccagauuuuggcgaucuauucaacugucgccaguucauugguacugguagucucccugggggcaaucaguuucuggaugugcucuaaugggucucuacaguguagaauauguauuuaa

SEQ ID NO: 37659 - RNA, 1701 nt, Artificial Sequence
  derived and/or modified CDS sequence (wt) from hemagglutinin__InfluenzaA__ADM23852
auggaggcaauacuaguaguucugcuauauacauuugcaaccgcaaaugcagacacauuauguauagguuaucaugcgaacaauucaacagacacuguagacacaguacuagaaaagaauguaacaguaacacacucuguuaaccuucuagaagacaagcauaacgggaaacuaugcaaacuaagagggguagccccauugcauuuggguaaauguaacauugcuggcuggauccugggaaauccagagugugaaucacucuccacagcaagcucaugguccuacauuguggaaacaucuaguucagacaaugguacguguuacccaggagauuucaucgauuaugaggagcuaagagagcaauugagcucagugucaucauuugaaagguuugagauauuccccaagacaaguucauggcccaaucaugacucgaacaaagguguaacggcagcauguccucaugcuggagcaaaaagcuucuacaaaaauuuaauauggcuaguuaaaaaaggaaauucauacccaaagcucagcaaauccuacauuaaugauaaagggaaagaaguccucgugcuauggggcauucaccauccaucuacuagugcugaccaacaaagucucuaucagaaugcagaugcauauguuuuuguggggucaucaagauacagcaagaaguucaagccggaaauagcaauaagacccaaagugagggaucaagaagguagaaugaacuauuacuggacacuaguagagccgggagacaaaauaacauucgaagcaacuggaaaucuagugguaccgagauaugcauucgcaauggaaagaaaugcuggaucugguauuaucauuucagauacaccaguccacgauugcaauacaacuugucagacacccaagggugcuauaaacaccagccucccauuucauaauauacauccgaucacaauuggaaaauguccuaaauauguaaaaagcacaaaauugagacuggccacaggauugaggaaugucccgucuauucaaucuagaggccuauuuggggccauugccgguuucauugaagggggguggacagggaugguagacggaugguacgguuaucaccaucaaaaugagcaggggucaggauaugcagccgaccugaagagcacacagaaugccauugacgagauuacuaacaaaguaaauucuguuauugaaaagaugaauacacaguucacagcaguagguaaagaguucaaccaccuggaaaaaagaauagaaaauuuaaauaaaaaaguugaugaugguuuccuggacauuuggacuuacaaugccgaacuguuaguucuauuggaaaaugaaagaacuuuggacuaccacgauucaaaugugaagaacuuauaugaaaagguaagaagccaguuaaaaaacaaugccaaggaaauuggaaacggcugcuuugaauuuuaccacaaaugcgauaacacgugcauggaaagugucaaaaaugggacuuaugacuacccaaaauacucagaggaagcaaaauuaaacagagaaaaaauagaugggguaaagcuggaaucaacaaggauuuaccagauuuuggcgaucuauucaacugucgccaguucauugguacugguagucucccugggggcaaucaguuucuggaugugcucuaaugggucucuacaguguagaauauguauuuaa

SEQ ID NO: 37660 - RNA, 1701 nt, Artificial Sequence
  derived and/or modified CDS sequence (wt) from hemagglutinin__InfluenzaA__ADM23853
auggaggcaauacuaguaguucugcuauauacauuugcaaccgcaaaugcagacacauuauguauagguuaucaugcgaacaauucaacagacacuguagacacaguacuagaaaagaauguaacaguaacacacucuguuaaccuucuagaagacaagcauaacgggaaacuaugcaaacuaagagggguagccccauugcauuuggguaaauguaacauugcuggcuggauccugggaaauccagagugugaaucacucuccacagcaagcucaugguccuacauuguggaaacaucuaguucagacaauggaacguguuacccaggagauuucaucgauuaugaggagcuaagagagcaauugagcucagugucaucauuugaaagguuugagauauuccccaagacaaguucauggcccaaucaugacucgaacaaagguguaacggcagcauguccucaugcuggagcaaaaagcuucuacaaaaauuuaauauggcuaguuaaaaaaggaaauucauacccaaagcucagcaaauccuacauuaaugauaaagggaaagaaguccucgugcuauggggcauucaccauccaucuacuagugcugaccaacaaagucucuaucagaaugcagaugcauauguuuuuguggggucaucaagauacagcaagaaguucaagccggaaauagcaauaagacccaaagugagggaucaagaagggagaaugaacuauuacuggacacuaguagagccgggagacaaaauaacauucgaagcaacuggaaaucuagugguaccgagauaugcauucgcaauggaaagaaaugcuggaucugguauuaucauuucagauacaccaguccacgauugcaauacaacuugucagacacccaagggugcuauaaacaccagccucccauuucauaauauacauccgaucacaauuggaaaauguccuaaauauguaaaaagcacaaaauugagacuggccacaggauugaggaaugucccgucuauucaaucuagaggccuauuuggggccauugccgguuucauugaagggggguggacagggaugguagacggaugguacgguuaucaccaucaaaaugagcaggggucaggauaugcagccgaccugaagagcacacagaaugccauugacgagauuacuaacaaaguaaauucuguuauugaaaagaugaauacacaguucacagcaguagguaaagaguucaaccaccuggaaaaaagaauagaaaauuuaaauaaaaaaguugaugaugguuuccuggacauuuggacuuacaaugccgaacuguuaguucuauuggaaaaugaaagaacuuuggacuaccacgauucaaaugugaagaacuuauaugaaaagguaagaagccaguuaaaaaacaaugccaaggaaauuggaaacggcugcuuugaauuuuaccacaaaugcgauaacacgugcauggaaagugucaaaaaugggacuuaugacuacccaaaauacucagaggaagcaaaauuaaacagagaaaaaauagaugggguaaagcuggaaucaacaaggauuuaccagauuuuggcgaucuauucaacugucgccaguucauugguacugguagucucccugggggcaaucaguuucuggaugugcucuaaugggucucuacaguguagaauauguauuuaa

SEQ ID NO: 37661 - RNA, 1701 nt, Artificial Sequence; identical to SEQ ID NO: 34965
  derived and/or modified CDS sequence (wt) from hemagglutinin__InfluenzaA__ADM23855

SEQ ID NO: 37662 - RNA, 1701 nt, Artificial Sequence
  derived and/or modified CDS sequence (wt) from hemagglutinin__InfluenzaA__ADM23856
augaaggcaauacuaguaguucugcuauauacauuugcaaccguaaaugcagacacauuauguauagguuaucaugcgaacaauucaacagacacuguagacacaguacuagaaaagaauguaacaguaacacacucuguuaaccuucuagaagacaagcauaacgggaaacuaugcaaacuaagagggguagccccauugcauuuggguaaauguaacauugcuggcuggauccugggaaauccagaaugugaaucacucuccacagcaagcucaugguccuacauuguggaaacaucuaguucagacaauggaacguguuacccaggagauuucaucgauuaugaggagcuaagagagcaauugagcucagugucaucauuugaaagguuugagauauuccccaagacaaguucauggcccaaucaugacucgaacaaagguguaacggcagcauguccucaugcuggagcaaaaagcuucuacaaaaauuuaauauggcuaguuaaaaaaggaaauucauacccaaagcucagcaaauccuacauuaaugauaaaaggaaagaaguccucgugcuauggggcauucaccaucaaucuacuagugcugaccaacaaagucucuaucagaaugcagaugcauauguuuuuguggggacaucaagauacagcaagaaguucaagccggaaauagcaauaagacccaaagugagggaucaagaagggagaaugaacuauuacuggacacuaguagagccgggagacaaaauaacauucgaagcaacuggaaaucuagugguaccgagauaugcauucgcaauggaaagaaaugcuggaucugguauuaucauuucagauacaccaguccacgauugcaauacaacuugucagacacccaagggugcuauaaacaccagccucccauuucagaauauacauccgaucacaauuggaaaauguccaaaauauguaaaaagcacaaaauugagacuggccacaggauugaggaaugucccgucuauucaaucuagaggccuauuuggggccauugccgguuucauugaagggggguggacagggaugguagauggaugguacgguuaucaccaucaaaaugagcaggggucaggauaugcagccgaccugaagagcacacagaaugccauugacaagauuacaaacaaaguaaauucuguuauugaaaagaugaauacacaguucacagcaguagguaaagaguucaaccaccuggaaaaaagaauagagaauuuaaauaaaaaaguugaugaugguuuccuggacauuuggacuuacaaugccgaacuguugguucuauuggaaaaugaaagaacuuuggacuaccacgauucaaaugugaagaacuuauaugaaaagguaagaagccaguuaaaaaacaaugccaaggaaauuggaaacggcugcuuugaauuuuaccacaaaugcgauaacacgugcauggaaagugucaaaaaugggacuuaugacuacccaaaauacucagaggaagcaaaauuaaacagagaagaaauagaugggguaaagcuggaaucaacaaggauuuaccagauuuuggcgaucuauucaacugucgccaguucauugguacugguagucucccugggggcaaucaguuucuggaugugcucuaaugggucucuacaguguagaauauguauuuaa

SEQ ID NO: 37663 - RNA, 1701 nt, Artificial Sequence; identical to SEQ ID NO: 35430
  derived and/or modified CDS sequence (wt) from hemagglutinin__InfluenzaA__ADM25945

SEQ ID NO: 37664 - RNA, 1701 nt, Artificial Sequence
  derived and/or modified CDS sequence (wt) from hemagglutinin__InfluenzaA__ADM25948
auggaggcaauacuaguaguucugcuauauacauuugcaaccgcaaaugcagacacauuauguauagguuaucaugcgaacaauucaacagacacuguagacacaguacuagaaaagaauguaacaguaacacacucuguuaaccuucuagaagacaagcauaacgggaaacuaugcaaacuaagagggguagccccauugcauuuggguaaauguaacauugcuggcuggauccugggaaauccagaaugugaaucacucuccacagcaagcucaugguccuacauuguggaaacaucuaguucagacaauggaacguguuacccaggagauuucaucgauuaugaggagcuaagagagcaauugagcucagugucaucauuugaaagguuugagauauuccccaagacaaguucauggcccaaucaugacucgaacaaagguguaacggcagcauguccucaugcuggagcaaaaagcuucuacaaaaauuuaauauggcuaguuaaaaaaggaaauucauacccaaagcucagcaaauccuacauuaaugauaaagggaaagaaguccucgugcuauggggcauucaccauccaucuacuagugcugaccaacaaagucucuaucagaaugcagaugcauauguuuuuguggggucaucaagauacagcaagaaguucaagccggaaauagcaauaagacccaaagugagggaucaagaagggagaaugaacuauuacuggacacuaguagagccgggagacaaaauaacauucgaagcaacuggaaaucuagugguaccgagauaugcauucgcaauggaaagaaaugcuggaucugguauuaucauuucagauacaccaguccacgauugcaauacaacuugucagacacccaagggugcuauaaacaccagccucccauuucauaauauacauccgauuacaauuggaaaaugucccaaauauguaaaaagcacaaaauugagacuggccacaggauugaggaaugucccgucuauucaaucuagaggccuauuuggggccauugccgguuucauugaagggggguggacagggaugguagauggaugguacgguuaucaccaucaaaaugagcaggggucaggauaugcagccgaccugaagagcacacagaaugccauugacgagauuacuaacaaaguaaauucuguuauugaaaagaugaauacacaguucacagcaguagguaaagaguucaaccaccuggaaaaaagaauagagaauuuaaauaaaaaaguugaugaugguuuccuggacauuuggacuuacaaugccgaacuguugguucuauuggaaaaugaaagaacuuuggacuaccacgauucaaaugugaagaacuuauaugaaaagguaagaagccaguuaaaaaacaaugccaaggaaauuggaaacggcugcuuugaauuuuaccacaaaugcgauaacacgugcauggaaagugucaaaaaugggacuuaugacuacccaaaauacucagaggaagcaaaauuaaacagagaagaaauagaugggguaaagcuggaaucaacaaggauuuaccagauuuuggcgaucuauucaacugucgccaguucauugguacugguagucucccugggggcaaucaguuucuggaugugcucuaaugggucucuacaguguagaauauguauuuaa

SEQ ID NO: 37665 - RNA, 1701 nt, Artificial Sequence
  derived and/or modified CDS sequence (wt) from hemagglutinin__InfluenzaA__ADM26264
augaaggcaauacuaguaguucugcuauauacauuuacaaccgcaaaugcagacacauuauguauagguuaucaugcgaacaauucaacagacacuguagacacaguacuagaaaagaauguaacaguaacacacucuguuaaccuucuagaagacaagcauaacgggaaacuaugcaaacuaagagggguagccccauugcauuuggguaaauguaacauugcuggcuggauccugggaaauccagagugugaaucacucuccacagcaagcucaugguccuacauuguggaaacaucuaguucagacaauggaacguguuacccaggagauuucaucgauuaugaggagcuaagagagcaauugagcucagugucaucauuugaaagguuugagauauuccccaagacaaguucauggcccaaucaugacucgaacaaagguguaacggcagcauguccucaugcuggagcaaaaagcuucuacaaaaauuuaauauggcuaguuaaaaaaggaaauucauacccaaagcucagcaaauccuacauuaaugauaaagggaaagaaguccucgugcuauggggcauucaccauccaucuacuagugcugaccaacaaagucucuaucagaaugcagaugcauauguuuuuguggggacaucaagauacagcaagaaguucaagccggaaauagcaauaagacccaaagugagggaacaagaagggagaaugaacuauuacuggacacuaguagagccgggagacaaaauaacauucgaagcaacuggaaaucuagugguaccgagauaugcauucgcaauggaaagaaaugcuggaucugguauuaucauuucagauacaccaguccacgauugcaauacaacuugucagacacccaagggugcuauaaacaccagccucccauuucagaauauacauucgaucacaauuggaaaauguccaaaauauguaaaaagcacaaaauugagacuggccacaggauugaggaaugucccgucuauucaaucuagaggccuauuuggggccauugccgguuucauugaagggggguggacagggaugguagauggaugguacgguuaucaccaucaaaaugagcaggggucaggauaugcagccgaccugaagagcacacagaaugccauugacgagauuacuaacaaaguaaauucuguuauugaaaagaugaauacacaguucacagcaguagguaaagaguucaaccaccuggaaaaaagaauagagaauuuaaauaaaaaaguugaugaugguuuccuggacauuuggacuuacaaugccgaacuguugguucuauuggaaaaugaaagaacuuuggacuaccacgauucaaaugugaagaacuuauaugaaaagguaagaagccaguuaaaaaacaaugccaaggaaauuggaaacggcugcuuugaauuuuaccacaaaugcgauaacacgugcauggaaagugucaaaaaugggacuuaugacuacccaaaauauucagaggaagcaaaauuaaacagagaagaaauagaugggguaaagcuggaaucaacaaggauuuaccagauuuuggcgaucuauucaacugucgccaguucauugguacugguagucucccugggggcaaucaguuucuggaugugcucuaaugggucucuacaguguagaauauguauuuaa

SEQ ID NO: 37666 - RNA, 1701 nt, Artificial Sequence; identical to SEQ ID NO: 36710
  derived and/or modified CDS sequence (wt) from hemagglutinin__InfluenzaA__ADM26265

SEQ ID NO: 37667 - RNA, 1701 nt, Artificial Sequence
  derived and/or modified CDS sequence (wt) from hemagglutinin__InfluenzaA__ADM26266
augaaggcaauacuaguaguucugcuauauacauuuacaaccgcaaaugcagacacauuauguauagguuaucaugcgaacaauucaacagacacuguagacacaguacuagaaaagaauguaacaguaacacacucuguuaaccuucuagaagacaagcauaacgggaaacuaugcaaacuaagagggguagccccauugcauuuggguaaauguaacauugcuggcuggauccugggaaauccagagugugaaucacucuccacagcaagcucaugguccuacauuguggaaacaucuaguucagacaauggaacguguuacccaggagauuucaucgauuaugaggagcuaagagagcaauugagcucagugucaucauuugaaagguuugagauauuccccaagacaaguucauggcccaaucaugacucgaacaaagguguaacggcagcauguccucaugcuggagcaaaaagcuucuacaaaaauuuaauauggcuaguuaaaaaaggaaauucauacccaaagcucagcaaauccuacauuaaugauaaagggaaagaaguccucgugcuauggggcauucaccauccaucuacuagugcugaccaacaaagucuauaucagaaugcagaugcauauguuuuuguggggacaucaagauacagcaagaaguucaagccggaaauagcaauaagacccaaagugagggaacaagaagggagaaugaacuauuacuggacacuaguagagccgggagacaaaauaacauucgaagcaacuggaaaucuagugguaccgagauaugcauucgcaauggaaagaaaugcuggaucugguauuaucauuucagauacaccaguccacgauugcaauacaacuugucagacacccaagggugcuauaaacaccagccucccauuucagaauauacauucgaucacaauuggaaaauguccaaaauauguaaaaagcacaaaauugagacuggccacaggauugaggaaugucccgucuauucaaucuagaggccuauuuggggccauugccgguuucauugaagggggguggacagggaugguagauggaugguacgguuaucaccaucaaaaugagcaggggucaggauaugcagccgaccugaagagcacacagaaugccauugacgagauuacuaacaaaguaaauucuguuauugaaaagaugaauacacaguucacagcaguagguaaagaguucaaccaccuggaaaaaagaauagagaauuuaaauaaaaaaguugaugaugguuuccuggacauuuggacuuacaaugccgaacuguugguucuauuggaaaaugaaagaacuuuggacuaccacgauucaaaugugaagaacuuauaugaaaagguaagaagccaguuaaaaaacaaugccaaggaaauuggaaacggcugcuuugaauuuuaccacaaaugcgauaacacgugcauggaaagugucaaaaaugggacuuaugacuacccaaaauacucagaggaagcaaaauuaaacagagaagaaauagaugggguaaagcuggaaucaacaaggauuuaccagauuuuggcgaucuauucaacugucgccaguucauugguacugguagucucccugggggcaaucaguuucuggaugugcucuaaugggucucuacaguguagaauauguauuuaa

SEQ ID NO: 37668 - RNA, 1701 nt, Artificial Sequence
  derived and/or modified CDS sequence (wt) from hemagglutinin__InfluenzaA__ADM26267
augaaggcaauacuaguaguucugcuauauacauuuacaaccgcaaaugcagacacauuauguauagguuaucaugcgaacaauucaacagacacuguagauacaguacuagaaaagaauguaacaguaacacacucuguuaaccuucuagaagacaagcauaacgggaaacuaugcaaacuaagagggguagccccauugcauuuggguaaauguaacauugcuggcuggauccugggaaauccagagugugaaucacucuccacagcaagcucaugguccuacauuguggaaacaucuaguucagacaauggaacguguuacccaggagauuucaucgauuaugaggagcuaagagagcaauugagcucagugucaucauuugaaagguuugagauauuccccaagacaaguucauggcccaaucaugacucgaacaaagguguaacggcagcauguccucaugcuggagcaaaaagcuucuacaaaaauuuaauauggcuaguuaaaaaaggaaauucauacccaaagcucagcaaauccuacauuaaugauaaagggaaagaaguccucgugcuauggggcauucaccauccaucuacuagugcugaccaacaaagucucuaucagaaugcagaugcauauguuuuuguggggacaucaagauacagcaagaaguucaagccggaaauagcaauaagacccaaagugagggaacaagaagggagaaugaacuauuacuggacacuaguagagccgggagacaaaauaacauucgaagcaacuggaaaucuagugguaccgagauaugcauucgcaauggaaagaaaugcuggaucugguauuaucauuucagauacaccaguccacgauugcaauacaacuugucagacacccaagggugcuauaaacaccagccucccauuucagaauauacauucgaucacaauuggaaaauguccaaaauauguaaaaagcacaaaauugagacuggccacaggauugaggaaugucccgucuauucaaucuagaggccuauuuggggccauugccgguuucauugaagggggguggacagggaugguagauggaugguacgguuaucaccaucaaaaugagcaggggucaggauaugcagccgaccugaagagcacacagaaugccauugacgagauuacuaacaaaguaaauucuguuauugaaaagaugaauacacaguucacagcaguagguaaagaguucaaccaccuggaaaaaagaauagagaauuuaaauaaaaaaguugaugaugguuuccuggacauuuggacuuacaaugccgaacuguugguucuauuggaaaaugaaagaacuuuggacuaccacgauucaaaugugaagaacuuauaugaaaagguaagaagccaguuaaaaaacaaugccaaggaaauuggaaacggcugcuuugaauuuuaccacaaaugcgauaacacgugcauggaaagugucaaaaaugggacuuaugacuacccaaaauacucagaggaagcaaaauuaaacagagaagaaauagaugggguaaagcuggaaucaacaaggauuuaccagauuuuggcgaucuauucaacugucgccaguucauugguacugguagucucccugggggcaaucaguuucuggaugugcucuaaugggucucuacaguguagaauauguauuuaa

SEQ ID NO: 37669 - RNA, 1701 nt, Artificial Sequence
  derived and/or modified CDS sequence (wt) from hemagglutinin__InfluenzaA__ADM26268
augaaggcaauacuaguaguucugcuauauacauuuacaaccgcaaaugcagacacauuauguauagguuaucaugcgaacaauucaacagacacuguagacacaguacuagaaaagaauguaacaguaacacacucuguuaaccuucuagaagacaagcauaacgggaaacuaugcaaacuaagagggguagccccauugcauuuggguaaauguaacauugcuggcuggauccugggaaauccagagugugaaucacucuccacagcaagcucaugguccuacauuguggaaacaucuaguucagacaauggaacguguuacccaggagauuucaucgauuaugaggagcuaagagagcaauugagcucagugucaucauuugaaagguuugagauauuccccaagacaaguucauggcccaaucaugacucgaacaaagguguaacggcagcauguccucaugcuggagcaaaaagcuucuacaaaaauuuaauauggcuaguuaaaaaaggaaauucauacccaaagcucagcaaauccuacauuaaugauaaagggaaagaaguccucgugcuauggggcauucaccauccaucuacuagugcugaccaacaaagucucuaucagaaugcagaugcauauguuuuuguggggacaucaagauacagcaagaaguucaagccggaaauagcaauaagacccaaagugagggaacaagaagggagaaugaacuauuacuggacacuaguagagccgggagacaaaauaacauucgaagcaacuggaaaucuagugguaccgagauaugcauucgcaauggaaagaaaugcuggaucugguauuaucauuucagauacaccaguccacgauugcaauacaacuugucagacacccaagggugcuauaaacaccagccucccauuucagaauauacauucgaucacaauuggaaaauguccaaaauauguaaaaagcacaaaauugagacuggccacaggauugaggaaugucccgucuauucaaucuagaggccuauuuggggccauugccgguuucauugaagggggguggacagggaugguagauggaugguacgguuaucaccaucaaaaugagcaggggucaggauaugcagccgaccugaagagcacacagaaugccauugacgagauuacuaacaaaguaaauucuguuauugaaaagaugaauacacaguucacagcaguagguaaagaguucaaccaccuggaaaaaagaauagagaauuuaaauaaaaaaguugaugaugguuuccuggacauuuggacuuacaaugccgaacuguugguucuauuggaaaaugaaagaacuuuggacuaccacgauucaaaugugaagaacuuauaugaaaagguaagaagccaguuaaaaaacaaugccaaggaaauuggaaacggcugcuuugaauuuuaccacaaaugcgauaacacgugcauggaaagugucaaaaaugggacuuaugacuacccaaaauacucagaggaagcaaaauuaaaaagagaagaaauagaugggguaaagcuggaaucaacaaggauuuaccagauuuuggcgaucuauucaacugucgccaguucauugguacugguagucucccugggggcaaucaguuucuggaugugcucuaaugggucucuacaguguagaauauguauuuaa

SEQ ID NO: 37670 - RNA, 1701 nt, Artificial Sequence
  derived and/or modified CDS sequence (wt) from hemagglutinin__InfluenzaA__ADM26269
augaagacaauacuaguaguucugcuauauacauuuacaaccgcaaaugcagacacauuauguauagguuaucaugcgaacaauucaacagacacuguagacacaguacuagaaaagaauguaacaguaacacacucuguuaaccuucuagaagacaagcauaacgggaaacuaugcaaacuaagagggguagccccauugcauuuggguaaauguaacauugcuggcuggauccugggaaauccagagugugaaucacucuccacagcaagcucaugguccuacauuguggaaacaucuaguucagacaauggaacguguuacccaggagauuucaucgauuaugaggagcuaagagagcaauugagcucagugucaucauuugaaagguuugagauauuccccaagacaaguucauggcccaaucaugacucgaacaaagguguaacggcagcauguccucaugcuggagcaaaaagcuucuacaaaaauuuaauauggcuaguuaaaaaaggaaauucauacccaaagcucagcaaauccuacauuaaugauaaagggaaagaaguccucgugcuauggggcauucaccauccaucuacuagugcugaccaacaaagucucuaucagaaugcagaugcauauguuuuuguggggacaucaagauacagcaagaaguucaagccggaaauagcaauaagacccaaagugagggaacaagaagggagaaugaacuauuacuggacacuaguagagccgggagacaaaauaacauucgaagcaacuggaaaucuagugguaccgagauaugcauucgcaauggaaagaaaugcuggaucugguauuaucauuucagauacaccaguccacgauugcaauacaacuugucagacacccaagggugcuauaaacaccagccucccauuucagaauauacauucgaucacaauuggaaaauguccaaaauauguaaaaagcacaaaauugagacuggccacaggauugaggaaugucccgucuauucaaucuagaggccuauuuggggccauugccgguuucauugaagggggguggacagggaugguagauggaugguacgguuaucaccaucaaaaugagcaggggucaggauaugcagccgaccugaagagcacacagaaugccauugacgagauuacuaacaaaguaaauucuguuauugaaaagaugaauacacaguucacagcaguagguaaagaguucaaccaccuggaaaaaagaauagagaauuuaaauaaaaaaguugaugaugguuuccuggacauuuggacuuacaaugccgaacuguugguucuauuggaaaaugaaagaacuuuggacuaccacgauucaaaugugaagaacuuauaugaaaagguaagaagccaguuaaaaaacaaugccaaggaaauuggaaacggcugcuuugaauuuuaccacaaaugcgauaacacgugcauggaaagugucaaaaaugggacuuaugacuacccaaaauacucagaggaagcaaaauuaaaaagagaagaaauagaugggguaaagcuggaaucaacaaggauuuaccagauuuuggcgaucuauucaacugucgccaguucauugguacugguagucucccugggggcaaucaguuucuggaugugcucuaaugggucucuacaguguagaauauguauuuaa

SEQ ID NO: 37671 - RNA, 1701 nt, Artificial Sequence
  derived and/or modified CDS sequence (wt) from hemagglutinin__InfluenzaA__ADM26270
augaaggcaauacuaguaguucugcuauauacauuuacaaccgcaaaugcagacacauuauguauagguuaucaugcgaacaauucaacagacacuguagacacaguacuagaaaagaauguaacaguaacacacucuguuaaccuucuagaagacaagcauaacgggaaacuaugcaaacuaagagggguagccccauugcauuuggguaaauguaacauugcuggcuggauccugggaaauccagagugugaaucacucuccacagcaagcucaugguccuacauuguggaaacaucuaguucagacaauggaacguguuacccaggagauuucaucgauuaugaggagcuaagagagcaauugagcucagugucaucauuugaaagguuugagauauuccccaagacaaguucauggcccaaucaugacucgaacaaagguguaacggcagcauguccucaugcuggagcaaaaagcuucuacaaaaauuuaauauggcuaguuaaaaaaggaaauucauacccaaagcucagcaaauccuacauuaaugauaaagggaaagaaguccucgugcuauggggcauucaccauccaucuacuagugcugaccaacaaagucucuaucagaaugcagaugcauaugucuuuguggggacaucaagauacagcaagaaguucaagccggaaauagcaauaagacccaaagugagggaacaagaagggagaaugaacuauuacuggacacuaguagagccgggagacaaaauaacauucgaagcaacuggaaaucuagugguaccgagauaugcauucgcaauggaaagaaaugcuggaucugguauuaucauuucagauacaccaguccacgauugcaauacaacuugucagacacccaagggugcuauaaacaccagccucccauuucagaauauacauucgaucacaauuggaagauguccaaaauauguaaaaagcacaaaauugagacuggccacaggauugaggaaugucccgucuauucaaucuagaggccuauuuggggccauugccgguuucauugaagggggguggacagggaugguagauggaugguacgguuaucaccaucaaaaugagcaggggucaggauaugcagccgaccugaagagcacacagaaugccauugacgagauuacuaacaaaguaaauucuguuauugaaaagaugaauacacaguucacagcaguagguaaagaguucaaccaccuggaaaaaagaauagagaauuuaaauaaaaaaguugaugaugguuuccuggacauuuggacuuacaaugccgaacuguugguucuauuggaaaaugaaagaacuuuggaccaccacgauucaaaugugaagaacuuauaugaaaagguaagaagccaguuaaaaaacaaugccaaggaaauuggaaacggcugcuuugaauuuuaccacaaaugcgauaacacgugcauggaaagugucaaaaaugggacuuaugacuacccaaaauacucagaggaagcaaaauuaaacagagaagaaauagaugggguaaagcuggaaucaacaaggauuuaccagauuuuggcgaucuauucaacugucgccaguucauugguacugguagucucccugggggcaaucaguuucuggaugugcucuaaugggucucuacaguguagaauauguauuuaa

SEQ ID NO: 37672 - RNA, 1701 nt, Artificial Sequence
  derived and/or modified CDS sequence (wt) from hemagglutinin__InfluenzaA__ADM26271
augaaggcaauacuaguaguucugcuauauacauuuacaaccgcaaaugcagacacauuauguauagguuaucaugcgaacaauucaacagacacuguagacacaguacuagaaaagaauguaacaguaacacacucuguuaaccuucuagaagacaagcauaacgggaaacuaugcaaacuaagagggguagccccauugcauuuggguaaauguaacauugcuggcuggauccugggaaauccagagugugaaucacucuccacagcaagcucaugguccuacauuguggaaacaucuaguucagacaauggaacguguuacccaggagauuucaucgauuaugaggagcuaagagagcaauugagcucagugucaucauuugaaagguuugagauauuccccaagacaaguucauggcccaaucaugacucgaacaaagguguaacggcagcauguccucaugcuggagcaaaaagcuucuacaaaaauuuaauauggcuaguuaaaaaaggaaauucauacccaaagcucagcaaauccuacauuaaugauaaagggaaagaaguccucgugcuauggggcauucaccauccaucuacuagugcugaccaacaaagucucuaucagaaugcagaugcauauguuuuuguggggacaucaagauacagcaagaaguucaagccggaaauagcaauaagacccaaagugagggaacaagaagggagaaugaacuauuacuggacacuaguagagccgggagacaaaauaacauucgaagcaacuggaaaucuagugguaccgagauaugcauucgcaauggaaagaaaugcuggaucugguauuaucauuucagauacaccaguccacgauugcaauacaacuugucagacacccaagggugcuauaaacaccagccucccauuucagaauauacauucgaucacaauuggaaaauguccaaaauauguaaaaagcacaaaauugagacuggccacaggauugaggaaugucccaucuauucaaucuagaggccuauuuggggccauugccgguuucauugaagggggguggacagggaugguagauggaugguacgguuaucaccaucaaaaugagcaggggucaggauaugcagccgaccugaagagcacacagaaugccauugacgagauuacuaacaaaguaaauucuguuauugaaaagaugaauacacaguucacagcaguagguaaagaguucaaccaccuggaaaaaagaauagagaauuuaaauaaaaaaguugaugaugguuuccuggacauuuggacuuacaaugccgaacuguugguucuauuggaaaaugaaagaacuuuggacuaccacgauucaaaugugaagaacuuauaugaaaagguaagaagccaguuaaaaaacaaugccaaggaaauuggaaacggcugcuuugaauuuuaccacaaaugcgauaacacgugcauggaaagugucaaaaaugggacuuaugacuacccaaaauacucagaggaagcaaaauuaaacagagaagaaauagaugggguaaagcuggaaucaacaaggauuuaccagauuuuggcgaucuauucaacugucgccaguucauugguacugguagucucccugggggcaaucaguuucuggaugugcucuaaugggucucuacaguguagaauauguauuuaa

SEQ ID NO: 37673 - RNA, 1701 nt, Artificial Sequence
  derived and/or modified CDS sequence (wt) from hemagglutinin__InfluenzaA__ADM26272
augaaggcaauacuaguaguucugcuauauacauuuacaaccgcaaaugcagacacauuauguauagguuaucaugcgaacaauucaacagacacuguagacacaguacuagaaaagaauguaacaguaacacacucuguuaaccuucuagaagacaagcauaacgggaaacuaugcaaacuaagagggguagccccauugcauuuggguaaauguaacauugcuggcuggauccugggaaauccagagugugaaucacucuccacagcaagcucaugguccuacauuguggaaacaucuaguucagacaauggaacguguuacccaggagauuucaucgauuaugaggagcuaagagagcaauugagcucagugucaucauuugaaagguuugagauauuccccaagacaaguucauggcccaaucaugacucgaacaaagguguaacggcagcauguccucaugcuggagcaaaaagcuucuacaaaaauuuaauauggcuaguuaaaaaaggaaauucauacccaaagcucagcaaauccuacauuaaugauaaagggaaagaaguccucgugcuauggggcauucaccauccaucuacuagugcugaccaacaaagucucuaucagaaugcagaugcauauguuuuuguggggacaucaagauacagcaagaaguucaagccggaaauagcaauaagacccaaagugagggaacaagaagggagaaugaacuauuacuggacacuaguagagccgggagacaaaauaacauucgaagcaacuggaaaucuagugguaccgagauaugcauucgcaauggaaagaaaugcuggaucugguauuaucauuucagauacaccaguccacgauugcaauacaacuugucagacacccaagggugcuauaaacaccagccucccauuucagaauauacauucgaucacaauuggaagauguccaaaauauguaaaaagcacaaaauugagacuggccacaggauugaggaaugucccgucuauucaaucuagaggccuauuuggggccauugccgguuucauugaagggggguggacagggaugguagauggaugguacgguuaucaccaucaaaaugagcaggggucaggauaugcagccgaccugaagagcacacagaaugccauugacgagauuacuaacaaaguaaauucuguuauugaaaagaugaauacacaguucacagcaguagguaaagaguucaaccaccuggaaaaaagaauagagaauuuaaauaaaaagguugaugaugguuuccuggacauuuggacuuacaaugccgaacuguugguucuauuggaaaaugaaagaacuuuggacuaccacgauucaaaugugaagaacuuauaugaaaagguaagaagccaguuaaaaaacaaugccaaggaaauuggaaacggcugcuuugaauuuuaccacaaaugcgauaacacgugcauggaaagugucaaaaaugggacuuaugacuacccaaaauacucagaggaagcaaaauuaaacagagaagaaauagaugggguaaagcuggaaucaacaaggauuuaccagauuuuggcgaucuauucaacugucgccaguucauugguacugguagucucccugggggcaaucaguuucuggaugugcucuaaugggucucuacaguguagaauauguauuuaa

SEQ ID NO: 37674 - RNA, 1701 nt, Artificial Sequence
  derived and/or modified CDS sequence (wt) from hemagglutinin__InfluenzaA__ADM26274
augaaggcaauacuaguaguucugcuauauacauuuacaaccgcaaaugcagacacauuauguauagguuaucaugcgaacaauucaacagacacuguagacacaguacuagaaaagaauguaacaguaacacacucuguuaaccuucuagaagacaagcauaaugggaaacuaugcaaacuaagagggguagccccauugcauuuggguaaauguaacauugcuggcuggauccugggaaauccagagugugaaucacucuccacagcaagcucaugguccuacauuguggaaacaucuaguucagacaauggaacguguuacccaggagauuucaucgauuaugaggagcuaagagagcaauugagcucagugucaucauuugaaagguuugagauauuccccaagacaaguucauggcccaaucaugacucgaacaaagguguaacggcagcauguccucaugcuggagcaaaaagcuucuacaaaaauuuaauauggcuaguuaaaaaaggaaauucauacccaaagcucagcaaauccuacauuaaugauaaagggaaagaaguccucgugcuauggggcauucaccauccaucuacuagugcugaccaacaaagucucuaucagaaugcagaugcauauguuuuuguggggacaucaagauacagcaagaaguucaagccggagauagcaauaagacccaaagugagggaacaagaagggagaaugaacuauuacuggacacuaguagagccgggagacaaaauaacauucgaagcaacuggaaaucuagugguaccgagauaugcauucgcaauggaaagaaaugcuggaucugguauuaucauuucagauacaccaguccacgauugcaauacaacuugucagacacccaagggugcuauaaacaccagccucccauuucagaauauacauucgaucacaauuggaaaauguccaaaauauguaaaaagcacaaaauugagacuggccacaggauugaggaaugucccgucuauucaaucuagaggccuauuuggggccauugccgguuucauugaagggggguggacagggaugguagauggaugguacgguuaucaccaucaaaaugagcaggggucaggauaugcagccgaccugaagagcacacagaaugccauugacgagauuacuaacaaaguaaauucuguuauugaaaagaugaauacacaguucacagcaguagguaaagaguucaaccaccuggaaaaaagaauagagaauuuaaauaaaaaaguugaugaugguuuccuggacauuuggacuuacaaugccgaacuguugguucuauuggaaaaugaaagaacuuuggacuaccacgauucaaaugugaaggacuuauaugaaaagguaagaagccaguuaaaaaacaaugccaaggaaauuggaaacggcugcuuugaauuuuaccacaaaugcgauaacacgugcauggaaagugucaaaaaugggacuuaugacuacccaaaauacucagaggaagcaaaauuaaacagagaagaaauagaugggguaaagcuggaaucaacaaggauuuaccagauuuuggcgaucuauucaacugucgccaguucauugguacugguagucucccugggggcaaucaguuucuggaugugcucuaaugggucucuacaguguagaauauguauuuaa

SEQ ID NO: 37675 - RNA, 1701 nt, Artificial Sequence; identical to SEQ ID NO: 36710
  derived and/or modified CDS sequence (wt) from hemagglutinin__InfluenzaA__ADM26276

SEQ ID NO: 37676 - RNA, 1701 nt, Artificial Sequence
  derived and/or modified CDS sequence (wt) from hemagglutinin__InfluenzaA__ADM26277
augaaggcaauacuaguaguucugcuauauacauuuacaaccgcaaaugcagacacauuauguauagguuaucaugcgaacaauucaacagacacuguagauacaguacuagaaaagaauguaacaguaacacacucuguuaaccuucuagaagacaagcauaacgggaaacuaugcaaacuaagagggguagccccauugcauuuggguaaauguaacauugcuggcuggauccugggaaauccagagugugaaucacucuccacagcaagcucaugguccuacauuguggaaacaucuaguucagacaauggaacguguuacccaggagauuucaucgauuaugaggagcuaagagagcaauugagcucagugucaucauuugaaagguuugagauauuccccaagacaaguucauggcccaaucaugacucgaacaaagguguaacggcagcauguccucaugcuggagcaaaaagcuucuacaaaaauuuaauauggcuaguuaaaaaaggaaauucauacccaaagcucagcaaauccuacauuaaugauaaagggaaagaaguccucgugcuauggggcauucaccauccaucuacuagugcugaccaacaaagucucuaucagaaugcagaugcauauguuuuuguggggacaucaagauacagcaagaaguucaagccggaaauagcaauaagacccaaagugagggaacaagaagggagaaugaacuauuacuggacacuaguagagccgggagacaaaauaacauucgaagcaacuggaaaucuagugguaccgagauaugcauucgcaauggaaagaaaugcuggaucugguauuaucauuucagauacaccaguccacgauugcaauacaacuugucagacacccaagggugcuauaaacaccagccucccauuucagaauauacauucgaucacaauuggaaaauguccaaaauauguaaaaagcacaaaauugagacuggccacaggauugaggaaugucccgucuauucaaucuagaggccuauuuggggccauugccgguuucauugaagggggguggacagggaugguagauggaugguacgguuaucaccaucaaaaugagcaggggucaggauaugcagccgaccugaagagcacacagaaugccauugacgagauuacuaacaaaguaaauucuguuauugaaaagaugaauacacaguucacagcaguagguaaagaguucaaccaccuggaaaaaagaauagagaauuuaaauaaaaaaguugaugaugguuuccuagacauuuggacuuacaaugccgaacuguugguucuauuggaaaaugaaagaacuuuggacuaccacgauucaaaugugaagaacuuauaugaaaagguaagaagccaguuaaaaaacaaugccaaggaaauuggaaacggcugcuuugaauuuuaccacaaaugcgauaacacgugcauggaaagugucaaaaaugggacuuaugacuacccaaaauacucagaggaagcaaaauuaaacagagaagaaauagaugggguaaagcuggaaucaacaaggauuuaccagauuuuggcgaucuauucaacugucgccaguucauugguacugauagucucccugggggcaaucaguuucuggauguguucuaaugggucucuacaguguagaauauguauuuaa

SEQ ID NO: 37677 - RNA, 1701 nt, Artificial Sequence
  derived and/or modified CDS sequence (wt) from hemagglutinin__InfluenzaA__ADM26278
augaaggcaauacuaguaguucugcuauauacauuuacaaccgcaaaugcagacacauuauguauagguuaucaugcgaacaauucaacagacacuguagacacaguacuagaaaagaauguaacaguaacacacucuguuaaccuucuagaagacaagcauaacgggaaacuaugcaaacuaagagggguagccccauugcauuuggguaaauguaacauugcuggcuggauccugggaaauccagagugugaaucacucuccacagcaagcucaugguccuacauuguggaaacaucuaguucagacaauggaacguguuacccaggagauuucaucgauuaugaggagcuaagagagcaauugagcucagugucaucauuugaaagguuugaaauauuccccaagacaaguucauggcccaaucaugacucgaacaaagguguaacggcagcauguccucaugcuggagcaaaaagcuucuacaaaaauuuaauauggcuaguuaaaaaaggaaauucauacccaaagcucagcaaauccuacauuaaugauaaagggaaagaaguccucgugcuauggggcauucaccauccaucuacuagugcugaccaacaaagucucuaucagaaugcagaugcauauguuucuguggggacaucaagauacagcaagaaguucaagccggaaauagcaauaagacccaaagugagggaacaagaagggagaaugaacuauuacuggacacuaguagagccgggagacaaaauaacauucgaagcaacuggaaaucuagugguaccgagauuugcauucgcaauggaaagaaaugcuggaucugguauuaucauuucagauacaccaguccacgauugcaauacaacuugucagacacccaagggugcuauaaacaccagccucccauuucagaauauacauucgaucacaauuggaaaauguccaaaauauguaaaaagcacaaaauugagacuggccacaggauugaggaaugucccgucuauucaaucuagaggccuauuuggggccauugccgguuucauugaagggggguggacagggaugguagauggaugguacgguuaucaccaucaaaaugagcaggggucaggauaugcagccgaccugaagagcacacagaaugccauugacgagauuacuaacaaaguaaauucuguuauugaaaagaugaauacacaguucacagcaguagguaaagaguucaaccaccuggaaaaaagaauagagaauuuaaauaaaaaaguugaugaugguuuccuggacauuuggacuuacaaugccgaacuguugguucuauuggaaaaugaaagaacuuuggacuaccacgauucaaaugugaagaacuuauaugaaaagguaagaagccaguuaaaaaacaaugccaaggaaauuggaaacggcugcuuugaauuuuaccacaaaugcgauaacacgugcauggaaagugucaaaaaugggacuuaugacuacccaaaauacucagaggaagcaaaauuaaaaagagaagaaauagaugggguaaagcuggaaucaacaaggauuuaccagauuuuggcgaucuauucaacugucgccaguucauugguacugguagucucccugggggcaaucaguuucuggaugugcucuaaugggucucuacaguguagaauauguauuuaa

SEQ ID NO: 37678 - RNA, 1701 nt, Artificial Sequence
  derived and/or modified CDS sequence (wt) from hemagglutinin__InfluenzaA__ADM26279
augaaggcaauacuaguaguucugcuauacacauuuacaaccgcaaaugcagacacauuauguauagguuaucaugcgaacaauucaacagacacuguagacacaguacuagaaaagaauguaacaguaacacacucuguuaaccuucuagaagacaagcauaacgggaaacuaugcaaacuaagagggguagccccauugcauuuggguaaauguaacauugcuggcuggauccugggaaauccagagugugaaucacucuccacagcaagcucaugguccuacauuguggaaacaucuaguucagacaauggaacguguuacccaggagauuucaucgauuaugaggagcuaagagagcaauugagcucagugucaucauuugaaagguuugagauauuccccaagacaaguucauggcccaaucaugacucgaacaaagguguaacggcagcaugcccucaugcuggagcaaaaagcuucuacaaaaauuuaauauggcuaguuaaaaaaggaaauucauacccaaagcucagcaaauccuacauuaaugauaaagggaaagaaguccucgugcuauggggcauucaccauccaucuacuagugcugaccaacaaagucucuaucagaaugcagaugcauauguuuuuguggggacaucaagauacagcaagaaguucaagccggaaauagcaauaagacccaaagugaggggacaagaagggagaaugaacuauuacuggacacuaguagagccgggagacaaaauaacauucgaagcaacuggaaaucuagugguaccgagauaugcauucgcaauggaaagaaaugcuggaucugguauuaucauuucagauacaccaguccacgauugcaauacaacuugucagacacccaagggugcuauaaacaccagccucccauuucagaauauacauucgaucacaauuggaaaauguccaaaauauguaaaaagcacaaaauugagacuggccacaggauugaggaaugucccgucuauucaaucuagaggccuauuuggggccauugccgguuucauugaagggggguggacagggaugguagauggaugguacgguuaucaccaucaaaaugagcaagggucaggauaugcagccgaccugaagagcacacagaaugccauugacgagauuacuaacaaaguaaauucuguuauugaaaagaugaauacacaguucacagcaguagguaaagaguucaaccaccuggaaaaaagaauagagaauuuaaauaaaaaaguugaugaugguuuccuggacauuuggacuuacaaugccgaacuguugguucuauuggaaaaugaaagaacuuuggacuaccacgauucaaaugugaagaacuuauaugaaaagguaagaagccaguuaaaaaacaaugccaaggaaauuggaaacggcugcuuugaauuuuaccacaaaugcgauaacacgugcauggaaagugucaaaaaugggacuuaugacuacccaaaauauucagaggaagcaaaauuaaacagagaagaaauagaugggguaaagcuggaaucaacaaggauuuaccagauuuuggcgaucuauucaacugucgccaguucauugguacugguagucucccugggggcaaucaguuucuggaugugcucuaaugggucucuacaguguagaauauguauuuaa

SEQ ID NO: 37679 - RNA, 1701 nt, Artificial Sequence
  derived and/or modified CDS sequence (wt) from hemagglutinin__InfluenzaA__ADM26280
augaaggcaauacuaguaguucugcuauauacauuuacaaccgcaaaugcagacacauuauguauagguuaucaugcgaacaauucaacagacacuguagacacaguacuagaaaagaauguaacaguaacacacucuguuaaccuucuagaagacaagcauaacgggaaacuaugcaaacuaagagggguagccccauugcauuuggguaaauguaacauugcuggcuggauccugggaaauccagagugugaaucacucuccacagcaagcucaugguccuacauuguggaaacaucuaguucagacaauggaacguguuacccaggagauuucaucgauuaugaggagcuaagagagcaauugagcucagugucaucauuugaaagguuugagauauuccccaagacaaguucauggcccaaucaugacucgaacaaagguguaacggcagcauguccucaugcuggagcaaaaagcuucuacaaaaauuuaauauggcuaguuaaaaaaggaaauucauacccaaagcucagcaaauccuacauuaaugauaaagggaaagaaguccucgugcuauggggcauucaccauccaucuacuagugcugaccaacaaagucucuaucagaaugcagaugcauauguuuuuguggggacaucaagauacagcaagaaguucaagccggaaauagcaauaagacccaaagugagggaacaagaagggagaaugaacuauuacuggacacuaguagagccgggagacaaaauaacauucgaagcaacuggaaaucuagugguaccgagauaugcauucgcaauggaaagaaaugcuggaucugguauuaucauuucagauacaccaguccacgauugcaauacaacuugucagacacccaagggugcuauaaacaccagccucccauuucagaauauacauucgaucacaauuggaaaauguccaaaauauguaaaaagcacaaaauugagacuggccacaggauugaggaaugucccgucuauucaaucuagaggccuauuuggggccauugccgguuucauugaagggggguggacagggaugguagauggaugguacgguuaucaccaucaaaaugagcaggggucaggauaugcagccgaccugaagagcacacagaaugccauugacgagauuacuaacaaaguaaauucuguuauugaaaagaugaauacacaguucacagcaguagguaaagaguucaaccaccuggaaaaaagaauagagaauuuaaauaaaaaaguugaugaugguuuccuggacauuuggacuuacaaugccgagcuguugguucuauuggaaaaugaaagaacuuuggacuaccacgauucaaaugugaagaacuuauaugaaaagguaagaagccaguuaaaaaacaaugccaaggaaauuggaaacggcugcuuugaauuuuaccacaaaugcgauaacacgugcauggaaagugucaaaaaugggacuuaugacuacccaaaauauucagaggaagcaaaauuaaacagagaagaaauagaugggguaaagcuggaaucaacaaggauuuaccagauuuuggcgaucuauucaacugucgccaguucauugguacugguagucucccugggggcaaucaguuucuggaugugcucuaaugggucucuacaguguagaauauguauuuaa

SEQ ID NO: 37680 - RNA, 1701 nt, Artificial Sequence
  derived and/or modified CDS sequence (wt) from hemagglutinin__InfluenzaA__ADM26281
augaaggcaauacuaguaguucugcuauauacauuugcaaccgcaaaugcagacacauuauguauagguuaucaugcgaacaauucaacagauacuguagacacaguacuagaaaagaauguaacaguaacacacucuguuaaccuucuagaagacaagcauaacgggaaacuaugcaaacuaagagggguagccccauugcauuuggguaaauguaacauugcuggcuggauccugggaaauccagagugugaaucacucuccacagcaagcucaugguccuacauuguggaaacaucuaguucagacaauggaacguguuacccaggagauuucaucgauuaugaggagcuaagagagcaauugagcucagugucaucauuugaaagguuugagauauuccccaagacaaguucauggcccaaucaugacucgaacaaagguguaacggcagcauguccucaugcuggagcaaaaagcuucuacaaaaauuuaauauggcuaguuaaaaaaggaaauucauacccaaagcucagcaaauccuacauuaaugauaaagggaaagaaguccucgugcuauggggcauucaccauccaucuacuagugcugaccaacaaagucucuaucagaaugcagaugcauauguuuuuguggggacaucaagauacagcaagaaguucaagccggaaauagcaauaagacccaaagugagggaucaagaagggagaaugaacuauuacuggacacuaguagagccgggagacaaaauaacauucgaagcaacuggaaaucuagugguaccgagauaugcauucgcaauggaaagaaaugcuggaucugguauuaucauuucagauacaccaguccacgauugcaauacaacuugucagacacccaagggugcuauaaacaccagccucccauuucagaguauacauccgaucacaauuggaaaauguccaaaauauguaaaaagcacaaaauugagacuggccacaggauugaggaaugucccgucuauucaaucuagaggccuauuuggggccauugccgguuucauugaagggggguggacagggaugguagauggaugguacgguuaucaccaucaaaaugagcaggggucaggauaugcagccgaccugaagagcacacagaaugccauugauaagauuacuaacaaaguaaauucuguuauugaaaagaugaauacacaguucacagcaguagguaaagaguucaaccaccuggaaagaagaauagagaauuuaaauaaaaagguugaugaugguuuccuggacauuuggacuuacaaugccgagcuguugguucuauuggaaaaugaaagaacuuuggacuaccacgauucaaaugugaagaacuuauaugaaaagguaagaagccaguuaaaaaacaaugccaaggaaauuggaaacggcugcuuugaauuuuaccacaaaugcgauaacacgugcauggaaagugucaaaaaugggacuuaugacuacccaaaauacucagaggaagcaaaauuaaacagagaagaaauagaugggguaaagcuggaaucaacaaggguuuaccagauuuuggcgaucuauucaacugucgccaguucauugguacugguagucucccugggggcaaucaguuucuggaugugcucuaaugggucucuacaguguagaauauguauuuaa

SEQ ID NO: 37681 - RNA, 1701 nt, Artificial Sequence
  derived and/or modified CDS sequence (wt) from hemagglutinin__InfluenzaA__ADM26282
augaaggcaauacuaguaguucugcuauauacauuuacaaccgcaaaugcagacacauuauguauagguuaucaugcgaacaauucaacagacacuguagacacaguacuagaaaagaauguaacaguaacacacucuguuaaccuucuagaagacaagcauaacgggaaacuaugcaaacuaagagggguagccccauugcauuuggguaaauguaacauugcuggcuggauccugggaaauccagagugugaaucacucuccacagcaagcucaugguccuacauuguggaaacaucuaguucagacaauggaacguguuacccaggagauuucaucgauuaugaggagcuaagagagcaauugagcucagugucaucauuugaaagguuugagauauuccccaagacaaguucauggcccaaucaugacucgaacaaagguguaacggcagcauguccucaugcuggagcaaaaagcuucuacaaaaauuuaauauggcuaguuaaaaaaggaaauucauacccaaagcucagcaaauccuacauuaaugauaaagggaaagaaguccucgugcuauggggcauucaccauccaucuacuagugcugaccaacaaagucucuaucagaaugcagaugcauauguuuuuguggggacaucaagauacagcaagaaguucaagccggaaauagcaauaagacccaaagugagggaacaagaagggagaaugaacuauuacuggacacuaguagagccgggagacaaaauaacauucgaagcaacuggaaaucuagugguaccgagauaugcauucgcaauggaaagaaaugcuggaucugguauuaucauuucagauacaccaguccaugauugcaauacaacuugucagacacccaagggugcuauaaacaccagccucccauuucagaauauacauucgaucacaauuggaaaauguccaaaauauguaaaaagcacaaaauugagacuggccacaggauugaggaaugucccguccauucaaucuagaggccuauuuggggccauugccgguuucauugaagggggguggacagggaugguagauggaugguacgguuaucaccaucaaaaugagcaggggucaggauaugcagccgaccugaagagcacacagaaugccauugacgagauuacuaacaaaguaaauucuguuauugaaaagaugaauacacaguucacagcaguagguaaagaguucaaccaccuggaaagaagaauagagaauuuaaauaaaaaaguugaugaugguuuccuggacauuuggacuuacaaugccgaacuguugguucuauuggaaaaugaaagaacuuuggacuaccacgauucaaaugugaagaacuuauaugaaaagguaagaagccaguuaaaaaacaaugccaaggaaauuggaaacggcugcuuugaauuuuaccacaaaugcgauaacacgugcauggaaagugucaaaaaugggacuuaugacuacccaaaauacucagaggaagcaaaauuaaacagagaagaaauagaugggguaaagcuggaaucaacaaggauuuaccagauuuuggcgaucuauucaacugucgccaguucauugguacugguagucucccugggggcaaucaguuucuggaugugcucuaaugggucucuacaguguagaauauguauuuaa

SEQ ID NO: 37682 - RNA, 1701 nt, Artificial Sequence
  derived and/or modified CDS sequence (wt) from hemagglutinin__InfluenzaA__ADM26283
augaaggcaauacuaguaguucugcuauauacauuuacaaccgcaaaugcagacacauuauguauagguuaucaugcgaacaauucaacagacacuguagacacaguacuagaaaagaauguaacaguaacacacucuguuaaccuucuagaagacaagcauaacgggaaacuaugcaaacuaagagggguagccccauugcauuuggguaaauguaacauugcuggcuggauccugggaaauccagagugugaaucacucuccacagcaagcucaugguccuacauuguggaaacaucuaguucagacaauggaacguguuacccaggagauuucaucgauuaugaggagcuaagagagcaauugagcucagugucaucauuugaaagguuugagauauuccccaagacaaguucauggcccaaucaugacucgaacaaagguguaacggcagcauguccucaugcuggagcaaaaagcuucuacaaaaauuuaauauggcuaguuaaaaaaggaaauucauacccaaagcucagcaaauccuacauuaaugauaaagggaaagaaguccucgugcuauggggcauucaccauccaucuacuagugcugaccaacaaagucucuaucagaaugcagaugcauauguuuuuguggggacaucaagauacagcaagaaguucaagccggaaauagcaauaagacccaaagugagggaacaagaagggagaaugaacuauuacuggacacuaguagagccgggagacaaaauaacauucgaagcaacuggaaaucuagugguaccgagauaugcauucgcaauggaaagaaaugcuggaucugguauuaucauuucagauacaccaguccacgauugcaauacaacuugucagacacccaagggugcuauaaacaccagccucccauuucagaauauacauucgaucacaauuggaaaauguccaaaauauguaaaaagcacaaaauugagacuggccacaggauugaggaaugucccgucuauucaaucuagaggccuauuuggggccauugccgguuucauugaagggggguggacagggaugguagauggaugguacgguuaucaccaucaaaaugagcaggggucaggauaugcagccgaccugaagagcacacagaaugccauugacgagauuacuaacaaaguaaauucuguuauugaaaagaugaauacacaguucacagcaguagguaaagaguucaaccaccuggaaaaaagaauagagaauuuaaauaaaaaaguugaugaugguuuccuggacauuuggacuuacaaugccgaacuauugguucuauuggaaaaugaaagaacuuuggacuaccacgauucaaaugugaagaacuuauaugaaaagguaagaagccaguuaaaaaacaaugccaaggaaauuggaaacggcugcuuugaauuuuaccacaaaugcgauaacacgugcauggaaagugucaaaaaugggacuuaugacuacccaaaauacucagaggaagcaaaauuaaacagagaaaaaauagaugggguaaagcuggaaucaacaagaauuuaccagauuuuggcgaucuauucaacugucgccaguucauugguacugguagucucccugggggcaaucaguuucuggaugugcucuaaugggucucuacaguguagaauauguauuuaa

SEQ ID NO: 37683 - RNA, 1701 nt, Artificial Sequence
  derived and/or modified CDS sequence (wt) from hemagglutinin__InfluenzaA__ADM26284
augaaggcaauacuaguaguucugcuauauacauuuacaaccgcaaaugcagacacauuauguauagguuaucaugcgaacaauucaacagacacuguagacacaguacuagaaaagaauguaacaguaacacacucuguuaaccuucuagaagacaagcauaacgggaaacuaugcaaacuaagagggguagccccauugcauuuggguaaauguaacauugcuggcuggauccugggaaauccagagugugaaucacucuccacagcaagcucaugguccuacauuguggaaacaucuaguucagacaauggaacguguuacccaggagauuucaucgauuaugaggagcuaagagagcaauugagcucagugucaucauuugaaagguuugagauauuccccaagacaaguucauggcccaaucaugacucgaacaaagguguaacggcagcauguccucaugcuggagcaaaaagcuucuacaaaaauuuaauauggcuaguuaaaaaaggaaauucauacccaaagcucagcaaauccuacauuaaugauaaagggaaagaaguccucgugcuauggggcauucaccauccaucuacuagugcugaccaacaaagucucuaucagaaugcagaugcauauguuuuuguggggacaucaagauacagcaagaaguucaagccggaaauagcaauaagacccaaagugagggaacaagaagggagaaugaacuauuacuggacacuaguagagccgggagacaaaauaacauucgaagcaacuggaaaucuagugguaccgagauaugcauucgcaauggaaagaaaugcuggaucugguaucaucauuucagauacaccaguccacgauugcaauacaacuugucagacacccaagggugcuauaaacaccagccucccauuucagaauauacauucgaucacaauuggaaaauguccaaaauauguaaaaagcacaaaauugagacuggccacaggauugaggaaugucccgucuauucaaucuagaggccuauuuggggccauugccgguuucauugaagggggguggacagggaugguagauggaugguacgguuaucaccaucaaaaugagcaggggucaggauaugcagccgaccugaagagcacacagaaugccauugacgagauuacuaacaaaguaaauucuguuauugaaaagaugaauacacaguucacagcaguagguaaagaguucaaccaccuggaaaaaagaauagagaauuuaaauaaaaaaguugaugaugguuuccuggacauuuggacuuacaaugccgagcuguugguucuauuggaaaaugaaagaacuuuggacuaccacgauucaaaugugaagaacuuauaugaaaagguaagaagccaguuaaaaaacaaugccaaggaaauuggaaacggcugcuuugaauuuuaccacaaaugcgauaacacgugcauggaaagugucaaaaaugggacuuaugacuacccaaaauacucagaggaagcaaaauuaaacagagaagaaauagaugggguaaagcuggaaucaacaaggauuuaccagauuuuggcgaucuauucaacugucgccaguucauugguacugguagucucccugggggcaaucaguuucuggaugugcucuaaugggucucuacaguguagaauauguauuuaa

SEQ ID NO: 37684 - RNA, 1701 nt, Artificial Sequence
  derived and/or modified CDS sequence (wt) from hemagglutinin__InfluenzaA__ADM26285
augaaggcaauacuaguaguucugcuauauacauuuacaaccgcaaaugcagacacauuauguauagguuaucaugcgaacaauucaacagacacuguagacacaguacuagaaaagaauguaacaguaacacacucuguuaaccuucuagaagacaagcauaacgggaaacuaugcaaacuaagagggguagccccauugcauuuggguaaauguaacauugcuggcuggauccugggaaauccagagugugaaucacucuccacagcaagcucaugguccuacauuguggaaacaucuaguucagacaauggaacguguuacccaggagauuucaucgauuaugaggagcuaagagagcaauugagcucagugucaucauuugaaagguuugagauauuccccaagacaaguucauggcccaaucaugacucgaacaaagguguaacggcagcaugcccucaugcuggagcaaaaagcuucuacaaaaauuuaauauggcuaguuaaaaaaggaaauucauacccaaagcucagcaaauccuacauuaaugauaaagggaaagaaguccucgugcuauggggcauucaccauccaucuacuagugcugaccaacaaagucucuaucagaaugcagaugcauauguuuuuguggggacaucaagauacagcaagaaguucaagccggaaauagcaauaagacccaaagugagggaacaagaagggagaaugaacuauuacuggacacuaguagagccgggagacaaaauaacauucgaagcaacuggaaaucuagugguaccgagauaugcauucgcaauggaaagaaaugcuggaucugguauuaucauuucagauacaccaguccacgauugcaauacaacuugucagacacccaagggugcuauaaacaccagccucccauuucagaauauacauucgaucacaauuggaaaauguccaaaauauguaaaaagcacaaaauugagacuggccacaggauugaggaaugucccgucuauucaaucuagaggccuauuuggggccauugccgguuucauugaagggggguggacagggaugguagauggaugguacgguuaucaccaucaaaaugagcaagggucaggauaugcagccgaccugaagagcacacagaaugccauugacgagauuacuaacaaaguaaauucuguuauugaaaagaugaauacacaguucacagcaguagguaaagaguucaaccaccuggaaaaaagaauagagaauuuaaauaaaaaaguugaugaugguuuccuggacauuuggacuuacaaugccgaacuguugguucuauuggaaaaugaaagaacuuuggacuaccacgauucaaaugugaagaacuuauaugaaaagguaagaagccaguuaaaaaacaaugccaaggaaauuggaaacggcugcuuugaauuuuaccacaaaugcgauaacacgugcauggaaagugucaaaaaugggacuuaugacuacccaaaauacucagaggaagcaaaauuaaauagagaagaaauagaugggguaaagcuggaaucaacaaggauuuaccagauuuuggcgaucuauucaacugucgccaguucauugguacugguagucucccugggggcaaucaguuucuggaugugcucuaaugggucucuacaguguagaauauguauuuaa

SEQ ID NO: 37685 - RNA, 1701 nt, Artificial Sequence
  derived and/or modified CDS sequence (wt) from hemagglutinin__InfluenzaA__ADM26784
augaagacuaucauugcuuugagcuacauucuaugucugguuuucgcucaaaaacuuccuggaaaugacaacagcacggcaacgcugugccuugggcaccaugcaguaccaaacggaacgauagugaaaacaaucacgaaugaccaaauugaaguuacuaaugcuacugagcugguucagaguuccucaacaggugaaauaugcgacaguccucaucagauccuugauggagaaaacugcacacuaauagaugcucuauugggagacccucagugugauggcuuccaaaauaagaaaugggaccuuuuuguugaacgcagcaaagccuacagcaacuguuacccuuaugaugugccggauuaugccucccuuaggucacuaguugccucauccggcacacuggaguuuaacaaugaaagcuucaauuggacuggagucacucaaaacggaacaagcucugcuugcaugaggagaucuaauaacaguuucuuuaguagauugaauugguugacccacuuaaaauucaaauacccagcauuaaacgugacuaugccaaacaaugaacaauuugacaaauuguacauuugggggguucaccacccggguacggacaaugaccaaaucuuccuguaugcucaagcaucaggaagaaucacagucucuaccaaaagaagccaacaaacuguaaucccgaauaucggaucuagacccagaguaaggaauaucccuagcagaauaagcaucuauuggacaauaguaaaaccgggagacauacuuuugauuaacagcacagggaaucuaauugcuccuagggguuacuucaaaauacgaagugggaaaagcucaauaaugagaucagaugcacccauuggcaaaugcaauucugaaugcaucacuccaaauggaagcauucccaaugacaaaccauuccaaaauguaaacaggaucacauacggggccugucccagauauguuaagcaaaacacucugaaauuggcaacagggaugcgaaauguaccagagaaacaaacuagaggcauauuuggcgcaaucgcggguuucauagaaaaugguugggagggaaugguggaugguugguacgguuucaggcaucaaaauucugagggaagaggacaagcagcagaucucaaaagcacucaagcagcaaucgaucaaaucaaugggaagcugaauagauugaucgggaaaaccaacgagaaauuccaucagauugaaaaagaauucucagaagucgaagggagaauucaggaccuugagaaauauguugaggacaccaaaauagaucucuggucauacaacgcggagcuucuuguugcccuggagaaccaacauacaauugaucuaacugacucagaaaugaacaaacuguuugaaaaaacaaagaagcaacugagggaaaaugcugaggauaugggcaaugguuguuucaaaauauaccacaaaugugacaaugccugcauaggaucaaucagaaauggaacuuaugaccacgauguauacagagaugaagcauuaaacaaccgguuccagaucaagggaguugagcugaagucaggguacaaagauuggauccuauggauuuccuuugccauaucauguuuuuugcuuuguguugcuuuguugggguucaucaugugggccugccaaaaaggcaacauuaggugcaacauuugcauuuga

SEQ ID NO: 37686 - RNA, 1701 nt, Artificial Sequence; identical to SEQ ID NO: 37382
  derived and/or modified CDS sequence (wt) from hemagglutinin__InfluenzaA__ADM26795

SEQ ID NO: 37687 - RNA, 1701 nt, Artificial Sequence
  derived and/or modified CDS sequence (wt) from hemagglutinin__InfluenzaA__ADM26817
augaagacuaccauugcuuugagccacauucuaugucugguuuucgcucaaaaacuuccuggaaaugacaacagcacggcaacgcugugccuugggcaccaugcaguaccaaacggaacgauagugaaaacaaucacgaaugaccaaauugaaguuacuaaugcuacugagcugguucagaguuccucagcaggugaaauaugcgacaguccucaucagauccuugauggagaaaacugcacacuaauagaugcucuauugggagacccucagugugauggcuuccaaaauaagaaaugggaccuuuuuguugaacgaagaagagccuacagcaacuguuacccuuaugaugugccggauuaugccucccuuaggucacuaguugccucauccggcacacuggaguuuaacaaugaaagcuucaauuggacuggagucacucaaaacggaacaagcucugcuugcauaaggagaucuaauaauaguuucuuuaguagauugaauugguugacccacuuaaacuucaaauacccagcauugaacgugacuaugccaaacaaugaacaauuugacaaauuguacauuugggggguucaccacccggguacggacaaggaccaaaucuuccuguaugcucaagcaucaggaagaaucacaguaucuaccaaaagaagccaacaagcuguaaucccgaauaucggaucuagacccagaguaaggaauaucccuagcagaauaagcaucuauuggacaauaguaaaaccgggagacauacuuuugauuaacagcacagggaaucuaauugcuccuagggguuacuucaaaauacgaagugggaaaagcucaauaaugagaucagaugcacccauuggcaaaugcaauucugaaugcaucacuccaaauggaagcauucccaaugacaaaccauuccaaaauguaaacaggaucacauacggggccugucccagauauguuaagcaaagcacucugaaauuggcaacaggaaugcgaaauguaccagagaaacaaacuagaggcauauuuggcgcaauagcggguuucauagaaaaugguugggagggaaugguggaugguugguacgguuucaggcaucaaaauucugagggaagaggacaagcagcagaucucaaaagcacucaagcagcaaucgaucaaaucaauggaaagcugaauagauugaucgggaaaaccaacgagaaauuccaucagauugaaaaagaauucucagaagucgaagggagaauucaggaccuugagaaauauguugaggacacuaaaauagaucucuggucauacaacgcggagcuucuuguugcccuggagaaccaacauacaauugaucuaacugacucagaaaugaacaaacuguuugaaaaaacaaagaagcaacugagggaaaaugcugaggauaugggcaaugguuguuucaaaauauaccacaaaugugacaaugccugcauaggaucaaucagaaauggaacuuaugaccacgauguauacagagaugaagcauuaaacaaccgguuccagaucaagggaguugagcugaagucaggguacaaagauuggauccuauggauuuccuuugccauaucauguuuuuugcuuuguguugcuuuguugggguucaucaugugggccugccaaaaaggcaacauuaggugcaacauuugcauuuga

SEQ ID NO: 37688 - RNA, 1704 nt, Artificial Sequence
  derived and/or modified CDS sequence (wt) from hemagglutinin__InfluenzaA__ADM31424
auggagaaaauagugcuucuuuuuacaacaaucagccuuguuaaaagcgaucauauuugcauugguuaucaugcaaauaacucgacagagcagguugacacaauaauggaaaagaacguuacuguuacacaugcccaagacauacuggaaaagacacacaacgggaagcucugcgaucuaaauggagugaagccucugauuuuaaaagauuguaguguagcgggauggcuccucggaaacccauugugugacgaauucaucaaugugccagaauggucuuacauaguagagaaggccaauccagccaaugaccucuguuacccagggaauuucaacgauuaugaagaauugaaacaccuauugagcaggauaaaccauuuugagaaaauacagaucauccccaaagauucuuggucagaucaugaagccucauugggggugagcgcagcauguucauaccagggaaauuccuccuucuucagaaacgugguauggcuuaucaaaaaggacaaugcauacccaacaauaaagaaagacuacaauaauaccaaccaagaagaucucuugguacugugggggauucaccauccuaaugaugaggcagagcagacaaggcucuaucaaaacccaaccaccuauauuuccauugggacaucaacacuaaaccagagauugguaccaaaaauagccacuagauccaaaauaaacgggcaaaguggcaggauagauuucuucuggacaauuuuaaaaccgaaugaugcaauccacuucgagaguaauggaaauuucauugcuccagaauaugcauacaaaauugucaagaaaggagacuccacaauuaugaaaagugaaguggaauaugguaacugcaacaccaggugucagacuccgauaggggcgauaaacucuaguaugccauuccacaacauacacccucucaccaucggagaaugucccaaauaugugaaaucaaacaaauuaguccuugcgacugggcucagaaauaguccucaaagagagagaagaagaaaaagaggacuguuuggagcuauagcagguuuuauagagggaggauggcagggaaugguagaugguugguauggguaccaccacagcaaugagcaggggaguggguacgcugcagacaaagaaucuacucaaaaggcaauagacggagucaccaacaaggucaacucgaucauugacaaaaugaacacucaguuugaggccguaggaagggaauuuaauaacuuagagaggagaauagagaauuuaaacaagaaaauggaagacggauuccuagauguuuggacuuauaaugcugaacuucugguucucauggaaaaugagagaacucuagacuuccaugacucaaaugucaagaaccuuuacgauaaggucagacuacagcuuaaggauaaugcaaaagaguuggguaacgguuguuucgaguucuaucacaaauguaauaaugaauguauggaaaguguaagaaacggaacguaugacuacccgcaguauucagaagaagcaagauuaaaaagagaggaaauaaguggaguaaaauuggaaucaauaggaaucuaccaaauacugucaauuuauucaacaguggcgaguucccuagugcuggcaaucaugauggcuggucugucuuuauggauguguuccaacgggucguuacagugcagaauuugcauuuaa

SEQ ID NO: 37689 - RNA, 1701 nt, Artificial Sequence
  derived and/or modified CDS sequence (wt) from hemagglutinin__InfluenzaA__ADM31478
augaaggcaauacuaguaguucugcuauauacauuuguaaccgcaaaugcagacacauuauguauagguuaucaugcgaacaauucaacagacacuguagacacaguacuagaaaagaauguaacaguaacacacucuguuaaccuucuagaagacaagcauaacgggaaacuaugcaaacuaagagggguagccccauugcauuuggguaaauguaacauugcuggcuggauccugggaaauccagagugugaaucacucuccacagcaagcucaugguccuacauuguggaaacaucuaguucagacaauggaacguguuacccaggagauuucaucgauuaugaggagcuaagagagcaauugagcucagugucaucauuugaaagguuugagauauuccccaagacaaguucauggcccaaucaugacucgaacaaagguguaacggcagcauguccucaugcuggagcaaaaagcuucuacaaaaauuuaauauggcuaguuaaaaaaggaaauucauacccaaagcucagcaaauccuacauuaaugauaaagggaaagaaguccucgugcuauggggaauucaccauccaucuacuagugcugaccaacaaagucucuaucagaaugcagaugcauauguuuuuguggggacaucaagauacagcaagaaguucaagccggaaauagcaauaagacccaaagugagggaucaagaagggagaaugaacuauuacuggacacuaguagagccgggagacaaaauaacauucgaagcaacuggaaaucuagugguaccgagauaugcauucgcaauggaaagaaaugcuggaucugguauuaucauuucagauacaccaguccacgauugcaauacaacuugucagacacccaagggugcuauaaacaccagccucccauuucagaauauacauccgaucacaauuggaaaauguccaaaauauguaaaaagcacaaaauugagacuggccacaggauugaggaaugucccgucuauucaaucuagaggccuauuuggggccauugccgguuucauugaagggggguggacagggaugguagauggaugguacgguuaucaccaucaaaaugagcaggggucaggauaugcagccgaccugaagagcacacagcaugccauugacgagauuacuaacaaaguaaauucuguuauugaaaagaugaauacacaguucacagcaguagguaaagaguucaaccaccuggaaaaaagaauagagaauuuaaauaaaaaaguugaugaugguuuccuggacauuuggacuuacaaugccgaacuguugguucuauuggaaaaugaaagaacuuuggacuaccacgauucaaaugugaagaacuuauaugaaaagguaagaagccaguuaaaaaacaaugccaaggaaauuggaaacggcugcuuugaauuuuaccacaaaugcgauaacacuugcauggaaagugucaaaaaugggacuuaugacuacccaaaauacucagaggaagcaaaauuaaacagagaagaaauagaugggguaaagcuggaaucaacaaggauuuaccagauuuuggcgaucuauucaacugucgccaguucauugguacugguagucucccugggggcaaucaguuucuggaugugcucuaaugggucucuacaguguagaauauguauuuaa

SEQ ID NO: 37690 - RNA, 1701 nt, Artificial Sequence
  derived and/or modified CDS sequence (wt) from hemagglutinin__InfluenzaA__ADM31488
augaaggcaauacuaguaguucugcuauauacauuugcaaccgcaaaugcagacacauuauguauagguuaucaugcgaacaauucaacagacacuguagacacaguacuagaaaagaauguaacaguaacacacucuguuaacauucuagaagacaagcauaacgggaaacuaugcaaacuaagagggguagccccauugcauuuggguaaauguaacauugcuggcuggauccugggaaauccagagugugaaucacucuccacagcaagcucaugguccuacauuguggaaacaucuaguucagacaauggaacguguuacccaggagauuucaucgauuaugaggagcuaagagagcaauugagcucagugucaucauuugaaagguuugagauauuccccaagacaaguucauggcccaaucaugacucgaacaaagguguaacggcagcauguccucaugcuggagcaaaaagcuucuacaaaaauuuaauuuggcuaguuaaaaaaggaaauucauacccaaagcucagcaaauccuacauuaaugauaaagggaaagaaguccucgugcuauggggcauucaccauccaucuacuagugcugaccaacaaagucucuaucagaaugcagaugcauauguuuuuguggggucaucaaaauacagcaagaaguucaagccggaaauagcaauuagacccaaagugagggaucaagaagggagaaugaacuauuacuggacacuaguagagccgggagacaaaauaacauucgaagcaacuggaaaucuagugguaccaagauaugcauucgcaauggaaagaaaugcuggaucugguauuaucauuucagauacaccaguccaugauugcaauacaacuugucagacacccaagggugcuauaaacaccagccucccauuucagaauauacauccgaucacaauuggaaaauguccaaaauauguaaaaagcacaaaauugagacuggccacaggauugaggaaugucccgucuauucaaucuagaggccuauuuggggccauugccgguuucauugaagggggguggacagggaugguagauggaugguacgguuaucaccaucaaaaugagcaggggucaggauaugcagccgaccugaagagcacacagaaugccauugacgagauuacuaacaaaguaaauucuguuauugaaaagaugaauacacaguucacagcaguagguaaagaguucaaccaccuggaaaaaagaauagagaauuuaaauaaaaaaguugaugaugguuuccuggacauuuggacuuacaaugccgaacuguugguucuauuggaaaaugaaagaacuuuggacuaccacgauucaaaugugaagaacuuauaugaaaagguaagaagccagcuaaaaaacaaugccaaggaaguuggaaacggcugcuuugaauuuuaccacaaaugugauaacacgugcauggaaagugucaaaaaugggacuuaugacuacccaaaauacucagaggaagcaaaauuaaacagagaagaaauagaugggguaaagcuggaaucaacaaggauuuaccagauuuuggcgaucuauucaacugccgccaguucauugguacugguagucucccugggggcaaucaguuucuggaugugcucuaaugggucucuacaguguagaauauguauuuaa

SEQ ID NO: 37691 - RNA, 1701 nt, Artificial Sequence
  derived and/or modified CDS sequence (wt) from hemagglutinin__InfluenzaA__ADM31498
augaaggcaauacuaguaguucugcuauauacauuugcaaccgcaaaugcagacacauuauguauagguuaucaugcgaacaauucaacagacacuguagacacaguacuagaaaagaauguaacaguaacacacucuguuaaccuucuagaagacaagcauaacgggaaacuaugcaaacuaagagggguagccccauugcauuuggguaaauguaacauugcuggcuggauccugggaaauccagagugugaaucacucuccacagcaagcucaugguccuacauuguggaaacaucuaguucagacaauggaacguguuacccaggagauuucaucgauuaugaggagcuaagagagcaauugagcucagugucaucauuugaaagguuugagauauuccccaagacaaguucauggcccaaucaugacucgaacaaagguguaacggcagcauguccucaugcuggagcaaaaagcuucuacaaaaauuuaauauggcuaguuaaaaaaggaaauucauacccaaagcucagcaaauccuacauuaaugauaaagggaaagaaguccucgugcuauggggcauucaccauccaucuacuagugcugaccaacaaagucucuaucagaaugcagaugcauauguuuuuguggggacaucaagauacagcaagaaguucaagccggaaauagcaauaagacccaaagugagggaucaagaagggagaaugaacuauuacuggacacuaguaaagccgggagacaaaauaacauucgaagcaacuggaaaucuagugguaccgagauaugcauucgcaauggaaagaaaugcuggaucugguauuaucauuucagauacaccaguccacgauugcaauacaacuugucagacacccaagggugcuauaaacaccagccucccauuucagaauauacauccgaucacaauuggaaaauguccaaaauauguaaaaagcacaaaauugagacuggccacaggauugaggaaugucccgucuauucaaucuagaggccuauuuggggccauugccgguuucauugaagggggguggacagggaugguagauggaugguacgguuaucaccaucaaaaugagcagggaucaggauaugcagccgaccugaagagcacacagcaugccauugacgagauuacuaacaaaguaaauucuguuauugaaaagaugaauacacaguucacagcaguagguaaagaguucaaccaccuggaaaaaagaauagagaauuuaaauaaaaaaguugaugaugguuuccuggacauuuggacuuacaaugccgaacuguugguucuauuggaaaaugaaagaacuuuggacuaccacgauucaaaugugaagaacuuauaugaaaagguaagaagccaguuaaaaaacaaugccaaggaaauuggaaacggcugcuuugaauuuuaccacaaaugcgauaacacgugcauggaaagugucaaaaaugggacuuaugacuacccaaaauacucagaggaagcaaaauuaaacagagaagaaauagaugggguaaagcuggaaucaacaaggauuuaccagauuuuggcgaucuauucaacugucgccaguucauugguacugguagucucccugggggcaaucaguuucuggaugugcucuaaugggucucuacaguguagaauauguauuuaa

SEQ ID NO: 37692 - RNA, 1701 nt, Artificial Sequence
  derived and/or modified CDS sequence (wt) from hemagglutinin__InfluenzaA__ADM31508
augaaggcaauacuaguaguucugcuauauacauuugcaaccgcaaaugcagacacauuauguauagguuaucaugcgaacaauucaacagacacuguagacacaguacuagaaaagaauguaacaguaacacacucuguuaaccuucuagaagacaagcauaacgggaaacuaugcaaacuaagagggguagccccauugcauuuggguaaauguaacauugcuggcuggauccugggaaauccagagugugaaucacucuccacagcaagcucaugguccuacauuguggaaacaucuaguucagacaauggaacguguuacccaggagauuucaucgauuaugaggagcuaagagagcaauugagcucagugucaucauuugaaagguuugagauauuccccaagacaaggucauggcccaaucaugacucgaacaaagguguaacggcagcauguccucaugcuggagcaaaaagcuucuacaaaaguuuaauauggcuaguuaaaaaaggaaauucauacccaaagcucagcaaauccuacauuaaugauaaagggaaagaaguccucgugcuauggggaauucaccauccaucuacuagugcugaccaacaaagucucuaucagaaugcagaugcauauguuuuuguggggacaucaagauacagcaagaaguucaagccggaaauagcaauaagacccaaagugagggaucaagaagggagaaugaacuauuacuggacgcuaguagagccgggagacaaaauaacauucgaagcaacuggaaaucuagugguaccgagauaugcauucgcaauggaaagaaaugcuggaucugguauuaucauuucagauacaccaguccacgauugcaauacaacuugucagacacccaagggugcuauaaacaccagccucccauuucagaauauacauccgaucacaauuggaaaauguccaaaauauguaaaaagcacaaaauugagacuggccacaggauugaggaaugucccgucuauucaaucuagaggccuauuuggggccauugccgguuucauugaagggggguggacagggaugguagauggaugguacgguuaucaccaucaaaaugagcaggggucaggauaugcagccgaccugaagagcacacagcaugccauugacgagauuacuaacaaaguaaauucuguuauugaaaagaugaauacacaguucacagcaguagguaaagaguucaaccaccuggaaaaaagaauagagaauuuaaauaaaaaaguugaugaugguuuccuggacauuuggacuuacaaugccgaacuguugguucuauuggaaaaugaaagaacuuuggacuaccacgauucaaaugugaagaacuuauaugaaaagguaagaagccaguuaaaaaacaaugccaaggaaauuggaaacggcugcuuugaauuuuaccacaaaugcgauaacacgugcauggaaagugucaaaaaugggacuuaugacuacccaaaauacucagaggaagcaaaauuaaacagagaagaaauagaugggguaaagcuggaaucaacaaggauuuaccagauuuuggcgaucuauucaacugucgccaguucauugguacugguagucucccugggggcaaucaguuucuggaugugcucuaaugggucucuacaguguagaauauguauuuaa

SEQ ID NO: 37693 - RNA, 1701 nt, Artificial Sequence
  derived and/or modified CDS sequence (wt) from hemagglutinin__InfluenzaA__ADM31518
augaaggcaauacuaguaguucugcuauauacauuugcaaccgcaaaugcagacacauuauguauagguuaucaugcgaacaauucaacagacacuguagacacaguacuagaaaagaauguaacaguaacacacucuguuaaccuucuagaagacaagcauaacgggaaacuaugcaaacuaagagggguagccccauugcauuuggguaaauguaacauugcuggcuggauccugggaaauccagagugugaaucacucuccacagcaagcucaugguccuacauuguggaaacaucuaguucagacaauggaacguguuacccaggagauuucaucgauuaugaggagcuaagagagcaauugagcucagugucaucauuugaaagguuugagauauuccccaagacaaguucauggcccaaucaugacucgaacaaagguguaacggcagcauguccucaugcuggagcaaaaagcuucuacaaaaauuuaauauggcuaguuaaaaaaggaaauucauacccaaagcucagcaaauccuacguuaaugauaaagggaaagaaguccuagugcuauggggcauucaccauccaucuacuagugcugaccaacaaagucucuaucagaaugcagaugcauauguuuuuguggggacaucaagauacagcaagaaguucaagccggaaauagcaauaagacccaaagugagggaucaagaagggagaaugaacuauuacuggacacuaguagagccgggagacaaaauaacauucgaagcaacuggaaaucuagugguaccgagauaugcauucgcaauggaaagaaaugcuggaucugguauuaucauuucagauacaccaguccacgauugcaauacaacuugucagacacccaagggugcuauaaacaccagccucccauuucagaauauacauccgaucacaauuggaaaauguccaaaauauguaaaaagcacaaaauugagacuggccacaggauugaggaauaucccgucuauucaaucuagaggccuauuuggggccauugccgguuucauugaagggggguggacagggaugguagauggaugguacgguuaucaccaucaaaaugagcaggggucaggauaugcagccgaccugaagagcacacagaaugccauugacgagauuacuaacaaaguaaauucuguuauugaaaagaugaauacacaguucacagcaguagguaaagaguucaaccaccuggaaaaaagaauagagaauuuaaauaaaaagguugaugaugguuuccuggacauuuggacuuacaaugccgaacuguugguucuauuggaaaaugaaagaacuuuggacuaccacgauucaaaugugaagaacuuauaugaaaagguaagaagccaguuaaaaaacaaugccaaggaaauuggaaacggcugcuuugaauuuuaccacaaaugcgauaacacgugcauggaaagugucaaaaaugggacuuaugacuacccaaaauacucagaggaagcaaaauuaaacagagaagaaauagaugggguaaagcuggaaucaacaaggauuuaccagauuuuggcgaucuauucaacugucgccaguucauugguacugguagucucccugggggcaaucaguuucuggaugugcucuaaugggucucuacaguguagaauauguauuuaa

SEQ ID NO: 37694 - RNA, 1701 nt, Artificial Sequence
  derived and/or modified CDS sequence (wt) from hemagglutinin__InfluenzaA__ADM31528
augaaggcaauacuaguaguucugcuauauacauuugcaaccgcaaaugcagacacauuauguauagguuaucaugcgaacaauucaacagacacuguagacacaguacuagaaaagaauguaacaguaacacacucuguuaaccuucuagaagacaagcauaacgggaaacuaugcaaacuaagagggguagccccauugcauuuggguaaauguaacauugcuggcuggauccugggaaauccagagugugaaucacucuccacagcaagcucaugguccuacauuguggaaacaucuaguucagacaauggaacauguuacccaggagauuucaucgauuaugaggagcuaagagagcaauugagcucagugucaucauuugaaagguuugagauguuccccaagacaaguucauggcccaaucaugacucgaacaaagguguaacggcagcauguccucaugcuggagcaaaaagcuucuacaaaaauuuaauauggcuaguuaaaaaaggaaauucauacccaaagcucagcaaauccuacauuaaugauaaagggaaagaaguccucgugcuauggggcauucaccauccauccacuagugcugaccaacaaagucucuaucagaaugcagaugcauauguuuuuguggggacaucaagauacagcaagaaguucaagccggaaauagcaauaagacccaaagugagggaucaagaagggagaaugaacuauuacuggacacuaguagagccgggagacaaaauaacauucgaagcaacuggaaaucuagugguaccgagauacgcauucgcaauggaaagaaaugcuggaucugguauuaucauuucagauacaccaguucacgauugcaauacaacuugucagacacccaagggugcuauaaacaccagccucccauuucagaauauacauccgaucacaauuggaaaauguccaaaauauguaaaaagcacaaaauugagacuggccacaggauugaggaaugucccgucuauucaaucuagaggccuauuuggggccauugccgguuucauugaagggggguggacagggaugguagauggaugguacgguuaucaccaucaaaaugagcaggggucaggauaugcagccgaccugaagagcacacagaaugccauugacaagauuacuaacaaaguaaauucuguuauugaaaagaugaauacacaguucacagcaguagguaaagaguucaaccaccuggaaaaaagaauagagaauuuaaauaaaaaaguugaugaugguuuccuggacauuuggacuuacaaugccgaacuguugguucuauuggaaaaugaaagaacuuuggacuaccacgauucaaaugugaagaacuuauaugaaaagguaagaagccaguuaaaaaacaaugccaaggaaguuggaaacggcugcuuugaauuuuaccacaaaugcgauaacacgugcauggaaagugucaaaaaugggacuuaugacuacccaaaauacucagaggaagcaaaauuaaacagagaagaaauagaugggguaaagcuggaaucaacaaggauuuaccagauuuuggcgaucuauucaacugucgccaguucauugguacugguagucucccugggggcaaucaguuucuggaugugcucuaaugggucucuacaguguagaauauguauuuaa

SEQ ID NO: 37695 - RNA, 1701 nt, Artificial Sequence
  derived and/or modified CDS sequence (wt) from hemagglutinin__InfluenzaA__ADM31538
augaaggcaauacuaguaguucugcuauauacauuugcaaccgcaaaugcagacacauuauguauagguuaucaugcgaacaauucaacagacacuguagacacaguacuagaaaagaauguaacaguaacacacucuguuaaccuucuagaagacaagcaugacgggaaacuaugcaaacuaagagggguagccccauugcauuuggguaaauguaacauugcuggcuggauccugggaaauccagagugugaaucacucuccacagcaagcucaugguccuacauuguggaaacaucuaguucagacaauggaacguguuacccaggagauuucaucgauuaugaggagcuaagagagcaauugagcucagugucaucauuugaaagguuugagauauuccccaagacaaguucauggcccaaucaugacucgaacaaagguguaacggcagcauguccucaugcuggagcaaaaagcuucuacaaaaauuuaauauggcuaguuaaaaaaggaaauucauacccaaagcucagcaaauccuacauuaaugauaaagggaaagaaguccucgugcuauggggcauucaccauccaucuacuagugcugaccaacaaagucucuaucagaaugcagaugcauauguuuuuguggggacaucaagauacagcaagaaguucaagccggaaauagcaauaagacccaaagugagggaucaagaagggagaaugaacuauuacuggacacuaguagagccgggagacaaaauaacauucgaagcaacuggaaaucuagugguaccgagauaugcauucgcaauggaaagaaaugcuggaucugguauuaucauuucagauacaccaguccacgauugcaauacaacuugucagacacccaagggugccauaaacaccagccucccauuucagaauauacauccgaucacaauuggaaaauguccaaaauauguaaaaagcacaaaauugagacuggccacaggauugaggaauaucccgucuauucaaucuagaggccuauuuggggccauugccgguuucauugaagggggguggacagggaugguagauggaugguacgguuaucaccaucaaaaugagcaggggucaggauaugcagccgaccugaagagcacacagaaugccauugacaagauuacuaacaaaguaaauucuguuauugaaaagaugaauacacaguucacagcaguagguaaagaguucaaccaccuggaaaaaagaauagagaauuuaaauaaaaagguugaugaugguuuccuggacauuuggacuuacaaugccgaacuguugguucuauuggaaaaugaaagaacuuuggacuaccacgauucaaaugugaagaacuuauaugaaaagguaagaagccaguuaaaaaacaaugccaaggaaauuggaaacggcugcuuugaauuuuaccacaaaugcgauaacacgugcauggaaagugucaaaaaugggacuuaugacuacccaaaauacucagaggaagcaaaauuaaacagagaagaaauagaugggguaaagcuggaaucaacaaggauuuaccagauuuuggcgaucuauucaacugucgccaguucauugguacugguagucucccugggggcaaucaguuucuggaugugcucuaaugggucucuacaguguagaauauguauuuaa

SEQ ID NO: 37696 - RNA, 1701 nt, Artificial Sequence
  derived and/or modified CDS sequence (wt) from hemagglutinin__InfluenzaA__ADM31548
augaaggcaauacuaguaguucugcuauauacauuugcaaccgcaaaugcagacacauuauguauagguuaucaugcgaacaauucaacagacacuguagacacaguacuagaaaagaauguaacaguaacacacucuguuaaccuucuagaagacaagcauaacgggaaacuaugcaaacuaagagggguagccccauugcauuuggguaaauguaacauugcuggcuggauccugggaaauccagagugugaaucacucuccacagcaagcucaugguccuacauuguggaaacaucuaguucagacaauggaacguguuacccaggagauuucaucgauuaugaggagcuaagagagcaauugagcucagugucaucauuugaaagguuugagauauuccccaagacaaguucauggcccaaucaugacucgaacaaagguguaacggcagcauguccucaugcuggagcaaaaagcuucuacaaaaauuuaauauggcuaguuaaaaaaggaaauucauacccaaagcucagcaaauccuacauuaaugauaaagggaaagaaguccucgugcuauggggcauucaccauccaucuacuagugcugaccaacaaagucucuaucagaaugcagaugcauauguuuuuguggggacaucaagauacagcaagaaguucaagccggagguagcaauaagacccaaagugagggaucaagaagggagaaugaacuauuacuggacacuaguagagccgggagacaaaauaacauucgaagcaacuggaaaucuagugguaccgagauaugcauucgcaauggaaagaaaugcuggaucugguauuaucauuucagauacaccaguccacgauugcaauacaacuugucagacacccaagggugcuauaaacaccagccucccauuucagaauauacauccgaucacaauuggaaaauguccaaaauauguaaaaagcacaaaauugagacuggccacaggauugaggaauaucccgucuauucaaucuagaggccuauuuggggccauugccgguuucauugaagggggguggacagggaugguagauggaugguacgguuaucaccaucaaaaugagcaggggucaggauaugcagccgaccugaagagcacacagaaugccauugacgagauuacuaacaaaguaaauucuguuauugaaaagaugaauacacaguucacagcaguagguaaagaguucaaccaccuggaaaaaagaauagagaauuuaaauaaaaagguugaugaugguuuccuggacauuuggacuuacaaugccgaacuguugguucuauuggaaaaugaaagaacuuuggacuaccacgauucaaaugugaagaacuuauaugaaaagguaagaagccaguuaaaaaacaaugccaaggaaauuggaaacggcugcuuugaauuuuaccacaaaugcgauaacacgugcauggaaagugucaaaaaugggacuuaugacuacccaaaauacucagaggaagcaaaauuaaacagagaagaaauagaugggguaaagcuggaaucaacaaggauuuaccagauuuuggcgaucuauucaacugucgccaguucauugguacugguagucucccugggggcaaucaguuucuggaugugcucuaaugggucucuacaguguagaauauguauuuaa

SEQ ID NO: 37697 - RNA, 1701 nt, Artificial Sequence
  derived and/or modified CDS sequence (wt) from hemagglutinin__InfluenzaA__ADM31558
augaaggcaauacuaguaguucugcuauauacguuugcaaccgcaaaugcagacacauuauguauagguuaucaugcgaacaauucaacagacacuguagacacaguacuagaaaagaauguaacaguaacacacucuguuaaccuucuagaagacaagcauaacgggaaacuaugcaaacuaagagggguagccccauugcauuuggguaaauguaacauugcuggcuggauccugggaaauccagagugugaaucacucuccacagcaagcucaugguccuacauuguggaaacaucuaguucagacaauggaacguguuacccaggagauuucaucgauuaugaggagcuaagagagcaauugagcucagugucaucauuugaaagguuugagauauuccccaagacaaguucauggcccaaucaugacucgaacaaagguguaacggcagcauguccucaugcuggagcaaaaagcuucuacaaaaauuuaauauggcuaguuaaaaaaggaaauucauacccaaagcucagcaaauccuacauuaaugauaaagggaaagaaguccucgugcuauggggcauucaccauccaucuacuagugcugaccaacaaagucucuaucagaaugcagaugcauauguuuuuguggggacaucaagauacagcaagaaguucaagccggaaauagcaauaagacccaaagugagggaucaagaagggagaaugaacuauuacuggacacuaguagagccgggagacaaaauaacauucgaagcaacuggaaaucuagugguaccgagauaugcauucgcaauggaaagaaaugcuggaucugguauuaucauuucagauacaccaguccacgauugcaauacaacuugucagacacccaagggugcuauaaacaccagccucccauuucagaauauacauccgaucacaauuggaaaauguccaaaauauguaaaaagcacaaaauugagacuggccacaggauugaggaauaucccgucuauucaaucuagaggccuauuuggggccauugccgguuucauugaagggggguggacagggaugguagauggaugguacgguuaucaccaucaaaaugagcaggggucaggauaugcagccgaccugaagagcacacagaaugccauugacaagauuacuaacaaaguaaauucuguuauugaaaagaugaauacacaguucacagcaguagguaaagaguucaaccaccuggaaaaaagaauagagaauuuaaauaaaaagguugaugaugguuuccuggacauuuggacuuacaaugccgaacuguugguucuauuggaaaaugaaagaacuuuggacuaccacgauucaaaugugaagaacuuauaugaaaagguaagaagccaguuaaaaaacaaugccaaggaaauuagaaacggcugcuuugaauuuuaccacaaaugcgauaacacgugcauggaaagugucaaaaaugggacuuaugacuacccaaaauacucagaggaagcaaaauuaaacagagaagaaauagaugggguaaagcuggaaucaacaaggauuuaccagauuuuggcgaucuauucaacugucgccaguucauugguacugguagucucccugggggcaaucaguuucuggaugugcucuaaugggucucuacaguguagaauauguauuuaa

SEQ ID NO: 37698 - RNA, 1701 nt, Artificial Sequence
  derived and/or modified CDS sequence (wt) from hemagglutinin__InfluenzaA__ADM31568
augaaggcaauacuaguaguucugcuauauacauuugcaaccgcaaaugcagacacauuauguauagguuaucaugcgaacaauucaacagacacuguagacacaguacuagaaaagaauguaacaguaacacacucuguuaacauucuagaagacaagcauaacgggaaacuaugcaaacuaagagggguagccccauugcauuuggguaaauguaacauugcuggcuggauccugggaaauccagagugugaaucacucuccacagcaagcucaugguccuacauuguggaaacaucuaguucagacaauggaacguguuacccaggagauuucaucgauuaugaggagcuaagagagcaauugagcucagugucaucauuugaaagguuugagauauuccccaagacaaguucauggcccaaucaugacucgaacaaagguguaacggcagcauguccucaugcuggagcaaaaagcuucuacaaaaauuuaauauggcuaguuaaaaaaggaaauucauacccaaagcucagcaaauccuacauuaaugauaaagggaaagaaguccucgugcuauggggcauucaccauccaucuacuagugcugaccaacaaagucucuaucagaaugcagaugcauauguuuuuguggggacaucaagauacagcaagaaguucaagccggaaauagcaauaagacccaaagugagggaucaagaagggagaaugaauuauuacuggacacuaguagagccgggagacaaaauaacauucgaagcaacuggaaaucuagugguaccgagauaugcauucgcaauggaaagaaaugcuggaucugguauuaucauuucagauacaccaguccacgauugcaauacaacuugucagacacccaagggugcuauaaacaccagccucccauuucagaauauacauccgaucacaauuggaaaauguccaaaauauguaaaaagcacaaaauugagacuggccacaggauugaggaaugucccgucuauucaaucuagaggccuauuuggggccauugccgguuucauugaagggggguggacaggaaugguagauggaugguacgguuaucaccaucaaaaugagcaggggucaggauaugcagccgaccugaagagcacacagaaugccauugacgagauuacuaacaaaguaaauucuguuauugaaaagaugaauacacaguucacagcaguagguaaagaguucaaccaccuggaaaaaagaauagagaauuuaaauaaaaaaguugaugaugguuuccuggacauuuggacuuacaaugccgaacuguugguucuauuggaaaaugaaagaacuuuggacuaccacgauucaaaugugaagaacuuauaugaaaagguaagaagccaguuaaaaaacaaugccaaggaaauuggaaacggcugcuuugaauuuuaccacaaaugcgauaacacgugcauggaaagugucaaaaaugggacuuaugacuaccccaaauacucagaggaagcaaaauuaaacagagaagaaauagaugggguaaagcuggaaucaacaaggauuuaccagauucuggcgaucuauucaacugucgccaguucauugguacugguagucucccugggggcaaucaguuucuggaugugcucuaaugggucucuacaguguagaauauguauuuaa

SEQ ID NO: 37699 - RNA, 1701 nt, Artificial Sequence
  derived and/or modified CDS sequence (wt) from hemagglutinin__InfluenzaA__ADM31578
augaaggcaauacuaguaguucugcuauauacauuugcaaccgcaaaugcagacacauuauguauagguuaucaugcgaacaauucaacagacacuguagacacaguacuagaaaagaauguaacaguaacacacucuguuaaccuucuagaagacaagcauaacgggaaacuaugcaaacuaagagggguagccccauugcauuuggguaaauguaacauugcuggcuggauccugggaaauccagagugugaaucacucuccacagcaagcucaugguccuacauuguggaaacaucuaguucagacaauggaacguguuacccaggagauuucaucgauuaugaggagcuaagagagcaauugagcucagugucaucauuugaaagguuugagauauuccccaagacaaguucauggcccaaucaugacucgaacaaagguguaacggcagcauguccucaugcuggagcaaaaagcuucuacaaaaauuuaauauggcuaguuaaaaaaggaaauucauacccaaagcucagcaaauccuauauuaaugauaaagggaaagaaguccucgugcuauggggcauucaccauccaucuacuagugcugaccaacaaagucucuaucagaaugcagaugcauauguuuuuguggggacaucaagauacagcaagaaguucaagccggaaauagcaauaagacccaaagugagggaucaagaagggagaaugaacuauuacuggacacuaguagagccgggagacaaaauaacauucgaagcaacuggaaaucuagugguaccgagauaugcauucgcaauggaaagaaaugcuggaucugguauuaucauuucagauacaccaguccacgauugcaauacaacuugucagacacccaagggugcuauaaacaccagccucccauuucagaauauacauccgaucacaauuggaaaauguccaaaauauguaaaaagcacaaaauugagacuggccacaggauugaggaaugucccgucuauucaaucuagaggccuauuuggggccauugccgguuucauugaagggggguggacagggaugguagauggaugguacgguuaucaccaucaaaaugagcaggggucaggauaugcagccgaccugaagagcacacagaaugccauugacgagauuacuaacaaaguaaauucuguuauugaaaagaugaauacacaguucacagcaguagguaaagaguucaaccaccuggaaaaaagaauagagaauuuaaauaaaaagguugaugaugguuuccuggacauuuggacuuacaaugccgaacuguugguucuauuggaaaaugaaagaacuuuggacuaccacgauucaaaugugaagaacuuauaugaaaagguaagaagccaguuaaaaaacaaugccaaggaaauuggaaacggcugcuuugaauuuuaccacaaaugcgauaacacgugcauggaaagugucaaaaaugggacuuaugacuacccaaaauacucagaggaagcaaaauuaaacagagaagaaauagaugggguaaagcuggaaucaacaaggauuuaccagauuuuggcgaucuauucaacugucgccaguucauugguacugguagucucccugggggcaaucaguuucuggaugugcucuaaugggucucuacaguguagaauauguauuuaa

SEQ ID NO: 37700 - RNA, 1701 nt, Artificial Sequence
  derived and/or modified CDS sequence (wt) from hemagglutinin__InfluenzaA__ADM31588
augaaggcaauacuaguaguucugcuauauacauuugcaaccgcaaaugcagacacauuauguauagguuaucaugcgaacaauucaacagacacuguagacacaauacuagaaaagaauguaacaguaacacacucuguuaaccuucuagaagacaagcauaacgggaaacuaugcaaacuaagagggguagccccauugcauuuggguaaauguaacauugcuggcuggauccugggaaauccagagugugaaucacucuccacagcaagcucaugguccuacauuguggaaacaucuaguucagacaauggaacauguuacccaggagauuucaucgauuaugaggagcuaagagagcaauugagcucagugucaucauuugaaagguuugagauguuccccaagacaaguucauggcccaaucaugacucgaacaaagguguaacggcagcauguccucaugcuggagcaaaaagcuucuacaaaaauuuaauauggcuaguuaaaaaaggaaauucauacccaaagcucaacaaauccuacauuaaugauaaagggaaagaaguccucguacuauggggcauucaccauccauccacuagugcugaccaacaaagucucuaucagaaugcagaugcauauguuuuuguggggacaucaagauacagcaagaaguucaagacggaaauagcaauaagacccaaagugagggaucaagaagggagaaugaacuauuacuggacacuaguagagccgggagacaaaauaacauucgaagcaacuggaaaucuagugguaccgagauacgcauucgcaauggaaagaaaugcuggaucugguauuaucauuucagauacaccaguucacgauugcaauacaacuugucagacacccaagggugcuauaaacaccagccucccauuucagaauauacauccgaucacaauuggaaaauguccaaaauauguaaaaagcacaaaauugagacuggccacaggauugaggaaugucccgucuauucaaucuagaggccuauuuggggccauugccgguuucauugaagggggguggacagggaugguagauggaugguacgguuaucaccaucaaaaugagcaggggucaggauaugcagccgaccugaagagcacacagaaugccauugacgagauuacuaacaaaguaaauucuguuauugaaaagaugaauacacaguucacagcaguagguaaagaguucaaccaccuggaaaaaagaauagagaauuuaaauaaaaaaguugaugaugguuuccuggacauuuggacuuacaaugccgaacuguugguucuauuggaaaaugaaagaacuuuggacuaccacgauucaaaugugaagaacuuauaugaaaagguaagaagccaguuaaaaaacaaugccaaggaaguuggaaacggcugcuuugaauuuuaccacaaaugcgauaacacgugcauggaaagugucaaaaaugggacuuaugacuacccaaaauacucagaggaagcaaaauuaaacagagaagaaauagaugggguaaagcuggaaucaacaaggauuuaccagauuuuggcgaucuauucaacugucgccaguucauugguacugguagucucccugggggcaaucaguuucuggaugugcucuaaugggucucuacaguguagaauauguauuuaa

SEQ ID NO: 37701 - RNA, 1701 nt, Artificial Sequence
  derived and/or modified CDS sequence (wt) from hemagglutinin__InfluenzaA__ADM31598
augaaugcaauacuaguaguucugcuauauacauuugcaaccgcaaaugcagacacauuauguauagguuaucaugcgaacaauucaacagacacuguagacacauuacuagaaaagaauguaacaguaacacacucuguuaaccuucuagaagacaagcauaacgggaaacuaugcaaacuaagagggguagccccauugcauuuggguaaaugugacauugcuggcuggauccugggaaauccagagugugaaucacucuccacagcaagcucaugguccuacauuguggaaacaucuaguucagacaauggaacguguuacccaggagauuucaucgauuaugaggagcuaagagagcaauugagcucagugucaucauuugaaagguuugagauauuccccaagacaaguucauggcccgaucaugacucgaacaaagguguaacggcagcauguccucaugcuggagcaaaaagcuucuacaaaaauuuaauauggcuaguuaaaaaaggaaauucauacccaaagcucagcaaauccuacauuaaugauaaagggaaagaaguccucgugcuauggggcauucaccauccaucuacuagugcugaccaacaaagucucuaucagaaugcagaugcauauguuuuuguggggacaucaagauacagcaagaaguucaagccagaaauagcaauaagacccaaagugagggaucaagaagggagaaugaacuaucacuggacacuaguagagccgggagacaaaauaacauucgaagcaacuggaaaucuagugguaccgagauaugcauucgcaauggaaagaaaugcuggaucugguauuaucauuucagaugcaccaguccacgauugcaauacaacuugucaaacacccaagggugcuauaaacaccagccucccauuucagaauauacauccgaucacaauuggaaaauguccaaaauauguaaaaagcacaaaauugagacuggccacaggauugaggaaugucccgucuauucaaucuagaggccuauuuggggccauugccgguuucauugaagggggguggacagggaugguagauggaugguacgguuaucaccaucaaaaugagcaggggucaggauaugcagccgaccugaagagcacacagaaugccauugacgagauuacuaacaaaauaaauucuguuauugaaaagaugaauacacaguucacagcaguagguaaagaguucaaccaccuggaaaaaagaauagagaauuuaaauaaaaaaguugaugaugguuuccuggacauuuggacuuacaaugccgaacuguugguucuauuggaaaaugaaagaacuuuggacuaccacgauucaaaugugaagaacuuauaugaaaagguaagaagccaguuaaaaaacaaugccaaggaaauuggaaacggcugcuuugaauuuuaccacaaaugcgauaacacgugcauggaaagugucaaaaaugggacuuaugacuacccaaaauacucagaggaagcaaaauuaaacagagaagaaauagaugggguaaagcuggaaucaacaaggauuuaccagauuuuggcgaucuauucaacugucgccaguucauugguacugguagucucccugggggcaaucaguuucuggaugugcucuaaugggucucuacaguguagaauauguauuuaa

SEQ ID NO: 37702 - RNA, 1701 nt, Artificial Sequence
  derived and/or modified CDS sequence (wt) from hemagglutinin__InfluenzaA__ADM31608
augaaggcaauacuaguaguucugcuauauacauuugcaaccguaaaugcagacacauuauguauagguuaucaugcgaacaauucaacagacacuguagacacaguacuagaaaagaauguaacaguaacacacucuguuaaccuucuagaagacaagcauaacgggaaacuaugcaaacuaagagggguagccccauugcauuuggguaaauguaacauugcuggcuggauccugggaaauccagagugugaaucacucuccacagcaagcucaugguccuacauuguggaaacaucuaguucagacaauggaacguguuacccaggagauuucaucgauuaugaggagcuaagagagcaauugagcucagugucaucauuugaaagguuugagauauuccccaagacaaguucauggcccaaucaugacucgaacaaagguguaacggcagcauguccucaugcuggagcaaaaagcuucuacaaaaauuuaauauggcuaguuaaaaaaggaaauucauacccaaagcucagcaaauccuacauuaaugauaaagggaaagaaguccucgugcuauggggcauucaccauccaucuacuagugcugaccaacaaagucucuaucagaaugcagaugcauauguuuuuguggggacaucaagauacagcaagaaguucaagccggaaauagcaauaagacccaaagugagggaucaagaagggagaaugaacuauuacuggacacuaguagagccgggagacaaaauaacauucgaagcaacuggaaaucuagugguaccgagauacgcauucgcaauggaaagaaaugcuggaucugguauuaucauuucagauacaccaguccaugauugcaauacaacuugucagacacccaagggugcuauaaacaccagccucccauuucagaauauacauccgaucacaauuggaaaauguccaaaauauguaaaaagcacaaaauugagacuggccacaggauugaggaaugucccgucuauucaaucuagaggccuauuuggggccauugccggcuucauugaagggggguggacagggaugguagauggaugguacgguuaucaccaucaaaaugagcaggggucaggauaugcagccgaccugaagagcacacagaaugccauugacaagauuacuaacaaaguaaauucuguuauugaaaagaugaauacacaguucacagcaguagguaaagaguucaaccaccuggaaaaaagaauagagaauuuaaauaaaaaaguugaugaugguuuccuggacauuuggacuuacaaugccgaacuguugguucuauuggaaaaugaaagaacuuuggacuaccacgauucaaaugugaagaacuuauaugaaaagguaagaagccaguuaaaaaacaaugccaaggaaauuggaaacggcugcuuugaauuuuaccacaaaugcgauaacacgugcauggaaagugucaaaaaugggacuuaugacuacccaaaauacucagaggaagcaaaauuaaacagagaagaaauagaugggguaaagcuggaaucaacaaggauuuaccagauuuuggcgaucuauucaacugucgccaguucauugguacugguagucucccugggggcaaucaguuucuggaugugcucuaaugggucucuacaguguagaauauguauuuaa

SEQ ID NO: 37703 - RNA, 1701 nt, Artificial Sequence
  derived and/or modified CDS sequence (wt) from hemagglutinin__InfluenzaA__ADM31618
augaaggcaauacuaguaguucugcuauauacauuugcaaccgcaaaugcagacacauuauguauagguuaucaugcgaacaauucaacagacacuguagacacaguacuagaaaagaauguaacaguaacacacucuguuaaccuucuagaagacaagcauaacgggaaacuaugcaaacuaagagggguagccccauugcauuuggguaaauguaacauugcuggcuggauccugggaaauccagagugugaaucacucuccacagcaagcucaugguccuacauuguggaaacaucuaguucagacaauggaacguguuacccaggagauuucaucaauuaugaggagcuaagagagcaauugagcucagugucaucauuugaaagguuugagauauuccccaagacaaguucauggcccaaucaugacucgaacaaagguguaacggcagcauguccucaugcuggagcaaaaagcuucuacaaaaauuuaauauggcuaguuaaaaaaggaaauucauacccaaagcucagcaaauccuacauuaaugauaaagggaaagaaguccucgugcuauggggcauucaccauccaucuacuagugcugaccaacaaagucucuaucagaaugcagaugcauauguuuuuguggggacaucaagauacagcaagaaguucaagccggaaauagcaauaagacccaaagugagggaucaagaagggagaaugaacuauuacuggacacuaguagagccgggagacaaaauaacauucgaagcaacuggaaaucuagugguaccgagauaugcauucgcaauggaaagaaaugcuggaucugguauuaucaucucagauacaccaguccacgauugcaauacaacuugucagacacccaagggugcuauaaacaccagccucccauuucagaauauacauccgaucacaauuggaaaauguccaaaauauguaaaaagcacaaaauugagacuggccacaggauugaggaaugucccgucuauucaaucuagaggccuauuuggggccauugccgguuucauugaagggggguggacagggaugguagauggaugguacgguuaucaccaucaaaaugagcaggggucaggauaugcagccgaccugaagagcacacagaaugccauugacaagauuacuaacaaaguaaauucuguuauugaaaagaugaauacacaguucacagcaguagguaaagaguucaaccaccuggaaaaaagaauagagaauuuaaauaaaaaaguugaugaugguuuccuggacauuuggacuuacaaugccgaacuguugguucuauuggaaaaugaaagaacuuuggacuaccacgauucaaaugugaagaacuuauaugaaaagguaagaagccaguuaaaaaacaaugccaaggaaauuggaaacggcugcuuugaauuuuaccacaaaugcgauaacacgugcauggaaagugucaaaaaugggacuuaugacuacccaaaauacucagaggaagcaaaauuaaacagagaagaaauagaugggguaaagcuggaaucaacaaggaucuaccagauuuuggcgaucuauucaacugucgccaguucauugguacugguagucucccugggggcaaucaguuucuggaugugcucuaaugggucucuacaguguagaauauguauuuaa

SEQ ID NO: 37704 - RNA, 1701 nt, Artificial Sequence; identical to SEQ ID NO: 36851
  derived and/or modified CDS sequence (wt) from hemagglutinin__InfluenzaA__ADM31628

SEQ ID NO: 37705 - RNA, 1701 nt, Artificial Sequence; identical to SEQ ID NO: 37584
  derived and/or modified CDS sequence (wt) from hemagglutinin__InfluenzaA__ADM31638

SEQ ID NO: 37706 - RNA, 1701 nt, Artificial Sequence; identical to SEQ ID NO: 37494
  derived and/or modified CDS sequence (wt) from hemagglutinin__InfluenzaA__ADM31648

SEQ ID NO: 37707 - RNA, 1701 nt, Artificial Sequence; identical to SEQ ID NO: 36848
  derived and/or modified CDS sequence (wt) from hemagglutinin__InfluenzaA__ADM31658

SEQ ID NO: 37708 - RNA, 1701 nt, Artificial Sequence; identical to SEQ ID NO: 37294
  derived and/or modified CDS sequence (wt) from hemagglutinin__InfluenzaA__ADM31668

SEQ ID NO: 37709 - RNA, 1701 nt, Artificial Sequence
  derived and/or modified CDS sequence (wt) from hemagglutinin__InfluenzaA__ADM31688
augaaggcaauacuaguaguucugcuauauacauuugcaaccgcaaaugcagacacauuauguauagguuaucaugcgaacaauucaacagacacuguagacacaguacuagaaaagaauguaacaguaacacacucuguuaaccuucuagaagacaagcauaacgggaaacuaugcaaacuaagagggguagccccauugcauuuggguaaauguaacauugcuggcuggauccugggaaauccagagugugaaucacucuccacagcaagcucaugguccuacauuguggaaacaucuaguucagacaauggaacguguuacccaggagauuucaucgauuaugaggagcuaagagagcaauugagcucagugucaucauuugaaagguuugagauauuccccaagacaaguucauggcccaaucaugacucgaacaaagguguaacggcagcauguccucaugcuggagcaaaaagcuucuacaaaaauuuaauauggcuaguuaaaaaaggaaauucauacccaaagcucagcaaauccuacauuaaugauaaagggaaagaaguccucgugcuauggggcauucaccauccaucuacuagugcugaccaacaaagucucuaucagaaugcagaugcauauguuuuuguggggacaucaagauacagcaagaaguucaagccggaaauagcgauaagacccaaagugagggaucaagaagggagaaugaacuauuacuggacacuaguagagccgggagacaaaauaacauucgaagcaacuggaaaucuagugguaccgagauaugcauucgcaauggaaagaaaugcuggaucugguauuaucauuucagauacaccaguccacgauugcaauacaacuugucagacacccaagggugcuauaaacaccagccucccauuucagaauauacauccgaucacaauuggaaaauguccaaaauauguaaaaagcacaaaauugagacuggccacaggauugaggaaugucccgucuauucaaucuagaggccuauuuggggccauugccgguuucauugaagggggguggacagggaugguagauggaugguacgguuaucaccaucaaaaugagcaggggucaggauaugcagccgaccugaagagcacacagaaugccauugacgagauuacuaacaaaguaaauucuguuauugaaaagaugaauacacaguucacagcaguagguaaagaguucaaccaccuggaaaaaagaauagagaauuuaaauaaaaaaguugaugaugguuuccuggacauuuggacuuacaaugccgaauuguugguucuauuggaaaaugaaagaacuuuggacuaccacgauucaaaugugaagaacuuauaugaaaagguaagaagccaguuaaaaaacaaugccaaggaaauuggaaacggcugcuuugaauuuuaccacaaaugcgauaacacgugcauggaaagugucaaaaaugggacuuaugacuacccaaaauacucagaggaagcaaaauuaaacagagaagaaauagaugggguaaagcuggaaucaacaaggauuuaccagauuuuggcgaucuauucaacugucgccaguucauugguacugguagucucccugggggcaaucaguuucuggaugugcucuaaugggucucuacaguguagaauauguauuuaa

SEQ ID NO: 37710 - RNA, 1701 nt, Artificial Sequence
  derived and/or modified CDS sequence (wt) from hemagglutinin__InfluenzaA__ADM31698
augaaggcaauacuaguaguucugcuauauacauuugcaaccgcaaaugcagacacauuauguauagguuaucaugcgaacaauucaacagacacuguagacacaguacuagaaaagaauguaacaguaacacacucuguuaaccuucuagaagacaagcauaacgggaaacuaugcaaacuaagagggguagccccauugcauuuggguaaaugcaacauugcuggcuggauccugggaaauccagagugugaaucacucuccacagcaagcucaugguccuacauuguggaaacaucuaguucagacaauggaacguguuacccaggagauuucaucgauuaugaggagcuaagagagcaauugagcucagugucaucauuugaaagguuugagauauuccccaagacaaguucauggcccaaucaugacucgaacaaagguguaacggcagcauguccucaugcuggagcaaaaagcuucuacaaaaauuuaauauggcuaguuaaaaaaggaaauucauacccaaagcucagcaaauccuacauuaaugauaaagggaaagaaguccucgugcuauggggcauucaccauccaucuacuagugcugaccaacaaagucucuaucagaaugcagaugcauauguuuuuguggggacaucaagauacagcaagaaguucaagccggaaauagcaauaagacccaaagugagggaucaagaagggagaaugaacuauuauuggacacuaguagagccgggagacaaaauaacauucgaagcaacuggaaaucuagugguaccgagauaugcauucgcaauggaaagaaaugcuggaucugguauuaucauuucagauacaccaguccacgauugcaauacaacuugucagacacccaagggugcuauaaacaccagccucccauuucagaauauacauccgaucacaauuggaaaauguccaaaauauguaaaaagcacaaaauugagacuggccacaggauugaggaauaucccgucuauucaaucuagaggccuauuuggggccauugccgguuucauugaagggggguggacagggaugguagauggaugguacgguuaucaccaucaaaaugagcaggggucaggauaugcagccgaccugaagagcacacagaaugccauugacaagauuacuaacaaaguaaauucuguuauugaaaagaugaauacacaguucacagcaguagguaaagaguucaaccaccuggaaaaaagaauagagaauuuaaauaaaaagguugaugaugguuuccuggacauuuggacuuacaaugccgaacuguugguucuauuggaaaaugaaagaacuuuggacuaccacgauucaaaugugaagaacuuauaugaaaagguaagaagccaguuaaaaaacaaugccaaggaaauuggaaacggcugcuuugaauuuuaccacaaaugcgauaacacgugcauggaaagugucaaaaaugggacuuaugacuacccaaaauacucagaggaagcaaaauuaaacagagaagaaauagaugggguaaagcuggaaucaacaaggauuuaccagauuuuggcgaucuauucaacugucgccaguucauugauacugguagucucccugggggcaaucaguuucuggaugugcucuaaugggucucuacaguguagaauauguauuuaa

SEQ ID NO: 37711 - RNA, 1701 nt, Artificial Sequence; identical to SEQ ID NO: 37586
  derived and/or modified CDS sequence (wt) from hemagglutinin__InfluenzaA__ADM31708

SEQ ID NO: 37712 - RNA, 1701 nt, Artificial Sequence
  derived and/or modified CDS sequence (wt) from hemagglutinin__InfluenzaA__ADM31718
augaaggcaauacuaguaguucugcuauauacauuugcaaccgcaaaugcagacacauuauguauagguuaucaugcgaacaauucaacagacacuguagacacaguacuagaaaagaauguaacaguaacacacucuguuaaccuucuagaagacaagcauaacgggaaacuaugcaaacuaagagggguagccccauugcauuuggguaaauguaacauugcuggcuggauccugggaaauccagagugugaaucacucuccacagcaagcucaugguccuacauuguggaaacaucuaguucagacaauggaacguguuacccaggagauuucaucgauuaugaggagcuaagagagcaauugagcucagugucaucauuugaaagguuugagauauuccccaagacaaguucauggcccaaucaugacucgaacaaagguguaacggcagcauguccucaugcuggagcaaaaagcuucuacaaaaauuuaauauggcuaguuaaaaaaggaaauucauacccaaagcucagcaaauccuacauuaaugauaaagggaaagaaguccucgugcuauggggcauucaccauccaucuacuagugcugaccaacaaagucucuaucagaaugcagauacauauguuuuuguggggacaucaagauacagcaagaaguucaagccggaaauagcaauaagacccaaagugagggaucaagaagggagaaugaacuauuacuggacacuaguagagccgggagacaaaauaacauucgaagcaacuggaaaucuagugguaccgagauaugcauucgcaauggaaagaaaugcuggaucugguauuaucauuucagauacaccaguccacgauugcaauacaacuugucagacacccaagggugcuauaaacaccagccucccauuucagaauauacauccgaucacaauuggaaaauguccaaaauauguaaaaagcacgaaauugagacuggccacaggauugaggaaugucccgucuauucaaucuagaggccuauuuggggccauugccgguuucauugaagggggguggacagggaugguagauggaugguacgguuaucaccaucaaaaugagcaggggucaggauaugcagccgaccugaagagcacacagaaugccauugacaagauuacuaacaaaguaaauucuguuauugaaaagaugaauacacaguucacagcaguagguaaagaguucaaccaccuggaaaaaagaauagagaauuuaaauaaaaaaguugaugaugguuuccuggacauuuggacuuacaaugccgaacuguugguucuauuggaaaaugaaagaacuuuggacuaccacgauucaaaugugaagaacuuauaugaaaagguaagaagccaguuaaaaaacaaugccaaggaaauuggaaacggcugcuuugaauuuuaccacaaaugcgauaacacgugcauggaaagugucaaaaaugggacuuaugacuacccaaaauacucagaggaagcaaaauuaaacagagaagaaauagaugggguaaagcuggaaucaacaaggauuuaccagauuuuggcgaucuauucaacugucgccaguucauugguacugguagucucccugggggcaaucaguuucuggaugugcucuaaugggucucuacaguguagaauauguauuuaa

SEQ ID NO: 37713 - RNA, 1701 nt, Artificial Sequence
  derived and/or modified CDS sequence (wt) from hemagglutinin__InfluenzaA__ADM31728
augaaggcaauacuaauaguucugcuauauacauuugcaaccgcaaaugcagacacauuauguauagguuaucaugcgaacaauucaacagacacuguagacacaguacuagaaaagaauguaacaguaacacacucuguuaaccuucuagaagacaagcauaacgggaaacuaugcaaacuaagagggguagccccauugcauuuggguaaauguaacauugcuggcuggauccugggaaauccagagugugaaucacucuccacagcaagcucaugguccuacauuguggaaacaucuaguucaggcaauggaacguguuacccaggagauuucaucgauuaugaggagcuaagagagcaauugagcucagugucaucauuugaaagguuugagauauuccccaagacaaguucauggcccaaucaugacucgaacaaagguguaacggcagcauguccucaugcuggagcaaaaagcuucuacaaaaauuuaauauggcuaguuaaaaaaggaaacucauacccaaagcucagcaaauccuacauuaaugauaaagggaaagaaguccucgugcuauggggcauucaccauccaucuacuagugcugaccaacaaagucucuaucagaaugcagaugcauauguuuuuguggggacaucaagauacagcaagaaguucaagccggaaauagcaauaagacccaaagugagggaucaagaagggagaaugaacuauuacuggacacuaguagagccgggagacaaaauaacauucgaagcaacuggaaaucuagugguaccgagauaugcauucgcaauggaaagaaaugcuggaucugguauuaucacuucagauacaccaguccacgauugcaauacaacuugucagacacccaagggugcuauaaacaccagccucccauuucagaauauacauccgaucacaauuggaaaauguccaaaauauguaaaaagcacaaaauugagacuggccacaggauugaggaaugucccgucuauucaaucuagaggccuauuuggggccauugccgguuucauugaagggggguggacagggaugguagauggaugguacgguuaucaccaucaaaaugagcaggggucaggauaugcagccgaccugaagagcacacagaaugccauugacgagauuacuaacaaaguaaauucuguuauugaaaagaugaauacacaguucacagcaguagguaaagaguucaaccaccuggaaaaaagaauagagaauuuaaauaaaaaaguugaugaugguuuccuggacauuuggacuuacaaugccgaacuguugguucuauuggaaaaugaaagaacuuuggacuaccacgauucaaaugugaagaacuuauaugaaaagguaagaagccaguuaaaaaacaaugccaaggaaauuggaaacggcugcuuugaauuuuaccacaaaugcgauaacacgugcauggaaagugucaaaaaugggacuuaugacuacccaaaauacucagaggaagcaaaauuaaacagagaagaaauagaugggguaaagcuggaaucaacaaggauuuaccagauuuuggcgaucuauucaacugucgccaguucauugguacugguagucucccugggggcaaucaguuucuggaugugcucuaaugggucucuacaguguagaauauguauuuaa

SEQ ID NO: 37714 - RNA, 1701 nt, Artificial Sequence
  derived and/or modified CDS sequence (wt) from hemagglutinin__InfluenzaA__ADM31738
augaaggcaauacuaguaguucugcuauauacauuugcaaccgcaaaugcagacacauuauguauagguuaucaugcgaacaauucaacagacacuguagacacaguacuagaaaagaauguaacaguaacacacucuguuaacauucuagaagacaagcauaacgggaaacuaugcaaacuaagagggguagccccauugcauuuggguaaauguaacauugcugguuggauccugggaaauccagagugugaaucacucuccacagcaagcucaugguccuacauuguggaaacaucuaguucagacaauggaacguguuacccaggagauuucaucgauuaugaggagcuaagagagcaauugagcucagugucaucauuugaaagguuugagauauuccccaagacaaguucauggcccaaucaugacucgaacaaagguguaacggcagcauguccucaugcuggagcaagaagcuucuacaaaaauuuaauauggcuaguuaaaaaaggaaauucauacccaaagcucagcaaauccuacauuaaugauaaagggaaagaaguccucgugcuauggggcauucaccacccaucuacuagugcugaccaacaaagucucuaucagaaugcagaugcauauguuuuuguggggacaucaagauacagcaagaaguucaagccggaaauagcaauaagacccaaagugagggaucaagaagggagaaugaacuauuacuggacacuaguagagccgggagacaaaauaacauucgaagcaacuggaaaucuagugguaccgagauaugcauucgcaauggaaagaaaugcuggaucugguauuaucauuucagauacaccaguccacgauugcaauacaacuugucagacacccaagggugcuauaaacaccagccucccauuucagaauauacauccgaucacaauuggaaaauguccaaaauauguaaaaagcacaaaauugagacuggccacaggauugaggaaugucccgucuauucaaucuagaggccuauuuggggccauugccgguuucauugaagggggguggacagggaugguagauggaugguacgguuaucaccaucaaaaugagcaggggucaggauaugcagccgaccugaagagcacacagaaugccauugacgagauuacuaacaaaguaaauucuguuauugaaaagaugaauacacaguucacagcaguagguaaagaguucaaccaccuggaaaaaagaauagagaauuuaaauaaaaaaguugaugaugguuuccuggacauuuggacuuacaaugccgaacuguugguucuauuggaaaaugaaagaacuuuggacuaucacgauucaaaugugaagaacuuauaugaaaagguaagaagccaguuaaaaaacaaugccaaggaaauuggaaacggcugcuuugaauuuuaccacaaaugcgauaacacgugcauggaaagugucaaaaaugggacuuaugacuaccccaaauacucagaggaagcaaaauuaaacagagaagaaauagaugggguaaagcuggaaucaacaaggauuuaccagauuuuggcgaucuauucaacugucgccaguucauugguacugguagucucccugggggcaaucaguuucuggaugugcucuaaugggucucuacaguguagaauauguauuuaa

SEQ ID NO: 37715 - RNA, 1701 nt, Artificial Sequence
  derived and/or modified CDS sequence (wt) from hemagglutinin__InfluenzaA__ADM31748
augaaggcaauacuaguaguucugcuauauacauuugcaaccgcaaaugcagacacauuauguauagguuaucaugcgaacaauucaacagacacuguagacacaguacuagaaaagaauguaacaguaacacacucuguuaaucuucuagaagacaagcauaacgggaaacuaugcaaacuaagagggguagccccauugcauuuggguaaaugcaacauugcuggcuggauccugggaaauccagagugugaaucacucuccacagcaagcucaugguccuacauuguggaaacaucuaguucagacaauggaacguguuacccaggagauuucaucgauuaugaggagcuaagagagcaauugagcucagugucaucauuugaaagguuugagauauuccccaagacaaguucauggcccaaucaugacucgaacaaagguguaacggcagcauguccucaugcuggagcaaaaagcuucuacaaaaauuuaauauggcuaguuaaaaaaggaaauucauacccaaagcucagcaaauccuacauuaaugauaaagggaaagaaguccucgugcuauggggcauucaccauccaucuacuagugcugaccaacaaagucucuaucagaaugcagaugcauauguuuuuguggggacaucaagauacagcaagaaguucaagccggaaauagcaauaagacccaaagugagggaucaagaagggagaaugaacuauuauuggacacuaguagagccgggagacaaaauaacauucgaagcaacuggaaaucuagugguaccgagauaugcauucgcaauggaaagaaaugcuggaucugguauuaucauuucagauacaccaguccacgauugcaauacaacuugucagacacccaagggugcuauaaacaccagccucccauuucagaauauacauccgaucacaauuggaaaauguccaaaauauguaaaaagcacaaaauugagacuggccacaggauugaggaauaucccgucuauucaaucuagaggccuauuuggggccauugccgguuucauugaagggggguggacagggaugguagauggaugguacgguuaucaccaucaaaaugagcaggggucaggauaugcagccgaccugaagagcacacagaaugccauugacaagauuacuaacaaaguaaauucuguuauugaaaagaugaauacacaguucacagcaguagguaaagaguucaaccaccuggaaaaaagaauagagaauuuaaauaaaaagguugaugaugguuuccuggacauuuggacuuacaaugccgaacuguugguucuauuggaaaaugaaagaacuuuggacuaccacgauucaaaugugaagaacuuauaugaaaagguaagaagccaguuaaaaaacaaugccaaggaaauuggaaacggcugcuuugaauuuuaccacaaaugcgauaacacgugcauggaaagugucaaaaaugggacuuaugacuacccaaaauacucagaggaagcaaaauuaaacagagaagaaauagaugggguaaagcuggaaucaacaaggauuuaccagauuuuggcgaucuauucgacugucgccaguucauugguacugguagucucccugggggcaaucaguuucuggaugugcucuaaugggucucuacaguguagaauauguauuuaa

SEQ ID NO: 37716 - RNA, 1701 nt, Artificial Sequence
  derived and/or modified CDS sequence (wt) from hemagglutinin__InfluenzaA__ADM31758
augaaggcaauacuaguaguucugcuauauacauuugcaaccgcaaaugcagacacauuauguauagguuaucaugcgaacaauucaacagacacuguagacacaguacuagaaaagaauguaacaguaacacacucuguuaaccuucuagaagacaagcauaacgggaaacuaugcaaacuaagagggauagccccauugcauuuggguaaauguaacauugcuggcuggauccugggaaauccagagugugaaucacucuccacagcaagcucaugguccuacauuguggaaacaucuaguucagacaauggaacguguuacccaggagauuucaucgauuaugaggagcuaagagagcaauugagcucagugucaucauuugaaagguuugagauauuccccaagacaaguucauggcccaaucaugacucgaacaaagguguaacggcagcauguccucaugcuggagcaaaaagcuucuacaaaaauuuaauauggcuaguuaaaaaaggaaauucauacccaaagcucagcaaauccuacauuaaugauaaagggaaagaaguccucgugcuauggggcauucaccauccaucuacuagugcugaccaacaaagucucuaucagaaugcagaugcauauguuuuuguggggacaucaagauacagcaagaaguucaagccggaaauagcaauaagacccaaagugagggaucaagaagggagaaugaacuauuacuggacacuaauagauccgggagacaaaauaacauucgaagcaacuggaaaucuagugguaccgagauaugcauucgcaauggaaagaaaugcuggaucugguauuaucauuucagauacaccaguccacgauugcaauacaacuugucagacacccaagggugcuauaaacaccagccucccauuucagaauauacauccgaucacaauuggaaaauguccaaaauauguaaaaagcacaaaauugagaauggccacaggauugaggaaugucccgucuauucagucuagaggccuauuuggggccauugccgguuucauugaagggggguggacagggaugguagauggaugguacgguuaucaccaucaaaaugagcaggggucaggauaugcagccgaccugaagagcacacagaaugccauugacgagauuacuaacaaaguaaauucuguuauugaaaagaugaauacacaguucacagcaguagguaaagaguucaaucaccuggaaaaaagaauagagaauuuaaauaaaaaaguugaugaugguuuccuggacauuuggacuuauaaugccgaacuguugguucuauuggaaaaugaaagaacuuuggacuaccacgauucaaaugugaagaacuuauaugaaaagguaagaagccaguuaaaaaacaaugccaaggaaauuggaaacggcugcuuugaauuuuaccacaaaugcgauaacacgugcauggaaagugucaaaaaugggacuuaugacuacccaaaauacucagaggaagcaaaauuaaacagagaagaaauagaugggguaaagcuggaaucaacaaggauuuaccagauuuuggcgaucuauucaacugucgccaguucauugguacugguagucucccugggggcaaucaguuucuggaugugcucuaaugggucucuacaguguagaauauguauuuaa

SEQ ID NO: 37717 - RNA, 1701 nt, Artificial Sequence
  derived and/or modified CDS sequence (wt) from hemagglutinin__InfluenzaA__ADM31768
augaaggcaauacuaguaguucugcuauauacauuugcaaccgcaaaugcagacacauuauguauagguuaucaugcgaacaauucaacagacacuguagacacaguacuagaaaagaauguaacaguaacacacucuguuaaccuucuagaagacaagcauaacgggaaacuaugcaaacuaagagggguagccccauugcauuuggguaaauguaacauugcuggcuggauccugggaaauccagagugugaaucacucuccacagcaagcucaugguccuacauuguggaaacaucuaguucagacaauggaacguguuacccaggagauuucaucgauuaugaggagcuaagagagcaauugagcucagugucaucauuugaaagguuugagauauuccccaagacaaguucauggcccaaucaugacucgaacaaagguguaacggcagcauguccucaugcuggagcaaaaagcuucuacaaaaauuuaauauggcuaguuaaaaaaggaaauucauacccaaagcucagcaaauccuacauuaaugauaaagggaaagaaguccucgugcuauggggcauucaccauccaucuacuagugcugaccaacaaagucucuaucagaaugcagaugcauauguuuuuguggggacaucaagauacagcaagaaguucaagccggaaauagcaauaagacccaaagugagggaucaagaagggagaaugaacuauuacuggacacuaauagagccgggagacaaaauaacauucgaagcaacuggaaaucuagugguaccgagauaugcauucgcaauggaaagaaaugcuggaucugguauuaucauuucagauacaccaguccacgauugcaauacaacuugucagacacccaagggugcuauaaacaccagccucccauuucagaauauacauccgaucacaauuggaaaauguccaaaauauguaaaaagcacaaaauugagacuggccacaggauugaggaaugucccgucuauucaaucuagaggccuauuuggggccauugccgguuucauugaagggggguggacagggaugguagauggaugguacgguuaucaccaucaaaaugagcaggggucaggauaugcagccgaccugaagagcacacagaaugccauugacgagauuacuaacaaaguaaauucuguuauugaaaagaugaauacacaguucacagcaguagguaaagaguucaaccaccuggaaaaaagaauagagaauuuaaauaaaaaaguugaugaugguuuccuggacauuuggacuuacaaugccgaauuguugguucuauuggaaaaugaaagaacuuuggacuaccacgauucaaaugugaagaacuuauaugaaaagguaagaagccaguuaaaaaacaaugccaaggaaauuggaaacggcugcuuugaauuuuaccacaaaugcgauaacacgugcauggaaagugucaaaaaugggacuuaugacuacccaaaauacucagaggaagcaaaauuaaacagagaagaaauagaugggguaaagcuggaaucaacaaggauuuaccagauuuuggcgaucuauucaacugucgccaguucauugguacugguagucucccugggggcaaucaguuucuggaugugcucuaaugggucucuacaguguagaauauguauuuaa

SEQ ID NO: 37718 - RNA, 1701 nt, Artificial Sequence; identical to SEQ ID NO: 36870
  derived and/or modified CDS sequence (wt) from hemagglutinin__InfluenzaA__ADM31778

SEQ ID NO: 37719 - RNA, 1701 nt, Artificial Sequence; identical to SEQ ID NO: 36848
  derived and/or modified CDS sequence (wt) from hemagglutinin__InfluenzaA__ADM31798

SEQ ID NO: 37720 - RNA, 1701 nt, Artificial Sequence
  derived and/or modified CDS sequence (wt) from hemagglutinin__InfluenzaA__ADM31808
augaaggcaauacuaguaguucugcuauauacauuugcaaccgcaaaugcagacacauuauguauagguuaucaugcgaacaauucaacagacacuguagacacaguacuagaaaagaauguaacaguaacacacucuguuaaccuucuagaagacaagcauaacgggaaacuaugcaaacuaagagggguagccccauugcauuuggguaaauguaacauugcuggcuggauccugggaaauccagagugugaaucacucuccacagcaagcucaugguccuacauuguggaaacaucuaguucaggcaauggaacguguuacccaggagauuucaucgauuaugaggagcuaagagagcaauugagcucagugucaucauuugaaagguuugagauauuccccaaaacaaguucauggcccaaucaugacucgaacaaagguguaacggcagcauguccucaugcuggagcaaaaagcuucuacaaaaauuuauuauggcuaguuaaaaaaggaaacucauacccaaagcucagcaaauccuacauuaaugauaaagggaaagaaguccucgugcuauggggcauucaccauccaucuacuagugcugaccaacaaagucucuaucagaaugcagaugcauauguuuuuguggggacaucaagauacagcaagaaguucaagccggaaauagcaauaagacccaaagugagggaucaagaagggagaaugaacuauuacuggacacuaguagggccgggagacaaaauaacauucgaagcaacuggaaaucuagugguaccgagauaugcauucgcaauggaaagaaaugcuggaucugguauuaucauuucagauacaccgguccacgauugcaauacaacuugucagacacccaagggugcuauaaacaccagccucccauuucagaauauacauccgaucacaauuggaaaauguccaaaauauguaaaaaguacaaaauugagacuggccacaggauugaggaaugucccgucuauucaaucuagaggccuauuuggggccauugccgguuucauugaagggggguggacagggaugguagauggaugguacgguuaucaccaucaaaaugagcaggggucaggauaugcagccgaccugaagagcacacagaaugccauugacgagauuacuaacaaaguaaauucuguuauugaaaagaugaauacacaguucacagcaguagguaaagaguucaaccaccuggaaaaaagaauagagaauuuaaauaaaaaaguugaugaugguuuccuggacauuuggacuuacaaugccgaacuguugguucuauuggaaaaugaaagaacuuuggacuaccacgauucaaaugugaagaacuuauaugaaaagguaagaagccaguuaaaaaacaaugccaaggaaauuggaaacggcugcuuugaauuuuaccacaaaugcgauaacacgugcauggaaagugucaaaaaugggacuuaugacuacccaaaauacucagaggaagcaaaauuaaacagagaagaaauagaugggguaaagcuggaaucaacaaggauuuaccagauuuuggcgaucuauucaacugucgccaguucauugguacugguagucucccugggggcaaucaguuucuggaugugcucuaaugggucucuacaguguagaauauguauuuaa

SEQ ID NO: 37721 - RNA, 1701 nt, Artificial Sequence; identical to SEQ ID NO: 37300
  derived and/or modified CDS sequence (wt) from hemagglutinin__InfluenzaA__ADM31818

SEQ ID NO: 37722 - RNA, 1701 nt, Artificial Sequence
  derived and/or modified CDS sequence (wt) from hemagglutinin__InfluenzaA__ADM31828
augaaggcaauacuaguaguucugcuauauacauuugcaaccgcaaaugcagacacauuauguauagguuaucaugcgaacaauucaacagacacuguagacacaguacuagaaaggaauguaacaguaacacacucuguuaaccuucuagaagacaagcauaacgggaaacuaugcaaacuaagagggguagccccauugcauuuggguaaauguaacauugcuggcuggauccugggaaauccagagugugaaucacucuccacagcaagcucaugguccuacauuguggaaacaucuaguucagacaauggaacguguuacccaggagauuucaucgauuaugaggagcuaagagagcaauugagcucagugucaucauuugaaagguuugagauauuccccaagacaaguucauggcccaaucaugacucgaacaaagguguaacggcagcauguccucaugcuggagcaaaaagcuucuacaaaaauuuaauauggcuaguuaaaaaaggaaaaucauacccaaagcucagcaaauccuacauuaaugauaaagggaaagaaguccucgugcuauggggcauucaccauccaucuacuagugcugaccaacaaagucucuaucagaaugcagaugcauauguuuuuguggggacaucaagauacagcaagaaguucaagccggaaauagcaauaagacccaaagugagggaacaagaagggagaaugaacuauuacuggacauuaguagagccgggagacaaaauaacauucgaagcaacuggaaaucuagugguaccgagauaugcauucgcaauggaaagaaaugcuggaucugguauuaucauuucagauacaccaguccacgauugcaauacaacuugucagacacccaagggugcuauaaacaccagccucccauuucagaauauacauccgaucacaauuggaaaauguccaaaauauguaaaaagcacaaaauugagacuggccacaggauugaggaaugucccgucuauucaaucuagaggccuauuuggggccauugccgguuucauugaagggggguggacagggaugguagauggaugguacgguuaucaccaucaaaaugagcaggggucaggauaugcagccgaccugaagagcacacagaaugccauugacgagauuacuaacaaaguaaauucuguuauugaaaagaugaauacacaguucacagcaguagguaaagaguucaaccaccuggaaaaaagaauagagaauuuaaauaaaaaaguugaugaugguuuccuggacauuuggacuuacaaugccgaacuguugguucuauuggaaaaugaaagaacuuuggacuaccacgauucaaaugugaagaacuuauaugaaaaaguaagaagccaguuaaaaaacaaugccaaggaaauuggaaacggcugcuuugaauuuuaccacaaaugcgauaacacgugcauggaaagugucaaaaaugggacuuaugacuacccaaaauacucagaggaagcaaaauuaaacagagaagaaauagaugggguaaagcuggaaucaacaaggauuuaccagauuuuggcgaucuauucaacugucgccaguucauugguacuguuagucucccugggggcaaucaguuucuggaugugcucuaaugggucucuacaguguagaauauguauuuaa

SEQ ID NO: 37723 - RNA, 1701 nt, Artificial Sequence; identical to SEQ ID NO: 37722
  derived and/or modified CDS sequence (wt) from hemagglutinin__InfluenzaA__ADM31838

SEQ ID NO: 37724 - RNA, 1701 nt, Artificial Sequence; identical to SEQ ID NO: 36870
  derived and/or modified CDS sequence (wt) from hemagglutinin__InfluenzaA__ADM31848

SEQ ID NO: 37725 - RNA, 1701 nt, Artificial Sequence
  derived and/or modified CDS sequence (wt) from hemagglutinin__InfluenzaA__ADM31858
augaaggcaauacuaguaguucugcuauauacauuugcaaccgcaaaugcagacacauuauguauagguuaucaugcgaacaauucaacagacacuguagacacaguacuagaaaagaauguaacaguaacacacucuguuaaccuucuagaagacaagcauaacgggaaacuaugcaaacuaagagggguagccccauugcauuuggguaaauguaacauugcuggcuggauccugggaaauccagagugugaaucacucuccacagcaagcucaugguccuacauuguggaaacaucuaguucagacaauggaacguguuacccaggagauuucaucgauuaugaggagcuaagagagcaauugagcucagugucaucauuugaaagguuugagauauuccccaagacaaguucauggcccaaucaugacucgaacaaagguguaacggcagcauguucucaugcuggagcaaaaagcuucuacaaaaauuuaauauggcuaguuaaaaaaggaaauucauacccaaagcucaacaaauccuacauuaaugauaaagggaaagaaguccucgugcuauggggcauucaccauccaucuacuagugcugaccaacaaagucucuaucagaaugcagaugcauauguuuuuguggggacaucaagauacagcaagaaguucaagccggaaauagcaauaagacccaaagugagggaacaagaagggagaaugaacuauuacuggacacuaguagagccgggagacaaaauaacauucgaagcaacuggaaaucuagugguaccgagauaugcauucgcaauggaaagaaaugcuggaucugguauuaucauuucagauacaccaguccacgauugcaauacaacuugucagacacccaagggugcuauaaacaccagccucccauuucagaauauacauccgaucacaauuggaaaauguccaaaauauguaaaaagcacaaaauugagacuggccacaggauugaggaaugucccaucuauucaaucuagaggccuauuuggggccauugccgguuucauugaagggggguggacagggaugguagauggaugguacgguuaucaccaucaaaaugagcaggggucaggauaugcagccgaccugaagagcacacagaaugccauugacgagauuacuaacaaaguaaauucuguuauugaaaagaugaauacacaguucacagcaguagguaaagaguucaaccaccuggaaaaaagaauagagaauuuaaauaaaaaaguugaugaugguuuccuggacauuuggacuuacaaugccgaacuguugguucuauuggaaaaugaaagaacuuuggacuaccacgauucaaaugugaagaacuuauacgaaaagguaagaagccaguuaaaaaacaaugccaaggaaauuggaaacggcugcuuugaauuuuaccacaaaugcgauaacacgugcauggaaagugucaaaaaugggacuuaugacuacccaaaauacucagaggaagcaaaauuaaacagagaagaaauagaugggguagagcuggaaucaacaaggauuuaccagauuuuggcgaucuauucaacugucgccaguucauugguacugguagucucccugggggcaaucaguuucuggaugugcucuaaugggucucuacaguguagaauauguauuuaa

SEQ ID NO: 37726 - RNA, 1701 nt, Artificial Sequence
  derived and/or modified CDS sequence (wt) from hemagglutinin__InfluenzaA__ADM31868
augaaggcaauacuaguaguucugcuauauacauuugcaaccgcaaaugcagacacauuauguauagguuaucaugcgaacaauucaacagacacuguagacacaguacuagaaaagaauguaacaguaacacacucuguuaaccuucuagaagacaagcauaacgggaaacuaugcaaacuaagagggguagccccauugcauuuggguaaauguaacauugcuggcuggauccugggaaauccagagugugaauuacucuccacagcaagcucaugguccuacauuguggaaacaucuaguucagacaauggaacguguuacccaggagauuucaucaauuaugaggagcuaagagagcaauugagcucagugucaucauuugaaagguuugagauauuccccaagacaaguucauggcccaaucaugacucgaacaaagguguaacggcagcauguccucaugcuggagcaaaaagcuucuacaaaaauuuaauauggcuaguuaaaaaaggaaauucauacccaaagcucagcaaauccuacauuaaugauaaagggaaagaaguccucgugcuauggggcguucaccauccaucuacuagugcugaccaacaaagucucuaucagaaugcagaugcauauguuuuuguggggacaucaagauacagcaagaaguucaagccggaaauagcaauaagacccaaagugagggaucaagaagggagaaugaacuauuacuggacacuaguagagccgggagacaaaauaacauucgaagcaacuggaaaucuaguggugccgagauaugcauucucaauggaaagaaaugcuggaucugguauuaucaucucagauacaccaguccacgauugcaauacaacuugucagacacccaagggugcuauaaacaccagccucccauuucagaauauacauccgaucacaauuggaaaauguccaaaauauguaaaaagcacaaaauugagacuggccacaggauugaggaaugucccgucuauucaaucuagaggccuauuuggggccauugccgguuucauugaagggggguggacagggaugguagauggaugguacgguuaucaccaucaaaaugagcaggggucaggauaugcagccgaccugaagagcacacagaaugccauugacaagauuacuaacaaaguaaauucuguuauugaaaagaugaauacacaguucacagcaguagguaaagaguucaaccaccuggaaaaaagaauagagaauuuaaauaaaaaaguugaugaugguuuccuggacauuuggacuuacaaugccgaacuguugguucuauuggaaaaugaaagaacuuuggacuaccacgauucaaaugugaagaacuuauaugaaaagguaagaagccaguuaaaaaacaaugccaaggaaauuggaaacggcugcuuugaauuuuaccacaaaugcgauaacacgugcauggaaagugucaaaaaugggacuuaugacuacccaaaauacucagaggaagcaaaauuaaacagagaaaaaauagaugggguaaagcuggaaucaacaaggauuuaccagauuuuggcgaucuauucaacugucgccaguucauugguacugguagucucccugggggcaaucaguuucuggaugugcucuaaugggucucuacaguguagaauauguauuuaa

SEQ ID NO: 37727 - RNA, 1701 nt, Artificial Sequence
  derived and/or modified CDS sequence (wt) from hemagglutinin__InfluenzaA__ADM31878
augaaggcaauacuaguaguucugcuauauacauuugcaaccgcaaaugcagacacauuauguauagguuaucaugcgaacaauucaacagacacuguagacacaguacuagaaaagaauguaacaguaacacacucuguuaacauucuagaagacaagcauaacgggaaacuaugcaaacuaagagggguagccccauugcauuuggguaaauguaacauugcuggcuggauccugggaaauccagagugugaaucacucuccacagcaagcucaugguccuacauuguggaaacaucuaguucagacaauggaacguguuacccaggagauuucaucgauuaugaggagcuaagagagcaauugagcucagugucaucauuugaaagguuugagauauuccccaaggcaaguucauggcccaaucaugacucgaacaaagguguaacggcagcauguccucaugcuggagcaaaaagcuucuacaaaaauuuaauauggcuaguuaaaaaaggaaauucauacccaaagcucagcaaauccuacauuaaugauaaagggaaagaaguccucgugcuauggggcauucaccauccaucuacuagugcugaucaacaaagucucuaucagaaugcagaugcauauguuuuuguggggacaucaagauacagcaagaaguucaagccggaaauagcaauaagacccaaagugagggaucaagaagggagaaugaacuauuacuggacacuaguagagccgggagacaaaauaacauucgaagcaacuggaaaucuagugguaccgagauaugcauucgcaauggaaagaaaugcuggaucugguauuaucauuucagauacaccaguccacgauugcaauacaacuugucaaacacccaagggugcuauaaacaccagccucccauuucagaauauacauccgaucacaauuggaaaauguccaaaauauguaaaaagcacaaaauugagacuggccacaggauugaggaaugucccgucuauucaaucuagaggccuauuuggggccauugccgguuucauugaagggggguggacagggaugguagauggaugguacgguuaucaccaucaaaaugagcaggggucaggauaugcagccgaccugaagagcacacagaaugccauugacgagauuacuaacaaaguaaauucuguuauugaaaagaugaauacacaguucacagcaguagguaaagaguucaaccaccuggaaaaaagaauagagaauuuaaauaaaaaaguugaugaugguuuccuggacauuuggacuuacaaugccgaacuguugguucuauuggaaaaugaaagaacuuuggacuaccacgauucaaaugugaagaacuuauaugaaaagguaagaagccaguuaaaaaacaaugccaaggaaauuggaaacggcugcuuugaauuuuaccacaaaugcgauaacacguguauggaaagugucaaaaaugggacuuaugacuaccccaaauacucagaggaagcaaaauuaaacagagaagaaauagaugggguaaagcuggaaucaacaaggauuuaccagauuuuggcgaucuauucaacugucgccaguucauugguacugguagucucccugggggcaaucaguuucuggaugugcucuaaugggucucuacaguguagaauauguauuuaa

SEQ ID NO: 37728 - RNA, 1701 nt, Artificial Sequence
  derived and/or modified CDS sequence (wt) from hemagglutinin__InfluenzaA__ADM31888
augaaggcaauacuaguaguucugcuauauacauuugcaaccgcaaaugcagacacauuauguauagguuaucaugcgaacaauucaacagacacuguagacacaguacuagaaaagaauguaacaguaacacacucuguuaaccuucuagaagacaagcauaacgggaaacuaugcaaacuaagagggguagccccauugcauuuggguaaauguaacauugcuggcuggauccugggaaauccagagugugaaucacucuccacagcaagcucaugguccuacauuguggaaacaucuaguucagacaauggaacguguuacccaggagauuucaucgauuaugaggagcuaagagagcaauugagcucagugucaucauuugaaagguuugagauauuccccaagacaaguucauggcccaaucaugacucgaacaaagguguaacggcagcauguccucaugcuggagcaaaaagcuucuacaaaaauuuaauauggcuaguuaaaaaaggaaauucauacccaaagcucagcaaauccuacauuaaugauaaagggaaagaaguccucgugcuauggggcauucaccauccaucuacuagugcugaccaacaaagucucuaucagaaugcagaugcauauguuuuuguggggacaucaagauacagcaagaaguucaagccggaaauagcaauaagacccaaagugagggaucaagaagggagaaugaacuauuacuggacacuaguagagccgggagacaaaauaacauucgaagcaacuggaaaucuagugguaccgagauaugcauucgcaauggaaagaaaugcuggaucugguauuaucauuucagauacaccaguccacgauugcaauacaacuugucagacacccaagggugcuauaaacaccagccucccauuucagaauauacauccgaucacaauuggaaaauguccaaaauauguaaaaagcacaaaauugagacuggccacaggauugaggaauaucccgucuauucaaucuagaggccuauuuggggccauugccgguuucauugaagggggguggacagggaugguagauggaugguacgguuaucaccaucaaaaugagcaggggucaggauaugcagccgaccugaagagcacacagaaugccauugacaagauuacuaacaaaguaaauucuguuauugaaaagaugaauacacaguucacagcaguagguaaagaguucaaccaccuggaaaaaagaauagagaauuuaaauaaaaagguugaugaugguuucuuggacauuuggacuuacaaugccgaacuguugguucuauuggaaaaugaaagaacuuuggacuaccacgauucaaaugugaagaacuuauaugaaaagguaagaagccaguuaaaaaacaaugccaaggaaauuggaaacggcugcuuugaauuuuaccacaaaugcgauaacacgugcauggaaagugucaaaaaugggacuuaugacuacccaaaauacucagaggaagcaaaauuaaacagagaagaaauagaugggguaaagcuggaaucaacaaggauuuaccagauuuuggcgaucuauucaacugucgccaguucauugguacugguagucucccugggggcaaucaguuucuggaugugcucuaaugggucucuacaguguagaauauguauuuaa

SEQ ID NO: 37729 - RNA, 1701 nt, Artificial Sequence; identical to SEQ ID NO: 37500
  derived and/or modified CDS sequence (wt) from hemagglutinin__InfluenzaA__ADM31898

SEQ ID NO: 37730 - RNA, 1701 nt, Artificial Sequence
  derived and/or modified CDS sequence (wt) from hemagglutinin__InfluenzaA__ADM31908
augaaggcaauacuaguaguucugcuauauacauuugcaaccgcaaaugcagacacauuauguauagguuaucaugcgaacaauucaacagacacuguagacacaguacuagaaaagaauguaacaguaacacacucuguuaacauucuagaagacaagcauaacgggaaacuaugcaaacuaagagggguagccccauugcauuuggguaaauguaacauugcuggcuggauccugggaaauccagagugugaaucacucuccacagcaagcucaugguccuacauuguggaaacaucuaguucagacaauggaacguguuacccaggagauuucaucgaucaugaggagcuaagagagcaauugagcucagugucaucauuugaaagguuugagauauuccccaagacaaguucauggcccaaucaugacucgaacaaagguguaacggcagcauguccucaugcuggagcaaaaagcuucuacaaaaauuuaauauggcuaguuaaaaaaggaaauucauacccaaagcucagcaaauccuacauuaaugauaaagggaaagaaguccucgugcuauggggcauucaccauccaucuacuagugcugaccaacaaagucucuaucagaaugcagaugcauauguuuuuguggggucaucaagauacagcaagaaguucaagccggaaauagcaauaagacccaaagugagggaucaagaagggagaaugaacuauuacuggacacuaguagagccgggagacaaaauaacauucgaagcaacuggaaaucuagugguaccgagauaugcauucgcaauggaaagaaaugcuggaucugguauuaucauuucagauacaccaguccacgauugcaauacaacuugucagacacccaagggugcuauaaacaccagccucccauuucagaauauacauccgaucacaauuggaaaauguccaaaauauguaaaaagcacaaaauugagacuggccacaggauugaggaaugucccgucuauucaaucuagaggccuauuuggggccauugccgguuucauugaagggggguggacagggaugguagauggaugguacgguuaucaccaucaaaaugagcaggggucaggauaugcagccgaccugaagagcacacagaaugccauugacgagauuacuaacaaaguaaauucuguuauugaaaagaugaauacacaguucacagcaguagguaaagaguucaaccaccuggaaaaaagaauagagaauuuaaauaaaaaaguugaugaugguuuccuggacauuuggacuuacaaugccgaacuguugguucuauuggaaaaugaaagaacuuuggacuaccacgauucaaaugugaagaacuuauaugaaaagguaagaagccagcuaaaaaacaaugccaaggaaauuggaaacggcugcuuugaauuuuaccacaaaugcgauaacacgugcauggaaagugucaaaaaugggacuuaugacuacccaaaauacucagaggaagcaaaauuaaacagagaagaaauagaugggguaaagcuggaaucaacaaggauuuaccagauuuuggcgaucuauucaacugucgccaguucauugguacugguagucucccugggggcaaucaguuucuggaugugcucuaaugggucucuacaguguagaauauguauuuaa

SEQ ID NO: 37731 - RNA, 1701 nt, Artificial Sequence; identical to SEQ ID NO: 36442
  derived and/or modified CDS sequence (wt) from hemagglutinin__InfluenzaA__ADM31918

SEQ ID NO: 37732 - RNA, 1701 nt, Artificial Sequence; identical to SEQ ID NO: 36453
  derived and/or modified CDS sequence (wt) from hemagglutinin__InfluenzaA__ADM31928

SEQ ID NO: 37733 - RNA, 1701 nt, Artificial Sequence; identical to SEQ ID NO: 36453
  derived and/or modified CDS sequence (wt) from hemagglutinin__InfluenzaA__ADM31948

SEQ ID NO: 37734 - RNA, 1701 nt, Artificial Sequence; identical to SEQ ID NO: 34681
  derived and/or modified CDS sequence (wt) from hemagglutinin__InfluenzaA__ADM31958

SEQ ID NO: 37735 - RNA, 1701 nt, Artificial Sequence
  derived and/or modified CDS sequence (wt) from hemagglutinin__InfluenzaA__ADM31968
augaaggcaauacuaguaguucugcuauauacauuugcaaccgcaaaugcagacacauuauguauagguuaucaugcgaacaauucaacagacacuguagacacaguacuagaaaagaauguaacaguaacacacucuguuaacauucuggaagacaagcauaacgggaaacuaugcaaacuaaaagggguagccccauugcauuuggguaaauguaacauugcuggcuggauccugggaaauccagagugugaaucacucuccacagcaagcucaugguccuacauuguggaaacaucuaguucagacaauggaacguguuacccaggagauuucaucgauuaugaggagcuaagagagcaauugagcucagugucaucauuugaaagguuugagauauuccccaagacaaguucauggcccaaucaugacucgaacaaagguguaacggcagcauguccucaugcuggagcaaaaagcuucuacaaaaauuuaauauggcuaguuaaaaaaggaaauucauacccaaagcucagcaaauccuacauuaaugauaaagggaaagaaguccucgugcuauggggcauucaccauccaucuacuagugcugaccaacaaagucucuaucagaaugcagaugcauauguuuuuguggggucaucaaaauacagcaagaaguucaagccggaaauagcaauaagacccaaagugagggaucaagaagggagaaugaacuauuacuggacacuaguagagccgggagacaaaauaacauucgaagcaacuggaaaucuagugguaccgagauaugcauucgcaauggaaagaaaugcuggaucugguauuaucauuucagauacaccaguccacgauugcaauacaacuugucagacacccaagggugcuauaaacacuagccucccauuucagaauauacauccgaucacaauuggaaaauguccaaaauauguaaaaagcacaaaauugagacuggccacaggauugaggaaugucccgucuauucaaucuagaggccuauuuggggccauugccgguuucauugaagggggguggacagggaugguagauggaugguacgguuaucaccaucaaaaugagcaagggucaggauaugcagccgaccugaagagcacacagaaugccauugacgagauuacuaacaaaguaaauucuguuauugaaaagaugaauacacaguucacagcaguagguaaagaguucaaccaccuggaaaaaagaauagagaauuuaaauaaaaaaguugaugaugguuuccuggacauuuggacuuacaaugccgaacuguugguucuauuggaaaaugaaagaacuuuggacuaccacgauucaaaugugaagaacuuauaugaaaagguaagaagccagcuaaaaaacaaugccaaggaaauuggaaacggcugcuuugaauuuuaccacaaaugcgauaacacgugcauggaaagugucaaaaaugggacuuaugacuacccaaaauacucagaggaagcaaaauuaaacagagaagaaauagaugggguaaagcuggaaucaacaaggauuuaccagauuuuggcgaucuauucaacugucgccaguucauugguacugguagucucccugggggcaaucaguuucuggaugugcucuaaugggucucuacaguguagaauauguauuuaa

SEQ ID NO: 37736 - RNA, 1701 nt, Artificial Sequence
  derived and/or modified CDS sequence (wt) from hemagglutinin__InfluenzaA__ADM31978
augaaggcaauacuaguaguucugcuauauacauuugcaaccgcaaaugcagacacauuauguauagguuaucaugcgaacaauucaacagacacuguagacacaguacuagaaaagaauguaacaguaacacacucuguuaacauucuagaagacaagcacaacgggaaacuaugcaaacuaagagggguagccccauugcauuuggguaaauguaacauugcuggcuggauccugggaaauccagagugugaaucacucuccacagcaagcucaugguccuacauuguggaaacaucuaguucagacaauggaacguguuacccaggagauuucaucgauuaugaggagcuaagagagcaauugagcucagugucaucauuugaaagguuugagauauuccccaagacaaguucauggcccaaucaugacucgaacaaagguguaacggcagcauguucucaugcuggagcaaaaagcuucuacaaaaauuuaauauggcuaguuaaaaaaggaaauucauacccaaagcucagcaaauccuacauuaaugauaaagggaaagaaguccucgugcuauggggcauucaccauccaucuacuagugcugaccaacaaagucucuaucagaaugcagaugcauauguuuuuguggggucaucaagauacagcaagaaguucaagccggaaauagcaauaagacccaaagugagggaucaagaagggagaaugaacuauuacuggacacuaguagagccgggagacaaaauaacauucgaagcaacuggaaaucuagugguaccgagauaugcauucgcaauggaaagaaaugcuggaucugguauuaucauuucagauacaccaguccacgauugcaauacaacuugucagacacccaagggugcuauaaacaccagccucccauuucagaauauacauccgaucacaauuggaaaauguccaaaauauguaaaaagcacaaaauugagacuggccacaggauugaggaaugucccgucuauucaaucuagaggccuauuuggggccauugccgguuucauugaagggggguggacagggaugguagauggaugguacgguuaucaccaucaaaaugagcaggggucaggauaugcagccgaccugaagagcacacagaaugccauugacgagauuacuaacaaaguaaauucuguuauugaaaagaugaauacacaguucacagcaguagguaaagaguucaaccaccuggaaaaaagaauagagaauuuaaauaaaaaaguugaugaugguuuccuggacauuuggacuuacaaugccgaacuguugguucuauuggaaaaugaaagaacuuuggacuaccacgauucaaaugugaagaacuuauaugaaaagguaagaagccagcuaaaaaacaaugccaaggaaauuggaaacggcugcuuugaauuuuaccacaaaugcgauaacacgugcauggaaagugucaaaaaugggacuuaugacuacccaaaauacucagaggaagcaaaauuaaacagagaagaaauagaugggguaaagcuggaaucaacaaggauuuaccagauuuuggcgaucuauucaacugucgccaguucauugguacugguagucucccugggggcaaucaguuucuggaugugcucuaaugggucucuacaguguagaauauguauuuaa

SEQ ID NO: 37737 - RNA, 1701 nt, Artificial Sequence
  derived and/or modified CDS sequence (wt) from hemagglutinin__InfluenzaA__ADM31998
augaaggcaauacuaguaguucugcuauauacauuugcaaccgcaaaugcagacacauuauguauagguuaucaugcgaacaauucaacagacacuguagacacaguacuagaaaagaauguaacaguaacacacucuguuaacauucuagaagacaagcauaacgggaaacuaugcaaacuaagagggguagccccauugcauuuggguaaauguaacauugcuggcuggauccugggaaauccagagugugaaucacucuccacagcaagcucaugguccuacauuguggaaacaucuaguucagacaauggaacguguuacccaggagauuucaucgauuaugaggagcuaagagagcaauugagcucagugucaucauuugaaagguuugagauauuccccaagacaaguucauggcccaaucaugacucgaacaaagguguaacggcagcauguccucaugcuggagcaaaaagcuucuacaaaaauuuaauauggcuaguuaaaaaaggaaauucauacccaaagcucagcaaauccuacauuaaugauaaagggaaagaaguccucgugcuauggggcauucaccauccaucuacuagugcugaccaacaaagucucuaucagaaugcagaugcauauguuuuuguggggucaucaagauacagcaagaaguucaagccggaaauagcaauaagacccaaagugagggaucaagaagggagaaugaacuauuacuggacacuaguagagccgggagacaaaauaacauucgaagcaacuggaaaucuagugguaccgagauaugcauucgcaauggaaagaaaugcuggaucugguauuaucauuucagauacaccaguccacgauugcaauacaacuugucagacacccaagggugcuauaaacaccagccucccauuucagaauauucauccgaucacaauuggaaaauguccaaaauauguaaaaagcacaaaauugagacuggccacaggauugaggaaugucccgucuauucaauccagaggccuauuuggggccauugccgguuucauugaagggggguggacagggaugguagaugggugguacgguuaucaccaucaaaaugagcaggggucaggauaugcagccgaccugaagagcacacagaaugccauugacgagauuacuaacaaaguaaauucuguuauugaaaagaugaauacacaguucacagcaguagguaaagaguucaaccaccuggaaaaaagaauagagaauuuaaauaaaaaaguugaugaugguuuccuggauauuuggacuuacaaugccgaacuguugguucuauuggaaaaugaaagaacuuuggacuaccacgauucaaaugugaagaacuuauaugaaaagguaagaagccagcuaaaaaacaaugccaaggaaauuggaaacggcugcuuugaauuuuaccacaaaugcgauaacacgugcauggaaagugucaaaaaugggacuuaugacuacccaaaauacucagaggaagcaaaauuaaacagagaagaaauagaugggguaaagcuggaaucaacaaggauuuaccagauuuuggcgaucuauucaacugucgccaguucauugguacugguagucucccugggggcaaucaguuucuggaugugcucuaaugggucucuacaguguagaauauguauuuaa

SEQ ID NO: 37738 - RNA, 1701 nt, Artificial Sequence; identical to SEQ ID NO: 35334
  derived and/or modified CDS sequence (wt) from hemagglutinin__InfluenzaA__ADM32008

SEQ ID NO: 37739 - RNA, 1701 nt, Artificial Sequence
  derived and/or modified CDS sequence (wt) from hemagglutinin__InfluenzaA__ADM32018
augaaggcaauacuaguaguucugcuauauacauuugcaaucgcaaaugcagacacauuauguauagguuaucaugcgaacaauucaacagacacuguagacacaguacuagaaaagaauguaacaguaacacacucuguuaaccuucuagaagacaagcauaacgggaaacuaugcaaacuaagagggguagccccauugcauuuggguaaaugugacauugcuggcuggauccugggaaauccagagugugaaucacucuccacagcaagcucaugguccuacauuguggaaacaucuaguucagacaauggaacguguuacccaggagauuucaucgauuaugaggagcuaagagagcaauugagcucagugucaucauuugaaagguuugagauauuccccaagacaaguucauggcccaaucaugacucgaacaaagguguaacggcagcauguccucaugcuggagcaaaaagcuucuacaaaaauuuaauauggcuaguuaaaaaaggaaauucauacccaaagcucagcaaauccuacauuaaugauaaagggaaagaaguccucgugcuauggggcauucaccauccaucuacuagugcugaccaacaaagucucuaucagaaugcagaugcauauguuuuuguggggacaucaagauacagcaagaaguucaagccggaaauagcaauaagacccaaagugagggaucaagaagggagaaugaacuauuacuggacacuaguagagccgggagacaaaauaacauucgaagcaacuggaaaucuagugguaccgagauaugcauucgcaauggaaagaaaugcuggaucugguauuaucauuucagauacaccaguccacgauugcaauacaacuugucagacacccaagggugcuauaaacaccagccucccauuucagaauauacauccgaucacaauuggaaaauguccaaaauauguaaaaagcacaaaauugagacuggccacaggauugaggaaugucccgucuauucaaucuagaggccuauuuggggccauugccgguuucauugaagggggguggacagggaugguagauggaugguacgguuaucaccaucaaaaugagcaggggucaggauaugcagccgaccugaagagcacacagaaugccauugacgagauuacuaacaaaguaaauucuguuauugaaaagaugaauacacaguucacagcaguagguaaagaguucaaccaccuggaaaaaagaauagagaauuuaaauaaaaagguugaugaugguuuccuggacauuuggacuuacaaugccgaacuguugguucuauuggaaaaugaaagaacuuuggacuaccacgauucaaaugugaagaacuuauaugaaaagguaagaagccaguuaaaaaacaaugccaaggaaauuggaaacggcugcuuugaauuuuaccacaaaugcgauaacacgugcauggaaagugucaaaaaugggacuuaugacuacccaaaauacucagaggaagcaaaauuaaacagagaagaaauagaugggguaaagcuggaaucaacaaggauuuaccagauuuuggcgaucuauucaacugucgccaguucauugguacugguagucucccugggggcaaucaguuucuggaugugcucuaaugggucucuacaguguagaauauguauuuaa

SEQ ID NO: 37740 - RNA, 1701 nt, Artificial Sequence
  derived and/or modified CDS sequence (wt) from hemagglutinin__InfluenzaA__ADM32028
augaaggcaauacuaguaguucugcuauauacauuugcaaccgcaaaugcagacacauuauguauagguuaucaugcgaacaauucaacagacacuguagacacaguacuagaaaagaauguaacaguaacacacucuguugaccuucuagaagacaagcauaacgggaaacuaugcaaacuaagagggguagccccauugcauuuggguaaauguaacauugcuggcuggauccugggaaauccagagugugaaucacucuccacagcaagcucaugguccuacauuguggaaacaucuaguucagacaauggaacguguuacccaggagauuucaucgauuaugaggagcuaagagagcaauugagcucagugucaucauuugaaagguuugagauauuccccaagacaaguucauggcccaaucaugacucgaacaaagguguaacggcagcauguccucaugcuggagcaaaaagcuucuacaaaaauuuaauauggcuaguuaaaaaaggaaauucauacccaaagcucagcaaauccuacauuaaugauaaagggaaagaaguccucgugcuauggggcauucaccauccaucuacuagugcugaccaacaaagucucuaucagaaugcagaugcauauguuuuuguggggacaucaagauacagcaagaaguucaagccggaaauagcaauaagacccaaagugagggaucaagaagggagaaugaacuauuacuggacacuaguagagccgggagacaaaauaacauucgaagcaacuggaaaucuagugguaccgagauaugcauucgcaauggaaagaaaugcuggaucugguauuaucauuucagauacaccaguccacgauugcaauacaacuugucagacacccaagggugcuauaaacaccagccucccauuucagaauguacauccgaucacaauuggaaaauguccaaaauauguaaaaagcacaaaauugagacuggccacaggauugaggaaugucccgucuauucaaucuagaggccuauuuggggccauugccgguuucauugaagggggguggacagggaugguagauggaugguacgguuaucaccaucaaaaugagcaggggucaggauaugcagccgaccugaagagcacacagaaugccauugacgagauuacuaacaaaguaaauucuguuauugaaaagaugaauacacaguucacagcaguagguaaagaguucaaccaccuggaaaaaagaauagagaauuuaaauaaaaaaguugaugaugguuuccuggacauuuggacuuacaaugccgaacuguugguucuauuggaaaaugaaagaacuuuggacuaccacgauucaaaugugaagaacuuauaugaaaagguaagaagccaguuaaaaaacaaugccaaggaaauuggaaacggcugcuuugaauuuuaccacaaaugcgauaacacgugcauggaaagugucaaaaaugggacuuaugacuacccaaaauacucagaggaagcaaaauuaaacagagaagaaauagaugggguaaagcuggaaucaacaaggauuuaccagauuuuggcgaucuauucaacugucgccaguucauugguacugguagucucccugggggcaaucaguuucuggaugugcucuaaugggucucuacaguguagaauauguauuuaa

SEQ ID NO: 37741 - RNA, 1701 nt, Artificial Sequence
  derived and/or modified CDS sequence (wt) from hemagglutinin__InfluenzaA__ADM32038
augaaggcaauacuaguaguucugcuauauacauuugcaaccgcaaaugcagacacauuauguauagguuaucaugcgaacaauucaacagacacuguagacacaguacuagaaaagaauguaacaguaacacacucuguuaacauucuagaagacaagcauaacgggaaacuaugcaaacuaaaagggguagccccauugcauuuggguaaauguaacauugcuggcuggauccugggaaauccagagugugaaucacucuccacagcaagcucaugguccuacauuguggaaacaucuaguucagacaaugggacguguuacccaggagauuucaucgauuaugaggagcuaagagagcaauugagcucagugucaucauuugaaagguuugagauauuccccaagacaaguucauggcccaaucaugacucgaacaaagguguaacggcagcauguccucaugcuggagcaaaaagcuucuacaaaaauuuaauauggcuaguuaaaaaaggaaauucauacccaaagcucagcaaauccuacauuaaugauaaagggaaagaaguccucgugcuauggggcauucaccauccaucuacuagugcugaccaacaaagucucuaucagaaugcagaugcauauguuuuuguggggucaucaaaauacagcaagaaguucaagccggaaauagcaauaagacccaaagugagggaucaagaagggagaaugaacuauuacuggacacuaguagagccgggagacaaaauaacauucgaagcaacuggaaaucuagugguaccgagauaugcauucgcaauggaaagaaaugcuggaucugguauuaucauuucagauacaccaguccacgauugcaauacaacuugucagacacccaagggugcuauaaacaccagccucccauuucagaauauacauccgaucacaauuggaaaauguccaaaauauguaaaaagcacaaaauugagacuggccacaggauugaggaaugucccgucuauucaaucuagaggccuauuuggggccauugccgguuucauugaagggggguggacagggaugguagauggaugguacgguuaucaccaucaaaaugagcaggggucaggauaugcagccgaccugaagagcacacagaaugccauugacgagauuacuaacaaaguaaauucuguuauugaaaagaugaauacacaguucacagcaguagguaaagaguucaaccaccuggaaaaaagaauagagaauuuaaauaaaaaaguugaugaugguuuccuggacauuuggacuuacaaugccgaacuguugguucuauuggaaaaugaaagaacuuuggacuaccacgauucaaaugugaagaacuuauaugaaaagguaagaagccagcuaaaaaacaaugccaaggaaauuggaaacggcugcuuugaauuuuaccacaaaugcgauaacacgugcauggaaagugucaaaaaugggacuuaugacuacccaaaauacucagaggaagcaaaauuaaacagagaagaaauagaugggguaaagcuggaaucaacaaggauuuaccagauuuuggcgaucuauucaacugucgccaguucauugguacugguagucucccugggggcaaucaguuucuggaugugcucuaaugggucucuacaguguagaauauguauuuaa

SEQ ID NO: 37742 - RNA, 1701 nt, Artificial Sequence; identical to SEQ ID NO: 34898
  derived and/or modified CDS sequence (wt) from hemagglutinin__InfluenzaA__ADM32048

SEQ ID NO: 37743 - RNA, 1701 nt, Artificial Sequence; identical to SEQ ID NO: 36459
  derived and/or modified CDS sequence (wt) from hemagglutinin__InfluenzaA__ADM32058

SEQ ID NO: 37744 - RNA, 1701 nt, Artificial Sequence; identical to SEQ ID NO: 36459
  derived and/or modified CDS sequence (wt) from hemagglutinin__InfluenzaA__ADM32068

SEQ ID NO: 37745 - RNA, 1701 nt, Artificial Sequence; identical to SEQ ID NO: 34681
  derived and/or modified CDS sequence (wt) from hemagglutinin__InfluenzaA__ADM32078

SEQ ID NO: 37746 - RNA, 1701 nt, Artificial Sequence
  derived and/or modified CDS sequence (wt) from hemagglutinin__InfluenzaA__ADM32088
augaaggcaauacuaguaguucugcuauauacauuugcaaccgcaaaugcagacacauuauguauagguuaucaugcgaacaauucaacagacacuguagacacaguacuagaaaagaauguaacaguaacacacucuguuaacauucuagaagacaagcauaacgggaaacuaugcaaacuaagagggguagccccauugcauuuggguaaauguaacauugcuggcuggauccugggaaauccagagugugaaucacucuccacagcaagcucaugguccuacauuguggaaacaucuaguucagacaauggaacguguuacccaggagauuucaucgauuaugaggagcuaagagagcaauugagcucagugucaucauuugaaagguuugagauauuccccaagacaaguucauggcccaaucaugacucgaacaaagguguaacggcagcauguucucaugcuggagcaaaaagcuucuacaaaaauuuaauauggcuaguuaaaaaaggaaauucauacccaaagcucagcaaauccuacauuaaugauaaagggaaagaaguccucgugcuauggggcauucaccauccaucuacuagugcugaccaacaaagucucuaucagaaugcagaugcauauguuuuuguggggucaucaagauacagcaagaaguucaagccggaaauagcaauaagacccaaagugagggaucaagaagggagaaugaacuauuacuggacacuaguagagccgggagacaaaauaacauucgaagcaacuggaaaucuagugguaccgagauaugcauucgcaauggaaagaaaugcuggaucugguauuaucauuucagauacaccaguccacgauugcaauacaacuugucagacacccaagggugcuauaaacaccagucucccauuucagaauauacauccgaucacaauuggaaaauguccaaaauauguaaaaagcacaaaauugagacuggccacaggauugaggaaugucccgucuauucaaucuagaggccuauuuggggccauugccgguuucauugaagggggguggacagggaugguagauggaugguacgguuaucaccaucaaaaugagcaggggucaggauaugcagccgaccugaagagcacacagaaugccauugacgagauuacuaacaaaguaaauucuguuauugaaaagaugaauacacaguucacagcaguagguaaagaguucaaccaccuggaaaaaagaauagagaauuuaaauaaaaaaguugaugaugguuuccuggacauuuggacuuacaaugccgaacuguugguucuauuggaaaaugaaagaacuuuggacuaccacgauucaaaugugaagaacuuauaugaaaagguaagaagccagcuaaaaaacaaugccaaggaaauuggaaacggcugcuuugaauuuuaccacaaaugcgauaacacgugcauggaaagugucaaaaaugggacuuaugacuacccaaaauacucagaggaagcaaaauuaaacagagaagaaauagaugggguaaagcuggaaucaacaaggauuuaccagauuuuggcgaucuauucaacugucgccaguucauugguacugguagucucccugggggcaaucaguuucuggaugugcucuaaugggucucuacaguguagaauauguauuuaa

SEQ ID NO: 37747 - RNA, 1701 nt, Artificial Sequence
  derived and/or modified CDS sequence (wt) from hemagglutinin__InfluenzaA__ADM32098
augaaggcaauacuaguaguucugcuauauacauuugcaaucgcaaaugcagacacauuauguauagguuaucaugcgaacaauucaacagacacuguagacacaguacuagaaaagaauguaacaguaacacacucuguuaaccuucuagaagacaagcauaacgggaaacuaugcaaacuaagagggguagccccauugcauuuggguaaauguaacauugcuggcuggauccugggaaauccagagugugaaucacucuccacagcaagcucaugguccuacauuguggaaacaucuaguucagacaauggaacguguuacccaggagauuucaucgauuaugaggagcuaagagagcaauugagcucagugucaucauuugaaagguuugagauauuccccaagacaaguucauggcccaaucaugacucgaacaaagguguaacggcagcauguccucaugcuggagcaaaaagcuucuacaaaaauuuaauauggcuaguuaaaaaaggaaauucauacccaaagcucagcaaauccuacauuaaugauaaagggaaagaaguccucgugcuauggggcauucaccauccaucuacuagugcugaccaacaaagucucuaucagaaugcagaugcauauguuuuuguggggacaucaagauacagcaagaaguucaagccggaaauagcaauaagacccaaagugagggaucaagaagggagaaugaacuauuacuggacacuaguagagccgggagacaaaauaacauucgaagcaacuggaaaucuagugguaccgagauaugcauucgcaauggaaagaaaugcuggaucugguauuaucauuucagauacaccaguccacgauugcaauacaacuugucagacacccaagggugcuauaaacaccagccucccauuucagaauauacauccgaucacaauuggaaaauguccaaaauauguaaaaagcacaaaauugagacuggccacaggauugaggaaugucccgucuauucaaucuagaggccuauuuggggccauugccgguuucauugaagggggguggacagggaugguagauggaugguacgguuaucaccaucaaaaugagcaggggucaggauaugcagccgaccugaagagcacacagaaugccauugacgagauuacuaacaaaguaaauucuguuauugaaaagaugaauacacaguucacagcaguagguaaagaguucaaccaccuggaaaaaagaauagagaauuuaaauaaaaagguugaugaugguuuccuggacauuuggacuuacaaugccgaacuguugguucuauuggaaaaugaaagaacuuuggacuaccacgauucaaaugugaagaacuuauaugaaaagguaagaagccaguuaaaaaacaaugccaaggaaauuggaaacggcugcuuugaauuuuaccacaaaugcgauaacacgugcauggaaagugucaaaaaugggacuuaugacuacccaaaauacucagaggaagcaaaauuaaacagagaagaaauagaugggguaaagcuggaaucaacaaggauuuaccagauuuuggcgaucuauucaacugucgccaguucauugguacugguagucucccugggggcaaucaguuucuggaugugcucuaaugggucucuacaguguagaauauguauuuaa

SEQ ID NO: 37748 - RNA, 1701 nt, Artificial Sequence; identical to SEQ ID NO: 34681
  derived and/or modified CDS sequence (wt) from hemagglutinin__InfluenzaA__ADM32108

SEQ ID NO: 37749 - RNA, 1701 nt, Artificial Sequence
  derived and/or modified CDS sequence (wt) from hemagglutinin__InfluenzaA__ADM32551
augaaggcaauacuaguaguucugcuauauacauuugcaaccgcaaaugcagacacauuauguauagguuaucaugcgaacaauucaacagacacuguagacacaguacuagaaaagaauguaacaguaacacacucuguuaacauucuagaagacaagcauaacgggaaacuaugcaaacuaaaagggguagccccauugcauuuggguaaauguaacauugcuggcuggauccugggaaauccagagugugaaucacucuccacagcaagcucaugguccuacauuguggaaacaucuaguucagacaauggaacguguuacccaggagauuucaucgauuaugaggagcuaagagagcaauugagcucagugucaucauuugaaagguuugagauauuccccaagacaaguucauggcccaaucaugacucgaacaaagguguaacggcagcauguccucaugcuggagcaaaaagcuucuacaaaaauuuaauauggcuaguuaaaaaaggaaauucauacccaaagcucagcaaauccuacauuaaugauaaagggaaagaaguccucgugcuauggggcauucaccauccaucuacuagugcugaccaacaaagucucuaucagaaugcagaugcauauguuuuuguggggucaucaaaauacagcaagaaguucaagccggaaauagcaauaagacccaaagugagggaucaagaagggagaaugaacuauuacuggacacuaguagagccgggagacaaaauaacauucgaagcaacuggaaaucuagugguaccgagauaugcauucgcaauggaaagaaaugcuggaucugguauuaucauuucagauacaccaguccacgauugcaauacaacuugucagacacccaagggugcuauaaacaccagccucccauuucagaauauacauccgaucacaauuggaaaauguccaaaauauguaaaaagcacaaaauugagacuggccacaggauugaggaaugucccgucuauucaaucuagaggccuauuuggggccauugccgguuucauugaagggggguggacagggaugguagauggaugguacgguuaucaccaucaaaaugagcaggggucaggauaugcagccgaccugaagagcacacagaaugccauugacgagauuacuaacaaaguaaauucuguuauugaaaagaugaauacacaguucacagcaguagguaaagaguucaaccaccuggaaaaaagaauagagaauuuaaauaaaaaaguugaugaugguuuccuggacauuuggacuuacaaugccgaacuguugguucuauuggaaaaugaaagaacuuuggacuaccacgauucaaaugugaagaacuuauaugaaaagguaagaagccagcuaaaaaacaaugccaaggaaauuggaaacggcugcuuugaauuuuaccacaaaugcgauaacacgugcauggaaagugucaaaaaugggacuuaugacuacccaaaauacucagaggaagcaaaauuaaacagagaagaaauagaugggguaaagcuggaaucaacaaggauuuaccagauuuuggcgaucuauucaacugucgccaguucauugguacugguagucucccugggggcaaucaguuucuggaugugcucuaaugggucucuacaauguagaauauguauuuaa

SEQ ID NO: 37750 - RNA, 1701 nt, Artificial Sequence; identical to SEQ ID NO: 37737
  derived and/or modified CDS sequence (wt) from hemagglutinin__InfluenzaA__ADM32561

SEQ ID NO: 37751 - RNA, 1701 nt, Artificial Sequence; identical to SEQ ID NO: 34898
  derived and/or modified CDS sequence (wt) from hemagglutinin__InfluenzaA__ADM32571

SEQ ID NO: 37752 - RNA, 1701 nt, Artificial Sequence
  derived and/or modified CDS sequence (wt) from hemagglutinin__InfluenzaA__ADM32581
augaaggcaauacuaguaguucugcuauauacauuugcaaccgcaaaugcagacacauuauguauagguuaucaugcgaacaauucaacagacacuguagacacaguacuagaaaagaauguaacaguaacacacucuguuaaccuucuagaagacaagcauaacgggaaacuaugcaaacuaagagggguagccccauugcauuuggguaaauguaacauugcuggcuggauccugggaaauccagagugugaaucacucuccacagcaagcucaugguccuacauuguggaaacaucuaguucagacaauggaacguguuacccaggagauuucaucgauuaugaggagcuaagagagcaauugagcucagugucaucauuugaaagguuugagauauuccccaagacaaguucauggcccaaucaugacucgaacaaagguguaacggcagcauguccucaugcuggagcaaaaagcuucuacaaaaauuuaauauggcuaguuaaaaaaggaaauucauacccaaagcucagcaaauccuacauuaaugauaaagggaaagaaguccucgugcuauggggcauucaccauccaucuacuagugcugaccaacaaagucucuaucagaaugcagaugcauauguuuuuguggggacaucaagauacagcaagaaguucaaaccggaaauagcaauaagacccaaagugagggaucaagaagggagaaugaacuauuacuggacacuaguagagccgggagacaaaauaacauucgaagcaacuggaaaucuagugguaccgagauaugcauucgcaauggaaagaaaugcuggaucugguauuaucauuucagauacaccaguccacgauugcaauacaacuugucagacacccaagggugcuauaaacaccagccucccauuucagaauauacauccgaucacaauuggaaaauguccaaaauauguaaaaagcacaaaauugagacuggccacaggauugaggaaugucccgucuauucaaucuagaggccuauuuggggccauugccgguuucauugaagggggguggacagggaugguagauggaugguacgguuaucaccaucaaaaugagcaggggucaggauaugcagccgaccugaagagcacacagaaugccauugacgagauuacuaacaaaguaaauucuguuauugaaaagaugaauacacaguucacagcaguagguaaagaguucaaccaccuggaaaaaagaauagagaauuuaaauaaaaaaguugaugaugguuuccuggacauuuggacuuacaaugccgaacuguugguucuauuggaaaaugaaagaacuuuggacuaccacgauucaaaugugaagaacuuauaugaaaagguaagaagccaguuaaaaaacaaugccaaggaaauuggaaacggcugcuuugaauuuuaccacaaaugcgauaacacgugcauggaaagugucaaaaaugggacuuaugacuacccaaaauacucagaggaagcaaaauuaaacagagaagaaauagaugggguaaagcuggaaucaacaaggauuuaccagauuuuggcgaucuauucaacugucgccaguucauugguacugguagucucccugggggcaaucaguuucuggaugugcucuaaugggucucuacaguguagaauauguauuuaa

SEQ ID NO: 37753 - RNA, 1701 nt, Artificial Sequence; identical to SEQ ID NO: 36453
  derived and/or modified CDS sequence (wt) from hemagglutinin__InfluenzaA__ADM32591

SEQ ID NO: 37754 - RNA, 1701 nt, Artificial Sequence; identical to SEQ ID NO: 34681
  derived and/or modified CDS sequence (wt) from hemagglutinin__InfluenzaA__ADM32601

SEQ ID NO: 37755 - RNA, 1701 nt, Artificial Sequence; identical to SEQ ID NO: 34681
  derived and/or modified CDS sequence (wt) from hemagglutinin__InfluenzaA__ADM32611

SEQ ID NO: 37756 - RNA, 1701 nt, Artificial Sequence
  derived and/or modified CDS sequence (wt) from hemagglutinin__InfluenzaA__ADM32621
augaaggcaauacuaguaguucugcuauauacauuugcaaccgcaaaugcagacacauuauguauagguuaucaugcgaacaauucaacagacacuguagacacaguacuagaaaagaauguaacaguaacacacucuguuaaccuucuagaagacaagcauaacgggaaacuaugcaaacuaagagggguagccccauugcauuuggguaaauguaacauugcuggcuggauccugggaaauccagagugugaaucacucuccacagcaagcucaugguccuacauuguggaaacaucuaguucagacaauggaacguguuacccaggagauuucaucgauuaugaggagcuaagagagcaauugagcucagugucaucauuugaaagguuugagauauuccccaagacaaguucauggcccaaucaugacucgaacaaagguguaacggcagcauguccucaugcuggagcaaaaagcuucuacaaaaauuuaauauggcuaguuaaaaaaggaaauucauacccaaagcucagcaaauccuacauuaaugauaaagggaaagaaguccucgugcuauggggcauucaccauccaucuacuagugcugaccaacaaagucucuaucagaaugcagaugcauauguuuuuguggggacaucaagauacagcaagaaguucaagccggaaauagcaauaagacccaaagugagggaucaagaagggagaaugaacuauuacuggacacuaguagagccgggagacaaaauaacauucgaagcaacuggaaaucuagugguaccgagauaugcauucgcaauggaaagaaaugcuggaucugguauuaucauuucagauacaccaguccacgauugcaauacaacuugucagacacccaagggugcuauaaacaccagccucccauuucagaauauacauccgaucacaauuggaaaauguccaaaauauguaaaaagcacaaaauugagacuggccacaggauugaggaaugucccaucuauucaaucuagaggccuauuuggggccauugccgguuucauugaagggggguggacagggaugguagauggaugguacgguuaucaccaucaaaaugagcaggggucaggauaugcagccgaccugaagagcacacagaaugccauugacaagauuacuaacaaaguaaauucuguuauugaaaagaugaauacacaguucacagcaguagguaaagaguucaaccaccuggaaaaaagaauagagaauuuaaauaaaaaaguugaugaugguuuccuggacaucuggacuuacaaugccgaacuguugguucuauuggaaaaugaaagaacuuuggacuaccacgauucaaaugugaagaacuuauaugaaaagguaagaagccaguuaaaaaacaaugccaaggaaauuggaaacggcugcuuugaauuuuaccacaaaugcgauaacacgugcauggaaagugucaaaaaugggacuuaugacuacccaaaauacucagaggaagcaaaauuaaacagagaagaaauagaugggguaaagcuggaaucaacaaggauuuaccagauuuuggcgaucuauucaacugucgccaguucauugguacugguagucucccugggggcaaucaguuucuggaugugcucuaaugggucucuacaguguagaauauguauuuaa

SEQ ID NO: 37757 - RNA, 1701 nt, Artificial Sequence
  derived and/or modified CDS sequence (wt) from hemagglutinin__InfluenzaA__ADM32631
augaaggcaauacuaguaguucugcuauauacauuugcaaccgcaaaugcagacacauuauguauagguuaucaugcgaacaauucaacagacacuguagacacaguacuagaaaagaauguaacaguaacacacucuguuaacauucuagaagacaagcauaacgggaaacuaugcaaacuaaaagggguagccccauugcauuuggguaaauguaacauugcuggcuggauccugggaaauccagagugugaaucacucuccacagcaagcucaugguccuacauuguggaaacaucuaguucagacaauggaacguguuacccaggagauuucaucgauuaugaggagcuaagagagcaauugagcucagugucaucauuugaaagguuugagauauuccccaagacaaguucauggcccaaucaugacucgaacaaagguguaacggcagcauguccucaugcuggagcaaaaagcuucuacaaaaauuuaauauggcuaguuaaaaaaggaaauuuauacccaaagcucagcaaauccuacauuaaugauaaagggaaagaaguccucgugcuauggggcauucaccauccaucuacuagugcugaccaacaaagucucuaucagaaugcagaugcauauguuuuuguggggucaucaaaauacagcaagaaguucaagccggaaauagcaauaagacccaaagugagggaucaagaagggagaaugaacuauuacuggacacuaguagagccgggagacaaaauaacauucgaagcaacuggaaaucuagugguaccgagauaugcauucgcaauggaaagaaaugcuggaucugguauuaucauuucagauacaccaguccacaauugcaauacaacuugucagacacccaagggugcuauaaacaccagccucccauuucagaauauacauccgaucacaauuggaaaauguccaaaauauguaaaaagcacaaaauugagacuggccacaggauugaggaaugucccgucuauucaaucuagaggccuauuuggggccauugccgguuucauugaagggggguggacagggaugguagauggaugguacgguuaucaccaucaaaaugagcaggggucaggauaugcagccgaccugaagagcacacagaaugccauugacgagauuacuaacaaaguaaauucuguuauugaaaagaugaauacacaguucacagcaguagguaaagaguuuaaccaccuggaaaaaagaauagagaauuuaaauaaaaaaguugaugaugguuuccuggacauuuggacuuacaaugccgaacuguugguucuauuggaaaaugaaagaacuuuggacuaccacgauucaaaugugaagaacuuauaugaaaagguaagaagccagcuaaaaaacaaugccaaggaaauuggaaacggcugcuuugaauuuuaccacaaaugcgauaacacgugcauggaaagugucaaaaaugggacuuaugacuacccaaaauacucagaggaagcaaaauuaaacagagaagaaauagaugggguaaagcuggaaucaacaaggauuuaccagauuuuggcgaucuauucaacugucgccaguucauugguacugguagucucccugggggcaaucaguuucuggaugugcucuaaugggucucuacaguguagaauauguauuuaa

SEQ ID NO: 37758 - RNA, 1701 nt, Artificial Sequence; identical to SEQ ID NO: 36459
  derived and/or modified CDS sequence (wt) from hemagglutinin__InfluenzaA__ADM32641

SEQ ID NO: 37759 - RNA, 1701 nt, Artificial Sequence
  derived and/or modified CDS sequence (wt) from hemagglutinin__InfluenzaA__ADM32651
augaaggcaauacuaguaguucugcuauauacauuugcaaccgcaaaugcagacacauuauguauagguuaucaugcgaacaauucaacagacacuguagacacaguacuagaaaagaauguaacaguaacacacucuguuaaccuucuagaagacaagcauaacgggaaacuaugcaaacuaagagggguagccccauugcauuuggguaaauguaacauugcuggcuggauccugggaaauccagagugugaaucacucuccacagcaagcucaugguccuacauuguggaaacaucuaguucagacaauggaacguguuacccaggagauuucaucgauuaugaggagcuaagagagcaauugagcucagugucaucauuugaaagguuugagauauuccccaagacaaguucauggcccaaucaugacucgaacaaagguguaacggcagcauguccucaugcuggagcaaaaagcuucuacaaaaauuuaauauggcuaguuaaaaaaggaaauucauacccaaagcucagcaaauccuacauuaaugauaaagggaaagaaguccucgugcuauggggcauucaccauccaucuacuagugcugaccaacaaagucucuaucagaaugcagaugcauauguuuuuguggggacaucaagauacagcaagaaguucaagccggaaauagcaauaagacccaaagugagggaucaagaagggagaaugaacuauuacuggacacuaguagagccgggagacaaaauaacauucgaagcaacuggaaaucuagugguaccgagauaugcauucgcaauggaaagaaaugcuggaucugguauuaucauuucagauacaccaguccacgauugcaauacaacuugucagacacccaagggugcuauaaacaccagccucccauuucagaauauacauccgaucacaauuggaaaauguccaaaauauguaaaaagcacaaaauugagacuggccacaggauugaggaaugucccgucuauucaaucuagaggcuuauuuggggccauugccgguuucauugaagggggguggacagggaugguagauggaugguacgguuaucaccaucaaaaugagcaggggucaggauaugcagccgaccugaagagcacacagaaugccauugacgagauuacuaacaaaguaaauucuguuauugaaaagaugaauacacaguucacagcaguagguaaagaguucaaccaccuggaaaaaagaauagagaauuuaaauaaaaaaguugaugaugguuuccuggacauuuggacuuacaaugccgaacuguugguucuauuggaaaaugaaagaacuuuggacuaccacgauucaaaugugaagaacuuauaugaaaagguaagaagccaguuaaaaaacaaugccaaggaaauuggaaacggcugcuuugaauuuuaccacaaaugcgauaacacgugcauggaaagugucaaaaaugggacuuaugacuacccaaaauacucagaggaagcaaaauuaaacagagaagaaauagaugggguaaagcuggaaucaacaaggauuuaccagauuuuggcgaucuauucaacugucgccaguucauugguacugguagucucccugggggcaaucaguuucuggaugugcucuaaugggucucuacaguguagaauauguauuuaa

SEQ ID NO: 37760 - RNA, 1701 nt, Artificial Sequence
  derived and/or modified CDS sequence (wt) from hemagglutinin__InfluenzaA__ADM32661
augaaggcaauacuaguaguucugcuauauacauuugcaaucgcaaaugcagacacauuauguauagguuaucaugcgaacaauucaacagacacuguagacacaguacuagaaaagaauguaacaguaacacacucuguuaaccuucuagaagacaagcauaacgggaaacuaugcaaacuaagagggguagccccauugcauuuggguaaauguaacauugcuggcuggauccugggaaauccagagugugaaucacucuccacagcaagcucaugguccuacauuguggaaacaucuaguucagacaauggaacguguuacccaggagauuucaacgauuaugaggagcuaagagagcaauugagcucagugucaucauuugaaagguuugagauauuccccaagacaaguucauggcccaaucaugacucgaacaaagguguaacggcagcauguccucaugcuggagcaaaaagcuucuacaaaaauuuaauauggcuaguuaaaaaaggaaauucauacccaaagcucagcaaauccuacauuaaugauaaagggaaagaaguccucgugcuauggggcauucaccauccaucuacuagugcugaccaacaaagucucuaucagaaugcagaugcauauguuuuuguggggacaucaagauacagcaagaaguucaagccggaaauagcaauaagacccaaagugagggaucaagaagggagaaugaacuauuacuggacacuaguagagccgggagacaaaauaacauucgaagcaacuggaaaucuagugguaccgagauaugcauucgcaauggaaagaaaugcuggaucugguauuaucauuucagauacaccaguccacgauugcaauacaacuugucagacacccaagggugcuauaaacaccagccucccauuucagaauauacauccgaucacaauuggaaaauguccaaaauauguaaaaagcacaaaauugagacuggccacaggauugaggaaugucccgucuauucaaucuagaggccuauuuggggccauugccgguuucauugaagggggguggacagggaugguagauggaugguacgguuaucaccaucaaaaugagcaggggucaggauaugcagccgaccugaagagcacacagaaugccauugacgagauuacuaacaaaguaaauucuguuauugaaaagaugaauacacaguucacagcaguagguaaagaguucaaccaccuggaaaaaagaauagagaauuuaaauaaaaagguugaugaugguuuccuggacauuuggacuuacaaugccgaacuguugguucuauuggaaaaugaaagaacuuuggacuaccacgauucaaaugugaagaacuuauaugaaaagguaagaagccaguuaaaaaacaaugccaaggaaauuggaaacggcugcuuugaauuuuaccacaaaugcgauaacacgugcauggaaagugucaaaaaugggacuuaugacuacccaaaauacucagaggaagcaaaauuaaacagagaagaaauagaugggguaaagcuggaaucaacaaggauuuaccagauuuuggcgaucuauucaacugucgccaguucauugguacugguagucucccugggggcaaucaguuucuggaugugcucuaaugggucucuacaguguagaauauguauuuaa

SEQ ID NO: 37761 - RNA, 1701 nt, Artificial Sequence; identical to SEQ ID NO: 36269
  derived and/or modified CDS sequence (wt) from hemagglutinin__InfluenzaA__ADM32671

SEQ ID NO: 37762 - RNA, 1701 nt, Artificial Sequence; identical to SEQ ID NO: 34681
  derived and/or modified CDS sequence (wt) from hemagglutinin__InfluenzaA__ADM32681

SEQ ID NO: 37763 - RNA, 1701 nt, Artificial Sequence; identical to SEQ ID NO: 37500
  derived and/or modified CDS sequence (wt) from hemagglutinin__InfluenzaA__ADM32691

SEQ ID NO: 37764 - RNA, 1701 nt, Artificial Sequence; identical to SEQ ID NO: 35279
  derived and/or modified CDS sequence (wt) from hemagglutinin__InfluenzaA__ADM32701

SEQ ID NO: 37765 - RNA, 1701 nt, Artificial Sequence; identical to SEQ ID NO: 36490
  derived and/or modified CDS sequence (wt) from hemagglutinin__InfluenzaA__ADM32711

SEQ ID NO: 37766 - RNA, 1701 nt, Artificial Sequence; identical to SEQ ID NO: 36490
  derived and/or modified CDS sequence (wt) from hemagglutinin__InfluenzaA__ADM32721

SEQ ID NO: 37767 - RNA, 1701 nt, Artificial Sequence; identical to SEQ ID NO: 36442
  derived and/or modified CDS sequence (wt) from hemagglutinin__InfluenzaA__ADM32741

SEQ ID NO: 37768 - RNA, 1701 nt, Artificial Sequence; identical to SEQ ID NO: 36490
  derived and/or modified CDS sequence (wt) from hemagglutinin__InfluenzaA__ADM32751

SEQ ID NO: 37769 - RNA, 1701 nt, Artificial Sequence; identical to SEQ ID NO: 36269
  derived and/or modified CDS sequence (wt) from hemagglutinin__InfluenzaA__ADM32761

SEQ ID NO: 37770 - RNA, 1701 nt, Artificial Sequence
  derived and/or modified CDS sequence (wt) from hemagglutinin__InfluenzaA__ADM32771
augaaggcaauacuaguaguucugcuauauacauuugcaaccgcaaaugcagacacauuauguauagguuaucaugcaaacaauucaacagacacuguagacacaguacuagaaaagaauguaacaguaacacacucuguuaaccuucuagaagacaagcauaacgggaaacuaugcaaacuaagagggguagccccauugcauuuggguaaauguaacauugcuggcuggauccugggaaauccagagugugaaucacucuccacagcaagcucaugguccuacauuguggaaacaucuaguucagacaauggaacguguuacccaggagauuucaucgauuaugaggagcuaagagagcaauugagcucagugucaucauuugaaagguuugagauauuccccaagacaaguucauggcccaaucaugacucgaacaaagguguaacggcagcauguccucaugcuggagcaaaaagcuucuacaaaaauuuaauauggcuaguuaaaaaaggaaauucauacccaaagcucagcgaauccuacauuaaugauaaagggaaagaaguccucgugcuauggggcauucaccauccaucuacuagugcugaccaacaaagucucuaucagaaugcagaugcauauguuuuuguggggacaucaagauacagcaagaaguucaagccggaaauagcaauaagacccaaagugagggaucaagaagggagaaugaacuauuacuggacacuaguagagccgggagacaaaauaacauucgaagcaacuggaaaucuagugguaccgagauaugcauucgcaauggaaagaaaugcuggaucugguauuaucauuucagauacaccaguccacgauugcaauacaacuugucagacacccaagggugcuauaaacaccagccucccauuucagaauauacauccgaucacaauuggaaaauguccaaaauauguaaaaagcacaaaauugagacuggccacaggauugaggaaugucccgucuauucaaucuaaaggccuauuuggggccauugccgguuucauugaagggggguggacagggaugguagauggaugguacgguuaucaccaucaaaaugagcaggggucaggauaugcagccgaccugaagagcacacagaaugccauugacgagauuacuaacaaaguaaauucuguuauugaaaagaugaauacacaguucacagcaguagguaaagaguucaaccaccuggaaaaaagaauagagaauuuaaauaaaaaaguugaugaugguuuccuggacauuuggacuuacaaugccgaacuguugguucuauuggaaaaugaaagaacuuuggacuaccacgauucaaaugugaagaacuuauaugaaaagguaagaagccaguuaaaaaacaaugccaaggaaauuggaaacggcugcuuugaauuuuaccacaaaugcgauaacacgugcauggaaagugucaaaaaugggacuuaugacuacccaaaauacucagaggaagcaaaauuaaacagagaagaaauagaugggguaaagcuggaaucaacaaggauuuaccagauuuuggcgaucuauucaacugucgccaguucauugguacugguagucucccugggggcaaucaguuucuggaugugcucuaaugggucucuacaguguagaauauguauuuaa

SEQ ID NO: 37771 - RNA, 1701 nt, Artificial Sequence
  derived and/or modified CDS sequence (wt) from hemagglutinin__InfluenzaA__ADM32781
augaaggcaauacuaguaguucugcuauauacauuugcaaccgcaaaugcagacacauuauguauagguuaucaugcgaacaauucaacagacacuguagacacaguacuagaaaagaauguaacaguaacacacucuguugaccuucuagaagacaagcauaacgggaaacuaugcaaacuaagagggguagccccauugcauuuggguaaauguaacauugcuggcuggauccugggaaauccagagugugaaucacucuccacagcaagcucaugguccuacauuguggaaacaucuaguucagacaauggaacguguuacccaggagauuucaucgauuaugaggagcuaagagagcaauugagcucagugucaucauuugaaagguuugagauauuccccaagacaaguucauggcccaaucaugacucgaacaaagguguaacggcagcauguccucaugcuggagcaaaaagcuucuacaaaaauuuaauauggcuaguuaaaaaaggaaauucauacccaaagcucagcaaauccuacauuaaugauaaagggaaagaaguccucgugcuauggggcauucaccauccaucuacuagugcugaccaacaaagucucuaucagaaugcagaugcauauguuuuuguggggacaucaagauacagcaaaaaguucaagccggaaauagcaauaagacccaaagugagggaucaagaagggagaaugaacuauuacuggacacuaguagagccgggagacaaaauaacauucgaagcaacuggaaaucuagugguaccgagauaugcauucgcaauggaaagaaaugcuggaucugguauuaucauuucagauacaccaguccacgauugcaauacaacuugucagacacccaagggugcuauaaacaccagcuucccauuucagaauauacauccgaucacaauuggaaaauguccaaaauauguaaaaagcacaaaauugagacuggccacaggauugaggaaugucccgucuauucaaucuagaggccuauuuggggccauugccgguuucauugaagggggguggacagggaugguagauggaugguacgguuaucaccaucaaaaugagcaggggucaggauaugcagccgaccugaagagcacacagaaugccauugacgagauuacuaacaaaguaaauucuguuauugaaaagaugaauacacaguucacagcaguagguaaagaguucaaccaccuggaaaaaagaauagagaauuuaaauaaaaaaguugaugaugguuuccuggacauuuggacuuacaaugccgaacuguugguucuauuggaaaaugaaagaacuuuggacuaccacgauucaaaugugaagaacuuauaugaaaagguaagaagccaguuaaaaaacaaugccaaggaaauuggaaacggcugcuuugaauuuuaccacaaaugcgauaacacgugcauggaaagugucaaaaaugggacuuaugacuacccaaaauacucagaggaagcaaaauuaaacagagaagaaauagaugggguaaagcuggaaucaacaaggauuuaccagauuuuggcgaucuauucaacugucgccaguucauugguacugguagucucccugggggcaaucaguuucuggaugugcucuaaugggucucuacaguguagaauauguauuuaa

SEQ ID NO: 37772 - RNA, 1701 nt, Artificial Sequence; identical to SEQ ID NO: 34898
  derived and/or modified CDS sequence (wt) from hemagglutinin__InfluenzaA__ADM32791

SEQ ID NO: 37773 - RNA, 1701 nt, Artificial Sequence
  derived and/or modified CDS sequence (wt) from hemagglutinin__InfluenzaA__ADM32801
augaaggcaauacuaguaguucugcuauauacauuugcaaccgcaaaugcagacacauuauguauagguuaucaugcgaacaauucaacagacacuguagacacaguacuagaaaagaauguaacaguaacacacucuguuaacauucuagaaaacaagcauaacgggaaacuaugcaaacuaagagggguagccccauugcauuuggguaaauguaacauugcuggcuggauccugggaaauccagagugugaaucacucuccacagcaagcucaugguccuacauuguggaaacaucuaguucagacaauggaacguguuacccaggagauuucaucgauuaugaggagcuaagagagcaauugagcucagugucaucauuugaaagguuugagauauuccccaagacaaguucauggcccaaucaugacucgaacaaagguguaacggcagcauguccucaugcuggagcaaaaagcuucuacaaaaauuuaauauggcuaguuaaaaaaggaaauucauacccaaagcucagcaaauccuacauuaaugauaaagggaaagaaguccucgugcuauggggcauucaccauccaucuacuagugcugaccaacaaagucucuaucagaaugcagaugcauauguuuuuguggggucaucaagauacagcaagaaguucaagccggaaauagcaauaagacccaaagugagggaucaagaagggagaaugaacuauuacuggacacuaguagagccgggagacaaaauaacauucgaagcaacuggaaaucuagugguaccgagauaugcauucgcaauggaaagaaaugcuggaucugguaucaucauuucagauacaccaguccacgauugcaauacaacuugucagacacccaagggugcuauaaauaccagccucccauuucagaauauacauccgaucacaauuggaaaauguccaaaauauguaaaaagcacaaaauugagacuggccacaggauugaggaaugucccgucuauucaaucuagaggccuauuuggggcaauugccgguuucauugaagggggguggacagggaugguagauggaugguacgguuaucaccaucaaaaugagcaggggucaggauaugcagccgaccugaagagcacacagaaugccauugacgagauuacuaacaaaguaaauucuguuauugaaaagaugaauacacaguucacagcaguagguaaagaguucaaccaccuggaaaaaagaauagagaauuuaaauaaaaaaguugaugaugguuuccuggacauuuggacuuacaaugccgaacuguugguucuauuggaaaaugaaagaacuuuggacuaccacgauucaaaugugaagaacuuauaugaaaagguaagaagccagcuaaaaaacaaugccaaggaaauuggaaacggcugcuuugaauuuuaccacaaaugcgauaacacgugcauggaaagugucaaaaaugggacuuaugacuacccaaaauacucagaggaagcaaaauuaaacagagaagaaauagaugggguaaagcuugaaucaacaaggauuuaccagauuuuggcgaucuauucaacugucgccaguucauugguacugguagucucccugggggcaaucaguuucuggaugugcucuaaugggucucuacaguguagaauauguauuuaa

SEQ ID NO: 37774 - RNA, 1701 nt, Artificial Sequence
  derived and/or modified CDS sequence (wt) from hemagglutinin__InfluenzaA__ADM32811
augaaggcaauacuaguaguucugcuauauacauuugcaaccgcaaaugcggacacauuauguauagguuaucaugcgaacaauucaacagacacuguagacacaguacuagaaaagaauguaacaguaacacacucuguuaaccuucuagaagacaagcauaacgggaaacuaugcaaacuaagagggguagccccauugcauuuggguaaauguaacauugcuggcuggauccugggaaauccagagugugaaucacucuccacagcaagcucaugguccuacauuguggaaacaucuaguucagacaauggaacguguuacccaggagauuucaucgauuaugaggagcuaagagagcaauugagcucagugucaucauuugaaagguuugagauauuccccaagacaaguucauggcccaaucaugacucgaacaaagguguaacggcagcauguccucaugcuggagcaaaaagcuucuacaaaaauuuaauauggcuaguuaaaaaaggaaauucauacccaaagcucagcaaauccuacauuaaugauaaagggaaagaaguccucgugcuauggggcauucaccauccaucuacuagugcugaccaacaaagucucuaucagaaugcagaugcauauguuuuuguggggacaucaagauacagcaagaaguucaagccggaaauagcaauaagacccaaagugagggaucaagaagggagaaugaacuauuacuggacacuaguagagccgggagacaaaauaacauucgaagcaacuggaaaucuagugguaccgagauaugcauucgcaauggaaagaaaugcuggaucugguauuaucauuucagauacaccaguccacgauugcaauacaacuugucagacacccaagggugcuauaaacaccagccucccauuucauaauauacauccgaucacaauuggaaaauguccaaaauauguaaaaagcacaaaauugagacuggccacaggauugaggaaugucccgucuauucaaucuagaggcuuauuuggggccauugccgguuucauugaagggggguggacagggaugguagauggaugguacgguuaucaccaucaaaaugagcaggggucaggauaugcagccgaccugaagagcacacagaaugccauugacgagauuacuaacaaaguaaauucuguuauugaaaagaugaauacacaguucacagcaguagguaaagaguucaaccaccuggaaaaaagaauagagaauuuaaauaaaaaaguugaugaugguuuccuggacauuuggacuuacaaugccgaacuguugguucuauuggaaaaugaaagaacuuuggacuaccacgauucaaaugugaagaacuuauaugaaaagguaagaagccaguuaaaaaacaaugccaaggaaauuggaaacggcugcuuugaauuuuaccacaaaugcgauaacacgugcauggaaaguguaaaaaaugggacuuaugacuacccaaaauacucagaggaagcaaaauuaaacagagaagaaauagaugggguaaagcuggaaucaacaaggauuuaccagauuuuggcgaucuauucaacugucgccaguucauugguacugguagucucccugggggcaaucaguuucuggaugugcucuaaugggucucuacaguguagaauauguauuuaa

SEQ ID NO: 37775 - RNA, 1701 nt, Artificial Sequence
  derived and/or modified CDS sequence (wt) from hemagglutinin__InfluenzaA__ADM32821
augaaggcaauacuaguaguucugcuauauacauuugcaaccgcaaaugcagacacauuauguauagguuaucaugcgaacaauucaacagacacuguagacacaguacuagaaaagaauguaacaguaacacacucuguuaaccuucuagaagacaagcauaacgggaaacuaugcaaacuaagagggguagccccauugcauuuggguaaauguaacauugcuggcuggauccugggaaauccagagugugaaucacucuccacagcaagcucaugguccuacauuguggaaacaucuaguucagacaauggaacguguuacccaggagauuucaucgauuaugaggagcuaagagagcaauugagcucagugucaucauuugaaagguuugagauauuccccaagacaaguucauggcccaaucaugacucgaacaaagguguaacggcagcauguccucaugcuggagcaaaaagcuucuacaaaaauuuaauauggcuaguuaaaaaaggaaauucauacccaaagcucagcaaauccuacauuaaugauaaagggaaagaaguccucgugcuauggggcauucaccauccaucuacuagugcugaccaacaaagucucuaucagaaugcagaugcauauguuuuuguggggacaucaagauacagcaagaaguucaagccggaaauagcaauaagacccaaagugagggaucaagaagggagaaugaacuauuacuggacacuaguagagccgggagacaaaauaacauucgaagcaacuggaaaucuagugguaccgagauaugcauucgcaauggaaagaaaugcuggaucugguauuaucauuucagauacaccaguccacgauugcaauacaacuugucagacacccaagggugcuauaaacaccagccucccauuucagaauauacauccgaucacaauuggaaaauguccaaaauauguaaaaagcacaaaauugagacuggccacaggauugaggaaugucccgucuauucaaucuagaggccuauuuggggccauugccgguuucauugaagggggguggacagggaugguagauggaugguacgguuaucaccaucaaaaugagcaggggucaggauaugcagccgaccugaagagcacacagaaugccauugacgagauuacuaacaaaguaaauucuguuauugaaaagaugaauacacaguucacagcaguagguaaagaguucaaccaccuggaaaaaagaauagagaauuuaaauaaaaaaguugaugaugguuuccuggacaucuggacuuacaaugccgaacuguugguucuauuggaaaaugaaagaacuuuggacuaccacgauucaaauguaaagaacuuauaugaaaagguaagaagccaguuaaaaaacaaugccaaggaaauuggaaacggcugcuuugaauuuuaccacaaaugcgauaacacgugcauggaaagugucaaaaaugggacuuaugacuacccaaaauacucagaggaagcaaaauuaaacagagaagaaauagaugggguaaagcuggaaucaacaaggauuuaccagauuuuggcgaucuauucaacugucgccaguucauugguacugguagucucccugggggcaaucaguuucuggaugugcucuaaugggucccuacaguguagaauauguauuuaa

SEQ ID NO: 37776 - RNA, 1701 nt, Artificial Sequence; identical to SEQ ID NO: 36269
  derived and/or modified CDS sequence (wt) from hemagglutinin__InfluenzaA__ADM32831

SEQ ID NO: 37777 - RNA, 1701 nt, Artificial Sequence; identical to SEQ ID NO: 37737
  derived and/or modified CDS sequence (wt) from hemagglutinin__InfluenzaA__ADM32841

SEQ ID NO: 37778 - RNA, 1701 nt, Artificial Sequence; identical to SEQ ID NO: 36269
  derived and/or modified CDS sequence (wt) from hemagglutinin__InfluenzaA__ADM32851

SEQ ID NO: 37779 - RNA, 1701 nt, Artificial Sequence; identical to SEQ ID NO: 35334
  derived and/or modified CDS sequence (wt) from hemagglutinin__InfluenzaA__ADM32861

SEQ ID NO: 37780 - RNA, 1701 nt, Artificial Sequence
  derived and/or modified CDS sequence (wt) from hemagglutinin__InfluenzaA__ADM32871
augaaggcaauacuaguaguucugcuauauacauuugcaaccgcaaaugcagacacauuauguauagguuaucaugcgaacaauucaacagacacuguagacacaguacuagaaaagaauguaacaguaacacacucuguuaaccuucuagaagacaagcauaacgggaaacuaugcaaacuaagagggguagccccauugcauuuggguaaauguaacauugcuggcuggauccugggaaauccagagugugaaucacucuccacagcaagcucaugguccuacauuguggaaacaucuaguucagacaauggaacguguuacccaggagauuucaucgauuaugaggagcuaagagagcaauugagcucagugucaucauuugaaagguuugagauauuccccaagacaaguucauggcccaaucaugacucgaacaaagguguaacggcagcauguccucaugcuggagcaaaaagcuucuacaaaaauuuaauauggcuaguuaaaaaaggaaauucauacccaaagcucagcaaauccuacauuaaugauaaagggaaagaaguccucgugcuauggggcauucaccauccaucuacuagugcugaccaacaaagucucuaucagaaugcagaugcauauguuuuuguggggacaucaagauacagcaagaaguucaagccggaaauagcaauaagacccaaagugagggaucaagaagggagaaugaacuauuacuggacacuaguagagccgggagacaaaauaacauucgaagcaacuggaaaucuagugguaccaagauaugcauucgcaauggaaagaaaugcuggaucugguauuaucauuucagauacaccaguccacgauugcaauacaacuugucagacacccaagggugcuauaaacaccagccucccauuucagaauauacauccgaucacaauuggaaaauguccaaaauauguaaaaagcacaaaauugagacuggccacaggauugaggaaugucccgucuauucaaucuagaggccuauuuggggccauugccgguuucauugaagggggguggacagggaugguagauggaugguacgguuaucaccaucaaaaugagcaggggucaggauaugcagccgaccugaagagcacacagaaugccauugacaagauuaccaacaaaguaaauucuguuauugaaaagaugaauacacaguucacagcaguagguaaagaguucaaccaccuggaaaaaagaauagagaauuuaaauaaaaaaguugaugaugguuuccuggacauuuggacuuacaaugccgaacuguugguucuauuggaaaaugaaagaacuuuggacuaccacgauucaaaugugaagaacuuauaugaaaagguaagaagccaguuaaaaaacaaugccaaggaaauuggaaacggcugcuuugaauuuuaccacaaaugcgauaacacgugcauggaaagugucaaaaaugggacuuaugacuacccaaaauacucagaggaagcaaaauuaaacagagaagaaauagaugggguaaagcuggaaucaacaaggauuuaccagauuuuggcgaucuauucaacugucgccaguucauugguacugguagucucccugggggcaaucaguuucuggaugugcucuaaugggucucuacaguguagaauauguauuuaa

SEQ ID NO: 37781 - RNA, 1701 nt, Artificial Sequence; identical to SEQ ID NO: 36848
  derived and/or modified CDS sequence (wt) from hemagglutinin__InfluenzaA__ADM32881

SEQ ID NO: 37782 - RNA, 1701 nt, Artificial Sequence
  derived and/or modified CDS sequence (wt) from hemagglutinin__InfluenzaA__ADM32929
augaaggcaauacuaguaguucugcuauauacauuugcaaccgcaaaugcagacacauuauguauagguuaucaugcgaacaauucaacagacacuguagacacaguacuagaaaagaauguaacaguaacacacucuguuaaccuucuagaagacaagcauaacgggaaacuaugcaaacuaagagggguagccccauugcauuuggguaaauguaacauugcuggcuggauccugggaaauccagagugugaaucacucuccacagcaagcucaugguccuacauuguggaaacaucuaguucagacaauggaacguguuacccaggagauuucaucgauuaugaggagcuaagagagcaauugagcucagugucaucauuugaaagguuugagauauuccccaagacaaguucauggcccaaucaugacucgaacaaagguguaacggcagcauguccucaugcuggagcaaaaagcuucuacaaaaauuuaauauggcuaguuaaaaaaggaaauucauacccaaagcucagcaaauccuacauuaaugauaaagggaaagaaguccucgugcuauggggcauucaccauccaucuacuagugcugaccaacaaagucucuaucagaaugcagaugcauauguuuuuguggggacaucaagauacagcaagaaguucaagccggaaauagcaauaagacccaaagugagggaucaagaagggagaaugaacuauuacuggacacuaguagagccgggagacaaaauaacauucgaagcaacuggaaaucuagugguaccgagauaugcauucgcaauggaaagaaaugcuggaucugguauuaucauuucagauacaccaguccacgauugcaauacaacuugucagacacccaagggugcuauaaacaccagccucccauuucagaauauacauccgaucacaauuggaaaauguccaaaauauguaaaaagcacaaaauugagacuggccacaggauugaggaaugucccgucuauucaaucuagaggccuauuuggggccauugccgguuucauugaagggggguggacagggaugguagauggaugguacgguuaucaccaucaaaaugagcaggggucaggauaugcagccgaccugaagagcacacagaaugccauugacaagauuacuaacaaaguaaauucuguuauugaaaagaugaauacacaguucacagcaguagguaaagaguucaaccaccuggaaaaaagaauagagaauuuaaauaaaaaaguugaugaugguuuccuggacauuuggacuuacaaugccgaacuguugguucuauuggaaaaugaaagaacuuuggacuaccacgauucaaaugugaagaacuuauaugaaaagguaagaagccaguuaaaaaacaaugccaaggaaauuggaaacggcugcuuugaauuuuaccacaaaugcgauaacacgugcauggaaagugucaaaaaugggacuuaugacuacccaaaauacucagaggaagcaaaauuaaacagagaagaaauagaugggguaaagcuggaaucaacaaggauuuaccagauuuuggcgaucuauucaacugucgccaguucauugguacugguagucucccugggggcaaucaguuucuggaugugcucuaaugggucucuacgcuguagaauauguauuuaa

SEQ ID NO: 37783 - RNA, 1701 nt, Artificial Sequence
  derived and/or modified CDS sequence (wt) from hemagglutinin__InfluenzaA__ADM32939
auggaggcaauacuaguaguucugcuauauacauuugcaaccgcaaaugcagacacauuauguauagguuaucaugcgaacaauucaacagacacuguagacacaguacuagaaaagaauguaacaguaacacacucuguuaaccuucuagaagacaagcauaacgggaaauuaugcaaacuaagagggguagccccauugcauuuggguaaauguaacauugcuggcuggauccugggaaauccagagugugaaucacucuccacagcaagcucaugguccuacauuguggaaacaucuaguucagacaauggaacguguuacccaggagauuucaucgauuaugaggagcuaagagagcaacugagcucagugucaucauuugaaagguuugagauauuccccaagacaaguucauggcccaaucaugacucgaacaaagguguaacggcagcauguccucaugcuggagcaaaaagcuucuacaaaaauuuaauauggcuaguuaaaaaaggaaauucauacccaaagcucagcaaauccuacauuaaugauaaagggaaagaaguccucgugcuauggggcauucaccauccaucuacuagugcugaccaacaaagucucuaucagaaugcagaugcauauguuuuuguggggucaucaagauacagcaagaaguucaagccggaaauagcaauaagacccaaagugagggaucaagaagggagaaugaacuauuacuggacacuaguagagccgggagacaaaauaacauucgaagcaacuggaaaucuagugguaccgagauaugcauucgcaauggaaagaaaugcuggaucugguauuaucauuucagauacaccaguccacgauugcaauacaacuugucagacacccaagggugcuauaaacaccagccucccauuucauaauauacauccgaucacaauuggaaaauguccaaaauauguaaaaagcacaaaauugagacuggccacaggauugaggaauaucccgucuauucaaucuagaggccuauuuggggccauugccgguuucauugaagggggguggacagggaugguagauggaugguacgguuaucaccaucaaaaugagcaggggucaggauaugcagccgaccugaagagcacacagaaugccauugacgagauuacuaacaaaguaaauucuguuauugaaaagaugaauacacaguucacagcaguagguaaagaguucaaccaccuggaaaaaagaauagagaauuuaaauaaaaaaguugaugaugguuuccuggacauuuggacuuacaaugccgaacuguugguucuauuggaaaaugaaagaacuuuggacuaccacgauucaaaugugaagaacuuauaugaaaagguaagaagccaguuaaaaaacaaugccaaggaaauuggaaacggcugcuuugaauuuuaccacaaaugcgauaacacgugcauggaaagugucaaaaaugggacuuaugacuacccaaaauacucagaggaagcaaaauuaaacagagaagaaauagaugggguaaagcuggaaucaacaaggauuuaccagauuuuggcgaucuauucaacugucgccaguucauugguacugguagucucccugggggcaaucaguuucuggaugugcucuaaugggucucuacgcuguagaauauguauuuaa

SEQ ID NO: 37784 - RNA, 1701 nt, Artificial Sequence
  derived and/or modified CDS sequence (wt) from hemagglutinin__InfluenzaA__ADM32949
augaaggcaauacuaguaguucugcuauauacauuugcaaccgcaaaugcagacacauuauguauagguuaucaugcgaacaauucaacagacacuguagacacaguacuagaaaagaauguaacaguaacacacucuguuaaccuucuagaagacaagcauaacgggaaacuaugcaaacuaagagggguagccccauugcauuuggguaaauguaacauugcuggcuggauccugggaaauccagagugugaaucacucuccacagcaagcucaugguccuacauuguggaaacaucuaguucagacaauggaacguguuacccaggagauuucaucgauuaugaggagcuaagagagcaauugagcucagugucaucauuugaaagguuugagauauuccccaagacaaguucauggcccaaucaugacucgaacaaagguguaacggcagcauguccucaugcuggagcaaaaagcuucuacaaaaauuuaauauggcuaguuaaaaaaggaaauucauacccaaagcucagcaaauccuacauuaaugauaaagggaaagaaguccucgugcuauggggcauucaccauccaucuacuagugcugaccaacaaagucuuuaucagaaugcagaugcauauguuuuuguggggacaucaagauacagcaagaaguucaagccggaaauagcaauaagacccaaagugagggaucaagaagggagaaugaacuauuacuggacacuaguagagccgggagacaaaauaacauucgaagcaacuggaaaucuagugguaccgagauaugcauucgcaauggaaagaaaugcuggaucugguauuaucauuucagauacaccgguccacgauugcaauacaacuugucagacacccaauggugcuauaaacaccagccucccauuucagaauauacauccgaucacaauuggaaaauguccaaaauauguaaaaagcacaaaauugagacuggccacaggauugaggaauaucccgucuauucaaucuagaggccuauuuggggccauugccgguuucauugaagggggguggacagggaugguagauggaugguacgguuaucaccaucaaaacgagcaggggucaggauaugcagccgaccugaagagcacacagaaugccauugacgagaucacuaacaaaguaaauucuguuauugaaaagaugaauacacaguucacagcaguagguaaagaguucaaccaccuggaaaaaagaauagagaauuuaaauaaaaaaguugaugaugguuuccuggacauuuggacuuacaaugccgaacuguugguucuauuggaaaaugaaagaacuuuggacuaccacgauucaaaugugaagaacuuauaugaaaagguaagaagccaguuaaaaaacaaugccaaggaaauuggaaacggcugcuuugaauuuuaccacaaaugcgauaacacgugcauggaaagugucaaaaaugggacuuaugacuacccaaaauacucagaggaagcaaaauuaaacagagaagaaauagaugggguaaagcuggaaucaacaaggauuuaccagauuuuggcgaucuauucaacugucgccaguucauugguacugguagucucccugggggcaaucaguuucuggaugugcucuaaugggucucuacgcuguagaauauguauuuaa

SEQ ID NO: 37785 - RNA, 1701 nt, Artificial Sequence
  derived and/or modified CDS sequence (wt) from hemagglutinin__InfluenzaA__ADM32958
augaaggcaauacuaguauuucugcuauauacauuugcaaccgcaaaugcagacacauuauguauagguuaucaugcgaacaauucaacagacacuguagacacaguacuagaaaagaauguaacaguaacacacucuguuaacauucuagaagacaagcauaacgggaaacuaugcaaacuaagagggguagccccauugcauuuggguaaauguaacauugcuggcuggauccugggaaauccagagugugaaucacucuccacagcaagcucaugguccuacauuguggaaacaucuaguucagacaauggaacguguuacccaggagauuucaucgauuaugaggagcuaagagagcaauugagcucagugucaucauuugaaagguuugagauauuccccaagacaaguucauggcccaaucaugacucgaacaaagguguaacggcagcauguccucaugcuggagcaaaaagcuucuacaaaaauuuaauuuggcuaguuaaaaaaggaaauucauacccaaagcucagcaaauccuacauuaaugauaaagggaaagaaguccucgugcuauggggcauucaccauccaucuacuagugcugaccaacaaagucucuaucagaaugcagaugcauauguuuuuguggagucaucaagauacagcaagaaguucaagccggaaauagcaauuagacccaaagugagggaucaagaagggagaaugaacuauuacuggacacuaguagagccgggagacaaaauaacauucgaagcaacuggaaaucuagugguaccaagauaugcauucgcaauggaaagaaaugcuggaucugguauuaucauuucagauacaccaguccaugauugcaauacaacuugucagacacccaagggugcuauaaacaccagccucccauuucagaauauacauccgaucacaauuggaaaauguccaaaauauguaaaaagcacaaaauugagacuggccacaggauugaggaaugucccgucuauucaaucuagaggccuauuuggggccauugccgguuucauugaagggggguggacagggaugguagauggaugguacgguuaucaccaucaaaaugagcaggggucaggauaugcagccgaccugaagagcacacagaaugccauugacgagauuacuaacaaaguaaauucuguuauugaaaagaugaauacacaguucacagcaguagguaaagaguucaaccaccuggaaaaaagacuagagaauuuaaauaaaaaaguugaugaugguuuccuggacauuuggacuuacaaugccgaacuguugguucuauuggaaaaugaaagaacuuuggacuaccacgauucaaaugugaagaacuuauaugaaaagguaagaagccagcuaaaaaacaaugccaaggaaguuggaaacggcugcuuugaauuuuaccacaaaugcgauaacacgugcauggaaagugucaaaaaugggacuuaugacuacccaaaauacucagaggaagcaaaauuaaacagagaagaaauagaugggguaaagcuggaaucaacaaggauuuaccagauuuuggcgaucuauucaacugccgccaguucauugguacugguagucucccugggggcaaucaguuucuggaugugcucuaaugggucucuacgcuguagaauauguauuuaa

SEQ ID NO: 37786 - RNA, 1701 nt, Artificial Sequence
  derived and/or modified CDS sequence (wt) from hemagglutinin__InfluenzaA__ADM32977
augaaggcaauacuaguaguucugcuauguacauuugcaaccgcaaaugcagacacauuauguauagguuaucaugcgaacaauucaacagacacuguagacacaguacuagaaaagaaugucacagugacacacucuguuaaccuucuagaagacaagcauaacgggaaacuaugcaaacuaagagggguagccccauugcauuuggguaaauguaacauugcuggcuggauccugggaaauccagagugugaaucacucuccacagcaagcucaugguccuacauuguggaaacaucuaguucagacaauggaacguguuacccaggagauuucaucgauuaugaggagcuaagagagcaauugagcucagugucaucauuugaaagguuugagauauuccccaagacaaguucauggcccaaucaugacucgaacaaagguguaacggcagcauguccucaugcuggagcaaaaagcuucuacaaaaauuuaauauggcuaguuaaaaaaggaaauucauacccaaagcucagcaaauccuacauuaaugauaaagggaaagaaguccucgugcuauggggcauucaccauccaucuacuagugcugaccaacaaagucucuaucagaaugcagaugcauauguuuuuguggggacaucaaaauacagcaagaaguucaagccggaaauagcaauaagacccaaagugagggaucaagaagggagaaugaacuauuacuggacacuaguagagccgggagacaaaauaacauucgaagcaacuggaaaucuagugguaccgagauaugcauucgcaauggaaagaaaugcuggaucugguauuaucauuucagauacaccaguccacgauugcaauacaacuugucagacacccaagggugcuauaaacaccagccucccauuucagaauauacauccgaucacaauuggaaaauguccaaaauauguaaaaagcacaaaauugagacuggccacaggauugaggaaugucccgucuauucaaucuagaggccuauuuggggccauugccgguuucauugaagggggguggacagggaugguagauggaugguacgguuaucaccaucaaaaugagcaggggucaggauaugcagccgaccugaagagcacacagaaugccauugacgggauuacuaacaaaauaaauucuguuauugaaaagaugaauacacaguucacagcaguagguaaagaguucaaccaccuggaaaaaagaauagagaauuuaaauaaaaaaguugaugaugguuuccuggacauuuggacuuacaaugccgaacuguugguucuauuggaaaaugaaagaacuuuggacuaccacgauucaaaugugaagaacuuauaugaaaagguaagaagccaguuaaaaaacaaugccaaggaaauuggaaacggcugcuuugaauuuuaccacaaaugcgauaacacgugcauggaaagugucaaaaaugggacuuaugacuacccaaaauacucagaggaagcaaaauuaaacagagaagaaauagaugggguaaagcuggaaucaacaaggauuuaccagauuuuggcgaucuauucaacugucgccaguucauugguacugguagucucccugggggcaaucaguuucuggaugugcucuaaugggucucuacgcuguagaauauguauuuaa

SEQ ID NO: 37787 - RNA, 1701 nt, Artificial Sequence
  derived and/or modified CDS sequence (wt) from hemagglutinin__InfluenzaA__ADM32986
augaaggcaauacuaguaguucugcuauauacauuugcaaccgcaaaugcagacacauuauguauagguuaucaugcgaacaauucaacagacacuguagacacaguacuagaaaagaaugucacagugacacacucuguuaaccuucuagaagacaagcauaacgggaaacuaugcaaacuaagagggguagccccauugcauuuggguaaauguaacauugcuggcuggauccugggaaauccagagugugaaucacucuccacagcaagcucaugguccuacauuguggaaacaucuaguucagacaauggaacguguuacccaggagauuucaucgauuaugaggagcuaagagagcaauugagcucagugucaucauuugaaagguuugagauauuccccaagacaaauucauggcccaaucaugacucgaacaaagguguaacggcagcauguccucaugcuggagcaaaaagcuucuacaaaaauuuaauauggcuaguuaaaaaaggaaauucauacccaaagcucagcaaauccuacauuaaugauaaagggaaagaaguccucgugcuauggggcauucaccauccaucuacuagugcugaccaacaaagucucuaucagaaugcagaugcauauguuuuuguggggacaucaaaauacagcaagaaguucaagccggaaauagcaauaagacccaaagugagggaucaagaagggagaaugaacuauuacuggacacuaguagagccgggagacaaaauaacauucgaagcaacuggaaaucuagugguaccgagauaugcauucgcaauggaaagaaaugcuggaucugguauuaucauuucagauacaccaguccacgauugcaauacaacuugucagacacccaagggugcuauaaacaccagccucccauuucagaauauacauccgaucacaauuggaaaauguccaaaauauguaaaaagcacaaaauugagacuggccacaggauugaggaaugucccgucuauucaaucuagaggccuauuuggggccauugccgguuucauugaagggggguggacagggaugguagauggaugguacgguuaucaccaucaaaaugagcaggggucaggauaugcagccgaccugaagagcacacagaaugccauugacgggauuacuaacaaaauaaauucuguuauugaaaagaugaauacacaguucacagcaguagguaaagaguucaaccaccuggaaaaaagaauagagaauuuaaauaaaaaaguugaugaugguuuccuggacauuuggacuuacaaugccgaacuguugguucuauuggaaaaugaaagaacuuugaacuaccacgauucaaaugugaagaacuuauaugaaaagguaagaagccaguuaaaaaacaaugccaaggaaauuggaaacggcugcuuugaauuuuaccacaaaugcgauaacacgugcauggaaagugucaaaaaugggacuuaugacuacccaaaauacucagaggaagcaaaauuaaacagagaagaaauagaugggguaaagcuggaaucaacaaggauuuaccagauuuuggcgaucuauucaacugucgccaguucauugguacugguagucucccugggggcaaucaguuucuggaugugcucuaaugggucucuacgcuguagaauauguauuuaa

SEQ ID NO: 37788 - RNA, 1701 nt, Artificial Sequence
  derived and/or modified CDS sequence (wt) from hemagglutinin__InfluenzaA__ADM32995
augaaggcaauacuaguaguucugcuauauacauuugcaaccgcaaaugcagacacauuauguauagguuaucaugcgaacaauucaacagacacuguagacacaguacuagaaaagaaugucacagugacacacucuguuaaccuucuagaagacaagcauaacgggaaacuaugcaaacuaagagggguagccccauugcauuuggguaaauguaacauugcuggcuggauccugggaaauccagagugugaaucacucuccacagcaagcucaugguccuacauuguggaaacaucuaguucagacaauggaacguguuacccaggagauuucaucgauuaugaggagcuaagagagcaauugagcucagugucaucauuugaaagguuugagauauuccccaagacaaauucauggcccaaucaugacucgaacaaagguguaacggcagcauguccucaugcuggagcaaaaagcuucuacaaaaauuuaauauggcuaguuaaaaaaggaaauucauacccaaagcucagcaaauccuacauuaaugauaaagggaaagaaguccucgugcuauggggcauucaccauccaucuacuagugcugaccaacaaagucucuaucagaaugcagaugcauauguuuuuguggggacaucaaaauacaguaagaaguucaagccggaaauagcaauaagacccaaagugagggaucaagaagggagaaugaacuauuacuggacacuaguagagccgggagacaaaauaacauucgaagcaacuggaaaucuagugguaccgagauaugcauucgcaauggaaagaaaugcuggaucugguauuaucauuucagauacaccaguccacgauugcaauacaacuugucagacacccaagggugcuauaaacaccagccucccauuucagaauauacauccgaucacaauuggaaaauguccaaaauauguaaaaagcacaaaauugagacuggccacgggauugaggaaugucccgucuauucaaucuagaggccuauuuggggccauugccgguuucauugaagggggguggacagggaugguagauggaugguacgguuaucaccaucaaaaugagcaggggucaggauaugcagccgaccugaagagcacacagaaugccauugacgggauuacuaacaaaauaaauucuguuauugaaaagaugaauacacaguucacagcaguagguaaagaguucaaccaccuggaaaaaagaauagagaauuuaaauaaaaaaguugaugaugguuuccuggacauuuggacuuacaaugccgaacuguugguucuauuggaaaaugaaagaacuuuggacuaccacgauucaaaugugaagaacuuauaugaaaagguaagaagccaguuaaaaaacaaugccaaggaaauuggaaacggcugcuuugaauuuuaccacaaaugcgauaacacgugcauggaaagugucaaaaaugggacuuaugacuacccaaaauacucagaggaagcaaaauuaaacagagaagaaauagaugggguaaagcuggaaucaacaaggauuuaccagauuuuggcgaucuauucaacugucgccaguucauugguacugguagucucccugggggcaaucaguuucuggaugugcucuaaugggucucuacgcuguagaauauguauuuaa

SEQ ID NO: 37789 - RNA, 1701 nt, Artificial Sequence; identical to SEQ ID NO: 35789
  derived and/or modified CDS sequence (wt) from hemagglutinin__InfluenzaA__ADM33004

SEQ ID NO: 37790 - RNA, 1701 nt, Artificial Sequence
  derived and/or modified CDS sequence (wt) from hemagglutinin__InfluenzaA__ADM33023
augaaggcaauacuaguaguucugcuauauacauuugcaaccgcaaaugcagacacauuauguauagguuaucaugcgaacaauucaacagacacuguagacacaguacuagaaaagaauguaacaguaacacacucuguuaaccuucuagaagacaagcauaacgggaaacuaugcaaacuaagagggguagccccauugcauuuggguaaauguaacauugcuggcuggauccugggaaauccagagugugaaucacucuccacagcaagcucaugguccuacauuguggaaacaucuaguucagacaauggaacguguuacccaggagauuucaucgauuaugaggagcuaagagagcaauugagcucagugucaucauuugaaagguuugagauauuccccaagacaaguucauggcccaaucaugacucaaacaaagguguaacggcagcauguccucaugcuggagcaaaaagcuucuacaaaaauuuaauauggcuaguuaaaaaaggaaauucauacccaaagcucagcaaauccuacauuaaugauaaagggaaagaaguccucgugcuauggggcauucaccauccaucuacuagugcugaccaacaaagucucuaucagaaugcagaugcauauguuuuuguggggacaucaagauacagcaagaaguucaagccggaaauagcaauaagacccaaagugagggaucaagaagggagaaugaacuauuacuggacacuaguagagccgggagacaaaauaacauucgaagcaacuggaaaucuagugguaccgagauaugcauucgcaauggaaagaaaugcuggaucugguaucaucauuucagauacaccaguccacgauugcaauacaacuugucagacacccaagggugcuauaaacaccagccucccauuucagaauauacauccgaucacaauuggaaaauguccaaaauauguaaaaagcacaaaauugagacuggccacaggauugaggaaugucccgucuauucaaucuagaggccuauuuggggccauugccgguuucauugaagggggguggacagggaugguagauggaugguacgguuaucaccaucaaaaugagcaggggucaggauaugcagccgaccugaagagcacacagaaugccauugacgagauuacuaacaaaguaaauucuguuauugaaaagaugaauacacaguucacagcaguagguaaagaguucaaccaccuggaaaaaagaauagagaauuuaaauaaaaagguugaugaugguuuccuggacauuuggacuuacaaugccgaacuguugguucuauuggaaaaugaaagaacuuuggacuaccacgauucaaaugugaagaacuuauaugaaaagguaagaagccaguuaaaaaacaaugccaaggaaauuggaaacggcugcuuugaauuuuaccacaaaugcgauaacacgugcauggaaagugucaaaaaugggacuuaugacuacccaaaauacucagaggaagcaaaauuaaacagagaagaaauagaugggguaaagcuggaaucaacaaggauuuaccagauuuuggcgaucuauucaacugucgccaguucauugguacugguagucucccugggggcaaucaguuucuggaugugcucuaaugggucucuacaguguagaauauguauuuaa

SEQ ID NO: 37791 - RNA, 1701 nt, Artificial Sequence
  derived and/or modified CDS sequence (wt) from hemagglutinin__InfluenzaA__ADM33040
augaaggcaauacuaguaguucugcuauauacauuugcaaccgcaaaugcagacacauuauguauagguuaucaugcgaacaauucaacagacacuguagacacaguacuagaaaagaauguaacaguaacacacucuguuaaccuucuagaagacaagcauaacgggaaacuaugcaaacuaagagggguagccccauugcauuuggguaaauguaacauugcuggcuggauccugggaaauccagagugugaaucacucuccacagcaagcucaugguccuacauuguggaaacaucuaguucagacaauggaacguguuacccaggagauuucaucgauuaugaggagcuaagagagcaauugagcucagugucaucauuugaaagguuugagauauuccccaagacaaguucauggcccaaucaugacucgaacaaagguguaacggcagcauguccucaugcuggagcaaaaagcuucuacaaaaauuuaauauggcuaguuaaaaaaggaaauucauacccaaagcucagcaaauccuacauuaaugauaaagggaaagaaguccucgugcuauggggcauucaccauccaucuacuagugcugaccaacaaagucucuaucagaaugcagaugcauauguuuuuguggggucaucaagauacagcaagaaguucaagccggaaauagcaauaagacccaaagugagggaucaagaagggagaaugaacuauuacuggacacuaguagagccgggagacaaaauaacauucgaagcaacuggaaaucuagugguaccgagauaugcauucgcaauggaaagaaaugcuggaucugguauuaucauuucagauacaccaguccacgauugcaauacaacuugucagacacccaagggugcuauaaacaccagccucccauuucagaauauacauccgaucacaauuggaaaauguccaaaauauguaaaaagcacaaaauugagacuggccacaggauugaggaaugucccgucuauucaaucuagaggccuauuuggggccauugccgguuucauugaagggggguggacagggaugguagauggaugguacgguuaucaccaucaaaaugagcaggggucaggauaugcagccgaccugaagagcacacagaaugccauugacgagauuacuaacaaaguaaauucuguuauugaaaagaugaauacacaguucacagcaguagguaaagaguucaaccaccuggaaaaaagaauagagaauuuaaauaaaaaaguugaugaugguuuccuggacauuuggacuuacaaugccgaacuguugguucuauuggaaaaugaaagaacuuuggacuaccacgauucaaaugugaagaacuuauaugaaaagguaagaagccaguuaaaaaacaaugccaaggaaauuggaaacggcugcuuugaauuuuaccacaaaugcgauaacacgugcauggaaagugucaaaaaugggacuuaugacuacccaaaauacucagaggaagcaaaauuaaacagagaagaaauagaugggguaaagcuggaaucaacaaggauuuaccagauuuuggcgaucuauucaacugucgccaguucauugguacugguagucucccugggggcaaucaguuucuggaugugcucuaaugggucucuacgcuguagaauauguauuuaa

SEQ ID NO: 37792 - RNA, 1701 nt, Artificial Sequence
  derived and/or modified CDS sequence (wt) from hemagglutinin__InfluenzaA__ADM33050
augaaggcaauacuaguaguucugcuauauacauuugcaaccgcaaaugcagacacauuauguauagguuaucaugcgaacaauucaacagacacuguagacacaguacuagaaaagaauguaacaguaacacacucuguuaaccuucuagaagacaagcauaacgggaaacuaugcaaacuaagagggguagccccauugcauuuggguaaauguaacauugcuggcuggauccugggaaauccagagugugaaucacucuccacagcaagcucaugguccuacauuguggaaacaucuaguucagacaauggaacguguuacccaggagauuucaucgauuaugaggagcuaagagagcaauugagcucagugucaucauuugaaagguuugagauauuccccaagacaaguucauggcccaaucaugacucgaacaaagguguaacggcagcauguccucaugcuggagcaaaaagcuucuacaaaaauuuaauauggcuaguuaaaaaaggaaauucauacccaaagcucaacaaauccuacauuaaugauaaagggaaagaaguccucgugcuauggggcauucaccauccaucuacuagugcugaccaacaaagucucuaucagaaugcagaugcauauguuuuuguggggacaucaagauacagcaagaaguucaagccggaaauagcaauaagacccaaagugagggaucaagaagggagaaugaacuauuacuggacacuaguagagccgggagacaaaauaacauucgaagcaacuggaaaucuauugguaccgagauaugcauucgcaauggaaagaaaugcuggaucugguauuaucauuucagauacaccaguccacgauugcaauacaacuugucagacacccaagggugcuauaaacaccagccucccauuucagaauauacauccgaucacaauuggaaaguguccaaaauauguaaaaagcacaaaauugagacuggccacaggauugaggaaugucccgucuauucaaucuagaggccuauuuggggccauugccgguuucauugaagggggguggacagggaugguagauggaugguacgguuaucaccaucaaaaugagcaggggucaggauaugcagccgaccugaagagcacacagaaugccauugacgagaucacuaacaaaguaaauucuguuauugaaaagaugaauacacaguucacagcaguagguaaagaguucaaccaccuggaaaaaagaauagagaauuuaaauaaaaaaguugaugaugguuuccuggacauuuggacuuacaaugccgaacuguugguucuauuggaaaaugaaagaacuuuggacuaccacgauucaaaugugaagaacuuauaugaaaagguaagaagccaguuaaaaaacaaugccaaggaaauuggaaacggcugcuuugaauuuuaucacaaaugcgauaacacgugcauggaaagugucaaaaaugggacuuaugacuacccaaaauacucagaggaagcaaaauuaaacagagaagaaauagaugggguaaagcuggaaucaacaaggauuuaccagauuuuggcgaucuauucaacugucgccaguucauugguacugguagucucccugggggcaaucaguuucuggaugugcucuaaugggucucuacgcuguagaauauguauuuaa

SEQ ID NO: 37793 - RNA, 1701 nt, Artificial Sequence
  derived and/or modified CDS sequence (wt) from hemagglutinin__InfluenzaA__ADM33069
augaaggcaauacuaguaguucugcuauauacauuugcaaccgcaaaugcagacacauuauguauagguuaucaugcgaacaauucaacagacacuguagacacaguacuagaaaagaauguaacaguaacacacucuguuaaccuucuagaagacaagcauaacgggaaacuaugcaaacuaagagggguagccccauugcauuuggguaaauguaacauugcuggcuggauccugggaaauccagagugugaaucacucuccacagcaagcucaugguccuacauuguggaaacaucuaguucagacaauggaacguguuacccaggagauuucaucgauuaugaggagcuaagagagcaauugagcucagugucaucauuugaaagguuugagauauuccccaagacaaguucauggcccaaucaugacucgaacaaagguguaacggcagcauguccucaugcuggagcaaaaagcuucuacaaaaauuuaauauggcuaguuaaaaaaggaaauucauacccaaagcucagcaaauccuacauuaaugauaaagggaaagaaguccucgugcuauggggcauucaccauccaucuacuagugcugaccaacaaagucucuaucagaaugcagaugcauauguuuuuguggggacaucaagauacagcaagaaguucaagccggaaauagcuauaagacccaaagugagagaucaagaagggagaaugaacuauuacuggacacuaguagagccgggagacaaaauaacauucgaagcaacuggaaaucuagugguaccgagauaugcauucgcaauggaaagaaaugcuggaucugguauuaucauuucagauacaccaguccacgauugcaauacaacuugucagacacccgagggugcuauaaacaccagccucccauuucagaauauacauccgaucacaauuggaaaauguccaaaauauguaaaaagcacaaaauugagacuggccacaggauugaggaaugucccgucuauucaaucuagaggccuauuuggggccauugccgguuucauugaagggggguggacagggaugguagauggaugguacgguuaucaccaucaaaaugagcaggggucaggauaugcagccgaccugaagagcacgcagaaugccauugacgagauuacuaacaaaguaaauucuguuauugaaaagaugaauacacaguucacagcaguagguaaagaguucaaccaccuggaaaaaagaauagagaauuuaaauaaaaaaguugaugaugguuuccuggacauuuggacuuacaaugccgaacuguugguucuauuggaaaaugaaagaacuuuggacuaccacgauucaaaugugaagaacuuauaugaaaagguaagaagccaguuaaaaaacaaugccaaggaaauuggaaacggcugcuuugaauuuuaccacaaaugcgauaacacgugcauggaaagugucaaaaaugggacuuaugacuacccaaaauacucagaggaagcaaaauuaaacagagaagaaauagaugggguaaagcuggaaucaacaaggauuuaccagauuuuggcgaucuauucaacugucgccaguucauugguacugguagucucccugggggcaaucaguuucuggaugugcucuaaugggucucuacgcuguagaauauguauuuaa

SEQ ID NO: 37794 - RNA, 1701 nt, Artificial Sequence
  derived and/or modified CDS sequence (wt) from hemagglutinin__InfluenzaA__ADM33079
augaaggcaauacuaguaguucugcuauauacauuugcaaccgcaaaugcagacacauuauguauagguuaucaugcgaacaauucaacagacacuguagacacaguacuagaaaagaauguaacaguaacacacucuguuaaccuucuagaagacaagcauaacgggaaacuaugcaaacuaagagggguagccccauugcauuuggguaaauguaacauugcuggcuggauccugggaaauccagagugugaaucacucuccacagcaagcucaugguccuacauuguggaaacaucuaguucagacaauggaacguguuacccaggagauuucaucgauuaugaggagcuaagagaacaauugagcucagugucaucauuugaaagguuugagauauuccccaagacaaguucauggcccaaucaugacucgaacaaagguguaacggcagcauguccucaugcuggagcaaaaagcuucuacaaaaauuuaauauggcuaguuaaaaaaggaaauucauacccaaagcucagcaaauccuacauuaaugauaaagggaaagaaguccucgugcuauggggcauucaccauccaucuacuagugcugaccaacaaagucucuaucagaaugcagaugcauauguuuuuguggggacaucaagauacagcaagaaguucaagccggaaauagcaauaagacccaaagugagggaucaagaagggagaaugaacuauuacuggacacuaguagagccgggagacaaaauaacauucgaagcaacuggaaaucuagugguaccgagauaugcauucgcaauggaaagaaaugcuggaucugguauuaucauuucagauacaccaguccacgauugcaauacaacuugucagacacccaagggugcuauaaacaccagccucccauuucagaauauacauccgauuacaauuggaaaauguccaaaauauguaaaaagcacaaaauugagacuggccacaggauugaggaaugucccgucuauucaaucuagaggccuauuuggggccauugccgguuucauugaagggggguggacagggaugguagauggaugguacgguuaucaccaucaaaaugagcaggggucaggauaugcagccgaccugaagagcacacagaaugccauugacgagauuacuaacaaaguaaauucuguuauugaaaagaugaauacacaguucacagcaguagguaaagaguucaaccaccuggaaaaaagaauagagaauuuaaauaaaaaaguugaugaugguuuccuggacauuuggacuuacaaugccgaacuguugguucuauuggaaaaugaaagaacuuuggacuaccacgauucaaaugugaagaacuuauaugaaaagguaagaagccaguuaaaaaacaaugccaaggaaauuggaaacggcugcuuugaauuuuaccacaaaugcgauaacacgugcauggaaagugucaaaaaugggacuuaugacuacccaaaauacucagaggaagcaaaauuaaacagagaagaaauagaugggguaaagcuggaaucaacaaggauuuaccagauuuuggcgaucuauucaacugucgccaguucauugguacugguagucucccugggggcaaucaguuucuggaugugcucuaaugggucucuacgcuguagaauauguauuuaa

SEQ ID NO: 37795 - RNA, 1701 nt, Artificial Sequence
  derived and/or modified CDS sequence (wt) from hemagglutinin__InfluenzaA__ADM33099
augaaggcaauacuaguaguucugcuauauacauuugcaaccgcaaaugcagacacauuauguauagguuaucaugcgaacaauucaacagacacuguagacacaguacuagaaaagaauguaacaguaacacacucuguuaaccuucuagaagacaagcauaacgggaaacuaugcaaacuaagagggguagccccauugcauuuggguaaauguaacauugcuggcuggauccugggaaauccagagugugaaucacucuccacagcaagcucaugguccuacauuguggaaacaucuaguucagacaauggaacguguuacccaggagauuucaucgauuaugaggagcuaagagagcaauugagcucagugucaucauuugaaagguuugagauauuccccaagacaaguucauggcccaaucaugacucgaacaaagguguaacggcagcauguccucaugcuggagcaaaaagcuucuacaaaaauuuaauauggcuaguuaaaaaaggaaauucauacccaaagcuaagcaaauccuacauuaaugauaaagggaaagaaguccucgugcuauggggcauucaccauccaucuacuagugcugaccaacaaagucucuaucagaaugcagaugcauauguuuuuguggggacaucaagauacagcaagaaguucaagccggaaauagcaauaagacccaaagugagggaucaagaagggagaaugaacuauuacuggacacuaguagagccgggagacaaaauaaccuucgaagcaacuggaaaucuaaugguaccgagauaugcauucgcaauggaaagaaaugcuggaucugguauuaucauuucagauacaccaguccacgauugcaauacaacuugucagacacccaagggugcuauaaacacuagccucccauuucagaauauacauccgaucacaauuggaaaauguccaaaauauguaaaaagcacaaaauugagacuggccacaggauugaggaaugucccgucuauucaaucuagaggccuauuuggggccauugccgguuucauugaagggggguggacagggaugguagauggaugguacgguuaucaccaucaaaaugagcaggggucaggauaugcagccgaccugaagagcacacagaaugccauugacgagauuacuaacaaaguaaauucuguuauugaaaagaugaauacacaguucacagcaguagguaaagaguucaaccaccuggaaaaaagaauagagaauuuaaauaaaaaaguugaugaugguuuccuggacauuuggacuuacaaugccgaacuguugguucuauuggaaaaugaaagaacuuuggacuaccacgauucaaaugugaagaacuuauaugaaaagguaagaagccaguuaaaaaacaaugccaaggaaauuggaaacggcugcuuugaauuuuaccacaaaugcgauaacacgugcauggaaagugucaaaaaugggacuuaugacuacccaaaauacucagaggaagcaaaauuaaacagagaagaaauagaugggguaaagcuggaaucaacaaggauuuaccagauuuuggcgaucuauucaacugucgccaguucauugguacugguagucucccugggggcaaucaguuucuggaugugcucuaaugggucucuacgcuguagaauauguauuuaa

SEQ ID NO: 37796 - RNA, 1701 nt, Artificial Sequence; identical to SEQ ID NO: 37795
  derived and/or modified CDS sequence (wt) from hemagglutinin__InfluenzaA__ADM33109

SEQ ID NO: 37797 - RNA, 1701 nt, Artificial Sequence
  derived and/or modified CDS sequence (wt) from hemagglutinin__InfluenzaA__ADM33128
augaaggcaauacuaguaguucugcuauauacauuugcaaccgcaaaugcagacacauuauguauagguuaucaugcgaacaauucaacagacacuguagacacaguacuagaaaagaauguaacaguaacacacucuguuaaccuucuagaagacaagcauaacgggaaacuaugcaaacuaagagggguagccccauugcauuuggguaaauguaacauugcuggcuggauccugggaaauccagagugugaaucacuuuccacagcaagcucaugguccuacauuguggaaacaucuaguucagacaauggaacguguuacccaggagauuucaucgauuaugaggagcuaagagagcaauugagcucagugucaucauuugaaagguuugagauauuccccaagacaaguucauggcccaaucaugacucgaacaaagguguaacggcagcauguccucaugcuggagcaaaaagcuucuacaaaaauuuaauauggcuaguuaaaaaaggaaauucauacccaaagcucagcaaauccuacauuaaugauaaagggaaagaaguccucgugcuauggggcauucaccauccaucuacuagugcugaccaacaaagucucuaucagaaugcagaugcauauguuuuuguggggacaucaagauacagcaagaaguucaagccggaaauagcaauaagacccaaagugagggaacaagaagggagaaugaacuauuacuggacacuaguagagccgggagacaaaauaacauucgaagcaacuggaaaucuagugguaccgagauaugcauucgcaauggaaagaaaugcuggaucugguauuaucauuucagauacaccaguccacgauugcaauacaacuugucagacacccaagggugcuauaaacaccagccucccauuucagaauauacauccgaucacaauuggaaaauguccaaaauauguaaaaagcacaaaauugagacuggccacaggauugaggaaugucccgucuauucaaucuagaggccuauuuggggccauugccgguuucauugaagggggguggacagggaugguagauggaugguacgguuaucaccaucaaaaugagcaggggucaggauaugcagccgaccugaagagcacacagaaugccauugacgagauuacuaacaaaguaaauucuguuauugaaaagaugaauacacaguucacagcaguagguaaagaguucaaccaccuggaaaaaagaauagagaauuuaaauaaaaaaguugaugaugguuuccuggacauuuggacuuacaaugccgaacuguugguucuauuggaaaaugaaagaacuuuggacuaccacgauucaaaugugaagaacuuauaugaaaagguaagaagccaguuaaaaaacaaugccaaggaaauuggaaacggcugcuuugaauuuuaccacaaaugcgauaacacgugcauggaaagugucaaaaaugggacuuaugacuacccaaaauacucagaggaagcaaaauuaaacagagaagaaauagaugggguaaagcuggaaucaacaaggaucuaccagauuuuggcgaucuauucaacugucgccaguucauugguacugguagucucccugggggcaaucaguuucuggaugugcucuaaugggucucuacgcuguagaauauguauuuaa

SEQ ID NO: 37798 - RNA, 1701 nt, Artificial Sequence; identical to SEQ ID NO: 37797
  derived and/or modified CDS sequence (wt) from hemagglutinin__InfluenzaA__ADM33137

SEQ ID NO: 37799 - RNA, 1701 nt, Artificial Sequence; identical to SEQ ID NO: 37797
  derived and/or modified CDS sequence (wt) from hemagglutinin__InfluenzaA__ADM33147

SEQ ID NO: 37800 - RNA, 1701 nt, Artificial Sequence; identical to SEQ ID NO: 37797
  derived and/or modified CDS sequence (wt) from hemagglutinin__InfluenzaA__ADM33157

SEQ ID NO: 37801 - RNA, 1701 nt, Artificial Sequence
  derived and/or modified CDS sequence (wt) from hemagglutinin__InfluenzaA__ADM33167
augaaggcaauacuaguaguucugcuauauacauuugcaaccgcaaaugcagacacauuauguauagguuaucaugcgaacaauucaacagacacuguagacacaguacuagaaaagaauguaacaguaacacacucuguuaacauucuagaagacaagcauaacgggaaacuaugcaaacuaagagggguagccccauugcauuuggguaaauguaacauugcuggcuggauccugggaaauccagagugugaaucacucuccacagcaagcucaugguccuacauuguggaaacaucuaguucagacaauggaacguguuacccaggagauuucaucgauuaugaggagcuaagagagcaauugagcucagugucaucauuugaaagguuugagauauuccccaagacaaguucauggcccaaucaugacucgaacaaagguguaacggcagcauguccucaugcuggagcaaaaagcuucuacaaaaauuuaauauggcuaguuaaaaaaggaaauucauacccaaagcucagcaaauccuacauuaaugauaaagggaaagaaguccucgugcuauggggcauucaccauccaucuacuagugcugaccaacaaagucucuaucagaaugcagaugcauauguuuuuguggggacaucaagauacagcaagaaguucaagccggaaauagcaauaagacccaaagugagggaucaagaagggagaaugaacuauuacuggacacuaguagagccgggagacaaaauaacguucgaagcaacuggaaaucuagugguaccgagauaugcauucgcaauggaaagaaaugcuggaucugguauuaucauuucagauacaccaguccacgauugcaauacaacuugucagacacccaagggugcuauaaacaccagccucccauuucagaauauacauccgaucacaauuggaaaauguccaaaauauguaaaaagcacaaaauugagacuggccacaggauugaggaaugucccgucuauucaaucuagaggccuauuuggggccauugccgguuucauugaagggggguggacagggaugguagauggaugguacgguuaucaccaucaaaaugagcaggggucaggauaugcagccgaccugaagagcacacagaaugccauugacgagauuacuaacaaaguaaauucuguuauugaaaagaugaauacacaguucacagcaguagguaaagaguucaaccaccuggaaaaaagaauagagaauuuaaauaaaaaaguugaugaugguuuccuggacauuuggacuuacaaugccgaacuguugguucuauuggaaaaugaaagaacuuuggacuaccacgauucaaaugugaagaacuuauaugaaaagguaagaagccaguuaaaaaacaaugccaaggaaauuggaaacggcugcuuugaauuuuaccacaaaugcgauaacacgugcauggaaagugucaaaaaugggacuuaugacuaccccaaauacucagaggaagcaaaauuaaacagagaaaaaauagaugggguaaagcuggaaucaacaaggauuuaccagauuuuggcgaucuauucaacugucgccaguucauugguacugguagucucccugggggcaaucaguuucuggaugugcucuaaugggucucuacgcuguagaauauguauuuaa

SEQ ID NO: 37802 - RNA, 1701 nt, Artificial Sequence
  derived and/or modified CDS sequence (wt) from hemagglutinin__InfluenzaA__ADM33177
augaaggcaauacuaguaguucugcuauauacauuugcaaccgcaaaugcagacacauuauguauagguuaucaugcgaacaauucaacagacacuguagacacaguacuagaaaagaauguaacaguaacacacucuguuaacauucuagaagacaagcauaacgggaaacuaugcaaacuaagagggguagccccauugcauuuggguaaauguaacauugcuggcuggauccugggaaauccagagugugaaucacucuccacagcaagcucaugguccuacauuguggaaacaucuaguucagacaauggaacguguuacccaggagauuucaucgauuaugaggagcuaagagagcaauugagcucagugucaucauuugaaagguuugagauauuccccaagacaaguucauggcccaaucaugacucgaacaaagguguaacggcagcauguccucaugcuggagcaaaaagcuucuacaaaaauuuaauauggcuaguuaaaaaaggaaauucauacccaaagcucagcaaauccuacauuaaugauaaagggaaagaaguccucgugcuauggggcauucaccauccaucuacuagugcugaccaacaaagucucuaucagaaugcagaugcauauguuuuuguggggacaucaagauacagcaagaaguucaagccggaaauagcaauaagacccaaagugagggaucaagaagggagaaugaacuauuacuggacacuaguagagccgggagacaaaauaacguucgaagcaacuggaaaucuagugguaccgagauaugcauucgcaauggaaagaaaugcuggaucugguauuaucauuucagauacaccaguccacgauugcaauacaacuugucagacacccaagggugcuauaaacaccagccucccauuucagaauauacauccgaucacaauuggaaaauguccaaaauauguaaaaagcacaaaauugagacuggccacaggauugaggaaugucccgucuauucaaucuagaggccuauuuggggccauugccgguuucauugaagggggguggacagggaugguagauggaugguacgguuaucaccaucaaaaugagcaggggucaggauaugcagccgaccugaagagcacacagaaugccauugacgagauuacuaacaaaguaaauucuguuauugaaaagaugaauacacaguucacagcaguagguaaagaguucaaccaccuggaaaaaagaauagagaauuuaaauaaaaaaguugaugaugguuuccuggacauuuggacuuacaaugccgaacuguugguucuauuggaaaaugaaagaacuuuggacuaccacgauucaaaugugaagaacuuauaugaaaagguaagaagccaguuaaaaaacaaugccaaggaaauuggaaacggcugcuuugaauuuuaccacaaaugcgauaacacgugcauggaaagugucaaaaaugggacuuaugacuaccccaaauacucagaggaagcaaaauuaaacagagaaaaaauagaugggguaaagcuggaaucaacaaggauuuaccagauuuuggcgaucuauucaacugucgccaguucauugguacugguagucucccugggggcaaucaguuucuggaugugcucuaaugggucucuacagugcagaauauguauuuaa

SEQ ID NO: 37803 - RNA, 1701 nt, Artificial Sequence; identical to SEQ ID NO: 37797
  derived and/or modified CDS sequence (wt) from hemagglutinin__InfluenzaA__ADM33186

SEQ ID NO: 37804 - RNA, 1701 nt, Artificial Sequence; identical to SEQ ID NO: 37797
  derived and/or modified CDS sequence (wt) from hemagglutinin__InfluenzaA__ADM33195

SEQ ID NO: 37805 - RNA, 1701 nt, Artificial Sequence
  derived and/or modified CDS sequence (wt) from hemagglutinin__InfluenzaA__ADM33204
augaaggcaauacuaguaguucugcuauauacauuugcaaccgcaaaugcagacacauuauguauagguuaucaugcgaacaauucaacagacacuguagacacaguacuagaaaagaauguaacaguaacacacucuguuaaccuucuagaagacaagcauaacgggaaacuaugcaaacuaagagggguagccccauugcauuuggguaaauguaacauugcuggcuggauccugggaaauccagagugugaaucacucuccacagcaagcucaugguccuacauuguggaaacaucuaguucagacaauggaacguguuacccaggagauuucaucgauuaugaggagcuaagagagcaauugagcucagugucaucauuugaaagguuugagauauuccccaagacaaguucauggcccaaucaugacucgaacaaagguguaacggcagcauguccucaugcuggagcaaaaagcuucuacaaaaauuuaauauggcuaguuaaaaaaggaaauucauacccaaagcucagcaaauccuacauuaaugauaaagggaaagaaguccucgugcuauggggcauucaccauccaucuacuagugcugaccaacaaagucucuaucagaaugcagaugcauauguuuuuguggggacaucaagauacagcaagaaguucaagccggaaauagcaauaagacccaaagugagggaucaagaagggagaaugaacuauuacuggacacuaguagagccgggagacaaaauaacauucgaagcaacuggaaaucuagugguaccgagauaugcauucgcaauggaaagaaaugcuggaucugguauuaucauuucagauacaccaguccacgauugcaauacaacuugucagacacccaagggugcuauaaacaccagccucccauuucagaauauacauccgaucacaauuggaaaauguccaaaauauguaaaaagcacaaaauugagacuggccacaggauugaggaaugucccgucuauucaaucuagaggccuauuuggggccauugccgguuucauugaagggggguggacagggaugguagauggaugguacgguuaucaccaucaaaaugagcaggggucaggauaugcagccgaccugaagagcacacagaaugccauugacgagauuacuaacaaaguaaauucuguuauugaaaagaugaauacacaguucacagcaguagguaaagaguucaaccaccuggaaaaaagaauagagaauuuaaauaaaaaaguugaugaugguuuccuggacauuuggacuuacaaugccgaacuguugguucuauuggaaaaugaaagaacuuuggacuaccacgauucaaaugugaagaacuuauaugaaaagguaagaagccaguuaaaaaacaaugccaaggaaauuggaaacggcugcuuugaauuuuaccacaaaugcgauaacacgugcauggaaagugucaaaaaugggacuuaugacuacccaaaauacucagaggaagcaaaauuaaacagagaagaaauagaugggguaaagcuggaaucaacaaggauuuaccagauuuuggcgaucuauucaacugucgccaguucauugguacugguagucucccugggggcaaucaguuucuggaugugcucuaaugggucucuacgcuguagaauaugcauuuaa

SEQ ID NO: 37806 - RNA, 1701 nt, Artificial Sequence
  derived and/or modified CDS sequence (wt) from hemagglutinin__InfluenzaA__ADM33222
auggaggcaauacuaguaguucugcuauauacauuugcaaccgcaaaugcagacacauuauguauagguuaucaugcgaacaauucaacagacacuguagacacaguacuagaaaagaauguaacaguaacacacucuguuaaccuucuagaagacaagcauaacgggaaacuaugcaaacuaagagggguagccccauugcauuuggguaaauguaacauugcuggcuggauccugggaaauccagagugugaaucacucuccacagcaagcucaugguccuacauuguggaaacaucuaguucagacaauggaacguguuacccaggagauuucaucgauuaugaggagcuaagagagcaauugagcucagugucaucauuugaaagguuugagauauuccccaagacaaguucauggcccaaucaugacucgaacaaagguguaacggcagcauguccucaugcuggagcaaaaagcuucuacaaaaauuuaauauggcuaguuaaaaaaggaaauucauacccaaagcucagcaaauccuacauuaaugauaaagggaaagaaguccucgugcuauggggcauucaccauccaucuacuagugcugaccaacaaagucucuaucagaaugcagaugcauauguuuuuguggggucaucaagauacagcaagaaguucaagccggaaauagcaauaagacccaaagugagggaucaagaagggagaaugaacuauuacuggacacuaguagagccgggagacaaaauaacauucgaagcaacuggaaaucuagugguaccgagauaugcauucgcaauggaaagaaaugcuggaucugguauuaucauuucagauacaccaguccacgauugcaauacaacuugucagacacccaagggugcuauaaacaccagccucccauuucauaauauacauccgaucacaauuggaaaauguccaaaauauguaaaaagcacaaaauugagacuggccacaggauugaggaaugucccgucuauucaaucuagaggccuauuuggggccauugccgguuucauugaagggggguggacagggaugguagauggaugguacgguuaucaccaucaaaaugagcaggggucaggauaugcagccgaccugaagagcacacagaaugccauugacgagauuacuaacaaaguaaauucuguuauugaaaagaugaauacacaguucacagcaguagguaaagaguucaaccaccuggaaaaaagaauagagaauuuaaauaaaaaaguugaugaugguuuccuggacauuuggacuuacaaugccgaacuguugguucuauuggaaaaugaaagaacuuuggacuaccacgauucaaaugugaagaacuuauaugaaaagguaagaaaccaguuaaaaaacaaugccaaggaaauuggaaacggcugcuuugaauuuuaccacaaaugcgauaacacgugcauggaaagugucaaaaaugggacuuaugacuacccaaaauacucagaggaagcaaaauuaaacagagaagaaauagaugggguaaagcuggaaucaacaaggauuuaccagauuuuggcgaucuauucaacugucgccaguucauugguacugguagucucccugggggcaaucaguuucuggaugugcucuaaugggucucuacgcuguagaauauguauuuaa

SEQ ID NO: 37807 - RNA, 1701 nt, Artificial Sequence
  derived and/or modified CDS sequence (wt) from hemagglutinin__InfluenzaA__ADM33232
auggaggcaauacuaguaguucugcuauauacauuugcaaccgcaaaugcagacacauuauguauagguuaucaugcgaacaauucaacagacacuguagacacaguacuagaaaagaauguaacaguaacacacucuguuaaccuucuagaagacaagcauaacgggaaacuaugcaaacuaagagggguagccccauugcauuuggguaaauguaacauugcuggcuggauccugggaaauccagagugugaaucacucuccacagcaagcucaugguccuacauuguggaaacaucuaguucagacaauggaacguguuacccaggagauuucaucgauuaugaggagcuaagagagcaauugagcucagugucaucauuugaaagguuugagauauuccccaagacaaguucauggcccaaucaugacucgaacaaagguguaacggcagcauguccucaugcuggagcaaaaagcuucuacaaaaauuuaauauggcuaguuaaaaaaggaaauucauacccaaagcucagcaaauccuacauuaaugauaaagggaaagaaguccucgugcuauggggcauucaccauccaucuacuagugcugaccaacaaagucucuaucagaaugcagaugcauauguuuuuguggggucaucaagauacagcaagaaguucaagccggaaauagcaauaagacccaaagugagggaucaagaagggagaaugaacuauuacuggacacuaguagagccgggagacaaaauaacauucgaagcaacuggaaaucuagugguaccgagauaugcauucgcaauggaaagaaaugcuggaucugguauuaucauuucagauacaccaguccacgauugcaauacaacuugucagacacccaagggugcuauaaacaccagccucccauuucauaauauacauccgaucacaauuggaaaauguccaaaauauguaaaaagcacaaaauugagacuggccacaggauugaggaaugucccgucuauucaaucuagaggccuauuuggggccauugccgguuucauugaagggggguggacagggaugguagauggaugguacgguuaucaccaucaaaaugagcaggggucaggauaugcagccgaccugaagagcacacagaaugccauugacgagauuacuaacaaaguaaauucuguuauugaaaagacgaauacacaguucacagcaguagguaaagaguucaaccaccuggaaaaaagaauagagaauuuaaauaaaaaaguugaugaugguuuccuggacauuuggacuuacaaugccgaacuguugguucuauuggaaaaugaaagaacuuuggacuaccacgauucaaaugugaagaacuuauaugaaaagguaagaaaccaguuaaaaaacaaugccaaggaaauuggaaacggcugcuuugaauuuuaccacaaaugcgauaacacgugcauggaaagugucaaaaaugggacuuaugacuacccaaaauacucagaggaagcaaaauuaaacagagaagaaauagaugggguaaagcuggaaucaacaaggauuuaccagauuuuggcgaucuauucaacugucgccaguucauugguacugguagucucccugggggcaaucaguuucuggaugugcucuaaugggucucuacaguguagaauauguauuuaa

SEQ ID NO: 37808 - RNA, 1701 nt, Artificial Sequence
  derived and/or modified CDS sequence (wt) from hemagglutinin__InfluenzaA__ADM33241
augaaggcaauacuaguaguucugcuauauacauuugcaaccgcaaaugcagacacauuauguauagguuaucaugcgaacaauucaacagacacuguagacacaguacuagaaaagaauguaacaguaacacacucuguuaacauucuagaagacaagcauaacgggaaacuaugcaaacuaagagggguagccccauugcauuuggguaaaugcaacauugcuggcuggauccugggaaauccagagugugaaucacucuccacagcaagcucaugguccuacauuguggaaacaucuaguucagacaauggaacguguuacccaggagauuucaucgauuaugaggagcuaagagagcaauugagcucagugucaucauuugaaagguuugagauauuccccaagacaaguucauggcccaaucaugacucgaacaaagguguaacggcagcauguccucaugcuggagcaaaaagcuucuacaaaaauuuaauauggcuaguuaaaaaagaaaauucauacccaaagcucagcaaauccuacauuaaugauaaagggaaagaaguccucgugcuauggggcauucaccauccaucuacuagugcugaccaacaaagucucuaucagaaugcagaugcauauguuuuuguggggucaucaagauacagcaagaaguucaagccggaaauaacaauaagacccaaagugagggaucaagaagggagaaugaacuauuacuggacacuaguagagccgggagacaaaauaacauucgaagcaacuggaaaucuagugguaccgagauaugcauucgcaauggaaagaaaugcuggaucugguauuaucauuucagauacaccaguccacgauugcaauacaacuugucagacacccaagggugcuauaaacaccagccucccauuucagaauauacauccgaucacaauuggaaaauguccaaaauauguaaaaagcacaaaauugagacuggccacaggauugaggaaugucccgucuauucaaucuagaggccuauuuggggccauugccgguuucauugaagggggguggacagggaugguagauggaugguacgguuaucaccaucaaaaugagcaggggucaggauaugcagccgaccugaagagcacacagaaugccauugacgagauuacuaacaaaguaaauucuguuauugaaaagaugaauacacaguucacagcaguagguaaagaguucaaccaccuggaaaaaagaauagagaauuuaaauaaaaaaguugaugaugguuuccuggacauuuggacuuacaaugccgaacuguugguucuauuggaaaaugaaagaacuuuggacuaccacgauucaaaugugaagaacuuauaugaaaagguaagaagccagcuaaaaaacaaugccaaggaaauuggaaacggcugcuuugaauuuuaccacaaaugcgauaacacgugcauggaaagugucaaaaaugggacuuaugacuacccaaaauacucagaggaagcaaaauuaaacagagaagaaauagaugggguaaagcuggaaucaacaaggauuuaccagauuuuggcgaucuauucaacugucgccaguucauugguacugguagucucccugggggcaaucaguuucuggaugugcucuaaugggucucuacgcuguagaauauguauuuaa

SEQ ID NO: 37809 - RNA, 1701 nt, Artificial Sequence; identical to SEQ ID NO: 37806
  derived and/or modified CDS sequence (wt) from hemagglutinin__InfluenzaA__ADM33251

SEQ ID NO: 37810 - RNA, 1701 nt, Artificial Sequence
  derived and/or modified CDS sequence (wt) from hemagglutinin__InfluenzaA__ADM33260
augaaggcaauacuaguaguucugcuauauacauuugcaaccgcaaaugcagacacauuauguauagguuaucaugcgaacaauucaacagacacuguagacacaguacuagaaaagaauguaacaguaacacacucuguuaacauucuagaagacaagcauaacgggaaacuaugcaaacuaagagggguagccccauugcauuuggguaaaugcaacauugcuggcuggauccugggaaauccagagugugaaucacucuccacagcaagcucaugguccuacauuguggaaacaucuaguucagacaauggaacguguuacccaggagauuucaucgauuaugaggagcuaagagagcaauugagcucagugucaucauuugaaagguuugagauauuccccaagacaaguucauggcccaaucaugacucgaacaaagguguaacggcagcauguccucaugcuggagcaaaaagcuucuacaaaaauuuaauauggcuaguuaaaaaaggagauucauacccaaagcucagcaaauccuacauuaaugauaaagggaaagaaguccucgugcuauggggcauucaccauccaucuacuagugcugaccaacaaagucucuaucagaaugcagaugcauauguuuuuguggggucaucaagauacagcaagaaguucaagccggaaauagcaauaagacccaaagugagggaucaagaagggagaaugaacuauuacuggacacuaguagagccgggagacaaaauaacauucgaagcaacuggaaaucuagugguaccgagauaugcauucgcaauggaaagaaaugcuggaucugguauuaucauuucagauacaccaguccacgauugcaauacaacuugucagacacccaagggugcuauaaacaccagccucccauuucagaauauacauccgaucacaauuggaaaauguccaaaauauguaaaaagcacaaaauugagacuggccacaggauugaggaaugucccgucuauucaaucuagaggccuauuuggggccauugccgguuucauugaagggggguggacagggaugguagauggaugguacgguuaucaccaucaaaaugagcaggggucaggauaugcagccgaccugaagagcacacagaaugccauugacgagauuacuaacaaaguaaauucuguuauugaaaagaugaauacacaguucacagcaguagguaaagaguucaaccaccuggaaaaaagaauagagaauuuaaauaaaaaaguugaugaugguuuccuggacauuuggacuuacaauaccgaacuguugguucuauuggaaaaugaaagaacuuuggacuaccacgauucaaaugugaagaacuuauaugaaaagguaagaagccagcuaaaaaacaaugccaaggaaauuggaaacggcugcuuugaauuuuaccacaaaugcgauaacacgugcauggaaagugucaaaaaugggacuuaugacuacccaaaauacucagaggaagcaaaauuaaacagagaagaaauagaugggguaaagcuggaaucaacaaggauuuaccagauuuuggcgaucuauucaacugucgccaguucauugguacugguagucucccugggggcaaucaguuucuggaugugcucuaaugggucucuacgcuguagaauauguauuuaa

SEQ ID NO: 37811 - RNA, 1701 nt, Artificial Sequence
  derived and/or modified CDS sequence (wt) from hemagglutinin__InfluenzaA__ADM33280
augaaggcaauacuaguaguucugcuauauacauuugcaaccgcaaaugcagacacauuauguauagguuaucaugcgaacaauucaacagacacuguagacacaguacuagaaaagaauguaacaguaacacacucuguuaacauucuagaagacaagcauaacgggaaacuaugcaaacuaagagggguagccccauugcauuuggguaaauguaacauugcuggcuggauccugggaaauccagagugugaaucacucuccacaguaagcucaugguccuacauuguggaaacaucuaguucagacaauggaacguguuacccaggagauuucaucgauuaugaggagcuaagagagcaauugagcucagugucaucauuugaaagguuugagauauuccccaagacaaguucauggcccaaucaugacucgaacaaagguguaacggcagcauguccucaugcuggagcaaaaagcuucuacaaaaauuuaauauggcuaguuaaaaaaggaaauucauacccaaagcucagcaaauccuacauuaaugauaaagggaaagaaguccucgugcuauggggcauucaccauccaucuacuagugcugaccaacaaagucucuaucagaaugcagaugcauauguuuucguggggucaucaagauacagcaagaaguucaagccggaaauagcaauaagacccaaagugagggaucaagaagggagaaugaacuauuacuggacacuaguagagccgggagacaaaauaacauucgaagcaacuggaaaucuagugguaccgagauaugcauucgcaauggaaagaaaugcuggaucugguauuaucauuucagauacaccaguccacgauugcaauacaacuugucagacacccaggggugcuauaaacaccagccucccauuucagaauauacauccgaucacaauuggaaaauguccaaaauauguaaaaagcacaaaauugagacuggccacaggauugaggaaugucccgucuauucaaucuagaggccuauuuggggccauugccgguuucauugaagggggguggacagggaugguagauggaugguacgguuaucaccaucaaaaugagcaggggucaggauaugcagccgaccugaagagcacacagaaugccauugacgagauuacuaacaaaguaaauucuguuauugaaaagaugaauacacaguucacagcaguagguaaagaguucaaccaccuggaaaaaagaauagagaauuuaaauaaaaaaguugaugaugguuuccuggacauuuggacuuacaaugccgaacuguugguucuauuggaaaaugaaagaacuuuggacuaccacgauucaaaugugaagaacuuauaugaaaagguaagaagccagcuaaaaaacaaugccaaggaaauuggaaacggcugcuuugaauuuuaccacaaaugcgauaacacgugcauggaaagugucaaaaaugggacuuaugacuacccaaaauacucagaggaagcaaaauuaaacagagaagaaauagaugggguaaagcuggaaucaacaaggauuuaccagauuuuggcgauuuauucaacugucgccaguucauugguacugguagucucccugggggcaaucaguuucuggaugugcucuaaugggucucuacaguguagaauauguauuuaa

SEQ ID NO: 37812 - RNA, 1701 nt, Artificial Sequence
  derived and/or modified CDS sequence (wt) from hemagglutinin__InfluenzaA__ADM33290
augaaggcaauacuaguaguucugcuauauacauuugcaaccgcaaaugcagacacauuauguauagguuaucaugcgaacaauucaacagacacuguagacacaguacuagaaaagaauguaacaguaacacacucuguuaaccuucuagaagacaagcauaacgggaaacuaugcaaacuaagagggguagccccauugcauuuggguaaauguaacauugcuggcuggauccugggaaauccagagugugaaucacucuccacagcaagcucaugguccuacauuguggaaacaucuaguucagacaauggaacguguuacccaggagauuucaucgauuaugaggagcuaagagagcaauugagcucagugucaucauuugaaagguuugagauauuccccaagacaaguucauggcccaaucaugacucgaacaaagguguaacggcagcauguccucaugcuggagcaaagagcuucuacaaaaauuuaauauggcuaguuaaaaaaggaaauucauacccaaagcucagcaaauccuacauuaaugauaaagggaaagaaguccucgugcuauggggcauucaccauccaucuacuagugcugaccaacaaagucucuaucagaaugcagaugcauauguuuuuguggggacaucaagauacagcaagaaguucaagccggaaauagcaauaagacccaaagugagggaacaagaagggagaaugaacuauuacuggacacuaguagagccgggagacaaaauaacauucgaagcaacuggaaaucuagugguaccgagauaugcauucgcaauggaaagaaaugcuggaucugguauuaucauuucagauacaccaguccacgauugcaauacaacuugucagacacccaagggugcuauaaacaccagccucccauuucagaauauacauucgaucacaauuggaaaauguccaaaauauguaaaaagcacaaaauugagacuggccacaggauugaggaaugucccgucuauucaaucuagaggccuauuuggggccauugccgguuucauugaagggggguggacagggaugguagauggaugguacgguuaucaccaucaaaaugagcaggggucaggauaugcagccgaccugaagagcacacagaaugccauugacgagauuacuaacaaaguaaauucuguuauugaaaagaugaauacacaguucacagcaguagguaaagaguucaaccaccuggaaaaaagaauagagaauuuaaauaaaaaaguugaugaugguuuccuggacauuuggacuuacaaugccgaacuguugguucuauuggaaaaugaaagaacuuuggacuaccacgauucaaaugugaagaacuuauaugaaaagguaagaagccaguuaaaaaacaaugccaaggaaauuggaaacggcugcuuugaauuuuaccacaaaugcgauaacacgugcauggaaagugucaaaaaugggacuuaugacuacccaaaauacucagaggaagcaaaauuaaacagagaagaaauagaugggguaaagcuggaaucaacaaggauuuaccagauuuuggcgaucuauucaacugucgccaguucauugguacugguagucucccugggggcaaucaguuucuggaugugcucuaaugggucucuacaguguagaauauguauuuaa

SEQ ID NO: 37813 - RNA, 1701 nt, Artificial Sequence; identical to SEQ ID NO: 34681
  derived and/or modified CDS sequence (wt) from hemagglutinin__InfluenzaA__ADM33300

SEQ ID NO: 37814 - RNA, 1701 nt, Artificial Sequence
  derived and/or modified CDS sequence (wt) from hemagglutinin__InfluenzaA__ADM33310
augaaggcaauacuaguaguucugcuauauacauuugcaaccgcaaaugcagacacauuauguauagguuaucaugcgaacaauucaacagacacuguagacacaguacuagaaaagaauguaacaguaacacacucuguuaaccuucuagaagacaagcauaacgggaaacuaugcaaacuaagagggguagccccauugcauuuggguaaauguaacauugcuggcuggauccugggaaauccagagugugaaucacucuccacagcaagcucaugguccuacauuguggaaacaucuaguucagacaauggaacguguuacccaggagauuucaucgauuaugaggagcuaagagagcaauugagcucagugucaucauuugaaagguuugagauauuccccaagacaaguucauggcccaaucaugacucgaacaaagguguaacggcagcauguccucaugcuggagcaaaaagcuucuacaaaaauuuaauauggcuaguuaaaaaaggaaauucauacccaaagcucagcaaauccuacauuaaugauaaagggaaagaaguccucgugcuauggggcauucaccauccaucuacuagugcugaccaacaaagucucuaucagaaugcagaugcauauguuuuuguggggucaucaagauacagcaagaaguucaagccggaaauagcaauaagacccaaagugagggaucaagaagggagaaugaacuauuacuggacacuaguagagccgggagacaaaauaacauucgaagcaacuggaaaucuagugguaccgagauaugcauucgcaauggaaagaaaugcuggaucugguauuaucauuucagauacaccaguccacgauugcaauacaacuugucagacacccaagggugcuauaaacaccagccucccauuucagaauauacauccgaucacaauuggaaaauguccaaaauauguaaaaagcacaaaauugagacuggccacaggauugaggaaugucccgucuauucaaucgagaggccuauuuggggccauugccgguuucauugaagggggguggacagggaugguagauggaugguacgguuaucaccaucaaaaugagcaggggucaggauaugcagccgaccugaagagcacacagaaugccauugacgagauuacuaacaaaguaaauucuguuauugaaaagaugaauacacaguucacagcaguagguaaagaguucaaccaccuggaaaaaagaauagagaauuuaaauaaaaaaguugaugaugguuuccuggacauuuggacuuacaaugccgaacuguugguucuauuggaaaaugaaagaacuuuggacuaccacgauucaaaugugaagaacuuauaugaaaagguaagaagccagcuaaaaaacaaugccaaggaaauuggaaacggcugcuuugaauuuuaccacaaaugcgauaacacgugcauggaaagugucaaaaaugggacuuaugacuacccaaaauacucagaggaagcaaaauuaaacagagaagaaauagaugggguaaagcuggaaucaacaaggauuuaccagauuuuggcgaucuauucaacugucgccaguucauugguacugguagucucccugggggcaaucaguuucuggaugugcucuaaugggucucuacaguguagaauauguauuuaa

SEQ ID NO: 37815 - RNA, 1701 nt, Artificial Sequence
  derived and/or modified CDS sequence (wt) from hemagglutinin__InfluenzaA__ADM33320
augaaggcaauacuaguaguuaugcuauauacauuugcaaccgcaaaugcagacacauuauguauagguuaucaugcgaacaauucaacagacacuguagacacaguacuagaaaagaauguaacaguaacacacucuguuaaccuucuagaagacaagcauaacgggaaacuaugcaaacuaagagggguagccccauugcauuuggguaaauguaacauugcuggcuggauccugggaaauccagagugugaaucacucuccacagcaagcucaugguccuacauuguggaaacauuuaguucagacaauggaacguguuacccaggagauuucaucgauuaugaggagcuaagagagcaauugagcucagugucaucauuugaaagguuugagauauuccccaagacaaguucauggcccaaucaugacucgaacaaagguguaacggcagcauguccucaugcuggagcaaaaagcuucuacaaaaauuuaauauggcuaguuaaaaaaggaaauucauacccaaagcucagcaaauccuacauuaaugauaaagggaaagaaguccucgugcuauggggcauucaccauccaucuacuagugcugaccaacaaagucucuaucagaaugcagaugcauauguuuuuguggggucaucaagauacagcaagaaguucaagccggaaauagcaauaagacccaaagugagggaucaagaagggagaaugaacuauuacuggacacuaguagagccgggagacaaaauaacauucgaagcaacuggaaaucuagugguaccgagauaugcauucgcaauggaaagaaaugcuggaucugguauuaucauuucagauacaccaguccacgauugcaauacaacuugucagacacccaagggugcuauaaacaccagccucccauuucagaauauacauccgaucacaauuggaaaauguccaaaauauguaaaaagcacaaaauugagacuggccacaggauugaggaaugucccgucuauucaaucuagaggccuauuuggggccauugccgguuucauugaagggggguggacagggaugguagauggaugguacgguuaucaccaucaaaaugagcaggggucaggauaugcagccgaccugaagagcacacagaaugccauugacgagauuacuaacaaaguaaauucuguuauugaaaagaugaauacacaguucacagcaguagguaaagaguucaaccaccuggaaaaaagaauagagaauuuaaauaaaaaaguugaugaugguuuccuggacauuuggacuuacaaugccgaacuguugguucuauuggaaaaugaaagaacuuuggacuaccacgauucaaaugugaagaacuuauaugaaaagguaagaagccagcuaaaaaacaaugccaaggaaauuggaaacggcugcuuugaauuuuaccacaaaugcgauaacacgugcauggaaagugucaaaaaugggacuuaugacuacccaaaauacucagaggaagcaaaauuaaacagagaagaaauagaugggguaaagcuggaaucaacaaggauuuaccagauuuuggcgaucuauucaacugucgccaguucauugguacugguagucucccugggggcaaucaguuucuggaugugcucuaaugggucucuacaguguagaauauguauuuaa

SEQ ID NO: 37816 - RNA, 1701 nt, Artificial Sequence; identical to SEQ ID NO: 34922
  derived and/or modified CDS sequence (wt) from hemagglutinin__InfluenzaA__ADM33340

SEQ ID NO: 37817 - RNA, 1701 nt, Artificial Sequence
  derived and/or modified CDS sequence (wt) from hemagglutinin__InfluenzaA__ADM33355
augaaggcaauacuaguaguuaugcuauauacauuugcaaccgcaaaugcagacacauuauguauagguuaucaugcgaacaauucaacagacacuguagacacaguacuagaaaagaauguaacaguaacacacucuguuaaccuucuagaagacaagcauaacgggaaacuaugcaaacuaagagggguagccccauugcauuuggguaaauguaacauugcuggcuggauccugggaaauccagagugugaaucacucuccacagcaagcucaugguccuacauuguggaaacaucuaguucagacaauggaacguguuacccaggagauuucaucgauuaugaggagcuaagagagcaauugagcucagugucaucauuugaaagguuugagauauuccccaagacaaguucauggcccaaucaugacucgaacaaagguguaacggcagcauguccucaugcuggagcaaaaagcuucuacaaaaauuuaauauggcuaguuaaaaaaggaaauucauacccaaagcucagcaaauccuacauuaaugauaaagggaaagaaguccucgugcuauggggcauucaccauccaucuacuagugcugaccaacaaagucucuaucagaaugcagaugcauauguuuuuguggggucaucaagauacagcaagaaguucaagccggaaauagcaauaagacccaaagugagggaucaagaagggagaaugaacuauuacuggacacuaguagagccgggagacaaaauaacauucgaagcaacuggaaaucuagugguaccgagauaugcauucgcaauggaaagaaaugcuggaucugguauuaucauuucagauacaccaguccacaauugcaauacaacuugucagacacccaagggugcuauaaacaccagccucccauuucagaauauacauccgaucacaauuggaaaauguccaaaauauguaaaaagcacaaaauugagacuggccacaggauugaggaaugucccgucuauucaaucuagaggccuauuuggggccauugccgguuucauugaagggggguggacagggaugguagauggaugguacgguuaucaccaucaaaaugagcaggggucaggauaugcagccgaccugaagagcacacagaaugccauugacgagauuacuaacaaaguaaauucuguuauugaaaagaugaauacacaguucacagcaguagguaaagaguucaaccaccuggaaaaaagaauagagaauuuaaauaaaaaaguugaugaugguuuccuggacauuuggacuuacaaugccgaacuguugguucuauuggaaaaugaaagaacuuuggacuaccacgauucaaaugugaagaacuuauaugaaaagguaagaagccagcuaaaaaacaaugccaaggaaauuggaaacggcugcuuugaauuuuaccacaaaugcgauaacacgugcauggaaagugucaaaaaugggacuuaugacuacccaaaauacucagaggaagcaaaauuaaacagagaagaaauagaugggguaaagcuggaaucaacaaggauuuaccagauuuuggcgaucuauucaacugucgccaguucauugguacugguagucucccugggggcaaucaguuucuggaugugcucuaaugggucucuacaguguagaauauguauuuaa

SEQ ID NO: 37818 - RNA, 1701 nt, Artificial Sequence; identical to SEQ ID NO: 37817
  derived and/or modified CDS sequence (wt) from hemagglutinin__InfluenzaA__ADM33365

SEQ ID NO: 37819 - RNA, 1701 nt, Artificial Sequence; identical to SEQ ID NO: 34747
  derived and/or modified CDS sequence (wt) from hemagglutinin__InfluenzaA__ADM33375

SEQ ID NO: 37820 - RNA, 1701 nt, Artificial Sequence
  derived and/or modified CDS sequence (wt) from hemagglutinin__InfluenzaA__ADM33385
augaaggcaauacuaguaguuaugcuauauacauuugcaaccgcaaaugcagacacauuauguauagguuaucaugcgaacaauucaacagacacuguagacacaguacuagaaaagaauguaacaguaacacacucuguuaaccuucuagaagacaagcauaacgggaaacuaugcaaacuaagagggguagccccauugcauuuggguaaauguaacauugcuggcuggauccugggaaauccagagugugaaucacucuccacagcaagcucaugguccuacauuguggaaacaucuaguucagacaauggaacguguuacccaggagauuucaucgauuaugaggagcuaagagagcaauugagcucagugucaucauuugaaagguuugagauauuccccaagacaaguucauggcccaaucaugacucgaacaaagguguaacggcagcauguccucaugcuggagcaaaaagcuucuacaaaaauuuaauauggcuaguuaaaaaaggaaauucauacccaaagcucagcaaauccuacauuaaugauaaagggaaagaaguccucgugcuauggggcauucaccauccaucuacuagugcugaccaacaaagucucuaucagaaugcagaugcauauguuuuuguggggucaucaagauacagcaagaaguucaagccggaaauagcaauaagacccaaagugagggaucaagaagggagaaugaacuauuacuggacacuaguagagccgggagacaaaauaacauucgaagcaacuggaaaucuagugguaccgagauaugcauucgcaauggaaagaaaugcuggaucugguauuaucauuucagauacaccaguccacgauugcaauacaacuugucagacauccaagggugcuauaaacaccagccucccauuucagaauauacauccgaucacaauuggaaaauguccaaaauauguaaaaagcacaaaauugagacuggccacaggauugaggaaugucccgucuauucaaucuagaggccuauuuggggccauugccgguuucauugaagggggguggacagggaugguagauggaugguacgguuaucaccaucaaaaugagcaggggucaggauaugcagccgaccugaagagcacacagaaugccauugacgagauuacuaacaaaguaaauucuguuauugaaaagaugaauacacaguucacagcaguagguaaagaguucaaccaccuggaaaaaagaauagagaauuuaaauaaaaaaguugaugaugguuuccuggacauuuggacuuacaaugccgaacuguugguucuauuggaaaaugaaagaacuuuggacuaccacgauucaaaugugaagaacuuauaugaaaagguaagaagccagcuaaaaaacaaugccaaggaaauuggaaacggcugcuuugaauuuuaccacaaaugcgauaacacgugcauggaaagugucaaaaaugggacuuaugacuacccaaaauacucagaggaagcaaaauuaaacagagaagaaauagaugggguaaagcuggaaucaacaaggauuuaccagauuuuggcgaucuauucaacugucgccaguucauugguacugguagucucccugggggcaaucaguuucuggaugugcucuaaugggucucuacaguguagaauauguauuuaa

SEQ ID NO: 37821 - RNA, 1701 nt, Artificial Sequence; identical to SEQ ID NO: 35128
  derived and/or modified CDS sequence (wt) from hemagglutinin__InfluenzaA__ADM33395

SEQ ID NO: 37822 - RNA, 1701 nt, Artificial Sequence; identical to SEQ ID NO: 35128
  derived and/or modified CDS sequence (wt) from hemagglutinin__InfluenzaA__ADM33405

SEQ ID NO: 37823 - RNA, 1701 nt, Artificial Sequence; identical to SEQ ID NO: 37817
  derived and/or modified CDS sequence (wt) from hemagglutinin__InfluenzaA__ADM33415

SEQ ID NO: 37824 - RNA, 1701 nt, Artificial Sequence
  derived and/or modified CDS sequence (wt) from hemagglutinin__InfluenzaA__ADM33425
augaaggcaauacuaguaguucugcuauauacauuugcaaccgcaaaugcagacacauuauguauagguuaucaugcgaacaauucaacagacacuguagacacaguacuagaaaagaauguaacaguaacacacucuguuaaccuucuagaagacaagcauaacgggaaacuaugcaaacuaagagggguagccccauugcauuuggguaaauguaacauugcuggcuggauccugggaaauccagagugugaaucacucuccacagcaagcucaugguccuacauuguggaaacaucuaguucagacaauggaacguguuacccaggagauuucaucgauuaugaggagcuaagagagcaauugagcucagugucaucauuugaaagguuugagauauuccccaagacaaguucauggcccaaucaugacucgaacaaagguguaacggcagcauguccucaugcuggagcaaaaagcuucuacaaaaauuuaauauggcuaguuaaaaaaggaaauucauacccaaagcucagcaaauccuacauuaaugauaaagggaaagaaguccucgugcuauggggcauucaccauccaucuacuagugcugaccaacaaagucucuaucagaaugcagaugcauauguuuuuguggggucaucaagauacagcaagaaguucaagccggaaauagcaauaagacccaaagugagggaucaagaagggagaaugaacuauuacuggacacuaguagagccgggagacaaaauaacauucgaagcaacuggaaaucuagugguaccgagauaugcauucgcaauggaaagaaaugcuggaucugguauuaucauuucagauacaccaguccacgauugcaauacaacuugucagacacccaagggugcuauaaacaccagccucccauuucauaauauacauccgaucacaauuggaaaauguccaaaauauguaaaaagcacaaaauugagacuggccacaggauugaggaaugucccgucuauucaaucuagaggccuauuuggggccauugccgguuucauugaagggggguggacagggaugguagauggaugguacgguuaucaccaucaaaaugagcaggggucaggauaugcagccgaccugaagagcacacagaaugccauugacgagauuacuaacaaaguaaauucuguuauugaaaagaugaauacacaguucacagcaguagguaaagaguucaaccaccuggaaaaaagaauagagaauuuaaauaaaaaaguugaugaugguuuccuggacauuuggacuuacaaugccgaacuguugguucuauuggaaaaugaaagaacuuuggacuaccacgauucaaaugugaagaacuuauaugaaaagguaagaagccaguuaaaaaacaaugccaaggaaauuggaaacggcugcuuugaauuuuaccacaaaugcgauaacacgugcauggaaagugucaaaaaugggacuuaugacuacccaaaauacucagaggaagcaaaauuaaacagagaagaaauagaugggguaaagcuggaaucaacaaggauuuaccagauuuuggcgaucuauucaacugucgccaguucauugguacugguagucucccugggggcaaucaguuucuggaugugcucuaaugggucucuacaguguagaauauguauuuaa

SEQ ID NO: 37825 - RNA, 1701 nt, Artificial Sequence
  derived and/or modified CDS sequence (wt) from hemagglutinin__InfluenzaA__ADM34007
augaaggcaauacuaguaguucugcuauauacauuugcaaccgcaaaugcagacacauuauguauagguuaucaugcgaacaauucaacagacacuguagacacgguacuagaaaagaauguaacaguaacacacucuguuaaccuucuagaagacaagcauaacgggaaacuaugcaaacuaagagggguagccccauugcauuuggguaaauguaacauugcuggcuggauccugggaaauccagagugugaaucacucuccacagcaagcucaugguccuacauuguggaaacaucuaguucagacaauggaacguguuacccaggagauuucaucgauuaugaggagcuaagagagcaauugagcucagugucaucauuugaaagguuugagauauuccccaagacaaguucauggcccaaucaugacucgaacaaagguguaacggcagcauguccucaugcuggagcaaaaagcuucuacaaaaauuuaauauggcuaguuaaaaaaggaaauucauacccaaagcucagcaaauccuacauuaaugauaaagggaaagagguccucgugcuauggggcauucaccauccaucuacuagugcugaccaacaaagucucuaucagaaugcagaugcauauguuuuuguggggacaucaagauacagcaagaaguucaagccggaaauagcaauaagacccaaagugagggaucaagaagggagaaugaacuauuacuggacacuagaagagccgggagacaaaauaacauucgaagcaacuggaaaucuagugguaccgagauaugcauucgcaauggaaagaaaugcuggaucugguauuaucauuucagauacaccaguccacgauugcaauacaacuugucagacacccaagggugcuauaaacaccagccucccauuucagaauauacauccgaucacaauuggaaaauguccaaaauauguaaaaagcacaaaauugagacuggccacaggauugaggaaugucccgucuauucaaucuagaggccuauuuggggccauugccgguuucauugaagggggguggacagggaugguagauggaugguacgguuaucaccaucaaaaugagcaggggucaggauaugcagccgaccugaagagcacacagaaugccauugaugagauuaccaacaaaguaaauucuguuauugaaaagaugaauacacaguucacagcaguagguaaagaguucaaccaccuggaaaaaagaauagagaauuuaaauaaaaaaguugaugaugguuuccuggacauuuggacuuacaaugcugaacuguugguucuauuggaaaaugaaagaacuuuggacuaccacgauucaaaugugaagaacuuauaugaaaagguaagaagccaguuaaaaaacaaugccaaggaaauuggaaacggcugcuuugaauuuuaccacaaaugcgauaacacgugcauggaaagugucaaaaaugggacuuaugacuacccaaaauacucagaggaagcaaaauuaaacagagaagaaauagaugggguaaagcuggaaucaacaaggauuuaccagauuuuggcgaucuauucaacugucgccaguucauugguacugguagucucccugggggcaaucaguuucuggauguguucuaaugggucucuacaguguagaauauguauuuaa

SEQ ID NO: 37826 - RNA, 1701 nt, Artificial Sequence; identical to SEQ ID NO: 34681
  derived and/or modified CDS sequence (wt) from hemagglutinin__InfluenzaA__ADM52443

SEQ ID NO: 37827 - RNA, 1701 nt, Artificial Sequence
  derived and/or modified CDS sequence (wt) from hemagglutinin__InfluenzaA__ADM52453
augaaggcaauacuaguaguucugcuauauacauuugcaaccgcaaaugcagacacauuauguauagguuaucaugcgaacaauucaacagacacuguagacacaguacuagaaaagaauguaacaguaacacacucuguuaacauucuagaagacaagcauaacgggaaacuaugcaaacuaagagggguagccccauugcauuuggguaaauguaacauugccggcuggauccugggaaauccagagugugaaucacucuccacagcaagcucaugguccuacauuguggaaacaucuaguucagacaauggaacguguuacccaggagauuucaucgauuaugaggagcuaagagagcaauugagcucagugucaucauuugaaagguuugagauauuccccaagacaaguucauggcccaaucaugacucgaacaaagguguaacggcagcauguccucaugcuggagcaaaaagcuucuacaaaaauuuaauauggcuaguuaaaaaaggaaauucauacccaaagcucagcaaauccuacauuaaugauaaagggaaagaaguccucgugcuauggggcauucaccauccaucuacuagugcugaccaacaaagucucuaucagaaugcagaugcauauguuuuuguggggucaucaagauacagcaagaaguucaagccggaaauagcaauaagacccaaagugagggaucaagaagggagaaugaacuauuacuggacacuaguagagccgggagacaaaauaacauucgaagcaacuggaaaucuagugguaccgagauaugcauucgcaauggaaagaaaugcuggaucugguauuaucauuucagauacaccaauccacgauugcaauacaacuugucagacacccaagggugcuauaaacaccagccucccauuucagaauguacauccgaucacaauuggaaaauguccaaaauauguaaaaagcacaaaauugagacuggccacaggauugaggaaugucccgucuauucaaucuagaggccuauuuggggccauugccgguuucauugaagggggguggacagggaugguagauggaugguacgguuaucaccaucaaaaugagcaggggucaggauaugcagccgaccugaagagcacacagaaugccauugacgagauuacuaacaaaguaaauucuguuauugaaaagaugaauacacaguucacagcaguagguaaagaguucaaccaccuggaaaaaagaauagagaauuuaaauaaaaaaguugaugaugguuuccuggacauuuggacuuacaaugccgaacuguugguucuauuggaaaaugaaagaacuuuggacuaccacgauucaaaugugaagaacuuauaugaaaagguaagaagccagcuaaaaaacaaugccaaggaaauuggaaacggcugcuuugaauuuuaccacaaaugcgauaacacgugcauggaaagugucaaaaaugggacuuaugacuauccaaaauacucagaggaagcaaaauuaaacagagaagaaauagaugggguaaagcuggaaucaacaaggauuuaccagauuuuggcgaucuauucaacugucgccaguucauugguacugguagucucccugggggcaaucaguuucuggaugugcucuaaugggucucuacaguguagaauauguauuuaa

SEQ ID NO: 37828 - RNA, 1701 nt, Artificial Sequence
  derived and/or modified CDS sequence (wt) from hemagglutinin__InfluenzaA__ADM52473
augaaggcaauacuagcaguucugcuauauacauuugcaaccgcaaaugcagacacauuauguauagguuaucaugcgaacaauucaacagacacuguagacacaguacuagaaaagaauguaacaguaacacacucuguuaaccuucuagaagacaagcauaacgggaaacuaugcaaacuaagagggguagccccauugcauuuggguaaauguaacauugcuggcuggauccugggaaauccagagugugaaucacucuccacagcaagcucaugguccuacauuguggaaacaucuaguucaggcaauggaacguguuacccaggagauuucaucgauuaugaggagcuaagagagcaauugagcucagugucaucauuugaaagguuugagauauuccccaaaacaaguucauggcccaaucaugacucgaacaaagguguaacggcagcauguccucaugcuggagcaaaaagcuucuacaaaaauuuauuauggcuaguuaaaaaaggaaacucauacccaaagcucagcaaauccuacauuaaugauaaagggaaagaaguccucgugcuauggggcauucaccauccaucuacuagugcugaccaacaaagucucuaucagaaugcagaugcauauguuuuuguggggacaucaagauacagcaagaaguucaagccggaaauagcaauaagacccaaagugagggaucaagaagggagaaugaacuauuacuggacacuaguagggccgggagacaaaauaacauucgaagcaacuggaaaucuagugguaccgagauaugcauucgcaauggaaagaaaugcuggaucugguauuaucauuucagauacaccaguccacgauugcaauacaacuugucagacacccaagggugcuauaaacaccagccucccauuucagaauauacauccgaucacaauuggaaaauguccaaaauauguaaaaaguacaaaauugagacuggccacaggauugaggaaugucccgucuauucaaucuagaggccuauuuggggccauugccgguuucauugaagggggguggacagggaugguagauggaugguacgguuaucaccaucaaaaugagcaggggucaggauaugcagccgaccugaagagcacacagaaugccauugacgagauuacuaacaaaguaaauucuguuauugaaaagaugaauacacaguucacagcaguagguaaagaguucaaccaccuggaaaaaagaauagagaauuuaaauaaaaaaguugaugaugguuuccuggacauuuggacuuacaaugccgaacuguugguucuauuggaaaaugaaagaacuuuggacuaccacgauucaaaugugaagaacuuauaugaaaagguaagaagccaguuaaaaaacaaugccaaggaaauuggaaacggcugcuuugaauuuuaccacaaaugcgauaacacgugcauggaaagugucaaaaaugggacuuaugacuacccaaaauacucagaggaagcaaaauuaaacagagaagaaauagaugggguaaagcuggaaucaacaaggauuuaccagauuuuggcgaucuauucaacugucgccaguucauugguacugguagucucccugggggcaaucaguuucuggaugugcucuaaugggucucuacaguguagaauauguauuuaa

SEQ ID NO: 37829 - RNA, 1701 nt, Artificial Sequence; identical to SEQ ID NO: 36459
  derived and/or modified CDS sequence (wt) from hemagglutinin__InfluenzaA__ADM52483

SEQ ID NO: 37830 - RNA, 1701 nt, Artificial Sequence; identical to SEQ ID NO: 37737
  derived and/or modified CDS sequence (wt) from hemagglutinin__InfluenzaA__ADM52493

SEQ ID NO: 37831 - RNA, 1701 nt, Artificial Sequence; identical to SEQ ID NO: 35334
  derived and/or modified CDS sequence (wt) from hemagglutinin__InfluenzaA__ADM52513

SEQ ID NO: 37832 - RNA, 1701 nt, Artificial Sequence; identical to SEQ ID NO: 37500
  derived and/or modified CDS sequence (wt) from hemagglutinin__InfluenzaA__ADM52524

SEQ ID NO: 37833 - RNA, 1701 nt, Artificial Sequence; identical to SEQ ID NO: 36442
  derived and/or modified CDS sequence (wt) from hemagglutinin__InfluenzaA__ADM52534

SEQ ID NO: 37834 - RNA, 1701 nt, Artificial Sequence
  derived and/or modified CDS sequence (wt) from hemagglutinin__InfluenzaA__ADM52554
augaaggcaauacuaguaguucugcuauauacauuugcaaccgcaaaugcagacacauuauguauagguuaucaugcgaacaauucaacagacacuguagacacaguacuagaaaagaauguaacaguaacacacucuguuaacauucuagaagacaagcauaacgggaaacuaugcaaacuaagagggguagccccauugcauuuggguaaauguaacauugcuggcuggauccugggaaauccagagugugaaucacucuccacagcaagcucaugguccuacauuguggaaacaucuaguucagacaauggaacguguuacccaggagauuucaucgauuaugaggagcuaagagagcaauugagcucagugucaucauuugaaagguuugagauauuccccaagacaaguucauggcccaaucaugacucgaacaaagguguaacggcagcauguccucaugcuggagcaaaaagcuucuacaaaaauuuaauauggcuaguuaaaaaaggaaauucauacccaaagcucagcaaauccuacauuaaugauaaagggaaagaaguccucgugcuauggggcauucaccauccaucuacuagugcugaccaacaaagucucuaucagaaugcagaugcauauguuuuuguggggucaucaagauacagcaagaaguucaagccggaaauagcaauaagacccaaagugagggaucaagaagggagaaugaacuauuacuggacacuaguagagccgggagacaaaauaacauucgaagcaacuggaaaucuagugguaccgagauaugcauucgcaauggaaagaaaugcuggaucugguauuaucaucucagauacaccaguccacgauugcaauacaacuugucagacacccaagggugcuauaaacaccagccucccauuucagaauauacauccgaucacaauuggaaaauguccaaaauauguaaaaagcacaaaauugagacuggccacaggauugaggaaugucccgucuauucaaucuagaggccuauuuggggccauugccgguuucauugaagggggguggacagggaugguagauggaugguacgguuaucaccaucaaaaugagcaggggucaggauaugcagccgaccugaagagcacacagaaugccauugacgagauuacuaacaaaguaaauucuguuauugaaaagaugaauacacaguucacagcaguagguaaagaguucaaccaccuggaaaaaagaauagagaauuuaaauaaaaaaguugaugaugguuuccuggacauuuggacuuacaaugccgaacuguugguucuauuggaaaaugaaagaacuuuggacuaccacgauucaaaugugaagaacuuauaugaaaagguaagaagccagcuaaaaaacaaugccaaggaaauuggaaacggcugcuuugaauuuuaccacaaaugcgauaacacgugcauggaaagugucaaaaaugggacuuaugacuacccaaaauacucagaggaagcaaaauuaaacagagaagaaauagaugggguaaagcuggaaucaacaaggauuuaccagauuuuggcgaucuauucaacugucgccaguucauugguacugguagucucccugggggcaaucaguuucuggaugugcucuaaugggucucuacaguguagaauauguauuuaa

SEQ ID NO: 37835 - RNA, 1701 nt, Artificial Sequence; identical to SEQ ID NO: 35334
  derived and/or modified CDS sequence (wt) from hemagglutinin__InfluenzaA__ADM52564

SEQ ID NO: 37836 - RNA, 1701 nt, Artificial Sequence
  derived and/or modified CDS sequence (wt) from hemagglutinin__InfluenzaA__ADM52574
augaaggcaauacuaguaguucugcuauauacauuugcaaccgcaaaugcagacacauuauguauagguuaucaugcgaacaauucaacagacacuguagacacaguacuagaaaagaauguaacaguaacacacucuguuaaccuucuagaagacaagcauaacgggaaacuaugcaaacuaagagggguagccccauugcauuuggguaaauguaacauugcuggcuggauccugggaaauccagagugugaaucacucuccacagcaagcucaugguccuacauuguggaaacaucuaguucagacaauggaacguguuacccaggagauuucaucgauuaugaggagcuaagagagcaauugagcucagugucaucauuugaaagguuugagauauuccccaagacaaguucauggcccaaucaugacucgaacaaagguguaacggcagcauguccucaugcuggagcaaaaagcuucuacaaaaauuuaauauggcuaguuaaaaaaggaaauucauacccaaagcucagcaaauccuacauuaaugauaaagggaaagaaguccucgugcuauggggcauucaccauccaucuacuagugcugaccaacaaagucucuaucagaaugcagaugcauauguuuuuguggggucaucaagauacagcaagaaguucaagccggaaauagcaauaagacccaaagugagggaucaagaagggagaaugaacuauuacuggacacuaguagagccgggagacaaaauaacauucgaagcaacuggaaaucuagugguaccgagauaugcauucgcaauggaaagaaaugcuggaucugguauuaucauuucagauacaccaguccacgauugcaauacaacuugucagacacccaagggugcuauaaacaccagccucccauuucagaauauacauccgaucacaauuggaaaauguccaaaauauguaaaaagcacaaaauugagacuggccacaggauugaggaaugucccgucuauccaaucuagaggccuauuuggggccauugccgguuucauugaagggggguggacagggaugguagauggaugguacgguuaucaccaucaaaaugagcaggggucaggauaugcagccgaccugaagagcacacagaaugccauugacgagauuacuaacaaaguaaauucuguuauugaaaagaugaauacacaguucacagcaguagguaaagaguucaaccaccuggaaaaaagaauagagaauuuaaauaaaaaaguugaugaugguuuccuggacauuuggacuuacaaugccgaacuguugguucuauuggaaaaugaaagaacuuuggacuaccacgauucaaaugugaagaacuuauaugaaaagguaagaagccagcuaaaaaacaaugccaaggaaauuggaaacggcugcuuugaauuuuaccacaaaugcgauaacacgugcauggaaagugucaaaaaugggacuuaugacuacccaaaauacucagaggaagcaaaauuaaacagagaagaaauagaugggguaaagcuggaaucaacaaggauuuaccagauuuuggcgaucuauucaacugucgccaguucauugguacugguagucucccugggggcaaucaguuucuggaugugcucuaaugggucucuacaguguagaauauguauuuaa

SEQ ID NO: 37837 - RNA, 1701 nt, Artificial Sequence
  derived and/or modified CDS sequence (wt) from hemagglutinin__InfluenzaA__ADM52584
augaaggcaauacuaguaguucugcuauauacauuugcaaccgcaaaugcagacacauuauguauagguuaucaugcgaacaauucaacagacacuguagacacaguacuagaaaagaauguaacaguaacacacucuguuaaccuucuagaagacaagcauaacgggaaacuaugcaaacuaagagggguagccccauugcauuuggguaaauguaacauugcuggcuggauccugggaaauccagagugugaaucacucuccacagcaagcucaugguccuacauuguggaaacaucuaguucagacaauggaacguguuacccaggagauuucaucgauuaugaggagcuaagagagcaauugagcucagugucaucauuugaaagguuugagauauuccccaagacaaguucauggcccaaucaugacucgaacaaagguguaacggcagcauguccucaugcuggagcaaaaagcuucuacaaaaauuuaauauggcuaguuaaaaaaggaaauucauacccaaagcucagcaaauccuacauuaaugauaaagggaaagaaguccucgugcuauggggcauucaccauccaucuacuagugcugaccaacaaagucucuaucagaaugcagaugcauauguuuuuguggggacaucaagauacagcaagaaguucaagccggaaauagcaauaagacccaaagugagggaucaagaagggagaaugaacuauuacuggacacuaguagaaccgggagacaaaauaacauucgaagcaacuggaaaucuagugguaccgagauaugcauucgcaauggaaagaaaugcuggaucugguauuaucauuucagauacaccaguccacgauugcaauacaacuugucagacacccaagggugcuauaaacaccagccucccauuucagaauauacauccgaucacaauuggaaaauguccaaaauauguaaaaagcacaaaauugagacuggccacaggauugaggaaugucccgucuauucaaucuagaggccuauuuggggccauugccgguuucauugaagggggguggacagggaugguagauggaugguacgguuaucaccaucaaaaugagcaggggucaggauaugcagccgaccugaagagcacacagaaugccauugacgagauuacuaacaaaguaaauucuguuauugaaaagaugaauacacaguucacagcaguagguaaagaguucaaccaccuggaaaaaagaauagagaauuuaaauaaaaaaguugaugaugguuuccuggacauuuggacuuacaaugccgaacuguugguucuauuggaaaaugaaagaacuuuggacuaccacgauucaaaugugaagaacuuauaugaaaagguaagaagccaguuaaaaaacaaugccaaggaaauuggaaacggcugcuuugaauuuuaccacaaaugcgauaacacgugcauggaaagugucaaaaaugggacuuaugacuacccaaaauacucagaggaagcaaaauuaaacagagaagaaauagaugggguaaagcuggaaucaacaaggauuuaccagauuuuggcgaucuauucaacugucgccaguucauugguacugguagucucccugggggcaaucaguuucuggaugugcucuaaugggucucuacaguguagaauauguauuuaa

SEQ ID NO: 37838 - RNA, 1701 nt, Artificial Sequence
  derived and/or modified CDS sequence (wt) from hemagglutinin__InfluenzaA__ADM52594
augaaggcaauacuaguaguucugcuauauacauuugcaaccgcaaaugcagacacauuauguauagguuaucaugcgaacaauucaacagacacuguagacacaguacuagaaaagaauguaacaguaacacacucuguuaaccuucuagaagacaagcauaacgggaaacuaugcaaacuaagagggguagccccauugcauuuggguaaauguaacauugcuggcuggauccugggaaauccagagugugaaucacucuccacagcaagcucaugguccuacauuguggaaacaucuaguucagacaauggaacguguuacccaggagauuucaucgauuaugaggagcuaagagagcaauugagcucagugucaucauuugaaagguuugagauauuccccaagacaaguucauggcccaaucaugacucgaacaaagguguaacggcagcauguccucaugcuggagcaaaaagcuucuacaaaaauuuaauauggcuaguuaaaaaaggaaauucauacccaaagcucagcaaauccuacauuaaugauaaagggaaagaaguccucgugcuauggggcauucaccauccaucuacuagugcugaccaacaaagucucuaucagaaugcagaugcauauguuuuuguggggacaucaaaauacagcaagaaguucaagccggaaauagcaauaagacccaaagugagggaucaagaagggagaaugaacuauuacuggacacuaguagagccgggagacaaaauaacauucgaagcaacuggaaaucuagugguaccgagauaugcauucgcaauggaaagaaaugcuggaucugguauuaucauuucagauacaccaguccacgauuguaauacaacuugucagacacccaagggugcuauaaacaccagccucccauuucagaauauacauccgaucacaauuggaaaauguccaaaauauguaaaaagcacaaaauugagacuggccacaggauugaggaaugucccgucuauucaaucuagaggccuauuuggggccauugccgguuucauugaagggggguggacagggaugguagauggaugguacgguuaucaccaucaaaaugagcaggggucaggauaugcagccgaccugaagagcacacagaaugccauugacaagauuacuaacaaaguaaauucuguuauugaaaagaugaauacacaguucacagcaguagguaaagaguucaaccaccuggaaaaaagaauagagaauuuaaauaaaaaaguugaugaugguuuccuggacaucuggacuuacaaugccgaacuguugguucuauuggaaaaugaaagaacuuuggacuaccacgauucaaaugugaagaacuuauaugaaaagguaagaagccaguuaaaaaacaaugccaaggaaauuggaaacggcugcuuugaauuuuaccacaaaugcgauaacacgugcauggaaagugucaaaaaugggacuuaugacuacccaaaauacucagaggaagcaaaauuaaacagagaagaaauagaugggguaaagcuggaaucaacaaggauuuaccagauuuuggcgaucuauucaacugucgccaguucauugguacugguagucucccugggggcaaucaguuucuggaugugcucuaaugggucucuacaguguagaauauguauuuaa

SEQ ID NO: 37839 - RNA, 1701 nt, Artificial Sequence; identical to SEQ ID NO: 37834
  derived and/or modified CDS sequence (wt) from hemagglutinin__InfluenzaA__ADM52604

SEQ ID NO: 37840 - RNA, 1701 nt, Artificial Sequence; identical to SEQ ID NO: 35334
  derived and/or modified CDS sequence (wt) from hemagglutinin__InfluenzaA__ADM52614

SEQ ID NO: 37841 - RNA, 1701 nt, Artificial Sequence; identical to SEQ ID NO: 36453
  derived and/or modified CDS sequence (wt) from hemagglutinin__InfluenzaA__ADM52624

SEQ ID NO: 37842 - RNA, 1701 nt, Artificial Sequence; identical to SEQ ID NO: 36442
  derived and/or modified CDS sequence (wt) from hemagglutinin__InfluenzaA__ADM52634

SEQ ID NO: 37843 - RNA, 1701 nt, Artificial Sequence; identical to SEQ ID NO: 36444
  derived and/or modified CDS sequence (wt) from hemagglutinin__InfluenzaA__ADM52644

SEQ ID NO: 37844 - RNA, 1701 nt, Artificial Sequence; identical to SEQ ID NO: 35334
  derived and/or modified CDS sequence (wt) from hemagglutinin__InfluenzaA__ADM52654

SEQ ID NO: 37845 - RNA, 1701 nt, Artificial Sequence
  derived and/or modified CDS sequence (wt) from hemagglutinin__InfluenzaA__ADM52664
augaaggcaauacuaguaguucugcuauauacauuugcaaccgcaaaugcagacacauuauguauagguuaucaugcgaacaauucaacagacacuguagacacaguacuagaaaagaauguaacaguaacacacucuguuaacauucuagaagacaagcauaacgggaaacuaugcaaacuaagagggguagccccauugcauuuggguaaauguaacauugcuggcuggauccugggaaauccagagugugaaucacucuccacagcaagcucaugguccuacauuguggaaacaucuaguucagacaauggaacguguuacccaggagauuucaucgauuaugaggagcuaagagagcaauugagcucagugucaucauuugaaagguuugagauauuccccaagacaaguucauggcccaaucaugacucgaacaaagguguaacggcagcauguucucaugcuggagcaaaaagcuucuacaaaaauuuaauauggcuaguuaaaaaaggaaauucauacccaaagcucagcaaauccuacauuaaugauaaagggaaagaaguccucgugcuauggggcauucaccauccaucuacuagugcugaccaacaaagucucuaucagaaugcagaugcauauguuuuuguggggucaucaagauacagcaagaaguucaagccggaaauagcaauaagacccaaagugagggaucaagaagggagaaugaacuauuacuggacacuaguagagccgggagacaaaauaacauucgaagcaacuggaaaucuagugguaccgagauaugcauucgcaauggaaagaaaugcuggaucugguauuaucauuucagauacaccaguccacgauugcaauacaacuugucagacacccaagggugcuauaaacaccagccucccauuucagaauauacauccgaucacaauuggaaaauguccaaaauauguaaaaagcacaaaauugagacuggccacaggauugaggaaugucccgucuauucaaucuagaggccuauuuggggccauugccgguuucauugaagggggguggacagggaugguagauggaugguacgguuaucaccaucaaaaugagcaggggucaggauaugcagccgaccugaagagcacacagaaugccauugacgagauuacuaauaaaguaaauucuguuauugaaaagaugaauacacaguucacagcaguagguaaagaguucaaccaccuggaaaaaagaauagagaauuuaaauaaaaaaguugaugaugguuuccuggacauuuggacuuacaaugccgaacuguugguucuauuggaaaaugaaagaacuuuggacuaccacgauucaaaugugaagaacuuauaugaaaagguaagaagccagcuaaaaaacaaugccaaggaaauuggaaacggcugcuuugaauuuuaccacaaaugcgauaacacgugcauggaaagugucaaaaaugggacuuaugacuacccaaaauacucagaggaagcaaaauuaaacagagaagaaauagaugggguaaagcuggaaucaacaaggauuuaccagauuuuggcgaucuauucaacugucgccaguucauugguacugguagucucccugggggcaaucaguuucuggaugugcucuaaugggucucuacaguguagaauauguauuuaa

SEQ ID NO: 37846 - RNA, 1701 nt, Artificial Sequence
  derived and/or modified CDS sequence (wt) from hemagglutinin__InfluenzaA__ADM52674
augaaggcaauacuaguaguucugcuauauacauuugcaaccgcaaaugcagacacauuauguauagguuaucaugcgaacaauucaacagacacuguagacacaguacuagaaaagaauguaacaguaacacacucuguuaacauucuagaagacaagcauaacgggaaacuaugcaaacuaaaagggguagccccauugcauuuggguaaauguaacauugcuggcuggauccugggaaauccagagugugaaucacucuccacagcaagcucaugguccuacauuguggaaacaucuaguucagacaauggaacguguuacccaggagauuucaucgauuaugaggagcuaagagagcaauugagcucagugucaucauuugaaagguuugagauauuccccaagacaaguucauggcccaaucaugacucgaacaaagguguaacggcagcauguccucaugcuggagcaaaaagcuucuacaaaaauuuaauauggcuaguuaaaaaaggaaauucauacccaaagcucagcaaauccuacauuaaugauaaagggaaagaaguccucgugcuauggggcauucaccauccaucuacuagugcugaccaacaaagucucuaucagaaugcagaugcauauguuuuuguggggucaucaaaauacagcaagaaguucaagccggaaauagcuauaagacccaaagugagggaucaagaagggagaaugaacuauuacuggacacuaguagagccgggagacaaaauaacauucgaagcaacuggaaaucuagugguaccgagauaugcauucgcaauggaaagaaaugcuggaucugguauuaucauuucagauacaccaguccacgauugcaauacaacuugucagacacccaagggugcuauaaacaccagccucccauuucagaauauacauccgaucacaauuggaaaauguccaaaauauguaaaaagcacaaaauugagacuggccacaggauugaggaaugucccgucuauucaaucuagaggccuauuuggggccauugccgguuucauugaagggggguggacagggaugguagauggaugguacgguuaucaccaucaaaaugagcaggggucaggauaugcagccgaccugaagagcacacagaaugccauugacgagauuacuaacaaaguaaauucuguuauugaaaagaugaauacacaguucacagcaguagguaaagaguucaaccaccuggaaaaaagaauagagaauuuaaauaaaaaaguugaugaugguuuccuggacauuuggacuuacaaugccgaacuguugguucuauuggaaaaugaaagaacuuuggacuaccacgauucaaaugugaagaacuuauaugaaaagguaagaagccagcuaaaaaacaaugccaaggaaauuggaaacggcugcuuugaauuuuaccacaaaugcgauaacacgugcauggaaagugucaaaaaugggacuuaugacuacccaaaauacucagaggaagcaaaauuaaacagagaagaaauagaugggguaaagcuggaaucaacaaggauuuaccagauuuuggcgaucuauucaacugucgccaguucauugguacugguagucucccugggggcaaucaguuucuggaugugcucuaaugggucucuacaguguagaauauguauuuaa

SEQ ID NO: 37847 - RNA, 1701 nt, Artificial Sequence; identical to SEQ ID NO: 37500
  derived and/or modified CDS sequence (wt) from hemagglutinin__InfluenzaA__ADM52684

SEQ ID NO: 37848 - RNA, 1701 nt, Artificial Sequence; identical to SEQ ID NO: 36453
  derived and/or modified CDS sequence (wt) from hemagglutinin__InfluenzaA__ADM52704

SEQ ID NO: 37849 - RNA, 1701 nt, Artificial Sequence
  derived and/or modified CDS sequence (wt) from hemagglutinin__InfluenzaA__ADM52714
augaaggcaauacuaguaguucugcuauauacauuugcaaccgcaaaugcagacacauuauguauagguuaucaugcgaacaauucaacagacacuguagacacaguacuagaaaagaauguaacaguaacacacucuguuaacauucuagaagacaagcauaacgggaaacuaugcaaacuaagagggguagccccauugcauuuggguaaauguaacauugcuggcuggauccugggaaauccagagugugaaucacucuccacagcaagcucaugguccuacauuguggaaacaucuaguucagacaauggaacguguuacccaggagauuucaucgauuaugaggagcuaagagagcaauugagcucagugucaucauuugaaagguuugagauauuccccaagacaaguucauggcccaaucaugacucgaacaaagguguaacggcagcauguucucaugcuggagcaaaaagcuucuacaaaaauuuaauauggcuaguuaaaaaaggaaauucauacccaaagcucagcaaauccuacauuaaugauaaagggaaagaaguccucgugcuauggggcauucaccauccaucuacuagugcugaccaacaaagucucuaucagaaugcagaugcauauguuuuuguggggucaucaagauacagcaagaaguucaagccggaaauagcaauaagacccaaagugagggaucaagaagggagaaugaacuauuacuggacacuaguagagccgggagacaaaauaacauucgaagcaacuggaaaucuagugguaccgagauaugcauucgcaauggaaagaaaugcuggaucugguauuaucauuucagauacaccaguccacgauugcaauacaacuugucagacacccaaaggugcuauaaacaccagccucccauuucagaauauacauccgaucacaauuggaaaauguccaaaauauguaaaaagcacaaaauugagacuggccacaggauugaggaaugucccgucuauucaaucuagaggccuauuuggggccauugccgguuucauugaagggggguggacagggaugguagauggaugguacgguuaucaccaucaaaaugagcaggggucaggauaugcagccgaccugaagagcacacagaaugccauugacgagauuacuaacaaaguaaauucuguuauugaaaagaugaauacacaguucacagcaguagguaaagaguucaaccaccuggaaaaaagaauagagaauuuaaauaaaaaaguugaugaugguuuccuggacauuuggacuuacaaugccgaacuguugguucuauuggaaaaugaaagaacuuuggacuaccacgauucaaaugugaagaacuuauaugaaaagguaagaagccagcuaaaaaacaaugccaaggaaauuggaaacggcugcuuugaauuuuaccacaaaugcgauaacacgugcauggaaagugucaaaaaugggacuuaugacuacccaaaauacucagaggaagcaaaauuaaacagagaagaaauagaugggguaaagcuggaaucaacaaggauuuaccagauuuuggcgaucuauucaacugucgccaguucauugguacugguagucucccugggggcaaucaguuucuggaugugcucuaaugggucucuacaguguagaauauguauuuaa

SEQ ID NO: 37850 - RNA, 1701 nt, Artificial Sequence
  derived and/or modified CDS sequence (wt) from hemagglutinin__InfluenzaA__ADM86399
augaaggcaauacuaguaguucugcuauauacauuugcaaccgcaaaugcagacacauuauguauagguuaucaugcgaacaauucaacagacacuguagacacaguacuagaaaagaauguaacaguaacacacucuguuaacauucuagaagacaagcauaacgggaaacuaugcaaacuaagagggguagccccauugcauuuggguaaauguaacauugcuggcuggauccugggaaauccagagugugaaucacucuccacagcaagcucaugguccuacauuguggaaacaucuaguucagacaauggaacguguuacccaggagauuucaucgauuaugaggagcuaagagagcaauugagcucagugucaucauuugaaagguuugagauauuccccaagacaaguucauggcccaaucaugacucgaacaaagguguaacggcagcauguccucaugcuggagcaaaaagcuucuacaaaaauuuaauuuggcuaguuaaaaaaggaaauucauacccaaagcucagcaaauccuacauuaaugauaaagggaaagaaguccucgugcuauggggcauucaccauccaucuacuagugcugaccaacaaagucucuaucagaaugcagaugcauauguuuuuguggggucaucaagauacagcaagaaguucaagccggaaauagcaauuagacccaaagugagggaucaagaagggagaaugaacuauuacuggacacuaguagagccgggagacaaaauaacauucgaagcaacuggaaaucuagugguaccaagauaugcauucgcaauggaaagaaaugcuggaucugguauuaucauuucagauacaccaguccaugauugcaauacaacuugucagacacccaagggugcuguaaacaccagccucccauuucagaauauacauccgaucacaauuggaaaauguccaaaauauguaaaaagcacaaaauugagacuggccacaggauugaggaaugucccgucuauucaaucuagaggccuauuuggggccauugccgguuucauugaagggggguggacagggaugguagauggaugguacgguuaucaccaucaaaaugagcaggggucaggauaugcagccgaccugaagagcacacagaaugccauugacgagauuacuaacaaaguaaauucuguuauugaaaagaugaauacacaguucacagcaguagguaaagaguucaaccaccuggaaaaaagaauagagaauuuaaauaaaaaaguugaugaugguuuccuggacauuuggacuuacaaugcugaacuguugguucuauuggaaaaugaaagaacuuuggacuaccacgauucaaaugugaagaacuuauaugaaaagguaagaagccagcuaaaaaacaaugccaaggaaguuggaaacggcugcuuugaauuuuaccacaaaugcgauaacacgugcauggaaagugucaaaaaugggacuuaugacuacccaaaauacucagaggaagcaaaauuaaacagagaagaaauagaugggguaaagcuggaaucaacaaggauuuaccagauuuuggcgaucuauucaacugccgccaguucauugguacugguagucucccugggggcaaucaguuucuggaugugcucuaaugggucucuacaguguagaauauguauuuaa

SEQ ID NO: 37851 - RNA, 1701 nt, Artificial Sequence
  derived and/or modified CDS sequence (wt) from hemagglutinin__InfluenzaA__ADM86409
augaaggcaauacuaguaguucugcuauauacauuugcaaccgcaaaugcagacacauuauguauagguuaucaugcgaacaauucaacagacacuguagacacaguacuagaaaagaauguaacaguaacacacucuguuaaccuucuagaagacaagcauaacgggaaacuaugcaaacuaagagggguagccccauugcauuuggguaaauguaacauugcuggcuggauccugggaaauccagagugugaaucacucuccacagcaagcucaugguccuacauuguggaaacaucuaguucagacaauggaacguguuacccaggagauuucaucgauuaugaggagcuaagagagcaauugagcucagugucaucauuugaaagguuugagauauuccccaagacaaguucauggcccaaucaugacucgaacaaagguguaacggcagcauguccucaugcuggagcaaaaagcuucuacaaaaauuuaauauggcuagucaaaaaaggaaauucauacccaaagcucagcaaauccuacauuaaugauaaagggaaagaaguccucgugcuauggggcauucaccauccaucuacuagugcugaccaacaaagucucuaucagaaugcagaugcauauguuuuuguggggacaucaagauacagcaagaaguucaagccggaaauagcaauaagacccaaagugagggaucaagaagggagaaugaacuauuacuggacacuaguagagccgggagacaaaauaacauucgaagcaacuggaaaucuagugguaccgagauaugcauucgcaauggaaagaaaugcuggaucugguauuaucauuucagauacaccaguccacgauugcaauacaacuugucagacacccaagggugcuauaaacaccagccucccauuucagaauauacauccgaucacaauuggaaaauguccaaaauauguaaaaagcacaaaauugagacuggccacaggauugaggaaugucccgucuauucaaucuagaggccuauuuggggccauugccgguuucauugaagggggguggacagggaugguagauggaugguacgguuaucaccaucaaaaugagcaggggucaggauaugcagccgaccugaagagcacacagaaugccauugacgagauuacuaacaaaguaaauucuguuauugaaaagaugaauacacaguucacagcaguagguaaagaguucaaccaccuggaaaaaagaauagagaauuuaaauaaaaagguugaugaugguuuccuggacauuuggacuuacaaugccgaacuguugguucuauuggaaaaugaaagaacuuuggacuaccacgauucaaaugugaagaacuuauaugaaaagguaagaagccaguuaaaaaacaaugccaaggaaauuggaaacggcugcuuugaauuuuaccacaaaugcgauaacacgugcauggaaagugucaaaaaugggacuuaugacuacccaaaauacucagaggaagcaaaauuaaacagagaagaaauagaugggguaaagcuggaaucaacaaggauuuaccagauuuuggcgaucuauucaacugucgccaguucauugguacugguagucucccugggggcaaucaguuucuggaugugcucuaaugggucucuacaguguagaauauguauuuaa

SEQ ID NO: 37852 - RNA, 1701 nt, Artificial Sequence; identical to SEQ ID NO: 37851
  derived and/or modified CDS sequence (wt) from hemagglutinin__InfluenzaA__ADM86419

SEQ ID NO: 37853 - RNA, 1701 nt, Artificial Sequence; identical to SEQ ID NO: 37561
  derived and/or modified CDS sequence (wt) from hemagglutinin__InfluenzaA__ADM86440

SEQ ID NO: 37854 - RNA, 1701 nt, Artificial Sequence
  derived and/or modified CDS sequence (wt) from hemagglutinin__InfluenzaA__ADM86450
augaaggcaauacuaguaguucugcuauauacauuugcaaccgcaaaugcagacacauuauguauagguuaucaugcgaacaauucaacagacacuguagacacagugcuagaaaagaauguaacaguaacacacucuguuaaccuucuagaagacaagcauaacgggaaacuaugcaaacuaagagggguagccccauugcauuuggguaaauguaacauugcuggcuggauccugggaaauccagagugugaaucacucuccacagcaagcucaugguccuacauuguggaaacaucuaguucagacaauggaacguguuacccaggagauuucaucgauuaugaggagcuaagagagcaauugagcucagugucaucauuugaaagguuugagauauuccccaagacaaguucauggcccaaucaugacucgaacaaagguguaacggcagcauguccucaugcuggagcaaaaagcuucuacaaaaauuuaauauggcuaguuaaaaaaggaaauucauacccaaagcucagcaaauccuacauuaaugauaaagggaaagaaguccucgugcuauggggcauucaccauccaucuacuagugcugaccaacaaagucucuaucagaaugcagaugcauauguuuuuguggggacaucaagauacagcaagaaguucaagccggaaauagcaauaagacccaaagugagggaucaagaagggagaaugaacuauuacuggacacuaguagagccgggagacaaaauaacauucgaagcaacuggaaaucuagugguaccgagauaugcauucgcaauggaaagaaaugcuggaucugguauuaucauuucagauacaccaguccacgauugcaauacaacuugucagacacccaagggugcuauaaacaccagccucccauuucagaauauacauccgaucacaauuggaaaauguccaaaauauguaaaaagcacaaaauugagacuggccacaggauugaggaaugucccgucuauucaaucuagaggccuauuuggggccauugccgguuucauugaagggggguggacagggaugguagauggaugguacgguuaucaccaucaaaaugagcaggggucaggauaugcagccgaccugaagagcacacagaaugccauugacgagauuacuaacaaaguaaauucuguuauugaaaagaugaauacacaguucacagcaguagguaaagaguucaaccaccuggaaaaaagaauagagaauuuaaauaaaaaaguugaugaugguuuccuggacauuuggacuuacaaugccgaacuguugguucuauuggaaaaugaaagaacuuuggacuaccacgauucaaaugugaagaacuuauaugaaaagguaagaagccaguuaaaaaacaaugccaaggaaauuggaaacggcugcuuugaauuuuaccacaaaugcgauaacacgugcauggaaagugucaaaaaugggacuuaugacuaccccaaauacucagaggaagcaaaauuaaacagagaagaaauagaugggguaaagcuggaaucaacaaggauuuaccagauuuuggcgaucuauucaacugucgccaguucauugguacugguagucucccugggggcaaucaguuucuggaugugcucuaaugggucucuacaguguagaauauguauuuaa

SEQ ID NO: 37855 - RNA, 1707 nt, Artificial Sequence
  derived and/or modified CDS sequence (wt) from hemagglutinin__InfluenzaA__ADM95450
auggagaaaauagugcuucuuuuugcgauagucagucuuguuaaaagugaucagauuugcauugguuaccaugcaaacaacucgacagagcagguugacacaauaauggaaaagaacguuacuguuacacaugcccaagacauacuggaaaagacacauaacgggaagcucugugaucuagauggagugaagccucuaaucuugagagauuguaguguagcuggauggcuccucggaaacccaaugugugacgaauucaucaaugugccggaauggucuuauauaguggagaaggccaauccagucaaugaccucuguuacccaggggauuucaaugacuaugaagaauugaaacaccuauugagcagaauaaaccauuuugagaaaauucagaucauucccaaaaguucuuggcccagucaugaagccucauugggggugagcgcagcauguccauaccaggggaaguccucuuuuuucagaaaugugguauggcuuaucaaaaagaacaacacauacccaacaauaaagaggagcuacaauaauaccaaccaagaagaucuuuugguaaugugggggauccaccauccuaaugaugcggcagagcagacaaaucucuaucaaaauccaaccaccuauauuuccguugggacaucaacacuaaaccagagauugacaccaagaauagcuacuagauccaaaguaaacgggcaaagugggagaauggaguucuucuggacaauuuuaaaaccgaaugaugcaaucaacuucgagaguaauggaaacuucauugcuccagaguaugcauacaaaauugucaagaaaggggacucaacaauuaugaaaagugaauuagaauaugguaacugcaacaccaagugucaaacuccaaugggggcgauaaacucuaguaugccauuccacaauauacauccucucaccauuggggaaugccccaaauaugugaaaucaaacagauuaguccuugcgacugggcucagaaauagcccucaaagagagggaagaagaaaaaagagaggauuauuuggagcuauagcagguuucauagagggaggauggcagggaaugguagaugguugguauggguaccaccauagcaaugagcaggggaguggguacgcugcagacaaagaauccacucaaaaggcuauagauggagucaccaauaaggucaacucgaucauugacaaaaugaacacucaguuugaggccguuggaagggaauuuaacaacuuagaaaggagaauagagaauuuaaacaagaagauggaagacggguuccuggaugucuggacuuauaaugcugaacuucugguucucauggaaaaugagagaacucuggacuuccaugacucaaauguaaagaaccuuuacgacaagguccgauuacagcuuagggauaaugcaaaggagcuggguaacgguuguuucgaguucuaucacaaaugugauaaugaauguauggaaagugugagaaacgggacguaugacuauccgcaguauucagaagaagcaagauuaaaaagagaggaaauaaguggagugaaauuggaaucaauaggaauuuaccaaauacugucaauuuauucuacaguggcgaguucucuagcacuggcaaucaugguagcuggucuauccuuguggaugugcuccaaugggucguuacaaugcagaauuugcauuuaa

SEQ ID NO: 37856 - RNA, 1701 nt, Artificial Sequence; identical to SEQ ID NO: 34681
  derived and/or modified CDS sequence (wt) from hemagglutinin__InfluenzaA__ADM95745

SEQ ID NO: 37857 - RNA, 1701 nt, Artificial Sequence; identical to SEQ ID NO: 34681
  derived and/or modified CDS sequence (wt) from hemagglutinin__InfluenzaA__ADM95746

SEQ ID NO: 37858 - RNA, 1701 nt, Artificial Sequence; identical to SEQ ID NO: 34681
  derived and/or modified CDS sequence (wt) from hemagglutinin__InfluenzaA__ADM95747

SEQ ID NO: 37859 - RNA, 1701 nt, Artificial Sequence
  derived and/or modified CDS sequence (wt) from hemagglutinin__InfluenzaA__ADM95749
augaaggcaauacuaguaguucugcuauauacauuugcaaccgcaaaugcagacacauuauguauagguuaucaugcgaacaauucaacagacacuguagacacaguacuagaaaagaauguaacaguaacacacucuguuaaccuucuagaagacaagcauaacgggaaacuaugcaaacuaagagggguagccccauugcauuuggguaaauguaacauugcuggcuggauccugggaaauccagagugugaaucacucuccacagcaagcucaugguccuacauuguggaaacaucuaguucagacaauggaacguguuacccaggagauuucaucgauuaugaggagcuaagagagcaauugagcucagugucaucauuugaaagguuugagauauuccccaagacaaguucauggcccaaucaugacucgaacaaagguguaacggcagcauguccucaugcuggagcaaaaagcuucuacaaaaauuuaauauggcuaguuaaaaaaggaaauucauacccaaagcucagcaaauccuacauuaaugauaaagggaaagaaguccucgugcuauggggcauucaccauccaucuacuagugcugaccaacaaagucucuaucagaaugcagaugcauauguuuuuguggggacaucaagauacagcaagaaguucaagccggaaauagcaauaagacccaaagugagggaucaagaagggagaaugaacuauuacuggacacuaguagagccgggagacaaaauaacauucgaagcaacuggaaaucuagugguaccgagauaugcauucgcaauggaaagaaaugcuggaucugguauuaucauuucagauacaccaguccacgauugcaauacaacuugucagacacccaagggugcuauaaacaccagccucccauuucagaauauacauccgaucacaauuggaaaauguccaaaauauguaaaaagcacaaaauugagacuggccacaggauugaggaaugucccgucuauucaaucuagaggccuauuuggggccauugccgguuucauugaagggggguggacagggaugguagauggaugguacgguuaucaccaucaaaaugagcaggggucaggauaugcagccgaccugaagagcacacagaaugccauugacgagauuacuaacaaaguaaauucuguuauugaaaagaugaauacacaguucacagcaguagguaaagaguucaaccaccuggaaaaaagaauagagaauuuaaauaaaaaaguugaugaugguuuccuggacauuuggacuuacaaugccgaacuguugguucuauuggaaaaugaaagaacuuuggacuaccacgauucaaaugugaagaacuuauaugaaaagguaagaagccaguuaaaaaacaaugccaaggaaauuggaaacggcugcuuugaauuuuaccacaaaugugauaacacgugcauggaaagugucaaaaaugggacuuaugacuacccaaaauacucagaggaagcaaaauuaaacagagaagaaauagaugggguaaagcuggaaucaacaaggauuuaccagauuuuggcgaucuauucaacugucgccaguucauugguacugguagucucccugggggcaaucaguuucuggaugugcucuaaugggucucuacaguguagaauauguauuuaa

SEQ ID NO: 37860 - RNA, 1701 nt, Artificial Sequence
  derived and/or modified CDS sequence (wt) from hemagglutinin__InfluenzaA__ADM95750
augaaggcaauacuaguaguucugcuauauacauuugcaaccgcaaaugcagacacauuauguauagguuaucaugcgaacaauucaacagacacuguagacacaguacuagaaaagaauguaacaguaacacacucuuuuaaccuucuagaagacaagcauaacgggaaacuaugcaaacuaagagggguagccccauugcauuuggguaaauguaacauugcuggcuggauccugggaaauccagagugugaaucacucuccacagcaagcucaugguccuacauuguagaaacaucuaguucagacaauggaacguguuacccaggagauuucaucgauuaugaggagcuaagagagcaauugagcucagugucaucauuugaaagguuugagauauuccccaagacaaguucauggcccaaucaugacucgaacaaagguguaacggcagcauguccucaugcuggagcaaaaagcuucuacaaaaauuuaauauggcuaguuaaaaaaggaaguucauacccaaagcucagcaaauccuacauuaaugauaaagggaaagaaguccucgugcuauggggcauucaccauccaucuacuagugcugaccaacaaagucucuaucagaaugcagaugcauauguuuuuguggggucaucaagauacagcaagaaguucaagccggaaauagcaauaagacccaaagugagggaucaagaagggagaaugaacuauuacuggacacuaguagagccgggagacaaaauaacauucgaagcaacuggaaaucuagugguaccgagauaugcauucgcaauggaaagaaaugcuggaucugguauuaucauuucagauacaccaguccacgauugcaauacaacuugucagacacccaagggugcuauaaacaccagccucccauuucagaauauacauccgaucacaauuggaaaauguccaaaauauguaaaaagcacaaaauugagacuggccacaggauugaggaaugucccgucuauucaaucuagaggccuauuuggggccauugccgguuucauugaagggggguggacagggaugguagauggaugguacgguuaucaccaucaaaaugagcaggggucaggauaugcagccgaccugaagagcacacagaaugccauugacgagauuacuaacaaaguaaauucuguuauugaaaagaugaauacacaguucacagcaguagguaaagaguucaaccaccuggaaaaaagaauagagaauuuaaauaaaaaaguugaugaugguuucuuggacauuuggacuuacaaugccgaacuguugguucuauuggaaaaugaaagaacuuuggacuaccacgauucaaaugugaagaacuuauaugaaaagguaagaagccagcuaaaaaacaaugccaaggaaauuggaaacggcugcuuugaauuuuaccacaaaugcgauaacacuugcauggaaagugucaaaaaugggacuuaugacuacccaaaauacucagaggaagcaaaauuaaacagagaagaaauagaugggguaaagcuggaaucaacaaggauuuaccagauuuuggcgaucuauucaacugucgccaguucauugguacugguagucucccugggggcaaucaguuucuggaugugcucuaaugggucucuacaguguagaauauguauuuaa

SEQ ID NO: 37861 - RNA, 1701 nt, Artificial Sequence
  derived and/or modified CDS sequence (wt) from hemagglutinin__InfluenzaA__ADM95751
augaaggcaauacuaguaguucugcuauauacauuugcaaccgcaaaugcagacacauuauguauagguuaucaugcgaacaauucaacagacacuguagacacaguacuagaaaagaauguaacaguaacacacucuguuaaccuucuagaagacaagcauaacgggaaacuaugcaaacuaagagggguagccccauugcauuuggguaaauguaacauugcuggcuggauccugggaaauccagagugugaaucacucuccacagcaagcucaugguccuacauuguggaaacaucuaguucagacaauggaacguguuacccaggagauuucaucgauuaugaggagcuaagagagcaauugagcucagugucaucauuugaaagguuugagauauuccccaagacaaguucauggcccaaucaugacucgaacaaagguguaacggcagcauguccucaugcuggggcaaaaagcuucuacaaaaauuuaauauggcuaguuaaaaaaggaaauucauacccaaagcucagcaaauccuacauuaaugauaaagggaaagaaguccucgugcuauggggcauucaccauccaucuacuagugcugaccaacaaagucucuaucagaaugcagaugcauauguuuuuguggggacaucaagauacagcaagaaguucaagccggaaauagcaauaagacccaaagugagggaucaagaagggagaaugaacuauuacuggacacuaguagagccgggagacaaaauaacauucgaagcaacuggaaaucuagugguaccgagauaugcauucgcaauggaaagaaaugcuggaucugguauuaucauuucagauacaccaguccacgauugcaauacaacuugucagacacccaagggugcuauaaacaccagccucccauuucagaauauacauccgaucacaauuggaaaauguccaaaauauguaaaaagcacaaaauugagacuggccacaggauugaggaaugucccgucuauucaaucuagaggccuauuuggggccauugccgguuucauugaagggggguggacagggaugguagauggaugguacgguuaucaccaucaaaaugagcaggggucaggauaugcagccgaccugaagagcacacagaaugccauugacgagauuacuaacaaaguaaauucuguuauugaaaagaugaauacacaguucacagcaguagguaaagaguucaaccaccuggaaaaaagaauagagaauuuaaauaaaaaaguugaugaugguuuccuggacauuuggacuuacaaugccgaacuguugguucuauuggaaaaugaaagaacuuuggacuaccacgauucaaaugugaagaacuuauaugaaaagguaagaagccaguuaaaaaacaaugccaaggaaauuggaaacggcugcuuugaauuuuaccacaaaugcgauaacacgugcauggaaagugucaaaaaugggacuuaugacuacccaaaauacucagaggaagcaaaauuaaacagagaagaaauagaugggguaaagcuggaaucaacaaggauuuaccagauuuuggcgaucuauucaacugucgccaguucauugguacugguagucucccugggggcaaucaguuucuggaugugcucuaaugggucucuacaguguagaauauguauuuaa

SEQ ID NO: 37862 - RNA, 1701 nt, Artificial Sequence; identical to SEQ ID NO: 35871
  derived and/or modified CDS sequence (wt) from hemagglutinin__InfluenzaA__ADM95752

SEQ ID NO: 37863 - RNA, 1701 nt, Artificial Sequence; identical to SEQ ID NO: 34681
  derived and/or modified CDS sequence (wt) from hemagglutinin__InfluenzaA__ADM95753

SEQ ID NO: 37864 - RNA, 1701 nt, Artificial Sequence; identical to SEQ ID NO: 35871
  derived and/or modified CDS sequence (wt) from hemagglutinin__InfluenzaA__ADM95754

SEQ ID NO: 37865 - RNA, 1701 nt, Artificial Sequence
  derived and/or modified CDS sequence (wt) from hemagglutinin__InfluenzaA__ADM95755
augaaggcaauacuaguaguucugcuauauacauuugcaaccgcaaaugcagacacauuauguauagguuaucaugcgaacaauucaacagacacuguagacacaguacuagaaaagaauguaacaguaacacacucuguuaaccuucuagaagacaagcauaacgggaaacuaugcaaacuaagagggguagccccauugcauuuggguaaauguaacauugcuggcuggauccugggaaaucccgagugugaaucacucuccacagcaagcucaugguccuacauuguggaaacaucuaguucagacaauggaacguguuacccaggagauuucaucgauuaugaggagcuaagagagcaauugagcucagugucaucauuugaaagguuugagauauuccccaagacaaguucauggcccaaucaugacucgaacaaagguguaacggcagcauguccucaugcuggagcaaaaagcuucuacaaaaauuuaauauggcuaguuaaaaaaggaaauucauacccaaagcucagcaaauccuacauuaaugauaaagggaaagaaguccucgugcuauggggcauucaccauccaucuacuagugcugaccaacaaagucucuaucagaaugcagaugcauauguuuuuguggggacaucaagauacagcaagaaguucaagccggaaauagcaauaagacccaaagugagggaucaagaagggagaaugaacuauuacuggacacuaguagagccgggagacaaaauaacauucgaagcaacuggaaaucuagugguaccgagauaugcauucgcaauggaaagaaaugcuggaucugguauuaucauuucagauacaccaguccacgauugcaauacaacuugucagacacccaagggugcuauaaacaccagccucccauuucagaauauacauccgaucacaauuggaaaauguccaaaauauguaaaaagcacaaaauugagacuggccacaggauugaggaaugucccgucuauucaaucuagaggccuauuuggggccauugccgguuucauugaagggggguggacagggaugguagauggaugguacgguuaucaccaucaaaaugagcaggggucaggauaugcagccgaccugaagagcacacagaaugccauugacgagauuacuaacaaaguaaauucuguuauugaaaagaugaauacacaguucacagcaguagguaaagaguucaaccaccuggaaaaaagaauagagaauuuaaauaaaaaaguugaugaugguuuccuggacauuuggacuuacaaugccgaacuguugguucuauuggaaaaugaaagaacuuuggacuaccacgauucaaaugugaagaacuuauaugaaaagguaagaagccaguuaaaaaacaaugccaaggaaauuggaaacggcugcuuugaauuuuaccacaaaugcgauaacacgugcauggaaagugucaaaaaugggacuuaugacuacccaaaauacucagaggaagcaaaauuaaacagagaagaaauagaugggguaaagcuggaaucaacaaggauuuaccagauuuuggcgaucuauucaacugucgccaguucauugguacugguagucucccugggggcaaucaguuucuggaugugcucuaaugggucucuacaguguagaauauguauuuaa

SEQ ID NO: 37866 - RNA, 1701 nt, Artificial Sequence
  derived and/or modified CDS sequence (wt) from hemagglutinin__InfluenzaA__ADM95757
augaaggcaauacuaguaguucugcuauauacauuugcaaccgcaaaugcagacacauuauguauagguuaucaugcgaacaauucaacagacacuguagacacaguacuagaaaagaauguaacaguaacacacucuguuaacauucuagaagacaagcauaacgggaaacuaugcaaacuaagagggguagccccauugcauuuggguaaauguaacauugcuggcuggauccugggaaauccagagugugaaucacucuccacagcaagcucaugguccuacauuguggaaacaucuaguucagacaauggaacguguuacccaggagauuucaucgauuaugaggagcuaagagagcaauugagcucagugucaucauuugaaagguuugagauauuccccaagacaaguucauggcccaaucaugacucgaacaaagguguaacggcagcauguccucaugcuggagcaaaaagcuucuacaaaaauuuaauauggcuaguuaaaaaaggaaauucauacccaaagcucagcaaauccuacauuaaugauaaagggaaagaaguccucgugcuauggggcauucaccauccaucuacuagugcugaccaacaaagucucuaucagaaugcagaugcauauguuuuuguggggucaucaagauacagcaagaaguucaagccggaaauagcaauaagacccaaagugagggaucaagaagggagaaugaacuauuacuggacacuaguagagccgggagacaaaauaacauucgaagcaacuggaaaucuagugguaccgagauaugcauucgcaauggaaagaaaugcuggaucugguauuaucauuucagauacaccaguccacgauugcaauacaacuugucagacacccaagggugcuauaaacaccagccucccauuucagaauauacauccgaucacaauuggaaaauguccaaaauauguaaaaagcacaaaauugagacuggccacaggauugaggaaugucccgucuauucaaucuagaggccuauuuggggccauugccgguuucauugaagggggguggacagggaugguagauggaugguacgguuaucaccaucaaaaugagcaggggucaggauaugcagccgaccugaagagcacacagaaugccauugacgagauuacuaacaaaguaaauucuguuauugaaaagaugaauacacaguucacagcaguagguaaagaguucaaccaccuggaaaaaagaauagagaauuuaaauaaaaaaguugaugaugguuuccuggacauuuggacuuacaaugccgaacuguugguucuauuggaaaaugaaagaacuuuggacuaccacgauucaaaugugaagaacuuauaugaaaagguaagaagccagcuaaaaaacaaugccaaggaaauuggaaacggcugcuuugaauuuuaccacaaaugcgauaacacgugcauggaaagugucaaaaaugggacuuaugacuacccaaaauacucagaggaagcaaaauuaaacagagaagaaauagaugggguaaagcuggaaucaacaaggauuuaccagauuuuggcgaucuauucaacugucgccagcucauugguacugguagucucccugggggcaaucaguuucuggaugugcucuaaugggucucuacaguguagaauauguauuuaa

SEQ ID NO: 37867 - RNA, 1701 nt, Artificial Sequence; identical to SEQ ID NO: 34681
  derived and/or modified CDS sequence (wt) from hemagglutinin__InfluenzaA__ADM95758

SEQ ID NO: 37868 - RNA, 1701 nt, Artificial Sequence
  derived and/or modified CDS sequence (wt) from hemagglutinin__InfluenzaA__ADM95759
augaaggcaauacuaguaguucugcuauauacauuugcaaccgcaaaugcagacacauuauguauagguuaucaugcgaacaauucaacagacacuguagacacaguacuagaaaagaauguaacaguaacacacucuguuaaccuucuagaagacaagcauaacgggaaacuaugcaaacuaagagggguagccccauugcauuuggguaaauguaacauugcuggcuggauccugggaaauccagagugugaaucacucuccacagcaagcucaugguccuacauuguggaaacaucuaguucagacuauggaacguguuacccaggagauuucaucgauuaugaggagcuaagagagcaauugagcucagugucaucauuugaaagguuugagauauuccccaagacaaguucauggcccaaucaugacucgaacaaagguguaacggcagcauguccucaugcuggagcaaaaagcuucuacaaaaauuuaauauggcuaguuaaaaaaggaaauucauacccaaagcucagcaaauccuacauuaaugauaaagggaaagaaguccucgugcuauggggcauucaccauccaucuacuagugcugaccaacaaagucucuaucagaaugcagaugcauauguuuuuguggggacaucaagauacagcaagaaguucaagccggaaauagcaauaagacccaaagugagggaucaagaagggagaaugaacuauuacuggacacuaguagagccgggagacaaaauaacauucgaagcaacuggaaaucuagugguaccgagauaugcauucgcaauggaaagaaaugcuggaucugguauuaucauuucagauacaccaguccacgauugcaauacaacuugucagacacccaagggugcuauaaacaccagccucccauuucagaauauacauccgaucacaauuggaaaauguccaaaauauguaaaaagcacaaaauugagacuggccacaggauugaggaaugucccgucuauucaaucuagaggccuauuuggggccauugccgguuucauugaagggggguggacagggaugguagauggaugguacgguuaucaccaucaaaaugagcaggggucaggauaugcagccgaccugaagagcacacagaaugccauugacgagauuacuaacaaaguaaauucuguuauugaaaagaugaauacacaguucacagcaguagguaaagaguucaaccaccuggaaaaaagaauagagaauuuaaauaaaaaaguugaugaugguuuccuggacauuuggacuuacaaugccgaacuguugguucuauuggaaaaugaaagaacuuuggacuaccacgauucaaaugugaagaacuuauaugaaaagguaagaagccaguuaaaaaacaaugccaaggaaauuggaaacggcugcuuugaauuuuaccacaaaugcgauaacacgugcauggaaagugucaaaaaugggacuuaugacuacccaaaauacucagaggaagcaaaauuaaacagagaagaaauagaugggguaaagcuggaaucaacaaggauuuaccagauuuuggcgaucuauucaacugucgccaguucauugguacugguagucucccugggggcaaucaguuucuggaugugcucuaaugggucucuacaguguagaauauguauuuaa

SEQ ID NO: 37869 - RNA, 1701 nt, Artificial Sequence
  derived and/or modified CDS sequence (wt) from hemagglutinin__InfluenzaA__ADM95760
augaaggcaauacuaguaguucugcuauauacauuugcaaccgcaaaugcagacacauuauguauagguuaucaugcgaacaauucaacagacacuguagacacaguacuagaaaagaauguaacaguaacacacucuguuaaccuucuagaagacaagcauaacgggaaacuaugcaaacuaagagggguagccccauugcauuuggguaaauguaacauugcuggcuggauccugggaaauccagagugugaaucacucuccacagcaagcucaugguccuacauuguggaaacaucuaguucagacaauggaacguguuacccaggagauuucaucgauuaugaggagcuaagagagcaauugagcucagugucaucauuugaaagguuugagauauuccccaagacaaguucauggcccaaucaugacucgaacaaagguguaacggcagcauguccucaugcuggagcaaaaagcuucuacaaaaauuuaauauggcuaguuaaaaaaggaaauucauacccaaagcucagcaaauccuacauuaaugauaaagggaaagaaguccucgugcuauggggcauucaccauccaucuacuagugcugaccaacaaagucucuaucagaaugcagaugcauauguuuuuguggggucaucaagauacagcaagaaguucaagccggaaauagcaauaagacccaaagugagggaucaagaagggagaaugaacuauuacuggacacuaguagagccgggagacaaaauaacauucgaagcaacuggaaaucuagugguaccgagauaugcauucgcaauggaaagaaaugcuggaucugguauuaucauuucagauacaccaguccacgauugcaauacaacuugucagacacccaagggugcuauaaacaccagccucccauuucagaauauacauccgaucacaauuggaaaauguccaaaauauguaaaaagcacaaaauugagacuggccacaggauugaggaaugucccgucuauucaaucuagaggccuauuuggggccauugccgguuucauugaagggggguggacagggaugguagauggaugguacgguuaucaccaucaaaaugagcaggggucaggauaugcagccgaccugaagagcacacagaaugccauugacgagauuacuaacaaaguaaauucuguuauugaaaagaugaauacacaguucacagcaguagguaaagaguucaaccaccuggaaaaaagaauagagaauuuaaauaaaaaaguugaugaugguuuccuggacauuuggacuuacaaugccgaacuguugguucuauuggaaaaugaaagaacuuuggacuaccacgauucaaaugugaagaacuuauaugaaaagguaagaagccaauuaaaaaacaaugccaaggaaauuggaaacggcugcuuugaauuuuaccacaaaugcgauaacacaugcauggaaagugucaaaaaugggacuuaugacuacccaaaauacucagaggaagcaaaauuaaacagagaagaaauagaugggguaaagcuggaaucaacaaggauuuaccagauuuuggcgaucuauucaacugucgccaguucauugguacugguagucucucugggggcaaucaguuucuggaugugcucuaaugggucucuacaguguagaauauguauuuaa

SEQ ID NO: 37870 - RNA, 1701 nt, Artificial Sequence; identical to SEQ ID NO: 35871
  derived and/or modified CDS sequence (wt) from hemagglutinin__InfluenzaA__ADM95761

SEQ ID NO: 37871 - RNA, 1701 nt, Artificial Sequence
  derived and/or modified CDS sequence (wt) from hemagglutinin__InfluenzaA__ADM95763
augaaggcaauacuaguaguucugcuauauacauuugcaaccgcaaaugcagacacauuauguauagguuaucaugcgaacaauucaacagacacuguagacacaguacuagaaaagaauguaacaguaacacacucuguuaaccuucuagaagacaagaauaacgggaaacuaugcaaacuaagagggguagccccauugcauuuggguaaauguaacauugcuggcuggauccugggaaauccagagugugaaucacucuccacagcaagcucaugguccuacauuguggaaacaucuaguucagacaauggaacguguuacccaggagauuucaucgauuaugaggagcuaagagagcaauugagcucagugucaucauuugaaagguuugagauauuccccaagacaaguucauggcccaaucaugacucgaacaaagguguaacggcagcauguccucaugcuggagcaaaaagcuucuacaaaaauuuaauauggcuaguuaaaaaaggaaauucauacccaaagcucagcaaauccuacauuaaugauaaagggaaagaaguccucgugcuauggggcauucaccauccaucuacuagugcugaccaacaaagucucuaucagaaugcagaugcauauguuuuuguggggucaucaagauacagcaagaaguucaagccggaaauagcaauaagacccaaagugagggaucaagaagggagaaugaacuauuacuggacacuaguagagccgggagacaaaauaacauucgaagcaacuggaaaucuagugguaccgagauaugcauucgcaauggaaagaaaugcuggaucugguauuaucauuucagauacaccaguccacgauugcaauacaacuugucagacacccaagggugcuauaaacaccagccucccauuucagaauauacauccgaucacaauuggaaaauguccaaaauauguaaaaagcacaaaauugagacuggccacaggauugaggaaugucccgucuauucaaucuagaggccuauuuggggccauugccgguuucauugaagggggguggacagggaugguagauggaugguacgguuaucaccaucaaaaugagcaggggucaggauaugcagcagaccugaagagcacacagaaugccauugacgagauuacuaacaaaguaaauucuguuauugaaaagaugaauacacaguucacagcaguagguaaagaguucaaccaccuggaaaaaagaauagagaauuuaaauaaaaaaguugaugaugguuuccuggacauuuggacuuacaaugccgaacuguugguucuauuggaaaaugaaagaacuuuggacuaccacgauucaaaugugaagaacuuauaugaaaagguaagaagccagcuaaaaaacaaugccaaggaaauuggaaacggcugcuuugaauuuuaccacaaaugcgauaacacgugcauggaaagugucaaaaaugggacuuaugacuacccaaaauacucagaggaagcaaaauuaaacagagaagaaauagaugggguaaagcuggaaucaacaaggauuuaccagauuuuggcgaucuauucaacugucgccaguucauugguacugguagucucccugggggcaaucaguuucuggaugugcucuaaugggucucuacaguguagaauauguauuuaa

SEQ ID NO: 37872 - RNA, 1701 nt, Artificial Sequence; identical to SEQ ID NO: 34681
  derived and/or modified CDS sequence (wt) from hemagglutinin__InfluenzaA__ADM95764

SEQ ID NO: 37873 - RNA, 1701 nt, Artificial Sequence; identical to SEQ ID NO: 34681
  derived and/or modified CDS sequence (wt) from hemagglutinin__InfluenzaA__ADM95765

SEQ ID NO: 37874 - RNA, 1701 nt, Artificial Sequence; identical to SEQ ID NO: 34681
  derived and/or modified CDS sequence (wt) from hemagglutinin__InfluenzaA__ADM95767

SEQ ID NO: 37875 - RNA, 1701 nt, Artificial Sequence; identical to SEQ ID NO: 37824
  derived and/or modified CDS sequence (wt) from hemagglutinin__InfluenzaA__ADM95768

SEQ ID NO: 37876 - RNA, 1701 nt, Artificial Sequence; identical to SEQ ID NO: 35772
  derived and/or modified CDS sequence (wt) from hemagglutinin__InfluenzaA__ADM95769

SEQ ID NO: 37877 - RNA, 1701 nt, Artificial Sequence
  derived and/or modified CDS sequence (wt) from hemagglutinin__InfluenzaA__ADM95771
augaaggcaauacuaguaguucugcuauauacauuugcaaccgcaaaugcagacacauuauguauagguuaucaugcgaacaauucaacagacacuguagacacaguacuagaaaagaauguaacaguaacacacucuguuaaccuccuagaagacaagcauaacgggaaacuaugcaaacuaagagggguagccccauugcauuuggguaaauguaacauugcuggcuggauccugggaaauccagagugugaaucacucuccacagcaagcucaugguccuacauuguggaaacaucuaguucagacaauggaacguguuacccaggagauuucaucgauuaugaggagcuaagagagcaauuaagcucagugucaucauuugaaagguuugagauauuccccaagacaaguucauggcccaaucaugacucgaacaaagguguaacggcagcauguccucaugcuggagcaaaaagcuucuacaaaaauuuaauauggcuaguuaaaaaaggaaauucauacccaaagcucagcaaauccuacauuaaugauaaagggaaagaaguccucgugcuauggggcauucaccauccaucuacuagugcugaccaacaaagucucuaucagaaugcagaugcauauguuuuuguggggacaucaagauacagcaagaaguucaagccggaaauagcaauaagacccaaagugagggaucaagaagggagaaugaacuauuacuggacacuaguagagccgggagacaaaauaacauucgaagcaacuggaaaucuagugguaccgagauaugcauucgcaauggaaagagaugcuggaucugguauuaucauuucagauacaccaguccacgauugcaauacaacuugucagacacccaagggugcuauaaacaccagccucccauuucagaauauacauccgaucacaauuggaaaauguccaaaauauguaaaaagcacaaaauugagacuggccacaggauugaggaaugucccgucuauucaaucuagaggccuauuuggggccauugccgguuucauugaagggggguggacagggaugguagauggaugguacgguuaucaccaucaaaaugagcaggggucaggauaugcagccgaccugaagagcacacagaaugccauugacgagauuacuaacaaaguaaauucuguuauugaaaagaugaauacacaguucacagcaguagguaaagaguucaaccaccuggaaaaaagaauagagaauuuaaauaaaaaaauugaugaugguuuccuggacauuuggacuuacaaugccgaacuguugguucuauuggaaaaugaaagaacuuuggacuaccacgauucaaaugugaagaacuuauaugaaaagguaagaagccaguuaaaaaacaaugccaaggaaauuggaaacggcugcuuugaauuuuaccacaaaugcgauaacacgugcauggaaagugucaaaaaugggacuuaugacuacccaaaauacucagaggaagcaaaauuaaacagagaagaaauagaugggguaaagcuggaaucaacaaggauuuaccagauuuuggcgaucuauucaacugucgccaguucauugguacugguagucucccugggggcaaucaguuucuggaugugcucuaaugggucucuacaguguagaauauguauuuaa

SEQ ID NO: 37878 - RNA, 1701 nt, Artificial Sequence
  derived and/or modified CDS sequence (wt) from hemagglutinin__InfluenzaA__ADM95772
augaaggcaauacuaguaguucugcuauauacauuugcaaccgcaaaugcagacacauuauguauagguuaucaugcuaacaauucaacagacacuguagacacaguacuagaaaagaauguaacaguaacacacucuguuaaccuucuagaagacaagcauaacgggaaacuaugcaaacuaagagggguagccccauugcauuuggguaaauguaacauugcuggcuggauccuaggaaauccagagugugaaucacucuccacagcaagcucaugguccuacauuguggaaacaucuaguucagacaauggaacguguuacccaggagauuucaucgauuaugaggagcuaagagagcaauugagcucagugucaucauuugaaagguuugagauauuccccaagacaaguucauggcccaaucaugacucgaacaaagguguaacggcagcauguccucaugcuggagcaaaaagcuucuacaaaaauuuaauauggcuaguuaaaaaaggaaauucauacccaaagcucagcaaauccuacauuaaugauaaagggaaagaaguccucgugcuauggggcauucaccauccaucuacuagugcugaccaacaaagucucuaucagaaugcagaugcauauguuuuuguggggacaucaagauacagcaagaaguucaagccggaaauagcaauaagacccaaagugagggaucaagaagggagaaugaacuauuacuggacacuaguagagccgggagacaaaauaacauucgaagcaacuggaaaucuagugguaccgagauaugcauucgcaauggaaagaaaugcuggaucugguauuaucauuucagauacaccaguccacgauugcaauacaacuugucagacacccaagggugcuauaaacaccagccucccauuucagaauauacauccgaucacaauuggaaaauguccaaaauauguaaaaagcacaaaauugagacuggccacaggauugaggaaugucccgucuauucaaucuagaggccuauuuggggccauugccgguuucauugaagggggguggacagggaugguagauggaugguacgguuaucaccaucaaaaugagcaggggucaggauaugcagccgaccugaagagcacacagaaugccauugacgagauuacuaacaaaguaaauucuguuauugaaaagaugaauacacaguucacagcaguagguaaagaguucaaccaccuggaaaaaagaauagagaauuuaaauaaaaaaguugaugaugguuuccuggacauuuggacuuacaaugccgaacuguugguucuauuggaaaaugaaagaacuuuggacuaccacgauucaaaugugaagaacuuauaugaaaagguaagaagccaguuaaaaaacaaugccaaggaaauuggaaacggcugcuuugaauuuuaccacaaaugugauaacacgugcauggaaagugucaaaaaugggacuuaugacuacccaaaauacucagaggaagcaaaauuaaacagagaagaaauagaugggguaaagcuggaaucaacaaggauuuaccagauuuuggcgaucuauucaacugucgccaguucauugguacugguagucucccugggggcaaucaguuucuggaugugcucuaaugggucucuacaguguagaauauguauuuaa

SEQ ID NO: 37879 - RNA, 1701 nt, Artificial Sequence; identical to SEQ ID NO: 34714
  derived and/or modified CDS sequence (wt) from hemagglutinin__InfluenzaA__ADM95774

SEQ ID NO: 37880 - RNA, 1701 nt, Artificial Sequence
  derived and/or modified CDS sequence (wt) from hemagglutinin__InfluenzaA__ADM95775
augaaggcaauacuaguaguucugcuauauacauuugcaaccgcaaaugcagacacauuauguauagguuaucaugcgaacaauucaacagacacuguagacacaguacuagaaaagaauguaacaguaacacacucuguuaaccuucuagaagacaagcauaacgggaaacuaugcaaauuaagagggguagccccauugcauuuggguaaauguaacauugcuggcuggauccugggaaauccagagugugaaucacucuccacagcaagcucaugguccuacauuguggaaacaucuaguucagacaauggaacguguuacccaggagauuucaucgauuaugaggagcuaagagagcaauugagcucagugucaucauuugaaagguuugagauauuccccaagacaaguucauggcccaaucaugacucgaacaaagguguaacggcagcauguccucaugcuggagcaaaaagcuucuacaaaaauuuaauauggcuaguuaaaaaaggaaauucauacccaaagcucagcaaauccuacauuaaugauaaagggaaagaaguccucgugcuauggggcauucaccauccaucuacuagugcugaccaacaaagucucuaucagaaugcagaugcauauguuuuuguggggacaucaagauacagcaagaaguucaagccggaaauagcaauaagacccaaagugagggaucaagaagggagaaugaacuauuacuggacacuaguagagccgggagacaaaauaacauucgaagcaacuggaaaucuagugguaccgagauaugcauucgcaauggaaagaaaugcuggaucugguauuaucauuucagauacaccaguccacgauugcaauacaacuugucagacacccaagggugcuauaaacaccagccucccauuucagaauauacauccgaucacaauuggaaaauguccaaaauauguaaaaagcacaaaauugagacuggccacaggauugaggaaugucccgucuauucaaucuagaggccuauuuggggccauugccgguuucauugaagggggguggacagggaugguagauggaugguacgguuaucaccaucaaaaugagcaggggucaggauaugcagccgaccugaagagcacacagaaugccauugacgagauuacuaacaaaguaaauucuguuauugaaaagaugaauacacaguucacagcaguagguaaagaguucaaccaccuggaaaaaagaauagagaauuuaaauaaaaaaguugaugaugguuuccuggacauuuggacuuacaaugccgaacuguugguucuauuggaaaaugaaagaacuuuggacuaccacgauucaaaugugaagaacuuauaugaaaagguaagaagccaguuaaaaaacaaugccaaggaaauuggaaacggcugcuuugaauuuuaccacaaaugcgauaacacgugcauggaaagugucaaaaaugggacuuaugacuacccaaaauacucagaggaagcaaaauuaaacagagaagaaauagaugggguaaagcuggaaucaacaaggauuuaccagauuuuggcgaucuauucaacugucgccaguucauugguacugguagucucccugggggcaaucaguuucuggaugugcucuaaugggucucuacaguguagaauauguauuuaa

SEQ ID NO: 37881 - RNA, 1701 nt, Artificial Sequence
  derived and/or modified CDS sequence (wt) from hemagglutinin__InfluenzaA__ADM95776
augaaggcaauacuaguaguucugcuauauacauuugcaaccgcaaaugcagacacauuauguauagguuaucaugcgaacaauucaacagacacuguagacacaguacuagaaaagaauguaacaguaacacacucuguuaaccuucuagaagacaagcauaacgggaaacuaugcaaacuaagagggguagccccauugcauuuggguaaauguaacauugcuggcuggauccugggaaauccagagugugaaucacucuccacagcaagcucaugguccuacauuguggaaacaucuaguucagacaauggaacguguuacccaggagauuucaucgauuaugaggagcuaagagagcaauugagcucagugucaucauuugaaagguuugagauauuccccaagacaaguucauggcccaaucaugacucgaacaaagguguaacggcagcauguccucaugcuggagcaaaaagcuucuacaaaaauuuaauauggcuaguuaaaaaaggaaauucauacccaaagcucagcaaauccuacauuaaugauaaagggaaagaaguccucgugcuauggggcauccaccauccaucuacuagugcugaccaacaaagucucuaucagaaugcagaugcauauguuuuuguggggacaucaagauacagcaagaaguucaagccggaaauagcaauaagacccaaagugagggaacaagaagggagaaugaacuauuacuggacacuaguagagccgggagacaaaauaacauucgaagcaacuggaaaucuagugguaccgagauaugcauucgcaauggaaagaaaugcuggaucugguauuaucauuucagauacaccaguccacgauugcaauacaacuugucagacacccaagggugcuauaaacaccagccucccauuucagaauauacauccgaucacaauuggaaaauguccaaaauauguaaaaagcacaaaauugagacuggccacaggauugaggaaugucccgucuauucaaucuagaggccuauuuggggccauugccgguuucauugaagggggguggacagggaugguagauggaugguacgguuaucaccaucaaaaugagcaggggucaggauaugcagccgaccugaagagcacacagaaugccauugacgagauuacuaacaaaguaaauucuguuauugaaaagaugaauacacaguucacagcaguagguaaagaguucaaccaccuggaaaaaagaauagagaauuuaaauaaaaaaguugaugaugguuuccuggacauuuggacuuacaaugccgaacuguugguucuauuggaaaaugaaagaacuuuggacuaccacgauucaaaugugaagaacuuauaugaaaagguaagaagccaguuaaaaaacaaugccaaggaaauuggaaacggcugcuuugaauuuuaccacaaaugcgauaacacgugcauggaaagugucaaaaaugggacuuaugacuacccaaaauacucagaggaagcaaaauuaaacagagaagaaauagaugggguaaagcuggaaucaacaaggauuuaccagauuuuggcgaucuauucaacugucgccaguucauugguacugguagucucccugggggcaaucaguuucuggaugugcucuaaugggucucuacaguguagaauauguauuuaa

SEQ ID NO: 37882 - RNA, 1701 nt, Artificial Sequence
  derived and/or modified CDS sequence (wt) from hemagglutinin__InfluenzaA__ADM95778
augaaggcaauacuaguaguucugcuauauacauuugcaaccgcaaaugcagacacauuauguauagguuaucaugcgaacaauucaacagacacuguagacacaguacuagaaaagaauguaacaguaacacacucuguuaaccuucuagaagacaagcauaacgggaaacuaugcaaacuaagagggguagccccauugcauuuggguaaauguaacauugcuggcuggauccugggaaauccagagugugaaucacucuccacagcaagcucaugguccuacauuguggaaacaucuaguucagauaauggaacguguuacccaggagauuucaucgauuaugaggagcuaagagagcaauugagcucagugucaucauuugaaagguuugagauauuccccaagacaaguucauggcccaaucaugacucgaacaaagguguaacggcagcauguccucaugcuggagcaaaaagcuucuacaaaaauuuaauauggcuaguuaaaaaaggaaauucauacccaaagcucagcaaauccuacauuaaugauaaagggaaagaaguccucgugcuauggggcauucaccauccaucuacuagugcugaccaacaaagucucuaucagaaugcagaugcauauguuuuuguggggacaucaagauacagcaagaaguucaagccggaaauagcaauaagacccaaagugagggaacaagaagggagaaugaacuauuacuggacacuaguagagccgggagacaaaauaacauucgaagcaacuggaaaucuagugguaccgagauaugcauucgcaauggaaagaaaugcuggaucugguauuaucauuucagauacaccaguccacgauugcaauacaacuugucagacacccaagggugcuauaaacaccagccucccauuucagaauauacauccgaucacaauuggaaaauguccaaaauauguaaaaagcacaaaauugagacuggccacaggauugaggaaugucccgucuauucaaucuagaggccuauuuggggccauugccgguuucauugaagggggguggacagggaugguagauggaugguacgguuaucaccaucaaaaugagcaggggucaggauaugcagccgaccugaagagcacacagaaugccauugacgagauuacuaacaaaguaaauucuguuauugaaaagaugaauacacaguucacagcaguagguaaagaguucaaccaccuggaaaaaagaauagagaauuuaaauaaaaaaguugaugaugguuuccuggacauuuggacuuacaaugccgaacuguugguucuauuggaaaaugaaagaaccuuggacuaccacgauucaaaugugaagaacuuauaugaaaagguaagaagccaguuaaaaaacaaugccaaggaaauuggaaacggcugcuuugaauuuuaccacaaaugcgauaacacgugcauggaaagugucaaaaaugggacuuaugacuacccaaaauacucagaggaagcaaaauuaaacagagaagaaauagaugggguaaagcuggaaucaacaaggauuuaccagauuuuggcgaucuauucaacugucgccaguucauugguacugguagucucccugggggcaaucaguuucuggaugugcucuaaugggucucuacaguguagaauauguauuuaa

SEQ ID NO: 37883 - RNA, 1701 nt, Artificial Sequence
  derived and/or modified CDS sequence (wt) from hemagglutinin__InfluenzaA__ADM95779
augaaggcaauacuaguaguucugcuauauacauuugcaaccgcaaaugcagacacauuauguauagguuaucaugcgaacaauucaacagacacuguagacacaguacuagaaaagaauguaacaguaacacacucuguuaaccuucuagaagacaagcauaacgggaaacuaugcaaacuaagagggguagccccauugcauuuggguaaauguaacauugcuggcuggauccugggaaauccagagugugaaucacucuccacagcaagcucaugguccuacauuguggaaacaucuaguucagacaauggaacguguuacccaggagauuucaucgauuaugaggagcuaagagagcaauugagcucagugucaucauuugaaagguuugagauauuccccaagacaaguucauggcccaaucaugacucgaacaaagguguaacggcagcauguccucaugcuggagcaaaaagcuucuacaaaaauuuaauauggcuaguuaaaaaaggaaauucauacccaaagcucagcaaauccuacauuaaugauaaagggaaagaaguccuagugcuauggggcauucaccauccaucuacuagugcugaccaacaaagucucuaucagaaugcagaugcauauguuuuuguggggacaucaagauacagcaagaaguucaagccggaaauagcaauaagacccaaagugagggaucaagaagggagaaugaacuauuacuggacacuaguagagccgggagacaaaauaacauucgaagcaacuggaaaucuagugguaccgagauaugcauucgcaauggaaagaaaugcuggaucugguauuaucauuucagauacaccaguccacgauugcaauacaacuugucagacacccaagggugcuauaaacaccagccucccauuucagaauauacauccgaucacaauuggaaaauguccaaaauauguaaaaagcacaaaauugagacuggccacaggauugaggaauaucccgucuauucaaucuagaggccuauuuggggccauugccgguuucauugaagggggguggacagggaugguagauggaugguacgguuaucaccaucaaaaugagcaggggucaggauaugcagccgaccugaagagcacacagaaugccauugacgagauuacuaacaaaguaaauucuguuauugaaaagaugaauacacaguucacagcaguagguaaagaguucaaccaccuggaaaaaagaauagagaauuuaaauaaaaagguugaugaugguuuccuggacauuuggacuuacaaugccgaacuguugguucuauuggaaaaugaaagaacuuuggacuaccacgauucaaaugugaagaacuuauaugaaaagguaagaagccaguuaaaaaacaaugccaaggaaauuggaaacggcugcuuugaauuuuaccacaaaugcgauaacacgugcauggaaagugucaaaaaugggacuuaugacuacccaaaauacucagaggaagcaaaauuaaacagagaagaaauagaugggguaaagcuggaaccaacaaggauuuaccagauuuuggcgaucuauucaacugucgccaguucauugguacugguagucucccugggggcaaucaguuucuggaugugcucuaaugggucucuacaguguagaauauguauuuaa

SEQ ID NO: 37884 - RNA, 1701 nt, Artificial Sequence
  derived and/or modified CDS sequence (wt) from hemagglutinin__InfluenzaA__ADM95780
augaaggcaauacuaguaguucugcuauauacauuugcaaccgcaaaugcagacacauuauguauagguuaucaugcgaacaauucaacagacacuguagacacaguacuagaaaagaauguaacaguaacacacucuguuaaccuucuagaagacaagcauaacgggaaacuaugcaaacuaagagggguagccccauugcauuuggguaaauguaacauugcuggcuggauccugggaaauccagagugugaaucacucuccacagcaagcucaugguccuacauuguggaaacaucuaguucagacaauggaacguguuacccaggagauuucaucgauuaugaggagcuaagagagcaauugagcucagugucaucauuugaaagguuugagauauuccccaagacaaguucauggcccaaucaugacucgaacaaagguguaacggcagcauguccucaugcuggagcaaaaagcuucuacaaaaauuuaauauggcuaguuaaaaaaggaaauucauacccaaagcucagcaaauccuacauuaaugauaaagggaaagaaguccucgugcuauggggcauucaccauccaucuacuagugcugaccaacaaagucucuaucagaaugcagaugcauauguuuuuguggggacaucaagauacagcaagaaguucaagccggaaauagcaauaagacccaaagugagggaacaagaagggagaaugaacuauuacuggacacuaguagagccgggagacaaaauaacauucgaagcaacuggaaaucuagugguaccgagauaugcauucgcaauggaaagaaaugcuggaucugguauuaucauuucagauacaccaguccacgauugcaauacaacuugucagacacccaagggugcuauaaacaccagccucccauuucagaauauacauccgaucacaauuggaaaauguccaaaauauguaaaaagcacaaaauugagacuggccacaggauugaggaaugucccgucuauucaaucuagaggccuauuuggggccauugccgguuucauugaagggggguggacagggaugguagauggaugguacgguuaucaccaucaaaaugagcaggggucaggauaugcagccgaccugaagagcacacagaaugccauugacgagauuacuaacaaaguaaauucuguuauugaaaagaugaauacacaguucacagcaguagguaaagaguucaaccaccuggaaaaaagaauagagaauuuaaauaaaaaaguugaugaugguuuccuggacauuuggacuuacaaugccgaacuguugguucuauuggaaaaugaaagaaccuuggacuaccacgauucaaaugugaagaacuuauaugaaaagguaagaagccaguuaaaaaacaaugccaaggaaauuggaaacggcugcuuugaauuuuaccacaaaugcgauaacacgugcauggaaagugucaaaaaugggacuuaugacuacccaaaauacucagaggaagcaaaauuaaacagagaagaaauagaugggguaaagcuggaaucaacaaggauuuaccagauuuuggcgaucuauucaacugucgccaguucauugguacugguagucucccugggggcaaucaguuucuggaugugcucuaaugggucucuacaguguagaauauguauuuaa

SEQ ID NO: 37885 - RNA, 1701 nt, Artificial Sequence
  derived and/or modified CDS sequence (wt) from hemagglutinin__InfluenzaA__ADM95783
augaaggcaauacuaguaguucugcuauauacauuugcaaccgcaaaugcagacacauuauguauagguuaucaugcgaacaauucaacagacacuguagacacaguacuagaaaagaauguaacaguaacacacucuguuaaccuucuagaagacaagcauaacgggaaacuaugcaaacuaagagggguagccccauugcauuuggguaaauguaacauugcuggcuggauccugggaaauccagagugugaaucacucuccacagcaagcucaugguccuacauuguggaaacaucuaguucagacaauggaacguguuacccaggagauuucaucgauuaugaggagcuaagagagcaauugagcucagugucaucauuugaaagguuugagauauuccccaagacaaguucauggcccaaucaugacucgaacaaagguguaacggcagcauguccucaugcuggagcaaaaagcuucuacaaaaauuuaauauggcuaguuaaaaaaggaaauucauacccaaagcucagcaaauccuacauuaaugauaaagggaaagaaguccucgugcuauggggcauucaccauccaucuacuagugcugaccaacaaagucucuaucagaaugcagaugcauauguuuuuguggggucaucaagauacagcaagaaguucaagccggaaauagcaauaagacccaaagugagggaucaagaagggagaaugaacuauuacuggacacuaguagagccgggagacaaaauaacauucgaagcaacuggaaaucuagugguaccgagauaugcauucgcaauggaaagaaaugcuggaucugguauuaucauuucagauacaccaguccacgauugcaauacaacuugucagacacccaagggugcuauaaacaccagccucccauuucauaauauacauccgaucacaauuggaaaauguccaaaauauguaaaaagcacaaaauugagacuggccacaggauugaggaaugucccgucuauucaaucuagaggccuauuuggggccauugccgguuucauugaagggggguggacagggaugguggauggaugguacgguuaucaccaucaaaaugagcaggggucaggauaugcagccgaccugaagagcacacagaaugccauugacgagauuacuaacaaaguaaauucuguuauugaaaagaugaauacacaguucacagcaguagguaaagaguucaaccaccuggaaaaaagaauagagaauuuaaauaaaaaaguugaugaugguuuccuggacauuuggacuuacaaugccgaacuguugguucuauuggaaaaugaaagaacuuuggacuaccacgauucaaaugugaagaacuuauaugaaaagguaagaagccaguuaaaaaacaaugccaaggaaauuggaaacggcugcuuugaauuuuaccacaaaugcgauaacacgugcauggaaagugucaaaaaugggacuuaugacuacccaaaauacucagaggaagcaaaauuaaacagagaagaaauagaugggguaaagcuggaaucaacaaggauuuaccagauuuuggcgaucuauucaacugucgccaguucauugguacugguagucucccugggggcaaucaguuucuggaugugcucuaaugggucucuacaguguagaauauguauuuaa

SEQ ID NO: 37886 - RNA, 1701 nt, Artificial Sequence
  derived and/or modified CDS sequence (wt) from hemagglutinin__InfluenzaA__ADM95784
augaaggcaauacuaguaguucugcuauauacauuugcaaccgcaaaugcagacacauuauguauagguuaucaugcgaacaauucaacagacacuguagacacaguacuagaaaagaauguaacaguaacacacucuguuaaccuucuagaagacaagcauaacgggaaacuaugcaaacuaagagggguagccccauugcauuuggguaaauguaacauugcuggcuggauccugggaaauccagagugugaaucacucuccacagcaagcucaugguccuacauuguggaaacaucuaguucagacaauggaacguguuacccaggagauuucaucgauuaugaggagcuaagagagcaauugagcucagugucauccuuugaaagguuugagauauuccccaagacaaguucauggcccaaucaugacucgaacaaagguguaacggcagcauguccucaugcuggagcaaaaagcuucuacaaaaauuuaauauggcuaguuaaaaaaggaaauucauacccaaagcucagcaaauccuacauuaaugauaaagggaaagaaguccucgugcuauggggcauucaccauccaucuacuagugcugaccaacaaagucucuaucagaaugcagaugcauauguuuuuguggggacaucaagauacagcaagaaguucaagccggaaauagcaauaagacccaaagugagggaucaagaagggagaaugaacuauuacuggacacuaguagagccgggagacaaaauaacauucgaagcaacuggaaaucuagugguaccgagauaugcauucgcaauggaaagaaaugcuggaucugguauuaucauuucagauacaccaguccacgauugcaauacaacuugucagacacccaagggugcgauaaacaccagccuaccauuucagaauauacauccgaucacaauuggaaaauguccaaaauauguaaaaagcacaaaauugagacuggccacaggauugaggaaugucccgucuauucaaucuagaggccuauuuggggccauugccgguuucauugaagggggguggacagggaugguagauggaugguacgguuaucaccaucaaaaugagcaggggucaggauaugcagccgaccugaagagcacacagaaugccauugacgagauuacuaacaaaguaaauucuguuauugaaaagaugaauacacaguucacagcaguagguaaagaguucaaccaccuggaaaaaagaauagagaauuuaaauaaaaaaguugaugaugguuuccuggacauuuggacuuacaaugccgaacuguugguucuauuggaaaaugaaagaacuuuggacuaccacgauucaaaugugaagaacuuauaugaaaagguaagaagccaguuaaaaaacaaugccaaggaaauuggaaacggcugcuuugaauuuuaccacaaaugcgauaacacgugcauggaaagugucaaaaaugggacuuaugacuacccaaaauacucagaggaagcaaaauuaaacagagaagaaauagaugggguaaagcuggaaucaacaaggauuuaccagauuuuggcgaucuauucaacugucgccaguucauugguacugguagucucccugggggcaaucaguuucuggaugugcucuaaugggucucuacaguguagaauauguauuuaa

SEQ ID NO: 37887 - RNA, 1701 nt, Artificial Sequence; identical to SEQ ID NO: 34714
  derived and/or modified CDS sequence (wt) from hemagglutinin__InfluenzaA__ADM95785

SEQ ID NO: 37888 - RNA, 1701 nt, Artificial Sequence
  derived and/or modified CDS sequence (wt) from hemagglutinin__InfluenzaA__ADM95786
augaaggcaauacuaguaguucugcuauauacauuugcaaccgcaaaugcagacacauuauguauagguuaucaugcgaacaauucaacagacacuguagacacaguacuagaaaagaauguaacaguaacacacucuguuaaccuucuagaagacaagcauaacgggaaacuaugcaaacuaagagggguagccccauugcauuuggguaaauguaacauagcuggcuggauccugggaaauccagagugugaaucacucuccacagcaagcucaugguccuacauuguggaaacaucuaguucagacaauggaacguguuacccaggagauuucaucgauuaugaggagcuaagagagcaauugagcucagugucaucauuugaaagguuugagauauuccccaagacaaguucauggcccaaucaugacucgaacaaagguguaacggcagcauguucucaugcuggagcaaaaagcuucuacaaaaauuuaauauggcuaguuaaaaaaggaaauucauacccaaagcucagcaaauccuacauuaaugauaaagggaaagaaguccucgugcuauggggcauucaccauccaucuacuagugcugaccaacaaagucucuaucagaaugcagaugcauauguuuuuguggggacaucaagauacagcaagaaguucaagccggaaauagcaauaagacccaaagugagggaacaagaagggagaaugaacuauuacuggacacuaguagagccgggagacaaaauaacauucgaagcaacuggaaaucuagugguaccgagauaugcauucgcaauggaaagaaaugcuggaucugguauuaucauuucagauacaccaguccacgauugcaauacaacuugucagacacccaagggugcuauaaacaccagccucccauuucagaauauacauccgaucacaauuggaaaauguccaaaauauguaaaaagcacaaaauugagacuggccacaggauugaggaaugucccgucuauucaaucuagaggccuauuuggggccauugccgguuucauugaagggggguggacagggaugguagauggaugguacgguuaucaccaucaaaaugagcaggggucaggauaugcagccgaccugaagagcacacagaaugccauugacgagauuacuaacaaaguaaauucuguuauugaaaagaugaauacacaguucacagcaguagguaaagaguucaaccaccuggaaaaaagaauagagaauuuaaauaaaaaaguugaugaugguuuccuggacauuuggacuuacaaugccgaacuguugguucuauuggaaaaugaaagaacuuuggacuaccacgauucaaaugugaagaacuuauaugaaaagguaagaagccaguuaaaaaacaaugccaaggaaauuggaaacggcugcuuugaauuuuaccacaaaugcgauaacacgugcauggaaagugucaaaaaugggacuuaugacuacccaaaauacucagaggaagcaaaauuaaacagagaagaaauagaugggguaaagcuggaaucaacaaggauuuaccagauuuuggcgaucuauucaacugucgccaguucauugguacugguagucucccugggggcaaucaguuucuggaugugcucuaaugggucucuacaguguagaauauguauuuaa

SEQ ID NO: 37889 - RNA, 1701 nt, Artificial Sequence; identical to SEQ ID NO: 37884
  derived and/or modified CDS sequence (wt) from hemagglutinin__InfluenzaA__ADM95788

SEQ ID NO: 37890 - RNA, 1701 nt, Artificial Sequence
  derived and/or modified CDS sequence (wt) from hemagglutinin__InfluenzaA__ADM95789
augaaggcaauacuaguaguucugcuauauacauuugcaaccgcaaaugcagacacauuauguauagguuaucaugcgaacaauucaacagacacuguagacacaguacuagaaaagaauguaacaguaacacacucuguuaaccuucuagaagacaagcauaacgggaaacuaugcaaacuaagagggguagccccauugcauuuggguaaauguaacauugcuggcuggauccugggaaauccagagugugaaucacucuccacagcaagcucaugguccuacauuguggaaacaucuaguucagacaauggaacguguuacccaggagauuucaucgauuaugaggagcuaagagagcaauugagcucagugucaucauuugaaagguuugagauauuccccaagacaaguucauggcccaaucaugacucgaacaaagguguaacggcagcauguccucaugcuggagcaaaaagcuucuacaaaaauuuaauauggcuaguuaaaaaaggaaauucauacccaaagcucagcaaauccuacauuaaugauaaagggaaagaaguccucgugcuauggggcauucaccauccaucuacuagugcugaccaacaaagucucuaucagaaugcagaugcauauguuuuuguggggacaucaagauacagcaagaaguucaagccggaaauagcaauaagacccaaagugagggaacaagaagggagaaugaacuauuacuggacacuaguagagccgggagacaaaauaacauucgaagcaacuggaaaucuagugguaccgagauaugcauucgcaauggaaagaaaugcuggaucugguauuaucauuucagauacaccaguccacgauugcaauacaacuugucagacacccaagggugcuauaaacaccagccucccauuucagaauauacauccgaucacaauuggaaaauguccaaaauauguaaaaagcacaaaauugagacuggccacaggauugaggaaugucccgucuauucaaucuagaggccuauuuggggccauugccgguuucauugaagggggguggacagggaugguagauggaugguacgguuaucaccaucaaaaugagcaggggucaggauaugcagccgaccugaagagcacacagaaugccauugacgagauuacuaacaaaguaaauucuguuauugaaaagaugaauacacaguucacagcaguagguaaagaguucaaccaccuggaaaaaagaauagagaauuuaaauaaaaaaguugaugaugguuuccuggacauuuggacuuacaaugccgaacuguugguucuauuggaaaaugaaagaaccuuggacuaccacgauucaaaugugaagaacuuauaugaaaagguaagaagccaguuaaaaaacaaugccaaggaaauuggaaacggcugcuuugaauuuuaccacaaaugcgauaacacgugcauggaaagugucaaaaauggaacuuaugacuacccaaaauacucagaggaagcaaaauuaaacagagaagaaauagaugggguaaagcuggaaucaacaaggauuuaccagauuuuggcgaucuauucaacugucgccaguucauugguacugguagucucccugggggcaaucaguuucuggaugugcucuaaugggucucuacaguguagaauauguauuuaa

SEQ ID NO: 37891 - RNA, 1701 nt, Artificial Sequence
  derived and/or modified CDS sequence (wt) from hemagglutinin__InfluenzaA__ADM95790
augaaggcaauacuaguaguucugcuauauacauuugcaaccgcaaaugcagacacauuauguauagguuaucaugcgaacaauucaacagacacuguagacacaguacuagaaaagaauguaacaguaacacacucuguuaaccuucuagaagacaagcauaacgggaaacuaugcaaacuaagagggguagccccauugcauuuggguaaauguaacauugcuggcuggauccugggaaauccagagugugaaucacucuccacagcaagcucaugguccuacauuguggaaacaucuaguucagacaauggaacauguuacccaggagauuucaucgauuaugaggagcuaagagagcaauugagcucagugucaucauuugaaagguuugagauauuccccaagacaaguucauggcccaaucaugacucgaacaaagguguaacggcagcauguccucaugcuggagcaaaaagcuucuacaaaaauuuaauauggcuaguuaaaaaaggaaauucauacccaaagcucagaaaauccuacauuaaugauaaagggaaagaaguccucgugcuauggggcauucaccauccaucuacuagugcugaccaacaaagucucuaucagaaugcagaugcauauguuuuuguggggacaucaagauacagcaagaaguucaagccggaaauagcaauaagacccaaagugagggaucaagaagggagaaugaacuauuacuggacacuaguagagccgggagacaaaauaacauucgaagcaacuggaaaucuagugguaccgagauaugcauucgcaauggaaagaaaugcuggaucugguauuaucauuucagauacaccaguccacgauugcaauacaacuugucagacacccaagggugcuauaaacaccagccucccauuucagaauauacauccgaucacaauuggaaaauguccaaaauauguaaaaagcacaaaauugagacuggccacaggauugaggaauaucccgucuauucaaucuagaggccuauuuggggccauugccgguuucauugaagggggguggacagggaugguagauggaugguacgguuaucaccaucaaaaugagcaggggucaggauaugcagccgaccugaagagcacacagaaugccauugacgagauuacuaacaaaguaaauucuguuauugaaaagaugaauacacaguucacagcaguagguaaagaguucaaccaccuggaaaaaagaauagagaauuuaaauaaaaagguugaugaugguuuccuggacauuuggacuuacaaugccgaacuguugguucuauuggaaaaugaaagaacuuuggacuaccacgauucaaaugugaagaacuuauaugaaaagguaagaagccaguuaaaaaacaaugccaaggaaauuggaaacggcugcuuugaauuuuaccacaaaugcgauaacacgugcauggaaagugucaaaaaugggacuuaugacuacccaaaauacucagaggaagcaaaauuaaacagagaagaaauagaugggguaaagcuggaaucaacaaggauuuaccagauuuuggcgaucuauucaacugucgccaguucauugguacugguagucucccugggggcaaucaguuucuggaugugcucuaaugggucucuacaguguagaauauguauuuaa

SEQ ID NO: 37892 - RNA, 1701 nt, Artificial Sequence; identical to SEQ ID NO: 37891
  derived and/or modified CDS sequence (wt) from hemagglutinin__InfluenzaA__ADM95791

SEQ ID NO: 37893 - RNA, 1701 nt, Artificial Sequence; identical to SEQ ID NO: 37891
  derived and/or modified CDS sequence (wt) from hemagglutinin__InfluenzaA__ADM95792

SEQ ID NO: 37894 - RNA, 1701 nt, Artificial Sequence
  derived and/or modified CDS sequence (wt) from hemagglutinin__InfluenzaA__ADM95793
augaaggcaauacuaguaguucugcuauauacauuugcaaccgcaaaugcagacacauuauguauagguuaucaugcgaacaauucaacagacacuguagacacaguacuagaaaagaauguaacaguaacacacucuguuaaccuucuagaagacaagcauaacgggaaacuaugcaaacuaagagggguagccccauugcauuuggguaaauguaacauugcuggcuggauccugggaaauccagagugugaaucacucuccacagcaagcucaugguccuacauuguggaaacaucuaguucagacaauggaacguguuacccaggagauuucaucgauuaugaggagcuaagagagcaauugagcucagugucaucauuugaaagguuugagauauuccccaagacaaguucauggcccaaucaugacucgaacaaagguguaacggcagcaugcccucaugcuggagcaaaaagcuucuacaaaaauuuaauauggcuaguuaaaaaaggaaauucauacccaaagcucagcaaauccuacauuaaugauaaagggaaagaaguccucgugcuauggggcauucaccauccaucuacuagugcugaccaacaaagucucuaucagaaugcagaugcauauguuuuugugggaacaucaagauacagcaagaaguucaagccggaaauagcaauaagacccaaagugagggaucaagaagggagaaugaacuauuacuggacacuaguagagccgggagacaaaauaacauucgaagcaacuggaaaucuagugguaccgagauaugcauucgcaauggaaagaaaugcuggaucugguauuaucauuucagauacaccaguccacgauugcaauacaacuugucagacacccaagggugcuauaaacaccagccucccauuucagaauauacauccgaucacaauuggaaaauguccaaaauauguaaaaagcacaaaauugagacuggccacaggauugaggaaugucccgucuauucaaucuagaggccuauuuggggccauugccgguuucauugaagggggguggacagggaugguagauggaugguacgguuaucaccaucaaaaugagcaggggucaggauaugcagccgaccugaagagcacacagaaugccauugacgagauuacuaacaaaguaaauucuguuauugaaaagaugaauacacaguucacagcaguagguaaagaguucaaccaccuggaaaaaagaauagagaauuuaaauaaaaaaguugaugaugguuuccuggacauuuggacuuacaaugccgaacuguugguucuauuggaaaaugaaagaacuuuggacuaccacgauucaaaugugaagaaauuauaugaaaagguaagaagccaguuaaaaaacaaugccaaggaaauuggaaacggcugcuuugaauuuuaccacaaaugcgauaacacgugcauggaaagugucaaaaaugggacuuaugacuacccaaaauacucagaggaagcaaaauuaaacagagaagaaauagauggaguaaagcuggaaucaacaaggauuuaccagauuuuggcgaucuauucaacugucgccaguucauugguacugguagucucccugggggcaaucaguuucuggaugugcucuaaugggucucuacaguguagaauauguauuuaa

SEQ ID NO: 37895 - RNA, 1701 nt, Artificial Sequence
  derived and/or modified CDS sequence (wt) from hemagglutinin__InfluenzaA__ADM95794
augaaggcaauacuaguaguucugcuauauacauuugcaaccgcaaaugcagacacauuauguauagguuaucaugcgaacaauucaacagacacuguagacacaguacuagaaaagaauguaacaguaacacacucuguuaaccuucuagaagacaagcauaacgggaaacuaugcaaacuaagagggguagccccauugcauuuggguaaauguaacauugcuggcuggauccugggaaauccagagugugaaucacucuccacagcaagcucaugguccuacauuguggaaacaucuaguucagacaauggaacguguuacccaggagauuucaucgauuaugaggagcuaagagagcaauugagcucagugucaucauuugaaagguuugagauauuccccaagacaaguucauggcccaaucaugacucgaacaaagguguaacggcagcauguccucaugcuggagcaaaaagcuucuacaaaaauuuaauauggcuaguuaaaaaaggaaauucauacccaaagcucagcaaauccuacauuaaugauaaagggaaagaaguccucgugcuauggggcauucaccauccaucuacuagugcugaccaacaaagucucuaucagaaugcagaugcauauguuuuuguggggacaucaagauacagcaagaaguucaagccggaaauagcaauaagacccaaagugagggaacaagaagggagaaugaacuauuacuggacacuaguagagccgggagacaaaauaacauucgaagcaacuggaaaucuagugguaccgagauaugcauucgcaauggaaagaaaugcuggaucugguauuaucauuucagauacaccaguccacgauugcaauacaacuugucagacacccaagggugcuauaaacaccagccucccauuucagaauauacauccgaucacaauugggaaauguccaaaauauguaaaaagcacaaaauugagacuggccacaggauugaggaaugucccgucuauucaaucuagaggccuauuuggggccauugccgguuucauugaagggggguggacagggaugguagauggaugguacgguuaucaccaucaaaaugagcaggggucaggauaugcagccgaccugaagagcacacagaaugccauugacgagauuacuaacaaaguaaauucuguuauugaaaagaugaauacacaguucacagcaguagguaaagaguucaaccaccuggaaaaaagaauagagaauuuaaauaaaaaaguugaugaugguuuccuggacauuuggacuuacaaugccgaacuguugguucuauuggaaaaugaaagaacuuuggacuaccacgauucaaaugugaagaacuuauaugaaaagguaagaagccaguuaaaaaacaaugccaaggaaauuggaaacggcugcuuugaauuuuaccacaaaugcgauaacacgugcauggaaagugucaaaaaugggacuuaugacuacccaaaauauucagaggaagcaaaauuaaacagagaagaaauagaugggguaaagcuggaaucaacaaggauuuaccagauuuuggcgaucuauucaacugucgccaguucauugguacugguagucucccugggggcaaucaguuucuggaugugcucuaaugggucucuacaguguagaauauguauuuaa

SEQ ID NO: 37896 - RNA, 1701 nt, Artificial Sequence
  derived and/or modified CDS sequence (wt) from hemagglutinin__InfluenzaA__ADM95795
augaaggcaauacuaguaguuuugcuauauacauuugcaaccgcaaaugcagacacauuauguauagguuaucaugcgaacaauucaacagacacuguagacacaguacuagaaaagaauguaacaguaacacacucuguuaaccuucuagaagacaagcauaacgggaaacuaugcaaacuaagagggguagccccauugcauuuggguaaauguaacauugcuggcuggauccugggaaauccagagugugaaucacucuccacagcaagcucaugguccuacauuguggaaacaucuaguucagacaauggaacguguuacccaggagauuucaucgauuaugaggagcuaagagagcaauugagcucagugucaucauuugaaagguuugagauauuccccaagacaaguucauggcccaaucaugacucgaacaaagguguaacggcagcauguccucaugcuggagcaaaaagcuucuacaaaaauuuaauauggcuaguuaaaaaaggaaauucauacccaaagcucagcaaauccuacauuaaugauaaagggaaagaaguccucgugcuauggggcauucaccauccaucuacuagugcugaccaacaaagucucuaucagaaugcagaugcauauguuuuuguggggacaucaagauacagcaagaaguucaagccggaaauagcaauaagacccaaagugagggaucaagaagggagaaugaacuauuacuggacacuaguagagccgggagacaaaauaacauucgaagcaacuggaaaucuagugguaccgagauaugcauucgcaauggaaagaaaugcuggaucugguauuaucauuucagauacaccaguccacgauugcaauacaacuugucagacacccaagggugcuauaaacaccagccucccauuucagaauauacauccgaucacaauuggaaaauguccaaaauauguaaaaagcacaaaauugagacuggccacaggauugaggaaugucccgucuauucaaucuagaggccuauuuggggccauugccgguuucauugaagggggguggacagggaugguagauggaugguacgguuaucaccaucaaaaugagcaggggucaggauaugcagccgaccugaagagcacacagaaugccauugacgagauuacuaacaaaguaaauucuguuauugaaaagaugaauacacaguucacagcaguagguaaagaguucaaccaccuggaaaaaagaauagagaauuuaaauaaaaaaguugaugaugguuuccuggacauuuggacuuacaaugccgaacuguugguucuauuggaaaaugaaagaacuuuggacuaccacgauucaaaugugaagaacuuauaugaaaagguaagaagccaguuaaaaaacaaugccaaggaaauuggaaacggcugcuuugaauuuuaccacaaaugcgauaacacgugcauggaaagugucaaaaaugggacuuaugacuacccaaaauacucagaggaagcaaaauuaaacagagaagaaauagaugggguaaagcuggaaucaacaaggauuuaccagauuuuggcgaucuauucaacugucgccaguucauugguacugguagucucccugggggcaaucaguuucuggaugugcucuaaugggucucuacaguguagaauauguauuuaa

SEQ ID NO: 37897 - RNA, 1701 nt, Artificial Sequence
  derived and/or modified CDS sequence (wt) from hemagglutinin__InfluenzaA__ADM95798
augaaggcaauacuaguaguucugcuauauacauuugcaaccgcaaaugcagacacauuauguauagguuaucaugcgaacaauucaacagacacuguagacacaguacuagaaaagaauguaacaguaacacacucuguuaaccuucuagaagacaagcauaacgggaaacuaugcaaacuaagagggguagccccauugcauuuggguaaauguaacauugcuggcuggauccugggaaauccagagugugaaucacucuccacagcaagcucaugguccuacauuguggaaacaucuaguucaggcaauggaacguguuacccaggagauuucaucgauuaugaggagcuaagagagcaauugagcucagugucaucauuugaaagguuugagauauuccccaagacaagcucauggcccaaucaugacucgaacaaagguguaacggcagcauguccucaugcuggagcaaaaagcuucuacaaaaauuuaauauggcuaguuaaaaaaggaaacucauacccaaagcucagcaaauccuacauuaaugauaaagggaaagaaguccucgugcuauggggcauucaccauccaucuacuagugcugaccaacaaagucucuaucagaaugcagaugcauauguuuuuguggggacaucaagauacagcaagaaguucaagccggaaauagcaauaagacccaaagugagggaucaagaagggagaaugaacuauuacuggacacuaguagagccgggagacaaaauaacauucgaagcaacuggaaaucuagugguaccgagauaugcauucgcaauggaaagaaaugcuggaucugguauuaucauuucagauacaccaguccacgauugcaauacaacuugucagacacccaagggugcuauaaacaccagccucccauuucagaauauacauccgaucacaauuggaaaauguccaaaauauguaaaaagcacaaaauugagacuggccacaggauugaggaaugucccgucuauucaaucuagaggccuauuuggggccauugccgguuucauugaagggggguggacagggaugguagauggaugguacgguuaucaccaucaaaaugagcaggggucaggauaugcagccgaccugaagagcacacagaaugccauugacgagauuacuaacaaaguaaauucuguuauugaaaagaugaauacacaguucacagcaguagguaaagaguucaaccaccuggaaaaaagaauagagaauuuaaauaaaaaaguugaugaugguuuccuggacauuuggacuuacaaugccgaacuguugguucuauuggaaaaugaaagaacuuuggacuaccacgauucaaaugugaagaacuuauaugaaaagguaagaagccaguuaaaaaacaaugccaaggaaauuggaaacggcugcuuugaauuuuaccacaaaugcgauaacacgugcauggaaagugucaaaaaugggacuuaugacuacccaaaauacucagaggaagcaaaauuaaacagagaagaaauagaugggguaaagcuggaaucaacaaggauuuaccagauuuuggcgaucuauucaacugucgccaguucauugguacugguagucucccugggggcaaucaguuucuggaugugcucuaaugggucucuacaguguagaauauguauuuaa

SEQ ID NO: 37898 - RNA, 1701 nt, Artificial Sequence
  derived and/or modified CDS sequence (wt) from hemagglutinin__InfluenzaA__ADM95799
augaaggcaauacuaguaguucugcuauauacauuugcaaccgcaaaugcagacacauuauguauagguuaucaugcgaacaauucaacagacacuguagacacaguacuagaaaagaauguaacaguaacacacucuguuaaccuucuagaagacaagcauaacgggaaacuaugcaaacuaagagggguagccccauugcauuuggguaaauguaacauugcuggcuggauccugggaaauccagagugugaaucacucuccacagcaagcucaugguccuacauuguggaaacaucuaguucagacaauggaacguguuacccaggagauuucaucgauuaugaggagcuaagagagcaauugagcucagugucaucauuugaaagguuugagauauuccccaagacaaguucauggcccaaucaugacucgaacaaagguguaacggcagcauguccucaugcuggagcaaaaagcuucuacaaaaauuuaauauggcuaguuaaaaaaggaaauucauacccaaagcucagcaaauccuacauuaaugauaaagggaaagaaguccucgugcuauggggcauucaccauccaucuacuagugcugaccaacaaagucucuaucagaaugcagaugcauauguuuuuguggggacaucaagauacagcaagaaguucaagccggaaauagcaauaagacccaaagugagggaucaagaagggagaaugaacuauuacuggacacuaguagagccgggagacaaaauaacauucgaagcaacuggaaaucuagugguaccgagauaugcauucgcaauggaaagaaaugcuggaucugguauuaucauuucagauacaccaguccacgauugcaauacaacuugucagacacccaagggugcgauaaacaccagccuaccauuucagaauauacauccgaucacaauuggaaaauguccaaaauauguaaaaagcacaaaauugagacuggccacaggauugaggaaugucccgucuauucaaucuagaggccuauuuggggccauugccgguuucauugaagggggguggacagggaugguagauggaugguacgguuaucaccaucaaaaugagcaggggucaggauaugcagccgaccugaagagcacacagaaugccauugacgagauuacuaacaaaguaaauucuguuauugaaaagaugaauacacaguucacagcaguagguaaagaguucaaccaccuggaaaaaagaauagagaauuuaaauaaaaaaguugaugaugguuuccuggacauuuggacuuacaaugccgaacuguugguucuauuggaaaaugaaagaacuuuggacuaccacgauucaaaugugaagaacuuauaugaaaagguaagaagccaguuaaaaaacaaugccaaggaaauugaaaacggcugcuuugaauuuuaccacaaaugcgauaacacgugcauggaaagugucaaaaaugggacuuaugacuacccaaaauacucagaggaagcaaaauuaaacagagaagaaauagaugggguaaagcuggaaucaacaaggauuuaccagauuuuggcgaucuauucaacugucgccaguucauugguacugguagucucccugggggcaaucaguuucuggaugugcucuaaugggucucuacaguguagaauauguauuuaa

SEQ ID NO: 37899 - RNA, 1701 nt, Artificial Sequence
  derived and/or modified CDS sequence (wt) from hemagglutinin__InfluenzaA__ADM95800
augaaggcaauacuaguaguucugcuauauacauuugcaaccgcaaaugcagacacauuauguauagguuaucaugcgaacaauucaacagacacuguagauacaguacuagaaaagaauguaacaguaacacacucuguuaaccuucuagaagacaagcauaacgggaaacuaugcaaacuaagagggguagccccauugcauuuggguaaauguaacauugcuggcuggauccugggaaauccagagugugaaucacucuccacagcaagcucaugguccuacauuguggaaacaucuaguucagacaauggaacguguuacccaggagauuucaucgauuaugaggagcuaagagagcaauugagcucagugucaucauuugaaagguuugagauauuccccaagacaaguucauggcccaaucaugacucgaacaaagguguaacggcagcauguccucaugcuggagcaaaaagcuucuacaaaaauuuaauauggcuaguuaaaaaaggaaauucauacccaaagcucagcaaauccuacauuaaugauaaagggaaagaaguccucgugcuauggggcauucaccauccaucuacuagugcugaccaacaaagucucuaucagaaugcagaugcauauguuuuuguggggacaucaagauacagcaagaaguucaagccggaaauagcaauaagacccaaagugagggaucaagaagggagaaugaacuauuacuggacacuaguagcgccgggagacaaaauaacauucgaagcaacuggaaaucuagugguaccgagauaugcauucgcaauggaaagaaaugcuggaucugguauuaucauuucagauacaccaguccacgauugcaauacaacuugucagacacccaagggugcuauaaacaccagccucccauuucagaauauacauccgaucacaauuggaaaauguccaaaauauguaaaaagcacaaaauugagacuggccacaggauugaggaaugucccgucuauucaaucuagaggccuauuuggggccauugccgguuucauugaagggggguggacagggaugguagauggaugguacgguuaucaccaucaaaaugagcaggggucaggauaugcagccgaccugaagagcacacagaaugccauugacgagauuacuaacaaaguaaauucuguuauugaaaagaugaauacacaguucacagcaguagguaaagaguucaaccaccuggaaaaaagaauagagaauuuaaauaaaaaaguugaugaugguuuccuggacauuuggacuuacaaugccgaacuguugguucuauuggaaaaugaaagaacuuuggacuaccacgauucaaaugugaagaacuuauaugaaaagguaagaagccaguuaaaaaacaaugccaaggaaauuggaaacggcugcuuugaauuuuaccacaaaugcgacaacacgugcauggaaagugucaaaaaugggacuuaugacuacccaaaauacucagaggaagcaaaauuaaacagagaagaaauagaugggguaaagcuggaaucaacaaggauuuaccagauuuuggcgaucuauucaacugucgccaguucauugguacugguagucucccugggggcaaucaguuucuggaugugcucuaaugggucucuacaguguagaauauguauuuaa

SEQ ID NO: 37900 - RNA, 1701 nt, Artificial Sequence; identical to SEQ ID NO: 37884
  derived and/or modified CDS sequence (wt) from hemagglutinin__InfluenzaA__ADM95801

SEQ ID NO: 37901 - RNA, 1701 nt, Artificial Sequence; identical to SEQ ID NO: 37884
  derived and/or modified CDS sequence (wt) from hemagglutinin__InfluenzaA__ADM95802

SEQ ID NO: 37902 - RNA, 1701 nt, Artificial Sequence; identical to SEQ ID NO: 37888
  derived and/or modified CDS sequence (wt) from hemagglutinin__InfluenzaA__ADM95803

SEQ ID NO: 37903 - RNA, 1701 nt, Artificial Sequence
  derived and/or modified CDS sequence (wt) from hemagglutinin__InfluenzaA__ADM95804
augaaggcaauacuaguaguucugcuauauacauuugcaaccgcaaaugcagacacauuauguauagguuaucaugcgaacaauucaacagacacuguagacacaguacuagaaaagaauguaacaguaacacacucuguuaaccuucuagaagacaagcauaacgggaaacuaugcaaacuaagagggguagccccauugcauuuggguaaauguaacauugcuggcuggauccugggaaauccagagugugaaucacucuccacagcaagcucaugguccuacauuguggaaacaucuaguucagacaauggaacguguuacccaggagauuucaucgauuaugaggagcuaagagagcaauugagcucagugucaucauuugaaagguuugagauauuccccaagacaaguucauggcccaaucaugacucgaacaaagguguaacggcagcaugcccucaugcuggagcaaaaaacuucuacaaaaauuuaauauggcuaguuaaaaaaggaaauucauacccaaagcucagcaaauccuacauuaaugauaaagggaaagaaguccucgugcuauggggcauucaccauccaucuacuagugcugaccaacaaagucucuaucagaaugcagaugcauauguuuuugugggaacaucaagauacagcaagaaguucaagccggaaauagcaauaagacccaaagugagggaucaagaagggagaaugaacuauuacuggacacuaguagagccgggagacaaaauaacauucgaagcaacuggaaaucuagugguaccgagauaugcauucgcaauggaaagaaaugcuggaucugguauuaucauuucagauacaccaguccacgauugcaauacaacuugucagacacccaagggugcuauaaacaccagccucccauuucagaauauacauccgaucacaauuggaaaauguccaaaauauguaaaaagcacaaaauugagacuggccacaggauugaggaaugucccgucuauucaaucuagaggccuauuuggggccauugccgguuucauugaagggggguggacagggaugguagauggaugguacgguuaucaccaucaaaaugagcaggggucaggauaugcagccgaccugaagagcacacagaaugccauugacgagauuacuaacaaaguaaauucuguuauugaaaagaugaauacacaguucacagcaguagguaaagaguucaaccaccuggaaaaaagaauagagaauuuaaauaaaaaaguugaugaugguuuccuggacauuuggacuuacaaugccgaacuguugguucuauuggaaaaugaaagaacuuuggacuaccacgauucaaaugugaagaaauuauaugaaaagguaagaagccaguuaaaaaacaaugccaaggaaauuggaaacggcugcuuugaauuuuaccacaaaugcgauaacacgugcauggaaagugucaaaaaugggacuuaugacuacccaaaauacucagaggaagcaaaauuaaacagagaagaaauagauggaguaaagcuggaaucaacaaggauuuaccagauuuuggcgaucuauucaacugucgccaguucauugguacugguagucucccugggggcaaucaguuucuggaugugcucuaaugggucucuacaguguagaauauguauuuaa

SEQ ID NO: 37904 - RNA, 1701 nt, Artificial Sequence
  derived and/or modified CDS sequence (wt) from hemagglutinin__InfluenzaA__ADM95805
augaaggcaauacuaguaguucugcuauauacauuugcaaccgcaaaugcagacacauuauguauagguuaucaugcgaacaauucaacagacacuguagacacaguacuagaaaagaauguaacaguaacacacucuguuaaccuucuagaagacaagcauaacgggaaacuaugcaaacuaagagggguagccccauugcauuuggguaaauguaacauugcuggcuggauccugggaaauccagagugugaaucacucuccacagcaagcucaugguccuacauuguggaaacaucuaguucagacaauggaacguguuacccaggagauuucaucgauuaugaggagcuaagagagcaauugagcucagugucaucauuugaaagguuugagauauuucccaagacaaguucauggcccaaucaugacucgaacaaagguguaacggcagcauguccucaugcuggagcaaaaagcuucuacaaaaauuuaauauggcuaguuaaaaaaggaaauucauacccaaagcucagcaaauccuacauuaaugauaaagggaaagaaguccucgugcuauggggcauucaccauccaucuacuagugcugaccaacaaagucucuaucagaaugcagaugcauauguuuuuguggggacaucaagauacagcaagaaguucaagccggaaauagcaauaagacccaaagugagggaucaagaagggagaaugaacuauuacuggacacuaguagagccgggagacaaaauaacauucgaagcaacuggaaaucuagugguaccgagauaugcauucgcaauggaaagaaaugcuggaucugguauuaucauuucagauacaccaguccacgauugcaauacaacuugucagacacccaagggugcuauaaacaccagccucccauuucagaauauacauccgaucacaauuggaaaauguccaaaauauguaaaaagcacaaaauugagaauggccacaggauugaggaaugucccgucuauucaaucuagaggccuauuuggggccauugccgguuucauugaagggggguggacagggaugguagauggaugguacgguuaucaccaucaaaaugagcaggggucaggauaugcagccgaccugaagagcacacagaaugccauugacgagauuacuaacaaaguaaauucuguuauugaaaagaugaauacacaguucacagcaguagguaaagaguucaaccaccuggaaaaaagaauagagaauuuaaauaaaaaaguugaugaugguuuccuggacauuuggacuuacaaugccgaacuguugguucuauuggaaaaugaaagaacuuuggacuaccacgauucaaaugugaagaacuuauaugaaaagguaagaagccaguuaaaaaacaaugccaaggaaauuggaaacggcugcuuugaauuuuaccacaaaugcgauaacacgugcauggaaagugucaaaaaugggacuuaugacuacccaaaauacucagaggaagcaaaauuaaacagagaagaaauagaugggguaaagcuggaaucaacaaggauuuaccagauuuuggcgaucuauucaacugucgccaguucauugguacugguagucucccugggggcaaucaguuucuggaugugcucuaaugggucucuacaguguagaauauguauuuaa

SEQ ID NO: 37905 - RNA, 1701 nt, Artificial Sequence
  derived and/or modified CDS sequence (wt) from hemagglutinin__InfluenzaA__ADM95808
augaaggcaauacuaguaguucugcuauauacauuugcaaccgcaaaugcagacacauuauguauagguuaucaugcgaacaauucaacagacacuguagacacaguacuagaaaagaauguaacaguaacacacucuguuaaccuucuagaagacaagcauaacgggaaacuaugcaaacuaagagggguagccccauugcauuuggguaaauguaacauugcuggcuggauccugggaaauccagagugugaaucacucuccacagcaagcucaugguccuacauuguggaaacaucuaguucagacaauggaacguguuacccaggagauuucaucgauuaugaggagcuaagagagcaauugagcucagugucaucauuugaaagguuugagauauuccccaagacaaguucauggcccaaucaugacucgaacaaagguguaacggcagcauguccucaugcuggagcaaaaagcuucuacaaaaauuuaauauggcuaguuaaaaaaggaaauucauacccaaagcucagcaaauccuacauuaaugauaaagggaaagaaguccucgugcuauggggcauucaccauccaucuacuagugcugaccaacaaagucucuaucagaaugcagaugcauauguuuuuguggggacaucaagauacagcaagaaguucaagccggagauagcaauaagacccaaagugagggaucaagaagggagaaugaacuauuacuggacacuaguagagccgggagacaaaauaacauucgaagcaacuggaaaucuagugguaccgagauaugcauucgcaauggaaagaaaugcuggaucugguauuaucauuucagauacaccaguccacgauugcaauacaacuugucagacacccaagggugcuauaaacaccagccucccauuucagaauauacauccgaucacaauuggaaaauguccaaaauauguaaaaagcacaaaauugagacuggccacaggauugaggaauaucccgucuauucaaucuagaggccuauuuggggccauugccgguuucauugaagggggguggacagggaugguagauggaugguacgguuaucaccaucaaaaugagcaggggucaggauaugcagccgaccugaagagcacacagaaugccauugacgagauuacuaacaaaguaaauucuguuauugaaaagaugaauacacaguucacagcaguagguaaagaguucaaccaccuggaaaaaagaauagagaauuuaaauaaaaagguugaugaugguuuccuggacauuuggacuuacaaugccgaacuguugguucuauuggaaaaugaaagaacuuuggacuaccacgauucaaaugugaagaacuuauaugaaaagguaagaagccaguuaaaaaacaaugccaaggaaauuggaaacggcugcuuugaauuuuaccacaaaugcgauaacacgugcauggaaagugucaaaaaugggacuuaugacuacccaaaauacucagaggaagcaaaauuaaacagagaagaaauagaugggguaaagcuggaaucaacaaggauuuaccagauuuuggcgaucuauucaacugucgccaguucauugguacugguagucucccugggggcaaucaguuucuggaugugcucuaaugggucucuacaguguagaauauguauuuaa

SEQ ID NO: 37906 - RNA, 1701 nt, Artificial Sequence; identical to SEQ ID NO: 37905
  derived and/or modified CDS sequence (wt) from hemagglutinin__InfluenzaA__ADM95809

SEQ ID NO: 37907 - RNA, 1701 nt, Artificial Sequence
  derived and/or modified CDS sequence (wt) from hemagglutinin__InfluenzaA__ADM95810
augaaggcaauacuaguaguucugcuauauacauuugcaaccgcaaaugcagacacauuauguauagguuaucaugcgaacaauucaacagacacuguagacacaguacuagaaaagaauguaacaguaacacacucuguuaaccuucuagaagacaagcauaacgggaaacuaugcaaacuaagagggguagccccauugcauuuggguaaauguaacauugcuggcuggauccugggaaauccagagugcgaaucacucuccacagcaagcucaugguccuacauuguggaaacaucuaguucagacaauggaacguguuacccaggagauuucaucgauuaugaggagcuaagagagcaauugagcucagugucaucauuugaaagguuugagauauuccccaagacaaguucauggcccaaucaugacucgaacaaagguguaacggcagcauguccucaugcuggagcaaaaagcuucuacaaaaauuuaauauggcuaguuaaaaaaggaaauucauacccaaagcucagcaaauccuacauuaaugauaaagggaaagaaguccucgugcuauggggcauucaccauccaucuacuagugcugaccaacaaagucucuaucagaaugcagaugcauauguuuuuguggggacaucaagauacagcaagaaguucaagccggagauagcaauaagacccaaagugagggaucaagaagggagaaugaacuauuacuggacacuaguagagccgggagacaaaauaacauucgaagcaacuggaaaucuagugguaccgagauaugcauucgcaauggaaagaaaugcuggaucugguauuaucauuucagauacaccaguccacgauugcaauacaacuugucagacacccaagggugcuauaaacaccagccucccauuucagaauauacauccgaucacaauuggaaaauguccaaaauauguaaaaagcacaaaauugagacuggccacaggauugaggaauaucccgucuauucaaucuagaggccuauuuggggccauugccgguuucauugaagggggguggacagggaugguagauggaugguacgguuaucaccaucaaaaugagcaggggucaggauaugcagccgaccugaagagcacacagaaugccauugacgagauuacuaacaaaguaaauucuguuauugaaaagaugaauacacaguucacagcaguagguaaagaguucaaccaccuggaaaaaagaauagagaauuuaaauaaaaagguugaugaugguuuccuggacauuuggacuuacaaugccgaacuguugguucuauuggaaaaugaaagaacuuuggacuaccacgauucaaaugugaagaacuuauaugaaaagguaagaagccaguuaaaaaacaaugccaaggaaauuggaaacggcugcuuugaauuuuaccacaaaugcgauaacacgugcauggaaagugucaaaaaugggacuuaugacuacccaaaauacucagaggaagcaaaauuaaacagagaagaaauagaugggguaaagcuggaaucaacaaggauuuaccagauuuuggcgaucuauucaacugucgccaguucauugguacugguagucucccugggggcaaucaguuucuggaugugcucuaaugggucucuacaguguagaauauguauuuaa

SEQ ID NO: 37908 - RNA, 1701 nt, Artificial Sequence
  derived and/or modified CDS sequence (wt) from hemagglutinin__InfluenzaA__ADM95812
augaaggcaauacuaguaguucugcuauauacauuugcaaccgcaaaugcagacacauuauguauagguuaucaugcgaacaauucaacagacacuguagacacaguacuagaaaagaauguaacaguaacacacucuguuaaccuucuagaagacaagcauaacgggaaacuaugcaaacuaagagggguagccccauugcauuuggguaaauguaacauugcuggcuggauccugggaaauccagagugugaauuacucuccacagcaagcucaugguccuacauuguggaaacaucuaguucagacaauggaacguguuacccaggagauuucaucgauuaugaggagcuaagagagcaauugagcucagugucaucauuugaaagguuugagauauuccccaagacaaguucauggcccaaucaugacucgaacaaagguguaacggcagcauguccucaugcuggagcaaaaagcuucuacaaaaauuuaauauggcuaguuaaaaaaggaaauucauacccaaagcucagcaaauccuacauuaaugauaaagggaaagaaguccucgugcuauggggcauucaccauccaucuacuagugcugaccaacaaagucucuaucagaaugcagaugcauauguuuuuguggggacaucaagauacagcaagaaguucaagccggaaauagcaauaagacccaaagugagggaucaagaagggagaaugaacuauuacuggacacuaguagagccgggagacaaaauaacauucgaagcaacuggaaaucuagugguaccgagauaugcauucgcaauggaaagaaaugcuggaucugguauuaucauuucagauacaccaguccacgauugcaauacaacuugucagacacccaagggugcuauaaacaccagccucccauuucagaauauacauccgaucacaauuggaaaauguccaaaauauguaaaaagcacaaaauugagacuggccacaggauugaggaaugucccgucuauucaaucuagaggccuauuuggggccauugccgguuucauugaagggggguggacagggaugguagauggaugguacgguuaucaccaucaaaaugagcaggggucaggauaugcagccgaccugaagagcacacagaaugccauugacgagauuacuaacaaaguaaauucuguuauugaaaagaugaauacacaguucacagcaguagguaaagaguucaaccaccuggaaaaaagaauagagaauuuaaauaaaaaaguugaugaugguuuccuggacauuuggacuuacaaugccgaacuguugguucuauuggaaaaugaaagaacuuuggacuaccacgauucaaaugugaagaacuuauaugaaaagguaagaagccaguuaaaaaacaaugccaaggaaauuggaaacggcugcuuugaauuuuaccacaaaugcgauaacacgugcauggaaagugucaaaaaugggacuuaugacuacccaaaauacucagaggaagcaaaauuaaacagagaagaaauagaugggguaaagcuggaaucaacaaggauuuaccagauuuuggcgaucuauucaacugucgccaguucauugguacugguagucucccugggggcaaucaguuucuggaugugcucuaaugggucucuacaguguagaauauguauuuaa

SEQ ID NO: 37909 - RNA, 1701 nt, Artificial Sequence; identical to SEQ ID NO: 37894
  derived and/or modified CDS sequence (wt) from hemagglutinin__InfluenzaA__ADM95816

SEQ ID NO: 37910 - RNA, 1701 nt, Artificial Sequence; identical to SEQ ID NO: 37894
  derived and/or modified CDS sequence (wt) from hemagglutinin__InfluenzaA__ADM95819

SEQ ID NO: 37911 - RNA, 1701 nt, Artificial Sequence; identical to SEQ ID NO: 37904
  derived and/or modified CDS sequence (wt) from hemagglutinin__InfluenzaA__ADM95820

SEQ ID NO: 37912 - RNA, 1701 nt, Artificial Sequence; identical to SEQ ID NO: 37894
  derived and/or modified CDS sequence (wt) from hemagglutinin__InfluenzaA__ADM95821

SEQ ID NO: 37913 - RNA, 1701 nt, Artificial Sequence; identical to SEQ ID NO: 37905
  derived and/or modified CDS sequence (wt) from hemagglutinin__InfluenzaA__ADM95822

SEQ ID NO: 37914 - RNA, 1701 nt, Artificial Sequence; identical to SEQ ID NO: 37905
  derived and/or modified CDS sequence (wt) from hemagglutinin__InfluenzaA__ADM95823

SEQ ID NO: 37915 - RNA, 1701 nt, Artificial Sequence
  derived and/or modified CDS sequence (wt) from hemagglutinin__InfluenzaA__ADM95824
augaaggcaauacuaguaguucugcuauauacauuugcaaccgcaaaugcagacacauuauguauagguuaucaugcgaacaauucaacagacacuguagacacaguacuagaaaagaauguaacaguaacacacucuguuaaccuucuagaagacaagcauaacgggaaacuaugcaaacuaagagggguagccccauugcauuuggguaaauguaacauugcuggcuggauccugggaaauccagagugugaaucacucuccacagcaagcucaugguccuacauuguggaaacaucuaguucagacaauggaacguguuacccaggagauuucauugauuaugaggagcuaagagagcaauugagcucagugucaucauuugaaagguuugagauauuucccaaaacaaguucauggcccaaucaugacucgaacaaagguguaacggcagcauguccucaugcuggagcaaaaagcuucuacaaaaauuuaauauggcuaguuaaaaaaggaaauucauacccaaagcucagcaaauccuacauuaaugauaaagggaaagaaguccucgugcuauggggcauucaccauccaucuacuagugcugaccaacaaagucucuaucagaaugcagaugcauauguuuuuguggggacaucaagauacagcaagaaguucaagccggaaauagcaauaagacccaaagugagggaucaagaagggagaaugaacuaucacuggacacuaguagagccgggagacaaaauaacauucgaagcaacuggaaaucuagugguaccgagauaugcauucgcaauggaaagaaaugcuggaucugguauuaucauuucagauacaccaguccacgauugcaauacaacuugucagacacccaagggugcuauaaacaccagccucccauuucagaauauacauccgaucacaauuggaaaauguccaaaauauguaaaaagcacaaaauugagaauggccacaggauugaggaaugucccgucuauucaaucuagaggccuauuuggggccauugccgguuucauugaagggggguggacagggaugguagauggaugguacgguuaucaccaucaaaaugagcaggggucaggauaugcagccgaccugaagagcacacagaaugccauugacgagauuacuaacaaaguaaauucuguuauugaaaagaugaauacacaguucacagcaguagguaaagaguucaaccaccuggaaaaaagaauagagaauuuaaauaaaaaaguugaugaugguuuccuggacauuuggacuuacaaugccgaacuguugguucuauuggaaaaugaaagaacuuuggacuaccacgauucaaaugugaagaacuuauaugaaaagguaagaagccaguuaaaaaacaaugccaaggaaauuggaaacggcugcuuugaauuuuaccacaaaugcgauaacacgugcauggaaagugucaaaaaugggacuuaugacuacccaaaauacucagaggaagcaaaauuaaacagagaagaaauagaugggguaaagcuggaaucaacaaggauuuaccagauuuuggcgaucuauucaacugucgccaguucauugguacugguagucucccugggggcaaucaguuucuggaugugcucuaaugggucucuacaguguagaauauguauuuaa

SEQ ID NO: 37916 - RNA, 1701 nt, Artificial Sequence; identical to SEQ ID NO: 37894
  derived and/or modified CDS sequence (wt) from hemagglutinin__InfluenzaA__ADM95825

SEQ ID NO: 37917 - RNA, 1701 nt, Artificial Sequence
  derived and/or modified CDS sequence (wt) from hemagglutinin__InfluenzaA__ADM95826
augaaggcaauacuaguaguucugcuauauacauuugcaaccgcaaaugcagacacauuauguauagguuaucaugcgaacaauucaacagacacuguagacacaguacuagaaaagaauguaacaguaacacacucuguuaaccuucuagaagacaagcauaacgggaaacuaugcaaacuaagagggguagccccauugcauuuggguaaauguaacauugcuggcuggauccugggaaauccagagugugaaucacucuccacagcaagcucaugguccuacauuguggaaacaucuaguucagacaauggaacguguuacccaggagauuucaucgauuaugaggagcuaagagagcaauugagcucagugucaucauuugaaagguuugagauauuccccaagacaaguucauggcccaaucaugacucgaacaaagguguaacggcagcaugcccucaugcuggagcaaaaagcuucuacaaaaauuuaauauggcuaguuaaaaaaggaaauucauacccaaagcucagcaaauccuacauuaaugauaaagggaaagaaguccucguacuauggggcauucaccauccaucuacuagugcugaccaacaaagucucuaucagaaugcagaugcauauguuuuugugggaacaucaagauacagcaagaaguucaagccggaaauagcaauaagacccaaagugagggaucaagaagggagaaugaacuauuacuggacacuaguagagccgggagacaaaauaacauucgaagcaacuggaaaucuagugguaccgagauaugcauucgcaauggaaagaaaugcuggaucugguauuaucauuucagauacaccaguccacgauugcaauacaacuugucagacacccaagggugcuauaaacaccagccucccauuucagaauauacauccgaucacaauuggaaaauguccaaaauauguaaaaagcacaaaauugagacuggccacaggauugaggaaugucccgucuauucaaucuagaggccuauuuggggccauugccgguuucauugaagggggguggacagggaugguagauggaugguacgguuaucaccaucaaaaugagcaggggucaggauaugcagccgaccugaagagcacacagaaugccauugacgagauuacuaacaaaguaaauucuguuauugaaaagaugaauacacaguucacagcaguagguaaagaguucaaccaccuggaaaaaagaauagagaauuuaaauaaaaaaguugaugaugguuuccuggacauuuggacuuacaaugccgaacuguugguucuauuggaaaaugaaagaacuuuggacuaccacgauucaaaugugaagaaauuauaugaaaagguaagaagccaguuaaaaaacaaugccaaggaaauuggaaacggcugcuuugaauuuuaccacaaaugcgauaacacgugcauggaaagugucaaaaaugggacuuaugacuacccaaaauacucagaggaagcaaaauuaaacagagaagaaauagauggaguaaagcuggaaucaacaaggauuuaccagauuuuggcgaucuauucaacugucgccaguucauugguacugguagucucccugggggcaaucaguuucuggaugugcucuaaugggucucuacaguguagaauauguauuuaa

SEQ ID NO: 37918 - RNA, 1701 nt, Artificial Sequence
  derived and/or modified CDS sequence (wt) from hemagglutinin__InfluenzaA__ADM95827
augaaggcaauacuaguaguucugcuauauacauuugcaaccgcaaaugcagacacauuauguauagguuaucaugcgaacaauucaacagacacuguagacacaguacuagaaaagaauguaacaguaacacacucuguuaaccuucuagaagacaagcauaacgggaaacuaugcaaacuaaaagggguagccccauugcauuuggguaaauguaacauugcuggcuggauccugggaaauccagagugugaaucacucuccacagcaagcucaugguccuacauuguggaaacaucuaguucagacaauggaacguguuacccaggagauuucaucgauuaugaggagcuaagagagcaauugagcucagugucaucauuugaaagguuugagauauuccccaagacaaguucauggcccaaucaugacucgaacaaagguguaacggcagcauguccucaugcuggagcaaaaagcuucuacaaaaauuuaauauggcuaguuaaaaaaggaaauucauacccaaagcucagcaaauccuacauuaaugauaaagggaaagaaguccucgugcuauggggaauucaccauccaucuacuagugcugaccaacaaagucucuaucagaaugcagaugcauauguuuuuguggggacaucaagauacagcaagaaguucaagccggaaauagcaauaagacccaaagugagggaucaagaagggagaaugaacuauuacuggacacuaguagagccgggagacaaaauaacauucgaagcaacuggaaaucuagugguaccgagauaugcauucgcaauggaaagaaaugcuggaucugguauuaucauuucagauacaccaguccacgauugcaauacaacuugucagacacccaagggugcuauaaacaccagccucccauuucagaauauacauccgaucacaauuggaaaauguccaaaauauguaaaaagcacaaaauugagacuggccacaggauugaggaaugucccgucuauucaaucuagaggccuauuuggggccauugccgguuucauugaagggggguggacagggaugguagauggaugguacgguuaucaccaucaaaaugagcaggggucaggauaugcagccgaccugaagagcacacagcaugccauugacgagauuacuaacaaaguaaauucuguuauugaaaagaugaauacacaguucacagcaguagguaaagaguucaaccaccuggaaaaaagaauagagaauuuaaauaaaaaaguugaugaugguuuccuggacauuuggacuuacaaugccgaacuguugguucuauuggaaaaugaaagaacuuuggacuaccacgauucaaaugugaagaacuuauaugaaaagguaagaagccaguuaaaaaacaaugccaaggaaauuggaaacggcugcuuugaauuuuaccacaaaugcgauaacacgugcauggaaagugucaaaaaugggacuuaugacuacccaaaauacucagaggaagcaaaauuaaacagagaagaaauagaugggguaaagcuggaaucaacaaggauuuaccagauuuuggcgaucuauucaacugucgccaguucauugguacugguagucucccugggggcaaucaguuucuggaugugcucuaaugggucucuacaguguagaauauguauuuaa

SEQ ID NO: 37919 - RNA, 1701 nt, Artificial Sequence
  derived and/or modified CDS sequence (wt) from hemagglutinin__InfluenzaA__ADM95828
augaaggcaauacuaguaguucugcuauauacauuugcaaccgcaaaugcagacacauuauguauagguuaucaugcgaacaauucaacagacacuguagacacaguacuagaaaagaauguaacaguaacacacucuguuaaccuucuagaagacaagcauaacgggaaacuaugcaaacuaagagggguagccccauugcauuuggguaaauguaacauugcuggcuggauccugggaaauccagagugugaaucacucuccacagcaagcucaugguccuacauuguggaaacaucuaguucagacaauggaacguguuacccaggagauuucaucgauuaugaggagcuaagagagcaauugagcucagugucaucauuugaaagguuugagauauuucccaagacaaguucauggcccaaucaugacucgaacaaagguguaacggcagcauguccucaugcuggagcaaaaagcuucuacaaaaauuuaauauggcuaguuaaaaaaggaaauucauacccaaagcucagcaaauccuacauuaaugauaaagggaaagaaguccucgugcuauggggcauucaccauccaucuacuagugcugaccaacaaagucucuaucagaaugcagaugcauauguuuuuguggggacaucaagauacagcaagaaguucaagccggaaauagcaauaagacccaaagugagggaucaagaagggagaaugaacuauuacuggacacuaguagagccgggagacaaaauaacauucgaagcaacuggaaaucuagugguaccgagauaugcauucgcaauggaaagaaaugcuggaucugguauuaucauuucagauacaccagcccacgauugcaauacaacuugucagacacccaagggugcuauaaacaccagccucccauuucagaauauacauccgaucacaauuggaaaauguccaaaauauguaaaaagcacaaaauugagaauggccacaggauugaggaaugucccgucuauucaaucuagaggccuauuuggggccauugccgguuucauugaagggggguggacagggaugguagauggaugguacgguuaucaccaucaaaaugagcaggggucaggauaugcagccgaccugaagagcacacagaaugccauugacgagauuacuaacaaaguaaauucuguuauugaaaagaugaauacacaguucacagcaguagguaaagaguucaaccaccuggaaaaaagaauagagaauuuaaauaaaaaaguugaugaugguuuccuggacauuuggacuuacaaugccgaacuguugguucuauuggaaaaugaaagaacuuuggacuaccacgauucaaaugugaagaacuuauaugaaaagguaagaagccaguuaaaaaacaaugccaaggaaauuggaaacggcugcuuugaauuuuaccacaaaugcgauaacacgugcauggaaagugucaaaaaugggacuuaugacuacccaaaauacucagaggaagcaaaauuaaacagagaagaaauagaugggguaaagcuggaaucaacaaggauuuaccagauuuuggcgaucuauucaacugucgccaguucauugguacugguagucucccugggggcaaucaguuucuggaugugcucuaaugggucucuacaguguagaauauguauuuaa

SEQ ID NO: 37920 - RNA, 1701 nt, Artificial Sequence
  derived and/or modified CDS sequence (wt) from hemagglutinin__InfluenzaA__ADM95829
augaaggcaauacuaguaguucugcuauauacauuugcaaccgcaaaugcagacacauuauguauagguuaucaugcgaacaauucaacagacacuguagacacaguacuagaaaagaauguaacaguaacacacucuguuaaccuucuagaagacaagcauaacgggaaacuaugcaaacuaagagggguagccccauugcauuuggguaaauguaacauugcuggcuggauccugggaaauccagagugugaaucacucuccacagcaagcucaugguccuacauuguggaaacaucuaguucagacaauggaacguguuacccaggagauuucaucgauuaugaggagcuaagagagcaauugagcucagugucaucauuugaaagguuugagauauuccccaagacaaguucauggcccaaucaugacucgaacaaagguguaacggcagcaugcccucaugcuggagcaaaaagcuucuacaaaaauuuaauauggcuaguuaaaaaaggaaauucauacccaaagcucagcaaauccuacauuaaugauaaagggaaagaaguccucgugcuauggggcauucaccauccaucuacuagugcugaccaacaaagucucuaucagaaugcagaugcauauguuuuugugggaacaucaagauacagcaagaaguucaagccggaaauagcaauaagacccaaagugagggaucaagaagggagaaugaacuauuacuggacacuaguagagccgggagacaaaauaacauucgaagcaacuggaaaucuagugguaccgagauaugcauucgcaauggaaagaaaugcuggaucugguauuaucauuucagauacaccaguccacgauugcaauacaacuugucagacacccaagggugcuauaaacaccagccucccauuucagaauauacauccgaucacaauuggaaaauguccaaaauauguaaaaagcacaaaauugagacuggccacaggauugaggaaugucccgucuauucaaucuagaggccuauuuggggccauugccgguuucauugaagggggguggacagggaugguagauggaugguacgguuaucaccaucaaaaugagcaggggucaggauaugcagccgaccugaagagcacacagaaugccauugacgagauuacuaacaaaguaaauucuguuauugaaaagaugaauacacaguucacagcaguagguaaagaguucaaccaccuggaaaaaagaauagagaauuuaaauaaaaaaguugaugaugguuuccuggacauuuggacuuacaaugccgaacuguugguucuauuggaaaaugaaagaacuuuggacuaccacgauucaaaugugaagaaauuauaugaaaagguaagaagccaguuaaaaaacaaugccaaggaaauuggaaacggcugcuuugaauuuuaccacaaaugcgauaacaugugcauggaaagugucaaaaaugggacuuaugacuacccaaaauacucagaggaagcaaaauuaaacagagaagaaauagauggaguaaagcuggaaucaacaaggauuuaccagauuuuggcgaucuauucaacugucgccaguucauugguacugguagucucccugggggcaaucaguuucuggaugugcucuaaugggucucuacaguguagaauauguauuuaa

SEQ ID NO: 37921 - RNA, 1701 nt, Artificial Sequence
  derived and/or modified CDS sequence (wt) from hemagglutinin__InfluenzaA__ADM95831
augaaggcaauacuaguaguucugcuauauacauuuguaaccgcaaaugcagacacauuauguauagguuaucaugcgaacaauucaacagacacuguagacacaguacuagaaaagaauguaacaguaacacacucuguuaaccuucuagaagacaagcauaacgggaaacuaugcaaacuaagagggguagccccauugcauuuggguaaauguaacauugcuggcuggauccugggaaauccagagugugaaucacucuccacagcaagcucaugguccuacauuguggaaacaucuaguucagacaauggaacguguuacccaggagauuucaucgauuaugaggagcuaagagagcaauugagcucagugucaucauuugaaagguuugagauauuccccaagacaaguucauggcccaaucaugacucgaacaaagguguaacggcagcauguccucaugcuggagcaaaaagcuucuacaaaaauuuaauauggcuaguuaaaaaaggaaauucauacccaaagcucagcaaauccuacauuaaugauaaagggaaagaaguccucgugcuauggggaauucaccauccaucuacuagugcugaccaacaaagucucuaucagaaugcagaugcauauguuuuuguggggacaucaagauacagcaagaaguucaagccggaaauagcaauaagacccaaagugagggaucaagaagggagaaugaacuauuacuggacacuaguagagccgggagacaaaauaacauucgaagcaacuggaaaucuagugguaccgagauaugcauucgcaauggaaaaaaaugcuggaucugguauuaucauuucagauacaccaguccacgauugcaauacaacuugucagacacccaagggugcuauaaacaccagccucccauuucagaauauacauccgaucacaauuggaaaauguccaaaauauguaaaaagcacaaaauugagacuggccacaggauugaggaaugucccgucuauucaaucuagaggccuauuuggggccauugccgguuucauugaagggggguggacagggaugguagauggaugguacgguuaucaccaucaaaaugagcaggggucaggauaugcagccgaccugaagagcacacagcaugccauugacgagauuacuaacaaaguaaauucuguuauugaaaagaugaauacacaguucacagcaguagguaaagaguucaaccaccuggaaaaaagaauagagaauuuaaauaaaaaaguugaugaugguuuccuggacauuuggacuuacaaugccgaacuguugguucuauuggaaaaugaaagaacuuuggacuaccacgauucaaaugugaagaacuuauaugaaaagguaagaagccaguuaaaaaacaaugccaaggaaauuggaaacggcugcuuugaauuuuaccacaaaugcgauaacacuugcauggaaagugucaaaaaugggacuuaugacuacccaaaauacucagaggaagcaaaauuaaacagagaagaaauagaugggguaaagcuggaaucaacaaggauuuaccagauuuuggcgaucuauucaacugucgccaguucauugguacugguagucucccugggggcaaucaguuucuggaugugcucuaaugggucucuacaguguagaauauguauuuaa

SEQ ID NO: 37922 - RNA, 1701 nt, Artificial Sequence; identical to SEQ ID NO: 37905
  derived and/or modified CDS sequence (wt) from hemagglutinin__InfluenzaA__ADM95832

SEQ ID NO: 37923 - RNA, 1701 nt, Artificial Sequence
  derived and/or modified CDS sequence (wt) from hemagglutinin__InfluenzaA__ADM95833
augaaggcaauacuaguaguucugcuauauacauuugcaaccgcaaaugcagacacauuauguauagguuaucaugcgaacaauucaacagacacuguagacacaguacuagaaaagaauguaacaguaacacacucuguuaaccuucuagaagacaagcauaacgggaaacuaugcaaacuaagagggguagccccauugcauuuggguaaauguaacauugcuggcuggauccugggaaauccagagugugaaucacucuccacagcaagcucaugguccuacauuguggaaacaucuaguucagacaauggaacguguuacccaggagauuucaucgauuaugaggagcuaagagagcaauugagcucagugucaucauuugaaagguuugagauauuucccaagacaaguucauggcccaaucaugacucgaacaaagguguaacggcagcauguccucaugcuggagcaaaaagcuucuacaaaaauuuaauauggcuaguuaaaaaaggaaauucauacccaaagcucagcaaauccuacauuaaugacaaagggaaagaaguccucgugcuauggggcauucaccauccaucuacuagugcugaccaacaaagucucuaucagaaugcagaugcauauguuuuuguggggacaucaagauacagcaagaaguucaagccggaaauagcaauaagacccaaagugagggaucaagaagggagaaugaacuauuacuggacacuaguagagccgggagacaaaauaacauucgaagcaacuggaaaucuagugguaccgagauaugcauucgcaauggaaagaaaugcuggaucugguauuaucauuucagauacaccaguccacgauugcaauacaacuugucagacacccaagggugcuauaaacaccagccucccauuucagaauauacauccgaucacaauuggaaaauguccaaaauauguaaaaagcacaaaauugagaauggccacaggauugaggaaugucccgucuauucaaucuagaggccuauuuggggccauugccgguuucauugaagggggguggacagggaugguagauggaugguacgguuaucaccaucaaaaugagcaggggucaggauaugcagccgaccugaagagcacacagaaugccauugacgagauuacuaacaaaguaaauucuguuauugaaaagaugaauacacaguucacagcaguagguaaagaguucaaccaccuggaaaaaagaauagagaauuuaaauaaaaaaguugaugaugguuuccuggacauuuggacuuacaaugccgaacuguugguucuauuggaaaaugaaagaacuuuggacuaccacgauucaaaugugaagaacuuauaugaaaagguaagaagccaguuaaaaaacaaugccaaggaaauuggaaacggcugcuuugaauuuuaccacaaaugcgauaacacgugcauggaaagugucaaaaaugggacuuaugacuacccaaaauacucagaggaagcaaaauuaaacagagaagaaauagaugggguaaagcuggaaucaacaaggauuuaccagauuuuggcgaucuauucaacugucgccaguucauugguacugguagucucccugggggcaaucaguuucuggaugugcucuaaugggucucuacaguguagaauauguauuuaa

SEQ ID NO: 37924 - RNA, 1701 nt, Artificial Sequence; identical to SEQ ID NO: 37908
  derived and/or modified CDS sequence (wt) from hemagglutinin__InfluenzaA__ADM95834

SEQ ID NO: 37925 - RNA, 1701 nt, Artificial Sequence; identical to SEQ ID NO: 37904
  derived and/or modified CDS sequence (wt) from hemagglutinin__InfluenzaA__ADM95836

SEQ ID NO: 37926 - RNA, 1701 nt, Artificial Sequence; identical to SEQ ID NO: 37894
  derived and/or modified CDS sequence (wt) from hemagglutinin__InfluenzaA__ADM95837

SEQ ID NO: 37927 - RNA, 1701 nt, Artificial Sequence
  derived and/or modified CDS sequence (wt) from hemagglutinin__InfluenzaA__ADM95838
augaaggcaauacuaguaguucugcuauauacauuugcaaccgcaaaugcagacacauuauguauagguuaucaugcgaacaauucaacagacacuguagacacaguacuagaaaagaauguaacaguaacacacucuguuaaccuucuagaagacaagcauaacgggaaacuaugcaaacuaagagggguagccccauugcauuuggguaaauguaacauugcuggcuggauccugggaaauccagagugugaaucacucuccacagcaagcucaugguccuacauuguggaaacaucuaguucagacaauggaacguguuacccaggagauuucaucgauuaugaggagcuaagagagcaauugagcucagugucaucauuugaaagguuugagauauuccccaagacaaguucauggcccaaucaugacucgaacaaagguguaacggcagcaugucuucaugcuggagcaaaaagcuucuacaaaaauuuaauauggcuaguuaaaaaaggaaauucauacccaaagcucagcaaauccuacauuaaugauaaagggaaagaaguccucgugcuauggggcauucaccauccaucuacuagugcugaccaacaaagucucuaucagaaugcagaugcauauguuuuuguggggacaucaagauacagcaagaaguucaagccggaaauagcaauaagacccaaagugagggaucaagaagggagaaugaacuauuacuggacacuaguagagccgggagacaaaauaacauucgaagcaacuggaaaucuagugguaccgagauaugcauucgcaauggaaagaaaugcuggaucugguauuaucauuucagauacaccaguccacgauugcaauacaacuugucagacacccaagggugcuauaaacaccagccucccauuucagaauauacauccgaucacaauuggaaaauguccaaaauauguaaaaagcacgaaauugagacuggccacaggauugaggaaugucccgucuauucaaucuagaggccuauuuggggccauugccgguuucauugaagggggguggacagggaugguagauggaugguacgguuaucaccaucaaaaugagcaggggucaggauaugcagccgaccugaagagcacacagaaugccauugacaagauuacuaacaaaguaaauucuguuauugaaaagaugaauacacaguucacagcaguagguaaagaguucaaccaccuggaaaaaagaauagagaauuuaaauaaaaaaguugaugaugguuuccuggacauuuggacuuacaaugccgaacuguugguucuauuggaaaaugaaagaacuuuggacuaccacgauucaaaugugaagaacuuauaugaaaagguaagaagccaguuaaaaaacaaugccaaggaaauuggaaacggcugcuuugaauuuuaccacaaaugcgauaacacgugcauggaaagugucaaaaaugggacuuaugacuacccaaaauacucagaggaagcaaaauuaaacagagaagaaauagaugggguaaagcuggaaucaacaaggauuuaccagauuuuggcgaucuauucaacugucgccaguucauugguacugguagucucccugggggcaaucaguuucuggaugugcucuaaugggucucuacaguguagaauauguauuuaa

SEQ ID NO: 37928 - RNA, 1701 nt, Artificial Sequence; identical to SEQ ID NO: 37904
  derived and/or modified CDS sequence (wt) from hemagglutinin__InfluenzaA__ADM95839

SEQ ID NO: 37929 - RNA, 1701 nt, Artificial Sequence
  derived and/or modified CDS sequence (wt) from hemagglutinin__InfluenzaA__ADM95840
augaaggcaauacuaguaguucugcuauauacauuugcaaccgcaaaugcagacacauuauguauagguuaucaugcgaacaauucaacagacacuguagacacaguacuagaaaagaauguaacaguaacacacucuguuaaccuucuagaagacaagcauaacgggaaacuaugcaaacuaagagggguagccccauugcauuuggguaaauguaacauugcuggcuggauccugggaaauccagagugugaaucacucuccacagcaagcucaugguccuacauuguggaaacaucuaguucagacaauggaacguguuacccaggagauuucaucgauuaugaggagcuaagagagcaauugagcucagugucaucauuugaaagguuugagauauuccccaagacaaguucauggcccaaucaugacucgaacaaagguguaacggcagcauguucucaugcuggagcaaaaagcuucuacaaaaauuuaauauggcuaguuaaaaaaggaaauucauacccaaagcucagcaaauccuacauuaaugauaaagggaaagaaguccucgugcuauggggcauucaccauccaucuacuagugcugaccaacaaagucucuaucagaaugcagaugcauauguuuuuguggggacaucaagauacagcaagaaguucaagccggaaauagcaauaagacccaaagugagggaacaagaagggagaaugaacuauuacuggacacuaguagagccgggagacaaaauaacauucgaagcaacuggaaaucuagugguaccgagauaugcauucgcaauggaaagaaaugcuggaucugguauuaucauuucagauacaccaguccacgauugcaauacaacuugucagacacccaagggugcuauaaacaccagccucccauuucagaauauacauccgaucacaauuggaaaauguccaaaauauguaaaaagcacaaaauugagacuggccacaggauugaggaaugucccgucuauucaaucuagaggccuauuuggggccauugccgguuucauugaagggggguggacagggaugguagauggaugguacgguuaucaccaucaaaaugagcaggggucaggauaugcagccgaccugaagagcacacagaaugccauugacgagauuacuaacaaaguaaauucuguuauugaaaagaugaauacacaguucacagcaguagguaaagaguucaaccaccuggaaaaaagaauagagaauuuaaauaaaaaaguugaugaugguuuccuggacauuuggacuuacaaugccgaacuguugguucuauuggaaaaugaaagaacuuuggacuaccacgauucaaaugugaagaacuuauaugaaaagguaagaagccaguuaaaaaacaaugccaaggaaauuggaaacggcugcuuugaauuuuaccacaaaugcgauaacacgugcauggaaagugucaaaaaugggacuuaugacuacccaaaauacucagaggaagcaaaauuaaacagagaagaaauagaugggguaaagcuggaaucaacaaggauuuaccagauuuuggcgaucuauucaacugucgccaguucauugguacugguagucucccugggggcaaucaguuucuggaugugcucuaaugggucucuacaguguagaauauguauuuaa

SEQ ID NO: 37930 - RNA, 1701 nt, Artificial Sequence; identical to SEQ ID NO: 37929
  derived and/or modified CDS sequence (wt) from hemagglutinin__InfluenzaA__ADM95842

SEQ ID NO: 37931 - RNA, 1701 nt, Artificial Sequence; identical to SEQ ID NO: 37894
  derived and/or modified CDS sequence (wt) from hemagglutinin__InfluenzaA__ADM95843

SEQ ID NO: 37932 - RNA, 1701 nt, Artificial Sequence; identical to SEQ ID NO: 37894
  derived and/or modified CDS sequence (wt) from hemagglutinin__InfluenzaA__ADM95844

SEQ ID NO: 37933 - RNA, 1701 nt, Artificial Sequence
  derived and/or modified CDS sequence (wt) from hemagglutinin__InfluenzaA__ADM95845
augaaggcaauacuaguaguucugcuauauacauuugcaaccgcaaaugcagacacauuauguauagguuaucaugcgaacaauucaacagacacuguagacacaguacuagaaaagaauguaacaguaacacacucuguuaaccuucuagaagacaagcauaacgggaaacuaugcaaacuaagagggguagccccauugcauuuggguaaauguaacauugcuggcuggauccugggaaauccagagugugaaucacucuccacagcaagcucaugguccuacauuguggaaacaucuaguucagacaauggaacguguuacccaggagauuucauugauuaugaggagcuaagagagcaauugagcucagugucaucauuugaaagguuugagauauuucccaagacaaguucauggcccaaucaugacucgaacaaagguguaacggcagcauguccucaugcuggagcaaaaagcuucuacaaaaauuuaauauggcuaguuaaaaaaggaaauucauacccaaagcucagcaaauccuacauuaaugauaaagggaaagaaguccucgugcuauggggcauucaccauccaucuacuagugcugaccaacaaagucucuaucagaaugcagaugcauauguuuuuguggggacaucaagauacagcaagaaguucaagccggaaauagcaauaagacccaaagugagggaucaagaagggagaaugaacuauuacuggacacuaguagagccgggagacaaaauaacauucgaagcaacuggaaaucuagugguaccgagauaugcauucgcaauggaaagaaaugcuggaucugguauuaucauuucagauacaccaguccacgauugcaauacaacuugucagacacccaagggugcuauaaacaccagccucccauuucagaauauacauccgaucacaauuggaaaauguccaaaauauguaaaaagcacaaaauugagaauggccacaggauugaggaaugucccgucuauucaaucuagaggccuauuuggggccauugccgguuucauugaagggggguggacagggaugguagauggaugguacgguuaucaccaucaaaaugagcaggggucaggauaugcagccgaccugaagagcacacagaaugccauugacgagauuacuaacaaaguaaauucuguuauugaaaagaugaauacacaguucacagcaguagguaaagaguucaaccaccuggaaaaaagaauagagaauuuaaauaaaaaaguugaugaugguuuccuggacauuuggacuuacaaugccgaacuguugguucuauuggaaaaugaaagaacuuuggacuaccacgauucaaaugugaagaacuuauaugaaaagguaagaagccaguuaaaaaacaaugccaaggaaauuggaaacggcugcuuugaauuuuaccacaaaugcgauaacacgugcauggaaagugucaaaaaugggacuuaugacuacccaaaauacucagaggaaacaaaauuaaacagagaagaaauagaugggguaaagcuggaaucaacaaggauuuaccagauuuuggcgaucuauucaacugucgccaguucauugguacugguagucucccugggggcaaucaguuucuggaugugcucuaaugggucucuacaguguagaauauguauuuaa

SEQ ID NO: 37934 - RNA, 1701 nt, Artificial Sequence
  derived and/or modified CDS sequence (wt) from hemagglutinin__InfluenzaA__ADM95846
augaaggcaauacuaguaguucugcuauauacauuugcaaccgcaaaugcagacacauuauguauagguuaucaugcgaacaauucaacagacacuguagacacaguacuagaaaagaauguaacaguaacacacucuguuaaccuucuagaagacaagcauaacgggaaacuaugcaaacuaagagggguagccccauugcauuuggguaaauguaacauugcuggcuggauccugggaaauccagagugugaaucacucuccacagcaagcucaugguccuacauuguggaagcaucuaguucagacaauggaacguguuacccaggagauuucaucgauuaugaggagcuaagagagcaauugagcucagugucaucauuugaaagguuugagauauuccccaagacaaguucauggcccaaucaugacucgaacaaagguguaacggcagcauguccucaugcuggagcaaaaagcuucuacaaaaauuuaauauggcuaguuaaaaaaggaaauucauacccaaagcucagcaaauccuacauuaaugauaaagggaaagaaguccucgugcuauggggcauucaccauccaucuacuagugcugaccaacaaagucucuaucagaaugcagaugcauauguuuuuguggggacaucaagauacagcaagaaguucaagccggagauagcaauaagacccaaagugagggaucaagaagggagaaugaacuauuacuggacacuaguagagccgggagacaaaauaacauucgaagcaacuggaaaucuagugguaccgagauaugcauucgcaauggaaagaaaugcuggaucugguauuaucauuucagauacaccaguccacgauugcaauacaacuugucagacacccaagggugcuauaaacaccagccucccauuucagaauauacauccgaucacaauuggaaaauguccaaaauauguaaaaagcacaaaauugagacuggccacaggauugaggaauaucccgucuauucaaucuagaggccuauuuggggccauugccgguuucauugaagggggguggacagggaugguagauggaugguacgguuaucaccaucaaaaugagcaggggucaggauaugcagccgaccugaagagcacacagaaugccauugacgagauuacuaacaaaguaaauucuguuauugaaaagaugaauacacaguucacagcaguagguaaagaguucaaccaccuggaaaaaagaauagagaauuuaaauaaaaagguugaugaugguuuccuggacauuuggacuuacaaugccgaacuguugguucuauuggaaaaugaaagaacuuuggacuaccacgauucaaaugugaagaacuuauaugaaaagguaagaagccaguuaaaaaacaaugccaaggaaauuggaaacggcugcuuugaauuuuaccacaaaugcgauaacacgugcauggaaagugucaaaaaugggacuuaugacuacccaaaauacucagaggaagcaaaauuaaacagagaagaaauagaugggguaaagcuggaaucaacaaggauuuaccagauuuuggcgaucuauucaacugucgccaguucauugguacugguagucucccugggggcaaucaguuucuggaugugcucuaaugggucucuacaguguagaauauguauuuaa

SEQ ID NO: 37935 - RNA, 1701 nt, Artificial Sequence; identical to SEQ ID NO: 37905
  derived and/or modified CDS sequence (wt) from hemagglutinin__InfluenzaA__ADM95847

SEQ ID NO: 37936 - RNA, 1701 nt, Artificial Sequence; identical to SEQ ID NO: 37907
  derived and/or modified CDS sequence (wt) from hemagglutinin__InfluenzaA__ADM95848

SEQ ID NO: 37937 - RNA, 1701 nt, Artificial Sequence
  derived and/or modified CDS sequence (wt) from hemagglutinin__InfluenzaA__ADM95849
augaaggcaauacuaguaguucugcuauauacauuugcaaccgcaaaugcagacacauuauguauagguuaucaugcgaacaauucaacagacacuguagacacaguacuagaaaagaauguaacaguaacacacucuguuaaccuucuagaagacaagcauaacgggaaacuaugcaaacuaagagggguagccccauugcauuuggguaaauguaacauugcuggcuggauccugggaaauccagagugugaaucacucuccacagcaagcucaugguccuacauuguggaaacaucuaguucagacaauggaacguguuacccaggagauuucaucgauuaugaggagcuaagagagcaauugagcucagugucaucauuugaaagguuugagauauuccccaagacaaguucauggcccaaucaugacucgaacaaagguguaacggcagcaugcccucaugcuggagcaaaaagcuucuacaaaaauuuaauauggcuaguuaaaaaaggaaauucauacccaaagcucagcaaauccuacauuaaugauaaagggaaagaaguccucgugcuauggggcauucaccauccaucuacuagugcugaccaacaaagucucuaucagaaugcagaugcauauguuuuugugggaacaucaagauacagcaagaaguucaagccggaaauagcaauaagacccaaagugagggaucaagaagggagaaugaacuauuacuggacacuaguagagccgggagacaaaauaacauucgaagcaacuggaaaucuagugguaccgagauaugcauucgcaauggaaagaaaugcuggaucugguauuaucauuucagauacaccaguccacgauugcaauacaacuugucagacacccaagggugcuauaaacaccagccucccauuucagaauauacauccgaucacaauuggaaaauguccaaaauauguaaaaagcacaaaauugagacuggccacaggauugaggaaugucccgucuauucaaucuagaggccuauuuggggccauugccgguuucauugaagggggguggacagggaugguagauggaugguacgguuaucaccaucaaaaugagcaggggucaggauaugcagccgaccugaagagcacacagaaugccauugacgagauuacuaacaaaguaaauucuguuauugaaaagaugaauacacaguucacagcaguagguaaagaguucaaccaccuggaaaaaagaauagagaauuuaaauaaaaaaguugaugaugguuuccuggacauuuggacuuacaaugccgaacuguugguucuauuggaaaaugaaagaacuuuggacuaccacgauucaaaugugaagaaauuauaugaaaagguaagaagccaguuaaaaaacaaugccaaggaaauuggaaacggcugcuuugaauuuuaccacaaaugcgauaacacgugcauggaaagugucaaaaaugggacuuaugacuacccaaaauacucagaggaagcaaaauuaaacagagaagaaauagauggaguaaagcuggaaucaacaaggauuuaccagauuuuggcgaucuauucaacugucgccaguucauugguacugguaaucucccugggggcaaucaguuucuggaugugcucuaaugggucucuacaguguagaauauguauuuaa

SEQ ID NO: 37938 - RNA, 1701 nt, Artificial Sequence; identical to SEQ ID NO: 37894
  derived and/or modified CDS sequence (wt) from hemagglutinin__InfluenzaA__ADM95850

SEQ ID NO: 37939 - RNA, 1701 nt, Artificial Sequence
  derived and/or modified CDS sequence (wt) from hemagglutinin__InfluenzaA__ADM95851
augaaggcaauacuaguaguucugcuauauacauuugcaaccgcaaaugcagacacauuauguauagguuaucaugcgaacaauucaacagacacuguagacacaguacuagaaaagaauguaacaguaacacacucuguuaaccuucuagaagacaagcauaacgggaaacuaugcaaacuaagagggguagccccauugcauuuggguaaauguaacauugcuggcuggauccugggaaauccagagugugaaucacucuccacaacaagcucaugguccuacauuguggaaacaucuaguucagacaauggaacguguuacccaggagauuucaucgauuaugaggagcuaagagagcaauugagcucagugucaucauuugaaagguuugagauauuccccaagacaaguucauggcccaaucaugacucgaacaaagguguaacggcagcauguccucaugcuggagcaaaaagcuucuacaaaaauuuaauauggcuaguuaaaaaaggaaauucauacccaaagcucagcaaauccuacauuaaugauaaagggaaagaaguccucgugcuauggggcauucaccauccaucuacuagugcugaccaacaaagucucuaucagaaugcagaugcauauguuuuuguggggacaucaagauacagcaagaaguucaagccggagauagcaauaagacccaaagugagggaucaagaagggagaaugaacuauuacuggacacuaguagagccgggagacaaaauaacauucgaagcaacuggaaaucuagugguaccgagauaugcauucgcaauggaaagaaaugcuggaucugguauuaucauuucagauacaccaguccacgauugcaauacaacuugucagacacccaagggugcuauaaacaccagccucccauuucagaauauacauccgaucacaauuggaaaauguccaaaauauguaaaaagcacaaaauugagacuggccacaggauugaggaauaucccgucuauucaaucuagaggccuauuuggggccauugccgguuucauugaagggggguggacagggaugguagauggaugguacgguuaucaccaucaaaaugagcaggggucaggauaugcagccgaccugaagagcacacagaaugccauugacgagauuacuaacaaaguaaauucuguuauugaaaagaugaauacacaguucacagcaguagguaaagaguucaaccaccuggaaaaaagaauagagaauuuaaauaaaaagguugaugaugguuuccuggacauuuggacuuacaaugccgaacuguugguucuauuggaaaaugaaagaacuuuggacuaccacgauucaaaugugaagaacuuauaugaaaagguaagaagccaguuaaaaaacaaugccaaggaaauuggaaacggcugcuuugaauucuaccacaaaugcgauaacacgugcauggaaagugucaaaaaugggacuuaugacuacccaaaauacucagaggaagcaaaauuaaacagagaagaaauagaugggguaaagcuggaaucaacaaggauuuaccagauuuuggcgaucuauucaacugucgccaguucauugguacugguagucucccugggggcaaucaguuucuggaugugcucuaaugggucucuacaguguagaauauguauuuaa

SEQ ID NO: 37940 - RNA, 1701 nt, Artificial Sequence
  derived and/or modified CDS sequence (wt) from hemagglutinin__InfluenzaA__ADM95852
augaaggcaauacuaguaguucugcuauauacauuugcaaccgcaaaugcagacacauuauguauagguuaucaugcgaacaauucaacagacacuguagacacaguacuagaaaagaauguaacaguaacacacucuguuaaccuucuagaagacaagcauaacgggaaacuaugcaaacuaagagggguagccccauugcauuuggguaaauguaacauugcuggcuggauccugggaaauccagagugugaaucacucuccacagcaagcucaugguccuacauuguggaaacaucuaguucagacaauggaacguguuacccaggagauuucaucgauuaugaggagcuaagagagcaauugagcucagugucaucauuugaaagguuugagauauuccccaagacaaguucauggcccaaucaugacucgaacaaagguguaacggcagcaugcccucaugcuggagcaaaaagcuucuacaaaaauuuaauauggcuaguuaaaaaaggaaauucauacccaaagcucagcaaauccuacauuaaugauaaagggaaagaaguccucgugcuauggggcauucaccauccaucuacuagugcugaccaacaaagucucuaucagaaugcagaugcauauguuuuugugggaacaucaagauacagcaagaaguucaagccggaaauagcaauaagacccaaagugagggaucaagaagggagaaugaacuauuacuggacacuaguagagccgggagacaaaauaacauucgaagcaacuggaaaucuagugguaccgagauaugcauucgcaauggaaagaaaugcuggaucugguauuaucauuucagauacaccaguccacgauugcaauacaacuugucagacacccaagggugcuauaaacaccagccucccauuucagaauauacauccgaucacaauuggaaaauguccaaaauauguaaaaagcacaaaauugagacuggccacaggauugaggaaugucccgucuauucaaucuagaggccuauuuggggccauugccgguuucauugaagggggguggacagggaugguagauggaugguacgguuaucaccaucaaaaugagcaggggucaggauaugcagccgaccugaagagcacacagaaugccauugacgagauuacuaacaaaguaaauucuguuauugaaaagaugaauacacaguucacagcaguagguaaagaguucaaccaccuggaaaaaagaauagagaauuuaaauaaaaaaguugaugaugguuuccuggacauuuggacuuacaaugccgaacuguugguucuauuggaaaaugaaagaacuuuggacuaccacgauucaaaugugaagaaauuauaugaaaagauaagaagccaguuaaaaaacaaugccaaggaaauuggaaacggcugcuuugaauuuuaccacaaaugcgauaacacgugcauggaaagugucaaaaaugggacuuaugacuacccaaaauacucagaggaagcaaaauuaaacagagaagaaauagauggaguaaagcuggaaucaacaaggauuuaccagauuuuggcgaucuauucaacugucgccaguucauugguacugguagucucccugggggcaaucaguuucuggaugugcucuaaugggucucuacaguguagaauauguauuuaa

SEQ ID NO: 37941 - RNA, 1701 nt, Artificial Sequence; identical to SEQ ID NO: 37294
  derived and/or modified CDS sequence (wt) from hemagglutinin__InfluenzaA__ADM95854

SEQ ID NO: 37942 - RNA, 1701 nt, Artificial Sequence
  derived and/or modified CDS sequence (wt) from hemagglutinin__InfluenzaA__ADM95855
augaaggcaauacuaguaguucugcuauauacauuugcaaccacaaaugcagacacauuauguauagguuaucaugcgaacaauucaacagacacuguagacacaguacuagaaaagaauguaacaguaacacacucuguuaaccuucuagaagacaagcauaacgggaaacuaugcaaacuaagagggguagccccauugcauuuggguaaauguaacauugcuggcuggauccugggaaauccagagugugaaucacucuccacagcaagcucaugguccuacauuguggaaacaucuaguucagacaauggaacguguuacccaggagauuucaucgauuaugaggagcuaagagagcaauugagcucagugucaucauuugaaagguuugagauauuccccaagacaaguucauggcccaaucaugacucgaacaaagguguaacggcagcaugcccucaugcuggagcaaaaagcuucuacaaaaauuuaauauggcuaguuaaaaaaggaaauucauacccaaagcucagcaaauccuacauuaaugauaaagggaaagaaguccucgugcuauggggcauucaccauccaucuacuagugcugaccaacaaagucucuaucagaaugcagaugcauauguuuuugugggaacaucaagauacagcaagaaguucaagccggaaauagcaauaagacccaaagugagggaucaagaagggagaaugaacuauuacuggacacuaguagagccgggagacaaaauaacauucgaagcaacuggaaaucuagugguaccgagauaugcauucgcaauggaaagaaaugcuggaucugguauuaucauuucagauacaccaguccacgauugcaauacaacuugucagacacccaagggugcuauaaacaccagccucccauuucagaauauacauccgaucacaauuggaaaauguccaaaauauguaaaaagcacaaaauugagacuggccacaggauugaggaaugucccgucuauucaaucuagaggccuauuuggggccauugccgguuucauugaagggggguggacagggaugguagauggaugguacgguuaucaccaucaaaaugagcaggggucaggauaugcagccgaccugaagagcacacagaaugccauugacgagauuacuaacaaaguaaauucuguuauugaaaagaugaauacacaguucacagcaguagguaaagaguucaaccaccuggaaaaaagaauagagaauuuaaauaaaaaaguugaugaugguuuccuggacauuuggacuuacaaugccgaacuguugguucuauuggaaaaugaaagaacuuuggacuaccacgauucaaaugugaagaaauuauaugaaaagguaagaagccaguuaaaaaacaaugccaaggaaauuggaaacggcugcuuugaauuuuaccacaaaugcgauaacacgugcauggaaagugucaaaaaugggacuuaugacuauccaaaauacucagaggaagcaaaauuaaacagagaagaaauagauggaguaaagcuggaaucaacaaggauuuaccagauuuuggcgaucuauucaacugucgccaguucauugguacugguagucucccugggggcaaucaguuucuggaugugcucuaaugggucucuacaguguagaauauguauuuaa

SEQ ID NO: 37943 - RNA, 1701 nt, Artificial Sequence
  derived and/or modified CDS sequence (wt) from hemagglutinin__InfluenzaA__ADM95857
augaaggcaauacuaguaguucugcuauauacauuugcaaccgcaaaugcagacacauuauguauagguuaucaugcgaacaauucaacagacacuguagacacaguacuagaaaagaauguaacaguaacacacucuguuaaccuucuagaagacaagcauaacgggaaacuaugcaaacuaagagggguagccccauugcauuuggguaaauguaacauugcuggcuggauccugggaaauccagagugugaaucacucuccacagcaaacucaugguccuacauuguggaaacaucuaguucagacaauggaacguguuacccaggagauuucaucgauuaugaggagcuaagagagcaauugagcucagugucaucauuugaaagguuugagauauuucccaagacaaguucauggcccaaucaugacucgaacaaagguguaacggcagcauguccucaugcuggagcaaaaagcuucuacaaaaauuuaauauggcuaguuaaaaaaggaaauucauacccaaagcucagcaaauccuacauuaaugauaaagggaaagaaguccucgugcuauggggcauucaccauccaucuacuagugcugaccaacaaagucucuaucagaaugcagaugcauauguuuuuguggggacaucaagauacagcaagaaguucaagccggaaauagcaauaagacccaaagugagggaucaagaagggagaaugaacuauuacuggacacuaguagagccgggagacaaaauaacauucgaagcaacuggaaaucuagugguaccgagauaugcauucgcaauggaaagaaaugcuggaucugguauuaucauuucagauacaccaguccacgauugcaauacaacuugucagacacccaagggugcuauaaacaccagccucccauuucagaauauacauccgaucacaauuggaaaauguccaaaauauguaaaaagcacaaaauugagaauggccacaggauugaggaaugucccgucuauucaaucuagaggccuauuuggggccauugccgguuucauugaagggggguggacagggaugguagauggaugguacgguuaucaccaucaaaaugagcaggggucaggauaugcagccgaccugaagagcacacagaaugccauugacgagauuacuaacaaaguaaauucuguuauugaaaagaugaauacacaguucacagcaguagguaaagaguucaaccaccuggaaaaaagaauagagaauuuaaauaaaaaaguugaugaugguuuccuggacauuuggacuuacaaugccgaacuguugguucuauuggaaaaugaaagaacuuuggacuaccacgauucaaaugugaagaacuuauaugaaaagguaagaagccaguuaaaaaacaaugccaaggaaauuggaaacggcugcuuugaauuuuaccacaaaugcgauaacacgugcauggaaagugucaaaaaugggacuuaugacuacccaaaauacucagaggaagcaaaauuaaacagagaagaaauagaugggguaaagcuggaaucaacaaggauuuaccagauuuuggcgaucuauucaacugucgccaguucauugguacugguagucucccugggggcaaucaguuucuggaugugcucuaaugggucucuacaguguagaauauguauuuaa

SEQ ID NO: 37944 - RNA, 1701 nt, Artificial Sequence
  derived and/or modified CDS sequence (wt) from hemagglutinin__InfluenzaA__ADM95858
augaaggcaauacuaguaguucugcuauauacauuugcaaccgcaaaugcagacacauuauguauagguuaucaugcgaacaauucaacagacacuguagacacaguacuagaaaagaauguaacaguaacacacucuguuaaccuucuagaagacaagcauaacgggaaacuaugcaaacuaagagggguagccccauugcauuuggguaaauguaacauugcuggcuggauccugggaaauccagagugugaaucacucuccacagcaagcucaugguccuacauuguggaaacaucuaguucagacaauggaacguguuacccaggagauuucaucgauuaugaggagcuaagagagcaauugagcucagugucaucauuugaaagguuugagauauuucccaagacaaguucauggcccaaucaugacucgaacaaagguguaacggcagcauguccucaugcuggagcaaaaagcuucuacaaaaauuuaauauggcuaguuaaaaaaggaaauucauacccaaagcucagcaaauccuacauuaaugauaaagggaaagaaguccucgugcuauggggcauucaccauccaucuacuagugcugaccaacaaagucucuaucagaaugcagaugcauauguuuuuguggggacaucaagauacagcaagaaguucaagccggaaauagcaauaagacccaaagugagggaucaagaagggagaaugaacuauuacuggacacuaguagagccgggagacaaaauaacauucgaagcaacuggaaaucuagugguaccgagauaugcauucgcaauggaaagaaaugcuggaucugguauuaucauuucagauacaccaguccacgauugcaauacaacuugucagacacccaagggugcuauaaacaccagccucccauuucagaauauacauccgaucacaauuggaaaauguccaaaauauguaaaaagcacaaaauugagaauggccacaggauugaggaaugucccgucuauucaaucuagaggccuauuuggggccauugccgguuucauugaagggggguggacagggaugguagauggaugguacgguuaucaccaucaaaaugagcaggggucaggauaugcagccgaccugaagagcacacagaaugccauugacgagauuacuaacaaaguaaauucuguuauugaaaagaugaauacacaguucacagcaguagguaaagaguucaaccaccuggaaaaaagaauagagaauuuaaauaaaaaaguugaugaugguuuccuggacauuuggacuuacaaugccgaacuguugguucuauuggaaaaugaaagaacuuuggacuaccacgauucaaaugugaagaacuuauaugaaaagguaagaagccaauuaaaaaacaaugccaaggaaauuggaaacggcugcuuugaauuuuaccacaaaugcgauaacacgugcauggaaagugucaaaaaugggacuuaugacuacccaaaauacucagaggaagcaaaauuaaacagagaagaaauagaugggguaaagcuggaaucaacaaggauuuaccagauuuuggcgaucuauucaacugucgccaguucauugguacugguagucucccugggggcaaucaguuucuggaugugcucuaaugggucucuacaguguagaauauguauuuaa

SEQ ID NO: 37945 - RNA, 1701 nt, Artificial Sequence
  derived and/or modified CDS sequence (wt) from hemagglutinin__InfluenzaA__ADM95859
augaaggcaauacuaguaguucugcuauauacauuugcaaccgcaaaugcagacacauuauguauagguuaucaugcgaacaauucaacagacacuguagacacaguacuagaaaagaauguaacaguaacacacucuguuaaccuucuagaagacaagcauaacgagaaacuaugcaaacuaagagggguagccccauugcauuuggguaaauguaacauugcuggcuggauccugggaaauccagagugugaaucacucuccacagcaagcucaugguccuacauuguggaaacaucuaguucagacaauggaacguguuacccaggagauuucaucgauuaugaagagcuaagagagcaauugagcucagugucaucauuugaaagguuugagauauuccccaagacaaguucauggcccaaucaugacucgaacaaagguguaacggcagcaugcccucaugcuggagcaaaaagcuucuacaaaaauuuaauauggcuaguuaaaaaaggaaauucauacccaaagcucagcaaauccuacauuaaugauaaagggaaagaaguccucgugcuauggggcauucaccauccaucuacuagugcugaccaacaaagucucuaucagaaugcagaugcauauguuuuugugggaacaucaagauacagcaagaaguucaagccggaaauagcaauaagacccaaagugagggaucaagaagggagaaugaacuauuacuggacacuaguagagccgggagacaaaauaacauucgaagcaacuggaaaucuagugguaccgagauaugcauucgcaauggaaagaaaugcuggaucugguauuaucauuucagauacaccaguccacgauugcaauacaacuugucagacacccaagggugcuauaaacaccagccucccauuucagaauauacauccgaucacaauuggaaaauguccaaaauauguaaaaagcacaaaauugagacuggccacaggauugaggaaugucccgucuauucaaucuagaggccuauuuggggccauugccgguuucauugaagggggguggacagggaugguagauggaugguacgguuaucaccaucaaaaugagcaggggucaggauaugcagccgaccugaagagcacacagaaugccauugacgagauuacuaacaaaguaaauucuguuauugaaaagaugaauacacaguucacagcaguagguaaagaguucaaccaccuggaaaaaagaauagagaauuuaaauaaaaaaguugaugaugguuuccuggacauuuggacuuacaaugccgaacuguugguucuauuggaaaaugaaagaacuuuggacuaccacgauucaaaugugaagaaauuauaugaaaagguaagaagccaguuaaaaaacaaugccaaggaaauuggaaacggcugcuuugaauuuuaccacaaaugcgauaacacgugcauggaaagugucaaaaaugggacuuaugacuacccaaaauacucagaggaagcaaaauuaaacagagaagaaauagauggaguaaagcuggaaucaacaaggauuuaccagauuuuggcgaucuauucaacugucgccaguucauugguacugguagucucccugggggcaaucaguuucuggaugugcucuaaugggucucuacaguguagaauauguauuuaa

SEQ ID NO: 37946 - RNA, 1701 nt, Artificial Sequence
  derived and/or modified CDS sequence (wt) from hemagglutinin__InfluenzaA__ADM95860
augaaggcaauacuaguaguucugcuauauacauuugcaaccgcaaaugcagacacauuauguauagguuaucaugcgaacaauucaacagacacuguagacacaguacuagaaaagaauguaacaguaacacacucuguuaacauucuagaagacaagcauaacgggaaacuaugcaaacuaagagggguagccccauugcauuuggguaaauguaacauugcuggcuggauccugggaaauccagagugugaaucacucuccacagcaagcucaugguccuacauuguggaaacaucuaguucagacaauggaacguguuacccaggagauuucaucgauuaugaggagcuaagagagcaauugagcucagugucaucauuugaaagguuugagauauuccccaagacaaguucauggcccaaucaugacucgaacaaagguguaacggcagcauguccucaugcuggagcaaaaagcuucuacaaaaauuuaauuuggcuaguuaaaaaaggaaauucauacccaaagcucagcaaauccuacauuaaugauaaagggaaagaaguccucgugcuauggggcauucaccauccaucuacuagugcugaccaacaaagucucuaucagaaugcagaugcauauguuuuuguggggucaucaagauacagcaagaaguucaagccggaaauagcaauuagacccaaagugagggaucaagaagggagaaugaacuauuacuggacacuaguagagccgggagacaaaauaacauucgaagcaacuggaaaucuagugguaccaagauaugcauucgcaauggaaagaaaugcuggaucugguauuaucauuucagauacaccaguccaugauugcaauacaacuugucagacacccaagggugcuauaaacaccagccucccauuucagaauauacauccgaucacaauuggaaaauguccaaaauauguaaaaagcacaaaauugagacuggccacaggauugaggaaugucccgucuauucaaucuagaggccuauuuggggccauugccgguuucauugaagggggguggacagggaugguagauggaugguacgguuaucaccaucaaaaugagcaggggucaggauaugcagccgaccugaagagcacacagaaugccauugacgagauuacuaacaaaguaaauucuguuauugaaaagaugaauacacaguucacagcaguagguaaagaauucaaccaccuggaaaaaagaauagagaauuuaaauaaaaaaguugaugaugguuuccuggacauuuggacuuacaaugccgaacuguugguucuauuggaaaaugaaagaacuuuggacuaccacgauucaaaugugaagaacuuauaugaaaagguaagaagccagcuaaaaaacaaugccaaggaaguuggaaacggcugcuuugaauuuuaccacaaaugcgauaacacgugcauggaaagugucaaaaaugggacuuaugacuacccaaaauacucagaggaagcaaaauuaaacagagaagaaauagaugggguaaagcuggaaucaacaaggauuuaccagauuuuggcgaucuauucaacugccgccaguucauugguacugguagucucccugggggcaaucaguuucuggaugugcucuaaugggucucuacaguguagaauauguauuuaa

SEQ ID NO: 37947 - RNA, 1701 nt, Artificial Sequence
  derived and/or modified CDS sequence (wt) from hemagglutinin__InfluenzaA__ADM95862
augaaggcaauacuaguaguucugcuauauacauuugcaaccgcaaaugcagacacauuauguauagguuaucaugcgaacaauucaacagacacuguagacacaguacuagaaaagaauguaacaguaacacacucuguuaaccuucuagaagacaagcauaacgggaaacuaugcaaacuaagagggguagccccauugcauuuggguaaauguaacauugcuggcuggauccugggaaauccagagugugaauuacucuccacagcaagcucaugguccuacauuguggaaacaucuaguucagacaauggaacguguuacccaggagauuucaucgauuaugaggagcuaagagagcaauugagcucagugucaucauuugaaagguuugagauauuccccaagacaaguucauggcccaaucaugacucgaacaaagguguaacggcagcauguccucaugcuggagcaaaaagcuucuacaaaaauuuaauauggcuaguuaaaaaaggaaauucauacccaaagcucagcaaauccuacauuaaugauaaagggaaagaaguccucgugcuauggggcauucaccauccaucuacuagugcugaccaacaaagucucuaucagaaugcagaugcauauguuuuuguggggacaucaagauacagcaagaaguucaagccggaaauagcaauaagacccaaagugagggaucaagaagggagaaugaacuauuacuggacacuaguagagccgggagacaaaauaacauucgaagcaacuggaaaucuagugguaccgagauaugcauucgcaauggaaagaaaugcuggaucugguauuaucauuucagauacaccaguccacgauugcaauacaacuugucagacacccaagggugcuauaaacaccagccucccauuucagaauauacauccgaucacaauuggaaaauguccaaaauauguaaaaagcacaaaauugagacuggccacaggauugaggaaugucccgucuauucaaucuagaggccuauuuggggccauugccgguuuuauugaagggggguggacagggaugguagauggaugguacgguuaucaccaucaaaaugagcaggggucaggauaugcagccgaccugaagagcacacagaaugccauugacgagauuacuaacaaaguaaauucuguuauugaaaagaugaauacacaguucacagcaguagguaaagaguucaaccaccuggaaaaaagaauagagaauuuaaauaaaaaaguugaugaugguuuccuggacauuuggacuuacaaugccgaacuguugguucuauuggaaaaugaaagaacuuuggacuaccacgauucaaaugugaagaacuuauaugaaaagguaagaagccaguuaaaaaacaaugccaaggaaauuggaaacggcugcuuugaauuuuaccacaaaugcgauaacacgugcauggaaagugucaaaaaugggacuuaugacuacccaaaauacucagaggaagcaaaauuaaacagagaagaaauagaugggguaaagcuggaaucaacaaggauuuaccagauuuuggcgaucuauucaacugucgccaguucauugguacugguagucucccugggggcaaucaguuucuggaugugcucuaaugggucucuacaguguagaauauguauuuaa

SEQ ID NO: 37948 - RNA, 1701 nt, Artificial Sequence
  derived and/or modified CDS sequence (wt) from hemagglutinin__InfluenzaA__ADM95864
augaaggcaauacuaguaguucugcuauauacauuugcaaccgcaaaugcagacacauuauguauagguuaucaugcgaacaauucaacagacacuguagacacaguacuagaaaagaauguaacaguaacacacucuguuaaccuucuagaagacaagcauaacgggaaacuaugcaaacuaagagggguagccccauugcauuuggguaaauguaacauugcuggcuggauccugggaaauccagagugugaaucacucuccacagcaagcucaugguccuacauuguggaaacaucuaguucagacaauggaacguguuacccaggagauuucaucgauuaugaggagcuaagagagcaauugagcucagugucaucauuugaaagguuugagauauuccccaagacaaguucauggcccaaucaugacucgaacaaagguguaacggcagcauguccucaugcuggagcaaaaagcuucuacaaaaauuuaauauggcuaguuaaaaaaggaaauucauacccaaagcucagcaaauccuacauuaaugauaaagggaaagaaguccuagugcuauggggcauucaccauccaucuacuagugcugaccaacaaagucucuaucagaaugcagaugcauauguuuuuguggggacaucaagauacagcaagaaguucaagccggaaauagcaauaagacccagagugagggaucaagaagggagaaugaacuaucacuggacacuaguagagccgggagacaaaauaacauucgaagcaacuggaaaucuagugguaccgagauaugcauucgcaauggaaagaaaugcuggaucugguauuaucauuucagauacaccaguccacgauugcaauacaacuugucagacacccaagggugcuauaaacaccagccucccauuucaaaauauacauccgaucacaauuggaaaauguccaaaauauguaaaaagcacaaaauugagacuggccacaggauugaggaauaucccgucuauucaaucuagaggccuauuuggggccauugccgguuucauugaagggggguggacagggaugguagauggaugguacgguuaucaccaucaaaaugagcaggggucaggauaugcagccgaccugaagagcacacagaaugccauugacgagauuacuaacaaaguaaauucuguuauugaaaagaugaauacacaguucacagcaguagguaaagaguucaaccaccuggaaaaaagaauagagaauuuaaauaaaaagguugaugaugguuuccuggacauuuggacuuacaaugccgaacuguugguucuauuggaaaaugaaagaacuuuggacuaccacgauucaaaugugaagaacuuauaugaaaagguaagaagccaguuaaaaaacaaugccaaggaaauuggaaacggcugcuuugaauuuuaccacaaaugcgauaacacgugcauggaaagugucaaaaaugggacuuaugacuacccaaaauacucagaggaagcaaaauuaaacagagaagaaauagaugggguaaagcuggaaucaacaaggauuuaccagauuuuggcgaucuauucaacugucgccaguucauugguacugguagucucccugggggcaaucaguuucuggaugugcucuaaugggucucuacaguguagaauauguauuuaa

SEQ ID NO: 37949 - RNA, 1701 nt, Artificial Sequence
  derived and/or modified CDS sequence (wt) from hemagglutinin__InfluenzaA__ADM95865
augaaggcaauacuaguaguucugcuauauacauuugcaaccgcaaaugcagacacauuauguauagguuaucaugcgaacaauucaacagacacuguagacacaguacuagaaaagaauguaacaguaacacacucuguuaaccuucuagaagacaagcauaacgggaaacuaugcaaacuaagagggguagccccauugcauuuggguaaauguaacauugcuggcuggauccugggaaauccagagugugaaucacucuccacagcaagcucaugguccuacauuguggaaacaucuaguucagacaauggaacguguuacccaggagauuucaucaauuaugaggagcuaagagagcaauugagcucagugucaucauuugaaagguuugagauauuccccaagacaaguucauggcccaaucaugacucgaacaaagguguaacggcugcauguccucaugcuggagcaaaaagcuucuacaaaaauuuaauauggcuaguuaaaaaaggaaauucauacccaaagcucagcaaauccuacauuaaugauaaagggaaagaaguccucgugcuauggggcauucaccauccauccacuagugcugaccaacaaagucucuaucagaaugcagaugcauauguuuuuguggggacaucaagauacagcaagaaguucaagccggaaauagcaauaagacccaaagugagggaucaagaagggagaaugaacuauuacuggacacuaguagagccgggagacaaaauaacauucgaagcaacuggaaaucuagugguaccgagauaugcauucgcaauggaaagaaaugcuggaucugguauuaucaucucagauacaccaguccacgauugcaauacaacuugucagacacccaagggugcuauaaacaccagccucccauuucagaauauacauccgaucacaauuggaaaauguccaaaauauguaaaaagcacaaaauugagacuggccacaggauugaggaaugucccgucuauucaaucuagaggccuauuuggggccauugccgguuucauugaagggggguggacagggaugguagauggaugguacgguuaucaccaucaaaaugagcaggggucaggauaugcagccgaccugaagagcacacagaaugccauugacaagauuacuaacaaaguaaauucuguuauugaaaagaugaauacacaguucacagcaguagguaaagaguucaaccaccuggaaaaaagaauagagaauuuaaauaaaaaaguugaugaugguuuccuggacauuuggacuuacaaugccgaacuguugguucuauuggaaaaugaaagaacuuuggacuaccacgauucaaaugugaagaacuuauaugaaaagguaagaagccaguuaaaaaacaaugccaaggaaauuggaaacggcugcuuugaauuuuaucacaaaugcgauaacacgugcauggaaagugucaaaaaugggacuuaugacuacccaaaauacucagaggaagcaaaauuaaacagagaagaaauagaugggguaaagcuggaaucaacaaggauuuaccagauuuuggcgaucuauucaacugucgccaguucauugguacugguagucucccugggggcaaucaguuucuggaugugcucuaaugggucucuacaguguagaauauguauuuaa

SEQ ID NO: 37950 - RNA, 1701 nt, Artificial Sequence
  derived and/or modified CDS sequence (wt) from hemagglutinin__InfluenzaA__ADM95866
augaaggcaauacuaguaguucugcuauauacauuugcaaccacaaaugcagacacauuauguauagguuaucaugcgaacaauucaacagacacuguagacacaguacuagaaaagaauguaacaguaacacacucuguuaaccuucuagaagacaagcauaacgggaaacuaugcaaacuaagagggguagccccauugcauuuggguaaauguaacauugcuggcuggauccugggaaauccagagugugaaucacucuccacagcaagcucaugguccuacauuguggaaauaucuaguucagacaauggaacguguuacccaggagauuucaucgauuaugaggagcuaagagagcaauugagcucagugucaucauuugaaagguuugagauauuccccaagacaaguucauggcccaaucaugacucgaacaaagguguaacggcagcauguccucaugcuggagcaaaaagcuucuacaaaaauuuaauauggcuaguuaaaaagggaaauucauacccaaagcucagcaaauccuacauuaaugauaaagggaaagaaguccucgugcuauggggcauucaccauccaucuacuagugcugaccaacaaagucucuaucagaaugcagaugcauauguuuuuguggggacaucaagauacagcaagaaguucaagccggaaauagcaauaagacccaaagugagggaucaagaagggagaaugaacuauuacuggacacuaguagagccgggagacaaaauaacauucgaagcaacuggaaaucuagugguaccgagauaugcauucgcaauggaaagaaaugcuggaucugguauuaucauuucagauacaccaguccacgauugcaauacaacuugucagacacccaagggugcuauaaacaccagccucccauuucagaauauacauccgaucacaauuggaaaauguccaaaauauguaaaaagcacaaaauugagacuggucacaggauugaggaaugucccgucuauucaaucuagaggccuauuuggggccauugccgguuucauugaagggggguggacagggaugguagauggaugguacgguuaucaccaucaaaaugagcaggggucaggauaugcagccgaccugaagagcacacagaaugccauugacaagauuacuaacaaaguaaauucuguuauugagaagaugaauacacaguucacagcaguagguaaagaguucaaccaccuggaaaaaagaauagagaauuuaaauaaaaaaguugaugaugguuuccuggacauuuggacuuacaaugccgaacuguugguucuauuggaaaaugaaagaacuuuggacuaccacgauucaaaugugaagaacuuauaugaaaagguaagaagccaguuaaaaaacaaugccaaggaaauuggaaacggcugcuuugaauuuuaccacaaaugcgauaacacgugcauggaaagugucaaaaaugggacuuaugacuacccaaaauacucagaggaagcaaaauuaaacagagaagaaauagaugggguaaagcuggaaucaacaaggauuuaccagauuuuggcgaucuauucaacugccgccaguucauugguacugguagucucccugggggcaaucaguuucuggaugugcucuaaugggucucuacaguguagaauauguauuuaa

SEQ ID NO: 37951 - RNA, 1698 nt, Artificial Sequence
  derived and/or modified CDS sequence (wt) from hemagglutinin__InfluenzaA__ADN06300
augaaaguaaaacuacugguccuguuaugcacauuuacagcuacauaugcagacacaauauguauaggcuaccaugcuaacaacucgaccgacacuguugacacaguacuugaaaagaaugugacagugacacacucugucaaccugcuugagaacagucacaauggaaaacuaugucuauuaaaaggaauagccccacuacaauuggguaacugcagcguugccggguggaucuuaggaaacccagaaugcgaauuacugauuuccaaagagucaugguccuacauuguagaaaaaccaaauccugagaauggaacauguuacccagggcauuucgcugacuaugaggaacugagggagcaauugaguucaguaucuucauuugagagguucgaaauauuccccaaagaaagcucauggcccaaccacaccguaaccggagugucagcaucaugcucccauaauggagaaagcaguuuuuacagaaauuugcuauggcugacggggaagaaugguuuguauccaaaucugagcaaguccuaugcaaacaacaaagaaaaagaaguccuuguacuaugggguguucaucacccgccaaacauaguugaccaaaagacccucuaccguacagaaaaugcuuauguuucuguagugucuucacauuauagcagaaaauucaccccagaaauagccaaaagacccaaaguaagagaucaagaaggaagaaucaacuacuacuggacucugcuugaacccggggauacaauaauauuugaggcaaauggaaaucuaauagcgccaagauaugcuuucgcacugaguagaggcuuuggaucaggaaucaucaacucaaaugcaccaauggguaaaugugaugcgaagugccaaacaccucagggagcuauaaacagcagucuuccuuuccagaacguacacccagucacaauaggagaguguccaaaguaugucaggagugcaaaauuaaggaugguuacaggacuaaggaacaucccauccauucaauccagagguuuguuuggagccauugccgguuucauugaagggggguggacuggaaugguagaugguugguaugguuaucaucaucagaaugagcaaggaucaggcuaugcugcagaucaaaaaagcacacaaaaugccauuaaugggauuacaaacaaggugaauucuguaauugagaaaaugaacacucaauucacagcagugggcaaagaauucaacaaauuggaaagaaggauggaaaacuugaauaaaaaaguugaugauggguuuauagacauuuggacauauaaugcagaacuguugguucuacuggaaaaugaaaggacuuuggauuuccaugacuccaaugugaagaaucuguaugagaaaguaaaaagccaguuaaagaauaaugcuaaagaaauaggaaauggguguuuugaauucuaucacaaguguaacgaugaaugcauggagaguguaaagaauggaacuuaugacuauccaaaauauuccgaagaaucaaaguuaaacagggagaaaauugauggagugaaauuggaaucaaugggagucuaucagauucuggcgauauacucaacagucgccaguucucugguucuuuuggucucccugggggcaaucagcuucuggauguguuccaaugggucuuugcaguguagaauaugcaucuaa

SEQ ID NO: 37952 - RNA, 1698 nt, Artificial Sequence
  derived and/or modified CDS sequence (wt) from hemagglutinin__InfluenzaA__ADN06311
augaaaguaaaacuacugguccuguuaugcacacuuacagcuacauaugcagacacaauauguauaggcuaccaugcuaacaacucgaccgacacuguugacacaguacuugaaaagaaugugacagugacacacucugucaaccugcuugagaacagucacaauggaaaacuaugucuauuaaaaggaauagccccacuacaauuggguaacugcagcguugccggguggaucuuaggaaacccagaaugcgaauugcugauuuccaaggagucaugguccuacauuguagaaaaaccaaauccugagaauggaacauguuacccagggcauuucgcugacuaugaggaacugagggagcaauugaguucaguaucuucauuugagagguucgaaauauuccccaaaggaagcucauggcccaaccacaccguaaccggagugucagcaucaugcucccauaauggggaaaacaguuuuuacagaaauuugcuauggcugacggggaagaaugguuuguacccaaaccugagcaaguccuaugcaaacaacaaagaaaaagaaguccuuguacuaugggguguucaucacccgccaaacauagcugaccaaaagacccucuaucauacagaaaaugcuuauguuucuguagugucuucacauuauagcagaaaauucaccccagaaauagccaaaagacccaaaguaagagaucaagaaggaagaaucaacuacuacuggacucugcuugaacccggggauacaauaauauuugaggcaaauggaaaucuaauagcgccaagauaugcuuucgcacugaguagaggcuuuggaucaggaaucaucaacucaaaugcaccaauggauaaaugugaugcgaagugccaaacaccucaaggagcuauaaacagcagucuuccuuuccagaacguacacccagucacaauaggagaguguccaaaguaugucaggagugcaaaauuaaggaugguuacaggacuaaggaacaucccauccauucaauccagagguuuguuuggagccauugccgguuucauugaagggggguggacuggaaugguagaugguugguaugguuaucaucaucagaaugagcaaggaucuggcuaugcugcagaucaaaaaagcacacaaaaugccauuaaugggauuacaaacaaggugaauucuguaauugagaaaaugaacacucaauucacagcagugggcaaagaauucaacaaauuggaaagaaggauggaaaacuugaauaaaaaaguugaugauggauuuauagacauuuggacauauaaugcagaacuguugguuuuacuggaaaaugaaaggacuuuggauuuccaugacuccaaugugaagaaucuguaugagaaaguaaaaagccaguuaaagaauaaugcuaaagaaauaggaaauggguguuuugaauucuaucacaaauguaacgaugaaugcauggagaguguaaagaauggaacuuaugacuauccaaaauauuccgaagaaucaaaguuaaacagggagaaaauugauggagugaaauuggaaucaaugggagucuaucagauucuggcgaucuacucaacagucgccaguucucugguucucuuggucucccugggggcaaucagcuucuggauguguuccaaugggucuuugcaguguagaauaugcaucuaa

SEQ ID NO: 37953 - RNA, 1698 nt, Artificial Sequence
  derived and/or modified CDS sequence (wt) from hemagglutinin__InfluenzaA__ADN06322
augaaaguaaaacuacugguccuguuaugcacauuuacagcuacauaugcagacacaauauguauaggcuaccaugcuaacaacucgaccgacacuguugacacaguacuugaaaagaaugugacagugacacacucugucaaccugcuugagaacagucacaauggaaaacuaugucuauuaaaaggaauagccccacuacaauuggguaacugcagcguugccggguggaucuuaggaaacccagaaugcgaauuacugauuuccaaagagucaugguccuacauuguagaaaaaccaaauccugagaauggaacauguuauccagggcauuucgcugacuaugaggaacugagagagcaauugaguucaguaucuucauuugagagguucgaaauauuccccaaagaaagcucauggcccaaccacaccguaaccggagugucagcaucaugcucccauaauggggaaagcaguuuuuacagaaauuugcuauggcugacggggaagaaugguuuguacccaaaccugagcaaguccuaugcaaacaacaaagaaaaagaaguccuuguacuaugggguguucaucacccgccaaacaugguugaccaaaggacccucuaccguacagaaaaugcuuauguuucuguagugucuucacauuauagcagaaaauucaccccagaaauagccaaaagacccaaaguaagagaucaagaaggaagaaucaacuacuacuggacucugcuugaacccggggauacaauaauauuugaggcaaauggaaaucuaauagcgccaagauaugcuuucgcacugaguagaggcuuuggaucaggaaucaucaacucaaaugcaccaauggguaaaugugaugcgaagugccaaacaccucagggagcuauaaacagcagucuuccuuuccagaacguacacccagucacaauaggagaguguccaaaguaugucaggagugcaaaauuaaggaugguuacaggacuaaggaacaucccauccauucaauccagagguuuguuuggagccauugccgguuucauugaagggggguggacuggaaugguagaugguugguaugguuaucaucaucagaaugagcaaggaucuggcuaugcugcagaucaaaaaagcacacaaaaugccauuaaugggauuacaaacaaggugaauucuguaauugagaaaaugaacacucaauucacagcagugggcaaagaauucaacaaauuggaaagaaggauggaaaacuugaauaaaaaaguugaugauggguuuauagacauuuggacauauaaugcagaacuguugguucuacuggaaaaugaaaggacuuuggauuuccaugacuccaaugugaagaaucuguaugagaaaguaaaaagccaguuaaagaauaaugcuaaagaaauaggaaauggguguuuugaauucuaucacaaguguaacgaugaaugcauggagaguguaaagaauggaacuuaugacuauccaaaauauuccgaagaaucaaaguuaaacagggagaaaauugauggagugaaauuggaaucaaugggagucuaucagauucuggcgaucuacucaacagucgccaguucucugguucuuuuggucucccugggggcaaucagcuucuggauguguuccaaugggucuuugcaguguagaauaugcaucuaa

SEQ ID NO: 37954 - RNA, 1698 nt, Artificial Sequence
  derived and/or modified CDS sequence (wt) from hemagglutinin__InfluenzaA__ADN06344
augaagguaaaacuacugguccuguuaugcacauuuacagcuacauaugcagacacaauauguauaggcuaccaugcuaacaacucgaccgacacuguugacacaguacuugaaaagaaugugacagugacacacucugucaaccugcuugagaacagucacaauggaaaacuaugucuauuaaaaggaauagccccacuacaauuggguaacugcagcguugccggguggaucuuaggaaacccagaaugcgaauuacugauuuccaaggagucaugguccuacauuguagaaaaaccaaauccugagaauggaacauguuacccagggcauuucgcugacuaugaggaacugagggagcaauugaguucaguaucuucauuugagagguucgaaauauuccccaaagaaagcucauggcccaaccacaccguaaccggagugucagcaucaugcucccauaauggggaaagcaguuuuuacagaaauuugcuauggcugacggggaagaaugguuuguacccaaaccugagcaaguccuaugcaaacaacaaagaaaaagaaguccuuguacuaugggguguucaucacccgccaagcauaagugaccaaaagacccucuaucauacagaaaaugcuuauguuucuguagugucuucacauuauagcagaaaauucaccccagaaauagccaaaagacccaaaguaagagaucaagaaggaagaaucaacuacuacuggacucugcuugaacccggggauacaauaauauuugaggcaaauggaaaucuaauagcaccaagauaugcuuucgcacugaguagaggcuuuggaucaggaaucaucaacucaaaugcaccaauggauaaaugugaugcgaagugccaaacaccucagggagcuauaaacagcagucuuccuuuccagaacguacacccagucacaauaggagaguguccaaaguaugucaggagugcaaaauuaaggaugguuacaggacuaaggaacaucccauccauucaauccagagguuuguuuggagccauugccgguuucauugaagggggguggacuggaaugguagaugguugguaugguuaucaucaucagaaugagcaaggaucuggcuaugcugcagaucaaaaaagcacacaaaaugccauuaaugggauuacaaacaaggugaauucuguaauugagaaaaugaacacucaauucacagcagugggcaaagaauucaacaaauuggaaagaaggauggaaaacuugaauaaaaaaguugaugauggguuuauagacauuuggacauauaaugcagaacuguugguucuacuggaaaaugaaaggacuuuggauuuccaugacuccaaugugaagaaucuguaugagaaaguaaaaagccaguuaaagaauaaugcuaaagaaauaggaaauggguguuuugaauucuaucacaaguguaacgaugaaugcauggagaguguaaagaauggaacuuaugacuauccaaaauacuccgaagaaucgaaguuaaacagggagaaaauugauggagugaaauuggaaucaaugggagucuaucagauucuggcgaucuacucaacagucgccaguucucugguucuuuuggucucccugggggcaaucagcuucuggauguguuccaaugggucuuugcaguguagaauaugcaucuaa

SEQ ID NO: 37955 - RNA, 1701 nt, Artificial Sequence; identical to SEQ ID NO: 37545
  derived and/or modified CDS sequence (wt) from hemagglutinin__InfluenzaA__ADN06366

SEQ ID NO: 37956 - RNA, 1701 nt, Artificial Sequence
  derived and/or modified CDS sequence (wt) from hemagglutinin__InfluenzaA__ADN26165
augaaggcaauacuaguaguucugcuauauacauuugcaaccgcaaaugcagacacauuauguauagguuaucaugcgaacaauucaacagacacuguagacacaguacuagaaaagaauguaacaguaacacacucuguuaaccuucuagaaggcaagcauaacgggaaacuaugcaaacuaagagggguagccccauugcauuuggguaaauguaacauugcuggcuggauccugggaaauccagagugugaaucacucuccacagcaagcucaugguccuacauuguggaaacaucuaguucagacaauggaacguguuacccaggagauuucaucgauuaugaggagcuaagagagcaauugagcucagugucaucauuugaaagguuugagauauuccccaagacaaguucauggcccaaucaugacucgaacaaagguguaacggcagcauguccucaugcuggagcaaaaagcuucuacaaaaauuuaauauggcuaauuaaaaaaggaaauucauacccaaagcucagcaaauccuacauuaaugauaaagggaaagaaguccucgugcuauggggcauucaccauccaucuacuagugcugaccaacaaagucucuaucagaaugcagaugcauauguuuuuguggggacaucaagauacagcaagaaguucaagccggaaauagcaauaagacccaaagugagggaucaagaagggagaaugaacuauuacuggacacuaguagagccgggagacaaaauaacauucgaagcaacuggaaaucuagugguaccgagauaugcauucgcaauggaaagaaaugcuggaucugguauuaucauuucagauacaccaguccacgauugcaauacaacuugucagacacccaagggugcuauaaacaccagccucccauuucagaauauacauccgaucacaauuggaaaauguccaaaauauguaaaaagcacaaaauugagacuggccacaggauugaggaauaucccgucuauucaaucuagaggccuauuuggggccauugccgguuucauugaagggggguggacagggaugguagauggaugguacgguuaucaccaucaaaaugagcaggggucaggauaugcagccgaccugaagagcacacagaaugccauugacgagauuacuaacaaaguaaauucuguuauugaaaagaugaauacacaguucacagcaguagguaaagaguucaaccaccuggaaaaaagaauagagaauuuaaauaaaaagguugaugaugguuuccuggacauuuggacuuacaaugccgaacuguugguucuauuggaaaaugaaagaacuuuggacuaccacgauucaaaugugaagaacuuauaugaaaagguaagaagccaguuaaaaaacaaugccaaggaaauuggaaacggcugcuuugaauuuuaccacaaaugcgauaacacgugcauggaaagugucaaaaaugggacuuaugacuacccaaaauacucagaggaagcaaaauuaaacagagaagaaauagaugggguaaagcuggaaucagcaaggauuuaccagauuuuggcgaucuauucaacugucgccaguucauugguacugguagucucccugggggcaaucaguuucuggaugugcucuaaugggucucuacaguguagaauauguauuuaa

SEQ ID NO: 37957 - RNA, 1701 nt, Artificial Sequence; identical to SEQ ID NO: 36344
  derived and/or modified CDS sequence (wt) from hemagglutinin__InfluenzaA__ADN26175

SEQ ID NO: 37958 - RNA, 1701 nt, Artificial Sequence
  derived and/or modified CDS sequence (wt) from hemagglutinin__InfluenzaA__ADN78194
augaaggcaauacuaguaguucugcuauauacauuugcaaccacaaaugcagacacauuauguauagguuaucaugcgaacaauucaacagacacuguagacacaguacuagaaaagaauguaacaguaacacacucuguuaaccuucuagaagacaagcauaacgggaaacuaugcaaacuaagagggguagccccauugcauuuggguaaauguaacauugcuggcuggauccugggaaauccagagugugaaucacucuccacagcaagcucaugguccuacauuguggaaacaucuaguucagacaauggaacguguuacccaggagauuucaucgauuaugaggagcuaagagagcaauugagcucagugucaucauuugaaagguuugagauauuccccaagacaaguucauggcccaaucaugacucgaacaaagguguaacggcagcauguccucaugcuggagcaaaaagcuucuacaaaaauuuaauauggcuaguuaaaaaaggaaauucauacccaaagcucagcaaauccuacauuaaugauaaagggaaagaaguccucgugcuauggggcauucaccauccaucuacuagugcugaccaacaaagucucuaucagaaugcagaugcauauguuuuuguggggacaucaagauacagcaagaaguucaagccggaaauagcaauaagacccaaagugagggaucaagaagggagaaugaacuauuacuggacacuaguagagccgggagacaaaauaacauucgaagcaacuggaaaucuagugguaccgagauaugcauucgcaauggaaagaaaugcuggaucugguauuaucauuucagauacaccaguccacgauugcaauacaacuugucagacacccaagggugcuauaaacaccagccuaccauuucagaauauacauccgaucacaauuggaaaauguccaaaauauguaaaaagcacaaaauugagacuggccacaggauugaggaaugucccgucuauucaaucuagaggccuauuuggggccauugccgguuucauugaagggggguggacagggaugguagauggaugguacgguuaucaccaucaaaaugagcaggggucaggauaugcagccgaccugaagagcacacagaaugccauugacaagauuacuaacaaaguaaauucuguuauugaaaagaugaauacacaguucacagcaguagguaaagaguucaaccaccuggaaaaaagaauagagaauuuaaauaaaaaaguugaugaugguuuacuggacauuuggacuuacaaugccgaacuguugguucuauuggaaaaugaaagaacuuuggacuaccacgauucaaaugugaagaacuuauaugaaaagguaagaagccaguuaaaaaacaaugccaaggaaauuggaaacggcugcuuugaauuuuaccacaaaugcgauaacacgugcauggaaagugucaaaaaugggacuuaugacuacccaaaauacucagaggaagcaaaauuaaacagagaagaaauagaugggguaaagcuggaaucaacaaggauuuaccagauuuuggcgaucuauucaacugucgccaguucauugguacugguagucucccugggggcaaucaguuucuggaugugcucuaaugggucucuacaguguagaauauguauuuaa

SEQ ID NO: 37959 - RNA, 1701 nt, Artificial Sequence
  derived and/or modified CDS sequence (wt) from hemagglutinin__InfluenzaA__ADN78195
augaaggcaauacuaguaguucugcuauauacauuugcaaccgcaaaugcagacacauuauguauagguuaucaugcgaacaauucaacagacacuguagacacaguacuagaaaagaauguaacaguaacacacucuguuaaccuucuagaagacaagcauaacgggaaacuaugcaaacuaagagggguagccccauugcauuuggguaaauguaacauugcuggcuggauccugggaaauccagagugugaaucacucuccacagcaagcucaugguccuacauuguggaaacaucuaguucagacaauggaacguguuacccaggagauuucaucgauuaugaggagcuaagagagcaauugagcucagugucaucauuugaaagguuugagauauuccccaagacaaguucauggcccaaucaugacucgaacaaagguguaacggcagcauguccucaugcuggagcaaaaagcuucuacaaaaauuuaauauggcuaguuaaaaaaggaaauucauacccaaagcucagcaaauccuacauuaaugauaaagggaaagaaguccucgugcuauggggcauucaccauccaucuacuagugcugaccaacaaagucucuaucagaaugcagaugcauauguuuuuguggggacaucaagauacagcaagaaguucaagccggaaauagcaauaagacccaaagugagggaucaagaagggagaaugaacuauuacuggacacuaguagagccgggagacaaaauaacauucgaagcaacuggaaaucuagugguaccgagauaugcauucgcaauggaaagaaaugcuggaucugguauuaucauuucagauacaccaguccacgauugcaauacaacuugucagacacccaagggugcuauaaacaccagccuaccauuucagaauauacauccgaucacaauuggaaaauguccaaaauauguaaaaagcacaaaauugagacuggccacaggauugaggaaugucccgucuauucaaucuagaggccuauuuggggccauugccgguuucauugaagggggguggacagggaugguagauggaugguacgguuaucaccaucaaaaugagcaggggucaggauaugcagccgaccugaagagcacacagaaugccauugacaagauuacuaacaaaguaaauucuguuauugaaaagaugaauacacaguucacagcaguagguaaagaguucaaccaccuggaaaaaagaauagagaauuuaaauaaaaaaguugaugaugguuuccuggacauuuggacuuacaaugccgaacuguugguucuauuggaaaaugaaagaacuuuggacuaccacgauucaaaugugaagaacuuauaugaaaagguaagaagccaguuaaaaaacaaugccaaggaaauuggaaacggcugcuuugaauuuuaccacaaaugcgauaacacgugcauggaaagugucaaaaaugggacuuaugacuacccaaaauacucagaggaagcaaaauuaaacagagaagaaauagaugggguaaagcuggaaucaacaaggauuuaccagauuuuggcgaucuauucaacugucgccaguucauugguacugguagucucccugggggcaaucaguuucuggaugugcucuaaugggucucuacaguguagaauauguauuuaa

SEQ ID NO: 37960 - RNA, 1701 nt, Artificial Sequence; identical to SEQ ID NO: 36239
  derived and/or modified CDS sequence (wt) from hemagglutinin__InfluenzaA__ADN78212

SEQ ID NO: 37961 - RNA, 1701 nt, Artificial Sequence; identical to SEQ ID NO: 36239
  derived and/or modified CDS sequence (wt) from hemagglutinin__InfluenzaA__ADN78221

SEQ ID NO: 37962 - RNA, 1698 nt, Artificial Sequence; identical to SEQ ID NO: 37952
  derived and/or modified CDS sequence (wt) from hemagglutinin__InfluenzaA__ADN89050

SEQ ID NO: 37963 - RNA, 1698 nt, Artificial Sequence
  derived and/or modified CDS sequence (wt) from hemagglutinin__InfluenzaA__ADN89061
augaaaguaaaacuacugguccuguuaugcacauucacagcuacauaugcagacacaauauguauaggcuaccaugcuaacaacucgaccgacacuguugacacaguacuugaaaagaaugugacagugacacacucugucaaccugcuugagaacagucacaauggaaaacuaugucuauuaaaaggaauagccccacuacaauuggguaacugcagcguugccggguggaucuuaggaaacccagaaugcgaauuauugauuuccaaggagucaugguccuacauuguagaaaaaccaaauccugagaauggaacauguuacccagggcauuucgcugacuaugaggaacugagggagcaauugaguucaguaucuucauuugagagguucgaaauauuccccaaagaaagcucauggcccaaccacaccguaaccggagugucagcaucaugcucccauaauggggaaagcaguuuuuacagaaauuugcuauggcugacggagaagaaugguuuguacccgaaccugagcaaguccuaugcaaacaacaaagaaaaagaaguccuuguacuaugggguguucaucacccgccaagcauaagugaccaaaaaacccucuaucauacagaaaaugcuuauguuucuguagugucuucacauuauagcagaaaauucaccccagaaauagccaaaagacccaaaguaagagaucaagaaggaagaaucaacuacuacuggacucugcuugaacccggggauacaauaauauuugaggcaaauggaaaucuaauagcgccaagauaugcuuucgcacugaguagaggcuuuggaucaggaaucaucaacucaaaugcaccaauggauaaaugugaugcgaagugccaaacaccucagggagcuauaaacagcagucuuccuuuccagaacguacacccagucacaauaggagaguguccaaaguaugucaggagugcaaaauuaaggaugguuacaggacuaaggaacaucccauccauucaauccagagguuuguuuggagccauugccgguuucauugaagggggguggacuggaaugguagaugguugguaugguuaucaucaucagaaugagcaaggaucuggcuaugcugcagaucaaaaaagcacacaaaaugccauuaaugagauuacaaacaaggugaauucaguaauugagaaaaugaacacucaauucacagcagugggcaaagaauucaacaaauuggaaagaaggauggaaaacuugaacaaaaaaguugaugauggguuuauagacauuuggacauauaaugcagaacuguugguucuacuggaaaaugaaaggacuuuggauuuccaugacuccaaugugaagaaucuguaugagaaaguaaaaaaccaguuaaagaauaaugcuaaagaaauaggaaauggguguuuugaauucuaucacaaguguaacgaugaaugcauggagaguguaaagaauggaacuuaugacuauccaaaauauuccgaagaaucaaaguuaaacagggagaaaauugauggagugaaauuggaaucaaugggagucuaucagauucuggcgaucuacucaacagucgccaguucucugguucuuuuggucucccugggggcaaucagcuucuggauguguuccaaugggucuuugcaguguagaauaugcaucuaa

SEQ ID NO: 37964 - RNA, 1698 nt, Artificial Sequence
  derived and/or modified CDS sequence (wt) from hemagglutinin__InfluenzaA__ADN89072
augaaaguaaaacuacugguccuguuaugcacauuuacagcuacauaugcagacacaauauguauaggcuaccaugcuaacaacucgaccgacacuguugacacaguacuugaaaagaaugugacagugacacacucugucaaccugcuugagaacagucacaauggaaaacuaugucuauuaaaaggaauagccccacuacaauuggguaacugcagcguugccggguggaucuuaggaaacccagaaugcgaauuacugauuuccaaggagucaugguccuacauuguagaaaaaccaaauccugagaauggaacauguuacccagggcauuucgcugacuaugaggaacugagggagcaauugaguucaguaucuucauuugagagguucgaaauauuccccaaagaaagcucauggcccaaccacaccguaaccggagugucagcaucaugcucccauaauggggaaagcaguuuuuacagaaauuugcuauggcugacggggaagaaugguuuguacccaaaccugagcaaguccuaugcaaacaacaaagaaaaagaaguccuuguacuaugggguguucaucacccgccaagcauaagugaccaaaagacccucuaucauacagaaaaugcuuauguuucuguagugucuucacauuauagcagaaaauucaccccagaaauagccaaaagaccuaaaguaagagaucaagaaggaagaaucaacuacuacuggacucugcuugaacccggggauacaauaauauuugaggcaaauggaaaucuaauagcgccaagauaugcuuucgcacugaguagaggcuuuggaucaggaaucaucaacucaaaugcaccaauggauaaaugugaugcgaagugccaaacaccucagggagcuauaaacagcagucuuccuuuccagaacguacacccagucacaauaggagaguguccaaaguaugucaggagugcaaaauuaaggaugguuacaggacuaaggaacaucccauccauucaauccagagguuuguuuggagccauugccgguuucauugaagggggguggacuggaaugguagaugguugguaugguuaucaucaucagaaugagcaaggaucuggcuaugcugcagaucaaaaaagcacacaaaaugccauuaaugggauuacaaacaaggugaauucuguaauugagaaaaugaacacucaauucacagcagugggcaaagaauucaacaaauuggaaagaaggauggaaaacuugaauaaaaaaguugaugauggguuuauagacauuuggacauauaaugcagaacuguugguucuacuggaaaaugaaaggacuuuggauuuccaugacuccaaugugaagaaucuguaugagaaaguaaaaagccaguuaaagaauaaugcuaaagaaauaggaaauggguguuuugaauucuaucacaaguguaacgaugaaugcauggagaguguaaagaauggaacuuaugacuauccaaaauauuccgaagaaucaaaguuaaacagggagaaaauugauggagugaaauuggaaucaaugggagucuaucagauucuggcgaucuacucaacagucgccaguucucugguucuuuuggucucccugggggcaaucagcuucuggauguguuccaaugggucuuugcaauguagaauaugcaucuaa

SEQ ID NO: 37965 - RNA, 1698 nt, Artificial Sequence
  derived and/or modified CDS sequence (wt) from hemagglutinin__InfluenzaA__ADN89083
augaaaguaaaacuacugguccuguuaugcacauuuacagcuacauaugcagacacaauauguauaggcuaccaugcuaacaacucgaccgacacuguugacacaguacuugaaaagaaugugacagugacacacucugucaaccugcuugagaacagucacaauggaaaacuaugucuauuaaaaggaauagccccacuacaauuggguaacugcagcguugccggguggaucuuaggaaacccagaaugcgaauuacugauuuccaaggagucauggucauacauuguagaaaaaccaaauccugagaauggaacauguuacccaggacauuucgcugacuaugaggaacugagggagcaauugaguucaguaucuucauuugagagguucgaaauauuccccaaagaaagcucauggcccaaccacaccguaaccggagugucagcaucaugcucccauaauggggaaaacaguuuuuacagaaauuugcuauggcugacggggaagaaugguuuguacccaaaccugagcaaguccuaugcaaacaacaaagaaaaagaaguccuuguacuaugggguguucaucacccgccaaacauggcugaccaaaagacccucuaucauacagaaaaugcuuauguuucuguagugucuucacauuauagcagaaaauucaccccagaaauagccaaaagacccaaaguaagagaucaagaaggaagaaucaacuacuacuggacucugcuugaacccggggauacaauaauauuugaggcaaauggaaaucuaauagcgccaagauaugcuuucgcacugaguagaggcuuuggaucaggaaucaucaacucaaaugcaccaauggauaaaugugaugcgaagugccaaacaccucaaggagcuauaaacagcagucuuccuuuccagaacguacacccagucacaauaggagaguguccaaaguaugucaggagugcaaaauuaaggaugguuacaggacuaaggaacaucccauccauucaauccagagguuuguuuggagccauugccgguuucauugaagggggguggacuggaaugguagaugguugguaugguuaucaucaucagaaugagcaaggaucuggcuaugcugcagaucaaaaaagcacacaaaaugccauuaaugggauuacaaacaaggugaauucuguaauugagaaaaugaacacucaauucacagcagugggcaaagaauucaacaaauuggaaagaaggauggaaaacuugaauaaaaaaguugaugauggguuuauagacauuuggacauauaaugcagagcuguugguucuacuggaaaaugaaaggacuuuggauuuccaugacuccaaugugaagaaucuguaugagaaaguaaaaagccaguuaaagaauaaugcuaaagaaauaggaaauggguguuuugaauucuaucacaaguguaacgaugaaugcauggagaguguaaagaauggaacuuaugacuauccaaaauauuccgaagaaucaaaguuaaacagggagaaaauugauggagugaaauuggaaucaaugggagucuaucagauucuggcgaucuacucaacagucgccaguucucugguucuuuuggucucccugggggcaaucagcuucuggauguguuccaaugggucuuugcaguguagaauaugcaucuaa

SEQ ID NO: 37966 - RNA, 1698 nt, Artificial Sequence
  derived and/or modified CDS sequence (wt) from hemagglutinin__InfluenzaA__ADN89094
augaaaguaaaacuacugguccuguuaugcacauuuacagcuacauaugcggacacaauauguauaggcuaccaugcuaacaacucgaccgacacuguugacacagcacuugaaaagaaugugacagugacacacucugucaaccugcuugagaacagucacaauggaaaacuaugucuauuaaaaggaauagccccacuacaauuggguaacugcagcguugccggguggaucuuaggaaacccagaaugcgaauuacugauuuccaaggagucaugguccuacauuguagaaaaaccaaauccugagaauggaacauguuacccagggcauuucgcugacuaugaggaacugagggagcaauugaguucaguaucuucauuugagagguucgaaauauuccccaaagaaagcucauggcccaaccacaccguaaccggagugucagcaucaugcucccauaauggggaaaacaguuuuuacagaaauuugcuauggcugacggggaagaaugguuuguacccaaaccugagcaaguccuaugcaaacaacaaaggaaaagaaguccuuguacuaugggguguucaucacccgccaaacauagcugaucaaaagacccucuaucauacagaaaaugcuuauguuucuguagugucuucacauuauagcagaaaauucaccccagaaauagccaaaagacccaaaguaagagaucaagaaggaagaaucaacuacuacuggacucugcuugaacccggggauacaauaauauuugaggcaaauggaaaucuaauagcgccaagauaugcuuucgcacugaguagaggcuuuggaucaggaaucaucaacucaaaugcaccaauggauaaaugugaugcgaagugccaaacaccucaaggagcuauaaacagcagucuuccuuuccagaacguacacccagucacaauaggagaguguccaaaguaugucaggagugcaaaauuaaggaugguuacaggacuaaggaacaucccauccauucaauccagagguuuguuuggagccauugccgguuucauugaagggggguggacuggaaugguagaugguugguaugguuaucaucaucagaaugagcaaggaucuggcuaugcugcagaucaaaaaagcacacaaaaugccauuaaugggauuacaaacaaggugaauucuguaauugagaaaaugaacacucaauucacagcagugggcaaagaauucaacaaauuggaaagaaggauggaaaacuugaauaaaaaaguugaugauggguuuauagacauuuggacauauaaugcagaacuguugguucuacuggaaaaugaacggacuuuggauuuccaugacuccaaugugaagaaucuguaugagaaaguaaaaagccaguuaaagaauaaugcuaaagaaauaggaaauggguguuuugaauucuaucacaaguguaacgaugaaugcauggagaguguaaagaauggaacuuaugacuauccaaaauauuccgaagaaucaaaguuaaacagggagaaaauugauggagugaaauuggaaucaaugggagucuaucagauuuuggcgaucuacucaacagucgccaguucucugguucuuuuggucucccugggggcaaucagcuucuggauguguuccaaugggucuuugcaguguagaauaugcaucuaa

SEQ ID NO: 37967 - RNA, 1698 nt, Artificial Sequence
  derived and/or modified CDS sequence (wt) from hemagglutinin__InfluenzaA__ADN89116
augaaaguaaaacuacugauccuguuaugcacauuuacagcuacauaugcagacacaauauguauaggcuaccaugcuaacaacucgaccgacacuguugacacaguacuugaaaagaaugugacagugacacacucugucaaccugcuugagaacagucacaaugggaaacuauguuuauuaaaaggaauagccccacuacaauuggguaacugcagcguugccggguggaucuuaggaaacccagaaugcgaauuacugauuuccaaggagucaugguccuacauuguagaaaaaccaaauccugagaauggaacauguuacccagggcauuucgcugacuaugaggaacugagggagcaauugaguucaguaucuucauuugagagguucgaaauauuccccaaagaaagcucauggcccaaccacaccguaaccggagugucagcaucaugcucccauaauggggaaagcaguuuuuacagaaauuugcuauggcugacggugaagaaugguuuguacccaaacuugagcaaguccuaugcaaacaacaaagaaaaagaaguccuuguacuaugggguguucaucacccgccaaacauaguugaccaaaagacccucuaucguacagaaaaugcuuauguuucuguagugucuucacauuauagcagaaaauucaccccagaaauagccaaaagacccaaaguaagagaucaagaaggaagaaucaacuacuacuggacucugcuugaacccggggauacaauaauauuugaggcaaauggaaaucuaauagcgccaagauaugcuuucgcacugaguagaggcuuuggaucaggaaucaucaacucaaaugcaccaauggauaaaugugaugcgaagugccaaacaccucggggagcuauaaacagcagucuuccuuuccagaacguacacccagucacaauaggagaguguccaaaguaugucaggagugcaaaauuaaggaugguuacaggacuaaggaacaucccauccauucaauccagagguuuguuuggagccauugccgguuucauugaagggggguggacuggaaugguagaugguugguaugguuaucaucaucagaaugagcaaggaucuggcuaugcugcagaucaaaaaagcacacaaaaugccauuaaugggauuacaaacaaggugaauucuguaauugagaaaaugaacacucaauucacagcagugggcaaagaauucaacaauuuggaaagaaggauggaaaacuugaauaaaaaaguugaugauggguuuauagacauuuggacauauaaugcagaacuguugguucuacuggaaaaugaaaggacuuuggauuuccaugacuccaaugugaagaaucuguaugagaaaguaaaaagccaguuaaagaauaaugcuaaagaaauaggaaauggguguuuugaauucuaucacaaguguaacgaugaaugcauggagaguguaaagaauggaaccuaugacuauccaaaauauuccgaagaaucaaaguuaaacagggagaaaauugauggagugaaauuggaaucaaugggagucuaucagauucuggcgaucuacucaacagucgccaguucucugguucuuuuggucucccugggggcaaucagcuucuggauguguuccaaugggucuuugcaguguagaauaugcaucuaa

SEQ ID NO: 37968 - RNA, 1698 nt, Artificial Sequence
  derived and/or modified CDS sequence (wt) from hemagglutinin__InfluenzaA__ADN89127
augaaaguaaaacuacugguccuguuaugcacacuuacagcuacauaugcagacacaauauguauaggcuaccaugcuaacaacucgaccgacacuguugacacaguacuugaaaagaaugugacagugacacacucugucaaccugcuugagaacagucacaauggaaaacuaugucuauuaaaaggaauagccccacuacaauuggguaacugcagcguugccggguggaucuuaggaaacccagaaugcgaauugcugauuuccaaggagucaugguccuacauuguagaaaaaccaaauccugagaauggaacauguuacccagggcauuucgcugacuaugaggaacugagggagcaauugaguucaguaucuucauuugagagguucgaaauauuccccaaaggaagcucauggcccaaccacaccguaaccggagugucagcaucaugcucccauaauggggaaaacaguuuuuacagaaauuugcuauggcugacggggaagaaugguuuguacccaaaccugagcaaguccuaugcaaacaacaaagaaaaagaaguccuuguacuaugggguguucaucacccgccaaacauagcugaccaaaagacccucuaucauacagaaaaugcuuauguuucuguagugucuucacauuauagcagaaaauucaccccagaaauagccaaaagacccaaaguaagagaucaagaaggaagaaucaacuacuacuggacucugcuugaacccggggauacaauaauauuugaggcaaauggaaaucuaauagcgccaagauaugcuuucgcacugaguagaggcuuuggaucaggaaucaucaacucaaaugcaccaauggauaaaugugaugcgaagugccaaacaccucaaggagcuauaaacagcagucuuccuuuccagaacguacacccagucacgauaggagaguguccaaaguaugucaggagugcaaaauuaaggaugguuacaggacuaaggaacaucccauccauucaauccagagguuuguuuggagccauugccgguuucauugaagggggguggacuggaaugguagaugguugguaugguuaucaucaucagaaugagcaaggaucuggcuaugcugcagaucaaaaaagcacacaaaaugccauuaaugggauuacaaacaaggugaauucuguaauugagaaaaugaacacucaauucacagcagugggcaaagaauucaacaaauuggaaagaaggauggaaaacuugaauaaaaaaguugaugauggauuuauagacauuuggacauauaaugcagaacuguugguuuuacuggaaaaugaaaggacuuuggauuuccaugacuccaaugugaagaaucuguaugagaaaguaaaaagccaguuaaagaauaaugcugaagaaauaggaaauggguguuuugaauucuaucacaaguguaacgaugaaugcauggagaguguaaagaauggaacuuaugacuauccaaaauauuccgaagaaucaaaguuaaacagggagaaaauugauggagugaaauuggaaucaaugggagucuaucagauucuggcgaucuacucaacagucgccaguucucugguucucuuggucucccugggggcaaucagcuucuggauguguuccaaugggucuuugcaguguagaauaugcaucuaa

SEQ ID NO: 37969 - RNA, 1698 nt, Artificial Sequence
  derived and/or modified CDS sequence (wt) from hemagglutinin__InfluenzaA__ADN89149
augaaaguaaaacuacugguccuguuaugcacauuuacagcuacauaugcagacacaauauguauaggcuaccaugcuaacaacucgaccgacacuguugacacaguacuugaaaagaaugugacagugacacacucugucaaccugcuugagaacagucacaauggaaaacuaugucuauuaaaaggaauagccccauuacaauuggguaacugcagcguugccggguggaucuuaggaaacccagaaugcgaauuacugauuuccaaggagucaugguccuacauuguagaaaaaccaaauccugagaauggaacauguuacccagggcauuucgcugacuaugaggaacugagggagcaauugaguucaguaucuucauuugagagguucgaaauauuccccaaagaaagcucauggcccaaccacaccguaaccggagugucagcaucaugcucccauaauggggaaagcaguuuuuacagaaauuugcuauggcugacggagaagaaugguuuguacccaaaccugagcaaguccuaugcaaacaacaaagaaaaagaaguccuuguacuaugggguguucaucacccgccaagcauaagugaucaaaagacccucuaucauacagaaaaugcuuauguuucuguagugucuucacauuauagcagaaaauucaccccagaaguagccaaaagacccaaaguaagggaucaagaaggaagaaucaacuacuacuggacucugcuugaacccggggauacaauaauauuugaggcaaauggaaaucuaauagcgccaagauaugcuuucgcacugaguagaggcuuuggaucaggaaucaucaacucaaaugcaccaauggauaaaugugaugcgaagugccaaacaccucagggagcuauaaacagcagucuuccuuuccagaacguacacccagucacaauaggagaguguccaaaguaugucaggagugcaaaauuaaggaugguuacaggacuaaggaacaucccauccauucaauccagagguuuguuuggagccauugccgguuucauugaagggggguggacuggaaugguagacgguugguaugguuaucaucaucagaaugagcaaggaucuggcuaugcugcagaucaaaaaagcacacaaaaugccauuaaugggauuacaaacaaggugaauucuguaauugagaaaaugaacacucaauucacagcagugggcaaagaauucaacaaauuggaaagaaggauggaaaacuugaauaaaaaaguugaugauggguuuauagacauuuggacauauaaugcagaacuguugguucuacuggaaaaugaaaggacuuuggauuuccaugacuccaaugugaagaaucuguaugagaaaguaaaaagccaguuaaagaauaaugcuaaagaaauaggaaauggguguuuugaauucuaucacaaguguaacgaugaaugcauggagaguguaaagaauggaacuuaugacuauccaaaguauuccgaagaaucaaaguuaaacagggagaaaauugauggagugaaauuggaaucaaugggagucuaucagauucuggcgaucuacucaacagucgccaguucucugguucuuuuggucucccugggggcaaucagcuucuggauguguuccaaugggucuuugcaguguagaauaugcaucuga

SEQ ID NO: 37970 - RNA, 1698 nt, Artificial Sequence; identical to SEQ ID NO: 37543
  derived and/or modified CDS sequence (wt) from hemagglutinin__InfluenzaA__ADN89171

SEQ ID NO: 37971 - RNA, 1698 nt, Artificial Sequence
  derived and/or modified CDS sequence (wt) from hemagglutinin__InfluenzaA__ADN89182
augaaaguaaaacuacugguccuguuaugcacacuuacagcuacauaugcagacacaauauguauaggcuaccaugcuaacaacucgaccgacacuguugacacaguacuugaaaagaaugugacagugacacacucugucaaccugcuugagaacagucacaauggaaaacuaugccuauuaaaaggaauagccccacuacaauuggguaacugcagcguugccggguggaucuuaggaaacccagaaugcgaauuacugauuuccaaggagucaugguccuacauuguagaaaaaccaaauccugagaauggaacauguuacccagggcauuucgcugacuaugaggaacugagggagcaauugaguucaguaucuucauuugagagguucgaaauauuccccaaagaaagcucauggcccaaccacaccguaaccggagugucagcaucaugcucccauaauggggaaagcaguuuuuacagaaauuugcuauggcugacggggaagaaugguuuguacccaaaccugagcaaguccuaugcaaacaacaaagaaaaagaaguccuuguacuaugggguguucaucacccgccaaacauaguugaccaaaagacccucuaucguacagaaaaugcuuauguuucuguagugucuucacauuauagcagaaaauucaccccagaaauagccaaaagacccaaaguaagagaucaagaaggaagaaucaacuacuacuggacucugcuugaacccggggauacaauaauauuugaggcaaauggaaaucuaauagcgccaagauaugcuuucgcacugaguagaggcuuuggaucaggaaucaucaacucaaaugcaccaauggauaaaugugaugcgaaaugccaaacaccucagggagcuauaaacaguagucuuccuuuccagaacguacacccagucacaauaggagaguguccaaaguaugucaggagugcaaaauuaaggaugguuacaggacuaaggaacaucccauccauucaauccagagguuuguuuggagccauugccgguuucauugaagggggguggacuggaaugguagaugguugguaugguuaucaucaucagaaugagcaaggaucuggcuaugcugcagaucaaaaaagcacacaaaaugccauuaaugggauuacaaacaaggugaauucuguaauugagaaaaugaacacucaauucacagcagugggcaaagaauucaacaaauuggagagaaggauggaaaacuugaauaaaaaaguugaugauggguuuauagacauuuggacauauaaugcagaacuguugguucuacuggaaaaugaaaggacuuuggauuuccaugacuccaaugugaagaaucuguaugagaaaguaaaaagccaguuaaagaauaaugcuaaagaaauaggaaauggguguuuugaauucuaucacaaguguaacgaugaaugcauggagaguguaaagaauggaacuuaugacuauccaaaauauuccgaagaaucaaaguuaaacagggagaaaauugauggagugaaauuggaaucaaugggagucuaucagauucuggcgaucuacucaacagucgccaguucucugguucuuuuggucucccugggggcaaucagcuucuggauguguuccaaugggucuuugcaguguagaauaugcaucuaa

SEQ ID NO: 37972 - RNA, 1698 nt, Artificial Sequence; identical to SEQ ID NO: 37543
  derived and/or modified CDS sequence (wt) from hemagglutinin__InfluenzaA__ADN89193

SEQ ID NO: 37973 - RNA, 1698 nt, Artificial Sequence; identical to SEQ ID NO: 37543
  derived and/or modified CDS sequence (wt) from hemagglutinin__InfluenzaA__ADN89204

SEQ ID NO: 37974 - RNA, 1698 nt, Artificial Sequence
  derived and/or modified CDS sequence (wt) from hemagglutinin__InfluenzaA__ADN89215
augaaaguaaaacuacugguccuguuaugcacacuuacagcuacauaugcagacacaauauguauaggcuaccaugcuaacaacucgaccgacacuguugacacaguacuugaaaagaaugugacagugacacacucugucaaccugcuugagaacagucacaauggaaaacuaugucuauuaaaaggaauagccccacuacaauuggguaacugcagcguugccggguggaucuuaggaaacccagaaugcgaauugcugauuuccaaggagucaugguccuacauuguagaaaaaccaaauccugagaauggaacauguuacccagggcauuucgcugacuaugaggaacugagggagcaauugaguucaguaucuucauuugagagguucgaaauauuccccaaaggaagcucauggcccaaccacaccguaaccggagugucagcaucaugcucccauaauggggaaaacaguuuuuacagaaauuugcuauggcugacggggaagaaugguuuguacccaaaccugagcaaguccuaugcaaacaacaaagaaaaagaaguccuuguacuaugggguguucaucacccgccaaacauagcugaccaaaagacccucuaucauacagaaaaugcuuauguuucuguagugucuucacauuauagcagaaaauucaccccagaaauagccaaaagacccaaaguaagagaucaagaaggaagaaucaacuacuacuggacucugcuugaacccggggauacaauaauauuugaggcaaauggaaaucuaauagcgccaagauaugcuuucgcacugaguagaggcuuuggaucaggaaucaucaacucaaaugcaccaauggauaaaugugaugcgaagugccaaacaccucaaggagcuauaaacagcagucuuccuuuccagaacguacacccagucacaauaggagaguguccaaaguaugucaggagugcaaaauuaaggaugguuacaggacuaaggaacaucccauccauucaauccagagguuuguuuggagccauugccgguuucauugaagggggguggacuggaaugguagaugguugguaugguuaucaucaucagaaugagcaaggaucuggcuaugcugcagaucaaaaaagcacacaaaaugccauuaaugggauuacaaacaaggugaauucuguaauugagaaaaugaacacucaauucacagcagugggcaaagaauucaacaaauuggaaagaaggauggaaaacuugaauaaaaaaguugaugauggauuuauagacauuuggacauauaaugcagaacuguugguuuuacuggaaaaugaaaggacuuuggauuuccaugacuccaaugugaagaaucuguaugagaaaguaaaaagccaguuaaagaauaaugcuaaagaaauaggaaauggguguuuugaauucuaucacaaguguaacgaugaaugcauggagaguguaaagaauggaacuuaugacuauccaaaauauuccgaagaaucaaaguuaaacagggagaaaauugauggagugaaauuggaaucaaugggagucuaucagauucuggcgaucuacucaacagucgccaguucucugguucucuuggucucccugggggcaaucagcuucuggauguguuccaaugggucuuugcaguguagaauaugcaucuaa

SEQ ID NO: 37975 - RNA, 1698 nt, Artificial Sequence
  derived and/or modified CDS sequence (wt) from hemagglutinin__InfluenzaA__ADN89226
augaaaguaaaacuacugguccuguuaugcacauuugcagcuacauaugcagacacaauauguauaggcuaccaugcuaacaacucgaccgacacuguugacacaguacuugaaaagaaugugacagugacacacucugucaaccugcuugagaacagucacaauggaaaacuaugucuauuaaaaggaauagccccacuacaauuggguaacugcagcguugccggguggaucuuaggaaacccagaaugcgaauuauugauuuccaaggagucaugguccuacauuguagaaaaaccaaauccugagaauggaacauguuacccagggcauuucgcugacuaugaggaacugagggagcaauugaguucaguaucuucauuugagagguucgaaauauuccccaaagaaagcucauggcccaaccacaccguaaccggagugucagcaucaugcucccauaauggggaaagcaguuuuuacagaaauuugcuauggcugacggagaagaaugguuuguacccgaaccugagcaaguccuaugcaaacaacaaagaaaaagaaguccuuguacuaugggguguucaucacccgccaagcauaagugaccaaaagacccucuaucauacagaaaaugcuuauguuucuguagugucuucacauuauagcagaaaauucaccccagaaauagccaaaagacccaaaguaagagaucaagaaggaagaaucaacuacuacuggacucugcuugaacccggggauacaauaauauuugaggcaaauggaaaucuaauagcgccaagauaugcuuucgcacugaauagaggcuuuggaucaggaaucaucaacucaaaugcaccaauggauaaaugugaugcgaagugccaaacaccucagggagcuauaaacagcagucuuccuuuccagaacguacacccagucacaauaggagaguguccaaaguaugucaggagugcaaaauuaaggaugguuacaggacuaaggaacaucccauccguucaauccagagguuuguuuggagccauugccgguuucauugaagggggguggacuggaaugguagaugguugguaugguuaucaucaucagaaugagcaaggaucuggcuaugcugcagaucaaaaaagcacacaaaaugccauuaaugggauuacaaacaaggugaauucuguaauugagaaaaugaacacucaauucacagcagugggcaaagaauucaacaaguuggaaagaaggauggaaaacuugaacaaaaagguugaugauggguuuauagacauuuggacauauaaugcagaacuguugguucuacuggaaaaugaaaggacuuuggauuuccaugacuccaaugugaagaaucuguaugagaaaguaaaaaaccaguuaaagaauaaugcuaaagaaauaggaaauggguguuuugaauucuaucacaaguguaacgaugaaugcauggagaguguaaagaauggaacuuaugacuauccaaaauauuccgaagaaucaaaguuaaacagggagaaaauugauggagugaaauuggaaucaaugggagucuaucagauucuggcgaucuacucaacagucgccaguucucugguucuuuuggucucccugggggcaaucagcuucuggauguguuccaaugggucuuugcaguguagaauaugcaucuaa

SEQ ID NO: 37976 - RNA, 1698 nt, Artificial Sequence; identical to SEQ ID NO: 37974
  derived and/or modified CDS sequence (wt) from hemagglutinin__InfluenzaA__ADN89237

SEQ ID NO: 37977 - RNA, 1698 nt, Artificial Sequence
  derived and/or modified CDS sequence (wt) from hemagglutinin__InfluenzaA__ADN89248
augaaaguaaaacuacugguccuguuaugcacauuuacagcuacauaugcagacacaauauguauaggcuaccaugcuaacaacucgaccgacacuguugacacaguacuugaaaagaaugugacagugacacacucugucaaccugcuugagaacagucacaauggaaaacuaugucuauuaaaaggaauagccccacuacaauuggguaacugcagcauugccggguggaucuuaggaaacccagaaugcgaauuacugauuuccaaggagucaugguccuacauuguagaaaaaccaaauccugagaauggaacauguuacccagggcauuucgcugacuaugaggaacugagggagcaauugaguucaguaucuucauuugagagguucgaaauauuccccaaagaaagcucauggcccaaccacaccguaaccggagugucagcaucaugcucccauaauggggaaagcaguuuuuacagaaauuugcuauggcugacggggaagaaugguuuguacccaaaccugagcaaguccuaugcaaacaacaaagaaaaagaaguccuuguacuaugggguguucaucacccgccaagcauaagugaccaaaagacccucuaucauacagaaaaugcuuauguuucuguagugucuucacauuauagcagaaaauucaccccagaaauagccaaaagaccuaaaguaagagaucaagaaggaagaaucaacuacuacuggacucugcuugaacccggggacacaauaauauuugaggcaaauggaaaccuaauagcgccaagauaugcuuucgcacugaguagaggcuuuggaucaggaaucaucaacucaaaugcaccaauggauaaaugugaugcgaagugccaaacaccucagggagcuauaaacagcagucuuccuuuccagaacguacacccagucacaauaggagaguguccaaaguaugucagaagugcaaaauuaaggaugguuacaggacuaaggaacaucccauccauucaauccagagguuuguuuggagccauugccgguuucauugaagggggguggacuggaaugguagaugguugguaugguuaucaucaucagaaugagcaaggaucuggcuaugcugcagaucaaaaaagcacacaaaaugccauuaaugggauuacaaacaaggugaauucuguaauugagaaaaugaacacucaauucacagcagugggcaaagaauucaacaaauuggaaagaaggauggaaaacuugaauaaaaaaguugaugauggguuuauagacauuuggacauauaaugcagaacuguugguucuacuggaaaaugaaaggacuuuggauuuccaugacuccaaugugaagaaucuguaugagaaaguaaaaagccaguuaaagaauaaugcuaaagaaauaggaaauggguguuuugaauucuaucacaaguguaacgaugaaugcauggagaguguaaagaauggaacuuaugacuauccaaaauauuccgaagaaucaaaguuaaacagggagaaaauugauggagugaaauuggaaucaaugggagucuaucagauucuggcgaucuacucaacagucgccaguucucugguucuuuuggucucccugggggcaaucagcuucuggauguguuccaaugggucuuugcaguguagaauaugcaucuaa

SEQ ID NO: 37978 - RNA, 1698 nt, Artificial Sequence; identical to SEQ ID NO: 37965
  derived and/or modified CDS sequence (wt) from hemagglutinin__InfluenzaA__ADN89259

SEQ ID NO: 37979 - RNA, 1698 nt, Artificial Sequence
  derived and/or modified CDS sequence (wt) from hemagglutinin__InfluenzaA__ADN89281
augaaaguaaaacuacugguccuguuaugcacauucacagcuacauaugcagacacaauauguauaggcuaccaugcuaacaacucgaccgacacuguugacacaguacuugaaaagaaugugacagugacacacucugucaaccugcuugagaacagucacaauggaaaacuaugucuacuaaaaggaauagccccacuacaauuggguaacugcagcguugccggguggauauuaggaaacccagaaugcgaauuauugauuuccaaggagucaugguccuacauuguagaaaaaccaaauccugagaauggaacauguuacccagggcauuucgcugacuaugaggaacugagggagcaauugaguucaguaucuucauuugagagguucgaaauauuccccaaagaaagcucauggcccaaccacaccguaaccggagugucagcaucaugcucccauaauggggaaagcaguuuuuacagaaauuugcuauggcugacggagaagaaugguuuguacccgaaccugagcaaguccuaugcaaacaacaaagaaaaagaaguccuuguacuaugggguguucaucacccaccaagcauaagugaccaaaagacccucuaucauacagaaaaugcuuauguuucuguagugucuucacauuauagcagaaaauucaccccagaaauagccaaaagacccaaaguaagagaucaagaaggaagaaucaacuacuacuggacucugcuugaacccggggauacaauaauauuugaggcaaauggaaaucuaauagcgccaagauaugcuuucgcacugaguagaggcuuuggaucaggaaucaucaacucaaaugcaccaauggauaaaugugaugcgaagugccaaacaccucagggagcuauaaacagcagucuuccuuuccagaacguacacccagucacaauaggagaguguccaaaguaugucaggagugcaaaauuaaggaugguuacaggacuaaggaacaucccauccauucaauccagagguuuguuuggagccauugccgguuucauugaagggggguggacuggaaugguagaugguugguaugguuaucaucaucagaaugagcaaggaucuggcuaugcugcagaucaaaaaagcacacaaaaugccauuaaugggauuacaaacaaggugaacucuguaauugagaaaaugaacacucaauucacagcagugggcaaagaauucaacaaauuggaaagaaggauggaaaacuugaacaaaaaaguugaugauggguuuauagacauuuggacauauaaugcagaacuguugguucuacuggaaaaugaaaggacuuuggauuuccaugacuccaaugugaagaaucuguaugagaaaguaaaaaaccaguuaaagaauaaugcuaaagaaauaggaaauggguguuuugaauucuaucacaaguguaacgaugaaugcauggagaguguaaagaauggaacuuaugacuauccaaaauauuccgaagaaucaaaguuaaacagggagaaaauugauggagugaaauuggaaucaaugggagucuaucagauucuggcgaucuacucaacagucgccaguucuuugguucuuuuggucucccugggggcaaucagcuucuggauguguuccaaugggucuuugcaguguagaauaugcaucuaa

SEQ ID NO: 37980 - RNA, 1698 nt, Artificial Sequence; identical to SEQ ID NO: 37979
  derived and/or modified CDS sequence (wt) from hemagglutinin__InfluenzaA__ADN89292

SEQ ID NO: 37981 - RNA, 1698 nt, Artificial Sequence; identical to SEQ ID NO: 37979
  derived and/or modified CDS sequence (wt) from hemagglutinin__InfluenzaA__ADN89303

SEQ ID NO: 37982 - RNA, 1698 nt, Artificial Sequence
  derived and/or modified CDS sequence (wt) from hemagglutinin__InfluenzaA__ADN89314
augaaaguaaaacuacugguccuguuaugcacauuuacagcuacauaugcagacacaauauguauaggcuaccaugcuaacaacucgaccgacacuguugacacaguacuugaaaagaaugugacagugacacacucugucaaccugcuugagaacagucacaauggaaaacuaugucuauuaaaaggaauagccccacuacaauuggguaacugcagcguugccggguggaucuuaggaaacccagaaugcgaauuacugauuuccaaggagucaugguccuacauuguagaaaaaccaaauccugagaauggaacauguuacccagggcauuucgcugacuaugaggaacugagggagcaauugaguucaguaucuucauuugagagguucgaaauauuccccaaagaaagcucauggcccaaccacaccguaaccggagugucagcaucaugcucccauaauggggaaaacagcuuuuacagaaauuugcuauggcugacggggaagaaugguuuguacccaaaccugagcaaguccuaugcaaacaacaaagaaaaagaaguccuuguacuaugggguguucaucacccgccaaacauagcugaccaaaagacccucuaucauacagaaaaugcuuauguuucuguagugucuucacauuauagcagaaaauucaccccagaaauagccaaaagacccaaaguaagagaucaagaaggaagaaucaacuacuacuggacucugcuugaacccggggauacaauaauauuugaggcaaauggaaaucuaauagcgccaagauaugcuuucgcacugaguagaggcuuuggaucaggaaucaucaacucaaaugcaccaauggauaaaugugaugcgaagugccaaacaccucaaggagcuauaaacagcagucuuccuuuccagaacguacacccagucacaauaggagaguguccaaaguaugucaggagugcaaaauuaaggaugguuacaggacuaaggaacaucccauccauucaauccagagguuuguuuggagccauugccgguuucauugaagggggguggacuggaaugguagaugguugguaugguuaucaucaucagaaugagcaaggaucuggcuaugcugcagaucaaaaaagcacacaaaaugccauuaaugggauuacaaacaaggugaauucuguaauugagaaaaugaacacucaauucacagcagugggcaaagaauucaacaaauuggaaagaaggauggaaaacuugaauaaaaaaguugaugauggauuuauagacauuuggacauauaaugcagaacuguugguuuuacuggaaaaugaaaggacuuuggauuuccaugacuccaaugugaagaaucuguaugagaaaguaaaaagccaguuaaagaauaaugcuaaagaaauaggaaauggguguuuugaauucuaucacaaguguaacgaugaaugcauggagaguguaaagaauggaacuuaugacuauccaaaauauuccgaagaaucaaaguuaaacagggagaaaauugauggagugaaauuggaaucaaugggagucuaucagauucuggcgaucuacucaacagucgccaguucucugguucucuuggucucccugggggcaaucagcuucuggauguguuccaaugggucuuugcaguguagaauaugcaucuaa

SEQ ID NO: 37983 - RNA, 1698 nt, Artificial Sequence; identical to SEQ ID NO: 36122
  derived and/or modified CDS sequence (wt) from hemagglutinin__InfluenzaA__ADN89325

SEQ ID NO: 37984 - RNA, 1698 nt, Artificial Sequence
  derived and/or modified CDS sequence (wt) from hemagglutinin__InfluenzaA__ADN89336
augaaaguaaaacuacugguccuguuaugcacauuuacagcuacauaugcagacacaauauguauaggcuaccaugcuaacaacucgaccgacacuguugacacaguacuugaaaagaaugugacagugacacacucugucaaccugcuugagaacagucacaauggaaaacugugucuauuaaaaggaauagccccacuacaauuggguaacugcagcguugccggguggaucuuaggaaauccagaaugcgaauuacugauuuccaaggagucaugguccuacauuguagaaaaaccaaauccugagaauggaacauguuacccagggcauuucgcugacuaugaggaacugagggagcaauugaguucaguaucuucauuugagagguucgaaauauuccccaaagaaagcucauggcccaaccacaccguaaccggagugucagcaucaugcucccauaauggggaaagaaguuuuuacagaaauuugcuauggcugacggggaagaaugguuuguacccaaaccugagcaaguccuaugcaaacaacaaagaaaaagaaguccuuguacuaugggguguucaucacccgccagacauaggugaccaaaagacccucuaucauacagaaaaugcuuauguuucuguagugucuucacauuauagcagaaaauucaccccagaaauagccaaaagacccaaaguaagagaucaagaaggaagaaucaacuacuacuggacucugcuugaacccggggauacaauaauauuugaggcaaauggaaaucuaauagcgccaagauaugcuuucgcacugaguagaggcuuuggaucaggaaucaucaacucaaaugcaccaauggauaaaugugaugcgaagugccaaacaccucagggagcuauaaacagcagucuuccuuuccagaacguacacccagucacaauaggagaguguccaaaguaugucaggagugcaaaauuaaggaugguuacuggacuaaggaacaucccauccauucaauccagagguuuguuuggagccauugccgguuucauugaagggggguggacuggaaugguagaugguugguaugguuaucaucaucagaaugagcaagggucuggcuaugcugcagaucaaaaaagcacacaaaaugccauuaaugggauuacaaacaaggugaauucuguaauugagaaaaugaacacucaguucacagcagugggcaaagaauucaauaaauuggaaagaaggauggaaaacuugaauaaaaaaguugaugauggauuuauagacauuuggacauauaaugcagaacuguugguucuacuggaaaaugaaaggacuuuggauuuccaugauuccaaugugaagaaucuguaugagaaaguaaaaagccaguuaaagaauaaugcuaaagaaauaggaaauggguguuuugaauucuaucacaaguguaacgaugagugcauggagaguguaaagaauggaacuuaugacuauccaaaauauuccgaagaaucaaaguuaaacagggagaaaauugauggagugaaauuggaaucaaugggagucuaucagauucuggcgaucuacucaacagucgccaguucucugguucuuuuggucucccugggggcaaucaguuucuggauguguuccaaugggucuuugcaguguagaauaugcaucuaa

SEQ ID NO: 37985 - RNA, 1698 nt, Artificial Sequence; identical to SEQ ID NO: 37975
  derived and/or modified CDS sequence (wt) from hemagglutinin__InfluenzaA__ADN89347

SEQ ID NO: 37986 - RNA, 1698 nt, Artificial Sequence; identical to SEQ ID NO: 36122
  derived and/or modified CDS sequence (wt) from hemagglutinin__InfluenzaA__ADN89358

SEQ ID NO: 37987 - RNA, 1698 nt, Artificial Sequence
  derived and/or modified CDS sequence (wt) from hemagglutinin__InfluenzaA__ADN89369
augaaaguaaaacuacugguccuguuaugcacauuuacagcuacauaugcagacacaauauguauaggcuaccaugcuaacaacucgaccgacacuguugacacaguacuugaaaagaaugugacagugacacacucugucaaccugcuugagaacagucacaaugggaaacuauguuuauuaaaaggaauagccccacuacaauuggguaacugcagcguugccggguggaucuuaggaaacccagaaugcgaauuacugauuuccaaggagucaugguccuacauuguagaaaaaccaaauccugagaauggaacauguuacccagggcauuucgcugacuaugaggaacugagggagcaauugaguucaguaucuucauuugagagguucgaaauauuccccaaagaaagcucauggcccaaccacaccguaaccggagugucagcaucaugcucccauaauggggaaagcaguuuuuacagaaauuugcuauggcugacggugaagaaugguuuguacccaaacuugagcaaguccuaugcaaacaacaaagaaaaagaaguccuuguacuaugggguguucaucacccgccaaacauaguugaccaaaagacccucuaucguacagaaaaugcuuauguuucuguagugucuucacauuauagcagaaaauucaucccagaaauagccaaaagacccaaaguaagagaucaagaaggaagaaucaacuacuacuggacucugcuugaacccggggauacaauaauauuugaggcaaauggaaaucuaauagcgccaagauaugcuuucgcacugaguagaggcuuuggaucaggaaucaucaacucaaaugcaccaauggauaaaugugaugcgaagugccaaacaccucggggagcuauaaacagcagucuuccuuuccagaacguacacccagucacaauaggagaguguccaaaguaugucaggagugcaaaauuaaggaugguuacaggacuaaggaacaucccauccauucaauccagagguuuguuuggagccauugccgguuucauugaagggggguggacuggaaugguagaugguugguaugguuaucaucaucagaaugagcaaggaucuggcuaugcugcagaucaaaaaagcacacaaaaugccauuaaugggauuacaaacaaggugaauucuguaauugagaaaaugaacacucaauucacagcagugggcaaagaauucaacaaauuggaaagaaggauggaaaacuugaauaaaaaaguugaugauggguuuauagacauuuggacauauaaugcagaacuguugguucuacuggaaaaugaaaggacuuuggauuuccaugacuccaaugugaagaaucuguaugagaaaguaaaaagccaguuaaagaauaaugcuaaagaaauaggaaauggguguuuugaauucuaucacaaguguaacgaugaaugcauggagaguguaaagaauggaaccuaugacuauccaaaauauuccgaagaaucaaaguuaaacagggagaaaauugauggagugaaauuggaaucaaugggagucuaucagauucuggcgaucuacucaacagucgccaguucucugguucuuuuggucucccugggggcaaucagcuucuggauguguuccaaugggucuuugcaguguagaauaugcaucuaa

SEQ ID NO: 37988 - RNA, 1698 nt, Artificial Sequence
  derived and/or modified CDS sequence (wt) from hemagglutinin__InfluenzaA__ADN89380
augaaaguaaaacuacugguccuguuaugcacacuuacagcuacauaugcagacacaauauguauaggcuaccaugcuaacaacucgaccgacacuguugacacaguacuugaaaagaaugugacagugacacacucugucaaccugcuugagaacagucacaauggaaaacuaugccuauuaaaaggaauagccccacuacaauuggguaacugcagcguugccggguggaucuuaggaaacccagaaugcgaauuacugauuuccaaggagucaugguccuacauuguagaaaaaccaaauccugagaauggaacauguuacccagggcauuucgcugacuaugaggaacugagggagcaauugaguucaguaucuucauuugagagguucgaaauauuccccaaagaaagcucauggcccaaccacaccguaaccggagugucagcaucaugcucccauaauggggaaagcaguuuuuacagaaauuugcuauggcugacggggaagaaugguuuguacccaaaccugagcaaguccuaugcaaacaacaaagaaaaagaaguccuuguacuaugggguguucaucacccgccaaacauaguugaccaaaagacccucuaucguacagaaaaugcuuauguuucuguagugucuucacauuauagcagaaaauucaccccagaaauagccaaaagacccaaaguaagagaucaagaaggaagaaucaacuacuacuggacucugcuugaacccggggauacaauaauauuugaggcaaauggaaaucuaauagcgccaagauaugcuuucgcacugaguagaggcuuuggaucaggaaucaucaacucaaaugcaccaauggauaaaugugaugcgaaaugccaaacaccucagggagcuauaaacaguagucuuccuuuccagaacguacacccagucacaauaggagaguguccaaaguaugucaggagugcaaaauuaaggaugguuacaggacuaaggaacaucccauccauucaauccagagguuuguuuggagccauugccgguuucauugaagggggguggacuggaaugguagaugguugguaugguuaucaucaucagaaugagcaaggaucuggcuaugcugcagaucaaaaaagcacacaaaaugccauuaaugggauuacaaacaaggugaauucuguaauugagaaaaugaacacucaauucacagcagugggcaaagaauucaacaaauuggagagaaggauggaaaacuugaauaaaaaaguugaugauggguuuauagacauuuggacauauaaugcagaacuguugguucuacuggaaaaugaaaggacuuuggauuuccaugacuccaaugugaagaaucuguaugagaaaguaaaaagccaguuaaagaauaaugcuaaagaaauaggaaauggguguuuugaauucuaucacaaguguaacaaugaaugcauggagaguguaaagaauggaacuuaugacuauccaaaauauuccgaagaaucaaaguuaaacagggagaaaauugauggagugaaauuggaaucaaugggagucuaucagauucuggcgaucuacucaacagucgccaguucucugguucuuuuggucucccugggggcaaucagcuucuggauguguuccaaugggucuuugcaguguagaauaugcaucuaa

SEQ ID NO: 37989 - RNA, 1698 nt, Artificial Sequence
  derived and/or modified CDS sequence (wt) from hemagglutinin__InfluenzaA__ADN89391
augaaaguaaaacuacugguccuguuaugcacauuuacagcuacauaugcagacacaauauguauaggcuaccaugcuaacaacucgaccgacacuguugacacaguacuugaaaagaaugugacagugacacacucugucaaccugcuugagaacagucacaauggaaaacugugucuauuaaaaggaauagccccacuacaauuggguaacugcagcguugccggguggaucuuaggaaauccagaaugcgaauuacugauuuccaaggagucaugguccuacauuguagaaaaaccaaacccugagaauggaacauguuacccagggcauuucgcugacuaugaggaacugagggagcaauugaguucaguaucuucauuugagagguucgaaauauuccccaaagaaagcucauggcccaaccacaccguaaccggagugucagcaucaugcucccauaauggggaaagaaguuuuuacaaaaauuugcuauggcugacggggaagaaugguuuguacccaaaccugagcaaguccuaugcaaacaacaaagaaaaagaaguccuuguacuaugggguguucaucacccgccagacauaggugaccaaaagacccucuaucauacagaaaaugcuuauguuucuguagugucuucacauuauagcagaaaauucaccccagaaauagccaaaagacccaaaguaagagaucaagaaggaagaaucaacuacuacuggacucugcuugaacccggggauacaauaauauuugaggcaaauggaaaucuaauagcgccaagauaugcuuucgcacugaguagaggcuuuggaucaggaaucaucaacucaaaugcaccaauggauaaaugugaugcgaagugccaaacaccucagggagcuauaaacagcagucuuccuuuccagaacguacacccagucacaauaggagaguguccaaaguaugucaggagugcaaaauuaaggaugguuacuggacuaaggaacaucccauccauucaauccagagguuuguuuggagccauugccgguuucauugaagggggguggacuggaaugguagauggcugguaugguuaucaucaucagaaugagcaagggucuggcuaugcugcagaucaaaaaagcacacaaaaugccauuaaugggauuacaaacaaggugaauucuguaauugagaaaaugaacacucaauucacagcagugggcaaagaauucaacaaauuggaaagaaggauggaaaacuugaauaaaaaaguugaugauggguuuauagacauuuggacauauaaugcagaacuguugguucuacuggaaaaugaaaggacuuuggauuuccaugauuccaaugugaagaaucuguaugagaaaguaaaaagccaguuaaagaauaaugcuaaagaaauaggaaauggguguuuugaauucuaucacaaguguaacgaugagugcauggagaguguaaagaauggaacuuaugacuauccaaaauauuccgaagaaucaaaguuaaacagggagaaaauugauggggugaaauuggaaucaaugggagucuaucagauucuggcgaucuacucaacagucgccaguucucugguucuuuuggucucccugggggcaaucaguuucuggauguguuccaaugggucuuugcaguguagaauaugcaucuaa

SEQ ID NO: 37990 - RNA, 1698 nt, Artificial Sequence
  derived and/or modified CDS sequence (wt) from hemagglutinin__InfluenzaA__ADN89402
augaaaguaaaacuacugguccuguuaugcacauuuacagcuacauaugcagacacaauauguauaggcuaccaugcuaacaacucgaccgacacuguugacacaguacuugaaaagaaugugacagugacacacucugucaaccugcuugagaacagucacaauggaaaacuaugucuauuaaaaggaauagccccacuacaauuggguaacugcagcguugccggguggaucuuaggaaacccagaaugcgaauuacugauuuccaaaaagucaugguccuacauuguagaaaaaccaaauccugagaauggaacauguuacccagggcauuucgcugacuaugaggaacugaaggagcaauugaguucaguaucuucauuugagagguucgaaauauuccccaaagaaagcucauggcccaaccacaccguaaccggagugucagcaucaugcucccauaauggggaaagcaguuuuuacagaaauuugcuauggcugacggggaagaaugguuuguacccaaaccugagcaaguccuaugcaaacaacaaagaaaaagaaguccuuguacuaugggguguucaucacccgccaaacauaguugaccaaaagacccucuaccguacagaaaaugcuuauguuucuguagugucuucacauuauagcagaaaauucaccccagaaauagccaaaagacccaaaguaagagaucaagaaggaagaaucaacuacuacuggacucugcuugaacccggggauacaauaauauuugaggcaaauggaaaucuaauagcgccaagauaugcuuucgcacugaguagaggcuuuggaucaggaaucaucaacucaaaugcaccaauggguaaaugugaugcgaagugccagacaccucagggagcuauaaacagcagucuuccuuuccagaacguacacccagucacaauaggagaguguccaaaguaugucaggagugcaaaauuaaggaugguuacaggacuaaggaacaucccauccauucaaucuagagguuuguuuggagccauugccgguuucauugaagggggguggacuggaaugguagaugguugguaugguuaucaucaucagaaugagcaaggaucuggcuaugcugcagaucaaaaaagcacacaaaaugccauuaaugggauuacaaacaaggugaauucuguaauugagaaaaugaacacucaauucacagcagugggcaaagaauucaacaaauuggaaagaaggauggaaaacuugaauaaaaaaguugaugauggguuuauagacauuuggacauauaaugcagaacuguugguucuacuggaaaaugaaaggacuuuggauuuccaugacuccaaugugaagaaucuguaugagaaaguaaaaagccaguuaaagaauaaugcuaaagaaauaggaaauggguguuuugaauucuaucacaaguguaacgaugaaugcauggagaguguaaagaauggaacuuaugacuauccaaaauauuccgaagaaucaaaguuaaacagggagaaaauugauggagugaaauuggaaucaaugggagucuaucagauucuggcgaucuacucaacagucgccaguucucugguucuuuuggucucccugggggcaaucagcuucuggauguguuccaaugggucuuugcaguguagaauaugcaucuaa

SEQ ID NO: 37991 - RNA, 1698 nt, Artificial Sequence; identical to SEQ ID NO: 37952
  derived and/or modified CDS sequence (wt) from hemagglutinin__InfluenzaA__ADN89413

SEQ ID NO: 37992 - RNA, 1698 nt, Artificial Sequence; identical to SEQ ID NO: 37543
  derived and/or modified CDS sequence (wt) from hemagglutinin__InfluenzaA__ADN89424

SEQ ID NO: 37993 - RNA, 1698 nt, Artificial Sequence
  derived and/or modified CDS sequence (wt) from hemagglutinin__InfluenzaA__ADN89435
augaaaguaaaacuacugguccuguuaugcacauuuacagcuacauaugcagacacaauauguauaggcuaccaugcuaacaacucgaccgacacuguugacacaguacuugaaaagaaugugacagugacacacucugucaaccugcuugaaaacagucacaauggaaaacuaugucuauuaaaaggaauagccccacuacaauuggguaacugcagcguugccggguggaucuuaggaaacccagaaugcgaauuacugauuuccaaggagucaugguccuacauuguggaaaaaccaaauccugagaauggaacauguuacccagggcauuucgcugacuaugaggaacugagggagcaauugaguucaguaucuucauuugagagguucgaaauauuccccaaagaaagcucauggcccaaccacaccguaaccggagugucagcaucaugcucccauaauggggaaaacaguuuuuacagaaauuugcuauggcugacggggaagaaugguuuguacccaaaccugagcaaguccuaugcaaacaacaaagaaaaagaaguccuuguacuaugggguguucaucacccgccaaacauagcugaccaaaagacccucuaucauacagaaaaugcuuauguuucuguagugucuucacauuauagcagaaaauucaccccagaaauagccaaaagacccaaaguaagagaucaagaaggaagaaucaacuacuacuggacucugcuugaacccggggauacaauaauauuugaggcaaauggaaaucuaauagcgccaagauaugcuuucgcacugaguagaggcuuuggaucaggaaucaucaacucaaaugcaccaauggauaaaugugaugcgaagugccaaacaccucaaggagcuauaaacagcagucuuccuuuccagaacguacacccagucacaauaggagaguguccaaaguaugucaggagugcaaaauuaaggaugguuacaggacuaaggaacaucccauccauucaauccagagguuuguuuggagccauugccgguuucauugaagggggguggacuggaaugguugaugguugguaugguuaucaucaucagaaugagcaaggaucuggcuaugcugcagaucaaaaaagcacacaaaaugccauuaauggaauuacaaacaaggugaauucuguaauugaaaaaaugaacacucaauucacagcagugggcaaagaauucaacaaauuggaaagaaggauggaaaacuugaauaaaaaaguugaugauggauuuauagacauuuggacauauaaugcagaacuguugguucuacuggaaaaugaaaggacuuuggauuuccaugacuccaaugugaagaaucuguaugagaaaguaaaaagccaguuaaagaauaaugcuaaagaaauaggaaauggguguuuugaauucuaucacaaguguaacgaugaaugcauggagaguguaaagaauggaacuuaugacuauccaaaauauuccgaagaaucaagguuaaacagggagaaaauugauggagugaaauuggaaucaaugggagucuaucagauucuggcgaucuacucaacagucgccaguucucugguucucuuggucucccugggggcaaucagcuucuggauguguuccaaugggucuuugcaguguagaauaugcaucuaa

SEQ ID NO: 37994 - RNA, 1698 nt, Artificial Sequence
  derived and/or modified CDS sequence (wt) from hemagglutinin__InfluenzaA__ADN89446
augaaagcaaaacuacugguccuguuaugcacauuuacagcuacauaugcagacacaauaugcauaggcuaccaugcuaacaacucgaccgacacuguugacacaguacuugaaaagaaugugacagugacacacucugucaaccugcuugagaacagucacaauggaaaacuaugucuauuaaaaggaauagccccacuacaauuggguaacugcagcguugccggguggaucuuaggaaacccagaaugcgaauuacugauuuccaaggagucaugguccuacauuguagaaaaaccaaauccugagaauggaacauguuacccagggcauuucgcugacuaugaggaacugagggagcaauugaguucaguaucuucauuugagagguucgaaauauuccccaaagaaagcucauggcccaaccacaccguaaccggagugucagcaucaugcucccauaauggggaaaacaguuuuuacagaaauuugcuauggcugacggggaagaaugguuuguacccaaaccugagcaaguccuaugcaaacaacaaagaaaaagaaguccuuguacuaugggguguucaucacccgccaaacauagcugaccaaaagacccucuaucauacagaaaaugcuuauguuucuguagugucuucacauuauagcagaaaauucaccccagaaauagccaaaagacccaaaguaagagaucaagaaggaagaaucaacuacuacuggacucugcuugaacccggggauacaauaauauuugaggcaaauggaaaucuaauagcgccaagauaugcuuucgcacugaguagaggcuuuggaucaggaaucaucaacucaaaugcaccaauggauaaaugugaugcgaagugccaaacaccucaaggagcuauaaacagcagucuuccuuuccagaacguacacccagucacaauaggagaguguccaaaguaugucaggagugcaaaauuaaggaugguuacaggacuaaggaacaucccauccauucaauccagagguuuguuuggagccauugccgguuucauugaagggggguggacuggaaugguagaugguugguaugguuaucaucaucagaaugagcaaggaucuggcuaugcugcagaucaaaaaagcacacaaaaugccauuaaugggauuacaaacaaggugaauucuguaauugagaaaaugaacacccaauucacagcagugggcaaagaauucaacaaauuggaaagaaggauggaaaacuugaauaaaaaaguugaugauggguuuauagacauuuggacauauaaugcagaacuguugguucuacuggaaaaugaaaggacuuuggauuuccaugacuccaaugugaagaaucuguaugagaaaguaaaaagccaguuaaagaauaaugcuaaagaaauaggaaauggguguuuugaauucuaucacaaguguaacgaugaaugcauggagaguguaaagaauggaacuuaugacuauccaaaauauuccgaagaaucaaaguuaaacagggagaaaauugauggagugaaauuggaaucaaugggagucuaucagauucuggcgaucuacucaacagucgccaguucucugguucuuuuggucucccugggggcaaucagcuucuggauguguuccaaugggucuuugcaguguagaauaugcaucuaa

SEQ ID NO: 37995 - RNA, 1698 nt, Artificial Sequence; identical to SEQ ID NO: 37543
  derived and/or modified CDS sequence (wt) from hemagglutinin__InfluenzaA__ADN89457

SEQ ID NO: 37996 - RNA, 1698 nt, Artificial Sequence
  derived and/or modified CDS sequence (wt) from hemagglutinin__InfluenzaA__ADN89468
augaaaguaaaacuacugguccuguuaugcacauuuacagcuacauaugcagacacaauauguauaggcuaccaugcuaacaacucgaccgacacuguugacacaguacuugaaaagaaugugacagugacacacucugucaaccugcuugagaacagucacaauggaaaacuaugucuauuaaaaggaauagccccacuacaauuggguaacugcagcguugccggguggaucuuaggaaacccagaaugcgaauuacugauuuccaaggagucaugguccuacauuguagaaaaaccaaauccugagaauggaacauguuacccagggcauuucgcugacuaugaggaacugagggagcaauugaguucaguaucuucauuugagagguucgaaauauuccccaaagauagcucauggcccaaccacaccguaaccggagugucagcaucauguucccauaauggggaaagcaguuuuuacagaaauuugcuauggcugacggggaagaaugguuuguacccaaaccugagcaaguccuaugcaaacaacaaagaaaaagaaguccuuguacuaugggguguucaucacccgccaagcauaaaugaccaaaagacccucuaucauacagaaaacgcuuauguuucuguagugucuucacauuauagcaggaaauucaccccagaaauagccaaaagacccaaaguaagagaucaagaaggaagaaucaacuacuacuggacucugcuugaacccggggauacaauaauauuugaggcaaauggaaaucuaauagcgccaagauaugcuuucgcacugaguagaggcuuuggaucaggaaucaucaacucaaaugcaccaauggauaaaugugaugcgaagugccaaacaccucagggagcuauaaacagcagucuuccuuuccagaacguacacccagucacaauaggagaguguccaaaguaugucaggagugcaaaauuaaggaugguuacaggacuaaggaacaucccauccauucaauccagagguuuguuuggagccauugccgguuucauugaagggggguggacuggaaugguagaugguugguaugguuaucaucaucagaaugagcaaggaucuggcuaugcugcagaucaaaaaagcacacaaaaugccauuaaugggauuacaaacaaggugaauucuguaauugagaaaaugaacacucaauucacagcagugggcaaagaauucagcaaauuggaaagaaggauggaaaacuugaauaaaaaaguugaugauggguuuauagacauuuggacauauaaugcagaacuguugguucuacuggaaaaugaaaggacuuuggauuuccaugacuccaaugugaagaaucuguaugagaaaguaaaaagccaguuaaagaauaaugcuaaagaaauaggaaauggguguuuugaauucuaucacaaguguaacgaugaaugcauggagaguguaaagaauggaacuuaugacuauccaaaauauuccgaagaaucaaaguuaaacagggagaaaauugauggagugaaauuggaaucaaugggagucuaucagauucugacgaucuacucaacagucgccaguucucugguucuuuugaucucccugggggcaaucagcuucuggauguguuccaaugggucuuugcaguguagaauaugcaucuaa

SEQ ID NO: 37997 - RNA, 1698 nt, Artificial Sequence; identical to SEQ ID NO: 37964
  derived and/or modified CDS sequence (wt) from hemagglutinin__InfluenzaA__ADN89479

SEQ ID NO: 37998 - RNA, 1698 nt, Artificial Sequence; identical to SEQ ID NO: 37954
  derived and/or modified CDS sequence (wt) from hemagglutinin__InfluenzaA__ADN89490

SEQ ID NO: 37999 - RNA, 1698 nt, Artificial Sequence; identical to SEQ ID NO: 37977
  derived and/or modified CDS sequence (wt) from hemagglutinin__InfluenzaA__ADN89501

SEQ ID NO: 38000 - RNA, 1698 nt, Artificial Sequence
  derived and/or modified CDS sequence (wt) from hemagglutinin__InfluenzaA__ADN89512
augaaaguaaaacuacugguccuguuaugcacauuuacagcuacauaugcagacacaauauguauaggcuaccaugcuaacaacucgaccgacacuguugacacaguacuugaaaagaaugugacagugacacacucugucaaccugcuugagaacagucacaauggaaaacuaugucuauuaaaaggaauagccccacuacaauuggguaacugcagcguugccggguggaucuuaggaaacccagaaugcgaauuacugauuuccaaggagucaugguccuacauuguagaaaaaccaaauccugagaauggaacauguuacccaggacauuucgcugacuaugaggaacugagggagcaauugaguucaguaucuucauuugagagguucgaaauauuccccaaagaaagcucauggcccaaccacaccguaaccggagugucagcaucaugcucccauaauggggaaaacaguuuuuacagaaauuugcuauggcugacggggaagaaugguuuguacccaaaccugagcaaguccuaugcaaacaacaaagaaaaagaaguccuuguacuaugggguguucaucacccgccaaacauggcugaccaaaagacccucuaucauacagaaaaugcuuauguuucuguagugucuucacauuauagcagaaaauucaccccagaaauagccaaaagacccaaaguaagagaucaagaaggaagaaucaacuacuacuggacucugcuugaacccggggauacaauaauauuugaggcaaauggaaaucuaauagcgccaagauaugcuuucgcacugaguagaggcuuuggaucaggaaucaucaacucaaaugcaccaauggauaaaugugaugcgaagugccaaacaccucaaggagcuauaaacagcagucuuccuuuccagaacguacacccagucacaauaggagaguguccaaaguaugucaggagugcaaaauuaaggaugguuacaggacuaaggaacaucccauccauucaauccagagguuuguuuggagccauugccgguuucauugaagggggguggacuggaaugguagaugguugguaugguuaucaucaucagaaugagcaaggaucuggcuaugcugcagaucaaaaaagcacacaaaaugccauuaaugggauuacaaacaaggugaauucuguaauugagaaaaugaacacucaauucacagcagugggcaaagaauucaacaaauuggaaagaaggauggaaaacuugaauaaaaaaguugaugauggguuuauagacauuuggacauauaaugcagaacuguugguucuacuggaaaaugaaaggacuuuggauuuccaugacuccaaugugaagaaucuguaugagaaaguaaaaagccaguuaaagaauaaugcuaaagaaauaggaaauggguguuuugaauucuaucacaaguguaacgaugaaugcauggagaguguaaagaauggaacuuaugacuauccaaaauauuccgaagaaucaaaguuaaacagggagaaaauugauggagugaaauuggaaucaaugggagucuaucagauucuggcgaucuacucaacagucgccaguucucugguucuuuuggucucccugggggcaaucagcuucuggauguguuccaaugggucuuugcaguguagaauaugcaucuaa

SEQ ID NO: 38001 - RNA, 1698 nt, Artificial Sequence
  derived and/or modified CDS sequence (wt) from hemagglutinin__InfluenzaA__ADN89523
augaaaguaaaacuacugguccuguuaugcacauuuacagcuacauaugcagacacaauauguauaggcuaccaugcuaacaacucgaccgacacuguugacacaguacuugaaaagaaugugacagugacacacucugucaaccugcuugagaacagucacaauggaaaacuaugucuauuaaaaggaauagccccacuacaauuggguaacugcagcguugccggguggaucuuaggaaacccagaaugcgaauuauugauuuccaaggagucaugguccuacauuguagaaaaaccaaauccugagaauggaacauguuacccagggcauuucgcugacuaugaggaacugagggagcaauugaguucaguaucuucauuugagagguucgaaauauuccccaaagaaagcucauggcccaaccacaccguaaccggagugucagcaucaugcucccauaauggggaaagcaguuuuuacagaaauuugcuauggcugacggagaagaaugguuuguacccgaaccugagcaaguccuaugcaaacaacaaagaaaaagaaguccuuguacuaugggguguucaucacccgccaagcauaagugaccaaaagacccucuaucauacagaaaaugcuuauguuucuguagugucuucacauuauagcagaaaauucaccccagaaauagccaaaagacccaaaguaagagaucaagaaggaagaaucaacuacuacuggacucugcuugaacccggggauacaauaauauuugaggcaaauggaaaucuaauagcgccaagauaugcuuucgcacugaguagaggcuuuggaucaggaaucaucaacucaaaugcaccaauggauaaaugugaugcgaagugccaaacaccucagggagcuauaaacagcagucuuccuuuccagaacguacacccagucacaauaggagaguguccaaaguaugucaggagugcaaaauuaaggaugguuacaggacuaaggaacaucccauccauucaauccagagguuuguuuggagccauugccgguuucauugaagggggguggacuggaaugguagaugguugguaugguuaucaucaucagaaugagcaaggaucuggcuaugcugcagaucaaaaaagcacacaaaaugccauuaaugggauuacaaacaaggugaauucuguaauugagaaaaugaacacucaauucacagcagugggcaaagaauucaacaaauuggaaagaaggauggaaaacuugaacaaaaaaguugaugauggguuuauagacauuuggacauauaaugcagaacuguugguucuacuggaaaaugaaaggacuuuggauuuccaugacuccaaugugaagaaucuguaugagaaaguaaaaaaccaguuaaagaauaaugcuaaagaaauaggaaauggguguuuugaauucuaucacaaguguaacgaugaaugcauggagaguguaaagaauggaacuuaugacuauccaaaauauuccgaagaaucaaaguuaaacagggagaaaauugauggaguuaaauuggaaucaaugggagucuaucagauucuggcgaucuacucaacagucgccaguucucugguucuuuuggucucccugggggcaaucagcuucuggauguguuccaaugggucuuugcaguguagaauaugcaucuaa

SEQ ID NO: 38002 - RNA, 1698 nt, Artificial Sequence; identical to SEQ ID NO: 37988
  derived and/or modified CDS sequence (wt) from hemagglutinin__InfluenzaA__ADN89534

SEQ ID NO: 38003 - RNA, 1698 nt, Artificial Sequence; identical to SEQ ID NO: 37993
  derived and/or modified CDS sequence (wt) from hemagglutinin__InfluenzaA__ADN89545

SEQ ID NO: 38004 - RNA, 1698 nt, Artificial Sequence
  derived and/or modified CDS sequence (wt) from hemagglutinin__InfluenzaA__ADN89556
augaaaguaaaacuacugguccuguuaugcacauuuacagcuacauaugcagacacaauauguauaggcuaccaugcuaacaacucgaccgacacuguugacacaguacuugaaaagaaugugacagugacacacucugucaaccugcuugagaacagucacaauggaaaacuaugucuauuaaaaggaauagccccacuacaauuggguaacugcagcguugccggguggaucuuaggaaacccagaaugcgaauuacugauuuccaaggagucaugguccuacauuguagaaaaaccaaauccugagaauggaacauguuacccaggacauuucgcugacuaugaggaacugagggagcaauugaguucaguaucuucauuugagagguucgaaauauuccccaaagaaagcucauggcccaaccacaccguaaccggagugucagcaucaugcucccauaauggggaaaacaguuuuuacagaaauuugcuauggcugacggggaagaaugguuuguacccaaaccugagcaaguccuaugcaaacaacaaagaaaaagaaguccuuguacuaugggguguucaucacccgccaaacauagcugaccaaaagacccucuaucauacagaaaaugcuuauguuucuguagugucuucacauuauagcagaaaauucaccccagaaauagccaaaagacccaaaguaagagaucaagaaggaagaaucaacuacuacuggacucugcuugaacccggggauacaauaauauuugaggcaaauggaaaucuaauagcgccaagauaugcuuucgcacugaguagaggcuuuggaucaggaaucaucaacucaaaugcaccaauggauaaaugugaugcgaagugccaaacaccucaaggagcuauaaacagcagucuuccuuuccagaacguacacccagucacaauaggagaguguccaaaguaugucaggagugcaaaauuaaggaugguuacaggacuaaggaacaucccauccauucaauccagagguuuguuuggagccauugccgguuucauugaagggggguggacuggaaugguagaugguugguaugguuaucaucaucaaaaugagcaaggaucuggcuaugcugcagaucaaaaaagcacacaaaaugccauuaaugggauuacaaacaaggugaauucuguaauugagaaaaugaacacucaauucacagcagugggcaaagaauucaacaaauuggaaagaaggauggaaaacuugaauaaaaaaguugaugauggguuuauagacauuuggacauauaaugcagaacuguugguucuacuggaaaaugaaaggacuuuggauuuccaugacuccaaugugaagaaucuguaugagaaaguaaaaagccaguuaaagaauaaugcuaaagaaauaggaaauggguguuuugaauucuaucacaaguguaacgaugaaugcauggagaguguaaagaauggaacuuaugacuauccaaaauauuccgaagaaucaaaguuaaacagggagaaaauugauggagugaaauuggaaucaaugggagucuaucagauucuggcgaucuacucaacagucgccaguucucugguucuuuuggucucccugggggcaaucagcuucuggauguguuccaaugggucuuugcaguguagaauaugcaucuaa

SEQ ID NO: 38005 - RNA, 1698 nt, Artificial Sequence; identical to SEQ ID NO: 37964
  derived and/or modified CDS sequence (wt) from hemagglutinin__InfluenzaA__ADN89567

SEQ ID NO: 38006 - RNA, 1698 nt, Artificial Sequence
  derived and/or modified CDS sequence (wt) from hemagglutinin__InfluenzaA__ADN89578
augaaaguaaaacuacugguccuguuaugcacacuuacagcuacauaugcagacacaauauguauaggcuaccaugcuaacaacucgaccgacacuguugacacaguacuugaaaagaaugugacagugacacacucugucaaccugcuugagaacagucacaauggaaaacuaugucuauuaaaaggaauagccccacuacaauuggguaacugcagcguugccggguggaucuuaggaaacccagaaugcgaauugcugauuuccaaggagucaugguccuacauuguagaaaaaccaaauccugagaauggaacauguuacccagggcauuucgcugacuaugaggaacugagggagcaauugaguucaguaucuucauuugagagguucgaaauauuccccaaaggaagcucauggcccaaccacaccguaaccggagugucagcaucaugcucccauaauggggaaaacaguuuuuacagaaauuugcuauggcugacggggaagaaugguuuguacccaaaccugagcaaguccuaugcaaacaacaaagaaaaagaaguccuuuuacuaugggguguucaucacccgccaaacauagcugaccaaaagacccucuaucauacagaaaaugcuuauguuucuguagugucuucacauuauagcagaaaauucaccccagaaauagccaaaagacccaaaguaagagaucaagaaggaagaaucaacuacuacuggacucugcuugaacccggggauacaauaauauuugaggcaaauggaaaucuaauagcgccaagauaugcuuucgcacugaguagaggcuuuggaucaggaaucaucaacucaaaugcaccaauggauaaaugugaugcgaagugccaaacaccucaaggagcuauaaacagcagucuuccuuuccagaacguacacccagucacaauaggagaguguccaaaguaugucaggagugcaaaauuaaggaugguuacaggacuaaggaacaucccauccauucaauccagagguuuguuuggagccauugccgguuucauugaagggggguggacuggaaugguagaugguugguaugguuaucaucaucagaaugagcaaggaucuggcuaugcugcagaucaaaaaagcacacaaaaugccauuaaugggauuacaaacaaggugaauucuguaauugagaaaaugaacacucaauucacagcagugggcaaagaauucaacaaauuggaaagaaggauggaaaacuugaauaaaaaaguugaugauggauuuauagacauuuggacauauaaugcagaacuguugguuuuacuggaaaaugaaaggacuuuggauuuccaugacuccaaugugaagaaucuguaugagaaaguaaaaagccaguuaaagaauaaugcuaaagaaauaggaaauggguguuuugaauucuaucacaaguguaacgaugaaugcauggagaguguaaagaauggaacuuaugacuauccaaaauauuccgaagaaucaaaguuaaacagggagaaaauugauggagugaaauuggaaucaaugggagucuaucagauucuggcgaucuacucaacagucgccaguucucugguucucuuggucucccugggggcaaucagcuucuggauguguuccaaugggucuuugcaguguagaauaugcaucuaa

SEQ ID NO: 38007 - RNA, 1698 nt, Artificial Sequence
  derived and/or modified CDS sequence (wt) from hemagglutinin__InfluenzaA__ADN89589
augaaaguaaaacuacugguccuguuaugcacauuuacagcuacauaugcagacacaauauguauaggcuaccaugcuaacaacucgaccgacacuguugacacaguacuugaaaagaaugugacagugacacacucugucaaccugcuugagaacagucacaauggaaaacuaugucuauuaaaaggaauagccccacuacaauuggguaacugcagcguugccggguggaucuuaggaaacccagaaugcgaauuacugauuuccaaagagucaugguccuacauuguagaaaaaccaaauccugagaauggaacauguuacccagggcauuucgcugacuaugaggaacugagggagcaauugaguucaguaucuucauuugagagguucgaaauauuccccaaagaaagcucauggcccaaccacaccguaaccggagugucagcaucaugcucccauaauggagaaagcaguuuuuacagaaauuugcuauggcugacggggaagaaugguuuguauccaaaucugagcaaguccuaugcaaacaacaaagaaaaagaaguccuuguacuaugggguguucaucacccgccaaacauaguugaccaaaagacccuuuaccguacagaaaaugcuuauguuucuguagugucuucacauuauagcagaaaauucaccccagaaauagccaaaagacccaaaguaagagaucaagaaggaagaaucaacuacuacuggacucugcuugaacccggggauacaauaauauuugaggcaaauggaaaucuaauagcgccaagauaugcuuucgcacugaguagaggcuuuggaucaggaaucaucaacucaaaugcaccaauggguaaaugugaugcgaagugccaaacaccucagggagcuauaaacagcagucuuccuuuccagaacguacacccagucacaauaggagaguguccaaaguaugucaggagugcaaaauuaaggaugguuacaggacuaaggaacaucccauccauucaauccagagguuuguuuggagccauugccgguuucauugaagggggguggacuggaaugguagaugguugguaugguuaucaucaucagaaugagcaaggaucaggcuaugcugcagaucaaaaaagcacacaaaaugccauuaaugggauuacaaacaaggugaauucuguaauugagaaaaugaacacucaauucacagcagugggcaaagaauucaacaaauuggaaagaaggauggaaaacuugaauaaaaaaguugaugauggguuuauagacauuuggacauauaaugcagaacuguugguucuacuggaaaaugaaaggacuuuggauuuccaugacuccaaugugaagaaucuguaugagaaaguaaaaagccaguuaaagaauaaugcuaaagaaauaggaaauggguguuuugaauucuaucacaaguguaacgaugaaugcauggagaguguaaagaauggaacuuaugacuauccaaaauauuccgaagaaucaaaguuaaacagggagaaaauugauggagugaaauuggaaucaaugggagucuaucagauucuggcgauauacucaacagucgccaguucucugguucuuuuggucucccugggggcaaucagcuucuggauguguuccaaugggucuuugcaguguagaauaugcaucuaa

SEQ ID NO: 38008 - RNA, 1698 nt, Artificial Sequence
  derived and/or modified CDS sequence (wt) from hemagglutinin__InfluenzaA__ADN89600
augaaaguaaaacuacugguccuguuaugcacauuuacagcuacauaugcagacacaauauguauaggcuaccaugcuaacaacucgaccgacacuguugacacaguacuugaaaagaaugugacagugacacacucugucaaccugcuugagaacagucacaauggaaaacuaugucuauuaaaaggaauagccccacuacaauuggguaacugcagcguugccggguggaucuuaggaaacccagaaugcgaauuacugauuuccaaagagucaugguccuacauuguagaaaaaccaaauccugagaauggaacauguuacccagggcauuucgcugacuaugaggaacugagagagcaauugaguucaguaucuucauuugagagguucgaaauauuccccaaagaaagcucauggcccaaccacaccguaaccggagugucagcaucaugcucccauaauggggaaagcaguuuuuacagaaauuugcuauggcugacgaggaagaaugguuuguacccaaaccugagcaaguccuaugcaaacaacaaagaaaaagaaguccuuguacuaugggguguucaucacccgccaaacaugguugaccaaaagacccucuaccguacagaaaaugcuuauguuucuguagugucuucacauuauagcagaaaauucaccccagaaauagccaaaagacccaaaguaagagaucaagaaggaagaaucaacuacuacuggacucugcuugaacccggggauacaauaauauuugaggcaaauggaaaucuaauagcgccaagauaugcuuucgcacugaguagaggcuuuggaucaggaaucaucaacucaaaugcaccaauggguaaaugugaugcgaagugccaaacaccucagggagcuauaaacagcagucuuccuuuccagaacguacacccagucacaauaggagaguguccaaaguaugucaggagugcaaaauuaaggaugguuacaggacuaaggaacaucccauccauucaauccagagguuuguuuggagccauugccgguuucauugaagggggguggacuggaaugguagaugguugguaugguuaucaucaucagaaugagcaaggaucuggcuaugcugcagaucaaaaaagcacacaaaaugccauuaaugggauuacaaacaaggugaauucuguaauugagaaaaugaacacucaauucacagcagugggcaaagaauucaacaaauuggaaagaaggauggaaaacuugaauaaaaaaguugaugauggguuuauagacauuuggacauauaaugcagaacuguugguucuacuggaaaaugaaaggacuuuggauuuccaugacuccaaugugaagaaucuguaugagaaaguaaaaagccaguuaaagaauaaugcuaaagaaauaggaaauggguguuuugaauucuaucacaaguguaacgaugaaugcauggagaguguaaagaauggaacuuaugacuauccaaaauauuccgaagaaucaaaguuaaacagggagaaaauugauggagugaaauuggaaucaaugggagucuaucagauucuggcgaucuacucaacagucgccaguucucugguucuuuuggucucccugggggcaaucagcuucuggauguguuccaaugggucuuugcaguguagaauaugcaucuaa

SEQ ID NO: 38009 - RNA, 1698 nt, Artificial Sequence; identical to SEQ ID NO: 37543
  derived and/or modified CDS sequence (wt) from hemagglutinin__InfluenzaA__ADN89611

SEQ ID NO: 38010 - RNA, 1698 nt, Artificial Sequence; identical to SEQ ID NO: 37952
  derived and/or modified CDS sequence (wt) from hemagglutinin__InfluenzaA__ADN89622

SEQ ID NO: 38011 - RNA, 1698 nt, Artificial Sequence; identical to SEQ ID NO: 37993
  derived and/or modified CDS sequence (wt) from hemagglutinin__InfluenzaA__ADN89633

SEQ ID NO: 38012 - RNA, 1698 nt, Artificial Sequence; identical to SEQ ID NO: 37977
  derived and/or modified CDS sequence (wt) from hemagglutinin__InfluenzaA__ADN89644

SEQ ID NO: 38013 - RNA, 1698 nt, Artificial Sequence
  derived and/or modified CDS sequence (wt) from hemagglutinin__InfluenzaA__ADN89655
augaaaguaaaacuacugguccuguuaugcacauuuacagcuacauaugcagacacaauauguauaggcuaccaugcuaacaacucgaccgacacuguugacacaguacuugaaaagaaugugacagugacacacucugucaaccugcuugaaaacagucacaauggaaaacuaugucuauuaaaaggaauagccccacuacaauuggguaacugcagcguugccggguggaucuuaggaaacccagaaugcgaauuacugauuuccaaggagucaugguccuacauuguggaaaaaccaaauccugagaauggaacauguuacccagggcauuucgcugacuaugaggaacugagggagcaauugaguucaguaucuucauuugagagguucgaaauauuccccaaagaaagcucauggcccaaccacaccguaaccggagugucagcaucaugcucccauaauggggaaaacaguuuuuacagaaauuugcuauggcugacggggaagaaugguuuguacccaaaccugagcaaguccuaugcaaacaacaaagaaaaagaaguccuuguacuaugggguguucaucacccgccaaacauagcugaccaaaagacccucuaucauacagaaaaugcuuauguuucuguagugucuucacauuauagcagaaaauucaccccagaaauagccaaaagacccaaaguaagagaucaagaaggaagaaucaacuacuacuggacucuucuugaacccggggauacaauaauauuugaggcaaauggaaaucuaauagcgccaagauaugcuuucgcacugaguagaggcuuuggaucaggaaucaucaacucaaaugcaccaauggauaaaugugaugcgaagugccaaacaccucaaggagcuauaaacagcagucuuccuuuccagaacguacacccagucacaauaggagaguguccaaaguaugucaggagugcaaaauuaaggaugguuacaggacuaaggaacaucccauccauucaauccagagguuuguuuggagccauugccgguuucauugaagggggguggacuggaaugguugaugguugguaugguuaucaucaucagaaugagcaaggaucuggcuaugcugcagaucaaaaaagcacacaaaaugccauuaauggaauuacaaacaaggugaauucuguaauugaaaaaaugaacacucaauucacagcagugggcaaagaauucaacaaauuggaaagaaggauggaaaacuugaauaaaaaaguugaugauggauuuauagacauuuggacauauaaugcagaacuguugguucuacuggaaaaugaaaggacuuuggauuuccaugacuccaaugugaagaaucuguaugagaaaguaaaaagccaguuaaagaauaaugcuaaagaaauaggaaauggguguuuugaauucuaucacaaguguaacgaugaaugcauggagaguguaaagaauggaacuuaugacuauccaaaauauuccgaagaaucaagguuaaacagggagaaaauugauggagugaaauuggaaucaaugggagucuaucagauucuggcgaucuacucaacagucgccaguucucugguucucuuggucucccugggggcaaucagcuucuggauguguuccaaugggucuuugcaguguagaauaugcaucuaa

SEQ ID NO: 38014 - RNA, 1698 nt, Artificial Sequence; identical to SEQ ID NO: 37951
  derived and/or modified CDS sequence (wt) from hemagglutinin__InfluenzaA__ADN89666

SEQ ID NO: 38015 - RNA, 1698 nt, Artificial Sequence; identical to SEQ ID NO: 37965
  derived and/or modified CDS sequence (wt) from hemagglutinin__InfluenzaA__ADN89677

SEQ ID NO: 38016 - RNA, 1698 nt, Artificial Sequence
  derived and/or modified CDS sequence (wt) from hemagglutinin__InfluenzaA__ADN89688
augaaaguaaaacuacugguccuguuaugcacauuuacagcuacauaugcagacacaauauguauaggcuaccaugcuaacaacucgaccgacacuguugacacaguacuugaaaagaaugugacagugacacacucugucaaccugcuugagaacagucacaauggaaaacuaugucuauuaaaaggaauagccccacugcaauuggguaacugcagcguugccggguggaucuuaggaaacccagaaugcgaauuacugauuuccaaggagucauggucauacauuguagaaaaaccaaauccugagaauggaacauguuacccaggacauuucgcugacuaugaggaacugagggagcaauugaguucaguaucuucauuugagagguucgaaauauuccccaaagaaagcucauggcccaaccacaccguaaccggagugucagcaucaugcucccauaauggggaaaacaguuuuuacagaaauuugcuauggcugacggggaagaaugguuuguacccaaaccugagcaaguccuaugcaaacaacaaagaaaaagaaguccuuguacuaugggguguucaucacccgccaaacauggcugaccaaaagacccucuaucauacagaaaaugcuuauguuucuguagugucuucacauuauagcagaaaauucaccccagaaauagccaaaagacccaaaguaagagaucaagaaggaagaaucaacuacuacuggacucugcuugaacccggggauacaauaauauuugaggcaaauggaaaucuaauagcgccaagauaugcuuucgcacugaguagaggcuuuggaucaggaaucaucaacucaaaugcaccaauggauaaaugugaugcgaagugccaaacaccucaaggagcuauaaacagcagucuuccuuuccagaacguacacccagucacaauaggagaguguccaaaguaugucaggagugcaaaauuaaggaugguuacaggacuaaggaacaucccauccauucaauccagagguuuguuuggagccauugccgguuucauugaagggggguggacuggaaugguagaugguugguaugguuaucaucaucagaaugagcaaggaucuggcuaugcugcagaucaaaaaagcacacaaaaugccauuaaugggauuacaaacaaggugaauucuguaauugagaaaaugaacacucaauucacagcagugggcaaagaauucaacaaauuggaaagaaggauggaaaacuugaauaaaaaaguugaugauggguuuauagacauuuggacauauaaugcagagcuguugguucuacuggaaaaugaaaggacuuuggauuuccaugacuccaaugugaagaaucuguaugagaaaguaaaaagccaguuaaagaauaaugcuaaagaaauaggaaauggguguuuugaauucuaucacaaguguaacgaugaaugcauggagaguguaaagaauggaacuuaugacuauccaaaauauuccgaagaaucaaaguuaaacagggagaaaauugauggagugaaauuggaaucaaugggagucuaucagauucuggcgaucuacucaacagucgccaguucucugguucuuuuggucucccugggggcaaucagcuucuggauguguuccaaugggucuuugcaguguagaauaugcaucuaa

SEQ ID NO: 38017 - RNA, 1698 nt, Artificial Sequence; identical to SEQ ID NO: 37952
  derived and/or modified CDS sequence (wt) from hemagglutinin__InfluenzaA__ADN89699

SEQ ID NO: 38018 - RNA, 1698 nt, Artificial Sequence; identical to SEQ ID NO: 37964
  derived and/or modified CDS sequence (wt) from hemagglutinin__InfluenzaA__ADN89710

SEQ ID NO: 38019 - RNA, 1698 nt, Artificial Sequence
  derived and/or modified CDS sequence (wt) from hemagglutinin__InfluenzaA__ADN89721
augaaaguaaaacuacugguccuguuaugcacauuuacagcuacauaugcagacacaauauguauaggcuaccaugcuaacaacucgaccgacacuguugacacaguacuugaaaagaaugugacagugacacacucugucaaccugcuugagaacagucacaauggaaaacuaugucuauuaaaaggaauagccccacuacaauuggguaacugcagcauugccggguggaucuuaggaaacccagaaugcgaauuacugauuuccaaggagucaugguccuacauuguagaaaaaccaaauccugagaauggaacauguuacccagggcauuucgcugacuaugaggaacugagggagcaauugaguucaguaucuucauuugagagguucgaaauauuccccaaagaaagcucauggcccaaccacaccguaaccggagugucagcaucaugcucccauaauggggaaagcaguuuuuacagaaauuugcuauggcugacggggaagaaugguuuguacccaaaccugagcaaguccuaugcaaacaacaaagaaaaagaaguccuuguacuaugggguguucaucacccgccaagcauaagugaccaaaagacccucuaucauacagaaaaugcuuauguuucuguagugucuucacauuauagcagaaaauucaccccagaaauagccaaaagaccuaaaguaagagaucaagaaggaagaaucaacuacuacuggacucugcuugaacccggggacacaauaauauuugaggcaaauggaaaccuaauagcgccaagauaugcuuucgcacugaguagaggcuuuggaucaggaaucaucaacucaaaugcaccaauggauaaaugugaugcgaagugccaaacaccucagggagcuauaaacagcagucuuccuuuccagaacguacacccagucacaauaggagaguguccaaaguaugucaggagugcaaaauuaaggaugguuacaggacuaaggaacaucccauccauucaauccagagguuuguuuggagccauugccgguuucauugaagggggguggacuggaaugguagaugguugguaugguuaucaucaucagaaugagcaaggaucuggcuaugcugcagaucaaaaaagcacacaaaaugccauuaaugggauuacaaacaaggugaauucuguaauugagaaaaugaacacucaauucacagcagugggcaaagaauucaacaaauuggaaagaaggauggaaaacuugaauaaaaaaguugaugauggguuuauagacauuuggacauauaaugcagaacuguugguucuacuggaaaaugaaaggacuuuggauuuccaugacuccaaugugaagaaucuguaugagaaaguaaaaagccaguuaaagaauaaugcuaaagaaauaggaaauggguguuuugaauucuaucacaaguguaacgaugaaugcauggagaguguaaagaauggaacuuaugacuauccaaaauauuccgaagaaucaaaguuaaacagggagaaaauugauggagugaaauuggaaucaaugggagucuaucagauucuggcgaucuacucaacagucgccaguucucugguucuuuuggucucccugggggcaaucagcuucuggauguguuccaaugggucuuugcaguguagaauaugcaucuaa

SEQ ID NO: 38020 - RNA, 1698 nt, Artificial Sequence; identical to SEQ ID NO: 37964
  derived and/or modified CDS sequence (wt) from hemagglutinin__InfluenzaA__ADN89732

SEQ ID NO: 38021 - RNA, 1698 nt, Artificial Sequence; identical to SEQ ID NO: 37964
  derived and/or modified CDS sequence (wt) from hemagglutinin__InfluenzaA__ADN89743

SEQ ID NO: 38022 - RNA, 1698 nt, Artificial Sequence; identical to SEQ ID NO: 37979
  derived and/or modified CDS sequence (wt) from hemagglutinin__InfluenzaA__ADN89765

SEQ ID NO: 38023 - RNA, 1698 nt, Artificial Sequence
  derived and/or modified CDS sequence (wt) from hemagglutinin__InfluenzaA__ADN89776
augaaaguaaaacuacugguccuguuaugcacauuuacagcuacauaugcagacacaauauguauaggcuaccaugcuaacaacucgaccgacacuguugacacaguacuugaaaagaaugugacagugacacacucugucaaccugcuugagaacagucacaauggaaaacuaugucuauuaaaaggaauagccccacuacaauuggguaacugcagcguugccggguggaucuuaggaaacccagaaugcgaauuacugauuuccaaggagucaugguccuacauuguagaaaaaccaaauccugagaauggaacauguuacccagggcauuucgcugacuaugaggaacugagggagcaauugaguucaguaucuucauuugagagguucgaaauauuccccaaagaaagcucauggcccaaccacaccguaaccggagugucagcaucaugcucccauaauggggaaagcaguuuuuacagaaauuugcuauggcugacggggaagaaugguuuguacccaaaccugagcaaguccuaugcaaacaacaaagaaaaagaaguccuuguacuaugggguguucaucacccgccaagcauaagugaucaaaagacccucuaucauacagaaaaugcuuauguuucuguagugucuucacauuauagcagaaaauucaccccagaaguagccaaaagacccaaaguaagagaucaagaaggaagaaucaacuacuacuggacucugcuugaacccggggauacaauaauauuugaggcaaauggaaaucuaauagcgccaagauaugcuuucgcacugaguagaggcuuuggaucaggaaucaucaacucaaaugcaccaauggauaaaugugaugcgaagugccaaacaccucagggagcuauaaacagcagucuuccuuuccagaacguacacccagucacaauaggagaguguccaaaguaugucaggagugcaaaauuaaggaugguuacaggacuaaggaacaucccauccauucaauccagagguuuguuuggagccauugccgguuucauugaagggggguggacuggaaugguagacgguugguaugguuaucaucaucagaaugagcaaggaucuggcuaugcugcagaucaaaaaagcacacaaaaugccauuaaugggauuacaaacaaggugaauucuguaauugagaaaaugaacacucaauucacagcagugggcaaagaauucaacaaauuggaaagaaggauggaaaacuugaauaaaaaaguugaugauggguuuauagacauuuggacauauaaugcagaacuguugguucuacuggaaaaugaaaggacuuuggauuuccaugacuccaaugugaagaaucuguaugagaaaguaaaaagccaguuaaagaauaaugcuaaagaaauaggaaauggguguuuugaauucuaucacaaguguaacgaugaaugcauggagaguguaaagaauggaacuuaugacuauccaaaauauuccgaagaaucaaaguuaaacagggagaaaauugauggagugaaauuggaaucaaugggagucuaucagauucuggcgaucuacucaacagucgccaguucucugguucuuuuggucucccugggggcaaucagcuucuggauguguuccaaugggucuuugcaguguagaauaugcaucuga

SEQ ID NO: 38024 - RNA, 1698 nt, Artificial Sequence; identical to SEQ ID NO: 37965
  derived and/or modified CDS sequence (wt) from hemagglutinin__InfluenzaA__ADN89787

SEQ ID NO: 38025 - RNA, 1698 nt, Artificial Sequence
  derived and/or modified CDS sequence (wt) from hemagglutinin__InfluenzaA__ADN89798
augaaaguaaaacuacugguccuguuaugcacauuuacagcuacauaugcagacacaauauguauaggcuaccaugcuaacaacucgaccgacacuguugacacaguacuugaaaagaaugugacagugacacacucugucaaccugcuugagaacagucacaauggaaaacuaugucuauuaaaaggaauagccccacuacaauuggguaacugcagcguugccggguggaucuuaggaaacccagaaugcgaauuauugauuuccaaggagucaugguccuacauuguagaaaaaccaaauccugagaauggaacauguuacccagggcauuucgcugacuaugaggaacugagggagcaauugaguucaguaucuucauuugagagguucgaaauauuccccaaagaaagcucauggcccaaccacaccguaaccggagugucagcaucaugcucccauaauggggaaagcaguuuuuacagaaauuugcuauggcugacggagaagaaugguuuguacccgaaccugagcaaguccuaugcaaacaacaaagaaaaagaaguccuuguacuaugggguguucaucacccgccaagcauaagugaccaaaagacccucuaucauacagaaaaugcuuauguuucuguagugucuucacauuauagcagaaaauucaccccagaaauagccaaaagacccaaaguaagagaucaagaaggaagaaucaacuacuacuggacucugcuugaacccggggauacaauaauauuugaggcaaauggaaaucuaauagcgccaagauaugcuuucgcacugaguagaggcuuuggaucaggaaucaucaacucaaaugcaccaauggauaaaugugaugcgaagugccaaacaccucagggagcuauaaacagcagucuuccuuuccagaacguacacccagucacaauaggagaguguccaaaguaugucaggagugcaaaauuaaggaugguuacaggacuaaggaacaucccauccauucaauccagagguuuguuuggagccauugccgguuucauugaagggggguggacuggaaugguagaugguugguaugguuaucaucaucagaaugagcaaggaucuggcuaugcugcagaucaaaaaagcacacaaaaugccauuaaugggauuacaaacaaggugaauucuguaauugagaaaaugaacacucaauucacagcagugggcaaagaauucaacaaauuggaaagaaggauggaaaacuugaacaaaaaaguugaugauggguuuauagacauuuggacauauaaugcagaacuguugguucuacuggaaaaugaaaggacuuuggauuuccaugacuccaaugugaagaaucuguaugagaaaguaaaaaaccaguuaaagaauaaugcuaaagaaauaggaaauggguguuuugaauucuaucacaaguguaacgaugaaugcauggagaguguaaagaauggaacuuaugacuauccaaaauauuccgaagaaucaaaguuaaacagggagaaaauugauggagugaaauuggaaucaaugggagucuaucagauucuggcgaucuacucaacagucgccaguucucugguucuuuuggucucccugggggcaaucagcuucuggauguguuccaaugggucuuugcaguguagaauaugcaucuaa

SEQ ID NO: 38026 - RNA, 1698 nt, Artificial Sequence
  derived and/or modified CDS sequence (wt) from hemagglutinin__InfluenzaA__ADN89809
augaaaguaaaacuacugguccuguuaugcacauuuacagcuacauaugcagacacaauauguauaggcuaccaugcuaacaacucgaccgacacuguugacacaguacuugaaaagaaugugacagugacacacucugucaaccugcuugagaacagucacaauggaaaacuaugucuauuaaaaggaauagccccacuacaauuggguaacugcagcguugccggguggaucuuaggaaacccagaaugcgaauuacugauuuccaaagagucaugguccuacauuguagaaaagccaaauccugagaauggaacauguuacccagggcauuucgcugacuaugaggaacugagggagcaauugaguucaguaucuucauuugagagguucgaaauauuccccaaagaaagcucauggcccaaccacaccguaaccggagugucagcaucaugcucccauaauggggaaagcaguuuuuacagaaauuugcuauggcugacggggaagaaugguuuguacccaaaccugagcaaguccuaugcaaacaacaaagaaaaagaaguccuuguacuaugggguguucaucacccgccaaacauaguugaccaaaagacccucuaccguacagaaaaugcuuauguuucuguagugucuucacauuauagcagaaaauucaccccagaaauagccaaaagacccaaaguaagagaucaagaaggaagaaucaacuacuacuggacucugcuugaacccggggauacaauaauauuugaggcaaauggaaaucuaauagcgccaagauaugcuuucgcacugaguagaggcuuuggaucaggaaucaucaacucaaaugcaccaauggguaaaugugaugcgaagugccaaacaccucagggagcuauaaacagcagucuuccuuuccagaacguacacccagucacaauaggagaguguccaaaguaugucaggagugcaaaauuaaggaugguuacaggacuaaggaacaucccauccauucaauccagagguuuguuuggagccauugccgguuucauugaagggggguggacuggaaugguagaugguugguaugguuaucaucaucagaaugagcaaggaucuggcuaugcugcagaucaaaaaagcacacaaaaugccauuaaugggauuacaaacaaggugaauucuguaauugagaaaaugaacacucaauucacagcagugggcaaagaauucaacaaauuggaaagaaggauggaaaacuugaauaaaaaaguugaugauggguuuauagacauuuggacauauaaugcagaacuguugguucuacuggaaaaugaaaggacuuuggauuuccaugacuccaaugugaagaaucuguaugagaaaguaaaaagccaguuaaagaauaaugcuaaagaaauaggaaauggguguuuugaauucuaucacaaguguaacgaugaaugcauggagaguguaaagaauggaacuuaugacuauccaaaauauuccgaagaaucaaaguuaaacagggagaaaauugauggagugaaauuggaaucaaugggagucuaucagauucuggcgaucuacucaacagucgccaguucucugguucuuuuggucucccugggggcaaucagcuucuggauguguuccaaugggucuuugcaguguagaauaugcaucuaa

SEQ ID NO: 38027 - RNA, 1698 nt, Artificial Sequence; identical to SEQ ID NO: 38026
  derived and/or modified CDS sequence (wt) from hemagglutinin__InfluenzaA__ADN89820

SEQ ID NO: 38028 - RNA, 1698 nt, Artificial Sequence; identical to SEQ ID NO: 37543
  derived and/or modified CDS sequence (wt) from hemagglutinin__InfluenzaA__ADN89831

SEQ ID NO: 38029 - RNA, 1698 nt, Artificial Sequence
  derived and/or modified CDS sequence (wt) from hemagglutinin__InfluenzaA__ADN89842
augaaaguaaaacuacugguccuguuaugcacauuuacagcuacauaugcagacacaauauguauaggcuaccaugcuaacaacucgaccgacacuguugacacaguacuugaaaagaaugugacagugacacacucugucaaccugcuugagaacaggcacaauggaaaacuaugccuauuaaaaggaauagccccacuacaauuggguaacugcagcguugccggguggaucuuaggaaacccagaaugcgaauuacugauuuccaaggagucaugguccuacauuguagaaaaaccaaauccugagaauggaacauguuacccagggcauuucgcugacuaugaggaacugagggagcaauugaguucaguaucuucauuugagagguucgaaauauuccccaaagaaagcucauggcccaaccacaccguaaccggagugucagcaucaugcucccauaauggggaaagcaguuuuuacagaaauuugcuauggcugacggggaagaaugguuuguacccaaaccugagcaaguccuaugcaaacaacaaagaaaaagaaguccuuguacuaugggguguucaucacccgccaaacauaguugaccaaaagacccucuaucguacagaaaaugcuuauguuucuguagugucuucacauuauagcagaaaauucaccccagaaauagccaaaagacccaaaguaagagaucaagaaggaagaaucaacuacuacuggacucugcuugaacccggggauacaauaauauuugaggcaaauggaaaucuaauagcgccaagauaugcuuucgcacugaguagaggcuuuggaucaggaaucaucaacucaaaugcaccaauggauaaaugugaugcgaaaugccaaacaccucagggagcuauaaacaguagucuuccuuuccagaacguacacccagucacaauaggagaguguccaaaguaugucaggagugcaaaauuaaggaugguuacaggacuaaggaacaucccauccauucaauccagagguuuguuuggagccauugccgguuucauugaagggggguggacuggaaugguagaugguugguaugguuaucaucaucagaaugagcaaggaucuggcuaugcugcagaucaaaaaagcacacaaaaugccauuaaugggauuacaaacaaggugaauucuguaauugagaaaaugaacacucaauucacagcagugggcaaagaauucaacaaauuggaaagaaggauggaaaacuugaauaaaaaaguugaugauggguuuauagacauuuggacauauaaugcagaacuguugguucuacuggaaaaugaaaggacuuuggauuuccaugacuccaaugugaagaaucuguaugagaaaguaaaaagccaguuaaagaauaaugcuaaagaaauaggaaauggguguuuugaauucuaucacaaguguaacgaugaaugcauggagaguguaaagaauggaacuuaugacuauccaaaauauuccgaagaaucaaaguuaaacagggagaaaauugauggagugaaauuggaaucaaugggagucuaucagauucuggcgaucuacucaacagucgccaguucucugguucuuuuggucucccugggggcaaucagcuucuggauguguuccaaugggucuuugcaguguagaauaugcaucuaa

SEQ ID NO: 38030 - RNA, 1701 nt, Artificial Sequence; identical to SEQ ID NO: 37545
  derived and/or modified CDS sequence (wt) from hemagglutinin__InfluenzaA__ADN89864

SEQ ID NO: 38031 - RNA, 1701 nt, Artificial Sequence; identical to SEQ ID NO: 37545
  derived and/or modified CDS sequence (wt) from hemagglutinin__InfluenzaA__ADN89875

SEQ ID NO: 38032 - RNA, 1701 nt, Artificial Sequence
  derived and/or modified CDS sequence (wt) from hemagglutinin__InfluenzaA__ADN89886
augaagacuaucauugcuuugagcuacauucuaugucugguuuucgcucaaaaacuuccuggaaaugacaacagcacggcaacgcugugccuugggcaccaugcaguaccaaacggaacgauagugaaaacaaucacgaaugaccaaauugaaguuacuaaugcuacugagcugguucagaguuccucaacaggugaaauaugcgacaguccucaucagauccuugauggagaaaacugcacacuaauagaugcucuauugggagacccucagugugauggcuuccaaaauaagaaaugggaccuuuuuguugaacgaagcaaagccuacagcaacuguuacccuuaugaugugccggauuaugccucccuuaggucacuaguugccucauccggcacacuggaguuuaacaaugaaagcuucaauuggacuggagucacucaaaacggaacaagcucugcuugcauaaggagaucuaauaauaguuucuuuaguagauugaauugguugacccacuuaaacuucaaauacccagcauugaacgugacuaugccaaacaaugaacaauuugacaaauuguacauuugggggguucaccacccggguacggacaaggaccaaaucuuccuguaugcucaagcaucaggaagaaucacaguaucuaccaaaagaagccaacaagcuguaaucccgaauaucggaucuagacccagaguaaggaauaucccuagcagaauaagcaucuauuggacaauaguaaaaccgggagacauacuuuugauuaacagcacagggaaucuaauugcuccuagggguuacuucaaaauacgaaguggaaaaagcucaauaaugagaucagaugcacccauuggcaaaugcaauucugaaugcaucacuccaaauggaagcauucccaaugacaaaccauuccaaaauguaaacaggaucacauacggggccugucccagauauguuaagcaaagcacucugaaauuggcaacaggaaugcgaaauguaccagagaaacaaacuagaggcauauuuggcgcaauagcggguuucauagaaaaugguugggagggaaugguggaugguugguacgguuucaggcaucaaaauucugagggaagaggacaagcagcagaucucaaaagcacucaagcagcaaucgaucaaaucaaugggaagcugaauagauugaucgggaaaaccaacgagaaauuccaucagauugaaaaagaauucucagaagucgaagggagaauucaggaccuugagaaauauguugaggacacuaaaauagaucucuggucauacaacgcggagcuucuuguugcccuggagaaccaacauacaauugaucuaacugacucagaaaugaacaaacuguuugaaaaaacaaggaagcaacugagggaaaaugcugaggauaugggcaaugguuguuucacaauauaccacaaaugugacaaugccugcauaggaucaaucagaaauggaacuuaugaccacaauguauacagagaugaagcauuaaacaaccgguuccagaucaagggaguugagcugaagucaggguacaaagauuggauccuauggauuuccuuugccauaucauguuuuuugcuuuguguugcuuuguugggguucaucaugugggccugccaaaaaggcaacauuaggugcaacauuugcauuuga

SEQ ID NO: 38033 - RNA, 1701 nt, Artificial Sequence; identical to SEQ ID NO: 37545
  derived and/or modified CDS sequence (wt) from hemagglutinin__InfluenzaA__ADN89897

SEQ ID NO: 38034 - RNA, 1701 nt, Artificial Sequence; identical to SEQ ID NO: 37545
  derived and/or modified CDS sequence (wt) from hemagglutinin__InfluenzaA__ADN89908

SEQ ID NO: 38035 - RNA, 1701 nt, Artificial Sequence
  derived and/or modified CDS sequence (wt) from hemagglutinin__InfluenzaA__ADN89919
augaagacuaucauugcuuugagcuacauucuaugucugguuuucgcucaaaaacuuccuggaaaugacaacagcacggcaacgcugugccuugggcaccaugcaguaccaaacggaacgauagugaaaacaaucacgaaugaccaaauugaaguuacuaaugcuacugagcugguucagaguuccucaacaggugaaauaugcgacaguccucaucagauccuugauggagaaaacugcacacuaauagaugcucuauugggagacccucagugugauggcuuccaaaauaagaaaugggaccuuuuuguugaacgaagcaaagccuacagcaacuguuacccuuaugaugugccggauuaugccucccuuaggucacuaguugccucauccggcacacuggaguuuaacaaugaaagcuucaauuggacuggagucacucaaaacggaacaagcucugcuugcauaaggagaucuaauaauaguuucuuuaguagauugaauugguugacccacuuaaacuucaaauacccagcauugaacgugacuaugccaaacaaugaacaauuugacaaauuguacauuugggggguucaccacccggguacggacaaggaccaaaucuuccuguaugcucaagcaucaggaagaaucacaguaucuaccaaaagaagccaacaagcuguaaucccgaauaucggaucuagacccagaguaaggaauaucccuagcagaauaagcaucuauuggacaauaguaaaaccgggagacauacuuuugauuaacagcacagggaaucuaauugcuccuagggguuacuucaaaauacgaaguggaaaaagcucaauaaugagaucagaugcacccauuggcaaaugcaauucugaaugcaucacuccaaauggaagcauucccaaugacaaaccauuccaaaauguaaacaggaucacauacggggccugucccagauauguuaagcaaagcacucugaaauuggcaacaggaaugcgaaauguaccagagaaacaaacuagaggcauauuuggcgcaauagcggguuucauagaaaaugguugggagggaaugguggaugguugguacgguuucaggcaucaaaauucugagggaagaggacaagcagcagaucucaaaagcacucaagcagcaaucgaucaaaucaaugggaagcugaauagauugaucgggaaaaccaacgagaaauuccaucagauugaaaaagaauucucagaagucgaagggagaauucaggaccuugagaaauauguugaggacacuaaaauagaucucuggucauacaacgcagagcuucuuguugcccuggagaaccaacauacaauugaucuaacugacucagaaaugaacaaacuguuugaaaaaacaaagaagcaacugagggaaaaugcugaggauaugggcaaugguuguuucacaauauaccacaaaugugacaaugccugcauaggaucaaucagaaauggaacuuaugaccacaauguauacagagaugaagcauuaaacaaccgguuccagaucaagggaguugagcugaagucaggguacaaagauuggauccuauggauuuccuuugccauaucauguuuuuugcuuuguguugcuuuguugggguucaucaugugggccugccaaaaaggcaacauuaggugcaacauuugcauuuga

SEQ ID NO: 38036 - RNA, 1701 nt, Artificial Sequence; identical to SEQ ID NO: 37545
  derived and/or modified CDS sequence (wt) from hemagglutinin__InfluenzaA__ADN89930

SEQ ID NO: 38037 - RNA, 1701 nt, Artificial Sequence; identical to SEQ ID NO: 37545
  derived and/or modified CDS sequence (wt) from hemagglutinin__InfluenzaA__ADN89941

SEQ ID NO: 38038 - RNA, 1701 nt, Artificial Sequence; identical to SEQ ID NO: 37545
  derived and/or modified CDS sequence (wt) from hemagglutinin__InfluenzaA__ADN89952

SEQ ID NO: 38039 - RNA, 1701 nt, Artificial Sequence; identical to SEQ ID NO: 37545
  derived and/or modified CDS sequence (wt) from hemagglutinin__InfluenzaA__ADN89963

SEQ ID NO: 38040 - RNA, 1701 nt, Artificial Sequence
  derived and/or modified CDS sequence (wt) from hemagglutinin__InfluenzaA__ADN89974
augaagacuaucauugcuuugagcuacauucuaugucugguuuucgcucaaaaacuuccuggaaaugacaacagcacggcaacgcugugccuugggcaccaugcaguaccaaacggaacgauagugaaaacaaucacgaaugaccaaauugaaguuacuaaugcuacugagcugguucagaguuccucaacaggugaaauaugcgacaguccucaucagauccuugauggagaaaacugcacacuaauagaugcucuauugggagacccucagugugauggcuuccaaaauaagaaaugggaccuuuuuguugaacgaagcaaagccuacagcaacuguuacccuuaugaugugccggauuaugccucccuuaggucacuaguugccucauccggcacacuggaguuuaacaaugaaagcuucaauuggacuggagucacucaaaacggaacaagcucugcuugcauaaggagaucuaauaauaguuucuuuaguagauugaauugguugacccacuuaaacuucaaauacccagcauugaacgugacuaugccaaacaaugaacaauuugacaaauuguacauuugggggguucaccacccggguacggacaaggaccaaaucuuccuguaugcucaagcaucaggaagaaucacaguaucuaccaaaagaagccaacaagcuguaaucccgaauaucggaucuagacccagaguaaggaauaucccuagcagaauaagcaucuauuggacaauaguaaaaccgggagacauacuuuugauuaacagcacagggaaucuaauugcuccuagggguuacuucaaaauacaaaguggaaaaagcucaauaaugagaucagaugcacccauuggcaaaugcaauucugaaugcaucacuccaaauggaagcauucccaaugacaaaccauuccaaaauguaaacaggaucacauacggggccugucccagauauguuaagcaaagcacucugaaauuggcaacaggaaugcgaaauguaccagagaaacaaacuagaggcauauuuggcgcaauagcggguuucauagaaaaugguugggagggaaugguggaugguugguacgguuucaggcaucaaaauucugagggaagaggacaagcagcagaucucaaaagcacucaagcagcaaucgaucaaaucaaugggaagcugaauagauugaucgggaaaaccaacgagaaauuccaucagauugaaaaagaauucucagaagucgaagggagaauucaggaccuugagaaauauguugaggacacuaaaauagaucucuggucauacaacgcggagcuucuuguugcccuggagaaccaacauacaauugaucuaacugacucagaaaugaacaaacuguuugaaaaaacaaagaagcaacugagggaaaaugcugaggauaugggcaaugguuguuucacaauauaccacaaaugugacaaugccugcauaggaucaaucagaaauggaacuuaugaccacaauguauacagagaugaagcauuaaacaaccgguuccagaucaagggaguugagcugaagucaggguacaaagauuggauccuauggauuuccuuugccauaucauguuuuuugcuuuguguugcuuuguugggguucaucaugugggccugccaaaaaggcaacauuaggugcaacauuugcauuuga

SEQ ID NO: 38041 - RNA, 1701 nt, Artificial Sequence; identical to SEQ ID NO: 37545
  derived and/or modified CDS sequence (wt) from hemagglutinin__InfluenzaA__ADN89985

SEQ ID NO: 38042 - RNA, 1701 nt, Artificial Sequence; identical to SEQ ID NO: 37545
  derived and/or modified CDS sequence (wt) from hemagglutinin__InfluenzaA__ADN89996

SEQ ID NO: 38043 - RNA, 1701 nt, Artificial Sequence
  derived and/or modified CDS sequence (wt) from hemagglutinin__InfluenzaA__ADN90007
augaagacuaucauugcuuugagcuacauucuaugucugguuuucgcucaaaaacuuccuggaaaugacaacagcacggcaacgcugugccuugggcaccaugcaguaccaaacggaacgauagugaaaacaaucacgaaugaccaaauugaaguuacuaaugcuacugagcugguucagaguuccucaacaggugaaauaugcgacaguccucaucagauccuugauggagaaaacugcacacuaauagaugcucuauugggagacccucagugugauggcuuccaaaauaagaaaugggaccuuuuuguugaacgaagcaaagccuacagcaacuguuacccuuaugaugugccggauuaugccucccuuaggucacuaguugccucauccggcacacuggaguuuaacaaugaaagcuucaauuggacuggagucacucaaaacggaacaagcucugcuugcauaaggagaucuaauaauaguuucuuuaguagauugaauugguugacccacuuaaacuucaaauacccagcauugaacgugacuaugccaaacaaugaacaauuugacaaauuguacauuugggggguucaccacccggguacggacaaggaccaaaucuuccuguaugcucaagcaucaggaagaaucacaguaucuaccaaaagaagccaacaagcuguaaucccgaauaucggaucuagacccagaguaaggaauaucccuagcagaauaagcaucuauuggacaauaguaaaaccgggagacauacuuuugauuaacagcacagggaaucuaauugcuccuagggguuacuucaaaauacgaaguggaaaaagcucaauaaugagaucagaugcacccauuggcaaaugcaauucugaaugcaucacuccaaauggaagcauucccaaugacaaaccauuccaaaauguaaacaggaucacauacggggccugucccagauauguuaagcaaagcacucugaaauuggcaacaggaaugcgaaauguaccagagaaacaaacuagaggcauauuuggcgcaauagcggguuucauagaaaaugguugggagggaaugguggaugguugguacgguuucaggcaucaaaauucugagggaagaggacaagcagcagaucucaaaagcacucaagcagcaaucgaucaaaucaaugggaagcugaauagauugaucgggaaaaccaacgagaaauuccaucagauugaaaaagaauucucagaagucgaagggagaauucaggaccuugagaaauauguugaggacacuaaaauagaucucuggucauacaacgcggagcuucuuguugcccuggagaaccaacauacaauugaucuaacugacucagaaaugaacaaacuguuugaaaaaacaaagaagcaacugagggaaaaugcugaggauaugggcaaugguuguuucacaauauaccacaaaugugacaaugccugcauaggaucaaucagaaauggaacuuaugaccacaauguauacagagaugaagcauuaaacaaccgguuccagaucaagggaguugagcugaagucaggguacaaggauuggauccuauggauuuccuuugccauaucauguuuuuugcuuuguguugcuuuguugggguucaucaugugggccugccaaaaaggcaacauuaggugcaacauuugcauuuga

SEQ ID NO: 38044 - RNA, 1701 nt, Artificial Sequence; identical to SEQ ID NO: 37545
  derived and/or modified CDS sequence (wt) from hemagglutinin__InfluenzaA__ADN90018

SEQ ID NO: 38045 - RNA, 1701 nt, Artificial Sequence; identical to SEQ ID NO: 37545
  derived and/or modified CDS sequence (wt) from hemagglutinin__InfluenzaA__ADN90040

SEQ ID NO: 38046 - RNA, 1701 nt, Artificial Sequence; identical to SEQ ID NO: 37545
  derived and/or modified CDS sequence (wt) from hemagglutinin__InfluenzaA__ADN90051

SEQ ID NO: 38047 - RNA, 1701 nt, Artificial Sequence; identical to SEQ ID NO: 37545
  derived and/or modified CDS sequence (wt) from hemagglutinin__InfluenzaA__ADN90062

SEQ ID NO: 38048 - RNA, 1701 nt, Artificial Sequence; identical to SEQ ID NO: 37545
  derived and/or modified CDS sequence (wt) from hemagglutinin__InfluenzaA__ADN90073

SEQ ID NO: 38049 - RNA, 1701 nt, Artificial Sequence
  derived and/or modified CDS sequence (wt) from hemagglutinin__InfluenzaA__ADN90084
augaagacuaucauugcuuugagcuacauucuaugucugguuuucgcucaaaaacuuccuggaaaugacaacagcacggcaacgcugugccuugggcaccaugcaguaccaaacggaacgauagugaaaacaaucacgaaugaccaaauugaaguuacuaaugcuacugagcugguucagaguuccucaacaggugaaauaugcgacaguccucaucagauccuugauggagaaaacugcacacuaauagaugcucuauugggagacccucagugugauggcuuccaaaauaagaaaugggaccuuuuuguugaacgaagcaaagccuacagcaacuguuacccuuaugaugugccggauuaugccucccuuaggucacuaguugccucauccggcacacuggaguuuaacaaugaaagcuucaauuggacuggagucacucaaaacggaacaagcucugcuugcauaaggagaucuaauaauaguuucuuuaguagauugaauugguugacccacuuaaacuucaaauacccagcauugaacgugacuaugccaaacaaugaacaauuugacaaauuguacauuugggggguucaccacccggguacggacaaggaccaaaucuuccuguaugcucaagcaucaggaagaaucacaguaucuaccaaaagaagccaacaagcuguaaucccgaauaucggaucuagacccagaguaaggaauaucccuagcagaauaagcaucuauuggacaauaguaaaaccgggagacauacuuuugauuaacagcacagggaaucuaauugcuccuagggguuacuucaaaauacgaaguggaaaaagcucaauaaugagaucagaugcacccauuggcaaaugcaauucugaaugcaucacuccaaauggaagcauucccaaugacaaaccauuccaaaauguaaacaggaucacauacggggccugucccagauauguuaagcaaagcacucugaaauuggcaacaggaaugcgaaauguaccagagaaacaaacuagaggcauauuuggcgcaauagcggguuucauagaaaaugguugggagggaaugguggaugguugguacgguuucaggcaucaaaauucugagggaagaggacaagcagcagaucucaaaagcacucaagcagcaaucgaucaaaucaaugggaagcugaauagauugaucgggaaaaccaacgagaaauuccaucagauugaaaaagaauuuucagaagucgaagggagaauucaggaccuugagaaauauguugaggacacuaaaauagaucucuggucauacaacgcggagcuucuuguugcccuggagaaccaacauacaauugaucuaacugacucagaaaugaacaaacuguuugaaaaaacaaagaagcaacugagggaaaaugcugaggauaugggcaaugguuguuucacaauauaccacaaaugugacaaugccugcauaggaucaaucagaaauggaacuuaugaccacaauguauacagagaugaagcauuaaacaaccgguuccagaucaagggaguugagcugaagucaggguacaaagauuggauccuauggauuuccuuugccauaucauguuuuuugcuuuguguugcuuuguugggguucaucaugugggccugccaaaaaggcaacauuaggugcaacauuugcauuuga

SEQ ID NO: 38050 - RNA, 1701 nt, Artificial Sequence; identical to SEQ ID NO: 37545
  derived and/or modified CDS sequence (wt) from hemagglutinin__InfluenzaA__ADN90095

SEQ ID NO: 38051 - RNA, 1701 nt, Artificial Sequence; identical to SEQ ID NO: 37545
  derived and/or modified CDS sequence (wt) from hemagglutinin__InfluenzaA__ADN90106

SEQ ID NO: 38052 - RNA, 1701 nt, Artificial Sequence; identical to SEQ ID NO: 37545
  derived and/or modified CDS sequence (wt) from hemagglutinin__InfluenzaA__ADN90117

SEQ ID NO: 38053 - RNA, 1701 nt, Artificial Sequence; identical to SEQ ID NO: 37545
  derived and/or modified CDS sequence (wt) from hemagglutinin__InfluenzaA__ADN90128

SEQ ID NO: 38054 - RNA, 1701 nt, Artificial Sequence; identical to SEQ ID NO: 37545
  derived and/or modified CDS sequence (wt) from hemagglutinin__InfluenzaA__ADN90139

SEQ ID NO: 38055 - RNA, 1701 nt, Artificial Sequence; identical to SEQ ID NO: 37545
  derived and/or modified CDS sequence (wt) from hemagglutinin__InfluenzaA__ADN90150

SEQ ID NO: 38056 - RNA, 1701 nt, Artificial Sequence
  derived and/or modified CDS sequence (wt) from hemagglutinin__InfluenzaA__ADN90161
augaagacuaucauugcuuugagcuacauucuaugucugguuuucgcucaaaaacuuccuggaaaugacaacagcacggcaacgcugugccuugggcaccaugcaguaccaaacggaacgauagugaaaacaaucacgaaugaccaaauugaaguuacuaaugcuacugagcugguucagaguuccucaacaggugaaauaugcgacaguccucaucagauccuugauggagaaaacugcacacuaauagaugcucuauugggagacccucagugugauggcuuccaaaauaagaaaugggaccuuuuuguugaacgaagcaaagccuacagcaacuguuacccuuaugaugugccggauuaugccucccuuaggucacuaguugccucauccggcacacuggaguuuaacaaugaaagcuucaauuggacuggagucacucaaaacggaacaagcucugcuugcauaagaagaucuaauaauaguuucuuuaguagauugaauugguugacccacuuaaacuucaaauacccagcauugaacgugacuaugccaaacaaugaacaauuugacaaauuguacauuugggggguucaccacccggguacggacaaggaccaaaucuuccuguaugcucaagcaucaggaagaaucacaguaucuaccaaaagaagccaacaagcuguaaucccgaauaucggaucuagacccagaguaaggaauaucccuagcagaauaagcaucuauuggacaauaguaaaaccgggagacauacuuuugauuaacagcacagggaaucuaauugcuccuagggguuacuucaaaauacgaaguggaaaaagcucaauaaugagaucagaugcacccauuggcaaaugcaauucugaaugcaucacuccaaauggaagcauucccaaugacaaaccauuccaaaauguaaacaggaucacauacggggccugucccagauauguuaagcaaagcacucugaaauuggcaacaggaaugcgaaauguaccagagaaacaaacuagaggcauauuuggcgcaauagcggguuucauagaaaaugguugggagggaaugguggaugguugguacgguuucaggcaucaaaauucugagggaagaggacaagcagcagaucucaaaagcacucaagcagcaaucgaucaaaucaaugggaagcugaauagauugaucgggaaaaccaacgagaaauuccaucagauugaaaaagaauucucagaagucgaagggagaauucaggaccuugagaaauauguugaggacacuaaaauagaucucuggucauacaacgcggagcuucuuguugcccuggagaaccaacauacaauugaucuaacugacucagaaaugaacaaacuguuugaaaaaacaaagaagcaacugagggaaaaugcugaggauaugggcaaugguuguuucacaauauaccacaaaugugacaaugccugcauaggaucaaucagaaauggaacuuaugaccacaauguauacagagaugaagcauuaaacaaccgguuccagaucaagggaguugagcugaagucaggguacaaagauuggauccuauggauuuccuuugccauaucauguuuuuugcuuuguguugcuuuguugggguucaucaugugggccugccaaaaaggcaacauuaggugcaacauuugcauuuga

SEQ ID NO: 38057 - RNA, 1701 nt, Artificial Sequence; identical to SEQ ID NO: 37545
  derived and/or modified CDS sequence (wt) from hemagglutinin__InfluenzaA__ADN90172

SEQ ID NO: 38058 - RNA, 1701 nt, Artificial Sequence; identical to SEQ ID NO: 37545
  derived and/or modified CDS sequence (wt) from hemagglutinin__InfluenzaA__ADN90183

SEQ ID NO: 38059 - RNA, 1701 nt, Artificial Sequence; identical to SEQ ID NO: 37545
  derived and/or modified CDS sequence (wt) from hemagglutinin__InfluenzaA__ADN90194

SEQ ID NO: 38060 - RNA, 1701 nt, Artificial Sequence
  derived and/or modified CDS sequence (wt) from hemagglutinin__InfluenzaA__ADN90205
augaagacuaucauugcuuugagcuacauucuaugucugguuuucgcucaaaaacuuccuggaaaugacaacagcacggcaacgcugugccuugggcaccaugcaguaccaaacggaacgauagugaaaacaaucacgaaugaccaaauugaaguuacuaaugcuacugagcugguucagaguuccucaacaggugaaauaugcgacaguccucaucagauccuugauggagaaaacugcacacuaauagaugcucuauugggagacccucagugugauggcuuccaaaauaagaaaugggaccuuuuuguugaacgaagcaaagccuacagcaacuguuacccuuaugaugugccggauuaugccucccuuaggucacuaguugccucauccggcacacuggaguuuaacaaugaaagcuucaauuggacuggagucacucaaaacggaacaagcucugcuugcauaaggagaucuaauaauaguuucuuuaguagauugaauugguugacccacuuaaacuucaaauacccagcauugaacgugacuaugccaaacaaugaacaauuugacaaauuguacauuugggggguucaccacccggguacggacaaggaccaaaucuuccuguaugcucaagcaucaggaagaaucacaguaucuaccaaaagaagccaacaagcuguaaucccgaauaucggaucuagacccagaguaaggaauaucccuagcagaauaagcaucuauuggacaauaguaaaaccgggagacauacuuuugauuaacagcacggggaaucuaauugcuccuagggguuacuucaaaauacgaaguggaaaaagcucaauaaugagaucagaugcacccauuggcaaaugcaauucugaaugcaucacuccaaauggaagcauucccaaugacaaaccauuccaaaauguaaacaggaucacauacggggccugucccagauauguuaagcaaagcacucugaaauuggcaacaggaaugcgaaauguaccagagaaacaaacuagaggcauauuuggcgcaauagcggguuucauagaaaaugguugggagggaaugguggaugguugguacgguuucaggcaucaaaauucugagggaagaggacaagcagcagaucucaaaagcacucaagcagcaaucgaucaaaucaaugggaagcugaauagauugaucgggaaaaccaacgagaaauuccaucagauugaaaaagaauucucagaagucgaagggagaauucaggaccuugagaaauauguugaggacacuaaaauagaucucuggucauacaacgcggagcuucuuguugcccuggagaaccaacauacaauugaucuaacugacucagaaaugaacaaacuguuugaaaaaacaaagaagcaacugagggaaaaugcugaggauaugggcaaugguuguuucacaauauaccacaaaugugacaaugccugcauaggaucaaucagaaauggaacuuaugaccacaauguauacagagaugaagcauuaaacaaccgguuccagaucaagggaguugagcugaagucaggguacaaagauuggauccuauggauuuccuuugccauaucauguuuuuugcuuuguguugcuuuguugggguucaucaugugggccugccaaaaaggcaacauuaggugcaacauuugcauuuga

SEQ ID NO: 38061 - RNA, 1701 nt, Artificial Sequence; identical to SEQ ID NO: 37545
  derived and/or modified CDS sequence (wt) from hemagglutinin__InfluenzaA__ADN90216

SEQ ID NO: 38062 - RNA, 1701 nt, Artificial Sequence
  derived and/or modified CDS sequence (wt) from hemagglutinin__InfluenzaA__ADN92467
augaagacuaucauugcuuugagcuacauucuaugucugguuuucgcucaaaaacuuccuggaaaugacaacagcacggcaacgcugugccuugggcaccaugcaguaccaaacggaacgauagugaaaacaaucacgaaugaccaaauugaaguuacuaaugcuacugagcugguucagaguuccucaacaggugaaauaugcgacaguccucaucagauccuugauggaaaaaacugcacacuaauagaugcucuauugggagacccucagugugauggcuuccaaaauaagaaaugggaccuuuuuguugaacgcagcaaagccuacagcaacuguuacccuuaugaugugccggauuaugccucccuuaggucacuaguugccucauccggcacacuggaguuuaacaaugaaagcuucaauuggacuggagucacucaaaacggaacaagcucugcuugcauaaggagaucuaaaaacaguuucuuuaguagauugaauugguugacccauuuaaacuucaaauaccaagcauugaacgugacuaugccgaacaaugaacaauuugacaaauuguacauuugggggguucaccacccggguacggacaaagaccaaaucuuccuguaugcucaagcaucaggaagaaucacagucucuaccaaaagaagccaacaaacuguaaucccgaauaucggaucuagaccccgaguaaggaauaucccuagcagaauaagcaucuauuggacaauaguaaaaccgggagacauacuuuugauuaacagcacaggaaaucuaauugcuccuagggguuacuucaaaauacaaagugggaaaagcucaauaaugagaucagaugcacccauuggcaaaugcaauucugaaugcaucacuccaaauggaagcauucccaaugacaaaccauuccaaaauguaaacaggaucacauacggggccugucccagauauguuaagcaaaacacucugaaauuggcaacagggaugcgaaauguaccagagaaacaaacuagaggcauauuuggcgcaaucgcggguuucauagaaaaugguugggagggaaugguggaugguugguacgguuucaggcaucaaaauucugagggaagaggacaagcagcagaucucaaaagcacucaagcagcaaucgaucaaaucaaugggaagcugaauagauugaucgggaaaaccaacgagaaauuccaucagauugaaaaagaauucucagaagucgaagggagaauucaggaccuugagaaauauguugaggacacuaaaauagaucucuggucauacaacgcggagcuucuuguugcccuggagaaccaacauacaauugaucuaacugacucagaaaugaacaaacuguuugaaaaaacaaagaagcaacugagggaaaaugcugaggauaugggcaaugguuguuucaaaauauaccacaaaugugacaaugccugcauaggaucaaucagaaauggaacuuaugaccacgauguauacagagaugaagcauuaaacaaccgguuucagaucaagggaguugagcugaagucaggguacaaagauuggauccuauggauuuccuuugccauaucauguuuuuugcuuuguguugccuuguugggguucaucaugugggccugccaaaaaggcaacauuaggugcaacauuugcauuuga

SEQ ID NO: 38063 - RNA, 1701 nt, Artificial Sequence
  derived and/or modified CDS sequence (wt) from hemagglutinin__InfluenzaA__ADN92478
augaagacuaucauugcuuugagccacauucuaugucugguuuucgcucaaaaacuuccuggaaaugacaacagcacggcaacgcugugccuugggcaccaugcaguaccaaacggaacgauagugaaaacaaucacgaaugaccaaauugagguuacuaaugcuacugagcugguucagaguuccucaacaggugaaauaugcgacaguccucaucagauccuugauggaaaaaacugcacacuaauagaugcucuauugggagacccucagugugauggcuuccaaaauaagaaaugggaccuuuuuguugaacgcagcaaagccuacagcaacuguuacccuuaugaugugccggauuaugccucccuuaggucacuaguugccucauccggcacacuggaguuuaacaaugaaagcuucaauuggacuggagucacucaaaacggaacaagcucugcuugcauaaggagaucuaaaaacaguuucuuuaguagauugaauugguugacccacuuaaacuucaaauaccaagcauugaacgugacuaugccgaacaaugaacaauuugacaaauuguacauuugggggguucaccacccggguacggacaaagaccaaaucuuccuguaugcucaagcaucaggaagaaucacagucucuaccaaaagaagccaacaaacuguaaucccgaauaucggaucuagaccccgaguaaggaauaucccuagcagaauaagcaucuauuggacaauaguaaaaccgggagacauacuuuugauuaacagcacagggaaucuaauugcuccuagggguuacuucaaaauacaaagugggaaaagcucaauaaugagaucagaugcacccauuggcaaaugcaauucugaaugcaucacuccaaauggaagcauucccaaugacaaaccauuccaaaauguaaacaggaucacauacggggccugucccagauauguuaagcaaaacacucugaaauuggcaacagggaugcgaaauguaccagagaaacaaacuagaggcauauuuggcgcaaucgcggguuucauagagaaugguugggagggaaugguggaugguugguacgguuucaggcaucaaaauucugagggaagaggacaagcagcagaucucaaaagcacucaagcagcaaucgaucaaaucaaugggaagcugaauagauugaucgggaaaaccaacgagaaauuccaucagauugaaaaagaauucucagaagucgaagggagaauucaggaccuugagaaauauguugaggacacuaaaauagaucucuggucauacaacgcggagcuucuuguugcccuggagaaccaacauacaauugaucuaacugacucagaaaugaacaaacuguuugaaaaaacaaagaagcaacugagggaaaaugcugaggauaugggcaaugguuguuucaaaauauaccacaaaugugacaaugccugcauaggaucaaucagaaauggaacuuaugaccacgauguauacagagaugaagcauuaaacaaccgguuucagaucaagggaguugagcugaagucaggguacaaagauuggauccuauggauuuccuuugccauaucauguuuuuugcuuuguguugcuuuguugggguucaucaugugggccugccaaaaaggcaacauuaggugcaacauuugcauuuga

SEQ ID NO: 38064 - RNA, 1701 nt, Artificial Sequence
  derived and/or modified CDS sequence (wt) from hemagglutinin__InfluenzaA__ADN92489
augaagacuaucauugcuuugagcuacauucuaugucugguuuucgcucaaaaacuuccuggaaaugacaacagcacggcaacgcugugccuugggcaccaugcaguaccaaacggaacgauagugaaaacaaucacgaaugaccaaauugagguuacuaaugcuacugagcugguucagaguuccucaacaggugaaauaugcgacaguccucaucagauccuugauggaaaaaacugcacacuaauagaugcucuauugggagacccucagugugauggcuuccaaaauaagaaaugggaccuuuuuguugaacgcagcaaagccuacagcaacuguuacccuuaugaugugccggauuaugccucccuuaggucacuaguugccucauccggcacacuggaguuuaacaaugaaaacuucaauuggacuggagucacucaaaacggaacaagcucugcuugcauaaggagaucuaaaaacaguuucuuuaguagauugaauugguugacccacuuaaacuucaaauaccaagcauugaacgugacuaugccgaacaaugaacaauuugacaaauuguacauuugggggguucaccacccggguacggacaaagaccaaaucuuccuguaugcucaagcaucaggaagaaucacagucucuaccaaaagaagccaacaaacuguaaucccgaauaucggaucuagaccccgaguaaggaauaucccuagcagaauaagcaucuauuggacaauaguaaaaccgggagacauacuuuugauuaacagcacagggaaucuaauugcuccuagggguuacuucaaaauacaaagugggaaaagcucaauaaugagaucagaugcacccauuggcaaaugcaauucugaaugcaucacuccaaauggaagcauucccaaugacaaaccauuccaaaauguaaacaggaucacauacggggccugucccagauauguuaagcaaaacacucugaaauuggcaacagggaugcgaaauguaccagagaaacaaacuagaggcauauuuggcgcaaucgcggguuucauagagaaugguugggagggaaugguggaugguugguacgguuucaggcaucaaaauucugagggaagaggacaagcagcagaucucaaaagcacucaagcagcaaucgaucaaaucaaugggaagcugaauagauugaucgggaaaaccaacgagaaauuccaucagauugaaaaagaauucucagaagucgaagggagaauucaggaccuugagaaauauguugaggacacuaaaauagaucucuggucauacaacgcggagcuucuuguugcccuggagaaccaacauacaauugaucuaacugacucagaaaugaacaaacuguuugaaaaaacaaagaagcaacugagggaaaaugcugaggauaugggcaaugguuguuucaaaauauaccacaaaugugacaaugccugcauaggaucaaucagaaauggaacuuaugaccacgauguauacagagaugaagcauuaaacaaccgguuucagaucaagggaguugagcugaagucaggguacaaagauuggauccuauggauuuccuuugccauaucauguuuuuugcuuuguguugcuuuguugggguucaucaugugggccugccaaaaaggcaacauuaggugcaacauuugcauuuga

SEQ ID NO: 38065 - RNA, 1701 nt, Artificial Sequence
  derived and/or modified CDS sequence (wt) from hemagglutinin__InfluenzaA__ADN92500
augaagacuaucauugcuuugagcuacauucuaugucugguuuucgcucaaaaacuuccuggaaaugacaacagcacggcaacgcugugccuugggcaccaugcaguaccaaacggaacgauagugaaaacaaucacgaaugaccaaauugagguuacuaaugcuacugagcugguucagaguuccucaacaggugaaauaugcgacaguccucaucagauccuugauggaaaaaacugcacacuaauagaugcucuauugggagacccucagugugauggcuuccaaaauaagaaaugggaccuuuuuguugaacgcagcaaagccuacagcaacuguuacccuuaugaugugccggauuaugccucccuuaggucacuaguugccucauccggcacacuggaguuuaacaaugaaagcuucaauuggacuggagucacucaaaacggaacaagcucugcuugcauaaggagaucuaaaaacaguuucuuuaguagauugaauugguugacccacuuaaacuucaaauaccaagcauugaacgugacuaugccgaacaaugaacaauuugacaaauuguacauuugggggguucaccacccggguacggacaaagaccaaaucuuccuguaugcucaagcaucaggaagaaucacagucucuaccaaaagaagccaacaaacuguaaucccgaauaucggaucuagaccccgaguaaggaauaucccuagcagaauaagcaucuauuggacaauaguaaaaccgggagacauacuuuugauuaacagcacagggaaucuaauugcuccuagggguuacuucaaaauacaaagugggaaaagcucaauaaugagaucagaugcacccauuggcaaaugcaauucugaaugcaucacuccaaauggaagcauucccaaugacaaaccauuccaaaauguaaacaggaucacauacggggccugucccagauauguuaagcaaaacacucugaaauuggcaacagggaugcgaaauguaccagagaaacaaacuagaggcauauuuggcgcaaucgcggguuucauagagaaugguugggagggaaugguggaugguugguacgguuucaggcaucaaaauucugagggaagaggacaagcagcagaucucaaaagcacucaagcagcaaucgaucaaaucaaugggaagcugaauagauugaucgggaaaaccaacgagaaauuccaucagauugaaaaagaauucucagaagucgaagggagaauucaggaccuugagaaauauguugaggacacuaaaauagaucucuggucauacaacgcggagcuucuuguugcccuggagaaccaacauacaauugaucuaacugacucagaaaugaacaaacuguuugaaaaaacaaagaagcaacugagggaaaaugcugaggauaugggcaaugguuguuucaaaauauaccacaaaugugacaaugccugcauaggaucaaucagaaauggaacuuaugaccacgauguauacagagaugaagcauuaaacaaccgguuucagaucaagggaguugagcugaagucaggguacaaagauuggauccuauggauuuccuuugccauaucauguuuuuugcuuuguguugcuuuguugggguucaucaugugggccugccaaaaaggcaacauuaggugcaacauuugcauuuga

SEQ ID NO: 38066 - RNA, 1701 nt, Artificial Sequence; identical to SEQ ID NO: 36045
  derived and/or modified CDS sequence (wt) from hemagglutinin__InfluenzaA__ADN92510

SEQ ID NO: 38067 - RNA, 1701 nt, Artificial Sequence; identical to SEQ ID NO: 36045
  derived and/or modified CDS sequence (wt) from hemagglutinin__InfluenzaA__ADN92520

SEQ ID NO: 38068 - RNA, 1701 nt, Artificial Sequence
  derived and/or modified CDS sequence (wt) from hemagglutinin__InfluenzaA__ADN92530
augaaggcaauacuaguaguucugcuauauacauuugcaaccgcaaaugcagacacauuauguauagguuaucaugcgaacaauucaacagacacuguagacacaguacuagaaaagaauguaacaguaacacacucuguuaaccuucuagaagacaagcauaacgggaaacuaugcaaacuaagagggguagccccauugcauuuggguaaauguaacauugcuggcuggauccugggaaauccagagugugaaucacucuccacagcaagcucaugguccuacauuguggaaacaucuaguucaggcaauggaacguguuacccaggagauuucaucgauuaugaggagcuaagagagcaauugagcucagugucaucauuugaaagguuugagauauuccccaagacaaguucauggcccaaucaugacucgaacaaagguguaacggcagcauguccucaugcuggagcaaaaagcuucuacaaaaauuuaauauggcuaguuaaaaaaggaaauucauacccaaagcucagcaaauccuacauuaaugauaaagggaaagaaguccucgugcuauggggcauucaccauccaucuacuagugcugaccaacaaagucucuaucagaaugcagaugcauauguuuuuguggggacaucaagauacagcaagaaguucaagccggaaauagcaauaagacccaaagugagggaucaagaagggagaaugaacuauuacuggacacuaguagagccgggagacaaaauaacauucgaagcaacuggaaaucuagugguaccgagauaugcauucgcaauggaaagaaaugcuggaucugguaucaucauuucagauacaccaguccacgauugcaauacaacuugucagacacccaagggugcuauaaacaccagccucccauuucagaauauacauccgaucacaauuggaaaauguccaaaauauguaaaaagcacaaaauugagacuggccacaggauugaggaaugucccgucuauucaaucuagaggccuauuuggggccauugccgguuucauugaagggggguggacagggaugguagauggaugguacgguuaucaccaucaaaaugagcaggggucaggauaugcagccgaccugaagagcacacagaaugccauugacgagauuacuaacaaaguaaauucuguuauugaaaagaugaauacacaguucacagcaguagguaaagaguucaaccaccuggaaaaaagaauagagaauuuaaauaaaaaaguugaugaugguuuccuggacauuuggacuuacaaugccgaacuguugguucuauuggaaaaugaaagaacuuuggacuaccacgauucaaaugugaagaacuuauaugaaaagguaagaagccaguuaaaaaacaaugccaaggaaauuggaaacggcugcuuugaauuuuaccacaaaugcgauaacacgugcauggaaagugucaaaaaugggacuuaugacuacccaaaauacucagaggaagcaaaauuaaacagagaagaaauagaugggguaaagcuggaaucaacaaggauuuaccagauuuuggcgaucuauucaacugucgccaguucauugguacugguagucucccugggggcaaucaguuucuggauguguucuaaugggucucuacaguguagaauauguauuuaa

SEQ ID NO: 38069 - RNA, 1701 nt, Artificial Sequence
  derived and/or modified CDS sequence (wt) from hemagglutinin__InfluenzaA__ADN92540
auggaggcaauacuaguaguucuacuauauacauuugcaaccgcaaaugcagacacauuauguauagguuaucaugcgaacaauucaacagacacuguagacacaguacuagaaaagaauguaacaguaacacacucuguuaaccuucuagaagacaagcauaacgggaaacuaugcaaacuaagagggguagccccauugcauuuggguaaauguaacauugcuggcuggauccugggaaauccagagugugaaucacucuccacagcaagcucaugguccuacauuguggaaacaucuaguucagacaauggaacguguuacccaggagauuucaucgauuaugaggagcuaagagagcaauugagcucagugucaucauuugaaagguuugagauauuccccaagacaaguucauggcccaaucaugacucgaacaaagguguaacggcagcauguccucaugcuggagcaaaaagcuucuacaaaaauuuaauauggcuaguuaaaaaaggaaauucauacccaaagcucagcaaauccuacauuaaugauaaagggaaagaaguccucgugcuauggggcauucaccauccaucuacuagugcugaccaacaaagucucuaucagaaugcagaugcauauguuuuuguggggucaucaagauacagcaagaaguucaagccggaaauagcaauaagacccaaagugagggaucaagaagggagaaugaacuauuacuggacacuaguagagccgggagacaaaauaacauucgaagcaacuggaaaucuagugguaccgagauaugcauucgcaauggaaagaaaugcuggaucugguauuaucauuucagauacaccaguccacgauugcaauacaacuugucagacacccaagggugcuauaaacaccagccucccauuucauaauauacauccgaucacaauuggaaaauguccaaaauauguaaaaagcacaaaauugagacuggccacaggauugaggaaugucccgucuauucaaucuagaggccuauuuggggccauugccgguuucauugaaggggguuggacagggaugguggauggaugguacgguuaucaccaucaaaaugagcaggggucaggauaugcagccgaccugaagagcacacagaaugccauugacgagauuacuaacaaaguaaauucuguuauugaaaagaugaauacacaguucacagcaguagguaaagaguucaaccaccuggaaaaaagaauagagaauuuaaauaaaaaaguugaugaugguuuccuggacauuuggacuuacaaugccgaacuguugguucuauuggaaaaugaaagaacuuuggacuaccacgauucaaaugugaagaacuuauaugaaaagguaagaagccaguuaaaaaacaaugccaaggaaauuggaaacggcugcuuugaauuuuaccacaaaugcgauaacacgugcauggaaagugucaaaaaugggacuuaugacuacccaaaauacucagaggaagcaaaauuaaacagagaagaaauagaugggguaaagcuggaaucaacaaggauuuaccagauuuuggcgaucuauucaacugucgccaguucauugguacugguagucucccugggggcaaucaguuucuggaugugcucuaaugggucucuacaguguagaauauguauuuaa

SEQ ID NO: 38070 - RNA, 1701 nt, Artificial Sequence
  derived and/or modified CDS sequence (wt) from hemagglutinin__InfluenzaA__ADN92550
augaaggcaauacuaguaguucugcuauauacauuugcaaccgcaaaugcagacacauuauguauagguuaucaugcgaacaauucaacagacacuguagacacaguacuagaaaagaauguaacaguaacacacucuguuaaucuucuagaagacaagcauaacgggaaacuaugcaaacuaagagggguagccccauugcauuuggguaaauguaacauugcuggcuggauccugggaaauccagagugugaaucacucuccacagcaagcucaugguccuacauuguggaaacaucuaguucagacaauggaacguguuacccaggagauuucaucgauuaugaggagcuaagagagcaauugagcucagugucaucauuugaaagguuugagauauuccccaagacaaguucauggcccaaucaugacucgaacaaagguguaacggcagcauguccucaugcuggagcaaaaagcuucuacaaaaauuuaauauggcuaguuaaaaaaggaaauucauacccaaagcucagcaaauccuacauuaaugauaaagggaaagaaguccucgugcuauggggcauucaccauccaucuacuagugcugaccaacaaagucucuaucagaaugcagaugcauauguuuuuguggggacaucaagauacagcaagaaguucaagccggaaauagcaauaagacccaaagugagggaucaagaagggagaaugaacuauuacuggacacuaguagagccgggagacaaaauaacauucgaagcaacuggaaaucuagugguaccgagauaugcauucgcaauggaaagaaaugcuggaucugguauuaucauuucagauacaccaguccacgauugcaauacaacuugucagacacccaagggugcuauaaacaccagccucccauuucagaauauacauccgaucacaauuggaaaauguccaaaauauguaaaaagcacaaaauugagacuggccacaggauugaggaaugucccgucuauucaaucuagaggccuauuuggggccauugccgguuucauugaagggggguggacagggaugguagauggaugguacgguuaucaccaucaaaaugagcaggggucaggauaugcagccgaccugaagagcacacagaaugccauugacgagauuacuaacaaaguaaauucuguuauugaaaagaugaauacacaguucacagcaguagguaaagaguucaaccaccuggaaaaaagaauagagaauuuaaauaaaaagguugaugaugguuuccuggacauuuggacuuacaaugcagaacuguugguucuauuggaaaaugaaagaacuuuggacuaccacgauucaaaugugaagaacuuauaugaaaagguaagaagccaguuaaaaaacaaugccaaggaaauuggaaacggcugcuuugaauuuuaccacaaaugcgauaacacgugcauggaaagugucaaaaaugggacuuaugacuacccaaaauacucagaggaagcaaaauuaaacagagaagaaauagaugggguaaagcuggaaucaacaaggauuuaccagauuuuggcgaucuauucaacugucgccaguucauugguacugguagucucccugggggcaaucaguuucuggaugugcucuaaugggucucuacaguguagaauauguauuuaa

SEQ ID NO: 38071 - RNA, 1701 nt, Artificial Sequence; identical to SEQ ID NO: 36045
  derived and/or modified CDS sequence (wt) from hemagglutinin__InfluenzaA__ADN92560

SEQ ID NO: 38072 - RNA, 1701 nt, Artificial Sequence
  derived and/or modified CDS sequence (wt) from hemagglutinin__InfluenzaA__ADO00730
augaaggcaauacuaguaguucugcuauauacauuugcaaccgcaaaugcagacacauuauguauagguuaucaugcgaacaauucaacagacacuguagacacaguacuagaaaagaauguaacaguaacacacucuguuaaccuucuagaagacaagcauaacgggaaacuaugcaaacuaagagggguagccccauugcauuuggguaaauguaacauugcuggcuggauccugggaaauccagaguguggaucacucuccacagcaagcucaugguccuacauuguggaaacaucuaguucagacaauggaacguguuacccaggagauuucaucgauuaugaggagcuaagagagcaauugagcucagugucaucauuugaaagguuugagauauuccccaagacaaguucauggcccaaucaugacucgaacaaagguguaacggcagcauguccucaugcuggagcaaaaagcuucuacaaaaauuuaauauggcuaguuaaaaaaggaaauucauacccaaagcucagcaaauccuacauuaaugauaaagggaaagaaguccucgugcuauggggcauucaccauccaucuacuagugcugaccaacaaagucucuaucagaaugcagaugcauauguuuuuguggggacaucaagauacagcaagaaguucaagccggaaauagcaauaagacccaaagugagggaucaagaagggagaaugaacuauuacuggacacuaguagagccgggagacaaaauaacauucgaagcaacuggaaaucuagugguaccgagauaugcauucgcaauggaaagaaaugcuggaucugguauuaucauuucagauacaccaguccacgauugcaauacaacuugucagacacccaagggugcuauaaacaccagccucccauuucagaauauacauccgaucacaauuggaaaauguccaaaauauguaaaaagcacaaaauugagacuggccacaggauugaggaaugucccgucuauucaaucuagaggccuauuuggggccauugccgguuucauugaagggggguggacagggaugguagauggaugguacgguuaucaccaucaaaaugagcaggggucaggauaugcagccgaccugaagagcacacagaaugccauugacgggauuacuaacaaaguaaauucuguuauugaaaagaugaauacacaguucacagcaguagguaaagaguucaaccaccuggaaaaaagaauagagaauuuaaauaaaaagguugaugaugguuuccuggacauuuggacuuacaaugccgaacuguugguucuauuggaaaaugaaagaacuuuggacuaccacgauucaaaugugaagaacuuauaugaaaagguaagaagccaguuaaaaaacaaugccaaggaaauuggaaacggcugcuuugaauuuuaccacaaaugcgauaacacgugcauggaaagugucaaaaaugggacuuaugacuacccaaaauacucagaggaagcaaaauuaaacagagaagaaauagaugggguaaagcuggaaucaacaaggauuuaccagauuuuggcgaucuauucaacugucgccaguucauugguacugguagucucccugggggcaaucaguuucuggaugugcucuaaugggucucuacaguguagaauauguauuuaa

SEQ ID NO: 38073 - RNA, 1701 nt, Artificial Sequence
  derived and/or modified CDS sequence (wt) from hemagglutinin__InfluenzaA__ADO00740
augaaggcaauacuaguaguucugcuauauacauuugcaaccgcaaaugcagacacauuauguauagguuaucaugcgaacaauucaacagacacuguagacacaguacuagaaaagaauguaacaguaacacacucuguuaaccuucuagaagacaagcauaacgggaaacuaugcaaacuaagagggguagccccauugcauuuggguaaauguaacauugcuggcuggauccugggaaauccagagugugaaucacucuccacagcaagcucaugguccuacauuguggaaacaucuaguucagacaauggaacguguuacccaggagauuucaucgauuaugaggagcuaagagagcaauugagcucagugucaucauuugaaagguuugagauauuccccaagacaaguucauggcccaaucaugacucgaacaaagguguaacggcagcauguccucaugcuggagcaaaaagcuucuacaaaaauuuaauauggcuaguuaaaaaaggaaauucauacccaaagcucagcaaauccuacauuaaugauaaagggaaagaaguccucgugcuauggggaauucaccauccaucuacuagugcugaccaacaaagucucuaucagaaugcagaugcauauguuuuuguggggacaucaagauacagcaagaaguucaagccggaaauagcaauaagacccaaagugagggaucaagaagggagaaugaacuauuacuggacacuaguagagccgggagacaaaauaacauucgaagcaacuggaaaucuaguggugccgagauaugcauucgcaauggaaagaaaugcuggaucugguauuaucauuucagauacaccaguccacgauugcaauacaacuugucagacacccaagggugcuauaaacaccagccucccauuucagaauauacauccgaucacaauuggaaaauguccaaaauauguaaaaagcacaaaauugagacuggccacaggauugaggaaugucccgucuauucaaucuagaggccuauuuggggccauugccgguuucauugaagggggguggacagggaugguagauggaugguacgguuaucaccaucaaaaugagcaggggucaggauaugcagccgaccugaagagcacacagcaugccauugacgagauuacuaacaaaguaaauucuguuauugaaaagaugaauacacaguucacagcaguagguaaagaguucaaccaccuggaaaaaagaauagagaauuuaaauaaaaaaguugaugaugguuuccuggacauuuggacuuacaaugccgaacuguugguucuauuggaaaaugaaagaacuuuggacuaccacgauucaaaugugaagaacuuauaugaaaagguaagaagccaguuaaaaaacaaugccaaggaaauuggaaacggcugcuuugaauuuuaccacaaaugcgauaacacgugcauggaaagugucaaaaaugggacuuaugacuacccaaaauacucagaggaagcaaaauuaaacagagaagaaauagaugggguaaagcuggaaucaacaaggauuuaccagauuuuggcgaucuauucaacugucgccaguucauugguacugguagucucccugggggcaaucaguuucuggaugugcucuaaugggucucuacaguguagaauauguauuuaa

SEQ ID NO: 38074 - RNA, 1701 nt, Artificial Sequence
  derived and/or modified CDS sequence (wt) from hemagglutinin__InfluenzaA__ADO00750
augaaggcaauacuaguaguucugcuauauacauuugcaaccgcaaaugcagacacauuauguauagguuaucaugcgaacaauucaacagacacuguagacacaguacuagaaaagaauguaacaguaacacacucuguuaaccuucuagaagacaagcauaacgggaaacuaugcaaacuaagagggguagccccauugcauuuggguaaauguaacauugcuggcuggauccuaggaaauccagagugugaaucacucuccacagcaagcucaugguccuacauuguggaaacaucuaguucagacaauggaacguguuacccaggagauuucaucgauuaugaggagcuaagagagcaauugagcucagugucaucauuugaaagguuugagauauuccccaagacaaguucauggcccaaucaugacucgaacaaagguguaacggcagcauguccucaugcuggagcaaaaagcuucuacaaaaauuuaauauggcuaguuaaaaaaggaaauucauacccaaagcucagcaaauccuauauuaaugauaaagggaaagaaguccucgugcuauggggcauucaccauccaucuacuagugcugaccaacaaagucucuaucagaaugcagaugcauauguuuuuguggggacaucaagauacagcaagaaguucaagccggaaauagcaauaagacccaaagugagggaucaagaagggagaaugaacuauuacuggacacuaguagagccgggagacaaaauaacauucgaagcaacuggaaaucuagugguaccgagauaugcauucgcaauggaaagaaaugcuggaucugguauuaucauuucagauacaccaguccacgauugcaauacaacuugucagacacccaagggugcuauaaacaccagccucccauuucagaauauacauccgaucacaauuggaaaauguccaaaauauguaaaaagcacaaaauugagacuggccacaggauugaggaaugucccgucuauucaaucuagaggccuauuuggggccauugccgguuucauugaagggggguggacagggaugguagauggaugguacgguuaucaccaucaaaaugagcaggggucaggauaugcagccgaccugaagagcacacagaaugccauugacaagauuacuaacaaaguaaauucuguuauugaaaagaugaauacacaguucacagcaguagguaaagaguucaaccaucuggaaaaaagaauagagaauuuaaauaaaaagguugaugaugguuuccuggacauuuggacuuacaaugccgaacuguugguucuauuggaaaaugaaagaacuuuggacuaccacgauucaaaugugaagaacuuauaugaaaagguaagaagccaguuaaaaaacaaugccaaggaaauuggaaacggcugcuuugaauuuuaccacaaaugcgauaacacgugcauggaaagugucaaaaaugggacuuaugacuacccaaaauacucagaggaagcaaaauuaaacagagaagaaauagaugggguaaagcuggaaucaacaaggauuuaccagauuuuggcgaucuauucaacugucgccaguucauugguacugguagucucccugggggcaaucaguuucuggauguguucuaaugggucucuacaguguagaauauguauuuaa

SEQ ID NO: 38075 - RNA, 1701 nt, Artificial Sequence; identical to SEQ ID NO: 34681
  derived and/or modified CDS sequence (wt) from hemagglutinin__InfluenzaA__ADO12143

SEQ ID NO: 38076 - RNA, 1701 nt, Artificial Sequence; identical to SEQ ID NO: 34681
  derived and/or modified CDS sequence (wt) from hemagglutinin__InfluenzaA__ADO12153

SEQ ID NO: 38077 - RNA, 1701 nt, Artificial Sequence; identical to SEQ ID NO: 34681
  derived and/or modified CDS sequence (wt) from hemagglutinin__InfluenzaA__ADO12163

SEQ ID NO: 38078 - RNA, 1701 nt, Artificial Sequence; identical to SEQ ID NO: 34681
  derived and/or modified CDS sequence (wt) from hemagglutinin__InfluenzaA__ADO12173

SEQ ID NO: 38079 - RNA, 1701 nt, Artificial Sequence; identical to SEQ ID NO: 34681
  derived and/or modified CDS sequence (wt) from hemagglutinin__InfluenzaA__ADO12183

SEQ ID NO: 38080 - RNA, 1701 nt, Artificial Sequence; identical to SEQ ID NO: 34681
  derived and/or modified CDS sequence (wt) from hemagglutinin__InfluenzaA__ADO12193

SEQ ID NO: 38081 - RNA, 1701 nt, Artificial Sequence; identical to SEQ ID NO: 34681
  derived and/or modified CDS sequence (wt) from hemagglutinin__InfluenzaA__ADO12203

SEQ ID NO: 38082 - RNA, 1701 nt, Artificial Sequence; identical to SEQ ID NO: 34681
  derived and/or modified CDS sequence (wt) from hemagglutinin__InfluenzaA__ADO12213

SEQ ID NO: 38083 - RNA, 1701 nt, Artificial Sequence; identical to SEQ ID NO: 34681
  derived and/or modified CDS sequence (wt) from hemagglutinin__InfluenzaA__ADO12223

SEQ ID NO: 38084 - RNA, 1701 nt, Artificial Sequence; identical to SEQ ID NO: 34681
  derived and/or modified CDS sequence (wt) from hemagglutinin__InfluenzaA__ADO12233

SEQ ID NO: 38085 - RNA, 1701 nt, Artificial Sequence
  derived and/or modified CDS sequence (wt) from hemagglutinin__InfluenzaA__ADO12243
augaaggcaauacuaguaguucugcuauauacauuugcaaccgcaaaugcagacacauuauguauagguuaucaugcgaacaauucaacagacacuguagacacaguacuagaaaagaauguaacaguaacacacucuguuaaccuucuagaagacaagcauaacgggaaacuaugcaaacuaagagggguagccccauugcauuuggguaaauguaacauugcuggcuggauccugggaaauccagagugugaaucacucuccacagcaagcucaugguccuacauuguggaaacaucuaguucagacaauggaacguguuacccaggagauuucaucgauuaugaggagcuaagagagcaauugagcucagugucaucauuugaaagguuugagauauuccccaagacaaguucauggcccaaucaugacucgaacaaagguguaacggcagcauguccucaugcuggagcaaaaagcuucuacaaaaauuuaauauggcuaguuaaaaaaggaaauucauacccaaagcucagcaaauccuacauuaaugauaaagggaaagaaguccucgugcuauggggcauucaccauccaucuacuagugcugaccaacaaagucucuaucagaaugcagaugcauauguuuuuguggggacaucaagauacagcaagaaguucaagccggaaauagcaauaagacccaaagugagggaucaagaagggagaaugaacuauuacuggacacuaguagagccgggagacaaaauaacauucgaagcaacuggaaaucuagugguaccgagauaugcauucgcaauggaaagaaaugcuggaucugguauuaucauuucagauacaccaguccacgauugcaauacaacuugucagacacccaagggugcuauaaacaccagccucccauuucagaauauacauccgaucacaauuggaaaauguccaaaauauguaaaaagcacaaaauugagacuggccacaggauugaggaaugucccgucuauucaaucuagaggccuauuuggggccauugccgguuucauugaagggggguggacagggaugguagauggaugguacgguuaucaccaucaaaaugagcaggggucaggauaugcagccgaccugaagagcacacagaaugccauugacgagauuacuaacaaaguaaauucuguuauugaaaagaugaauacacaguucacagcaguagguaaagaguucaaccaccuggaaaaaagaauagagaauuuaaauaaaaaaguugaugaugguuuccuggacauuuggacuuacaaugccgaacuguugguucuauuggagaaugaaagaacuuuggacuaccacgauucaaaugugaagaacuuauaugaaaagguaagaagccaguuaaaaaacaaugccaaggaaauuggaaacggcugcuuugaauuuuaccacaaaugcgauaacacgugcauggaaagugucaaaaaugggacuuaugacuacccaaaauacucagaggaagcaaaauuaaacagagaagaaauagaugggguaaagcuggaaucaacaaggauuuaccagauuuuggcgaucuauucaacugucgccaguucauugguacugguagucucccugggggcaaucaguuucuggaugugcucuaaugggucucuacaguguagaauauguauuuaa

SEQ ID NO: 38086 - RNA, 1701 nt, Artificial Sequence; identical to SEQ ID NO: 34681
  derived and/or modified CDS sequence (wt) from hemagglutinin__InfluenzaA__ADO12253

SEQ ID NO: 38087 - RNA, 1701 nt, Artificial Sequence; identical to SEQ ID NO: 34681
  derived and/or modified CDS sequence (wt) from hemagglutinin__InfluenzaA__ADO12263

SEQ ID NO: 38088 - RNA, 1701 nt, Artificial Sequence; identical to SEQ ID NO: 34681
  derived and/or modified CDS sequence (wt) from hemagglutinin__InfluenzaA__ADO12273

SEQ ID NO: 38089 - RNA, 1701 nt, Artificial Sequence
  derived and/or modified CDS sequence (wt) from hemagglutinin__InfluenzaA__ADO12283
augaaggcaauacuaguaguucugcuauauacauuugcaaccgcaaaugcagacacauuauguauagguuaucaugcgaacaauucaacagacacuguagacacaguacuagaaaagaauguaacaguaacacacucuguuaaccuucuagaagacaagcauaacgggaaacuaugcaaacuaagagggguagccccauugcauuuggguaaauguaacauugcuggcuggauccugggaaauccagagugugaaucacucuccacagcaagcucaugguccuacauuguggaaacaucuaguucagacaauggaacguguuacccaggagauuucaucgauuaugaggagcuaagagagcaauugagcucagugucaucauuugaaagguuugagauauuccccaagacaaguucauggcccaaucaugacucgaacaaagguguaacggcagcauguccucaugcuggagcaaaaagcuucuacaaaaauuuaauauggcuaguuaaaaaaggaaauucauacccaaagcucagcaaauccuacauuaaugauaaagggaaagaaguccucgugcuauggggcauucaccauccaucuacuagugcugaccaacaaagucucuaucagaaugcagaugcauauguuuuuguggggacaucaagauacagcaagaaguucaagccggaaauagcaauaagacccaaagugagggaucaagaagggagaaugaacuauuacuggacacuaguagagccgggagacaaaauaacauucgaagcaacuggaaaucuagugguaccgagauaugcauucgcaauggaaagaaaugcuggaucugguauuaucauuucagauacaccaguccacgauugcaauacaacuugucagacacccaagggugcuauaaacaccagccucccauuucagaauauacauccgaucacaauuggaaaauguccaaaauauguaaaaagcacaaaauugagacuggccacaggauugaggaaugucccgucuauucaaucuagaggccuauuuggggccauugccgguuucauugaagggggguggacagggaugguagauggaugguacgguuaucaccaucaaaaugagcaggggucaggauaugcagccgaccugaagagcacacagaaugccauugacgaaauuacuaacaaaguaaauucuguuauugaaaagaugaauacacaguucacagcaguagguaaagaguucaaccaccuggaaaaaagaauagagaauuuaaauaaaaaaguugaugaugguuuccuggacauuuggacuuacaaugccgaacuguugguucuauuggaaaaugaaagaacuuuggacuaccacgauucaaaugugaagaacuuauaugaaaagguaagaagccaguuaaaaaacaaugccaaggaaauuggaaacggcugcuuugaauuuuaccacaaaugcgauaacacgugcauggaaagugucaaaaaugggacuuaugacuacccaaaauacucagaggaagcaaaauuaaacagagaagaaauagaugggguaaagcuggaaucaacaaggauuuaccagauuuuggcgaucuauucaacugucgccaguucauugguacugguagucucccugggggcaaucaguuucuggaugugcucuaaugggucucuacaguguagaauauguauuuaa

SEQ ID NO: 38090 - RNA, 1701 nt, Artificial Sequence; identical to SEQ ID NO: 34681
  derived and/or modified CDS sequence (wt) from hemagglutinin__InfluenzaA__ADO12293

SEQ ID NO: 38091 - RNA, 1701 nt, Artificial Sequence; identical to SEQ ID NO: 34681
  derived and/or modified CDS sequence (wt) from hemagglutinin__InfluenzaA__ADO12303

SEQ ID NO: 38092 - RNA, 1701 nt, Artificial Sequence; identical to SEQ ID NO: 34681
  derived and/or modified CDS sequence (wt) from hemagglutinin__InfluenzaA__ADO12313

SEQ ID NO: 38093 - RNA, 1701 nt, Artificial Sequence; identical to SEQ ID NO: 38085
  derived and/or modified CDS sequence (wt) from hemagglutinin__InfluenzaA__ADO12323

SEQ ID NO: 38094 - RNA, 1701 nt, Artificial Sequence
  derived and/or modified CDS sequence (wt) from hemagglutinin__InfluenzaA__ADO12333
augaaggcaauacuaguaguucugcuauauacauuugcaaccgcaaaugcagacacauuauguauagguuaucaugcgaacaauucaacagacacuguagacacaguacuagaaaagaauguaacaguaacacacucuguuaaccuucuagaagacaagcauaacgggaaacuaugcaaacuaagagggguagccccauugcauuuggguaaauguaacauugcuggcuggauccugggaaauccagagugugaaucacucuccacagcaagcucaugguccuacauuguggaaacaucuaguucagacaauggaacguguuacccaggagauuucaucgauuaugaggagcuaagagagcaauugagcucagugucaucauuugaaagguuugagauauuccccaagacaaguucauggcccaaucaugacucgaacaaagguguaacggcagcauguccucaugcuggagcaaaaagcuucuacaaaaauuuaauauggcuaguuaaaaaaggaaauucauacccaaagcucagcaaauccuacauuaaugauaaagggaaagaaguccucgugcuauggggcauucaccauccaucuacuagugcugaccaacaaagucucuaucagaaugcagaugcauauguuuuuguggggacaucaagauacagcaagaaguucaagccggaaauagcaauaagacccaaagugagggaucaagaagggagaaugaacuauuacuggacacuaguagagccgggagacaaaauaacauucgaagcaacuggaaaucuagugguaccgagauaugcauucgcaauggaaagaaaugcuggaucugguauuaucauuucagauacaccaguccacgauugcaauacaacuugucagacacccaagggugcuauaaacaccagccucccauuucagaauauacauccgaucacaauuggaaaauguccaaaauauguaaaaagcacaaaauugagacuggccacaggauugaggaaugucccgucuauucaaucuagaggccuauuuggggccauugccgguuucauugaagggggguggacagggaugguagauggaugguacgguuaucaccaucaaaaugagcaggggucaggauaugcagcugaccugaagagcacacagaaugccauugacgagauuacuaacaaagugaauucuguuauugaaaagaugaauacacaguucacagcaguagguaaagaguucaaccaccuggaaaaaagaauagagaauuuaaauaaaaaaguugaugaugguuuccuggacauuuggacuuacaaugccgaacuguugguucuauuggaaaaugaaagaacuuuggacuaccacgauucaaaugugaagaacuuauaugaaaagguaagaagccaguuaaaaaacaaugccaaggaaauuggaaacggcugcuuugaauuuuaccacaaaugcgauaacacgugcauggaaagugucaaaaaugggacuuaugacuacccaaaauacucagaggaagcaaaauuaaacagagaagaaauagaugggguaaagcuggaaucaacaaggauuuaccagauuuuggcgaucuauucaacugucgccaguucauugguacugguagucucccugggggcaaucaguuucuggaugugcucuaaugggucucuacaguguagaauauguauuuaa

SEQ ID NO: 38095 - RNA, 1701 nt, Artificial Sequence; identical to SEQ ID NO: 34681
  derived and/or modified CDS sequence (wt) from hemagglutinin__InfluenzaA__ADO12343

SEQ ID NO: 38096 - RNA, 1701 nt, Artificial Sequence; identical to SEQ ID NO: 34681
  derived and/or modified CDS sequence (wt) from hemagglutinin__InfluenzaA__ADO12353

SEQ ID NO: 38097 - RNA, 1701 nt, Artificial Sequence; identical to SEQ ID NO: 38094
  derived and/or modified CDS sequence (wt) from hemagglutinin__InfluenzaA__ADO12363

SEQ ID NO: 38098 - RNA, 1701 nt, Artificial Sequence
  derived and/or modified CDS sequence (wt) from hemagglutinin__InfluenzaA__ADO12373
augaaggcaauacuaguaguucugcuauauacauuugcaaccgcaaaugcagacacauuauguauagguuaucaugcgaacaauucaacagacacuguagacacaguacuagaaaagaauguaacaguaacacacucuguuaaccuucuagaagacaagcauaacgggaaacuaugcaaacuaagagggguagccccauugcauuuggguaaauguaacauugcuggcuggauccugggaaauccagagugugaaucacucuccacagcaagcucaugguccuacauuguggaaacaucuaguucagacaauggaacguguuacccaggagauuucaucgauuaugaggagcuaagagagcaauugagcucagugucaucauuugaaagguuugagauauuccccaagacaaguucauggcccaaucaugacucgaacaaagguguaacggcagcauguccucaugcuggagcaaaaagcuucuacaaaaauuuaauauggcuaguuaaaaaaggaaauucauacccaaagcucagcaaauccuacauuaauaauaaagggaaagaaguccucgugcuauggggcauucaccauccaucuacuagugcugaccaacaaagucucuaucagaaugcagaugcauauguuuuuguggggacaucaagauacagcaagaaguucaagccggaaauagcaauaagacccaaagugagggaucaagaagggagaaugaacuauuacuggacacuaguagagccgggagacaaaauaacauucgaagcaacuggaaaucuagugguaccgagauaugcauucgcaauggaaagaaaugcuggaucugguauuaucauuucagauacaccaguccacgauugcaauacaacuugucagacacccaagggugcuauaaacaccagccucccauuucagaauauacauccgaucacaauuggaaaauguccaaaauauguaaaaagcacaaaauugagacuggccacaggauugaggaaugucccgucuauucaaucuagaggccuauuuggggccauugccgguuucauugaagggggguggacagggaugguagauggaugguacgguuaucaccaucaaaaugagcaggggucaggauaugcagccgaccugaagagcacacagaaugccauugacgagauuacuaacaaaguaaauucuguuauugaaaagaugaauacacaguucacagcaguagguaaagaguucaaccaccuggaaaaaagaauagagaauuuaaauaaaaaaguugaugaugguuuccuggacauuuggacuuacaaugccgaacuguugguucuauuggaaaaugaaagaacuuuggacuaccacgauucaaaugugaagaacuuauaugaaaagguaagaagccaguuaaaaaacaaugccaaggaaauuggaaacggcugcuuugaauuuuaccacaaaugcgauaacacgugcauggaaagugucaaaaaugggacuuaugacuacccaaaauacucagaggaagcaaaauuaaacagagaagaaauagaugggguaaagcuggaaucaacaaggauuuaccagauuuuggcgaucuauucaacugucgccaguucauugguacugguagucucccugggggcaaucaguuucuggaugugcucuaaugggucucuacaguguagaauauguauuuaa

SEQ ID NO: 38099 - RNA, 1701 nt, Artificial Sequence; identical to SEQ ID NO: 36166
  derived and/or modified CDS sequence (wt) from hemagglutinin__InfluenzaA__ADO12383

SEQ ID NO: 38100 - RNA, 1701 nt, Artificial Sequence
  derived and/or modified CDS sequence (wt) from hemagglutinin__InfluenzaA__ADO12403
augaaggcaauacuaguaguucugcuauauacauuugcaaccgcaaaugcagacacauuauguauagguuaucaugcgaacaauucaacagacacuguagacacaguacuagaaaagaauguaacaguaacacacucuguuaaccuucuagaagacaagcauaacgggaaacuaugcaaacuaagagggguagccccauugcauuuggguaaauguaacauugcuggcuggauccugggaaauccagagugugaaucacucuccacagcaagcucaugguccuacauuguggaaacaucuaguucagacaauggaacguguuacccaggagauuucaucgauuaugaggagcuaagagagcaauugagcucagugucaucauuugaaagguuugagauauuccccaagacaaguucauggcccaaucaugacucgaacaaagguguaacggcagcauguccucaugcuggagcaaaaagcuucuacaaaaauuuaauauggcuaguuaaaaaaggaaauucauacccaaagcucagcaaauccuacauuaaugauaaagggaaagaaguccucgugcuauggggcauucaccauccaucuacuagugcugaccaacaaagucucuaucagaaugcagaugcauauguuuuuguggggacaucaagauacagcaagaaguucaagccggaaauagcaauaagacccaaagugagggaucaagaagggagaaugaacuauuacuggacacuaguagagccgggagacaaaauaacauucgaagcaacuggaaaucuagugguaccgagauaugcauucgcaauggaaagaaaugcuggaucugguauuaucauuucagauacaccaguccacgauugcaauacaacuugucagacacccaagggugcuauaaacaccagccucccauuucagaauguacauccgaucacaauuggaaaauguccaaaauauguaaaaagcacaaaauugagacuggccacaggauugaggaaugucccgucuauucaaucuagaggccuauuuggggccauugccgguuucauugaagggggguggacagggaugguagauggaugguacgguuaucaccaucaaaaugagcaggggucaggauaugcagccgaccugaagagcacacagaaugccauugacgagauuacuaacaaaguaaauucuguuauugaaaagaugaauacacaguucacagcaguagguaaagaguucaaccaccuggaaaaaagaauagagaauuuaaauaaaaaaguugaugaugguuuccuggacauuuggacuuacaaugccgaacuguugguucuauuggaaaaugaaagaacuuuggacuaccacgauucaaaugugaagaacuuauaugaaaagguaagaagccaguuaaaaaacaaugccaaggaaauuggaaacggcugcuuugaauuuuaccacaaaugcgauaacacgugcauggaaagugucaaaaaugggacuuaugacuacccaaaauacucagaggaagcaaaauuaaacagagaagaaauagaugggguaaagcuggaaucaacaaggauuuaccagauuuuggcgaucuauucaacugucgccaguucauugguacugguagucucccugggggcaaucaguuucuggaugugcucuaaugggucucuacaguguagaauauguauuuaa

SEQ ID NO: 38101 - RNA, 1701 nt, Artificial Sequence
  derived and/or modified CDS sequence (wt) from hemagglutinin__InfluenzaA__ADO12413
augaaggcaauacuaguaguucugcuauauacauuugcaaccgcaaaugcagacacauuauguauagguuaucaugcgaacaauucaacagacacuguagacacaguacuagaaaagaauguaacaguaacacacucuguuaaccuucuagaagacaagcauaacgggaaacuaugcaaacuaagagggguagccccauugcauuuggguaaauguaacauugcuggcuggauccugggaaauccagagugugaaucacucuccacagcaagcucaugguccuacauuguggaaacaucuaguucagacaauggaacguguuacccaggagauuucaucgauuaugaggagcuaagagagcaauugagcucagugucaucauuugaaagguuugagauauuccccaagacaaguucauggcccaaucaugacucgaacaaagguguaacggcagcauguccucaugcuggagcaaaaagcuucuacaaaaauuuaauauggcuaguuaaaaaaggaaauucauacccaaagcucagcaaauccuacauuaaugauaaagggaaagaaguccucgugcuauggggcauucaccauccaucuacuagugcugaccaacaaagucucuaucagaaugcagaugcauauguuuuuguggggacaucaagauacagcaagaaguucaagccggaaauagcaauaagacccaaagugagggaucaagaagggagaaugaacuauuacuggacacuaguagagccgggagacaaaauaacauucgaagcaacuggaaaucuagugguaccgagauaugcauucacaauggaaagaaaugcuggaucugguauuaucauuucagauacaccaguccacgauugcaauacaacuugucagacacccaagggugcuauaaacaccagccucccauuucagaauauacauccgaucacaauuggaaaauguccaaaauauguaaaaagcacaaaauugagacuggccacaggauugaggaaugucccgucuauucaaucuagaggccuauuuggggccauugccgguuucauugaagggggguggacagggaugguagauggaugguacgguuaucaccaucaaaaugagcaggggucaggauaugcagccgaccugaagagcacacagaaugccauugacgagauuacuaacaaaguaaauucuguuauugagaagaugaauacacaguucacagcaguagguaaagaguucaaccaccuggaaaaaagaauagagaauuuaaauaaaaaaguugaugaugguuuccuggacauuuggacuuacaaugccgaacuguugguucuauuggaaaaugaaagaacuuuggacuaccacgauucaaaugugaagaacuuauaugaaaagguaagaagccaguuaaaaaacaaugccaaggaaauuggaaacggcugcuuugaauuuuaccacaaaugcgauaacacgugcauggaaagugucaaaaaugggacuuaugacuacccaaaauacucagaggaagcaaaauuaaacagagaagaaauagaugggguaaagcuggaaucaacaaggauuuaccagauuuuggcgaucuauucaacugucgccaguucauugguacugguagucucccugggggcaaucaguuucuggaugugcucuaaugggucucuacaguguagaauauguauuuaa

SEQ ID NO: 38102 - RNA, 1701 nt, Artificial Sequence; identical to SEQ ID NO: 34681
  derived and/or modified CDS sequence (wt) from hemagglutinin__InfluenzaA__ADO12423

SEQ ID NO: 38103 - RNA, 1701 nt, Artificial Sequence; identical to SEQ ID NO: 34681
  derived and/or modified CDS sequence (wt) from hemagglutinin__InfluenzaA__ADO12433

SEQ ID NO: 38104 - RNA, 1701 nt, Artificial Sequence; identical to SEQ ID NO: 34681
  derived and/or modified CDS sequence (wt) from hemagglutinin__InfluenzaA__ADO12443

SEQ ID NO: 38105 - RNA, 1701 nt, Artificial Sequence; identical to SEQ ID NO: 34681
  derived and/or modified CDS sequence (wt) from hemagglutinin__InfluenzaA__ADO12453

SEQ ID NO: 38106 - RNA, 1701 nt, Artificial Sequence; identical to SEQ ID NO: 34681
  derived and/or modified CDS sequence (wt) from hemagglutinin__InfluenzaA__ADO12463

SEQ ID NO: 38107 - RNA, 1701 nt, Artificial Sequence
  derived and/or modified CDS sequence (wt) from hemagglutinin__InfluenzaA__ADO12473
augaaggcaauacuaguaguucugcuauauacauuugcaaccgcaaaugcagacacauuauguauagguuaucaugcgaacaauucaacagacacuguagacacaguacuagaaaagaauguaacaguaacacacucuguuaaccuucuagaagacaagcaaaacgggaaacuaugcaaacuaagagggguagccccauugcauuuggguaaauguaacauugcuggcuggauccugggaaauccagagugugaaucacucuccacagcaagcucaugguccuacauuguggaaacaucuaguucagacaauggaacguguuacccaggagauuucaucgauuaugaggagcuaagagagcaauugagcucagugucaucauuugaaagguuugagauauuccccaagacaaguucauggcccaaucaugacucgaacaaagguguaacggcagcauguccucaugcuggagcaaaaagcuucuacaaaaauuuaauauggcuaguuaaaaaaggaaauucauacccaaagcucagcaaauccuacauuaaugauaaagggaaagaaguccucgugcuauggggcauucaccauccaucuacuagugcugaccaacaaagucucuaucagaaugcagaugcauauguuuuuguggggacaucaagauacagcaagaaguucaagccggaaauagcaauaagacccaaagugagggaucaagaagggagaaugaacuauuacuggacacuaguagagccgggagacaaaauaacauucgaagcaacuggaaaucuagugguaccgagauaugcauucgcaauggaaagaaaugcuggaucugguauuaucauuucagauacaccaguccacgauugcaauacaacuugucagacacccaagggugcuauaaacaccagccucccauuucagaauauacauccgaucacaauuggaaaauguccaaaauauguaaaaagcacaaaauugagacuggccacaggauugaggaaugucccgucuauucaaucuagaggccuauuuggggccauugccgguuucauugaagggggguggacagggaugguagauggaugguacgguuaucaccaucaaaaugagcaggggucaggauaugcagccgaccugaagagcacacagaaugccauugacgagauuacuaacaaaguaaauucuguuauugaaaagaugaauacacaguucacagcaguagguaaagaguucaaccaccuggaaaaaagaauagagaauuuaaauaaaaaaguugaugaugguuuccuggacauuuggacuuacaaugccgaacuguugguucuauuggaaaaugaaagaacuuuggacuaccacgauucaaaugugaagaacuuauaugaaaagguaagaagccaguuaaaaaacaaugccaaggaaauuggaaacggcugcuuugaauuuuaccacaaaugcgauaacacgugcauggaaagugucaaaaaugggacuuaugacuacccaaaauacucagaggaagcaaaauuaaacagagaagaaauagaugggguaaagcuggaaucaacaaggauuuaccagauuuuggcgaucuauucaacugucgccaguucauugguacugguagucucccugggggcaaucaguuucuggaugugcucuaaugggucucuacaguguagaauauguauuuaa

SEQ ID NO: 38108 - RNA, 1701 nt, Artificial Sequence; identical to SEQ ID NO: 34681
  derived and/or modified CDS sequence (wt) from hemagglutinin__InfluenzaA__ADO12493

SEQ ID NO: 38109 - RNA, 1701 nt, Artificial Sequence
  derived and/or modified CDS sequence (wt) from hemagglutinin__InfluenzaA__ADO12503
augaaggcaauacuaguaguucugcuauauacauuugcaaccgcaaaugcagacacauuauguauagguuaucaugcgaacaauucaacagacacuguagacacaguacuagaaaagaauguaacaguaacacacucuguuaaccuucuagaagacaagcauaacgggaaacuaugcaaacuaagagggguagccccauugcauuuggguaaauguaacauugcuggcuggauccugggaaauccagagugugaaucacucuccacagcaagcucaugguccuacauuguggaaacaucuaguucagacaauggaacguguuacccaggagauuucaucgauuaugaggagcuaagagagcaauugagcucagugucaucauuugaaagguuugagauauuccccaagacaaguucauggcccaaucaugacucgaacaaagguguaacggcagcauguccucaugcuggagcaaaaagcuucuacaaaaauuuaauauggcuaguuaaaaaaggaaauucauacccaaagcucagcaaauccuacauuaaugauaaagggaaagaaguccucgugcuauggggcauucaccauccaucuacuagugcugaccaacaaagucucuaucagaaugcagaugcauauguuuuuguggggacaucaagauacagcaagaaguucaagccggaaauagcaauaagacccaaagugagggaucaagaagggagaaugaacuauuacuggacacuaguagagccgggagacaaaauaacauucgaagcaacuggaaaucuagugguaccgagauaugcauucgcaauggaaagaaaugcuggaucugguauuaucauuucagauacaccaguccacgauugcaauacaacuugucagacacccaagggugcuauaaacaccagccucccauuucagaauauacauccgaucacaauuggaaaauguccaaaauauguaaaaagcacaaaauugagacuggccacaggauugaggaacgucccgucuauucaaucuagaggccuauuuggggccauugccgguuucauugaagggggguggacagggaugguagauggaugguacgguuaucaccaucaaaaugagcaggggucaggauaugcagccgaccugaagagcacacagaaugccauugacgagauuacuaacaaaguaaauucuguuauugaaaagaugaauacacaguucacagcaguagguaaagaguucaaccaccuggaaaaaagaauagagaauuuaaauaaaaaaguugaugaugguuuccuggacauuuggacuuacaaugccgaacuguugguucuauuggaaaaugaaagaacuuuggacuaccacgauucaaaugugaagaacuuauaugaaaagguaagaagccaguuaaaaaacaaugccaaggaaauuggaaacggcugcuuugaauuuuaccacaaaugcgauaacacgugcauggaaagugucaaaaaugggacuuaugacuacccaaaauacucagaggaagcaaaauuaaacagagaagaaauagaugggguaaagcuggaaucaacaaggauuuaccagauuuuggcgaucuauucaacugucgccaguucauugguacugguagucucccugggggcaaucaauuucuggaugugcucuaaugggucucuacaguguagaauauguauuuaa

SEQ ID NO: 38110 - RNA, 1701 nt, Artificial Sequence
  derived and/or modified CDS sequence (wt) from hemagglutinin__InfluenzaA__ADO12513
augaaggcaauacuaguaguucugcuauauacauuugcaaccgcaaaugcagacacauuauguauagguuaucaugcgaacaauucaacagacacuguagacacaguacuagaaaagaauguaacaguaacacacucuguuaaccuucuagaagacaagcauaacgggaaacuaugcaaacuaagagagguagccccauugcauuuggguaaauguaacauugcuggcuggauccugggaaauccagagugugaaucacucuccacagcaagcucaugguccuacauuguggaaacaucuaguucagacaauggaacguguuacccaggagauuucaucgauuaugaggagcuaagagagcaauugagcucagugucaucauuugaaagguuugagauauuccccaagacaaguucauggcccaaucaugacucgaacaaagguguaacggcagcauguccucaugcuggagcaaaaagcuucuacaaaaauuuaauauggcuaguuaaaaaaggaaauucauacccaaagcucagcaaauccuacauuaaugauaaagggaaagaaguccucgugcuauggggcauucaccauccaucuacaagugcugaccaacaaagucucuaucagaaugcagaugcauauguuuuuguggggacaucaagauacagcaagaaguucaagccggaaauagcaauaagacccaaagugagggaucaagaagggagaaugaacuauuacuggacacuaguagagccgggagacaaaauaacauucgaagcaacuggaaaucuagugguaccgagauaugcauucgcaauggaaagaaaugcuggaucugguauuaucauuucagauacaccaguccacgauugcaauacaacuugucagacacccaagggugcuauaaacaccagccucccauuucagaauauacauccgaucacaauuggaaaauguccaaaauauguaaaaagcacaaaauugagacuggccacaggauugaggaaugucccgucuauucaaucuagaggccuauuuggggccauugccgguuucauugaagggggguggacagggaugguagauggaugguacgguuaucaccaucaaaaugagcaggggucaggauaugcagccgaccugaagagcacacagaaugccauugacgagauuacuaacaaaguaaauucuguuauugaaaagaugaauacacaguucacagcaguagguaaagaguucaaccaccuggaaaaaagaauagagaauuuaaauaaaaaaguugaugaugguuuccuggacauuuggacuuacaaugccgaacuguugguucuauuggaaaaugaaagaacuuuggacuaccacgauucaaaugugaagaacuuauaugaaaagguaagaagccaguuaaaaaacaaugccaaggaaauuggaaacggcugcuuugaauuuuaccacaaaugcgauaacacgugcauggaaagugucaaaaaugggacuuaugacuacccaaaauacucagaggaagcaaaauuaaacagagaagaaauagaugggguaaagcuggaaucaacaaggauuuaccagauuuuggcgaucuauucaacugucgccaguucauugguacugguagucucccugggggcaaucaguuucuggaugugcucuaaugggucucuacaguguagaauauguauuuaa

SEQ ID NO: 38111 - RNA, 1701 nt, Artificial Sequence; identical to SEQ ID NO: 34681
  derived and/or modified CDS sequence (wt) from hemagglutinin__InfluenzaA__ADO12523

SEQ ID NO: 38112 - RNA, 1701 nt, Artificial Sequence
  derived and/or modified CDS sequence (wt) from hemagglutinin__InfluenzaA__ADO12533
augaaggcaauacuaguaguucugcuauauacauuugcaaccgcaaaugcagacacauuauguauagguuaucaugcgaacaauucaacagacacuguagacacaguacuagaaaagaauguaacaguaacacacucuguuaaccuucuagaagacaagcauaacgggaaacuaugcaaacuaagagggguagccccauugcauuuggguaaauguaacauugcuggcuggauccugggaaauccagagugugaaucacucuccacagcaagcucaugguccuacauuguggaaacaucuaguucagacaauggaacguguuacccaggagauuucaucgauuaugaggagcuaagagagcaauugagcucagugucaucauuugaaagguuugagauauuccccaagacaaguucauggcccaaucaugacucgaacaaagguguaacggcagcauguccucaugcuggagcaaaaagcuucuacaaaaauuuaauauggcuaguuaaaaaaggaaauucauacccaaagcucagcaaauccuacauuaaugauaaagggaaagaaguccucgugcuauggggcauucaccauccaucuacuagugcugaccaacaaagucucuaucagaaugcagaugcauauguuuuuguggggacaucaagauacagcaagaaguucaagccggaaauagcaauaagacccaaagugagggaucaagaagggagaaugaacuauuacuggacacuaguagagccgggagacaaaauaacauucgaagcaacuggaaaucuagugguaccgagauaugcauucgcaauggaaagaaaugcuggaucugguauuaucauuucagauacaccaguccacgauugcaauacaacuugucagacacccaagggugcuauaaacaccagccucccauuucagaauauacauccgaucacaauuggaaaauguccaaaauauguaaaaagcacaagauugagacuggccacaggauugaggaaugucccgucuauucaaucuagaggccuauuuggggccauugccgguuucauugaagggggguggacagggaugguagauggaugguacgguuaucaccaucaaaaugagcaggggucaggauaugcagccgaccugaagagcacacagaaugccauugacgagauuacuaacaaaguaaauucuguuauugaaaagaugaauacacaguucacagcaguagguaaagaguucaaccaccuggaaaaaagaauagagaauuuaaauaaaaaaguugaugaugguuuccuggacauuuggacuuacaaugccgaacuguugguucuauuggaaaaugaaagaacuuuggacuaccacgauucaaaugugaagaacuuauaugaaaagguaagaagccaguuaaaaaacaaugccaaggaaauuggaaauggcugcuuugaauuuuaccacaaaugcgauaacacgugcauggaaagugucaaaaaugggacuuaugacuacccaaaauacucagaggaagcaaaauuaaacagagaagaaauagaugggguaaagcuggaaucaacaaggauuuaccagauuuuggcgaucuauucaacugucgccaguucauugguacugguagucucccugggggcaaucaguuucuggaugugcucuaaugggucucuacaguguagaauauguauuuaa

SEQ ID NO: 38113 - RNA, 1701 nt, Artificial Sequence; identical to SEQ ID NO: 34681
  derived and/or modified CDS sequence (wt) from hemagglutinin__InfluenzaA__ADO12543

SEQ ID NO: 38114 - RNA, 1701 nt, Artificial Sequence; identical to SEQ ID NO: 34681
  derived and/or modified CDS sequence (wt) from hemagglutinin__InfluenzaA__ADO12553

SEQ ID NO: 38115 - RNA, 1701 nt, Artificial Sequence; identical to SEQ ID NO: 37896
  derived and/or modified CDS sequence (wt) from hemagglutinin__InfluenzaA__ADO12563

SEQ ID NO: 38116 - RNA, 1701 nt, Artificial Sequence; identical to SEQ ID NO: 34681
  derived and/or modified CDS sequence (wt) from hemagglutinin__InfluenzaA__ADO12573

SEQ ID NO: 38117 - RNA, 1701 nt, Artificial Sequence
  derived and/or modified CDS sequence (wt) from hemagglutinin__InfluenzaA__ADO12593
augaaggcaauacuaguaguucugcuauauacauuugcaaccgcaaaugcagacacauuauguauagguuaucaugcgaacaauucaacagacauuguagacacaguacuagaaaagaauguaacaguaacacacucuguuaaccuucuagaagacaagcauaacgggaaacuaugcaaacuaagagggguagccccauugcauuuggguaaauguaacauugcuggcuggauccugggaaauccagagugugaaucacucuccacagcaagcucaugguccuacauuguggaaacaucuaguucagacaauggaacguguuacccaggagauuucaucgauuaugaggagcuaagagagcaauugagcucagugucaucauuugaaagguuugagauauuccccaagacaaguucauggcccaaucaugacucgaacaaagguguaacggcagcauguccucaugcuggagcaaaaagcuucuacaaaaauuuaauauggcuaguuaaaaaaggaaauucauacccaaagcucagcaaauccuacauuaaugauaaagggaaagaaguccucgugcuauggggcauucaccauccaucuacuagugcugaccaacaaagucucuaucagaaugcagaugcauauguuuuuguggggacaucaagauacagcaagaaguucaagccggaaauagcaauaagacccaaagugagggaucaagaagggagaaugaacuauuacuggacacuaguagagccgggagacaaaauaacauucgaagcaacuggaaaucuagugguaccgagauaugcauucgcaauggaaagaaaugcuggaucugguauuaucauuucagauacaccaguccacgauugcaauacaacuugucagacacccaagggugcuauaaacaccagccucccauuucagaauauacauccgaucacaauuggaaaauguccaaaauauguaaaaagcacaaaauugagacuggccacaggauugaggaaugucccgucuauucaaucuagaggccuauuuggggccauugccgguuucauugaagggggguggacagggaugguagauggaugguacgguuaucaccaucaaaaugagcaggggucaggauaugcagccgaccugaagagcacacagaaugccauugacgagauuacuaacaaaguaaauucuguuauugaaaagaugaauacacaguucacagcaguagguaaagaguucaaccaccuggaaaaaagaauagagaauuuaaauaaaaaaguugaugaugguuuccuggacauuuggacuuacaaugccgaacuguugguucuauuggaaaaugaaagaacuuuggacuaccacgauucaaaugugaagaacuuauaugaaaagguaagaagccaguuaaaaaacaaugccaaggaaauuggaaacggcugcuuugaauuuuaccacaaaugcgauaacacgugcauggaaagugucaaaaaugggacuuaugacuacccaaaauacucagaggaagcaaaauuaaacagagaagaaauagaugggguaaagcuggaaucaacaaggauuuaccagauuuuggcgaucuauucaacugucgccaguucauugguacugguagucucccugggggcaaucaguuucuggaugugcucuaaugggucucuacaguguagaauauguauuuaa

SEQ ID NO: 38118 - RNA, 1701 nt, Artificial Sequence
  derived and/or modified CDS sequence (wt) from hemagglutinin__InfluenzaA__ADO12603
augaaggcaauacuaguaguucugcuauauacauuugcaaccgcaaaugcagacacauuauguauagguuaucaugcgaacaauucaacagacacuguagacacaguacuagaaaagaauguaacaguaacacacucugucaaccuucuagaagacaagcauaacgggaaacuaugcaaacuaagagggguagccccauugcauuuggguaaauguaacauugcuggcuggauccugggaaauccagagugugaaucacucuccacagcaagcucaugguccuacauuguggaaacaucuaguucagacaauggaacguguuacccaggagauuucaucgauuaugaggagcuaagagagcaauugagcucagugucaucauuugaaagguuugagauauuccccaagacaaguucauggcccaaucaugacucgaacaaagguguaacggcagcauguccucaugcuggagcaaaaagcuucuacaaaaauuuaauauggcuaguuaaaaaaggaaauucauacccaaagcucagcaaauccuacauuaaugauaaagggaaagaaguccucgugcuauggggcauucaccauccaucuacuagugcugaccaacaaagucucuaucagaaugcagaugcauauguuuuuguggggacaucaagauacagcaagaaguucaagccggaaauagcaauaagacccaaagugagggaucaagaagggagaaugaacuauuacuggacacuaguagagccgggagacaaaauaacauucgaagcaacuggaaaucuagugguaccgagauaugcauucgcaauggaaagaaaugcuggaucugguauuaucauuucagauacaccaguccacgauugcaauacaacuugucagacacccaagggugcuauaaacaccagccucccauuucagaauauacauccgaucacaauuggaaaauguccaaaauauguaaaaagcacaaaauugagacuggccacaggauugaggaaugucccgucuauucaaucuagaggccuauuuggggccauugccgguuucauugaagggggguggacagggaugguagauggaugguacgguuaucaccaucaaaaugagcaggggucaggauaugcagccgaccugaagagcacacagaaugccauugacgagauuacuaacaaaguaaauucuguuauugaaaagaugaauacacaguucacagcaguagguaaagaguucaaccaccuggaaaaaagaauagagaauuuaaauaaaaaaguugaugaugguuuccuggacauuuggacuuacaaugccgaacuguugguucuauuggaaaaugaaagaacuuuggacuaccacgauucaaaugugaagaacuuauaugaaaagguaagaagccaguuaaaaaacaaugccaaggaaauuggaaacggcugcuuugaauuuuaccacaaaugcgauaacacgugcauggaaagugucaaaaaugggacuuaugacuacccaaaauacucagaggaagcaaaauuaaacagagaagaaauagaugggguaaagcuggaaucaacaaggauuuaccagauuuuggcgaucuauucaacugucgccaguucauugguacugguagucucccugggggcaaucaguuucuggaugugcucuaaugggucucuacaguguagaauauguauuuaa

SEQ ID NO: 38119 - RNA, 1701 nt, Artificial Sequence
  derived and/or modified CDS sequence (wt) from hemagglutinin__InfluenzaA__ADO12613
augaaggcaauacuaguaguucugcuauauacauuugcaaccgcaaaugcagacacauuauguauagguuaucaugcgaacaauucaacagacacuguagacacaguacuagaaaagaauguaacaguaacacacucuguuaaccuucuagaagacaagcauaacgggaaauuaugcaaacuaagagggguagccccauugcauuuggguaaauguaacauugcuggcuggauccugggaaauccagagugugaaucacucuccacagcaagcucaugguccuacauuguggaaacaucuaguucagacaauggaacguguuacccaggagauuucaucgauuaugaggagcuaagagagcaauugagcucagugucaucauuugaaagguuugagauauuccccaagacaaguucauggcccaaucaugacucgaacaaagguguaacggcagcauguccucaugcuggagcaaaaagcuucuacaaaaauuuaauauggcuaguuaaaaaaggaaauucauacccaaagcucagcaaauccuacauuaaugauaaagggaaagaaguccucgugcuauggggcauucaccauccaucuacuagugcugaccaacaaagucucuaucagaaugcagaugcauauguuuuuguggggacaucaagauacagcaagaaguucaagccggaaauagcaauaagacccaaagugagggaucaagaagggagaaugaacuauuacuggacacuaguagagccgggagacaaaauaacauucgaagcaacuggaaaucuagugguaccgagauaugcauucgcaauggaaagaaaugcuggaucugguauuaucauuucagauacaccaguccacgauugcaauacaacuugucagacacccaagggugcuauaaacaccagccucccauuucagaauauacauccgaucacaauuggaaaauguccaaaauauguaaaaagcacaaaauugagacuggccacaggauugaggaaugucccgucuauucaaucuagaggccuauuuggggccauugccgguuucauugaagggggguggacagggaugguagauggaugguacgguuaucaccaucaaaaugagcaggggucaggauaugcagccgaccugaagagcacacagaaugccauugacgagauuacuaacaaaguaaauucuguuauugaaaagaugaauacacaguucacagcaguagguaaagaguucaaccaccuggaaaaaagaauagagaauuuaaauaaaaaaguugaugaugguuuccuggacauuuggacuuacaaugccgaacuguugguucuauuggaaaaugaaagaacuuuggacuaccacgauucaaaugugaagaacuuauacgaaaagguaagaagccaguuaaaaaacaaugccaaggaaauuggaaacggcugcuuugaauuuuaccacaaaugcgauaacacgugcauggaaagugucaaaaaugggacuuaugacuacccaaaauacucagaggaagcaaaauuaaacagagaagaaauagaugggguaaagcuggaaucaacaaggauuuaccagauuuuggcgaucuauucaacugucgccaguucauugguacugguagucucccugggggcaaucaguuucuggaugugcucuaaugggucucuacaguguagaauauguauuuaa

SEQ ID NO: 38120 - RNA, 1701 nt, Artificial Sequence
  derived and/or modified CDS sequence (wt) from hemagglutinin__InfluenzaA__ADO12623
augaaggcaauacuaguaguucugcuauauacauuugcaaccgcaaaugcagacacauuauguauagguuaucaugcgaacaauucaacagacacuguagacacaguacuagaaaagaauguaacaguaacacauucuguuaaccuucuagaagacaagcauaacgggaaacuaugcaaacuaagagggguagccccauugcauuuggguaaauguaacauugcuggcuggauccugggaaauccagagugugaaucacucuccacagcaagcucaugguccuacauuguggaaacaucuaguucagacaauggaacguguuacccaggagauuucaucgauuaugaggagcuaagagagcaauugagcucagugucaucauuugaaagguuugagauauuccccaagacaaguucauggcccaaucaugacucgaacaaagguguaacggcagcauguccucaugcuggagcaaaaagcuucuacaaaaauuuaauauggcuaguuaaaaaaggaaauucauacccaaagcucagcaaauccuacauuaaugauaaagggaaagaaguccucgugcuauggggcauucaccauccaucuacuagugcugaccaacaaagucucuaucagaaugcagaugcauauguuuuuguggggacaucaagauacagcaagaaguucaagccggaaauagcaauaagacccaaagugagggaucaagaagggagaaugaacuauuacuggacacuaguagagccgggagacaaaauaacauucgaagcaacuggaaaucuagugguaccgagauaugcauucgcaauggaaagaaaugcuggaucugguauuaucauuucagauacaccaguccacgauugcaauacaacuugucagacacccaagggugcuauaaacaccagccucccauuucagaauauacauccgaucacaauuggaaaauguccaaaauauguaaaaagcacaaaauugagacuggccacaggauugaggaaugucccgucuauucaaucuagaggccuauuuggggccauugccgguuucauugaagggggguggacagggaugguagauggaugguacgguuaucaccaucaaaaugagcaggggucaggauaugcagccgaccugaagagcacacagaaugccauugacgagauuacuaacaaaguaaauucuguuauugaaaagaugaauacacaguucacagcaguagguaaagaguucaaccaccuggaaaaaagaauagagaauuuaaauaaaaaaguugaugaugguuuccuggacauuuggacuuacaaugccgaacuguugguucuauuggaaaaugaaagaacuuuggacuaccacgauucaaaugugaagaacuuauaugaaaagguaagaagccaguuaaaaaacaaugccaaggaaauuggaaacggcugcuuugaauuuuaccacaaaugcgauaacacgugcauggaaagugucaaaaaugggacuuaugacuacccaaaauacucagaggaagcaaaauuaaacagagaagaaauagaugggguaaagcuggaaucaacaaggauuuaccagauuuuggcgaucuauucaacugucgccaguucauugguacugguagucucccugggggcaaucaguuucuggaugugcucuaaugggucucuacaguguagaauauguauuuaa

SEQ ID NO: 38121 - RNA, 1701 nt, Artificial Sequence
  derived and/or modified CDS sequence (wt) from hemagglutinin__InfluenzaA__ADO14349
augaaggcaauacuaguaguucugcuauauacauuugcaaccgcaaaugcagacacauuauguauagguuaucaugcgaacaauucaacagacacuguagacacaguacuagaaaagaauguaacaguaacacacucuguuaaccuucuagaagacaagcauaaagggaaacuaugcaaacuaagagggguagccccauugcauuuggguaaauguaacauugcuggcuggauccugggaaauccagagugugaaucacucuccacagcaagcucaugguccuacauuguggaaacaucuaguucagacaaaggaacguguuacccaggagauuucaucgauuaugaggagcuaagagagcaauugagcucagugucaucauuugaaagguuugagauauuccccaagacaaguucauggcccaaucaugacucgaacaaagguguaacggcagcauguccucaugcuggagcaaaaagcuucuacaaaaauuuaauauggcuaguuaaaaaaggaaauucauacccaaagcucagcaaauccuacauuaaugauaaagggaaagaaguccuagugcuauggggcauucaccauccaucuacuagugcugaccaacaaagucucuaucagaaugcagaugcauauguuuuuguggggacaucaagauacagcaagaaguucaagccggaaauagcaauaagacccaaagugagggaucaagaagggagaaugaacuauuacuggacacuaguagagccgggagacaaaauaacauucgaagcaacuggaaaucuagugguaccgagauaugcauucgcaauggaaagaaaugcuggaucugguauuaucauuucagauacaccaguccacgauugcaauacaacuugucagacacccaagggugcuauaaacaccagccucccauuucagaauauacauccgaucacaauuggaaaauguccaaaauaugugaaaagcacaaaauugagacuggccacaggauugaggaauaucccgucuauucaaucuagaggccuauuuggggccauugccgguuucauugaagggggguggacagggaugguagauggaugguacgguuaucaccaucaaaaugagcaggggucaggauaugcagccgaccugaagagcacacagaaugccauugacgagauuacuaacaaaguaaauucuguuauugaaaagaugaauacacaguucacagcaguagguaaagaguucaaccaccuggaaaaaagaauagagaauuuaaauaaaaagguugaugaugguuuccuggacauuuggacuuacaaugccgaacuguugguucuauuggaaaaugaaagaacuuuggacuaccacgauucaaaugugaagaacuuauaugaaaagguaagaagccaguuaaaaaacaaugccaaggaaauuggaaacggcugcuuugaauuuuaccacaaaugcgauaacacgugcauggaaagugucaaaaaugggacuuaugacuacccaaaauacucagaggaagcaaaauuaaacagagaagaaauagaugggguaaagcuggaaucaacaaggauuuaccagauuuuggcgaucuauucaacugucgccaguucauugguacugguagucucccugggggcaaucaguuucuggaugugcucuaaugggucucuacaguguagaauauguauuuaa

SEQ ID NO: 38122 - RNA, 1701 nt, Artificial Sequence
  derived and/or modified CDS sequence (wt) from hemagglutinin__InfluenzaA__ADO14351
augaaggcaauacuaguaguucugcuauauacauuugcaaccgcaaaugcagacacauuauguauagguuaucaugcgaacaauucaacagacacuguagacacaguacuagaaaagaauguaacaguaacacacucuguuaaccuucuagaagacaagcauaacgggaaacuaugcaaacuaagagggguagccccauugcauuuggguaaauguaacauugcuggcuggauccugggaaauccagagugugaaucacucuccacagcaagcucaugguccuacauuguggaaacaucuaguucagacaauggaacguguuacccaggagauuucaucgauuaugaggagcuaagagagcaauugagcucagugucaucauuugaaagguuugagauauuccccaagacaaguucauggcccaaucaugacucgaacaaagguguaacggcagcauguccucaugcuggagcaaaaagcuucuacaaaaauuuaauauggcuaguuaaaaaaggaaauucauacccaaagcucagcaaauccuacauuaaugauaaagggaaagaaguccucgugcuauggggcauucaccauccaucuacuagugcugaccaacaaagucucuaucagaaugcagaugcauauguuuuuguggggacaucaagauacagcaagaaguucaagccggagauagcaauaagacccaaagugaggggucaagaagggagaaugaacuauuacuggacacuaguagagccgggagacaaaauaacauucgaagcaacuggaaaucuagugguaccgagauaugcauucgcaauggaaagaaaugcuggaucugguauuaucauuucagauacaccaguccacgauugcaauacaacuugucagacacccaagggugcuauaaacaccagccucccauuucagaauauacauccgaucacaauuggaaaauguccaaaauauguaaaaagcacaaaauugagacuugccacaggauugaggaauaucccgucuauucaaucuagaggccuauuuggggccauugccgguuucauugaagggggguggacagggaugguagauggaugguacgguuaucaccaucaaaaugagcaggggucaggauaugcagccgaccugaagagcacacagaaugccauugacgagauuacuaacaaaguaaauucuguuauugaaaagaugaauacacaguucacagcaguagguaaagaguucaaccaccuggaaaaaagaauagagaauuuaaauaaaaagguugaugaugguuuccuggacauuuggacuuacaaugccgaacuguugguucuauuggaaaaugaaagaacuuuggacuaccacgauucaaaugugaagaacuuauaugaaaagguaagaagccaguuaaaaaacaaugccaaggaaauuggaaacggcugcuuugaauuuuaccacaaaugcgauaacacgugcauggaaagugucaaaaaugggacuuaugacuacccaaaauacucagaggaagcaaaauuaaacagagaagaaauagaugggguaaagcuggaaucaacaaggauuuaccagauuuuggcgaucuauucaacugucgccaguucauugguacugguagucucccugggggcaaucaguuucuggaugugcucuaaugggucucuacaguguagaauauguauuuaa

SEQ ID NO: 38123 - RNA, 1701 nt, Artificial Sequence
  derived and/or modified CDS sequence (wt) from hemagglutinin__InfluenzaA__ADO14353
augaaggcaauacuaguaguucugcuauauacauuugcaaccgcaaaugcagacacauuauguauagguuaucaugcgaacaauucaacagacacuguagacacaguacuagaaaagaauguaacaguaacacacucuguuaaccuucuagaagacaagcauaacgggaaacuaugcaaacuaagagggguagccccauugcauuuggguaaauguaacauugcuggcuggauccugggaaauccagagugugaaucacucuccacagcaagcucaugguccuacauuguggaaacaucuaguucagacaauggaacguguuacccaggagauuucaucgauuaugaggagcuaagagagcaauugagcucagugucaucauuugaaagguuugagauauuccccaagacaaguucauggcccaaucaugacucgaacaaagguguaacggcagcauguccucaugcugaagcaaaaagcuucuacaaaaauuuaauauggcuaguuaaaaaaggaaauucauacccaaagcucagcaaauccuacauuaaugauaaagggaaagaaguccuagugcuauggggcauucaccauccaucuacuagugcugaccaacaaagucucuaucagaaugcagaugcauauguuuuuguggggacaucaagauacagcaagaaguucaagccggaaauagcaauaagacccaaagugagggaucaagaagggagaaugaacuauuacuggacacuaguagagccgggagacaaaauaacauucgaagcaacuggaaaucuagugguaccgagauaugcauucgcaauggaaagaaaugcuggaucugguauuaucauuucagauacaccaguccacgauugcaauacaacuugucagacacccaagggugcuauaaacaccagccucccauuucagaauauacauccgaucacaauuggaaaauguccaaaauauguaaaaagcacaaaauugagacuggccacaggauugaggaauaucccgucuauucaaucuagaggccuauuuggggccauugccgguuucauugaagggggguggacagggaugguagauggaugguacgguuaucaucaucaaaaugagcaggggucaggauaugcagccgaccugaagagcacacagaaugccauugacgagauuacuaacaaagugaauucuguuauugaaaagaugaauacacaguucacagcaguagguaaagaguucaaccaccuggaaaaaagaauagagaauuuaaauaaaaagguugaugaugguuuccuggacauuuggacuuacaaugccgaacuguugguucuauuggaaaaugaaagaacuuuggacuaccacgauucaaaugugaagaacuuauaugaaaagguaagaagccaguuaaaaaacaaugccaaggaaauuggaaacggcugcuuugaauuuuaccacaaaugcgauaacacgugcauggaaagugucaaaaaugggacuuaugacuacccaaaauacucagaggaagcaaaauuaaacagagaagaaauagaugggguaaagcuggaaucaacaaggauuuaccagauuuuggcgaucuauucaacugucgccaguucauugguacugguagucucccugggggcaaucaguuucuggaugugcucuaaugggucucuacaguguagaauauguauuuaa

SEQ ID NO: 38124 - RNA, 1701 nt, Artificial Sequence
  derived and/or modified CDS sequence (wt) from hemagglutinin__InfluenzaA__ADO14354
augaaggcaauacuaguaguucugcuauauacauuugcaaccgcuaaugcagacacauuauguauggguuaucaugcgaacaauucaacagacacuguagacacaguacuagaaaagaauguaacaguaacacacucuguuaaccuucuagaagacaagcauaacgggaaacuaugcaaacuaagagggguagccccauugcauuuggguaaauguaacauugcuggcuggauccugggaaauccagagugugaaucacucuccacagcaagcucaugguccuacauuguggaaacaucuaguucagacaauggaacguguuacccaggagauuucaucgauuaugaggagcuaagagagcaauugagcucagugucaucauuugaaagguuugagauauuccccaagacaaguucauggcccaaucaugacucgaacaaagguguaacggcagcauguccucaugcuggagcaaaaagcuucuacaaaaauuuaauauggcuaguuaaaaaaggaaauucauacccaaagcucagcaaauccuacauuaaugauaaagggaaagaaguccucgugcuauggggcauucaccauccaucuacuagugcugaccaacaaagucucuaucagaaugcagaugcauauguuuuuguggggacaucaagauacagcaagaaguucaagccggaaauagcaauaagacccaaagugagggaacaagaagggagaaugaacuauuacuggacacuaguagagccgggagacaaaauaacauucgaagcaacuggaaaucuagugguaccgagauaugcauucgcaauggaaagaaaugcuggaucugguauuaucauuucagauacaccaguccacgauugcaauacaacuugucagacacccaagggugcuauaaacaccagccucccauuucagaauauacauccgaucacaauuggaaaauguccaaaauauguaaaaagcacaaaauugagacuggccacaggauugaggaaugucccgucuauucaaucuagaggccuauuuggggccauugccgguuucauugaagggggguggacagggaugguagauggaugguacgguuaucaccaucaaaaugagcaggggucaggauaugcagccgaccugaagagcacacagaaugccauugacgagauuacuaacaaaguaaauucuguuauugaaaagaugaauacacaguucacagcaguagguaaagaguucaaccaccuggaaaaaagaauagaaaauuuaaauaaaaaaguugaugaugguuuccuggacauuuggacuuacaaugccgaacuguugguucuauuggaaaaugaaagaacuuuggacuaccacgauucaaaugugaagaacuuauaugaaaagguaagaagccaguuaaaaaacaaugccaaggaaauuggaaacggcugcuuugaauuuuaccacaaaugcgauaacacgugcauggaaagugucaaaaaugggacuuaugacuacccaaaauacucagaggaagcaaaauuaaacagagaagaaauagaugggguaaagcuggaaucaacaaggauuuaccagauuuuggcgaucuauucaacugucgccaguucauugguacugguagucucccugggggcaaucaguuucuggaugugcucuaaugggucucuacaguguagaauauguauuuaa

SEQ ID NO: 38125 - RNA, 1701 nt, Artificial Sequence
  derived and/or modified CDS sequence (wt) from hemagglutinin__InfluenzaA__ADO14356
augaaggcaauacuaguaguucugcuauauacauuugcaaccgcaaaugcagacacauuauguauagguuaucaugcgaacaauucaacagacacuguagacacaguacuagaaaagaauguaacaguaacacacucuguuaaccuucuagaagacaagcauaacgggaaacuaugcaaacuaagagggguagccccauugcauuuggguaaauguaacauugcuggcuggauccugggaaauccagagugugaaucacucuccacagcaagcucaugguccuacauuguggaaacaucuaguucagacaauggaacguguuacccaggagauuucaucgauuaugaggagcuaagagagcaauugagcucagugucaucauuugaaagguuugagauauuccccaagacaaguucauggcccaaucaugacucgaacaaagguguaacggcagcauguccucaugcuggagcaaaaagcuucuacaaaaauuuaauauggcuaguuaaaaaaggaaauucauacccaaagcucagcaaauccuacauuaaugauaaagggaaagaaguccucgugcuauggggcauucaccauccaucuacuagugcugaccaacaaagucucuaucagaaugcagaugcauauguuuuuguggggacaucaagauacagcaagaaguucaagccggaaauagcaauaagacccaaagugaggggucaagaagggagaaugaacuauuacuggacacuaguagagccgggagacaaaauaacauucgaagcaacuggaaaucuagugguaccgagauaugcauucgcaauggaaagaaaugcuggaucugguauuaucauuucagauacaccaguccacgauugcaauacaacuugucagacacccaagggugcuauaaacaccagccucccauuucagaauauacauccgaucacaauuggaaaauguccaaaauauguaaaaagcacaaaauugagacuggccacaggauugaggaauaucccgucuauucaaucuagaggccuauuuggggccauugccgguuucauugaagggggguggacagggaugguagauggaugguacgguuaucaccaucaaaaugagcaggggucaggauaugcagccgaccugaagagcacacagaaugccauugacgagauuacuaacaaaguaaauucuguuauugaaaagaugaauacacaguucacagcaguagguaaagaguucaaccaccuggaaaaaagaauagagaauuuaaauaaaaagguugaugaugguuuccuggacauuuggacuuacaaugccgaacuguugguucuauuggaaaaugaaagaacuuuggacuaccacgauucaaaugugaagaacuuauaugaaaagguaagaagccaguuaaaaaacaaugccaaggaaauuggaaacggcugcuuugaauuuuaccacaaaugcgauaacacgugcauggaaagugucaaaaaugggacuuaugacuacccagaauacucagaggaagcaaaauuaaacagagaagaaauagaugggguaaagcuggaaucaacaaggauuuaccagauuuuggcgaucuauucaacugucgccaguucauugguacugguagucucccugggggcaaucaguuucuggaugugcucuaaugggucucuacaguguagaauauguauuuaa

SEQ ID NO: 38126 - RNA, 1701 nt, Artificial Sequence
  derived and/or modified CDS sequence (wt) from hemagglutinin__InfluenzaA__ADO14357
augaaggcaauacuaguaguucugcuauauacauuugcaaccgcaaaugcagacacauuauguauagguuaucaugcgaacaauucaacagacacuguagacacaguacuagaaaagaauguaacaguaacacacucuguuaaccuucuagaagacaagcauaacgggaaacuaugcaaacuaagagggguagccccauugcauuuggguaaauguaacauugcuggcuggauccugggaaauccagagugugaaucacucuccacagcaagcucaugguccuacauuguggaaacaucuaguucagacaauggaacguguuacccaggagauuucaucgauuaugaggagcuaagagagcaauugagcucagugucaucauuugaaagguuugagauauuccccaagacaaguucauggcccaaucaugacucgaacaaagguguaacggcagcauguccucaugcuggagcaaaaagcuucuacaaaaauuuaauauggcuaguuaaaaaaggaaauucauacccaaagcucagcaaauccuacauuaaugauaaagggaaagaaguccuaguacuauggggcauucaccauccaucuacuagugcugaccaacaaagucucuaucagaaugcagaugcauauguuuuuguggggacaucaagauacagcaagaaguucaagccggaaauagcaauaagacccaaagugaggggucaagaagggagaaugaacuauuacuggacacuaguagagccgggagacaaaauaacauucgaagcaacuggaaaucuagugguaccgagauaugcauucgcaauggaaagaaaugcuggaucugguauuaucauuucagauacaccaguccacgauugcaauacaacuugucagacacccaagggugcuauaaacaccagccucccauuucagaauauacauccgaucacaauuggaaaauguccaaaauaugugaaaagcacaaaauugagacuggccacaggauugaggaauaucccgucuauucaaucuagaggccuauuuggggccauugccgguuucauugaagggggguggacagggaugguagauggaugguacgguuaucaccaucaaaaugagcaggggucaggauaugcagccgaccugaagagcacacagaaugccauugacgagauuacuaacaaaguaaauucuguuauugaaaagaugaauacacaguucacagcaguagguaaagaguucaaccaccuggaaaaaagaauagagaauuuaaauaaaaagguugaugaugguuuccuggacauuuggacuuacaaugccgaacuguugguucuauuggaaaaugaaagaacuuuggacuaccacgauucaaaugugaagaacuuauaugaaaagguaagaagccaguuaaaaaacaaugccaaggaaauuggaaacggcugcuuugaauuuuaccacaaaugcgauaacacgugcauggaaagugucaaaaaugggacuuaugacuacccaaaauacucagaggaagcaaaauuaaacagagaagaaauagaugggguaaagcuggaaucaacaaggauuuaccagauuuuggcgaucuauucaacugucgccaguucauugguacugguagucucccugggggcaaucaguuucuggaugugcucuaaugggucucuacaguguagaauauguauuuaa

SEQ ID NO: 38127 - RNA, 1701 nt, Artificial Sequence
  derived and/or modified CDS sequence (wt) from hemagglutinin__InfluenzaA__ADO14359
augaaggcaauacuaguaguucugcuauauacauuugcaaccgcaaaugcagacacauuauguauagguuaucaugcgaacaauucaacagacacuguagacacaguacuagaaaagaauguaacaguaacacacucuguuaaccuucuagaagacaagcauaacgggaaacuaugcaaacuaagagggguagccccauugcauuuggguaaauguaacauugcuggcuggauccugggaaauccagagugugaaucacucuccacagcaagcucaugguccuacauuguggaaacaucuaguucagacaauggaacguguuacccaggagauuucaucgauuaugaggagcuaagagagcaauugagcucagugucaucauuugaaagguuugagauauuccccaagacaaguucauggcccaaucaugacucgaacaaagguguaacggcagcauguccucaugcuggagcaaaaagcuucuacaaaaauuuaauauggcuaguuaaaaaaggaaauucauacccaaagcucagcaaauccuacauuaaugauaaagggaaagaaguccucgugcuauggggcauucaccauccaccuacuagugcugaccaacaaagucucuaucagaaugcagaugcauauguuuuuguggggacaucaagauacagcaagaaguucaagccggaaauagcaauaagacccaaagugagggaucaagaagggagaaugaacuauuacuggacacuaguagagccgggagacaaaauaacauucgaagcaacuggaaaucuagugguaccgagauaugcauucgcaauggaaagaaaugcuggaucugguauuaucauuucagauacaccaguccacgauugcaauacaacuugucagacacccaagggugcuauaaacaccagccucccauuucagaauauacauccgaucacaauuggaaaauguccaaaauauguaaaaagcacaaaauugagacuggccacaggauugaggaaugucccgucuauucaaucuagaggccuauuuggggccauugccgguuucauugaagggggguggacagggaugguagauggaugguacgguuaucaccaucaaaaugagcaggggucaggauaugcagccgaccugaagagcacacagaaugccauugacaagauuacuaacaaaguaaauucuguuauugaaaagaugaauacacaguucacagcaguagguaaagaguucaaccaccuggaaaaaagaauagagaauuuaaauaaaaaaguugaugaugguuuccuggacauuuggacuuacaaugccgaacuguugguucuauuggaaaaugaaagaacuuuggacuaccacgauucaaaugugaagaacuuauaugaaaagguaagaagccaguuaaaaaacaaugccaaggaaauuggaaacggcugcuuugaauuuuaccacaaaugcgauaacacgugcauggaaagugucaaaaaugggacuuaugacuacccaaaauacucagaggaagcaaaauuaaacagagaagaaauagaugggguaaagcuggaaucaacaaggauuuaccagauuuuggcgaucuauucaacugucgccaguucauugguacugguagucucccugggggcaaucaguuucuggaugugcucuaaugggucucuacaguguagaauauguauuuaa

SEQ ID NO: 38128 - RNA, 1701 nt, Artificial Sequence
  derived and/or modified CDS sequence (wt) from hemagglutinin__InfluenzaA__ADO14361
augaaggcaauacuaguaguucugcuauauacauuugcaaccgcaaaugcagacacauuauguauagguuaucaugcgaacaauucaacagacacuguagacacaguacuagaaaagaauguaacaguaacacacucuguuaaccuucuagaagacaagcauaacgggaaacuaugcaaacuaagagggguagccccauugcauuuggguaaauguaacauugcuggcuggauccugggaaauccagagugugaaucacucuccacagcaagcucaugguccuacauuguggaaacaucuaguucagacaaaggaacguguuacccaggagauuucaucgauuaugaggagcuaagagagcaauugagcucagugucaucauuugaaagguuugagauauuccccaagacaaguucauggcccaaucaugacucgaacaaagguguaacggcagcauguccucaugcuggagcaaaaagcuucuacaaaaauuuaauauggcuaguuaaaaaaggaaauucauacccaaagcucagcaaauccuacauuaaugauaaagggaaagaaguccuagugcuauggggcauucaccauccaucuacuagugcugaccaacaaagucucuaucagaaugcagaugcauauguuuuuguggggacaucaagauacagcaagaaguucaagccggaaauagcaauaagacccaaagugagggaucaagaagggagaaugaacuauuacuggacacuaguagagccgggagacaaaauaacauucgaagcaacuggaaaucuagugguaccgagauaugcauucgcaauggaaagaaaugcuggaucugguauuaucauuucagauacaccaguccacgauugcaauacaacuugucagacacccaagggugcuauaaacaccagccucccauuucagaauauacauccgaucacaauuggaaaauguccaaaauaugugaaaagcacaaaauugagacuggccacaggauugaggaauaucccgucuauucaaucuagaggccuauuuggggccauugccgguuucauugaagggggguggacagggaugguagauggaugguacgguuaucaccaucaaaaugagcaggggucaggauaugcagccgaccugaagagcacacagaaugccauugacgagauuacuaacaaaguaaauucuguuauugaaaagaugaauacacaguucacagcaguagguaaagaguucaaccaccuggaaaaaagaauagagaauuuaaauaaaaaaguugaugaugguuuccuggacauuuggacuuacaaugccgaacuguugguucuauuggaaaaugaaagaacuuuggacuaccacgauucaaaugugaagaacuuauaugaaaagguaagaagccaguuaaaaaacaaugccaaggaaauuggaaacggcugcuuugaauuuuaccacaaaugcgauaacacgugcauggaaagugucaaaaaugggacuuaugacuacccaaaauacucagaggaagcaaaauuaaacagagaagaaauagaugggguaaagcuggaaucaacaaggauuuaccagauuuuggcgaucuauucaacugucgccaguucauugguacugguagucucccugggggcaaucaguuucuggaugugcucuaaugggucucuacaguguagaauauguauuuaa

SEQ ID NO: 38129 - RNA, 1701 nt, Artificial Sequence
  derived and/or modified CDS sequence (wt) from hemagglutinin__InfluenzaA__ADO14362
augaaggcaauacuaguaguucugcuauauacauuugcaaccgcaaaugcagacacauuauguauagguuaucaugcgaacaauucaacagacacuguagacacaguauuagaaaagaauguaacaguaacacacucuguuaaccuucuagaagacaagcauaacgggaaacuaugcaaacuaagagggguagccccauugcauuuggguaaauguaacauugcuggcuggauccugggaaauccagagugugaaucacucuccacagcaagcucaugguccuacauuguggaaacaucuaguucagacaaugggacguguuacccaggagauuucaucgauuaugaggagcuaagagagcaauugagcucagugucaucauuugaaagguuugagauauuccccaagacaaguucauggcccaaucaugacucgaacaaagguguaacggcagcauguccucaugcuggagcaaaaagcuucuacaaaaauuuaauauggcuaguuaaaaaaggaaauucauacccaaagcucagcaaguccuacauuaaugauaaagggaaagaaguccucgugcuauggggcauucaccauccaucuaauagugcugaccaacaaagucucuaucagaaugcagaugcauauguuuuuguggggacaucaagauacagcaagaaguucaagccggaaauagcaauaagacccaaagugagggaucaagaagggagaaugaacuauuacuggacacuaguagagccgggagacaaaauaacauucgaagcaacuggaaaucuagugguaccgagauaugcauucgcaauggaaagaaaugcuggaucugguauuaucauuucagauacaccaguccacgauugcaauacaacuugucagacacccaagggugcuauaaacaccagccucccauuucagaauauacauccgaucacaauuggaaaguguccaaaauauguaaaaagcacaaaauugagacuggccacaggauugaggaaugucccgucuauucaaucuagaggccuauuuggggccauugccgguuucauugaagggggguggacagggaugguagauggaugguacgguuaucaccaucaaaaugagcaggggucaggauaugcagccgaccugaagagcacacagaaugccauugacgagauuacuaacaaaguaaauucuguuauugaaaagaugaauacacaguucacagcaguagguaaagaguucaaccaccuggaaaaaagaauagagaauuuaaauaaaaaaguugaugaugguuuccuggacauuuggacuuacaaugccgaacuguugguucuauuggaaaaugaaagaacuuuggacuaccacgauucaaaugugaagaacuuauaugaaaagguaagaagccaguuaaaaaacaaugccaaggaaauuggaaacggcugcuuugaauuuuaccacaaaugcgauaacacgugcauggaaagugucaaaaacgggacuuaugacuacccaaaauacucagaggaagcaaaauuaaacagagaagaaauagaugggguaaagcuggaaucaacaaggauuuaccagauuuuggcgaucuauucaacugucgccaguucauugguacugguagucucccugggggcaaucaguuucuggaugugcucuaaugggucucuacaguguagaauauguauuuaa

SEQ ID NO: 38130 - RNA, 1683 nt, Artificial Sequence
  derived and/or modified CDS sequence (wt) from hemagglutinin__InfluenzaA__ADO21015
auggaaguaguaucacuaauaacuauacuacuauuaguaacaguaagcaaugcagauaaaaucugcaucggcuaccaaucaacaaacuccacagaaacuguagacacgcuaacagaaaacaauguuccuguggcacaugccaaagaauugcuccacacagagcacaaugggaugcuuugugcaacaaaucugggacauccucuuauucuagacaccuguaccauugaaggacuaaucuauggcaacccuucuugugaucuacuguugggaggaagagaaugguccuacaucgucgaaagaccaucggcuguuaauggauuguguuaccccgggaauguagaaaaccuagaagaacuacggucacuuuuuaguucugcuaguucuuaccaaagaauccagaucuuuccaggcacaaucuggaaugugucuuacggugggacaagcaaagcauguucagauucauucuacaaaagcaugagaugguugacucaaaagaacaacgcuuacccuauucaagacgcccaauacacaaauaauagagggaagaacauucuuuucauguggggcauaaaucacccacccaccgauacuacgcagacaaaucuguacacaaggacugacacaacaacaaguguggcaacagaagauauaaauaggaccuucaaaccauugauagggccaaggccucuugucaauggucagcagggaagaauugauuauuauuggucgguauugaaaccaggucagacauugcgaguaagauccaaugggaaucuaaucgcuccaugguauggacacauucuuucaggagagagccacggaagaauccugaagacugauuugaacagugguaacuguguugugcaaugucagacagaaagagguggcuuaaauacuacauugccauuccacaauguaaguaaguaugcauuugggaacugcccaaaauauguuggaguaaagagucucaaauuggcaguuggucugaggaaugugccugcuagaucaaguagaggacuauucggggccauagcuggauucauagagggagguuggucagggcuagucgcugguugguauggguuccagcauucaaaugaucaagggguugguauggcagcagauagagacucaacucaaaaggcaauugacaaaauaacauccaaagugaauaauauagucgauaaaaugaacaaacaguaugaaauuauugaucaugaauucagcgagguugaaacuagacucaacaugaucaauaauaagauugaugaccaaauucaagacauaugggcauauaacgcagaauugcuagugcugcuugaaaaccagaaaacacucgaugagcaugaugcgaauguaaacaaucuauacaauaaagugaagagggcauuggguuccaaugcaguggaagaugggaaaggauguuucgagcuauaccauaaaugugaugaccagugcauggagacaauucggaacgggaccuacaacaggagaaaguauaaagaggaaucaagacuagaaagacagaaaauagaaggggucaagcuggaaucugaaggaacuuacaaaauccucaccauuuauucgacugucgccucaucucuugugauugcaaugggguuugcugccuucuuguucugggccauguccaauggaucuugcagaugcaacauuuguauauaa

SEQ ID NO: 38131 - RNA, 1683 nt, Artificial Sequence
  derived and/or modified CDS sequence (wt) from hemagglutinin__InfluenzaA__ADO21026
auggaaguaguaucacuaauaacuauacuacuauuaguaacaguaagcaaugcagauaaaaucugcaucggcuaccaaucaacaaacuccacagaaacuguagacacgcuaacagaaaacaauguuccuguggcacaugccaaagaauugcuccacacagagcacaaugggaugcuuugugcaacaaaucugggacauccucuuauucuagacaccuguaccauugaaggacuaaucuauggcaacccuucuugugaucuacuguugggaggaagagaaugguccuacaucgucgaaagaccaucggcuguuaauggauuguguuaccccgggaauguagaaaaccuagaagaacuacggucacuuuuuaguucugcuaguucuuaccaaagaauccagaucuuuccaggcacaaucuggaaugugucuuacggugggacaagcaaagcauguucagauucauucuacaaaagcaugagaugguugacucaaaagaacaacgcuuacccuauucaagacgcccaauacacaaauaauagagggaagaacauucuuuucauguggggcauaaaucacccacccaccgauacuacgcagacaaaucuguacacaaggacugacacaacaacaaguguggcaacagaagauauaaauaggaccuucaauccauugauagggccaaggccucuugucaauggucagcagggaagaauugauuauuauuggucgguauugaaaccaggucagacauugcgaguaagauccaaugggaaucuaaucgcuccaugguauggacacauucuuucaggagagagccacggaagaauccugaagacugauuugaacagugguaacuguguugugcaaugucagacagaaagagguggcuuaaauacuacauugccauuccacaauguaaguaaguaugcauuugggaacugcccaaaauauguuggaguaaagagucucaaauuggcaguuggucugaggaaugugccugcuagaucaaguagaggacuauucggggccauagcuggauucauagagggagguuggucagggcuagucgcugguugguauggguuccagcauucaaaugaucaagggguugguauggcagcagauagagacucaacucaaaaggcaauugacaaaauaacauccaaagugaauaauauagucgauaaaaugaacaaacaguaugaaauuauugaucaugaauucagcgagguugaaacuagacucaacaucaucaauaauaagauugaugaccaaauucaagacauaugggcauauaacgcagaauugcuagugcugcuugaaaaccagaaaacacucgaugagcaugaugcgaauguaaacaaucuauacaauaaagugaagagggcauuggguuccaaugcaguggaagaugggaaaggauguuucgagcuauaccauaaaugugaugaccagugcauggagacaauucggaacgggaccuacaacaggagaaaguauaaagaggaaucaagacuagaaagacagaaaauagaaggggucaagcuggaaucugaaggaacuuacaaaauccucaccauuuauucgacugucgccucaucucuugugauugcaaugggguuugcugccuucuuguucugggccauguccaauggaucuugcagaugcaacauuuguauauaa

SEQ ID NO: 38132 - RNA, 1683 nt, Artificial Sequence
  derived and/or modified CDS sequence (wt) from hemagglutinin__InfluenzaA__ADO21037
auggaaguaguaucacuaauaacuauacuacuauuaguaacaguaagcaaugcagauaaaaucugcaucggcuaccaaucaacaaacuccacagaaacuguagacacgcuaacagaaaacaauguuccuguggcacaugccaaagaauugcuccacacagagcacaaugggaugcuuugugcaacaaaucugggacauccucuuauucuagacaccuguaccauugaaggacuaaucuauggcaacccuucuugugaucuacuguugggaggaagagaaugguccuacaucgucgaaagaccaucggcuguuaauggauuguguuaccccgggaauguagaaaaccuagaagaacuacggucacuuuuuaguucugcuaguucuuaccaaagaauccagaucuuuccaggcacaaucuggaaugugucuuacggugggacaagcaaagcauguucagauucauucuacaaaagcaugagaugguugacucaaaagaacaacgcuuacccuauucaagacgcccaauacacaaauaauagagggaagaacauucuuuucauguggggcauaaaucacccacccaccgauacuacgcagacaaaucuguacacaaggacugacacaacaacaaguguggcaacagaagauauaaauaggaccuucaaaccauacauagggccaaggccucuugucaauggucagcagggaagaauugauuauuauuggucgguauugaaaccaggucagacauugcgaguaagauccaaugggaaucuaaucgcuccaugguauggacacauucuuucaggagagagccacggaagaauccugaagacugauuugaacagugguaacuguguugugcaaugucagacagaaagagguggcuuaaauacuacauugccauuccacaauguaaguaaguaugcauuugggaacugcccaaaauauguuggaguaaagagucucaaauuggcaguuggucugaggaaugugccugcuagaucaaguagaggacuauucggggccauagcuggauucauagagggagguuggucagggcuagucgcugguugguauggguuccagcauucaaaugaucaagggguugguauggcagcagauagagacuuaacucaaaaggcaauugacaaaauaacauccaaagugaauaauauagucgauaaaaugaacaaacaguaugaaauuauugaucaugaauucagcgagguugaaacuagacucaacaugaucaauaauaagauugaugaccaaauucaagacauaugggcauauaacgcagaauugcuagugcugcuugaaaaccagaaaacacucgaugagcaugaugcgaauguaaacaaucuauacaauaaagugaagagggcauuggguuccaaugcaguggaagaugggaaaggauguuucgagcuauaccauaaaugugaugaccagugcauggagacaauucggaacgggaccuacaacaggagaaaguauaaagaggaaucaagacuagaaagacagaaaauagaaggggucaagcuggaaucugaaggaacuuacaaaauccucaccauuuauucgacugucgccucaucucuugugauugcaaugggguuugcugccuucuuguucugggccauguccaauggaucuugcagaugcaacauuuguauauaa

SEQ ID NO: 38133 - RNA, 1683 nt, Artificial Sequence
  derived and/or modified CDS sequence (wt) from hemagglutinin__InfluenzaA__ADO21048
auggaaguaguaucacuaauaacuauacuacuauuaguaacaguaagcaaugcagauaaaaucugcaucggcuaccaaucaacaaacuccacagaaacuguagacacgcuaacagaaaacaauguuccuguggcacaugccaaagaauugcuccacacagagcacaaugggaugcuuugugcaacaaaucugggacauccucuuauucuagacaccuguaccauugaaggacuaaucuauggcaacccuucuugugaucuacuguugggaggaagagaaugguccuacaucgucgaaagaccaucggcuguuaauggauuguguuaccccgggaauguagaaaaccuagaagaacuacggucacuuuuuaguucugcuaguucuuaccaaagaauccagaucuuuccaggcacaaucuggaaugugucuuacggugggacaagcaaagcauguucagauucauucuacaaaagcaugagaugguugacucaaaagaacaacgcuuacccuauucaagacgcccaauacacaaauaauagagggaagaacauucauuucauguggggcauaaaucacccacccaccgauacuacgcagacaaaucuguacacaaggacugacacaacaacaaguguggcaacagaagauauaaauaggaccuucaaaccauugauagggccaaggccucuugucaauggucagcagggaagaauugauuauuauuggucgguauugaaaccaggucagacauugcgaguaagauccaaugggaaucuaaucgcuccaugguauggacacauucuuucaggagagagccacggaagaauccugaagacugauuugaacagugguaacuguguugugcaaugucagacagaaagagguggcuuaaauacuacauugccauuccacaauguaaguaaguaugcauuugggaacugcccaaaauauguuggaguaaagagucucaaauuggcaguuggucugaggaaugugccugcuagaucaaguagaggacuauucggggccauagcuggauucauagagggagguuggucagggcuagucgcugguugguauggguuccagcauucaaaugaucaagggguugguauggcagcagauagagucucaacucaaaaggcaauugacaaaauaacauccaaagugaauaauauagucgauaaaaugaacaaacaguaugaaauuauugaucaugaauucagcgagguugaaacuagacucaacaugaucaauaauaagauugaugaccaaauucaagacauaugggcauauaacgcagaauugcuagugcugcuugaaaaccagaaaacacucgaugagcaugaugcgaauguaaacaaucuauacaauaaagugaagagggcauuggguuccaaugcaguggaagaugggaaaggauguuucgagcuauaccauaaaugugaugaccagugcauggagacaauucggaacgggaccuacaacaggagaaaguauaaagaggaaucaagacuagaaagacagaaaauagaaggggucaagcuggaaucugaaggaacuuacaaaauccucaccauuuauucgacugucgccucaucucuugugauugcaaugggguuugcugccuucuuguucugggccauguccaauggaucuugcagaugcaacauuuguauauaa

SEQ ID NO: 38134 - RNA, 1701 nt, Artificial Sequence
  derived and/or modified CDS sequence (wt) from hemagglutinin__InfluenzaA__ADO25092
augaaggcaauacuaguaguucugcuauauacauuugcaaccgcaaaugcagacacauuauguauagguuaucaugcgaacaauucaacagacacuguagacacaguacuagaaaagaauguaacaguaacacacucuguuaaccuucuagaagacaagcauaacgggaaacuaugcaaacuaagagggguagccccauugcauuuggguaaauguaacauugcuggcuggauccuggggaauccagagugugaaucacucuccacagcaagcucaugguccuacauuguggaaacaucuaguucagacaauggaacguguuacccaggagauuucaucgauuaugaggagcuaagagagcaauugagcucagugucaucauuugaaagguuugagauauuccccaagacaaguucauggcccaaucaugacucgaacaaagguguaacggcagcauguccucaugcuggagcaaaaagcuucuacaaaaauuuaauauggcuaguuaaaaaaggaaauucauacccaaagcucagcaacuccuacauuaaugauaaagggaaagaaguccucgugcuauggggcauucaccauccaucuacuagugcugaccaacaaagucucuaucagaaugcagaugcauauguuuuuguggggacaucaagauacagcaagaaguucaagccggaaauagcaauaagacccaaagugagggaucaagaagggagaaugaacuauuacuggacacuaguagagccgggagacaaaauaacauucgaagcaacuggaaaucuagugguaccgagauaugcauucgcaauggaaagaaaugcuggaucugguauuaucauuucagauacaccagcccacgauugcaauacaacuugucagacacccaagggugcuauaaacaccagccucccauuucagaauauacauccgaucacaauuggaaaauguccaaaauauguaaaaagcacaaaauugagacuggccacaggauugaggaaugucccgucuauucaaucuagaggccuauuuggggccauugccgguuucauugaagggggguggacagggaugguagauggaugguacgguuaucaccaucaaaaugagcaggggucaggauaugcagccgaccugaagagcacacagaaugccauugacgagauuacuaacaaaguaaauucuguuauugaaaagaugaauacacaguucacagcaguagguaaagaguucaaccaccuggaaaaaagaauagagaauuuaaauaaaaaaguugaugaugguuuccuggacauuuggacuuacaaugccgaacuguugguucuauuggaaaaugaaagaacuuuggacuaccacgauucaaaugugaagaacuuauaugaaaagguaagaagccaguuaaaaaacaaugccaaggaaauuggaaacggcugcuuugaauuuuaccacaaaugcgauaacacgugcauggaaagugucaaaaaugggacuuaugacuacccaaaauacucagaggaagcaaaauuaaacagagaagaaauagaugggguaaagcuggaaucaacaaggauuuaccagauuuuggcgaucuauucaacugucgccaguucauugguacugguagucucccugggggcaaucaguuucuggaugugcucuaaugggucucuacaguguagaauauguauuuaa

SEQ ID NO: 38135 - RNA, 1701 nt, Artificial Sequence
  derived and/or modified CDS sequence (wt) from hemagglutinin__InfluenzaA__ADO25112
augaaggcaauacuaguaguucugcuauauacauuugcaaccgcaaaugcagacacauuauguauagguuaucaugcgaacaauucaacagacacuguagacacaguacuagaaaagaauguaacaguaacacacucuguuaaccuucuagaagacaagcauaacgggaaacuaugcaaacuaagagggguagccccauugcauuuggguaaauguaacauugcuggcuggauccugggaaauccagagugugaaucacucuccacagcaagcucaugguccuacauuguggaaacaucuaguucagacaauggaacguguuacccaggagauuucaucgauuaugaggagcuaagagagcaauugagcucagugucaucauuugaaagguuugagauauuccccaagacaaguucauggcccaaucaugacucgaacaaagguguaacggcagcauguccucaugcuggagcaaaaagcuucuacaaaaauuuaauauggcuaguuaaaaaaggaaauucauacccaaagcucagcaaguccuacauuaaugauaaagggaaagaaguccucgugcuauggggcauucaccauccaucuacuaguacugaccaacaaagucucuaucagaaugcagaugcauauguuuuuguggggacaucaagauacagcaagaaguucaagccggaaauagcaauaagacccaaagugagggaucaagaagggagaaugaacuauuacuggacacuaguagagccgggagacaaaauaacauucgaagcaacuggaaaucuagugguaccgagauaugcauucgcaauggaaagaaaugcuggaucugguauuaucauuucagauacaccaguccacgauugcaauacaacuugucagacacccaagggugcuauaaacaccagccucccauuucagaauauacauccgaucacaauuggaaaauguccaaaauauguaaaaagcacaaaauugagacuggccacaggauugaggaaugucccgucuauucaaucuagaggccuauuuggggccauugccgguuucauugaagggggguggacagggaugguagauggaugguacgguuaucaccaucaaaaugagcaggggucaggauaugcagccgaccugaagagcacacagaaugccauugacaagauuacuaacaaaguaaauucuguuauugaaaagaugaauacacaguucacagcaguagguaaagaguucaaccaccuggaaaaaagaauagagaauuuaaauaaaaaaguugaugaugguuuccuggacauuuggacuuacaaugccgaacuguugguucuauuggaaaaugaaagaacuuuggacuaccacgauucaaaugugaagaacuuauaugaaaagguaagaagccaguuaaaaaacaaugccaaggaaauuggaaacggcugcuuugaauuuuaccacaaaugcgauaacacgugcauggaaagugucaaaaaugggacuuaugacuacccaaaauacucagaggaagcaaaauuaaacagagaagaaauagaugggguaaagcuggaaucaacaaggauuuaccagauuuuggcgaucuauucaacugucgccaguucauugguacugguagucucccugggggcaaucaguuucuggaugugcucuaaugggucucuacaguguagaauauguauuuaa

SEQ ID NO: 38136 - RNA, 1701 nt, Artificial Sequence; identical to SEQ ID NO: 38135
  derived and/or modified CDS sequence (wt) from hemagglutinin__InfluenzaA__ADO25122

SEQ ID NO: 38137 - RNA, 1701 nt, Artificial Sequence
  derived and/or modified CDS sequence (wt) from hemagglutinin__InfluenzaA__ADO25132
augaaugcaauacuaguaguucugcuauauacauuugcaaccgcaaaugcagacacauuauguauagguuaucaugcgaacaauucaacagacacuguagacacauuacuagaaaagaauguaacaguaacacacucuguuaaccuucuagaagacaagcauaacgggaaacuaugcaaacuaagagggguagccccauugcauuuggguaaauguaacauugcuggcuggauccugggaaauccagagugugaaucacucuccacagcaagcucaugguccuacauuguggaaacaucuaguucagacaauggaacguguuacccaggagauuucaucgauuaugaggagcuaagagagcaauugagcucagugucaucauuugaaagguuugagauauuccccaagacaaguucauggcccaaucaugacucgaacaaagguguaacggcagcauguccucaugcuggagcaaaaagcuucuacaaaaauuuaauauggcuaguuaaaaaaggaaauucauacccaaagcucagcaaauccuacauuaaugauaaagggaaagaaguccucgugcuauggggcauucaccauccaucuacuagugcugaccaacaaagucucuaucagaaugcagaugcauauguuuuuguggggacaucaagauacagcaagaaguucaagccggaaauagcaauaagacccaaagugagggaucaagaagggagaaugaacuauuacuggacacuaguagagccgggagacaaaauaacauucgaagcaacuggaaaucuagugguaccgagauaugcauucgcaauggaaagaaaugcuggaucugauauuaucauuucagauacaccaguccacgauugcaauacaacuugucagacacccaagggugcuauaaacaccagccucccauuucagaauauacauccgaucacaauuggaaaauguccaaaauauguaaaaagcacaaaauugagacuggccacaggauugaggaaugucccgucuauucaaucuagaggccuauuuggggccauugccgguuucauugaagggggguggacagggaugguagauggaugguacgguuaucaccaucaaaaugagcaggggucaggauaugcagccgaccugaagagcacacagaaugccauugacgagauuacuaacaaaauaaauucuguuauugaaaagaugaauacacaguucacagcaguagguaaagaguucaaccaccuggaaaaaagaauagagaauuuaaauaaaaaaguugaugaugguuuccuggacauuuggacuuacaaugccgaacuguugguucuauuggaaaaugaaagaacuuuggacuaccacgauucaaaugugaagaacuuauaugaaaagguaagaagccaguuaaaaaacaaugccaaggaaauuggaaacggcugcuuugaauuuuaccacaaaugcgauaacacgugcauggaaagugucaaaaaugggacuuaugacuacccaaaauacucagaggaagcaaaauuaaacagagaagaaauagaugggguaaagcuggaaucaacaaggauuuaccagauuuuggcgaucuauucaacugucgccaguucauugguacugguagucucccugggggcaaucaguuucuggaugugcucuaaugggucucuacaguguagaauauguauuuaa

SEQ ID NO: 38138 - RNA, 1701 nt, Artificial Sequence; identical to SEQ ID NO: 37498
  derived and/or modified CDS sequence (wt) from hemagglutinin__InfluenzaA__ADO25142

SEQ ID NO: 38139 - RNA, 1701 nt, Artificial Sequence
  derived and/or modified CDS sequence (wt) from hemagglutinin__InfluenzaA__ADO25152
augaaggcaauacuaguaguucugcuauauacauuugcagccgcaaaugcagacacauuauguauagguuaucaugcgaacaauucaacagacacuguagacacaguacuagaaaagaauguaacaguaacacacucuguuaaccuucuagaagacaagcauaacgggaaacuaugcaaacuaagagggguagccccauugcauuuggguaaauguaacauugcuggcuggauccugggaaauccagagugugaaucacucuccacagcaagcucaugguccuacauuguggaaacaucuaguucagacaauggaacguguuacccaggagauuucaucaauuaugaggagcuaagagagcaauugagcucagugucauuauuugaaagguuugagauauuccccaagacaaguucauggcccaaucaugacucgaacaaagguguaacggcagcauguccucaugcuggagcaaaaagcuucuacaaaaauuuaauauggcuaguuaaaaaaggaaauucauacccaaagcucagcaaauccuacauuaaugauaaagggaaagaaguccucgugcuauggggcauucaccauccaucuacuagugcugaccaacaaagucucuaucagaaugcagaugcauauguuuuuguggggacaucaagauacagcaagaaguucaagccggaaauagcaauaagacccaaagugagggaucaagaagggagaaugaacuauuacuggacacuaguagagccgggagacaaaauaacauucgaagcaacuggaaaucuagugguaccgagauaugcauucgcaauggaaagaaaugcuggaucugguauuaucaucucagauacaccaguccacgauugcaauacaacuugucagacacccaagggugcuauaaacaccagccucccauuucagaauauacauccgaucacaauuggaaaauguccaaaauauguaaaaagcacaaaauugagacuggccacaggauugaggaaugucccgucuauucaaucuagaggccuauuuggggccauugccgguuucauugaagggggguggacagggaugguagauggaugguacgguuaucaccaucaaaaugagcaggggucaggauaugcagccgaccugaagagcacacagaaugccauugacaagauuacuaacaaaguaaauucuguuauugaaaagaugaauacacaguucacagcaguagguaaagaguucaaccaccuggaaaaaagaauagagaauuuaaauaaaaaaguugaugaugguuuccuggacauuuggacuuacaaugccgaacuguugguucuauuggaaaaugaaagaacuuuggacuaccacgauucaaaugugaagaaccuauaugaaaagguaagaagccaguuaaaaaacaaugccaaggaaauuggaaacggcugcuuugaauuuuaccacaaaugcgauaacacgugcauggaaagugucaaaaaugggacuuaugacuacccaaaauacucagaggaagcaaaauuaaacagagaagaaauagaugggguaaagcuggaaucaacaaggauuuaccagauuuuggcgaucuauucaacugucgccaguucauugguacugguagucucccugggggcaaucaguuucuggaugugcucuaaugggucucuacaguguagaauauguauuuaa

SEQ ID NO: 38140 - RNA, 1701 nt, Artificial Sequence
  derived and/or modified CDS sequence (wt) from hemagglutinin__InfluenzaA__ADO25162
augaaggcaauacuaguaguucugcuauauacauuugcaaccgcaaaugcagacacauuauguauagguuaucaugcgaacaauucaacagacacuguagacacaguacuagaaaagaauguaacaguaacacacucuguuaaccuucuagaagacaagcauaacgggaaacuaugcaaacuaagagggguagccccauugcauuuggguaaauguaacauugcuggcuggauccugggaaauccagagugugaaucacucuccacagcaagcucaugguccuacauuguggaaacaucuaguucagacaauggaacguguuacccaggagauuucaucaauuaugaggagcuaagagagcaauugagcucagugucaucauuugaaagguuugagauauuccccaagacaaguucauggcccaaucaugacucgaacaaagguguaacggcagcauguccucaugcuggagcaaaaagcuucuacaaaaauuuaauauggcuaguuaaaaaaggaaauucauacccaaagcucagcaaauccuacauuaaugauaaagggaaagaaguccucgugcuauggggcauucaccauccaucuacuagugcugaccaacaaagucucuaucagaaugcagaugcauauguuuuuguggggacaucaagauacagcaagaaguucaagccggaaauagcaauaagacccaaagugagggaucaagaagggagaaugaacuauuacuggacacuaguagaaccgggagacaaaauaacauucgaagcaacuggaaaucuagugguaccgagauaugcauucgcaauggaaagaaaugcuggaucugguauuaucaucucagauacaccaguccacgauugcaauacaacuugucagacacccaagggugcuauaaacaccagccucccauuucagaauauacauccgaucacaauuggaaaauguccaaaauauguaaaaagcacaaaauugagacuggccacaggauugaggaaugucccgucuauucaaucuagaggccuauuuggggccauugccgguuucauugaagggggguggacagggaugguagauggaugguacgguuaucaccaucaaaaugagcaggggucaggauaugcagccgaccugaagagcacacagaaugccauugacaagauuacuaacaaaguaaauucuguuauugaaaagaugaauacacaguucacagcaguagguaaagaguucaaccaccuggaaaaaagaauagagaauuuaaauaaaaaaguugaugaugguuuccuggacauuuggacuuacaaugccgaacuguugguucuauuggaaaaugaaagaacuuuggacuaccacgauucaaaugugaagaacuuauaugaaaagguaagaagccaguuaaaaaacaaugccaaggaaauuggaaacggcugcuuugaauuuuaccacaaaugcgauaacacgugcauggaaagugucaaaaaugggacuuaugacuacccaaaauacucagaggaagcaaaauuaaacagagaagaaauagaugggguaaagcuggaaucaacaaggauuuaccagauuuuggcgaucuauucaacugucgccaguucauugguacugguagucucccugggggcaaucaguuucuggaugugcucuaaugggucucuacaguguagaauauguauuuaa

SEQ ID NO: 38141 - RNA, 1701 nt, Artificial Sequence; identical to SEQ ID NO: 36239
  derived and/or modified CDS sequence (wt) from hemagglutinin__InfluenzaA__ADO25172

SEQ ID NO: 38142 - RNA, 1701 nt, Artificial Sequence; identical to SEQ ID NO: 36239
  derived and/or modified CDS sequence (wt) from hemagglutinin__InfluenzaA__ADO25182

SEQ ID NO: 38143 - RNA, 1701 nt, Artificial Sequence; identical to SEQ ID NO: 36857
  derived and/or modified CDS sequence (wt) from hemagglutinin__InfluenzaA__ADO25192

SEQ ID NO: 38144 - RNA, 1701 nt, Artificial Sequence
  derived and/or modified CDS sequence (wt) from hemagglutinin__InfluenzaA__ADO25202
augaaggcaauacuaguaguucugcuauauacauuugcaaccgcaaaugcagacacauuauguauagguuaucaugcgaacaauucaacagacacuguagacacaguacuagaaaagaauguaacaguaacacacucuguuaaccuucuagaagacaagcauaacgggaaacuaugcaaacuaagagggguagccccauugcauuuggguaaauguaacauugcuggcuggauccugggaaauccagagugugaaucacucuccacagcaagcucaugguccuacauuguggaaacaucuaguucagacaauggaacguguuacccaggagauuucaucgauuaugaggagcugagagagcaauugagcucagugucaucauuugaaagguuugagauauuccccaagacaaguucauggcccaaucaugacucaaacaaagguguaacggcagcauguccucaugcuggagcaaaaagcuucuacaaaaauuuaauauggcuaguuaaaaaaggaaauucauacccaaagcucagcaaauccuacauuaaugauaaagggaaagaaguccucgugcuauggggcauucaccauccaucuacuagugcugaccaacaaagucuauaucagaaugcagaugcauauguuuuuguggggacaucaagauacagcaagaaguucaagccggaaauagcaauaagacccaaagugagggaucaagaagggagaaugaacuauuacuggacacuaguagagccgggagacaaaauaacauucgaagcaacuggaaaucuagugguaccgagauaugcauucgcaauggaaagaaaugcuggaucugguauuaucauuucagauacaccaguccacgauugcaauacaacuugucagacacccaagggugcuauaaacaccagccucccauuucagaauauacauccgaucacaauuggaaaauguccaaaauauguaaaaagcacaaaauugagacuggccacaggauugaggaaugucccgucuauucaaucuagaggccuauuuggggccauugccgguuucauugaagggggguggacagggaugguagauggaugguacgguuaucaccaucaaaaugagcaggggucaggauaugcagccgaccugaagagcacacagaaugccauugacgagauuacuaacaaaguaaauucuguuauugaaaagaugaauacacaguucacagcaguagguaaagaguucaaccaccuggaaaaaagaauagagaauuuaaauaaaaaaguugaugaugguuuccuggacauuuggacuuacaaugccgaacuguugguucuauuggaaaaugaaagaacuuuggacuaccacgauucaaaugugaagaacuuauaugaaaagguaagaagccaguuaaaaaacaaugccaaggaaauuggaaacggcugcuuugaauuuuaccacaaaugcgauaacacgugcauggaaagugucaaaaaugggacuuaugacuacccaaaauacucagaggaagcaaaauuaaacagagaagaaauagaugggguaaagcuggaaucaacaaggauuuaccagauuuuggcgaucuauucaacugucgccaguucauugguacugguagucucccugggggcaaucaguuucuggaugugcucuaaugggucucuacaguguagaauauguauuuaa

SEQ ID NO: 38145 - RNA, 1701 nt, Artificial Sequence
  derived and/or modified CDS sequence (wt) from hemagglutinin__InfluenzaA__ADO25212
augaaggcaauacuaguaguucugcuauauacauuugcaaccgcaaaugcagacacauuauguauagguuaucaugcgaacaauucaacagacacuguagacacaguacuagaaaagaauguaacaguaacacacucuguuaaccuucuagaagacaagcauaacgggaaacuaugcaaacuaagagggguagccccauugcauuuggguaaauguaacauugcuggcuggauccugggaaauccagagugugaaucacucuccacagcaagcucaugguccuacauuguggaaacaucuaguucagacaauggaacguguuacccaggagauuucaucgauuaugaggagcuaagagagcaauugagcucagugucaucauuugaaagauuugagauauuccccaagacaaguucauggcccaaucaugacucgaacaaagguguaacggcagcauguccucaugcuggagcaaaaagcuucuacaaaaauuuaauauggcuaguuaaaaaaggaaauucauacccaaagcucagcaaauccuacaucaaugauaaaaggaaagaaguccucgugcuauggggcauucaccauccaucuacuagugcugaccaacaaagucucuaucagaaugcagauucauauguuuuuguggggacaucaagauacagcaagaaguucaagccggaaauagcaauaagacccaaagugagggaucaagaagggagaaugaacuauuacuggacacuaguagagccgggagacaaaauaacauucgaagcaacuggaaaucuagugguaccgagauaugcauucgcaauggaaagaaaugcuggaucugguauuaucauuucagauacaccaguccacgauugcaauacaacuugucagacacccgagggugcuauaaacaccagccucccauuucagaauauacauccgaucacaauuggaaaauguccaaaauauguaaaaagcacaaaauugagacuggccacaggauugaggaaugucccgucuauucaaucuagaggccuauuuggggccauugccgguuucauugaagggggguggacagggaugguagauggaugguacgguuaucaccaucaaaaugagcaggggucaggauaugcagccgaccugaagagcacacagaaugccauugacgagauuacuaacaaaguaaauucuguuauugaaaagaugaauacacaguucacagcaguagguaaagaguucaaccaccuggaaaaaagaauagagaauuuaaauaaaaaaguugaugaugguuuccuggacauuuggacuuacaaugccgaacuguugguucuauuggaaaaugaaagaacuuuggacuaccacgauucaaaugugaagaacuuauaugaaaagguaagaagccaguuaaaaaacaaugccaaggaaauuggaaacggcugcuuugaauuuuaccacaaaugcgauaacacgugcauggaaagugucaaaaaugggacuuaugacuacccaaaauacucagaggaagcaaaauuaaacagagaagaaauagaugggguaaagcuggaaucaacaaggauuuaccagauuuuggcgaucuauucaacugucgccaguucauugguacugguagucucccugggggcaaucaguuucuggaugugcucuaaugggucucuacaguguagaauauguauuuaa

SEQ ID NO: 38146 - RNA, 1701 nt, Artificial Sequence
  derived and/or modified CDS sequence (wt) from hemagglutinin__InfluenzaA__ADO25222
augaaggcaauacuaguaguucugcuauauacauuugcaaccgcaaaugcagacacauuauguauagguuaucaugcgaacaauucaacagacacuguagacacaguacuagaaaagaauguaacaguaacacacucuguuaaccuucuagaagacaagcauaacgggaaacuaugcaaacuaagagggguagccccauugcauuuggguaaauguaacauugcuggcuggauccugggaaauccagagugugaaucacucuccacagcaagcucaugguccuacauuguggaaacaucuaguucagacaauggaacguguuacccaggagauuucaucgauuaugaggagcuaagagagcaauugagcucagugucaucauuugaaagguuugaaauauuccccaagacaaguucauggcccaaucaugacucgaacaaagguguaacggcagcauguccucaugcuggagcaaagagcuucuauaaaaauuuaauauggcuaguuaaaaaaggaaauucauacccaaagcucaacaaauccuacauuaaugauaaagggaaagaaguccucgugcuauggggcauucaccauccaucuacuagugcugaccaacaaagucucuaucagaaugcagaugcauauguuuuuguggggacaucaagauacagcaagaaguucaagccggaaauagcaauaagacccaaagugagggaucaagaagggagaaugaacuauuacuggacacuaguagagccgggagacaaaauaacauucgaagcaacuggaaaucuagugguaccgagauaugcauucgcaauggaaagaaaugcuggaucugguauuaucauuucagauacaccaguucacgauugcaauacaacuugucagacacccaagggugcuauaaacaccagccucccauuucagaauauacauccgaucacaauuggaaaauguccaaaauauguaaaaagcacaaaauugagacuggccacaggauugaggaaugucccgucuauucaaucuagaggccuauuuggggccauugccgguuucauugaagggggguggacagggaugguagauggaugguacgguuaucaccaucaaaaugagcaggggucaggauaugcagccgaccugaagagcacacagaaugccauugacaagauuacuaacaaaguaaauucuguuauugaaaagaugaauacacaguucacagcaguagguaaagaguucaaccaccuggaaaaaagaauagagaauuuaaauaaaaaaguugaugaugguuuccuggacauuuggacuuacaaugccgaacuguugguucuauuggaaaaugaaagaacuuuggacuaccacgauucaaaugugaagaacuuauaugaaaagguaagaagccaguuaaaaaacaaugccaaggaaauuggaaacggcugcuuugaauuuuaccacaaaugcgauaacacgugcauggaaagugucaaaaaugggacuuaugacuacccaaaauacucagaggaagcaaaauuaaacagagaagaaauagaugggguaaagcuggaaucaacaaggauuuaccagauuuuggcgaucuauucaacugucgccaguucauugguacugguagucucccugggggcaaucaguuucuggaugugcucuaaugggucucuacaguguagaauauguauuuaa

SEQ ID NO: 38147 - RNA, 1701 nt, Artificial Sequence; identical to SEQ ID NO: 37498
  derived and/or modified CDS sequence (wt) from hemagglutinin__InfluenzaA__ADO25232

SEQ ID NO: 38148 - RNA, 1701 nt, Artificial Sequence; identical to SEQ ID NO: 38140
  derived and/or modified CDS sequence (wt) from hemagglutinin__InfluenzaA__ADO25242

SEQ ID NO: 38149 - RNA, 1701 nt, Artificial Sequence
  derived and/or modified CDS sequence (wt) from hemagglutinin__InfluenzaA__ADO25252
augaaggcaauacuaguaguucugcuauauacauuugcaaccgcaaaugcagacacauuauguauagguuaucaugcgaacaauucaacagacacuguagacacaguacuagaaaagaauguaacaguaacacacucuguuaaccuucuagaagacaagcauaacgggaaacuaugcaaacuaagagggguagccccauugcauuuggguaaauguaacauugcuggcuggauccugggaaauccagagugugaaucacucuccacagcaagcucaugguccuacauuguggaaacaucuaguucagacaauggaacguguuacccaggagauuucaucgauuaugaggagcuaagagagcaauugagcucagugucaucauuugaaagguuugagauauuccccaagacaaguucauggcccaaucaugacucgaacaaagguguaacggcagcauguccucaugcuggagcaaaaagcuucuacaaaaauuuaauauggcugguuaaaaaaggaaauucauacccaaagcucagcaaauccuacauuaaugauaaagggaaagaaguccucgugcuauggggcauucaccauccaucuacuagugcugaccaacaaagucucuaucagaaugcagaugcauauguuuuuguggggacaucaagauacagcaagaaguucaagccggaaauagcaauaagacccaaagugagggaucaagaagggagaaugaacuauuacuggacacuaguagagccgggagacaaaauaacauucgaagcaacuggaaaucuagugguaccgagauaugcauucgcaauggaaagaaaugcuggaucugguauuaucauuucagauacaccaguccacgauugcaauacaacuugucagacacccaagggugcuauaaacaccagccucccauuucagaauauacauccgaucacaauuggaaaauguccaaaauauguaaaaagcacaaaauugagacuggccacaggauugaggaaugucccgucuauucaaucuagaggccuauuuggggccauugccgguuucauugaagggggguggacagggaugguagauggaugguacgguuaucaccaucaaaaugagcaggggucaggauaugcagccgaccugaagagcacacagaaugccauugacaagauuacuaacaaaguaaauucuguuauugaaaagaugaauacacaguucacagcaguagguaaagaguucaaccaccuggaaaaaagaauagagaauuuaaauaaaaaaguugaugaugguuuccuggacauuuggacuuacaaugccgaacuguugguucuauuggaaaaugaaagaacuuuggacuaccacgauucaaaugugaagaacuuauaugaaaagguaagaagccaguuaaaaaacaaugccaaggaaauuggaaacgguugcuuugaauuuuaccacaaaugcgauaacacgugcauggaaagugucaaaaaugggacuuaugacuacccaaaauacucagaggaagcaaaauuaaacagagaagaaauagaugggguaaagcuggaaucaacaaggauuuaccagauuuuggcgaucuauucaacugucgccaguucauugguacugauagucucccugggggcaaucaguuucuggaugugcucuaaugggucucuacaguguagaauauguauuuaa

SEQ ID NO: 38150 - RNA, 1701 nt, Artificial Sequence
  derived and/or modified CDS sequence (wt) from hemagglutinin__InfluenzaA__ADO25262
augaaggcaauacuaguaguucugcuauauacauuugcaaccgcaaaugcagacacauuauguauagguuaucaugcgaacaauucaacagacacuguagacacaguacuagaaaagaauguaacaguaacacacucuguuaaccuucuagaagacaagcauaacgggaaacuaugcaaacuaagagggguagccccauugcauuuggguaaauguaacauugcuggcuggauccugggaaauccagagugugaaucacucuccacagcaagcucaugguccuacauuguggaaacaucuaguucagacaauggaacguguuacccaggagauuucaucgauuaugaggagcuaagagagcaauugagcucagugucaucauuugaaagguuugagauauuccccaagacaaguucauggcccaaucaugacucgaacaaagguguaacggcagcauguccucaugcuggagcaaaaagcuucuacaaaaauuuaauauggcuaguuaaaaaaggaaauucauacccaaagcucagcaaguccuacauuaaugauaaagggaaagaaguccucgugcuauggggcauucaccauccaucuacuaguacugaccaacaaagucucuaucagaaugcagaugcauauguuuuuguggggacaucaagauacagcaagaaguucaagccggaaauagcaauaagacccaaagugagggaucaagaagggagaaugaacuauuacuggacacuaguagagccgggagacaaaauaacauucgaagcaacuggaaaucuagugguaccgagauaugcauucgcaauggaaagaaaugcuggaucugguauuaucauuucagauacaccaguccacgauugcaauacaacuugucagacacccaagggugcuauaaacaccagccucccauuucagaauauacauccgaucacaauuggaaaauguccaaaauauguaaaaagcacaaaauugagacuggccacaggauugaggaaugucccgucuauucaaucuagaggccuauuuggggccauugccgguuucauugaagggggguggacagggaugguagauggaugguacgguuaucaccaucaaaaugagcaggggucaggauaugcagccgaccugaagagcacacagaaugccauugacaagauuacuaacaaaguaaauucuguuauugaaaagaugaauacacaguucacagcaguagguaaagaguucaaccaccuggaaaaaagaauagagaauuuaaauaaaaaaguugaugaugguuuccuggacauuuggacuuacaaugccgaacuguugguucuauuggaaaaugaaagaacuuuggacuaccacgauucaaaugugaaaaacuuauaugaaaagguaagaagccaguuaaaaaacaaugccaaggaaauuggaaacggcugcuuugaauuuuaccacaaaugcgauaacacgugcauggaaagugucaaaaaugggacuuaugacuacccaaaauacucagaggaagcaaaauuaaacagagaagaaauagaugggguaaagcuggaaucaacaaggauuuaccagauuuuggcgaucuauucaacugucgccaguucauugguacugguagucucccugggggcaaucaguuucuggaugugcucuaaugggucucuacaguguagaauauguauuuaa

SEQ ID NO: 38151 - RNA, 1701 nt, Artificial Sequence
  derived and/or modified CDS sequence (wt) from hemagglutinin__InfluenzaA__ADO25272
augaaggcaauacuaguaguucugcuauauacauuugcaaccgcaaaugcagacacauuauguauagguuaucaugcgaacaauucaacagacacuguagacacaguacuagaaaagaauguaacaguaacacacucuguuaaccuucuagaagacaagcauaacgggaaacuaugcaaacuaagagggguagccccauugcauuuggguaaauguaacauugcuggcuggauccugggaaauccagagugugaaucacucuccacagcaagcucaugguccuacauuguggaaacaucuaguucagacaauggaacguguuacccaggagauuucaucgauuaugaggagcuaagagagcaauugagcucagugucaucauuugaaagguuugagauguuucccaagacaaguucauggcccaaucaugacucgaacaaagguguaacggcagcauguccucaugcuggaguaaaaagcuucuacaaaaauuuaauauggcuaguuaaaaaaggaaauucauacccaaagcucagcaaauccuacauuaaugauaaagggaaagaaguccucgugcuauggggcauucaccauccaucuacuagugcugaccaacaaagucucuaucagaaugcagaugcauauguuuuuguggggacaucaagauacagcaagaaguucaagccggaaauagcaauaagacccaaagugagggaucaagaagggagaaugaacuauuacuggacacuaguagagccgggagacaaaauaacauucgaagcaacuggaaaucuaguggugccgagauaugcauucgcaauggaaagaaaugcuggaucugguauuaucauuucagauacaccaguccacgauugcaauacaacuugucagacacccaagggugcuauaaacaccagccucccauuucagaauauacauccgaucacaauuggaaaauguccaaaauauguaaaaagcacaaaauugagacuggccacaggauugaggaaugucccgucuauucaaucuagaggccuauuuggggccauugccgguuucauugaagggggguggacagggaugguagauggaugguacgguuaucaccaucaaaaugagcaggggucaggauaugcagccgaccugaagagcacacagaaugccauugacgagauuacuaacaaaguaaauucuguuauugaaaagaugaauacacaguucacagcaguagguaaagaguucaaccaccuggaaaaaagaauagagaauuuaaauaaaaaaguugaugaugguuuccuggacauuuggacuuacaaugccgaacuguugguucuauuggaaaaugaaagaacuuuggacuaccacgauucaaaugugaagaacuuauaugaaaagguaagaagccaguuaaaaaacaaugccaaggaaauuggaaacggcugcuuugaauuuuaccacaaaugcgauaacacgugcauggaaagugucaaaaaugggacuuaugacuacccaaaauacucagaggaagcaaaauuaaacagagaagaaauagaugggguaaagcuggaaucaacaaggauuuaccagauuuuggcgaucuauucaacugucgccaguucauugguacugguagucucccugggggcaaucaguuucuggaugugcucuaaugggucucuacaguguagaauauguauuuaa

SEQ ID NO: 38152 - RNA, 1701 nt, Artificial Sequence; identical to SEQ ID NO: 37498
  derived and/or modified CDS sequence (wt) from hemagglutinin__InfluenzaA__ADO25282

SEQ ID NO: 38153 - RNA, 1698 nt, Artificial Sequence; identical to SEQ ID NO: 34517
  derived and/or modified CDS sequence (wt) from hemagglutinin__InfluenzaA__ADO27622

SEQ ID NO: 38154 - RNA, 1701 nt, Artificial Sequence
  derived and/or modified CDS sequence (wt) from hemagglutinin__InfluenzaA__ADO29887
augaaggcaauacuaguaguucugcuauauacauuugcaaccgcaaaugcagacacauuauguauagguuaucaugcgaacaauucaacagacacuguagacacaguacuagaaaagaauguaacaguaacacacucuguuaaccuucuagaagacaagcauaacgggaaacuaugcaaacuaagagggguagccccauugcauuuggguaaauguaacauugcuggcuggauccugggaaauccagagugugaaucacucuccacagcaagcucaugguccuacauuguggaaacaucuaguucagacaauggaacguguuacccaggagauuucaucgauuaugaggagcuaagagagcaauugagcucagugucaucauuugaaagguuugagauauuccccaagacaaguucauggcccaaucaugacucgaacaaagguguaacggcagcauguccucaugcuggagcaaaaagcuucuacaaaaauuuaauauggcuaguuaaaaaaggaaauucauacccaaagcucagcaaauccuacauuaaugauaaagggaaagaaguccucgugcuauggggcauucaccauccaucuacuagugcugaccaacaaagucucuaucagaaugcagaugcauauguuuuuguggggacaucaagauacagcaagaaguucaagccggaaauagcaauaagacccaaagugagggaucaagaagggagaaugaacuauuacuggacacuaguagagccgggagacaaaauaacauucgaagcaacuggaaaucuagugguaccgagauaugcauucgcaauggaaagaaaugcuggaucugguauuaucauuucagauacaccaguccacgauugcaauacaacuugucagacacccaagggugcuauaaacaccagccucccauuucagaauauacauccgaucacaauuggaaaauguccaaaauauguaaaaagcacaaaauugagacuggccacaggauugaggaaugucccgucuauucaaucuagaggccuauuuggggccauugccgguuucauugaagggggguggacagggaugguagauggaugguacgguuaucaccaucaaaaugagcaggggucaggauaugcagccgaccugaagagcacacagaaugccaucgacgagauuacuaacaaaguaaauucugucauugaaaagaugaauacacaguucacagcaguagguaaagaguucaaccaccuggaaaaaagaauagagaauuuaaauaaaaagguugaugaugguuuccuggacauuuggacuuacaaugccgaacuguugguucuauuggaaaaugaaagaacuuuggacuaccacgauucaaaugugaagaacuuauaugaaaagguaagaagccaguuaaaaaacaaugccaaggaaauuggaaacggcugcuuugaauuuuaccacaaaugcgauaacacgugcauggaaagugucaaaaaugggacuuaugacuacccaaaauacucagaggaagcaaaauuaaacagagaagaaauagaugggguaaagcuggaaucaacaaggauuuaccagauuuuggcgaucuauucaacugucgccaguucauugguacugguagucucccugggggcaaucaguuucuggauguguucuaaugggucucuacaguguagaauauguauuuaa

SEQ ID NO: 38155 - RNA, 1701 nt, Artificial Sequence
  derived and/or modified CDS sequence (wt) from hemagglutinin__InfluenzaA__ADO29888
augaaggcaauacuaguaguucugcuauauacauuugcaaccgcaaaugcagacacauuauguauagguuaucaugcgaacaauucaacagacacuguagacacaguacuagaaaagaauguaacaguaacacacucuguuaaccuucuagaagacaagcauaacgggaaacuaugcagacuaagagggguagccccauugcauuuggguaaauguaacauugcuggcuggauccugggaaauccagagugugaaucacucuccacagcaagcucaugguccuacauuguggaaacaucuaguucagacaauggaacguguuacccaggagauuucaucgauuaugaggagcuaagagagcaauugagcucagugucaucauuugaaagguuugagauauuccccaagacaaguucauggcccaaucaugacccgaacaaagguguaacggcagcauguccucaugcuggagcaaaaagcuucuacaaaaauuuaauauggcuaguuaaaaaaggaaauucauacccaaagcucagcaaauccuacauuaaugauaaagggaaagaaguccucgugcuauggggcauucaccauccaucuacuagugcugaccaacaaagucucuaucagaaugcagaugcauauguuuuuguggggacaucaagauacagcaagaaguucaagccggaaauagcaauaagacccaaagugagggaucaagaagggagaaugaacuauuacuggacacuaguagagccgggagacaaaauaacauucgaagcaacuggaaaucuagugguaccgagauaugcauucgcaauggaaagaaaugcuggaucugguauuaucauuucagauacaccaguccacgauugcaauacaacuugucagacacccaagggugcuauaaacaccagccucccauuucagaauauacauccgaucacaauuggaaaauguccaaaauauguaaaaagcacaaaauugagacuggccacaggauugaggaaugucccgucuauucaaucuagaggccuauuuggggccauugccgguuucauugaagggggguggacagggaugguagauggaugguacgguuaucaccaucaaaaugagcaggggucaggauaugcagccgaccugaagagcacacagaaugccauugacgagauuacuaacaaaguaaauucuguuauugaaaagaugaauacacaguucacagcaguagguaaagaguucaaccaccuggaaaaaagaauagagaauuuaaauaaaaaaguugaugaugguuuccuggacauuuggacuuacaaugccgaacuguugguucuauuggaaaaugaaagaacuuuggacuaccacgauucaaaugugaagaacuuauaugaaaagguaagaagccaguuaaaaaacaaugccaaggaaauuggaaacggcugcuuugaauuuuaccacaaaugcgauaacacgugcauggaaagugucaaaaaugggacuuaugacuacccaaaauacucagaggaagcaaaauuaaacagagaagaaauagaugggguaaagcuggaaucaacaaggauuuaccagauuuuggcgaucuauucaacugucgccaguucauugguacugguagucucccugggggcaaucaguuucuggaugugcucuaaugggucucuacaguguagaauauguauuuaa

SEQ ID NO: 38156 - RNA, 1701 nt, Artificial Sequence
  derived and/or modified CDS sequence (wt) from hemagglutinin__InfluenzaA__ADO29889
augaaggcaauacuaguaguucugcuauauacauuugcaaccgcaaaugcagacauauuauguauagguuaucaugcgaacaauucaacagacacuguagacacaguacuagaaaagaauguaacaguaacacacucuguuaaccuucuagaagacaagcauaacgggaaacuaugcaaacuaagagggguagccccauugcauuuggguaaauguaacauugcuggcuggauccugggaaauccagagugugaaucuuucuccacaucaagcucaugguccuacauuguggaaacaucuaguucagacaauggaacguguuacccaggagauuucaucgauuaugaggagcuaagagagcaauugagcucagugucaucauuugaaagguuugagauauuccccaagacaaguucauggcccaaucaugacucgaacaaagguguaacggcagcauguccucaugcuggagcaaaaagcuucuacaaaaauuuaauauggcuaguuaaaaaaggaaauucauacccaaagcucagcaaauccuacauuaaugauaaagggaaagaaguccucgugcuauggggcauucaccauccaucuacuagugcugaccaacaaagucucuaucagaaugcagaugcauauguuuuuguggggacaucaagauacagcaagaaguucaagccggaaauagcaauaagacccaaagugagggaucaagaagggagaaugaacuauuacuggacacuaguagagccgggagacaaaauaacauucgaagcaacuggaaaucuagugguaccgagauaugcauucgcaauggaaagaaaugcuggaucugguauuaucauuucagauacaccaguccacgauugcaauacaacuugucagacacccaagggugcuauaaacaccagccucccauuucagaacauacauccgaucacaauuggaaaauguccaaaauauguaaaaagcacaaaauugagacuggccacaggauugaggaaugucccgucuauucaaucuagaggccuauuuggggccauugccgguuucauugaagggggguggacagggaugguagauggaugguacgguuaucaccaucaaaaugagcaggggucaggauaugcagccgaccugaagagcacacagaaugccauugacgagauuacuaacaaaguaaauucuguuauugaaaagaugaauacacaguucacagcaguagguaaagaguucaaucaccuggaaaaaagaauagagaauuuaaauaaaaaaguugaugaugguuuccuggacauuuggacuuacaaugccgaacuguugguucuauuggaaaaugaaagaacuuuggacuaccacgauucaaaugugaagaacuuauaugaaaagguaagaagccaguuaaaaaacaaugccaaggaaauuggaaacggcugcuuugaauuuuaccacaaaugcgauaacacgugcauggaaagugucaaaaaugggacuuaugacuacccaaaauacucagaggaagcaaaauuaaacagagaagaaauagaugggguaaagcuggaaucaacaaggauuuaccagauuuuggcgaucuauucaacugucgccaguucauugguacugguagucucccugggggcaaucaguuucuggaugugcucuaaugggucucuacaguguagaauauguauuuaa

SEQ ID NO: 38157 - RNA, 1701 nt, Artificial Sequence
  derived and/or modified CDS sequence (wt) from hemagglutinin__InfluenzaA__ADO29890
augaaggcaauacuaguaguucugcuauauacauuugcaaccgcaaaggcagacacauuauguauagguuaucaugcgaacaauucagcagacacuguagacacaguacuagaaaagaauguaacaguaacacacucuguuaaccuucuagaagacaagcauaacgggaaacuaugcaaacuaagagggguagccccauugcauuuggguaaauguaacauugcuggcuggauccugggaaauccagagugugaaucacucuccacagcaagcucaugguccuacauuguggaaacaucuaguucagacaauggaacguguuacccaggagauuucaucgauuaugaggagcuaagagagcaauugagcucagugucaucauuugaaagguuugagauauuccccaagacgaguucauggcccaaucaugacccgaacaaagguguaacggcagcauguccucaugcuggagcaaaaagcuucuacaaaaauuuaauauggcuaguuaaaaaaggaaauucauacccaaagcucagcaaauccuacauuaaugauaaagggaaagaaguccucgugcuauggggcauucaccauccaucuacuaguguugaccaacaaagucucuaucagaaugcagaugcauauguuuuuguggggacaucaagauacagcaagaaguucaagccggaaauagcaauaagacccaaagugagggaucaagaagggagaaugaacuauuacuggacacuaguagagccgggagacaaaauaacauucgaagcaacuggaaaucuagugguaccgagauaugcauucgcaauggaaagaaaugcuggaucugguauuaucauuucagauacaccaguccacgauugcaauacaacuugucagacacccaagggugcuauaaacaccagccucccauuucagaauauacauccgaucacaauuggaaaauguccaaaauauguaaaaagcacaaaauugagacuggccacaggauugaggaaugucccgucuauucaaucuagaggccuauuuggggccauugccgguuucauugaagggggguggacagggaugguagauggaugguacgguuaucaccaucaaaaugagcaggggucaggauaugcagccgaccugaagagcacacagaacgccauugacgagauuacuaacaaaguaaauucuguuauugaaaagaugaauacacaguucacagcaguagguaaagaguucaaccaccuggaaaaaagaauagagaauuuaaauaaaaaaguugaugaugguuuccuggacauuuggacuuacaaugccgaacuguugguucuauuggaaaaugaaagaacuuuggacuaccaugauucaaaugugaagaacuuauaugaaaagguaagaagccaguuaaaaaacaaugccaaggaaauuggaaacggcugcuuugaauuuuaccacaaaugcgauaacacgugcauggaaagugucaaaaaugggacuuaugacuacccaaaauacucagaggaagcaaaauuaaacagagaagaaauagauggaguaaagcuggaaucaacaaggauuuaccagauuuuggcgaucuauucaacugucgccaguucauugguacugguagucucccugggggcaaucaguuucuggaugugcucuaaugggucucuacaguguagaauauguauuuaa

SEQ ID NO: 38158 - RNA, 1701 nt, Artificial Sequence
  derived and/or modified CDS sequence (wt) from hemagglutinin__InfluenzaA__ADO29891
augaaggcaauacuaguaguucugcuauauacauuugcaaccgcaaaugcagacacauuauguauagguuaucaugcgaacaauucaacagacacuguagacacaguacuagaaaagaauguaacaguaacacacucuguuaaccuucuagaagacaagcauaacgggaaacuaugcaaacuaagagggguagccccauugcauuuggguaaauguaacauugcuggcuggauccugggaaauccagagugugaaucacucuccacagcaagcucaugguccuacauuguggaaacaucuaguucagacaauggaacguguuacccaggagauuucaucgauuaugaggagcuaagagagcaauugagcucagugucaucauuugaaagguuugagauauuccccaagacaaguucauggcccaaucaugacucgaacaaagguguaacggcagcauguccucaugcuggagcaaaaagcuucuacaaaaauuuaauauggcuaguuaaaaaaggaaauucauacccaaagcucagcaaauccuacauuaaugauaaagggaaagaaguccucgugcuauggggcauucaccauccaucuacuagugcugaccaacaaagucucuaucagaaugcagaugcauauguuuuuguggggacaucaagauacagcaagaaguucaagccggaaauagcaauaagacccaaagugagggaucaagaaggaagaaugaacuauuacuggacacuaguagagccgggagacaaaacaacauucgaagcaacuggaaaucuagugguaccgagauaugcauucgcaauggaaagaaaugcuggaucugguauuaucauuucagauacaccaguccacgauugcaauacaacuugucagacacccaagggugcuauaaacaccagccucccauuucagaauauacauccgaucacaauuggaaaauguccaaaauauguaaaaagcacaaaauugagacuggccacaggauugaggaaugucccgucuauucaaucuagaggccuauuuggggccauugccgguuucauugaagggggguggacagggaugguagauggaugguacgguuaucaccaucaaaaugagcaggggucaggauaugcagccgaccugaagagcacacagaaugccauugacaagauuacuaacaaaguaaauucuguuauugaaaagaugaauacacaguucacagcaguagguaaagaguucaaccaccuggaaaaaagaauagagaauuuaaauaaaaaaguugaugaugguuuccuggacauuuggacuuacaaugccgaacuguugguucuaucggaaaaugaaagaacuuuggacuaccacgauucaaaugugaagaacuuauaugaaaagguaagaagccaguuaaaaaacaaugccaaggaaauuggaaacggcugcuuugaauuuuaccacaaaugcgauaacacgugcauggaaagugucaaaaaugggacuuaugacuacccaaaauacucagaggaagcaaaauuaaacagagaagaaauagaugggguaaagcuggaaucaacaaggauuuaccagauuuuggcgaucuauucaacugucgccaguucauugguacugguagucucccugggggcaaucaguuucuggaugugcucuaaugggucucuacaguguagaauauguauuuaa

SEQ ID NO: 38159 - RNA, 1701 nt, Artificial Sequence
  derived and/or modified CDS sequence (wt) from hemagglutinin__InfluenzaA__ADO29892
augaaggcaauacuaguaguucugcuauauacauuugcaaccgcaaaggcagacacauuauguauagguuaucaugcgaacaauucaacagacacuguagacacaguacuagaaaagaauguaacaguaacacacucuguuaaccuucuagaagacaagcauaacgggaagcuaugcaaacuaagagggguagccccauugcauuuggguaaauguaacauugcuggccggauccugggaaauccagagugugaaucacucuccacagcaagcucaugguccuacauuguggaaacaucuaguucagacaauggaacguguuacccaggagauuucaucgauuaugaggagcuaagagagcaauugagcucagugucaucauuugaaagguuugagauauuccccaagacaaguucauggcccaaucaugacccgaacaaagguguaacggcagcauguccucaugcuggagcaaaaagcuucuacaaaaauuuaauauggcuaguuaaaaaaggaaauucauacccaaagcucagcaaauccuacauuaaugauaaagggaaagaaguccucgugcuauggggcauccaccauccaucuacuaguguugaccaacaaagucucuaucagaaugcagaugcauauguuuuuguggggacaucaagauacagcaagaaguucaagccggaaauagcaauaagacccaaagugagggaucaagaagggagaaugaacuauuacuggacacuaguagagccgggagacaaaauaacauucgaagcaacuggaaaucuagugguaccgagauaugcauucgcaauggaaagaaaugcuggaucugguauuaucauuucagauacaccaguccacgauugcaauacaacuugucagacacccaagggugcuauaaacaccagccucccauuucagaauauacauccgaucacaauugguaaauguccaaaauauguaaaaagcacaaaauugagacuggccacaggauugaggaaugucccgucuauucaaucuagaggccuauuuggggccauugccgguuucauugaagggggguggacagggaugguagauggaugguacgguuaucaccaucaaaaugagcaggggucaggauaugcagccgaccugaagagcacacagaaugccauugacgagauuacuaacaaaguaaauucuguuauugaaaagaugaauacacaguucacagcaguagguaaagaguucaaccaccuggaaaaaagaauagagaauuuaaauaaaaaaguugaugaugguuuccuggacauuuggacuuacaaugccgaacuguugguucuauuggaaaaugaaagaacuuuggacuaccaugauucaaaugugaagaacuuauaugaaaagguaagaagccaguuaaaaaacaaugccaaggaaauuggaaacggcugcuuugaauuuuaccacaaaugcgauaacacgugcauggaaagugucaaaaaugggacuuaugacuacccaaaauacucagaggaagcaaaauuaaacagagaagaaauagauggaguaaagcuggaaucaacaaggauuuaccagauuuuggcgaucuauucaacugucgccaguucauugguacugguagucucccugggggcaaucaguuucuggaugugcucuaaugggucucuacaguguagaauauguauuuaa

SEQ ID NO: 38160 - RNA, 1701 nt, Artificial Sequence
  derived and/or modified CDS sequence (wt) from hemagglutinin__InfluenzaA__ADO29893
augaaggcaauacuaguaguucugcuauauacauuugcaaccgcaaaugcagacacauuauguauagguuaucaugcgaacaauucaacagacacuguagacacaguacuagaaaagaauguaacaguaacacacucuguuaaccuucuagaagacaagcauaacgggaaacuaugcaaacuaagagggguagccccauugcauuuggguaaauguaacauugcuggcuggauccugggaaauccagagugugaaucacucuccacagcaagcucaugguccuacauuguggaaacaucuaguucagacaauggaacguguuacccaggagauuucaucgauuaugaggagcuaagagagcaauugagcucagugucaucauuugaaagguuugagauauuccccaagacaaguucguggcccaaucaugacccgaacaaagguguaacggcagcauguccucaugcuggagcaaaaagcuucuacaaaaauuuaauauggcuaguuaaaaaaggaaauucauacccaaagcucagcaaauccuacauuaaugauaaagggaaagaaguccucgugcuauggggcauucaccauccaucuacuagugcugaccaacaaagucucuaucagaaugcagaugcauauguuuuuguggggacaucaagauacagcaagaaguucaagccggaaauagcaauaagacccaaagugagggaucaagaagggagaaugaacuauuacuggacacuaguagagccgggagacaaaauaacauucgaagcaacuggaaaucuagugguaccgagauaugcauucgcaauggaaagaaaugcuggaucugguauuaucaucucagauacaccaguccacgauugcaauacaacuugucagacacccaagggugcuauaaacaccagccucccauuucagaauauacauccgaucacaauuggaaaauguccaaaauauguaaaaagcacaaaauugagacuggccacaggauugaggaaugucccgucuauucaaucuagaggccuguuuggggccauugccgguuucauugaagggggguggacagggaugguagauggaugguacgguuaucaccaucaaaaugagcaggggucaggauaugcagccgaccugaagagcacacagaaugccauugacgagauuacuaacaaaguaaauucuguuauugaaaagaugaauacacaguucacagcaguagguaaagaguucaaccaccuggaaaaaagaauagagaauuuaaauaaaaaaguugaugaugguuuccuggacauuuggacuuacaaugccgaacuguugguucuauuggaaaaugaaagaacuuuggacuaccacgauucaaaugugaagaacuuauaugaaaagguaagaagccaguuaaaaaacaaugccaaggaaauuggaaacggcugcuuugaauuuuaccacaaaugcgauaacacgugcauggaaagugucaaaaaugggacuuaugacuacccaaaauacucagaggaagcaaaauuaaacagagaagaaauagaugggguaaagcuggaaucaacaaggauuuaccagauuuuggcgaucuauucaacugucgccaguucauugguacuaguagucucccugggggcaaucaguuuuuggaugugcucuaaugggucucuacaguguagaauauguauuuaa

SEQ ID NO: 38161 - RNA, 1701 nt, Artificial Sequence
  derived and/or modified CDS sequence (wt) from hemagglutinin__InfluenzaA__ADO29894
augaaggcaauacuaguaguucugcuauauacauuugcaaccgcaaaugcagacacauuauguauagguuaucaugcgaacaauucaacagacacuguagacacaguacuagaaaugaauguaacaguaacacacucuguuaaccuucuagaagacaagcauaacgggaaacuaugcaaacuaagagggguagccccauugcauuuggguaaauguaacauugcuggcuggauccugggaaauccagagugugaaucauucuccacaucaagcucaugguccuacauuguggaaacaucuaguucagacaauggaacguguuacccaggagauuucaucgauuaugaggagcuaagagagcaauugagcucagugucaucauuugaaagguuugagauauuccccaagacaaguucauggcccaaucaugacucgaacaaagguguaacggcagcauguccucaugcuggagcaaaaagcuucuacaaaaauuuaauauggcuaguuaaaaaaggaaguucauacccaaagcucagcaaauccuacauuaaugauaaagggaaagaaguccucgugcuauggggcauucaccauccaucuacuagugcugaccaacaaagucucuaucagaaugcagaugcauauguuuuuguggggacaucaagauacagcaagaaguucaagccggaaauagcaauaagacccaaagugagggaucaagaagggagaaugaacuauuacuggacacuaguagagccgggagacaaaauaacauucgaagcaacuggaaaucuagugguaccgagauaugcauucgcaauggaaagaaaugcuggaucugguauuaucauuucagauacaccaguccacgauugcaauacaacuugucagacacccaagggugcuauaaacaccagccucccauuucagaauauacauccgaucacaauuggaaaauguccaaaauauguaaaaagcacaaaauuaagacuggccacaggauugaggaaugucccgucuauucaaucuagaggccuauuuggggccauugccgguuucauugaagggggguggacagggaugguagauggaugguacgguuaucaccaucaaaaugagcaggggucaggauaugcagccgaccugaagagcacacagaaugccauugacgagauuacuaacaaaguaaauucuguuauugaaaagaugaauacacaguucacagcaguagguaaagaguucaaccaccuggaaaaaagaauagagaauuuaaauaaaaaaguugaugaugguuuccuggacauuuggacuuacaaugccgaacuguugguucuauuggaaaaugaaagaacuuuggacuaccacgauucaaaugugaagaacuuauaugaaaagguaagaagccaguuaaaaaacaaugccaaggaaauuggaaacggcugcuuugaauuuuaccacaaaugcgauaacacgugcauggaaagugucaaaaaugggacuuaugacuacccaaaauacucagaggaggcaaaauuaaacagagaagaaauagaugggguaaagcuggaaucaacaaggauuuaccagauuuuggcgaucuauucaacugucgccaguucauugguacugguagucucccugggggcaaucaguuucuggaugugcucuaaugggucucuacaguguagaauauguauuuaa

SEQ ID NO: 38162 - RNA, 1701 nt, Artificial Sequence
  derived and/or modified CDS sequence (wt) from hemagglutinin__InfluenzaA__ADO29895
augaaggcaauacuaguagcucugcuauauacauuugcaaccgcaaaugcagacacauuauguauagguuaucaugcgaacaauucaacagacacuguagacacaguacuagaaaagaauguaacaguaacacacucuguuaaccuucuagaagacaagcauaacgggaaacuaugcaaacuaagagggguagccccauugcauuuggguaaauguaacauugcuggcuggauccugggaaauccagagugugaaucauucuccacaucaagcucaugguccuacauuguggaaacaucuaguucagacaauggaacguguuacccaggagauuucaucgauuaugaggagcuaagagagcaauugagcucagugucaucauuugaaagguuugagauauuccccaagacaaguucauggcccaaucaugacucgaacaaagguguaacggcagcauguccucaugcuggagcaaaaagcuucuacaaaaauuuaauauggcuaguuaaaaaaggaaguucauacccaaagcucagcaaauccuacauuaaugauaaagggaaagaaguccucgugcuauggggcauucaccauccaucuacuagugcugaccaacaaagucucuaucagaaugcagaugcauauguuuuuguggggacaucaagauacagcaagaaguucaagccggaaauagcaauaagacccaaagugagggaucaagaagggagaaugaacuauuacuggacacuaguagagccgggagacaaaauaacauucgaagcaacuggaaaucuagugguaccgagauaugcauucgcaauggaaagaaaugcuggaucugguauuaucauuucagauacaccaguccacgauugcaauacaacuugucagacacccaagggugcuauaaacaccagccucccauuucagaauauacauccgaucacaauuggaaaauguccaaaauauguaaaaggcacaaaauuaagacuggccacaggauugaggaaugucccgucuauucaaucuagaggccuauuuggggccauugccgguuucauugaagggggguggacagggaugguagauggaugguacgguuaucaccaucaaaaugagcaggggucaggauaugcagccgaccugaagagcacacagaaugccauugacgagauuacuaacaaaguaaauucuguuauugaaaagaugaauacacaguucacagcaguagguaaagaguucaaccaccuggaaaaaagaauagagaauuuaaauaaaaaaguugaugaugguuuccuggacauuuggacuuacaaugccgaacuguugguucuauuggaaaaugaaagaacuuuggacuaccacgauucaaaugugaagaacuuauaugaaaagguaagaagccaguuaaaaaacaaugccaaggaaauuggaaacggcugcuuugaauuuuaccacaaaugcgauaacacgugcauggaacgugucaaaaaugggacuuaugacuacccaaaauacucagaggaagcaaaauuaaacagagaagaaauagaugggguaaagcuggaaucaacaaggauuuaccagauuuuggcgaucuauucaacugucgccaguucauugguacugguagucucccugggggcaaucaguuucuggaugugcucuaaugggucucuacaguguagaauauguauuuaa

SEQ ID NO: 38163 - RNA, 1701 nt, Artificial Sequence
  derived and/or modified CDS sequence (wt) from hemagglutinin__InfluenzaA__ADO29897
augaaggcaauacuaguaguucugcuauauacauuugcaaccgcaaaugcagacauauuauguauagguuaucaugcgaacaauucaacagacacuguagacacaguacuagaaaagaauguaacaguaacacacucuguuaaccuucuagaagacaagcauaacgggaaacuaugcaaacuaagagggguagccccauugcauuuggguaaauguaacauugcuggcuggauccugggaaauccagagugugaaucuuucuccacaucaagcucaugguccuacauuguggaaacaucuaguucagacaauggaaaguguuacccaggagauuucaucgauuaugaggagcuaagagagcaauugagcucagugucaucauuugaaagguuugagauauuccccaagacaaguucauggcccaaucaugacucgaacaaagguguaacgacagcauguccucaugcuggagcaaaaagcuucuacaaaaauuuaauauggcuaguuaaaaaaggaaauucauacccaaggcucagcaaauccuacauuaaugauaaagggaaagaaguccucgugcuauggggcauucaccauccaucuacuagugcugaccaacaaagucucuaucagaaugcagaugcauauguuuuuguggggacaucaagauacagcaagaaguucaagccggaaauagcaauaagacccaaagugagggaucaagaagggagaaugaacuauuacuggacacuaguagagccgggagacaaaauaacauucgaagcaacuggaaaucuagugguaccgagauaugcauucgcaauggaaagaaaugcuggaucugguauuaucauuucagauacaccaguccacgguugcaauacaacuugucagacacccaagggugcuauaaacaccagccucccauuucagaacauacauccgaucacaauuggaaaauguccaaaauauguaaaaagcacaaaauugagacuggccacaggauugaggaaugucccgucuauucaaucuagaggccuauuuggggccguugccgguuucauugaagggggguggacagggaugguagauggaugguacgguuaucaccaucaaaaugagcaggggucaggauaugcagccgaccugaagagcacacagaaugccauugacgagauuacuaacaaaguaaauucuguuauugaaaagaugaauacacaguucacagcaguagguaaagaguucaaucaccuggaaaaaagaauagagaauuuaaauaaaaaaguugaugaugguuuccuggacauuuggacuuacaaugccgaacuguugguucuauuggaaaaugaaagaacuuuggacuaccacgauucaaaugugaagaacuuauaugaaaagguaagaagccaguuaaaaaacaaugccaaggaaauuggaaacggcugcuuugaauuuuaccacaaaugcgauaacacgugcauggaaagugucaaaaaugggacuuaugacuauccaaaauacucagaggaagcaaaauuaaacagagaagaaauagaugggguaaagcuggaaucaacaaggauuuaccagauuuuggcgaucuauucaacugucgccaguucauugguacugguagucucccugggggcaaucaguuucuggaugugcucuaaugggucucuacaguguagaauauguauuuaa

SEQ ID NO: 38164 - RNA, 1701 nt, Artificial Sequence
  derived and/or modified CDS sequence (wt) from hemagglutinin__InfluenzaA__ADO29898
augaaggcaauacuaguaguucugcuauauacauuugcaaccgcaaaugcagacacauuauguauagguuaucaugcgaacaauucaacagacacuguagacacaguacuagaaaagaauguaacaguaacacacucuguuaaccuucuagaagacaagcauaacgggaaacuaugcaaacuaagagggguagccccauugcauuuggguaaauguaacauugcuggcuggauccugggaaauccagagugugaaucacucuccacagcaagcucaugguccuacauuguggaaacaucuaguucagacaauggaacguguuacccaggagauuucaucgauuaugaggagcuaagagagcaauugagcucagugucaucauuugaaagguuugagauauuccccaagacaagcucauggcccaaucaugacccgaacaaagguguaacggcagcauguccucaugcuggagcaaaaagcuucuacaaaaauuuaauauggcuaguuaaaaaaggaaauucguacccaaagcucagcaaauccuacauuaaugauaaagggaaagaaguccucgugcuauggggcauucaccauccaucuacuagugcugaccaacaaagucucuaucagaaugcagaugcauauguuuuuguggggacaucaagauacagcaagaaguucaagccggaaauagcaauaagacccaaagugagggaucaagaagggagaaugaacuauuacuggacacuaguagagccgggagacaaaauaacauucgaagcaacuggaaaucuagugguaccgagauaugcauucgcaauggaaagaaaugcuggaucugguauuaucauuucagauacaccaguccacgauugcaauacaacuugucagacacccaagggugcuauaaacaccagccucccauuucagaauauacauccgaucacaauuggaaaauguccaaaauauguaaaaagcacaaaauugagacuggccacaggauugaggaaugucccgucuauucaaucuagaggccuauuuggggccauugccgguuucauugaagggggguggacagggaugguagauggaugguacgguuaucaccaucaaaaugagcaggggucaggauaugcagccgaccugaagagcacacagaaugccauugacgagauuacuaacaaaguaaauucuguuauugaaaagaugaauacacaguucacagcaguagguaaagaguucaaccaccuggaaaaaagaauagagaauuuaaauaaaaaaguugaugaugguuuccuggacauuuggacuuacaaugccgaacuguugguucuauuggaaaaugaaagaacuuuggacuaccacgauucaaaugugaagaacuuauaugaaaagguaagaagccaguuaaaaaacaaugccaaggaaauuggaaacggcugcuuugaauuuuaccacaaaugcgauaacacgugcauggaaagugucaaaaaugggacuuaugacuacccaaaauacucagaggaagcaaaauuaaacagagaagaaauagaugggguaaagcuggaaucaacaaggauuuaccagauuuuggcgaucuauucaacugucgccaguucauugguacugguagucucccugggggcaaucaguuucuggaugugcucuaaugggucucuacaguguagaauauguauuuaa

SEQ ID NO: 38165 - RNA, 1701 nt, Artificial Sequence
  derived and/or modified CDS sequence (wt) from hemagglutinin__InfluenzaA__ADO29899
augaaggcaauacuaguaguucugcuauauacauuugcaaccgcaaaugcagacacauuaugcauagguuaucaugcgaacaauucaacagacacuguagacacaguacuagaaaagaauguaacaguaacacacucuguuaaccuucuagaagacaagcauaacgggaaacuaugcaaacuaagagggguagccccauugcauuuggguaaauguaacauugcuggcuggauccugggaaauccagagugugaaucacucuccacagcaagcucaugguccuacauuguggaaacaucuaguucagacaauggaacguguuacccaggagauuucaucgauuaugaggagcuaagagagcaauugagcucagugucaucauuugaaagguuugagauauuccccaagacaaguucauggcccaaucaugacucgaacaaagguguaacggcagcauguccucaugcuggagcgaaaagcuucuacaaaaauuuaauauggcuaguuaaaaaaggaaauucauacccaaagcucagcaaauccuacauuaaugauaaagggaaagaaguccucgugcuauggggcauucaccauccaucuacuagugcugaccaacaaagucucuaucagaaugcagacgcauauguuuuuguggggacaucaagauacagcaagaaguucaagccggaaauagcaauaagacccaaagugagggaucaagaagggagaaugaacuauuacuggacacuaguagagccgggagacaaaauaacauucgaagcaacuggaaaucuagugguaccgagauaugcauucgcaauggaaagaaaugcuggaucugguauuaucauuucagauacaccaguccacgauugcaauacaacuugucagacacccaagggugcuauaaacaccagccucccauuucagaauauacauccgaucacaauuggaaaauguccaaaauauguaaaaagcacaaaauugagacuggccacaggauugaggaaugucccgucuauucaaucuagaggccuauuuggggccauugccgguuucauugaagggggguggacagggaugguagauggaugguacgguuaucaccaucaaaaugagcaggggucaggauaugcagccgaccugaagagcacacagaaugccauugacaagauuacuaacaaaguaaauucuguuauugaaaagaugaauacacaguucacagcaguagguaaagaguucaaccaccuggaaaaaagaauagagaauuuaaauaaaaaaguugaugaugguuuccuggacauuuggacuuacaaugccgaacuguugguucuauuggaaaaugaaagaacuuuggacuaccacgauucaaaugugaagaacuuauaugaaaagguaagaagccaguuaaaaaacaaugccaaggaaauuggaaacggcugcuuugaauuuuaccacaaaugcgauaacacgugcauggaaagugucaaaaaugggacuuaugacuacccaaaauacucagaggaagcaaaauuaaacagagaagaaauagaugggguaaagcuggaaucaacaaggauuuaccagauuuuggcgaucuauucaacugucgccaguucauugguacugguagucucccugggggcaaucaguuucuggaugugcucuaaugggucucuacaguguagaacauguauuuaa

SEQ ID NO: 38166 - RNA, 1701 nt, Artificial Sequence
  derived and/or modified CDS sequence (wt) from hemagglutinin__InfluenzaA__ADO29900
augaaggcaauacuaguaguucugcuauauacauuugcaaccgcaaaugcagacacauuauguauagguuaucaugcgaacaauucaacagacacuguagacacaguacuagaaaagaauguaacaguaacacacucuguuaaccuucuagaagacaagcauaacgggaaacuaugcaaacuaagagggguagccccauugcauuuggguaaauguaacauugcuggcuggauccugggaaauccagagugugaaucacucuccacagcaagcucaugguccuacauuguggaaacaucuaguucagacaauggaacguguuacccaggagaucucaucgauuaugaggagcuaagagagcaauugagcucagugucaucauuugaaagguuugagauauuccccaagacaaguucauggcccaaucaugaccugaacaaagguguaacggcagcauguccucaugcuggagcaaaaagcuucuacaaaaauuuaauauggcuaguuaaaaaaggaaauucauacccaaagcucagcaaauccuacauuaaugauaaagggaaagaaguccucgugcuauggggcauucaccauccaucuacuagugcugaccaacaaagucucuaucagaaugcagaugcauauguuuuuguggggacaucaagauacagcaagaaguccaagccggaaauagcaauaagacccaaagugagggaucaagaagggagaaugaacuauuacuggacacuaguagagccgggagacaaaauaacauucgaagcaacuggaaaucuagugguaccgagauaugcauucgcaauggaaagaaaugcuggaucugguauuaucauuucagauacaccaguccacgauugcaauacaacuugucagacacccaagggugcuauaaacaccagccucccauuucagaauauacauccgaucacaauuggaaaauguccaaaauauguaagaagcacaaaauugagacuggccacaggguugaggaaugucccgucuauucaaucuagaggccuauuuggggccauugccgguuucauugaagggggguggacagggaugguagauggaugguacgguuaucaccaucaaaaugagcaggggucaggauaugcagccgaccugaagagcacacagaaugccauugacgagauuacuaacaaaguaaauucuguuauugaaaagaugaauacacaguucacagcaguagguaaagaguucaaccaccuggaaaaaagaauagagaauuuaaauaaaaaaguugaugacgguuuccuggacauuugggcuuacaaugccgaacuguugguucuauuggaaaaugaaagaacuuuggacuaccacgauucaaaugugaagaacuuauaugaaaagguaagaagccaguuaaaaaacaaugccaaggaaauuggaaacggcugcuuugaauuuuaccacaaaugcgauaacacgugcauggaaagugucaaaaaugggacuuaugacuacccaaaauacucagaggaagcaaaauuaaacagagaagaaauagaugggguaaagcuggaaucaacaaggauuuaccagauuuuggcgaucuauucaacugucgccaguucauugguacugguagucucccugggggcaaucaguuucuggaugugcucuaaugggucucuacaguguagaauauguauuuaa

SEQ ID NO: 38167 - RNA, 1701 nt, Artificial Sequence
  derived and/or modified CDS sequence (wt) from hemagglutinin__InfluenzaA__ADO29901
augaaggcaauacuaguaguucugcuauauacauuugcaaccgcaaaugcagacacauuauguauagguuaucaugcgaacaauucaacagacacuguagacacaguacuagaaaagaauguaacaguaacacacucuguuaaccuucuagaagacaagcauaacgagaaacuaugcaaacuaagagggguagccccauugcauuuggguaaauguaacauugcuggcuggauccugggaaauccagagugugaaucacucuccacagcaagcucaugguccuacauuguggaaacaucuaguucagacaauggaacguguuacccaggagauuucaucgauuaugaggagcuaagagagcaauugagcucagugucaucauuugaaagguuugagauauuccccaagacaaguucauggcccaaucaugacucgaacaaagguguaacggcagcauguccucaugcuggagcaaaaagcuucuacaaaaauuuaauauggcuagcuaaaaaaggaaauucauacccaaaggucagcaaauccuacauuaaugauaaagggaaagagguccucgugcuauggggcauucaccauccaucuacuagugcugaccaacaaagucucuaucagaaugcagaugcauauguuuuuguggggacaucaagauacagcaagaaguucaagccggaaauagcaauaagacccaaagugagggaucaagaagggagaaugaacuauuacuggacacuaguugagccgggagacaaaauaacauucgaagcaacuggaaaucuagugguaccgagauaugcauucgcaauggaaagaaaugcuggaucugguauuaucauuucagauacaccaguccacgauugcaauacaacuugucagacacccaagggugcuauaaacaccagccucccauuucagaauauacauccgaucacaauuggaaaauguccaaaauauguaaaaagcacaaaauugagacuggccacaggauugaggaaugucccgucuauucaaucuagaggccuauuuggggccauugccgguuucauugaagggggguggacagggaugguagauggaugguacgguuaucaccaucaaaaugagcaggggucaggauaugcagccgaccugaagagcacacagaaugccauugacgagauuacuaacaaaguaaauucuguuauugaaaagaugaauacacaguucacagcaguagguaaagaguucaaccaccuggaaaaaagaauagagaauuuaaauaaaaaaguugaugaugguuuccuggacauuuggacuuacaaugccgaacuguugguucuauuggaaaaugaaagaacuuuggacuaccacgauucaaaugugaagaacuuauaugaaaagguaagaagccaguuaaaaaacaaugccaaggaaauuggaaacggcugcuuugaauuuuaccacaaaugcgauaacacgugcauggaaagugucaaaaaugggacuuaugacuacccaaaauacucagaggaagcaaaauuaaacagagaagaaauagaugggguaaagcuggaaucaacaaggauuuaccagauuuuggcgaucuauucaacugucgccaguucauugguacugguagucucccugggggcaaucaguuucuggauguguuuuaaugggucucuacaguguagaauauguauuuaa

SEQ ID NO: 38168 - RNA, 1701 nt, Artificial Sequence
  derived and/or modified CDS sequence (wt) from hemagglutinin__InfluenzaA__ADO29902
augaaggcaauacuaguaguucugcuauauacauuugcaaccgcaaaugcagacacauuauguauagguuaucaugcgaacaauucaacagacacuguagacacaguacuagaaaagaauguaacaguaacacacucuguuaaccuucuagaagacaagcauaacgggaaacuaugcaaacuaagagggguagccccauugcauuuggguaaauguaacauugcuggcuggauccugggaaauccagagugugagucacucuccacagcaagcucaugguccuacauuguggaaacaucuaguucagacaauggaacguguuacccaggagauuucaucgauuaugaggagcuaagagagcaauugagcucagugucaucauuugaaagguuugagauauuccccaagacaaguucauggcccaaucacgacucgaacaaagguguaacggcagcauguccucaugcuggagcaaaaagcuucuacaaaaauuuaauauggcuaguuaaaaaaggaaauucauacccaaagcucagcaaauccuacauuaaugauaaagggaaagaaguccucgugcuauggggcauucaccauccaucuacuagugccgaccaacaaagucucuaucagaaugcagaugcauauguuuuuguggggacaucaagauacagcaagaaguucaagccggaaauagcaauaagacccaaagugagggaucaagaagggagaaugaacuauuacuggacacuaguagagccgggagacaaaauaacauucgaagcaacuggaaaucuagugguaccgagauaugcauucgcaauggaaagaaaugcuggaucugguauuaucauuucagauacaccaguccacgauugcaauacaacuugucagacacccaagggugcuauaaacaccagccucccauuucagaauauacauccgaucacaauuggaaaauguccaaaauauguaaaaagcacaaaauugagacuggccacaggauugaggaaugucccgucuauucaaucuagaggccuauuuggggccauugccgguuucauugaagggggguggacagggaugguagauggaugguacgguuaucaccaucaaaaugagcaggggucaggauaugcagccgaccugaagagcacacagaaugccauugacaagauuacuaacaaaguaaauucuguuauugaaaagaugaauacacaguucacagcaguagguaaagaguucaaccaccuggaaaaaagaauagagaauuuaaauaaaaaaguugaugaugguuuccuggacauuuggacuuacaaugccgaacuguugguucuauuggaaaaugaaagaacuuuggacuaccacgauucaaaugugaagaacuuauaugaaaagguaagaagccaguuaaaaaacaaugccaaggaaauuggaaacggcugcuuugaauuuuaccacaaaugcgauaacacgugcauggaaggugucaaaaaugggacuuaugacuacccaaaauacucagaggaagcgaaauuaaacagagaagaaauagaugggguaaagcuggaaucaacaaggauuuaccagauuuuggcgaucuauucaacugucgccaguucauugguacugguagucucccugggggcaaucaguuucuggaugugcucuaaugggucucuacaguguagaauauguauuuaa

SEQ ID NO: 38169 - RNA, 1701 nt, Artificial Sequence
  derived and/or modified CDS sequence (wt) from hemagglutinin__InfluenzaA__ADO29903
augaaggcaauacuaguaguucugcuauauacauuugcaaccgcaaaugcagacacauuauguauagguuaucaugcgaacaauucaacagacacuguagacacaguacuagaaaagaauguaacaguaacacacucuguuaaccuucuagaagacaagcauaacgggaaacuaugcaaacuaagagggguagccccauugcauuuggguaaauguaacacugcuggcuggauccugggaaauccagagugugaaucacucuccacagcaagcucaugguccuacauuguggaaacaucuaguucagacaauggaacguguuacccaggagauuucaucgauuaugaggagcuaagagagcaauugagcucagugucaucauuugaaagguuugagauauuccccaagacaaguucauggcccaaucaugacccgaacaaagguguaacggcagcauguccucaugcuggagcaaaaagcuucuacaaaaauuuaauauggcuaguuaaaaaaggaaauucauacccaaagcucagcaaauccuacauuaaugauaaagggaaagaaguccucgugcuauggggcauucaccauccaucuacuagugcugaccaacaaagucucuaucagaaugcagaugcauauguuuuuguggggacaucaagauacagcaagaaguucaagccggaaauagcaauaagacccaaagugagggaucaagaagggagaaugaacuauuacuggacacuaguagagccgggagacaaaauaacauucgaagcaacuggaaaucuagugguaccgagauaugcauucgcaauggaaagaaaugcuggaucugguauuaucauuucagauacaccaguccacgauugcaauacaacuugucagacacccaagggugcuauaaacaccagccucccauuucagaauauacauccgaucacaauuggaaaauguccaaaauauguaaaaagcacaaaauugagacuggccacaggauugaggaaugucccgucuauucaaucuagaggccuauuuggggccauugccgguuucauugaagggggguggacagggaugguagauggaugguacgguuaucaccaucaaaaugagcaggggucaggauaugcagccgaccugaagagcacacagaaugccauugacgagauuacuaacaaaguaaauucuguuauugaaaagaugaauacacaguucacagcaguagguaaagaguucaaccaccuggaaaaaagaauagagaauuuaaauaaaaaaguugaugaugguuuccuggacauuuggacuuacaaugccgaacuguugguucuauuggaaaaugaaagaacuuuggacuaccacgauucaaaugugaagaacuuauaugaaaagguaagaagccaguuaaaaaacaaugccaaggaaauuggaaacggcugcuuugaauuuuaccacaaaugcgauaacacgugcauggaaagugucaaaaaugggacuuaugacuacccaaaauacucagaggaagcaaaauuaaacagagaagaaauagaugggguaaagcuggaaucaacaaggauuuaccagauuuuggcgaucuauucaacugucgccaguucauugguacugguagucucccugggggcaaucaguuucuggaugugcucuaaugggucucuacaguguagaauauguauuuaa

SEQ ID NO: 38170 - RNA, 1701 nt, Artificial Sequence
  derived and/or modified CDS sequence (wt) from hemagglutinin__InfluenzaA__ADO29904
augaaggcaauacuaguaguucugcuauauacauuugcaaccgcaaaugcagacacauuauguauagguuaucaugcgaacaauucaacagacacuguagacacaguacuagaaaagaauguaacaguaacacacucuguuaaccuucuagaagacaagcauaacgggaaacuaugcaaacuaagagggguagccccauugcauuuggguagauguaacauugcuggcuggauccugggaaauccagagugugaaucacucuccacagcaagcucaugguccuacauuguggaaacaucuaguucagacaauggaacguguuacccaggagauuucaucgauuaugaggagcuaagagagcaauugagcucagugucaucauuugaaagguuugagauauuccccaagacaaguucauggcccaaucaugacccgaacaaagguguaacggcagcauguccucaugcuggagcaaaaagcuucuacaaaaauuuaauauggcuaguuaaaaaaggaaauucauacccaaagcucagcaaauccuacauuaaugauaaagggaaagaaguccucgugcuauggggcauucaccguccaucuacuagugcugaccaacaaagucucuaucagaaugcagaugcauauguuuuuguggggacaucaagauacagcaagaaguucaagccggaaauagcaauaagacccaaagugggggaucaagaagggagaaugaacuauuacuggacacuaguagagccgggagacaaaauaacauucgaagcaacuggaaaucuagugguaccgagauaugcauucgcaauggaaagaaaugcuggaucugguauuaucauuucaaauacaccaguccacgauugcaauacaacuugucagacacccaagggugcuauaaacaccagccucccauuucagaauauacauccgaucacaauuggaaaauguccaaaauauguaaaaagcacaaaauugagacuggccacaggauugaggaaugucccgucuauucaaucuagaggccuauuuggggccauugccgguuucauugaagggggguggacagggaugguagauggaugguacgguuaucaccaucaaaaugagcaggggucuggauaugcagccgaccugaagagcacacagaaugccauugacgagauuacuaacaaaguaaauucuguuauugaaaagaugaauacacaguucacagcaguagguaaagaguucaaccaccuggaaaaaagaauagagaauuuaaauaaaaaaguugaugaugguuuccuggacauauggacuuacaaugccgaacuguugguucuauuggaaaaugaaagaacuuuggacuaccacgauucaaaugugaagaacuuauaugaaaagguaagaagccaguuaaaaaacaaugccaaggaaauuggaaacggcugcuuugaauuuuaccacaaaugcgauaacacgugcauggaaagugucaaaaaugggacuuaugacuacccaaaauacucagaggaagcaaaauuaaacagagaagaaauagaugggguaaagcuggaaucaacaaggauuuaccagauuuuggcgaucuauucaacugucgccaguucauugguacugguagucucccugggggcaaucaguuucuggaugugcucuaaugggucucuacaguguagaauauguauuuaa

SEQ ID NO: 38171 - RNA, 1701 nt, Artificial Sequence
  derived and/or modified CDS sequence (wt) from hemagglutinin__InfluenzaA__ADO29905
augaaggcaauacuaguaguucugcuauauacauuugcaaccgcaaaugcagacacauuauguauagguuaucaugcgaacaauucaacagacacuguagacacaguacuagaaaagaauguaacaguaacacgcucuguuaaccuucuagaagacaagcauaacgggaaacuaugcaaacuaagagggguagccccauugcauuuggguaaauguaacauugcuggcuggauccugggaaauccagagugugaaucacucuccacagcaagcucaugguccuacauuguggaaacaucuaguucagacaauggaacguguuacccaggagauuucaucgauuaugaggagcuaagagagcaauugagcucagugucaucauuugaaagguuugagauauuccccaagacaaguucauggcccaaucaugacccgaacaaagguguaacggcagcauguccucaugcuggagcaaaaagcuucuacaaaaauuuaauauggcuaguuaaaaaaggaaauucauacccaaagcucagcaaauccuacauuaaugauaaagggaaagaaguccucgugcuauggggcauucaccacccaucuacuagugcugaccaacaaagucucuaucagaaugcagaugcauauguuuuuguggggacaucaagauacagcaagaaguucaagccggaaauagcaauaagacccaaagugagggaucaagaagggagaaugaacuauuacuggacacuaguagagccgggagacaaaauaacauucgaagcaacuggaaaucuagugguaccgagauaugcauucgcaauggaaagaaaugcuggaucugguauuaucauuucaaauacaccgguccacgauugcaauacaacuugucagacacccaagggugcuauaaacaccagccucccauuucagaauauacauccgaucacaauuggaaaauguccaaaauauguaaaaagcacaaaauugagacuggccacaggauugaggaaugucccgucuauucaaucuagaggccuauuuggggccauugccgguuucauugaagggggguggacagggaugguagauggaugguacgguuaucaccaucaaaaugagcaggggucuggauaugcagccgaccugaagagcacacagaaugccauugacgagauuacuaacaaaguaaauucuguuauugaaaagaugaauacacaguucacagcaguagguaaagaguucaaccaccuggaaaaaagaauagagaauuuaaauaaaaaaguugaugaugguuuccuggacauauggacuuacaaugccgaacuguugguucuauuggaaaaugaaagaacuuuggacuaccacgauucaaaugugaagaacuuauaugaaaagguaagaagccaguuaaaaaacaaugccaaggaaauuggaaacggcugcuuugaauuuuaccacaaaugcgauaacacgugcauggaaagugucaaaaaugggacuuaugacuacccaaaauacucagaggaagcaaaauuaaacagagaagaaauagaugggguaaagcuggaaucaacaaggauuuaccagauuuuggcgaucuauucaacugucgccaguucauugguacugguagucucccugggggcaaucaguuucuggaugugcucuaaugggucucuacaguguagaauauguauuuaa

SEQ ID NO: 38172 - RNA, 1701 nt, Artificial Sequence
  derived and/or modified CDS sequence (wt) from hemagglutinin__InfluenzaA__ADO29906
augaaggcaauacuaguaguucugcuauauacauuugcaaccgcaaaugcagacacauuauguauagguuaucaugcgaacaauucaacagacacuguagacacaguacuagaaaagaauguaacaguaacacacucuguuaaccuucuagaagacaagcauaacaggaaacuaugcaaacuaagagggguagccccauugcauuuggguaaauguaacauugcuggcuggauccugggaaauccagagugugaaucacucuccacagcaagcucaugguccuacauuguggaaacaucuaguucagacaauggaacguguuacccaggagauuucaucgauuaugaggagcuaagagagcaauugagcucagugucaucauuugaaagguuugagauauuccccaagacaaguucauggcccaaucaugacccgaacaaagguguaacggcagcauguccucaugcuggagcaaaaagcuucuacaaaaauuuaauauggcuaguuaaaaaaggaaauucauacccaaagcucagcaaauccuacauuaaugauaaagggaaagaaguccucgugcuauggggcauucaccauccaucuacuagugcugaccaacaaagucucuaucagaaugcagaugcauauguuuuuguggggacaucaagauacagcaagaaguucaagccggaaauagcaauaagacccaaagugagggaucaagaagggagaaugaacuauuacuggacacuaguagagccgggagacaaaauaacauucgaagcaacuggaaaucuagugguaccgagauaugcauucgcaauggaaagaaaugcuggaucugguauuaucauuucagauacaccaguccacgauugcaauacaacuugucagacacccaagggugcuauaaacaccagccucccauuucagaauauacauccgaucacaauuggaaaauguccaaaauauguaaaaagcacaaaauugagacuggccacaggauugaggaaugucccgucuauucaaucuagaggccuauuuggggccauugccgguuucauugaagggggguggacagggaugguagauggaugguacgguuaucaccaucaaaaugagcaggggucaggauaugcagccgaccugaagagcacacagaaugccauugacgagauuaccaacaaaguaaauucuguuauugaaaagaugaauacacaguucacagcaguagguaaagaguucaaccaccuggaaaaaagaauagagaauuuaaauaaaaaaguugaugaugguuuccuggacauuuggacuuacaaugccgaacuguugguucuauuggaaaaugaaagaacuuuggacuaccacgauucaaaugugaagaacuuauaugaaaagguaagaagccaguuaaaaaacaaugccaaggaaauuggaaacggcugcuuugaauuuuaccacaaaugcgauaacacgugcauggaaagugucaaaaaugggacuuaugauuacccaaaauacucagaggaagcaaaauuaaacagagaagaaauagaugggguaaagcuggaaucaacaaggauuuaccagauuuuggcgaucuauucaacugucgccaguucauugguacugguagucucccugggggcaaucaguuucuggaugugcucuaaugggucucuacaguguagaauauguauuuaa

SEQ ID NO: 38173 - RNA, 1701 nt, Artificial Sequence
  derived and/or modified CDS sequence (wt) from hemagglutinin__InfluenzaA__ADO29907
augaaggcaauacuaguaguucugcuauauacauuugcaaccgcaaaugcagacacauuauguauagguuaucaugcgaacaauucaacagacacuguagacacaguacuagaaaagaauguaacaguaacacacucuguuaaccuucuagaagacaagcacaacgggaaacuaugcaaacuaagagggguagccccauugcauuuggguaaauguaacauugcuggcuggauccugggaaauccagagugugaaucacucuccacagcaagcucaugguccuacauuguggaaacaucuaguucagacaauggaacguguuacccaggagauuucaucgauuaugaggagcuaagagagcaauugagcucagugucaucauuugaaagguuugagauauuccccaagacaaguucauggcccaaucaugacccgaacaaagguguaacggcagcauguccucaugcuggagcaaaaagcuucuacaaaaauuuaauauggcuaguuaaaaaaggaaauucauacccaaagcucagcaaauccuacauuaaugauaaagggaaagaaguccucgugcuauggggcauucaccauccaucuacuagugcugaccaacaaagucucuaucagaaugcagaugcauauguuuuuguggggacaucaagauacagcaagaagcucaagccggaaauagcaauaagacccaaagugagggaucaagaagggagaaugaacuaucacuggacacuaguagagccgggggacaaaauaacauucgaagcaacuggaaaucuagugguaccgagauaugcauucgcaauggaaagaaaugcuggaucugguauuaucauuucagauacaccaguccacgauugcaauacaacuugucagacacccaagggugcuauaaacaccagccucccauuucagaauauacauccgaucacaauuggaaaauguccaaaauauguaaaaagcacaaaauugagacuggccacaggacugaggaaugucccgucuauucaaucuagaggccuauuuggggccauugccgguuucauugaagggggguggacaggaaugguagauggaugguacgguuaucaccaucaaaaugagcaggggucaggauaugcagccgaccugaagagcacacagaaugccauugacgagauuacuaacaaaguaaauucuguuauugaaaagaugaauacacaguucacagcaguagguaaagaguucaaccaccuggaaaaaagaauagagaauuuaaauaaaaaaguugaugaugguuuccuggacauuuggacuuacaaugccgaacuguugguucuauuggaaaaugaaagaacuuuggacuaccacgauucaaaugugaagaacuuauaugaaaagguaagaagccaguuaaaaaacaaugccaaggaaauuggaaacggcugcuuugaauuuuaccacaaaugcgauaacacgugcauggaaagugucaaaaaugggacuuaugacuacccaaaauacucagaggaagcaaaauuaaacagagaagaaauagaugggguaaagcuggaaucaacaaggauuuaccagauuuuggcgaucuauucaacugucgccaguucauugguacugguagucucccugggggcaaucaguuucuggaugugcucuaaugggucucuacaguguagaauauguauuuaa

SEQ ID NO: 38174 - RNA, 1701 nt, Artificial Sequence
  derived and/or modified CDS sequence (wt) from hemagglutinin__InfluenzaA__ADO29908
augaaggcaauacuaguaguucugcuauauacauuugcaaccgcaaaugcagacacauuauguauagguuaucaugcgaacaauucaacagacacuguagacacaguacuagaaaagaauguaacaguaacacacucuguuaaccuucuagaagacaagcauaacgggaaacuaugcaaacuaagagggguagccccauugcauuuggguaaauguaacauugcuggcuggauccugggaaauccagagugugaaucacucuccacagcaagcucaugguccuacauuguggaaacaucuaguucagacaauggaacguguuacccaggagauuucaucgauuaugaggagcuaagagagcaauugagcucagugucaucauuugaaagguuugagauauuccccaagacaaguucauggcccaaucaugacccgaacaaagguguaacggcagcauguccucaugcuggagcaaaaagcuucuacaaaaauuuaauauggcuaguuaaaaaaggaaauucauacccaaagcucagcaaauccuacauuaaugauaaagggaaagaaguccucgugcuauggggcauucaccauccaucuacuagugcugaccaacaaagucucuaucagaaugcagaugcauauguuuuuguggggacaucaagauacagcaagaaguucaagccggaaauagcaauaagacccaaagugagggaucaagaauggagaaugaacuauuacuggacacuaguagagccgggagacaaaauaacauucgaagcaacuggaaaucuagugguaccgagauaugcauucgcaauggaaagaaaugcuggaucugguauuaucauuucagauacaccaguccacgauugcaauacaacuugucagacacccaagggugcuauaaacaccagccucccauuccagaauauacauccgaucacaauuggaaaauguccaaaauauguaaaaagcacaaaauugagacuggccacaggauugaggaaugucccgucuauucaaucuagaggccuauuuggggccauugccgguuucauugaagggggguggacagggaugguagauggaugguacgguuaucaccaucaaaaugagcaggggucaggauaugcagccgaccugaagagcacacagaaugccauugacgagauuacuaacaaaguaaauucuguuauugaaaagaugaauacacaguucacagcaguagguaaagaguucaaccaccuggaaaaaagaauagagaauuuaaauaaaaaaguugaugaugguuuccuggacauauggacuuacaaugccgaacuguugguucuauuggaaaaugaaagaacuuuggacuaccacgauucaaaugugaagaacuuauaugaaaagguaagaagccaguuaaaaaacaaugccaaggaaauuggaaacggcugcuuugaauuuuaccacaaaugcgauaacacgugcauggaaagugucaaaaaugggacuuaugacuacccaaaauacucagaggaagcaaaauuaaacagagaagaaauagaugggguaaagcuggaaucaacaaggguuuaccagauuuuggcgaccuauucaacugucgccaguucauugguacugguagucucccugggggcaaucaguuucuggaugugcucuaaugggucucuacaguguagaauauguauuuaa

SEQ ID NO: 38175 - RNA, 1701 nt, Artificial Sequence
  derived and/or modified CDS sequence (wt) from hemagglutinin__InfluenzaA__ADO29909
augaaggcaauacuaguaguucugcuauauacauuugcaaccgcaaaugcagacacauuacguauagguuaucaugcgaacaauucaacagacacuguagacacaguacuagaaaagaauguaacaguaacacauucuguuaaccuucuagaagacaagcauaacgggaaacuaugcaaacuaagagggguagccccauugcauuuggguaaauguaacauugcuggcuggauccugggaaauccagagugugaaucacucuccacagcaagcucaugguccuacauuguggaaacaucuaguucagacaauggaacguguuacccaggagauuucaucgauuaugaggaguuaagagagcaauugagcucagugucaucauuugaaagguuugagauauuccccaagacaaguucauggcccaaucaugacccgaacaaagguguaacggcagcauguccucaugcuggagcaaaaagcuucuacaaaaauuuaauauggcuaguuaaaaaaggaaauucauacccaaagcucagcaaauccuacauuaaugauaaagggaaagaaguccucgugcuauggggcauucaccauccaucuacuagugcugaccaacaaagucucuaucagaaugcagaugcauauguuuuuguggggacaucaagauacagcaagaaguucaagccggaaauagcaauaagacccaaagugagggaucaagaagggagaaugaacuauuacuggacacuaguagagccgggagacaaaauaacauucgaagcaacuggaaaucuagugguaccgagauaugcauucgcaauggaaagaaacgcuggaucugguauuaucauuucagauacaccaguccacgauugcaauacaacuugucagacacccaagggugcuauaaacaccagccucccauuucagaauauacauccgaucacaauuggaaaauguccaaaauauguaaaaagcacaaaauugagacuggccacaggauugaggaaugucccgucuauucaaucuagaggccuauuuggggccauugccgguuucauugaagggggguggacagggaugguagauggaugguacgguuaucaccaucaaaaugagcaggggucaggauaugcagccgaccugaagagcauacagaaugccauugacgagauuacuaacaaaguaaauucugucauugaaaagaugaauacacaguucacagcaguagguaaagaguucaaccaccuggaaaaaagaauagagaauuuaaauaaaaaaguugaugaugguuuccuggacauuuggacuuacaaugccgaacuguugguucuauuggaaaaugaaagaacuuuggacuaccacgauucaaaugugaagaacuuauaugaaaagguaagaagccaguuaaaaaacaaugccaaggaaauuggaaacggcugcuuugaauuuuaccacaaaugcgauaacacgugcauggaaagugucaaaaaugggacuuaugacuacccgaaauacucagaggaagcaaaauuaaacagagaagaaauagaugggguaaagcuggaaucaacaaggauuuaccagauuuuggcgaucuauucaacugucgccaguucauugauacugguagucucccugggggcaaucaguuucuggaugugcucuaaugggucuuuacaguguagaauauguauuuaa

SEQ ID NO: 38176 - RNA, 1701 nt, Artificial Sequence
  derived and/or modified CDS sequence (wt) from hemagglutinin__InfluenzaA__ADO29910
augaaggcaauacuaguaguucugcuauauacauuugcaaccgcaaaugcagacacauuauguauagguuaucaugcgaacaauucaacagacacuguagacacaguacuagaaaagaauguaacaguaacacacucuguuaaccuucuagaagacaagcauaacgggaaacuaugcaaaccaagagggguagccccauugcauuuggguaaauguaacauugcuggcuggauccugggaaauccagagugugaaucacucuccacagcaagcucaugguccuacauuguggaaacaucuaguucagacaauggaacguguuacccaggagauuucaucgauuaugaggagcuaagagagcaauugagcucagugucaucauuugaaagguuugagauauuccccaagacaaguucauggcccaaucaugacccgaacaaagguguaacggcagcauguccucaugcuggagcaaaaagcuucuacaaaaauuuaauauggcuaguuaaaaaaggaaauucauacccaaagcucagcaaauccuacauuaaugauaaagggaaagaaguccucgugcuauggggcauucaccauccgucuacuagugcugaccaacaaagucucuaucagaaugcagaugcauauguuuuuguggggacaucaagauacagcaagaaguucaagccggaaauagcaauaagacccaaagugagggaucaagaagggagaaugaacuauuacuggacacuaguagagccgggagacaaaauaacauucgaagcaauuggaaaucuagugguaccgagauaugcauucgcaauggaaaggaaugcuggaucugguauuaucauuucagauacaccaguccacgauugcaauacaacuugucagacacccaagggugcuauaaacaccagccucccauuucagaauauacauccgaucacaauuggaaaauguccaaaauauguaaaaagcacaaaauugagacuggccacaggauugaggaaugucccgucuauucaaucuagaggccuauuuggggccauugccgguuucauugaagggggguggacagggaugguagauggaugguacgguuaucaccaucaaaaugaacaggggucaggauaugcagccgaccugaagagcacacagaaugccauugacgagauuacuaacaaaguaaauucuguuauugaaaagaugaauacacaguucacagcaguagguaaagaguucaaccaccuggaaaaaagaauagagaauuuaaauaaaaaaguugaugaugguuuccuggacauuuggacuuacaaugccgaacuguugguucuauuggaaaaugaaagaacuuuggacuaccacgauucaaaugugaagaacuuauaugaaaagguaagaagccaguuaaaaaacaaugccaaggaaauuggaaacggcugcuuugaauuuuaccacaaaugcgauaacacgugcauggaaagugucaaaaaugggacuuaugacuacccaaaauacucagaggaagcaaaauuaaacagaggagaaauagaugggguaaagcuggaaucaacaaggauuuaccagauuuuggcgaucuauucaacugucgccaguucauugguacugguagucucccugggggcaaucaguuucuggaugugcucuaaugggucucuacaguguagaauauguauuuaa

SEQ ID NO: 38177 - RNA, 1701 nt, Artificial Sequence
  derived and/or modified CDS sequence (wt) from hemagglutinin__InfluenzaA__ADO30407
augaaggcaauacuaguaguucugcuauauacauuugcaaccgcaaaugcagacacauuauguauagguuaucaugcgaacaauucaacagacacuguagacacaguacuagaaaagaauguaacaguaacacacucuguuaaccuucuagaagacaagcauaacgggaaacuaugcaaacuaagagggguagccccauugcauuuggguaaauguaacauugcuggcuggauccugggaaauccagagugugaaucacucuccacagcaagcucaugguccuacauuguggaaacaucuaguucagacaauggaacguguuacccaggagauuucaucaauuaugaggagcuaagagagcaauugagcucagugucauuauuugaaagguuugagauauuccccaagacaaguucauggcccaaucaugacucgaacaaagguguaacggcagcauguccucaugcuggagcaaaaagcuucuacaaaaauuuaauauggcuaguuaaaaaaggaaauucauacccaaagcucagcaaauccuacauuaaugauaaagggaaagaaguccucgugcuauggggcauucaccauccaucuacuagugcugaccaacaaagucucuaucagaaugcagaugcauauguuuuuguggggacaucaagauacagcaagaaguucaagccggaaauagcaauaagacccaaagugagggaucaagaagggagaaugaacuauuacuggacacuaguagagccgggagacaaaauaacauucgaagcaacuggaaaucuagugguaccgagauaugcauucgcaauggaaagaaaugcuggaucugguauuaucaucucagauacaccaguccacgauugcaauacaacuugucagacacccaagggugcuauaaacaccagccucccauuucagaauauacauccgaucacaauuggaaaauguccaaaauauguaaaaagcacaaaauugagacuggccacaggauugaggaaugucccgucuauucaaucuagaggccuauuuggggccauugccgguuucauugaagggggguggacagggaugguagauggaugguacgguuaucaccaucagaaugagcaggggucaggauaugcagccgaccugaagagcacacagaaugccauugacaagauuacuaacaaaguaaauucuguuauugaaaagaugaauacacaguucacagcaguagguaaagaguucaaccaccuggaaaaaagaauagagaauuuaaauaaaaaaguugaugaugguuuccuggacauuuggacuuacaaugccgaacuguugguucuauuggaaaacgaaagaacuuuggacuaccacgauucaaaugugaagaacuuauaugaaaagguaagaagccaguuaaaaaacaaugccaaggaaauuggaaacggcugcuuugaauuuuaccacaaaugcgauaacacgugcauggaaagugucaaaaaugggacuuaugacuacccaaaauacucagaggaagcaaaauuaaacagagaagaaauagaugggguaaagcuggaaucaacaaggauuuaccagauuuuggcgaucuauucaacugucgccaguucauugguacugguagucucccugggggcaaucaguuucuggaugugcucuaaugggucucuacaguguagaauauguauuuaa

SEQ ID NO: 38178 - RNA, 1701 nt, Artificial Sequence; identical to SEQ ID NO: 37498
  derived and/or modified CDS sequence (wt) from hemagglutinin__InfluenzaA__ADO30417

SEQ ID NO: 38179 - RNA, 1701 nt, Artificial Sequence; identical to SEQ ID NO: 37107
  derived and/or modified CDS sequence (wt) from hemagglutinin__InfluenzaA__ADO33202

SEQ ID NO: 38180 - RNA, 1701 nt, Artificial Sequence; identical to SEQ ID NO: 37824
  derived and/or modified CDS sequence (wt) from hemagglutinin__InfluenzaA__ADO33240

SEQ ID NO: 38181 - RNA, 1701 nt, Artificial Sequence; identical to SEQ ID NO: 34681
  derived and/or modified CDS sequence (wt) from hemagglutinin__InfluenzaA__ADO33247

SEQ ID NO: 38182 - RNA, 1701 nt, Artificial Sequence; identical to SEQ ID NO: 37824
  derived and/or modified CDS sequence (wt) from hemagglutinin__InfluenzaA__ADO33254

SEQ ID NO: 38183 - RNA, 1701 nt, Artificial Sequence; identical to SEQ ID NO: 37824
  derived and/or modified CDS sequence (wt) from hemagglutinin__InfluenzaA__ADO33261

SEQ ID NO: 38184 - RNA, 1701 nt, Artificial Sequence; identical to SEQ ID NO: 37824
  derived and/or modified CDS sequence (wt) from hemagglutinin__InfluenzaA__ADO33269

SEQ ID NO: 38185 - RNA, 1701 nt, Artificial Sequence
  derived and/or modified CDS sequence (wt) from hemagglutinin__InfluenzaA__ADO33277
augaaggcaauacuaguaguucugcuauauacauuugcaaccgcaaaugcagacacauuauguauagguuaucaugcgaacaauucaacagacacuguagacacaguacuagaaaagaauguaacaguaacacacucuguuaaccuucuagaagacaagcauaacgggaaacuaugcaaacuaagagggguagccccauugcauuuggguaaauguaacauugcuggcuggauccugggaaauccagagugugaaucacucuccacagcaagcucaugguccuacauuguggaaacaucuaguucagacaauggaacguguuacccaggagauuucaucgauuaugaggagcuaagagagcaauugagcucagugucaucauuugaaagguuugagauauuccccaagacaaguucauggcccaaucaugacucgaacaaagguguaacggcagcauguccucaugcuggagcaaaaagcuucuacaaaaauuuaauauggcuaguuaaaaaaggaaauucauacccaaagcucagcaaauccuacauuaaugauaaagggaaagaaguccucgugcuauggggcauucaccauccaucuacuagugcugaccaacaaagucucuaucagaaugcagaugcauauguuuuuguggggacaucaagauacagcaagaaguucaagccggaaauagcaauaagacccaaagugagggaucaagaagggagaaugaacuauuacuggacacuaguagagccgggagacaaaauaacauucgaagcaacuggaaaucuagugguaccgagauaugcauucgcaauggaaagagaugcuggaucugguauuaucauuucagauacaccaguccacgauugcaauacaacuugucagacacccaagggugcuauaaacaccagccucccauuucagaauauacauccgaucacaauuggaaaauguccaaaauauguaaaaagcacaaaauugagacuggccacaggauugaggaaugucccgucuauucaauccagaggccuauuuggggccauugccgguuucauugaagggggguggacagggaugguagauggaugguacgguuaucaccaucaaaaugagcaggggucaggauaugcagccgaccugaagagcacacagaaugccauugacgagauuacuaacaaaguaaauucuguuauugaaaagaugaauacacaguucacagcaguagguaaagaguucaaccaccuggaaaaaagaauagagaauuuaaauaaaaaaguugaugaugguuuccuggacauuuggacuuacaaugccgaacuguugguucuauuggaaaaugaaagaacuuuggacuaccacgauucaaaugugaagaacuuauaugaaaagguaagaagccaguuaaaaaacaaugccaaggaaauuggaaacggcugcuuugaauuuuaccacaaaugcgauaacacgugcauggaaagugucaaaaaugggacuuaugacuacccaaaauacucagaggaagcaaaauuaaacagagaagaaauagaugggguaaagcuggaaucaacaaggauuuaccagauuuuggcgaucuauucaacugucgccaguucauugguacugguagucucccugggggcaaucaguuucuggaugugcucuaaugggucucuacaguguagaauauguauuuaa

SEQ ID NO: 38186 - RNA, 1701 nt, Artificial Sequence; identical to SEQ ID NO: 37824
  derived and/or modified CDS sequence (wt) from hemagglutinin__InfluenzaA__ADO33285

SEQ ID NO: 38187 - RNA, 1701 nt, Artificial Sequence; identical to SEQ ID NO: 37107
  derived and/or modified CDS sequence (wt) from hemagglutinin__InfluenzaA__ADO33293

SEQ ID NO: 38188 - RNA, 1701 nt, Artificial Sequence; identical to SEQ ID NO: 37107
  derived and/or modified CDS sequence (wt) from hemagglutinin__InfluenzaA__ADO33307

SEQ ID NO: 38189 - RNA, 1701 nt, Artificial Sequence; identical to SEQ ID NO: 37824
  derived and/or modified CDS sequence (wt) from hemagglutinin__InfluenzaA__ADO33313

SEQ ID NO: 38190 - RNA, 1701 nt, Artificial Sequence
  derived and/or modified CDS sequence (wt) from hemagglutinin__InfluenzaA__ADO33329
augaaggcaauacuaguaguucugcuauauacauuugcaaccgcaaaugcagacacauuauguauagguuaucaugcgaacaauucaacagacacuguagacacaguacuagaaaagaauguaacaguaacacacucuguuaaccuucuagaagacaagcauaacgggaaacuaugcaaacuaagagggguagccccauugcauuuggguaaauguaacauugcuggcuggauccugggaaauccagagugugaaucacucuccacagcaagcucaugguccuacauuguggaaacaucuaguucagacaauggaacguguuacccaggagauuucaucgauuaugaggagcuaagagagcaauugagcucagugucaucauuugaaagguuugagauauuccccaagacaaguucauggcccaaucaugacucgaacaaagguguaacggcagcauguccucaugcuggagcaaaaagcuucuacaaaaauuuaauauggcuaguuaaaaaaggaaauucauacccaaagcucagcaaauccuacauuaaugauaaagggaaagaaguccucgugcuauggggcauucaccauccaucuacuagugcugaccaacaaagucucuaucagaaugcagaugcauauguuuuuguggggacaucaagauacagcaagaaguucaagccggaaauagcaauaagacccaaagugagggaucaagaagggagaaugaacuauuacuggacacuaguagagccgggagacaaaauaacauucgaagcaacuggaaaucuagugguaccgagauaugcauucgcaauggaaagaaaugcuggaucugguauuaucauuucagauacaccaguccacgauugcaauacaacuugucagacacccaagggugcuauaaacaccagccucccauuucauaauauacauccgaucacaauuggaaaauguccaaaauauguaaaaagcacaaaauugagacuggccacaggauugaggaaugucccgucuauucaaucuagaggccuauuuggggccauugccgguuucauugaagggggguggacagggaugguagauggaugguacgguuaucaccaucaaaaugagcaggggucaggauaugcagccgaccugaagagcacacagaaugccauugacgagauuacuaacaaaguaaauucuguuauugaaaagaugaauacacaguucacagcaguagguaaagaguucaaccaccuggaaaaaagaauagagaauuuaaauaaaaaaguugaugaugguuuccuggacauuuggacuuacaaugccgaacuguugguucuauuggaaaaugaaagaacuuuggacuaccacgauucaaaugugaagaacuuauaugaaaagguaagaagccaguuaaaaaacaaugccaaggaaauuggaaacggcugcuuugaauuuuaccacaaaugcgauaacacgugcauggaaagugucaaaaaugggacuuaugacuacccaaaauacucagaggaagcaaaauuaaacagagaagaaauagaugggguaaagcuggaaucaacaaggauuuaccagauuuuggcgaucuauucaacugucgccaguucauugguacugguagucucccugggggcaaucaguuucuggaugugcucuaaugggucucuacaguguagaauauguauuuaa

SEQ ID NO: 38191 - RNA, 1701 nt, Artificial Sequence; identical to SEQ ID NO: 37824
  derived and/or modified CDS sequence (wt) from hemagglutinin__InfluenzaA__ADO33337

SEQ ID NO: 38192 - RNA, 1701 nt, Artificial Sequence; identical to SEQ ID NO: 37824
  derived and/or modified CDS sequence (wt) from hemagglutinin__InfluenzaA__ADO33345

SEQ ID NO: 38193 - RNA, 1701 nt, Artificial Sequence; identical to SEQ ID NO: 37107
  derived and/or modified CDS sequence (wt) from hemagglutinin__InfluenzaA__ADO33352

SEQ ID NO: 38194 - RNA, 1701 nt, Artificial Sequence; identical to SEQ ID NO: 36139
  derived and/or modified CDS sequence (wt) from hemagglutinin__InfluenzaA__ADO33360

SEQ ID NO: 38195 - RNA, 1701 nt, Artificial Sequence; identical to SEQ ID NO: 37824
  derived and/or modified CDS sequence (wt) from hemagglutinin__InfluenzaA__ADO33368

SEQ ID NO: 38196 - RNA, 1701 nt, Artificial Sequence; identical to SEQ ID NO: 37824
  derived and/or modified CDS sequence (wt) from hemagglutinin__InfluenzaA__ADO33376

SEQ ID NO: 38197 - RNA, 1701 nt, Artificial Sequence; identical to SEQ ID NO: 34705
  derived and/or modified CDS sequence (wt) from hemagglutinin__InfluenzaA__ADO33384

SEQ ID NO: 38198 - RNA, 1701 nt, Artificial Sequence; identical to SEQ ID NO: 34681
  derived and/or modified CDS sequence (wt) from hemagglutinin__InfluenzaA__ADO33391

SEQ ID NO: 38199 - RNA, 1701 nt, Artificial Sequence
  derived and/or modified CDS sequence (wt) from hemagglutinin__InfluenzaA__ADO79917
augaaggcaauacuaguaguucugcuauauacauuugcaaccgcaaaugcagacacauuauguauagguuaucaugcgaacaauucaacagacacuguagacacaguacuagaaaagaauguaacaguaacacacucuguuaaccuucuagaagacaagcauaacgggaaacuaugcaaacuaagagggguagccccauugcauuuggguaaauguaacauugcuggcuggauccugggaaauccagagugugaaucacucuccacagcaagcucaugguccuacauuguggaaacaucuaguucagacaauggaacguguuacccaggagauuucaucgauuaugaggagcuaagagagcaauugagcucagugucaucauuugaaagguuugagauauuccccaagacaaguucauggcccaaucaugacucgaacaaagguguaacggcagcauguccucaugcuggagcaaaaagcuucuacaaaaauuuaauauggcuaguuaaaaaaggaaauucauacccaaagcucagcaaauccuacauuaaugauaaagggaaagaaguccucgugcuauggggcauucaccauccaucuacuagugcugaccaacaaagucucuaucagaaugcagaugcauauguuuuuguggggacaucaagauacagcaagaaguucaagccggaaauagcaauaagacccaaagugagggaucgagaagggagaaugaacuauuacuggacacuaguagagccgggagacaaaauaacauucgaagcaacuggaaaucuagugguaccgagauaugcauucgcaauggaaagaaaugcuggaucugguauuaucauuucagauacaccaguccacaauugcaauacaacuugucagacacccaagggugcuauaaacaccagccucccauuucagaauauacauccgaucacaauuggaaaauguccaaaauauguaaaaagcacaaaauugagacuggccacaggauugaggaaugucccgucuauucaaucuagaggccuauuuggggccauugccgguuucauugaagggggguggacagggaugguagaugggugguacgguuaucaccaucaaaaugagcaggggucaggauaugcagccgaccugaagagcacacagaaugccauugacgagauuacuaacaaaguaaauucuguuauugaaaagaugaauacacaguucacagcaguagguaaagaguucaaccaccuggaaaaaagaauagagaauuuaaauaaaaaaguugaugaugguuuccuggacauuuggacuuacaaugccgaacuguugguucuauuggaaaaugaaagaacuuuggacuaccacgauucaaaugugaagaacuuauaugaaaagguaagaagccaguuaaaaaacaaugccaaggaaauuggaaacggcugcuuugaauuuuaccacaaaugcgauaacacgugcauggaaagugucaaaaaugggacuuaugacuacccaaaauacucagaggaagcaaaauuaaacagagaagaaauagaugggguaaagcuggaaucaacaaggauuuaccagauuuuggcgaucuauucaacugucgccaguucauugguacugguagucucccugggggcaaucaguuucuggaugugcucuaaugggucucuacaguguagaauauguauuuaa

SEQ ID NO: 38200 - RNA, 1701 nt, Artificial Sequence
  derived and/or modified CDS sequence (wt) from hemagglutinin__InfluenzaA__ADO79923
augaaggcaauacuaguaguucugcuauauacauuugcaaccgcaaaugcagacacauuauguauagguuaucaugcgaacaauucaacagacacuguagacacaguacuagaaaagaauguaacaguaacacacucuguuaaccuucuagaagacaagcauaacgggaaacuaugcaaacuaagagggguagccccauugcauuuggguaaauguaacauugcuggcuggauccugggaaauccagagugugaaucacucuccacagcaagcucaugguccuacauuguggaaacaucuaguacagacaaauggacguguuacccaggagauuucaucgauuaugaggagcuaagagagcaauugagcucagugucaucauuugaaagguuugagauauuccccaagacaaguucauggcccaaucaugacucgaacaaagguguaacggcagcauguccucaugcuggagcaaaaagcuucuacaaaaauuuaauauggcuaguuaaaaaaggaaauucauacccaaagcucagcaaauccuacauuaaugauaaagggaaagaaguccucgugcuauggggcauucaccauccaucuacuagugcugaccaacaaagucucuaucagaaugcagaugcauauguuuuuguggggacaucaagauacagcaagaaguucaagccggaaauagcuauaagacccaaagugagggaucaagaacggagaaugaacuauuacuggacacuaguacagccgggagacaaaauaacauuccaagcaacuggaaaucuagugguaccgagauaugcauucgcaauggaaagaaaugcuggaucugguauuaucauuucagauacaccaguccacaauugcaauacaacuugucagacacccaagggugcuauaaacaccagccucccauuucagaauauacauccgaucacaauuggaaaauguccaaaauauguaaaaagcacaaaauugagacuggccacaggauugaggaaugucccgucuauucaaucuagaggccuauuuggggccauugccgguuucauugaagggggguggacagggaugguagaugggugguacgguuaucaccaucaaaaugagcaggggucaggauaugcagccgaccugaagagcacacagaaugccauugacgagauuacuaacaaaguaaauucuguuauugaaaagaugaauacacaguucacagcaguagguaaagaguucaaccaccuggaaaaaagaauagagaauuuaaauaaaaaaguugaugaugguuuccuggacauuuggacuuacaaugccgaacuguugguucuauuggaaaaugaaagaacuuuggacuaccacgauucaaaugugaagaacuuauaugaaaagguaagaagccaguuaaaaaacaaugccaaggaaauuggaaacggcugcuuugaauuuuaccacaaaugcgauaacacgugcauggaaagugucaaaaaugggacuuaugacuacccaaaauacucagaggaagcaaaauuaaacagagaagaaauagaugggguaaagcuggaaucaacaaggauuuaccagauuuuggcgaucuauucaacugucgccaguucauugguacugguagucucccugggggcaaucaguuucuggaugugcucuaaugggucucuacaguguagaauauguauuuaa

SEQ ID NO: 38201 - RNA, 1701 nt, Artificial Sequence
  derived and/or modified CDS sequence (wt) from hemagglutinin__InfluenzaA__ADO79924
augaaggcaauacuaguaguucugcuauauacauuugcaaccgcaaaugcagacacauuauguauagguuaucaugcgaacaauucaacagacacuguagacacaguacuagaaaagaauguaacaguaacacacucuguuaaccuucuagaagacaagcauaacgggaaacuaugcaaacuaagagggguagccccauugcauuuggguaaauguaacauugcuggcuggauccugggaaauccagagugugaaucacucuccacagcaagcucaugguccuacauuguggaaacaucuaguacagacaaauggacguguuacccaggagauuucaucgauuaugaggagcuaagagagcaauugagcucagugucaucauuugaaagguuugagauauuccccaagacaaguucauggcccaaucaugacucgaacaaagguguaacggcagcauguccucaugcuggagcaaaaagcuucuacaaaaauuuaauauggcuaguuaaaaaaggaaauucauacccaaagcucagcaaauccuacauuaaugauaaagggaaagaaguccucgugcuauggggcauucaccauccaucuacuagugcugaccaacaaagucucuaucagaaugcagaugcauauguuuuuguggggacaucaagauacagcaagaaguucaagccggaaauagcaauaagacccaaagugagggaucgagaagggagaaugaacuauuacuggacacuaauagagccgggagacaaaauaacauucgaaccaacuggaaaucuagugguaccgagauaugcauucgcaauggaaagaaaugcuggaucugguauuaucauuucagauacaccaguccacaauugcaauaccacuugucagacacccaagggugcuauaaacaccagccucccauuucagaauauacauccgaucacaauuggaaaauguccaaaauauguaaaaagcacaaaauugagacuggccacaggauugaggaaugucccgucuauucaaucuagaggccuauuuggggccauugccgguuucauugaagggggguggacagggaugguagaugggugguacgguuaucaccaucaaaaugagcaggggucaggauaugcagccgaccugaagagcacacagaaugccauugacgagauuacuaacaaaguaaauucuguuauugaaaagaugaauacacaguucacagcaguagguaaagaguucaaccaccuggaaaaaagaauagagaauuuaaauaaaaaaguugaugaugguuuccuggacauuuggacuuacaaugccgaacuguugguucuauuggaaaaugaaagaacuuuggacuaccacgauucaaaugugaagaacuuauaugaaaagguaagaagccaguuaaaaaacaaugccaaggaaauuggaaacggcugcuuugaauuuuaccacaaaugcgauaacacgugcauggaaagugucaaaaaugggacuuaugacuacccaaaauacucagaggaagcaaaauuaaacagagaagaaauagaugggguaaagcuggaaucaacaaggauuuaccagauuuuggcgaucuauucaacugucgccaguucauugguacugguagucucccugggggcaaucaguuucuggaugugcucuaaugggucucuacaguguagaauauguauuuaa

SEQ ID NO: 38202 - RNA, 1701 nt, Artificial Sequence
  derived and/or modified CDS sequence (wt) from hemagglutinin__InfluenzaA__ADO79925
augaaggcaauacuaguaguucugcuauauacauuugcaaccgcaaaugcagacacauuauguauagguuaucaugcgaacaauucaacagacacuguagacacaguacuagaaaagaauguaacaguaacacacucuguuaaccuucuagaagacaagcauaacgggaaacuaugcaaacuaagagggguagccccauugcauuuggguaaauguaacauugcuggcuggauccugggaaauccagagugugaaucacucuccacagcaagcucaugguccuacauuguggaaacaucuaguacacaugaauggacguguuacccaggagauuucaucgauuaugaggagcuaagagagcaauugagcucagugucaucauuugaaagguuugagauauuccccaagacaaguucauggcccaaucaugacucgaacaaagguguaacggcagcauguccucaugcuggagcaaaaagcuucuacaaaaauuuaauauggcuaguuaaaaaaggaaauucauacccaaagcucagcaaauccuacauuaaugauaaagggaaagaaguccucgugcuauggggcauucaccauccaucuacuagugcugaccaacaaagucucuaucagaaugcagaugcauauguuuuuguggggacaucaagauacagcaagaaguucaagccggaaauagcaauaagacccaaagugagggaucgagaagggagaaugaacuauuacuggacacuaguagagcccggagacaaaauaacauucgaagcaccuggaaaucuagugguaccgagauaugcauucgcaauggaaagaaaugcuggaucugguauuaucauuucagauacaccaguccacaauugcaauacaacuugucagacacccaagggugcuauaaacaccagccucccauuucagaauauacauccgaucaaaauuggaaaauguucaaaauauguaaaaagcacaaaauugagacuggccacaggauugaggaaugucccgucuauucaaucuagaggccuauuuggggccauugccgguuucauugaagggggguggacagggaugguagaugggugguacgguuaucaccaucaaaaugagcaggggucaggauaugcagccgaccugaagagcacacagaaugccauugacgagauuacuaacaaaguaaauucuguuauugaaaagaugaauacacaguucacagcaguagguaaagaguucaaccaccuggaaaaaagaauagagaauuuaaauaaaaaaguugaugaugguuuccuggacauuuggacuuacaaugccgaacuguugguucuauuggaaaaugaaagaacuuuggacuaccacgauucaaaugugaagaacuuauaugaaaagguaagaagccaguuaaaaaacaaugccaaggaaauuggaaacggcugcuuugaauuuuaccacaaaugcgauaacacgugcauggaaagugucaaaaaugggacuuaugacuacccaaaauacucagaggaagcaaaauuaaacagagaagaaauagaugggguaaagcuggaaucaacaaggauuuaccagauuuuggcgaucuauucaacugucgccaguucauugguacugguagucucccugggggcaaucaguuucuggaugugcucuaaugggucucuacaguguagaauauguauuuaa

SEQ ID NO: 38203 - RNA, 1701 nt, Artificial Sequence
  derived and/or modified CDS sequence (wt) from hemagglutinin__InfluenzaA__ADO79926
augaaggcaauacuaguaguucugcuauauacauuugcaaccgcaaaugcagacacauuauguauagguuaucaugcgaacaauucaacagacacuguagacacaguacuagaaaagaauguaacaguaacacacucuguuaaccuucuagaagacaagcauaacgggaaacuaugcaaacuaagagggguagccccauugcauuuggguaaauguaacauugcuggcuggauccugggaaauccagagugugaaucacucuccacagcaagcucaugguccuacauuguggaaacaucuaguacagacaaauggacguguuacccaggagauuucaucgauuaugaggagcuaagagagcaauugagcucagugucaucauuugaaagguuugagauauuccccaaaacaaguucauggcccaaucaugacucgaacaaagguguaacggcugcauguccucaugcuggagcaaaaagcuucuacaaaaauuuaauauggcuaguuaaaaaaggaaauucauucucaaagcucagcaaaaccuaccuuaaugauaaagggaaagaaguccucgugcuauggggcauucaccauccaucuacuagugcugaccaacaaagucucuaucagaaugcagaugcauauguuuuuguggggacaucaagauacagcaagaaguucaagccggaaauagcaauaagacccaaagugagggaucaagaagggagaaugaacuauuacuggacacuaguagagccgggagacaaaauaacauucgaagcaacuggaaaucuagugguaccgagauaugcauucgcaauggaaagaaauguuggaucugguauuaucauuucagauacaccaguccacgauugcaauacaacuugucagacacccaagggugcuauaaacaccagccucccauuucagaauauacauccgaucacaauuggaaaauguccaaaauauguaaaaagcacaaaauugagacuggccacaggauugaggaaugucccgucuauucaaucuagaggccuauuuggggccauugccgguuucauugaagggggguggacagggaugguagauggaugguaugguuaucaccaucaaaaugagcaggggucaggauaugcagccgaccugaagagcacacagaaugccauugacaagauuacuaacaaaguaaauucuguuauugaaaagaugaauacacaguucacagcaguagguaaagaguucaaccaccuggaaaaaagaauagagaauuuaaauaaaaaaguugaugaugguuuccuggacauuuggacuuacaaugccgaacuguugguucuauuggaaaaugaaagaacuuuggacuaccacgauucaaaugugaagaacuuauaugaaaagguaagaagccaguuaaaaaacaaugccaaggaaaugaaaaacggcugcuuugaauuuuaccacaaaugcgauaacacgugcauggaaagugucaaaaaugggacuuaugacuacccaaaauacucagaggaagcaaaauuaaacagagaagaaauagaugggguaaagcuggaaucaacaaggauuuaccagauuuuggcgaucuauucaacugucgccaguucauugguacugguagucucccugggggcaaucaguuucuggaugugcucuaaugggucucuacaguguagaauauguauuuaa

SEQ ID NO: 38204 - RNA, 1701 nt, Artificial Sequence
  derived and/or modified CDS sequence (wt) from hemagglutinin__InfluenzaA__ADO79927
augaaggcaauacuaguaguucugcuauauacauuugcaaccgcaaaugcagacacauuauguauagguuaucaugcgaacaauucaacagacacuguagacacaguacuagaaaagaauguaacaguaacacacucuguuaaccuucuagaagacaagcauaacgggaaacuaugcaaacuaagagggguagccccauugcauuuggguaaauguaacauugcuggcuggauccugggaaauccagagugugaaucacucuccacagcaagcucaugguccuacauuguggaaacaucuaguacagacaaauggacguguuacccaggagauuucaucgauuaugaggagcuaagagagcaauugagcucagugucaucauuugaaagguuugagauauuccccaagacaaguucauggcccaaucaugacucgaacaaagguguaacggcagcauguccucaugcugcagcaaaaagcuucuacaaaaauuuaauauggcuaguuaaaaaaggaaauucauacccaaagcucagcaaauccuacauuaaugauaaagggaaagaaguccucgugcuauggggcauucaccauccaucuacuagugcugaccaacaaagucuuuaucagaaugcagaugcauauguuuuuguggggacaucaagauacagcaagaaguucaagccggaaauagcaauaagacccaaagugagggaucaagaagggagaaugaacuauuacuggacacuaguagagccgggagacaaaauaacauucgaagcaacuggaaaucuagugguaccgagauaugcauucgcaauggaaagaaaugcuggaucugguauuaucauuucagauacaccaguccacgauugcaauacaacuugucagacacccaagggugcuauaaacaccagccucccauuucagaauauacauccgaucacaauuggaaaauguccaaaauauguaaaaagcacaaaauugagacuggccacaggauugaggaauaucccgucuguucaaucuagaggccuauuuggggccauugccgguuucauugaagggggguggacagggaugguagauggaugguacgguuaucaccaucaaaaugagcaggggucaggauaugcagccgaccugaagagcacacagaaugcaauugacaagauuacuaacaaaguaaauucuguuauugaaaagaugaauacacaguucacagcaguagguaaagaguucaaccaccuggaaaaaagaauagagaauuuaaauaaaaaaguugaugaugguuuccuggacauuuggacuuacaaugccgaacuguugguucuauuggaaaaugaaagaacuuuggacuaccacgauucaaaugugaagaacuuauaugaaaagguaagaagccaguuaaaaaacaaugccaaggaaaugaaaaacggcugcuuugaauuuuaccacaaaugcgauaacacgugcauggaaagugucaaaaaugggacuuaugacuacccaaaauacucagaggaagcaaaauuaaacagagaagaaauagaugggguaaagcuggaaucaacaaggauuuaccagauuuuggcgaucuauucaacugucgccaguucauugguacugguagucucccugggggcaaucaguuucuggaugugcucuaaugggucucuacaguguagaauauguauuuaa

SEQ ID NO: 38205 - RNA, 1701 nt, Artificial Sequence
  derived and/or modified CDS sequence (wt) from hemagglutinin__InfluenzaA__ADO79928
augaaggcaauacuaguaguucugcuauauacauuugcaaccgcaaaugcagacacauuauguauagguuaucaugcgaacaauucaacagacacuguagacacaguacuagaaaagaauguaacaguaacacacucuguuaaccuucuagaagacaagcauaacgggaaacuaugcaaacuaagagggguagccccauugcauuuggguaaauguaacauugcuggcuggauccugggaaauccagagugugaaucacucuccacagcaagcucaugguccuacauuguggaaacaucuaguacagacaaauggacguguuacccaggagauuucaucgauuaugaggagcuaagagagcaauugagcucagugucaucauuugaaagguuugagauauuccccaagacaaauucauggcccaaucaugacucgaacaaagguguaacggcagcauguccucaugcuggagcaaaaagcuucuacaaaaauuuaauauggcuaguuaaaaaaggaaauucauacccaaagcucagcaaauccuacauuaaugauaaagggaaagaaguccucgugcuauggggcauucaccauccaucuacuagugcugaccaacaaagucucuaucagaaugcagaugcauauguuuuuguggggacaucaaaauacagcaagaaguucaagccggaaauagcaauaagacccaaagugagggaucaagaagggagaaugaacuauuacuggacacuaguagagccgggagacaaaauaacauucgaagcaacuggaaaucuagugguaccgagauaugcauucgcaauggaaagaaaugcuggaucugguauuaucauuucagauacaccaguccacgauugcaauacaacuugucagacacccaagggugcuauaaacaccagccucccauuucagaauauacauccgaucacaauuggaaaauguccaaaauauguaaaaagcacaaaauugagacuggccacaggauugaggaaugucccgucuauucaaucuagaggccuauuuggggccauugccgguuucauugaagggggguggacagggaugguagauggaugguacgguuaucaccaucaaaaugagcaggggucaggauaugcagccgaccugaagagcacacagaaugccauugacgagauuacuaacaaaguaaauucuguuauugaaaagaugaauacacaguucacagcaguagguaaagaguucaaccaccuggaaaaaagaauagagaauuuaaauaaaaaaguugaugaugguuuccuggacauuuggacuuacaaugccgaacuguugguucuauuggaaaaugaaagaacuuuggacuaccacgauucaaaugugaagaacuuauaugaaaagguaagaagccaguuaaaaaacaaugccaaggaaauuggaaacggcugcuuugaauuuuaccacaaaugcgauaacacgugcauggaaagugucaaaaaugggacuuaugacuacccaaaauacucagaggaagcaaaauuaaacagagaagaaauagaugggguaaagcuggaaucaacaaggauuuaccagauuuuggcgaucuauucaacugucgccaguucauugguacugguagucucccugggggcaaucaguuucuggaugugcucuaaugggucucuacaguguagaauauguauuuaa

SEQ ID NO: 38206 - RNA, 1701 nt, Artificial Sequence
  derived and/or modified CDS sequence (wt) from hemagglutinin__InfluenzaA__ADO79929
augaaggcaauacuaguaguucugcuauauacauuugcaaccgcaaaugcagacacauuauguauagguuaucaugcgaacaauucaacagacacuguagacacaguacuagaaaagaauguaacaguaacacacucuguuaaccuucuagaagacaagcauaacgggaaacuaugcaaacuaagagggguagccccauugcauuuggguaaauguaacauugcuggcuggauccugggaaauccagagugugaaucacucuccacagcaagcucaugguccuacauuguggaaacaucuaguacagacaaauggacguguuacccaggagauuucaucgauuaugaggagcuaagagagcaauugagcucagugucaucauuugaaagguuugagauauuccccaagacaaguucauggcccaaucaugacucgaacaaagguguaacggcagcauguccucaugcuggagcaaaaagcuucuacaaaaauuuaauauggcuaguuaaaaaaggaaauucauacccaaagcucagcaaauccuacauuaaugauaaagggaaagaaguccucgugcuauggggcauucaccauccaucuacuagugcugaccaacaaagucuuuaucagaaugcagaugcauauguuuuuguggggacaucaagauacagcaagaaguucaagccggaaauagcaauaagacccaaagugaggggucaagaagggagaaugaacuauuacuggacacuaguagagccgggagacaaaauaacauucgaagcaacuggaaaucuagugguaccgagauaugcauucgcaauggaaagaaaugcuggaucugguauuaucauuucagauacaccaguccacgauugcaauacaacuugucagacacccaagggugcuauaaacaccagccucccauuucagaauauacauccgaucacaauuggaaaauguccaaaauauguaaaaagcacaaaauugagacuggccacaggauugaggaauaucccgucuauucaaucuagaggccuauuuggggccauugccgguuucauugaagggggguggacagggaugguagauggaugguacgguuaucaccaucaaaaugagcaggggucaggauaugcagccgaccugaagagcacacagaaugccauugacgagauuacuaacaaaguaaauucuguuauugaaaagaugaauacacaguucacagcaguagguaaagaguucaaccaccuggaaaaaagaauagagaauuuaaauaaaaaaguugaugaugguuuccuggacauuuggacuuacaaugccgaacuguugguucuauuggaaaaugaaagaacuuuggacuaccacgauucaaaugugaagaacuuauaugaaaagguaagaagccaguuaaaaaacaaugccaaggaaauuggaaacggcugcuuugaauuuuaccacaaaugcgauaacacgugcauggaaagugucaaaaaugggacuuaugacuacccaaaauacucagaggaagcaaaauuaaacagagaagaaauagaugggguaaagcuggaaucaacaaggauuuaccagauuuuggcgaucuauucaacugucgccaguucauugguacugguagucucccugggggcaaucaguuucuggaugugcucuaaugggucucuacaguguagaauauguauuuaa

SEQ ID NO: 38207 - RNA, 1701 nt, Artificial Sequence
  derived and/or modified CDS sequence (wt) from hemagglutinin__InfluenzaA__ADO79930
augaaggcaauacuaguaguucugcuauauacauuugcaaccgcaaaugcagacacauuauguauagguuaucaugcgaacaauucaacagacacuguagacacaguacuagaaaagaauguaacaguaacacacucuguuaaccuucuagaagacaagcauaacgggaaacuaugcaaacuaagagggguagccccauugcauuuggguaaauguaacauugcuggcuggauccugggaaauccagagugugaaucacucuccacagcaagcucaugguccuacauuguggaaacaucuaguacagacaaauggacguguuacccaggagauuucaucgauuaugaggagcuaagagagcaauugagcucagugucaucauuugaaagguuugagauauuccccaagacaaguucauggcccaaucaugacucgaacaaagguguaacggcagcauguccucaugcuggagcaaaaagcuucuacaaaaauuuaauauggcuaguuaaaaaaggaaauucauacccaaagcucagcaaauccuacauuaaugauaaagggaaagaaguccucgugcuauggggcauucaccauccaucuacuagugcugaccaacaaagucucuaucagaaugcagaugcauauguuuuuguggggacaucaagauacagcaagaaguucaagccggaaauagcaauaagacccaaagugagggaucgagaagggagaaugaacuauuacuggacacuaguagagccgggagacaaaauaacauucgaagcaacuggaaaucuagugguaccgagauaugcauucgcaauggaaagaaaugcuggaucugguauuaucauuucagauacaccaguccacaauugcaauacaacuugucagacacccaagggugcuauaaacaccagccucccauuucagaauauacauccgaucacaauuggaaaauguccaaaauauguaaaaagcacaaaauugagacuggccacaggauugaggaaugucccgucuauucaaucuagaggccuauuuggggccauugccgguuucauugaagggggguggacagggaugguagaugggugguacgguuaucaccaucaaaaugagcaggggucaggauaugcagccgaccugaagagcacacagaaugccauugacgagauuacuaacaaaguaaauucuguuauugaaaagaugaauacacaguucacagcaguagguaaagaguucaaccaccuggaaaaaagaauagagaauuuaaauaaaaaaguugaugaugguuuccuggacauuuggacuuacaaugccgaacuguugguucuauuggaaaaugaaagaacuuuggacuaccacgauucaaaugugaagaacuuauaugaaaagguaagaagccaguuaaaaaacaaugccaaggaaauuggaaacggcugcuuugaauuuuaccacaaaugcgauaacacgugcauggaaagugucaaaaaugggacuuaugacuacccaaaauacucagaggaagcaaaauuaaacagagaagaaauagaugggguaaagcuggaaucaacaaggauuuaccagauuuuggcgaucuauucaacugucgccaguucauugguacugguagucucccugggggcaaucaguuucuggaugugcucuaaugggucucuacaguguagaauauguauuuaa

SEQ ID NO: 38208 - RNA, 1701 nt, Artificial Sequence
  derived and/or modified CDS sequence (wt) from hemagglutinin__InfluenzaA__ADO84715
augaaggcaauacuaguaguucugcuauauacauuugcaaccgcaaacgcaggcacauuauguauagguuaccaugcgaacaauucaacagacacuguagacacaguacuagaaaagaauguaacaguaacacacucuguuaaccuucuagaagacaagcauaacgggaaacuaugcaaacuaagagggguagccccauugcauuuggguaaauguaacauugcuggcuggauccugggaaauccagagugugaaucacucuccacagcaagcucaugguccuacauuguggaaacauuuaguucagacaauggaacguguuacccaggagauuucaucgauuaugaggagcuaagagagcaauugagcucagugucaucauuugaaagguuugagauauuccccaagacaaguucauggcccaaucaugacucgaacaaagguguaacggcagcauguccucaugcuggagcaaaaagcuucuacaaaaauuuaauauggcuaguuaaaaaaggaaauucauacccaaagcucagcaaauccuacauuaaugauaaagggaaagaaguccucgugcuauggggcauucaccauccaucuacuagugcugaccaacaaagucucuaucagaaugcagaugcauauguuuuuguggggacaucaagauacagcaagaaguucaagccggaaauagcaauaagacccaaagugagggaucaagaagggagaaugaacuauuacuggacacuaguagagccgggagacaaaauaacauucgaagcaacuggaaaucuagugguaccgagauaugcauucgcaauggaaagaaaugcuggaucugguauuaucauuucagauacaccaguccacgauugcaauacaacuugucagacacccaagggugcuauaaacaccagccucccauuucagaauauacauccgaucacaauaggaaaauguccaaaauauguaaaaagcacaaaauugagacuggccacaggauugaggaaugucccgucuauucaaucuagaggccuauuuggggccauugccgguuucauugaagggggguggacagggaugguagauggaugguacgguuaucaccaucaaaaugagcaggggucaggauaugcagccgaccugaagagcacacagaaugccauugacgagauuacuaacaaaguaaauucuguuauugaaaagaugaauacacaguucacagcaguagguaaagaguucaaccaccuggaaaaaagaauagagaauuuaaauaaaaaaguugaugaugguuuccuggacauuuggacuuacaaugccgaacuguugguucuauuggaaaaugaaagaacuuuggacuaccacgauucaaaugugaagaacuuauaugaaaagguaagaagccaguuaaaaaacaaugccaaggaaauuggaaacggcugcuuugaauuuuaccacaaaugcgauaacacgugcauggaaagugucaaaaaugggacuuaugacuacccaaaauacucagaggaagcaaaauuaaacagagaagaaauagaugggguaaagcuggaaucaacaaggauuuaccagauuuuggcgaucuauucaacugucgccaguucauugguacugguagucucccugggggcaaucaguuucuggaugugcucuaaugggucucuacaguguagaauauguauuuaa

SEQ ID NO: 38209 - RNA, 1701 nt, Artificial Sequence; identical to SEQ ID NO: 34898
  derived and/or modified CDS sequence (wt) from hemagglutinin__InfluenzaA__ADP95341

SEQ ID NO: 38210 - RNA, 1701 nt, Artificial Sequence
  derived and/or modified CDS sequence (wt) from hemagglutinin__InfluenzaA__ADP95351
augaaggcaauacuaguaguucugcuauauacauuugcaaccgcaaaugcagacacauuauguauagguuaucaugcgaacaauucaacagacacuguagacacaguacuagaaaagaauguaacaguaacacacucuguuaaccuucuagaagacaagcauaacgggaaacuaugcaaacuaagagggguagccccauugcauuuggguaaauguaacauugcuggcuggauccugggaaauccagagugugaaucacucuccacagcaagcucaugguccuacauuguggaaacaucuaguucagacaauggaacguguuacccaggagauuucaucgauuaugaggagcuaagagagcaauugagcucagugucaucauuugaaagguuugagauauuccccaagacaaguucauggcccaaucaugacucgaacaaagguguaacggcagcauguccucaugcuggagcaaaaagcuucuacaaaaauuuaauauggcuaguuaaaaaaggaaauucauacccaaagcucagcaaauccuacauuaaugauaaagggaaagaaguccucgugcuauggggcauucaccauccaucuacuagugcugaccaacaaagucucuaucagaaugcagaugcauauguuuuuguggggucaucaagauacagcaagaaguucaagccggaaauagcaauaagacccaaagugagggaucaagaagggagaaugaacuauuacuggacacuaguagagccgggagacaaaauaacauucgaagcaacuggaaaucuagugguaccgagauaugcauucgcaauggaaagaaaugcuggaucugguauuaucauuucagauacaccaguccacgauugcaauacaacuugucagacacccaagggugcuauaaacaccagccucccauuucagaauauacauccgaucacaauuggaaaauguccaaaauauguaaaaagcacaaaauugagacuggccacaggauugaggaaugucccgucuauucaaucuagaggccuauuuggggccauugccgguuucauugaagggggguggacagggaugguagauggaugguacgguuaucaccaucaaaaugagcaggggucaggauaugcagccgaccugaagagcacacagaaugccauugacgagauuacuaacaaaguaaauucuguuauugaaaagaugaauacacaguucacagcaguagguaaagaguucaaccaccuggaaaaaagaauagagaauuugaauaaaaaaguugaugaugguuuccuggacauuuggacuuacaaugccgaacuguugguucuauuggaaaaugaaagaacuuuggacuaccacgauucaaaugugaagaacuuauaugaaaagguaagaagccagcuaaaaaacaaugccaaggaaauuggaaacggcugcuuugaauuuuaccacaaaugcgauaacacgugcauggaaagugucaaaaaugggacuuaugacuacccaaaauacucagaggaagcaaaauuaaacagagaagaaauagaugggguaaagcuggaaucaacaaggauuuaccagauuuuggcgaucuauucaacugucgccaguucauugguacugguagucucccugggggcaaucaguuucuggaugugcucuaaugggucucuacaguguagaauauguauuuaa

SEQ ID NO: 38211 - RNA, 1701 nt, Artificial Sequence; identical to SEQ ID NO: 38210
  derived and/or modified CDS sequence (wt) from hemagglutinin__InfluenzaA__ADP95361

SEQ ID NO: 38212 - RNA, 1701 nt, Artificial Sequence; identical to SEQ ID NO: 38210
  derived and/or modified CDS sequence (wt) from hemagglutinin__InfluenzaA__ADP95371

SEQ ID NO: 38213 - RNA, 1701 nt, Artificial Sequence; identical to SEQ ID NO: 38210
  derived and/or modified CDS sequence (wt) from hemagglutinin__InfluenzaA__ADP95381

SEQ ID NO: 38214 - RNA, 1701 nt, Artificial Sequence; identical to SEQ ID NO: 38210
  derived and/or modified CDS sequence (wt) from hemagglutinin__InfluenzaA__ADP95391

SEQ ID NO: 38215 - RNA, 1701 nt, Artificial Sequence; identical to SEQ ID NO: 34965
  derived and/or modified CDS sequence (wt) from hemagglutinin__InfluenzaA__ADQ28007

SEQ ID NO: 38216 - RNA, 1701 nt, Artificial Sequence
  derived and/or modified CDS sequence (wt) from hemagglutinin__InfluenzaA__ADQ28008
augaaggcaauacuaguaguucugcuauauacauuugcaaccgcaaaugcagacacauuauguauagguuaucaugcgaacaauucaacagacacuguagacacaguacuagaaaagaauguaacaguaacacacucuguuaaucuucuagaagacaagcauaacgggaaacuaugcaaacuaagagggguagccccauugcauuuggguaaauguaacauugcuggcuggauccugggaaauccagagugugaaucacucuccacagcaagcucaugguccuacauuguggaaacaucuaguucagacaauggaacguguuacccaggagauuucaucgauuaugaggagcuaagagagcaauugagcucagugucaucauuugaaagguuugaaauauuccccaagacaaguucauggcccaaucaugacucgaacaaagguguaacggcagcauguccucaugcuggagcaaaaagcuucuacaaaaauuuaauauggcuaguuaaaaaaggaaauucauacccaaagcucagcaaauccuacauuaaugauaaagggaaagaaguccucgugcuauggggcauucaccauccaucuacuagugcugaccaacaaagucucuaucagaaugcagaugcauauguuuuuguggggacaucaagauacagcaagaaguucaagccggaaauagcaauaagacccaaagugagggaucaagaagggagaaugaacuauuacuggacacuaguagagccgggagacaaaauaacauucgaagcaacuggaaaucuagugguaccgagauaugcauucgcaauggaaagaaaugcuggaucugguauuaucauuucagauacaccaguccacgauugcaacacaacuugucagacacccaagggugcuauaaacaccagccucccauuucagaauauacauccgaucacaauuggaaaauguccaaaauauguaaaaagcacaaaauugagacuggccacaggauugaggaaugucccgucuauucaaucuagaggccuauuuggggccauugccgguuucauugaagggggguggacagggaugguagauggaugguacgguuaucaccaucaaaaugagcaggggucaggauaugcagccgaccugaagagcacacagaaugccauugacgagauuacuaacaaaguaaauucuguuauugaaaagaugaauacacaguucacagcaguagguaaagaguucaaccaccuggaaaaaagaauagagaauuuaaauaaaaaaguugaugaugguuuccuggacauuuggacuuacaaugccgaacuguugguucuauuggaaaaugaaagaacuuuggacuaccacgauucaaaugugaagaacuuauaugaaaagguaagaagccaguuaaaaaacaaugccaaggaaauuggaaacggcugcuuugaauuuuaccacaaaugcgauaacacgugcauggaaagugucaaaaaugggacuuaugacuacccaaaauacucagaggaagcaaaauuaaacagagaagaaauagaugggguaaagcuggaaucaacaaggauuuaccagauuuuggcgaucuauucaacugucgccaguucauugguacugguagucucccugggggcaaucaguuucuggaugugcucuaaugggucucuacaguguagaauauguauuuaa

SEQ ID NO: 38217 - RNA, 1701 nt, Artificial Sequence; identical to SEQ ID NO: 36532
  derived and/or modified CDS sequence (wt) from hemagglutinin__InfluenzaA__ADQ28009

SEQ ID NO: 38218 - RNA, 1701 nt, Artificial Sequence
  derived and/or modified CDS sequence (wt) from hemagglutinin__InfluenzaA__ADQ28010
augaaggcaauacuaguaguucugcuauauacauuugcaaccgcaaaugcagacacauuauguauagguuaucaugcgaacaauucaacagacacuguagacacaguacuagaaaagaauguaacaguaacacacucugucaaccuucuagaagacaagcauaacgggaaacuaugcaaacuaagagggguagccccauugcauuuggguaaauguaacauugcuggcuggauccugggaaauccagagugugaaucacucuccacagcaagcucaugguccuacauuguggaaacaucuaguucagacaauggaacguguuacccaggagauuucaucaauuaugaggagcuaagagagcaauugagcucagugucaucauuugaaagguuugagauauuccccaagacaaguucauggcccaaucaugacucgaacaaagguguaacggcagcauguccucaugcuggagcaaaaagcuucuacaaaaguuuaauauggcuaguuaaaaaaggaaauucauacccaaagcucagcaaauccuacauuaaugauaaagggaaagaaguccucgugcuauggggcauucaccauccaucuacuagugcugaccaacaaagucucuaucagaaugcagaugcauauguuuuuguggggacaucaagauacagcaagaaguucaagccagaaauagcaauaagacccaaagugagggaucaagaagggagaaugaacuauuacuggacacuaguagagccgggagacaaaauaacauucgaagcaacuggaaaucuagugguaccgagauaugcauucgcaauggaaagaaaugcuggaucugguauuaucauuucagauacaccaguccacgauugcaauacaacuugucagacacccaagggugcuauaaacaccagccucccauuucagaauauacauccgaucacaauuggaaaauguccaaaauauguaaaaagcacaaaauugagacuggccacaggauugaggaaugucccgucuauucaaucuagaggccuauuuggggccauugccgguuucauugaagggggguggacagggaugguagauggaugguacgguuaucaccaucaaaaugagcaggggucaggauaugcagccgaccugaagagcacacagaaugccauugacgagauuacuaacaaaguaaauucuguuauugaaaagaugaauacacaguucacagcaguagguaaagaguucaaccaccuggaaaaaagaauagagaauuuaaauaaaaaaguugaugaugguuuccuggacauuuggacuuacaaugccgaacuguugguucuauuggaaaaugaaagaacuuuggacuaccacgauucaaaugugaagaacuuauaugaaaagguaagaagccaguuaaaaaacaaugccaaggaaauuggaaacggcugcuuugaauuuuaccacaaaugcgauaacacgugcauggaaagugucaaaaaugggacuuaugacuacccaaaauacucagaggaagcaaaauuaaacagagaagaaauagaugggguaaagcuggaaucaacaaggauuuaccagauuuuggcgaucuauucaacugucgccaguucauugguacugguagucucccugggggcaaucaguuucuggaugugcucuaaugggucucuacaguguagaauauguauuuaa

SEQ ID NO: 38219 - RNA, 1701 nt, Artificial Sequence; identical to SEQ ID NO: 34681
  derived and/or modified CDS sequence (wt) from hemagglutinin__InfluenzaA__ADQ28011

SEQ ID NO: 38220 - RNA, 1701 nt, Artificial Sequence
  derived and/or modified CDS sequence (wt) from hemagglutinin__InfluenzaA__ADQ28012
augaaggcaauacuaguaguucugcuauauacauuugcaaccgcaaaugcagacacauuauguauagguuaucaugcgaacaauucaacagacacuguagacacaguacuagaaaagaauguaacaguaacacacucuguuaaccuucuagaagacaagcauaacgggaaacuaugcaaacuaagagggguagccccauugcauuuggguaaauguaacauugcuggcuggauccugggaaauccagagugugaaucacucuccacagcaagcucaugguccuacauuguggaaacaucuaguucagacaauggaacguguuacccaggagauuucaucgauuaugaggagcuaagagagcaauugagcucagugucaucauuugaaagguuugagauauuccccaagacaaguucauggcccaaucaugacucgaacaaagguguaacggcagcauguccucaugcuggagcaaaaagcuucuacaaaaauuuaauauggcuaguuaaaaaaggaaauucauacccaaagcucagcaaauccuacauuaaugauaaagggaaagaaguccucgugcuauggggcauucaccauccaucuacuagugcugaccaacaaagucucuaucagaaugcagaugcauauguuuuuguggggacaucaagauacagcaagaaguucaagccggaaauagcaauaagacccaaagugagggaucaagaagggagaaugaacuauuacuggacacuaguagaaccgggagacaaaauaacauucgaagcaacuggaaaucuagugguaccgagauaugcauucgcaauggaaagaaaugcuggaucugguauuaucauuucagauacaccaguccacgauugcaauacaacuugucagacacccaagggugcuauaaacaccagccucccauuucagaauauacauccgaucacaauuggaaaauguccaaaauauguaaaaagcacaaaauugagacuggccacaggauugaggaaugucccgucuauucaaucuagaggccuauuuggggccauugccgguuucauugaagggggguggacagggaugguagauggaugguacgguuaucaccaucaaaaugagcaggggucaggauaugcagccgaccugaagagcacacagaaugccauugacgagauuacuaacaaaguaaauucuguuauugaaaagaugaauacacaguucacagcaguagguaaagaguucaaccaccuggaaaaaagaauagagaauuuaaacaaaaaaguugaugaugguuuccuggacauuuggacuuacaaugccgaacuguugguucuauuggaaaaugaaagaacuuuggacuaccacgauucaaaugugaagaacuuauaugaaaagguaagaagccaguuaaaaaacaaugccaaggaaauuggaaacggcugcuuugaauuuuaccacaaaugcgauaacacgugcauggaaagugucaaaaaugggacuuaugacuacccaaaauacucagaggaagcaaaauuaaacagagaagaaauagaugggguaaagcuggaaucaacaaggauuuaccagauuuuggcgaucuauucaacugucgccaguucauugguacugguagucucccugggggcaaucaguuucuggaugugcucuaaugggucucuacaguguagaauauguauuuaa

SEQ ID NO: 38221 - RNA, 1701 nt, Artificial Sequence
  derived and/or modified CDS sequence (wt) from hemagglutinin__InfluenzaA__ADQ28013
augaaggcaauacuaguaguucugcuauauacauuugcaaccgcaaaugcagacacauuauguauagguuaucaugcgaacaauucaacagacacuguagacacaguacuagaaaagaauguaacaguaacacacucuguuaaccuucuagaagacaagcauaacgggaaacuaugcaaacuaagagggguagccccauugcauuuggguaaauguaacauugcuggcuggauccugggaaauccagagugugaaucacucuccacagcaagcucaugguccuacauuguggaaacaucuaguucagacaauggaacguguuacccaggagauuucaucgauuaugaggagcuaagagagcaauugagcucagugucaucauuugaaagguuugagauauuccccaagacaaguucauggcccaaucaugacucgaacaaagguguaacggcagcauguccucaugcuggagcaaaaagcuucuacaaaaauuuaauauggcuaguuaaaaaaggaaauucauacccaaagcucagcaaauccuacauuaaugauaaagggaaagaaguccucgugcuauggggcauucaccauccaucuacuagugcugaccaacaaagucucuaucagaaugcagaugcauauguuuuuguggggacaucaagauacagcaagaaguucaagccggaaauagcaauaagacccaaagugagggaucaagaagggagaaugaacuauuacuggacacuaguagagccgggagacaaaauaacauucgaagcaacuggaaaucuagugguaccgagauaugcauucgcaauggaaagaaaugcuggaucugguauuaucauuucagauacaccaguccacgauugcaauacaacuugucagacacccaagggugcuauaaacaccagccucccauuucagaauauacauccgaucacaauuggaaaauguccaaaauauguaaaaagcacaaaauugagacuggccacaggauugaggaaugucccgucuauucaaucuagaggccuauuuggggccauugccgguuucauugaagggggguggacagggaugguagauggaugguacgguuaucaccaucaaaaugagcaggggucaggauaugcagccgaccugaagagcacacagaaugccauugacgagauuacuaacaaaguaaauucuguuauugaaaagaugaauacacaguucacagcaguagguaaagaguucaaccaccuggaaaaaagaauagagaauuuaaauaaaaagguugaugaugguuuccuagacauuuggacuuacaaugccgaacuguugguucuauuggaaaaugaaagaacuuuggacuaccacgauucaaaugugaagaacuuauaugaaaagguaagaagccaguuaaaaaacaaugccaaggaaauuggaaacggcugcuuugaauuuuaccacaaaugcgauaacacgugcauggaaagugucaaaaaugggacuuaugacuacccaaaauacucagaggaagcaaaauuaaacagagaagaaauagaugggguaaagcuggaaucaacaaggauuuaccagauuuuggcgaucuauucaacugucgccaguucauugguacugguagucucccugggggcaaucaguuucuggaugugcucuaaugggucucuacaguguagaauauguauuuaa

SEQ ID NO: 38222 - RNA, 1701 nt, Artificial Sequence
  derived and/or modified CDS sequence (wt) from hemagglutinin__InfluenzaA__ADQ28014
auggaggcaauacuaguaguucugcuauauacauuugcaaccgcaaaugcagacacauuauguauagguuaucaugcgaacaauucaacagacacuguagacacaguacuagaaaagaauguaacaguaacacacucuguuaaccuucuagaagacaagcauaacgggaaacuaugcaaacuaagagggguagccccauugcauuuggguaaauguaacauugcuggcuggauccugggaaauccagagugugaaucacucuccacagcaagcucaugguccuacauuguggaaacaucuaguucagacaauggaacguguuacccaggagauuucaucgauuaugaggagcuaagagagcaauugagcucagugucaucauuugaaagguuugagauauuccccaagacaaguucauggcccaaucaugacucgaacaaagguguaacggcagcauguccucaugcuggagcaaaaagcuucuacaaaaauuuaauauggcuaguuaaaaaaggaaauucauacccaaagcucagcaaauccuacauuaaugauaaagggaaagaaguccucgugcuauggggcauucaccauccaucuacuagugcugaccaacaaagucucuaucagaaugcagaugcauauguuuuuguggggucaucaagauacagcaagaaguucaagccggaaauagcaauaagacccaaagugagggaucaagaagggagaaugaacuauuacuggacacuaguagagccgggagacaaaauaacauucgaagcaacuggaaaucuagugguaccgagauaugcauucgcaauggaaagaaaugcuggaucugguauuaucauuucagauacaccaguccacgauugcaauacaacuugucagacacccaagggugcuauaaacaccagccucccauuucauaauauacauccgaucacaauuggaaaauguccaaaauauguaaaaagcacaaaauugagacuggccacaggauugaggaaugucccgucuauucaaucuagaggccuauuuggggccauugccgguuucauugaagggggguggacagggaugguagauggaugguacgguuaucaccaucaaaaugagcaggggucaggauaugcagccgaccugaagagcacacagaaugccauugacgagauuacuaacaaaguaaauucuguuauugaaaagaugaauacacaguucacagcaguagguaaagaguucaaccaccuggaaaaaagaauagagaauuuaaauaaaaagguugaugaugguuuccuggacauuuggacuuacaaugccgaacuguugguucuauuggaaaaugaaagaacuuuggacuaccacgauucaaaugugaagaacuuauaugaaaagguaagaagccaguuaaaaaacaaugccaaggaaauuggaaacggcugcuuugaauuuuaccacaaaugcgauaacacgugcauggaaagugucaaaaaugggacuuaugacuacccaaaauacucagaggaagcaaaauuaaacagagaagaaauagaugggguaaagcuggaaucaacaaggauuuaccagauuuuggcgaucuauucaacugucgccaguucauugguacugguagucucccugggggcaaucaguuucuggaugugcucuaaugggucucuacaguguagaauauguauuuaa

SEQ ID NO: 38223 - RNA, 1701 nt, Artificial Sequence
  derived and/or modified CDS sequence (wt) from hemagglutinin__InfluenzaA__ADQ28015
auggaggcaauacuaguaguucugcuauauacauuugcaaccgcaaaugcagacacauuauguauagguuaucaugcgaacaauucaacagacacuguagacacaguacuagaaaagaauguaacaguaacacacucuguuaaccuucuagaagacaagcauaacgggaaauuaugcaaacuaagagggguagccccauugcauuuggguaaauguaacauugcuggcuggauccugggaaauccagagugugaaucacucuccacagcaagcucaugguccuacauuguggaaacaucuaguucagacaauggaacguguuacccaggagauuucaucgauuaugaggagcuaagagagcaauugagcucagugucaucauuugaaagguuugagauauuccccaagacaaguucauggcccaaucaugacucgaacaaagguguaacggcagcauguccucaugcuggagcaaaaagcuucuacaaaaauuuaauauggcuaguuaaaaaaggaaauucauacccaaagcucagcaaauccuacauuaaugauaaagggaaagaaguccucgugcuauggggcauucaccauccaucuacuagugcugaccaacaaagucucuaucagaaugcagaugcauauguuuuuguggggucaucaagauacagcaagaaguucaagccggaaauagcaauaagacccaaagugagggaucaagaagggagaaugaacuauuacuggacacuaguagagccgggagacaaaauaacauucgaagcaacuggaaaucuagugguaccgagauaugcauucgcaauggaaagaaaugcuggaucugguauuaucauuucagauacaccaguccacgauugcaauacaacuugucagacacccaagggugcuauaaacaccagccucccauuucauaauauacauccgaucacaauuggaaaauguccaaaauauguaaaaagcacaaaauugagacuggccacaggauugaggaaugucccgucuauucaaucuagaggccuauuuggggccauugccgguuucauugaagggggguggacagggaugguagauggaugguacgguuaucaccaucaaaaugagcaggggucaggauaugcagccgaccugaagagcacacagaaugccauugacgagauuacuaacaaaguaaauucuguuauugaaaagaugaauacacaguucacagcaguagguaaagaguucaaccaccuggaaaaaagaauagagaauuuaaauaaaaaaguugaugaugguuuccuggacauuuggacuuacaaugccgaacuguugguucuauuggaaaaugaaagaacuuuggacuaccacgauucaaaugugaagaacuuauaugaaaagguaagaagccaguuaaaaaacaaugccaaggaaauuggaaacggcugcuuugaauuuuaccacaaaugcgauaacacgugcauggaaagugucaaaaaugggacuuaugacuacccaaaauacucagaggaagcaaaauuaaacagagaagaaauagaugggguaaagcuggaaucaacaaggauuuaccagauuuuggcgaucuauucaacugucgccaguucauugguacugguagucucccugggggcaaucaguuucuggaugugcucuaaugggucucuacaguguagaauauguauuuaa

SEQ ID NO: 38224 - RNA, 1701 nt, Artificial Sequence; identical to SEQ ID NO: 34681
  derived and/or modified CDS sequence (wt) from hemagglutinin__InfluenzaA__ADQ28016

SEQ ID NO: 38225 - RNA, 1701 nt, Artificial Sequence; identical to SEQ ID NO: 34681
  derived and/or modified CDS sequence (wt) from hemagglutinin__InfluenzaA__ADQ28017

SEQ ID NO: 38226 - RNA, 1701 nt, Artificial Sequence
  derived and/or modified CDS sequence (wt) from hemagglutinin__InfluenzaA__ADQ28018
augaaggcaauacuaguaguucugcuauauacauuugcaaccgcaaaugcagacacauuauguauagguuaucaugcgaacaauucaacagacacuguagacacaguacuagaaaagaauguaacaguaacacacucuguuaaccuucuagaagacaagcauaacgggaaacuaugcaaacuaagagggguagccccauugcauuuggguaaauguaacauugcuggcuggauccugggaaauccagagugugaaucacucuccacagcaaacucaugguccuacauuguggaaacaucuaguucagacaauggaacguguuacccaggagauuucaucgauuaugaggagcuaagagagcaauugagcucagugucaucauuugaaagguuugagauauuccccaagacaaguucauggcccaaucaugacucgaacaaagguguaacggcagcauguccucaugcuggagcaaaaagcuucuacaaaaauuuaauauggcuaguuaaaaaaggaaauucauacccaaagcucagcaaauccuacauuaaugauaaagggaaagaaguccucgugcuauggggcauucaccauccaucuacuagugcugaccaacaaagucucuaucagaaugcagaugcauauguuuuuguggggacaucaagauacagcaagaaguucaagccggaaauagcaauaagacccaaagugagggaucaagaagggagaaugaacuauuacuggacacuaguagagccgggagacaaaauaacauucgaagcaacuggaaaucucgugguaccgagauaugcauucgcaauggaaagaaaugcuggaucugguauuaucauuucagauacaccaguccacgauugcaauacaacuugucagacacccaagggugcuauaaacaccagccucccauuucagaauauacauccgaucacaauuggaaaauguccaaaauauguaaaaagcacaaaauugagacuggccacaggauugaggaaugucccgucuauucaaucuagaggccuauuuggggccauugccgguuucauugaagggggguggacagggaugguagauggaugguacgguuaucaccaucaaaaugagcaggggucaggauaugcagccgaccugaagagcacacagaaugccauugacgagauuacuaacaaaguaaauucuguuauugaaaagaugaauacacaguucacagcaguagguaaagaguucaaccaccuggaaaaaagaauagagaauuuaaauaaaaaaguugaugaugguuuccuggacauuuggacuuacaaugccgaacuguugguucuauuggaaaaugaaagaacuuuggacuaccacgauucaaaugugaagaacuuauaugaaaagguaagaagccaguuaaaaaacaaugccaaggaaauuggaaacggcugcuuugaauuuuaccacaaaugcgauaacacgugcauggaaagugucaaaaaugggacuuaugacuacccaaaauacucagaggaagcaaaauuaaacagagaagaaauagaugggguaaagcuggaaucaacaaggauuuaccagauuuuggcgaucuauucaacugucgccaguucauugguacugguagucucccugggggcaaucaguuucuggaugugcucuaaugggucucuacaguguagaauauguauuuaa

SEQ ID NO: 38227 - RNA, 1701 nt, Artificial Sequence
  derived and/or modified CDS sequence (wt) from hemagglutinin__InfluenzaA__ADQ28019
auggaggcaauacuaguaguucugcuauauacauuugcaaccgcaaaugcagacacauuauguauagguuaucaugcgaacaauucaacagacacuguagacacaguacuagaaaagaauguaacaguaacacacucuguuaaccuucuagaagacaagcauaacgggaaacuaugcaaacuaagagggguagccccauugcauuuggguaaauguaacauugcuggcuggauccugggaaauccagagugugaaucacucuccacagcaagcucaugguccuacauuguggaaacaucuaguucagacaauggaacguguuacccaggagauuucaucgauuaugaggagcuaagagagcaauugagcucagugucaucauuugaaagguuugagauauuccccaagacaaguucauggcccaaucaugacucgaacaaagguguaacggcagcauguccucaugcuggagcaaaaagcuucuacaaaaauuuaauauggcuaguuaaaaaaggaaauucauacccaaagcucagcaaauccuacauuaaugauaaagggaaagaaguccucgugcuauggggcauucaccauccaucuacuagugcugaccaacaaagucucuaucagaaugcagaugcauauguuuuuguggggucaucaagauacagcaagaaguucaagccggaaauagcaauaagacccaaagugagggaucaagaagggagaaugaacuauuacuggacacuaguagagccgggagacaaaauaacauucgaagcaacuggaaaucuagugguaccgagguaugcauucgcaauggaaagaaaugcuggaucugguauuaucauuucagauacaccaguccacgauugcaauacaacuugucagacacccaagggugcuauaaacaccagccucccauuucauaauauacauccgaucacaauuggaaaauguccaaaauauguaaaaagcacaaaauugagacuggccacaggauugaggaaugucccgucuauucaaucuagaggccuauuuggggccauugccgguuucauugaagggggguggacagggaugguagauggaugguacgguuaucaccaucaaaaugagcaggggucaggauaugcagccgaccugaagagcacacagaaugccauugacgagauuacuaacaaaguaaauucuguuauugaaaagaugaauacacaguucacagcaguagguaaagaguucaaccaccuggaaaaaagaauagagaauuuaaauaaaaaaguugaugaugguuuccuggacauuuggacuuacaaugccgaacuguugguucuauuggaaaaugaaagaacuuuggacuaccacgauucaaaugugaagaacuuauaugaaaagguaagaagccaguuaaaaaacaaugccaaggaaauuggaaacggcugcuuugaauuuuaccacaaaugcgauaacacgugcauggaaagcgucaaaaaugggacuuaugacuacccaaaauacucagaggaagcaaaauuaaacagagaagaaauagaugggguaaagcuggaaucaacaaggauuuaccagauuuuggcgaucuauucaacugucgccaguucauugguacugguagucucccugggggcaaucaguuucuggaugugcucuaaugggucucuacaguguagaauauguauuuaa

SEQ ID NO: 38228 - RNA, 1701 nt, Artificial Sequence
  derived and/or modified CDS sequence (wt) from hemagglutinin__InfluenzaA__ADQ28020
auggaggcaauacuaguaguucugcuauauacauuugcaaccgcaaaugcagacacauuauguauagguuaucaugcgaacaauucaacagacacuguagacacaguacuagaaaagaauguaacaguaacacacucuguuaaccuucuagaagacaagcauaacgggaaacuaugcaaacuaagagggguagccccauugcauuuggguaaauguaacauugcuggcuggauccugggaaauccagagugugaaucacucuccacagcaagcucaugguccuacauuguggaaacaucuaguucagacaauggaacguguuacccaggagauuucaucgauuaugaggagcuaagagagcaauugagcucagugucaucauuugaaagguuugagauauuccccaagacaaguucauggcccaaucaugacucgaacaaagguguaacggcagcauguccucaggcuggagcaaaaagcuucuacaaaaauuuaauauggcuaguuaaaaaaggaaauucauacccaaagcucagcaaauccuacauuaaugauaaagggaaagaaguccucgugcuauggggcauucaccauccaucuacuagugcugaccaacaaagucucuaucagaaugcagaugcauauguuuuuguggggucaucaagauacagcaagaaguucaagccggaaauagcaauaagacccaaagugagggaucaagaagggagaaugaacuauuacuggacacuaguagagccgggagacaaaauaacauucgaagcaacuggaaaucuagugguaccgagauaugcauucgcaauggaaagaaaugcuggaucugguauuaucauuucagauacaccaguccacgauugcaauacaacuugucagacacccaagggugcuauaaacaccagccucccauuucauaauauacauccgaucacaauuggaaaauguccaaaauauguaaaaagcacaaaauugagacuggccacaggauugaggaaugucccgucuauucaaucuagaggccuauuuggggccauugccgguuucauugaagggggguggacagggaugguagauggaugguacgguuaucaccaucaaaaugagcaggggucaggauaugcagccgaccugaagagcacacagaaugccauugacgagauuacuaacaaaguaaauucuguuauugaaaagaugaauacacaguucacagcaguagguaaagaguucaaccacuuggaaaaaagaauagagaauuuaaauaaaaaaguugaugaugguuuccuggacauuuggacuuacaaugccgaacuguugguucuauuggaaaaugaaagaacuuuggacuaccacgauucaaaugugaagaacuuauaugaaaagguaagaagccaguuaaaaaacaaugccaaggaaauuggaaacggcugcuuugaauuuuaccacaaaugcgauaacacgugcauggaaagugucaaaaaugggacuuaugacuacccaaaauacucagaggaagcaaaauuaaacagagaagaaauagaugggguaaagcuggaaucaacaaggauuuaccagauuuuggcgaucuauucaacugucgccaguucauugguacugguagucucccugggggcaaucaguuucuggaugugcucuaaugggucucuacaguguagaauauguauuuaa

SEQ ID NO: 38229 - RNA, 1701 nt, Artificial Sequence; identical to SEQ ID NO: 37156
  derived and/or modified CDS sequence (wt) from hemagglutinin__InfluenzaA__ADQ28021

SEQ ID NO: 38230 - RNA, 1701 nt, Artificial Sequence
  derived and/or modified CDS sequence (wt) from hemagglutinin__InfluenzaA__ADQ28022
augaaggcaauacuaguaguucugcuauauacauuugcaaccgcaaaugcagacacauuauguauagguuaucaugcgaacaauucaacagacacuguagacacaguacuagaaaagaauguaacaguaacacacucuguuaaccuucuagaagacaagcauaacgggaaacuaugcaaacuaagagggguagccccauugcauuuggguaaauguaacauugcuggcuggauccugggaaauccagagugugaaucacucuccacagcaagcucaugguccuacauuguggaaacaucuaguucagacaauggaacguguuacccaggaaauuucaucgauuaugaggagcuaagagagcaauugagcucagugucaucauuugaaagguuugagauauuccccaagacaaguucauggcccaaucaugacucgaacaaagguguaacggcagcauguccucaugcuggagcaaaaagcuucuacaaaaauuuaauauggcuaguuaaaaaaggaaauucauacccaaagcucagcaaauccuacauuaaugauaaagggaaagaaguccucgugcuauggggcauucaccauccaucuacuagugcugaccaacaaagucucuaucagaaugcagaugcauauguuuuuguggggacaucaagauacagcaagaaguucaagccggaaauagcaauaagacccaaagugaggggucaagaagggagaaugaacuauuacuggacacuaguagagccgggagacaaaauaacauucgaagcaacuggaaaucuagugguaccgagauaugcauucgcaauggaaagaaaugcuggaucugguauuaucauuucagauacaccaguccacgauugcaauacaacuugucagacacccaagggugcuauaaacaccagccucccauuucagaauauacauccgaucacaauuggaaaauguccaaaauauguaaaaagcacaaaauugagacuggccacaggauugaggaaugucccgucuauucaaucuagaggccuauuuggggccauugccgguuucauugaagggggguggacagggaugguagauggaugguacgguuaucaccaucaaaaugagcaggggucaggauaugcagccgaccugaagagcacacagaaugccauugacgagauuacuaacaaaguaaauucuguuauugaaaagaugaauacacaguucacagcaguagguaaagaguucaaccaccuggaaaaaagaauagagaauuuaaauaaaaaaguugaugaugguuuccuggacauuuggacuuacaaugccgaacuguugguucuauuggaaaaugaaagaacuuuggacuaccacgauucaaaugugaagaacuuauaugaaaagguaagaagccaguuaaaaaacaaugccaaggaaauuggaaacggcugcuuugaauuuuaccacaaaugcgauaacacgugcauggaaagugucaaaaaugggacuuaugacuacccaaaauacucagaggaagcaaaauuaaacagagaagaaauagaugggguaaagcuggaaucaacaaggauuuaccagauuuuggcgaucuauucaacugucgccaguucauugguacugguagucucccugggggcaaucaguuucuggaugugcucuaaugggucucuacaguguagaauauguauuuaa

SEQ ID NO: 38231 - RNA, 1701 nt, Artificial Sequence
  derived and/or modified CDS sequence (wt) from hemagglutinin__InfluenzaA__ADQ28023
augaaggcaauacuaguaguucugcuauauacauuugcaaccgcaaaugcagacacauuauguauagguuaucaugcgaacaauucaacagacacuguagacacaguacuagaaaagaauguaacaguaacacacucuguuaaccuucuagaagacaagcauaacgggaaacuaugcaaacuaagagggguagccccauugcauuuggguaaauguaacauugcuggcuggauccugggaaauccagagugugaaucacucuccacagcaagcucaugguccuacauuguggaaacaucuaguucagacaauggaacguguuacccaggagauuucaucgauuaugaggagcuaagagagcaauugagcucagugucaucauuugaaagguuugagauauuccccaagacaaguucauggcccaaucaugacucgaacaaagguguaacggcagcauguccucaugcuggagcaaaaagcuucuacaaaaauuuaauauggcuaguuaaaaaaggaaauucauacccaaagcucagcaaauccuacauuaaugauaaagggaaagaaguccucgugcuauggggcauucaccauccaucuacuagugcugaccaacaaagucucuaucagaaugcagaugcauauguuuuuguggggacaucaagauacagcaagaaguucaagccggaaauagcaauaagacccaaagugagggaucaagaagggagaaugaacuauuacuggacacuaguagagccgggagacaaaauaacauucgaagcaacuggaaaucuagugguaccgagauaugcauucgcaauggaaagaaaugcuggaucugguauuaucauuucagauacaccaguccacgauugcaauacaacuugucagacacccaagggugcuauaaacaccagccucccauuucagaauauacauccgaucacaauuggaaaauguccaaaauauguaaaaagcacaaaauugagacuggccacaggauugaggaaugucccgucuauucaaucuagaggccuauuuggggccauugccgguuucauugaagggggguggacagggaugguagauggaugguacgguuaucaccaucaaaaugagcaggggucaggauaugcagccgaccugaagagcacacagaaugccauugacgagauuacuaacaaaguaaauucuguuauugaaaagaugaauacacaguucacagcaguagguaaagaguucaaccaccuggaaaaaagaauagagaauuuaaauaaaaaaguugaugaugguuuccuggacauuuggacuuacaaugccgaacuguugguucuauuggaaaaugaaagaacuuuggacuaccacgauucaaaugugaagaacuuauaugaaaagguaagaagccaguuaaaaaacaaugccaaggaaauuggaaacggcugcuuugaauuuuaccacaaaugcgauaacacgugcauggaaagugucaaaaaugggacuuaugacuacccaaaauacucagaggaagcaaaauuaaacagagaagaaauagauggaguaaagcuggaaucaacaaggauuuaccagauuuuggcgaucuauucaacugucgccaguucauugguacugguagucucccugggggcaaucaguuucuggaugugcuccaaugggucucuacaguguagaauauguauuuaa

SEQ ID NO: 38232 - RNA, 1701 nt, Artificial Sequence; identical to SEQ ID NO: 38223
  derived and/or modified CDS sequence (wt) from hemagglutinin__InfluenzaA__ADQ28024

SEQ ID NO: 38233 - RNA, 1701 nt, Artificial Sequence
  derived and/or modified CDS sequence (wt) from hemagglutinin__InfluenzaA__ADQ28025
auggaggcaauacuaguaguucugcuauauacauuugcaaccgcaaaugcagacacauuauguauagguuaucaugcgaacaauucaacagacacuguagacacagugcuagaaaagaauguaacaguaacacacucuguuaaccuucuagaagacaagcauaacgggaaacuaugcaaacuaagagggguagccccauugcauuuggguaaauguaacauugcuggcuggauccugggaaauccagagugugaaucacucuccacagcaagcucaugguccuacauuguggaaacaucuaguucagacaauggaacguguuacccaggagauuucaucgauuaugaggagcuaagagagcaauugagcucagugucaucauuugaaagguuugagauauuccccaagacaaguucauggcccaaucaugacucgaacaaagguguaacggcagcauguccucaugcuggagcaaaaagcuucuacaaaaauuuaauauggcuaguuaaaaaaggaaauucauacccaaagcucagcaaauccuacauuaaugauaaagggaaagaaguccucgugcuauggggcauucaccauccaucuacuagugcugaccaacaaagucucuaucagaaugcagaugcauauguuuuuguggggucaucaagauacagcaagaaguucaagccggaaauagcaauaagacccaaagugagggaucaagaagggagaaugaacuauuacuggacacuaguagagccgggagacaaaauaacauucgaagcaacuggaaaucuagugguaccgagauaugcauucgcaauggaaagaaaugcuggaucugguauuaucauuucagauacaccaguccacgauugcaauacaacuugucagacacccaagggugcuauaaacaccagccucccauuucauaauauacauccgaucacaauuggaaaauguccaaaauauguaaaaagcacaaaauugagacuggccacaggauugaggaaugucccgucuauucaaucuagaggccuauuuggggccauugccgguuucauugaagggggguggacagggaugguagauggaugguacgguuaucaccaucaaaaugagcaggggucaggauaugcagccgaccugaagagcacacagaaugccauugacgagauuacuaacaaaguaaauucuguuauugaaaagaugaauacacaguucacagcaguagguaaagaguucaaccaccuggaaaaaagaauagagaauuuaaauaaaaaaguugaugaugguuuccuggacauuuggacuuacaaugccgaacuguugguucuauuggaaaaugaaagaacuuuggacuaccacgauucaaaugugaagaacuuauaugaaaagguaagaagccaguuaaaaaacaaugccaaggaaauuggaaacggcugcuuugaauuuuaccacaaaugcgauaacacgugcauggaaagugucaaaaaugggacuuaugacuacccaaaauacucagaggaagcaaaauuaaacagagaagaaauagaugggguaaagcuggaaucaacaaggauuuaccagauuuuggcgaucuauucaacugucgccaguucauugguacugguagucucccugggggcaaucaguuucuggaugugcucuaaugggucucuacaguguagaauauguauuuaa

SEQ ID NO: 38234 - RNA, 1701 nt, Artificial Sequence; identical to SEQ ID NO: 35426
  derived and/or modified CDS sequence (wt) from hemagglutinin__InfluenzaA__ADQ28028

SEQ ID NO: 38235 - RNA, 1701 nt, Artificial Sequence
  derived and/or modified CDS sequence (wt) from hemagglutinin__InfluenzaA__ADQ28029
auggaggcaauacuaguaguucugcuauauacauuugcaaccgcaaaugcagacacauuauguauagguuaucaugcgaacaauucaacagacacuguagacacaguacuagaaaagaauguaacaguaacacacucuguuaaccuucuagaagacaagcauaacgggaaacuaugcaaacuaagagggguagccccauugcauuuggguaaauguaacauugcuggcuggauccugggaaauccagagugugaaucacucuccacagcaagcucaugguccuacauuguggaaacaucuaguucagacaauggaacguguuacccaggagauuucaucgauuaugaggagcuaagagagcaauugagcucagugucaucauuugaaagguuugagauauuccccaagacaaguucauggcccaaucaugacucgaacaaagguguaacggcagcauguccucaugcuggagcaaaaagcuucuacaaaaauuuaauauggcuaguuaaaaaaggaaauucauacccaaagcucagcaaauccuacauuaaugauaaagggaaagaaguccucgugcuauggggcauucaccauccaucuacuagugcugaccaacaaagucucuaucagaaugcagaugcauauguuuuuguggggucaucaagauacagcaagaaguucaagccggaaauagcaauaagacccaaagugaggggucaagaagggagaaugaacuauuacuggacacuaguagagccgggagacaaaauaacauucgaagcaacuggaaaucuagugguaccgagauaugcauucgcaauggaaagaaaugcuggaucugguauuaucauuucagauacaccaguccacgauugcaauacaacuugucagacacccaagggugcuauaaacaccagccucccauuucauaauauacauccgaucacaauuggaaaauguccaaaauauguaaaaagcacaaaauugagacuggccacaggauugaggaaugucccgucuauucaaucuagaggccuauuuggggccauugccgguuucauugaagggggguggacagggaugguagauggaugguacgguuaucaccaucaaaaugagcaggggucaggauaugcagccgaccugaagagcacacagaaugccauugacgagauuacuaacaaaguaaauucuguuauugaaaagaugaauacacaguucacagcaguagguaaagaguucaaccaccuggaaaaaagaauagagaauuuaaauaaaaaaguugaugaugguuuccuggacauuuggacuuacaaugccgaacuguugguucuauuggaaaaugaaagaacuuuggacuaccacgauucaaaugugaagaacuuauaugaaaagguaagaagccaguuaaaaaacaaugccaaggaaauuggaaacggcugcuuugaauuuuaccacaaaugcgauaacacgugcauggaaagugucaaaaaugggacuuaugacuacccaaaauacucagaggaagcaaaauuaaacagagaagaaauagaugggguaaagcuggaaucaacaaggauuuaccagauuuuggcgaucuauucaacugucgccaguucauugguacugguagucucccugggggcaaucaguuucuggaugugcucuaaugggucucuacaguguagaauauguauuuaa

SEQ ID NO: 38236 - RNA, 1701 nt, Artificial Sequence
  derived and/or modified CDS sequence (wt) from hemagglutinin__InfluenzaA__ADQ28030
augaaggcaauacuaguaguucugcuauauacauuugcaaccgcaaaugcagacacauuauguauagguuaucaugcgaacaauucaacagacacuguagacacaguacuagaaaagaauguaacaguaacacacucugucaaccuucuagaagacaagcauaacgggaaacuaugcaaacuaagagggguagccccauugcauuuggguaaauguaacauugcuggcuggauccugggaaauccagagugugaaucgcucuccacagcaagcucaugguccuacauuguggaaacaucuaguucagacaauggaacguguuacccaggagauuucaucaauuaugaggagcuaagagagcaauugagcucagugucaucauuugaaagguuugagauauuccccaagacaaguucauggcccaaucaugacucgaacaaagguauaacggcagcauguccucaugcuggagcaaaaagcuucuacaaaaauuuaauauggcuaguuaaaaaaggaaauucauacccaaagcucagcaaauccuacauuaaugauaaagggaaagaaguccucgugcuauggggcauucaccauccaucuacuagugcugaccaacaaagucucuaucagaaugcagaugcauauguuuuuguggggacaucaagauacagcaagaaguucaagccagaaauagcaauaagacccaaagugagggaucaagaagggagaaugaacuauuacuggacacuaguagagccgggagacaaaauaacauucgaagcaacuggaaaucuagugguaccgagauaugcauucgcaauggaaagaaaugcuggaucugguauuaucauuucagauacaccaguccacgauugcaauacaacuugucagacacccaagggugcuauaaacaccagccucccauuucagaauauacauccgaucacaauuggaaaauguccaaaauauguaaaaagcacaaaauugagacuggccacaggauugaggaaugucccgucuauucaaucuagaggccuauuuggggccauugccgguuucauugaagggggguggacagggaugguagauggaugguacgguuaucaccaucaaaaugagcaggggucaggauaugcagccgaccugaagagcacacagaaugccauugacgagauuacuaacaaaguaaauucuguuauugaaaagaugaauacacaguucacagcaguagguaaagaguucaaccaccuggaaaaaagaauagagaauuuaaauaaaaaaguugaugaugguuuccuggacauuuggacuuacaaugccgaacuguugguucuauuggaaaaugaaagaacuuuggacuaccacgauucaaaugugaagaacuuauaugaaaagguaagaagccaguuaaaaaacaaugccaaggaaauuggaaacggcugcuuugaauuuuaccacaaaugcgauaacacgugcauggaaagugucaaaaaugggacuuaugacuacccaaaauacucagaggaagcaaaauuaaacagagaagaaauagaugggguaaagcuggaaucaacaaggauuuaccagauuuuggcgaucuauucaacugucgccaguucauugguacugguagucucccugggggcaaucaguuucuggaugugcucuaaugggucucuacaguguagaauauguauuuaa

SEQ ID NO: 38237 - RNA, 1701 nt, Artificial Sequence
  derived and/or modified CDS sequence (wt) from hemagglutinin__InfluenzaA__ADQ28031
augaaggcaauacuaguaguucugcuauauacauuugcaaccgcaaaugcagacacauuauguauagguuaucaugcgaacaauucaacagacacuguagacacaguacuagaaaagaauguaacaguaacacacucugucaaccuucuagaagacaagcauaacgggaaacuaugcaaacuaagagggguagccccauugcauuuggguaaauguaacauugcuggcuggauccugggaaauccagagugugaaucacucuccacagcaagcucaugguccuacauuguggaaacaucuaguucagacaauggaacguguuacccaggagauuucaucaauuaugaggagcuaagagagcaauugagcucagugucaucauuugaaagguuugagauauuccccaagacaaguucauggcccaaucaugacucgaacaaagguguaacggcagcauguccucaugcuggagcaaaaagcuucuacaaaaauuuaauauggcuaguuaaaaaaggaaauucauacccaaagcucagcaaauccuacauuaaugauaaagggaaagaaguccucgugcuauggggcauucaccauccaucuacuagugcugaccaacaaagucucuaucagaaugcagaugcauauguuuuuguggggacaucaagauacagcaagaaguucaagccagaaauagcaauaagacccaaagugagggaucaagaagggagaaugaacuauuacuggacacuaguagagccgggagacaaaauaacauucgaagcaacuggaaaucuagugguaccgagauaugcauucgcaauggaaagaaaugcuggaucugguauuaucauuucagauacaccaguccacgauugcaauacaacuugucagacacccaagggugcuauaaacaccagccucccauuucagaauauacauccgaucacaauuggaaaauguccaaaauauguaaaaagcacaaaauugagacuggccacaggauugaggaaugucccgucuauucaaucuagaggccuauuuggggccauugccgguuucauugaagggggguggacagggaugguagauggaugguacgguuaucaccaucaaaaugagcaggggucaggauaugcagccgaccugaagagcacacagaaugccauugacgagauuacuaacaaaguaaauucuguuauugaaaagaugaauacacaguucacagcaguagguaaagaguucaaccaccuggaaaaaagaauagagaauuuaaauaaaaaaguugaugaugguuuccuggacauuuggacuuacaaugccgaacuguugguucuauuggaaaaugaaagaacuuuggacuaccacgauucaaaugugaagaacuuauaugaaaagguaagaagccaguuaaaaaacaaugccaaggaaauuggaaacggcugcuuugaauuuuaccacaaaugcgauaacacgugcauggaaagugucaaaaaugggacuuaugacuacccaaaauacucagaggaagcaaaauuaaacagagaagaaauagaugggguaaagcuggaaucaacaaggauuuaccagauuuuggcgaucuauucaacugucgccaguucauugguacugguagucucccugggggcaaucaguuucuggaugugcucuaaugggucucuacaguguagaauauguauuuaa

SEQ ID NO: 38238 - RNA, 1701 nt, Artificial Sequence
  derived and/or modified CDS sequence (wt) from hemagglutinin__InfluenzaA__ADQ28032
auggaggcaauacuaguaguucugcuauauacauuugcaaccgcaaaugcagacacauuauguauagguuaucaugcgaacaauucaacagacacuguagacacaguacuagaaaagaauguaacaguaacacacucuguuaaccuucuagaagacaagcauaacgggaaacuaugcaaacuaagagggguagccccauugcauuuggguaaauguaacauugcuggcuggauccugggaaauccagagugugaaucacucuccacagcaagcucaugguccuacauuguggaaacaucuaguucagacaauggaacguguuacccaggagauuucaucgauuaugaggagcuaagagagcaauugagcucagugucaucauuugaaagguuugagauauuccccaagacaaguucauggcccaaucaugacucgaacaaagguguaacggcugcauguccucaugcuggagcaaaaagcuucuacaaaaauuuaauauggcuaguuaaaaaaggaaauucauacccaaagcucagcaaauccuacauuaaugauaaagggaaagaaguccucgugcuauggggcauucaccauccaucuacuagugcugaccaacaaagucucuaucagaaugcagaugcauauguuuuuguggggucaucaagauacagcaagaaguucaagccggaaauagcaauaagacccaaagugagggaucaagaagggagaaugaacuauuacuggacacuaguagagccgggagacaaaauaacauucgaagcaacuggaaaucuagugguaccgagauaugcauucgcaauggaaagaaaugcuggaucugguauuaucauuucagauacaccaguccacgauugcaauacaacuugucagacacccaagggugcuauaaacaccagccucccauuucauaauauacauccgaucacaauuggaaaauguccaaaauauguaaaaagcacaaaauugagacuggccacaggauugaggaaugucccgucuauucaaucuagaggccuauuuggggccauugccgguuucauugaagggggguggacagggaugguagauggaugguacgguuaccaccaucaaaaugagcaggggucaggauaugcagccgaccugaagagcacacagaaugccauugacgagauuacuaacaaaguaaauucuguuauugaaaagaugaauacacaguucacagcaguagguaaagaguucaaccaccuggaaaaaagaauagagaauuuaaauaaaaaaguugaugaugguuuccuggacauuuggacuuacaaugccgaacuguugguucuauuggaaaaugaaagaacuuuggacuaccacgauucaaaugugaagaacuuauaugaaaagguaagaagccaguuaaaaaacaaugccaaggaaauuggaaacggcugcuuugaauuuuaccacaaaugcgauaacacgugcauggaaagugucaaaaaugggacuuaugacuacccaaaauacucagaggaagcaaaauuaaacagagaagaaauagaugggguaaagcuggaaucaacaaggauuuaccagauuuuggcgaucuauucaacugucgccaguucauugguacugguagucucccugggggcaaucaguuucuggaugugcucuaaugggucucuacaguguagaauauguauuuaa

SEQ ID NO: 38239 - RNA, 1701 nt, Artificial Sequence
  derived and/or modified CDS sequence (wt) from hemagglutinin__InfluenzaA__ADQ28034
augaaggcaauacuaguaguucugcuauauacauuugcaaccgcaaaugcagacacauuauguauagguuaucaugcgaacaauucaacagacacuguagacacaguacuagaaaagaauguaacaguaacacacucuguuaaccuucuagaagacaagcauaacgggaaacuaugcaaacuaagagggguagccccauugcauuuggguaaauguaacauugcuggcuggauccugggaaauccagagugugaaucacucuccacagcaagcucaugguccuacauuguggaaacaucuaguucagacaauggaacguguuacccaggagauuucaucaauuaugaggagcuaagagagcaauugagcucagugucaucauuugaaagguuugagauauuccccaagacaaguucauggcccaaucaugacucgaacaaagguguaacggcagcauguccucaugcuggagcaaaaagcuucuacaaaaauuuaauauggcuaguuaaaaaaggaaauucauacccaaagcucagcaaauccuacauuaaugauaaagggaaagaaguccucgugcuauggggcauucaccauccaucuacuagugcugaccaacaaagucucuaucagaaugcagaugcauauguuuuuguggggacaucaagauacagcaagaaguucaagccggaaauagcaauaagacccaaagugaggggucaagaagggagaaugaacuauuacuggacaauaguagagccgggagacaaaauaacauucgaagcaacuggaaaucuagugguaccgagauaugcauucgcaauggaaagaaaugcuggaucugguauuaucauuucagauacaccaguccacgauugcaauacaacuugucagacacccaagggugcuauaaacaccagccucccauuucagaauauacauccgaucacaauuggaaaauguccaaaauauguaaaaagcacaaaauugagacuggccacaggauugaggaaugucccgucuauucaaucuagaggccuauuuggggccauugccgguuucauugaagggggguggacagggaugguagauggaugguacgguuaucaccaucaaaaugagcaggggucaggauaugcagccgaccugaagagcacacagaaugccauugacgagauuacuaacaaaguaaauucuguuauugaaaagaugaauacacaguucacagcaguagguaaagaguucaaccaccuggaaaaaagaauagagaauuuaaauagaaaaguugaugaugguuuccuggacauuuggacuuacaaugccgaacuguugguucuauuggaaaaugaaagaacuuuggacuaccacgauucaaaugugaagaacuuauaugaaaagguaagaagccaguuaaaaaacaaugccaaggaaauuggaaacggcugcuuugaauuuuaccacaaaugcgauaacacgugcauggaaagugucaaaaaugggacuuaugacuacccaaaauacucagaggaagcaaaauuaaacagagaagaaauagaugggguaaagcuggaaucaacaaggauuuaccagauuuuggcgaucuauucaacugucgccaguucauugguacugguagucucccugggggcaaucaguuucuggaugugcucuaaugggucucuacaguguagaauauguauuuaa

SEQ ID NO: 38240 - RNA, 1701 nt, Artificial Sequence
  derived and/or modified CDS sequence (wt) from hemagglutinin__InfluenzaA__ADQ28035
augaaggcaauacuaguaguucugcuauauacauuugcaaccgcaaaugcagacacauuauguauagguuaucaugcgaacaauucaacagacacuguagacacaguacuagaaaagaauguaacaguaacacacucuguuaaccuucuagaagacaagcauaacgggaaacuaugcagacuaagagggguagccccauugcauuuggguaaauguaacauugcuggcuggauccugggaaauccagagugugaaucacucuccacagcaagcucaugguccuacauuguggaaacaucuaguucagacaauggaacguguuacccaggagauuucaucgauuaugaggagcuaagagagcaauugagcucagugucaucauuugaaagguuugagauauuccccaagacaaguucauggcccaaucaugacucgaacaaagguguaacggcagcauguccucaugcuggagcaaaaagcuucuacaaaaauuuaauauggcuaguuaaaaaaggaaauucauacccaaagcucagcaaauccuacauuaaugauaaagggaaagaaguccucgugcuauggggcauucaccauccaucuacuagugcugaccaacaaagucucuaucagaaugcagaugcauauguuuuuguggggacaucaagauacagcaagaaguucaagccggaaauagcaauaagacccaaagugaggggucaagaagggagaaugaacuauuacuggacacuaguagagccgggagacaaaauaacauucgaagcaacuggaaaucuagugguaccgagauaugcauucgcaauggaaagaaaugcuggaucugguauuaucauuucagauacaccaguccacgauugcaauacaacuugucagacacccaagggugcuauaaacaccagccucccauuucagaauauacauccgaucacaauuggaaaauguccaaaauauguaaaaagcacaaaauugagacuggccacaggauugaggaaugucccgucuauucaaucuagaggccuauuuggggccauugccgguuucauugaagggggguggacagggaugguagauggaugguacgguuaucaccaucaaaaugagcaggggucaggauaugcagccgaccugaagagcacacagaaugccauugacgagauuacuaacaaaguaaauucuguuauugaaaagaugaauacacaguucacagcaguagguaaagaguucaaccaccuggaaaaaagaauagagaauuuaaauaaaaaaguugaugaugguuuccuggacauuuggacuuacaaugccgaacuguugguucuauuggaaaaugaaagaacuuuggacuaccacgauucaaaugugaagaacuuauaugaaaagguaagaagccaguuaaaaaacaaugccaaggaaauuggaaacggcugcuuugaauuuuaccacaaaugcgauaacacgugcauggaaagugucaaaaaugggacuuaugacuacccaaaauacucagaggaagcaaaauuaaacagagaagaaauagaugggguaaagcuggaaucaacaaggauuuaccagauuuuggcgaucuauucaacugucgccaguucauugguacugguagucucccugggggcaaucaguuucuggaugugcucuaaugggucucuacaguguagaauauguauuuaa

SEQ ID NO: 38241 - RNA, 1701 nt, Artificial Sequence
  derived and/or modified CDS sequence (wt) from hemagglutinin__InfluenzaA__ADQ28036
augaaggcaauacuaguaguucugcuauauacauuugcaaccgcaaaugcagacacauuauguauagguuaucaugcgaacaauucaacagacacuguagacacaguacuagaaaagaauguaacaguaacacacucuguuaaccuucuagaagacaagcauaacgggaaacuaugcaaacuaagagggguagccccauugcauuuggguaaauguaacauugcuggcuggauccugggaaauccagagugugaaucacucuccacagcaagcucaugguccuacauuguggaaacaucuaguucagacaauggaacguguuacccaggagauuucaucgauuaugaggagcuaagagagcaauugagcucagugucaucauuugaaagguuugagauauuccccaagacaaguucauggcccaaucaugacucgaacaaagguguaacggcagcauguccucaugcuggagcaaaaagcuucuacaaaaauuuaauauggcuaguuaaaaaaggaaauucauacccaaagcucagcaaauccuacauuaaugauaaagggaaagaaguccucgugcuauggggcauucaccauccaucuacuagugcugaccaacaaagucucuaucagaaugcagaugcauauguuuuuguggggacaucaagauacagcaagaaguucaagccggaaauagcaauaagacccaaagugagggaucaagaagggagaaugaacuauuacuggacacuaguagagccgggagacaaaauaacauucgaagcaacuggaaaucuagugguaccgagauaugcauucgcaauggaaagaaaugcuggaucugguauuaucauuucagauacaccaguccacgauugcaauacaacuugucagacacccaagggugcuauaaacaccagccucccauuucagaauauacauccgaucacaauuggaaaauguccaaaauauguaaaaagcacaaaauugagacuggccacaggauugaggaaugucccgucuauucaaucuagaggccuauuuggggccauugccgguuucauugaagggggguggacagggaugguagauggaugguacgguuaucaccaucaaaaugagcaggggucaggauaugcagccgaccugaagagcacacagaaugccauugacgagauuacuaacaaaguaaauucuguuauugaaaagaugaauacacaguucacagcaguagguaaagaguucaaccaccuagaaaaaagaauagagaauuuaaauaaaaaaguugaugaugguuuccuggacauuuggacuuacaaugccgaacuguugguucuauuggaaaaugaaagaacuuuggacuaccacgauucaaaugugaagaacuuauaugaaaagguaagaagccaguuaaaaaacaaugccaaggaaauuggaaacggcugcuuugaauuuuaccacaaaugcgauaacacgugcauggaaagugucaaaaaugggacuuaugacuacccaaaauacucagaggaagcaaaauuaaacagagaagaaauagaugggguaaagcuggaaucaacaaggauuuaccagauuuuggcgaucuauucaacugucgccaguucauugguacugguagucucccugggggcaaucaguuucuggaugugcucuaaugggucucuacaguguagaauauguauuuaa

SEQ ID NO: 38242 - RNA, 1701 nt, Artificial Sequence
  derived and/or modified CDS sequence (wt) from hemagglutinin__InfluenzaA__ADQ28037
augaaggcaauacuaguaguucugcuauauacauuugcaaccgcaaaugcagacacauuauguauagguuaucaugcgaacaauucaacagacacuguagacacaguacuagaaaagaauguaacaguaacacacucuguuaaccuucuagaagacaagcauaacgggaaacuaugcaaacuaagagggguagccccauugcauuuggguaaauguaacauugcuggcuggauccugggaaauccagagugugaaucacucuccacagcaagcucaugguccuacauuguggaaacaucuaguucagacaauggaacguguuacccaggagauuucaucgauuaugaggagcuaagagagcaauugagcucagugucaucauuugaaagguuugagauauuccccaagacaaguucauggcccaaucaugacucgaacaaagguguaacggcagcauguccucaugcuggagcaaaaagcuucuacaaaaauuuaauauggcuaguuaaaaaaggaaauucauacccaaagcucagcaaauccuacauuaaugauaaagggaaagaaguccucgugcuauggggcauucaccauccaucuacuagugcugaccaacaaagucucuaucagaaugcagaugcauauguuuuuguggggacaucaagauacagcaagaaguucaagccggaaauagcaauaagacccaaagugagggaucaagaagggagaaugaacuauuacuggacacuaguagagccgggagacaaaauaacauucgaagcaacuggaaaucuagugguaccgagauaugcauucgcaauggaaagaaaugcuggaucugguauuaucauuucagauacaccaguccacgauugcaauacaacuugucagacacccaagggugcuauaaacaccagccucccauuucagaauauacauccgaucacaauuggaaaauguccaaaauauguaaaaagcacaaaauugagacuggccacaggauugaggaaugucccgucuauucaaucuagaggccuauuuggggccauugccgguuucauugaagggggguggacagggaugguagauggaugguacgguuaucaccaucaaaaugagcaggggucaggauaugcagccgaccugaagagcacacagaaugccauugacgagauuacuaacaaaguaaauucuguuauugaaaagaugaauacacaguucacagcaguagguaaagaguucaaccaccuggaaaaaagaauagagaauuuaaauaaaaaaguugaugaugguuuccuggacauuuggacuuacaaugccgaacuguugguucuauuggaaaaugaaagaacuuuggacuaccacgauucaaaugugaagaacuuauaugaaaagguaagaagccaguuaaaaaacaaugccaaggaaauuggaaacggcugcuuugaauucuaccacaaaugcgauaacacgugcauggaaagugucaaaaaugggacuuaugacuacccaaaauacucagaggaagcaaaauuaaacagagaagaaauagaugggguaaagcuggaaucaacaaggauuuaccagauuuuggcgaucuauucaacugucgccaguucauugguacugguagucucccugggggcaaucaguuucuggaugugcucuaaugggucucuacaguguagaauauguauuuaa

SEQ ID NO: 38243 - RNA, 1701 nt, Artificial Sequence
  derived and/or modified CDS sequence (wt) from hemagglutinin__InfluenzaA__ADQ28038
auggaggcaauacuaguaguucugcuauauacauuugcaaccgcaaaugcagacacauuauguauagguuaucaugcgaacaauucaacagacacuguagacacaguacuagaaaagaauguaacaguaacacacucuguuaaccuucuagaagacaagcauaacgggaaacuaugcaaacuaagagggguagccccauugcauuuggguaaauguaacauugcuggcuggauccugggaaauccagagugugaaucacucuccacagcaagcucaugguccuacauuguggaaacaucuaguucagacaauggaacguguuacccaggagauuucaucgauuaugaggagcuaagagagcaauugagcucagugucaucauuugaaagguuugagauauuccccaagacaaguucauggcccaaucaugacucgaacaaagguguaacugcagcauguccucaugcuggagcaaaaagcuucuacaaaaauuuaauauggcuaguuaaaaaaggaaauucauacccaaagcucagcaaauccuacauuaaugauaaagggaaagaaguccucgugcuauggggcauucaccauccaucuacuagugcugaccaacaaagucucuaucagaaugcagaugcauauguuuuuguggggucaucaagauacagcaagaaguucaagccggaaauagcaauaagacccaaagugagggaucaagaagggagaaugaacuauuacuggacacuaguagagccgggagacaaaauaacauucgaagcaacuggaaaucuagugguaccgagauaugcauucgcaauggaaagaaaugcuggaucugguauuaucauuucagauacaccaguccacgauugcaauacaacuugucagacacccaagggugcuauaaacaccagccucccauuucauaauauacauccgaucacaauuggaaaauguccaaaauauguaaaaagcacaaaauugagacuggccacaggauugaggaaugucccgucuauucaaucuagaggccuauuuggggccauugccgguuucauugaaggaggguggacagggaugguagauggaugguacgguuaucaccaucaaaaugagcaggggucaggauaugcagccgaccugaagagcacacagaaugccauugacgagauuacuaacaaaguaaauucuguuauugaaaagaugaauacacaguucacagcaguagguaaagaguucaaccaccuggaaaaaagaauagagaauuuaaauaaaaaaguugaugaugguuuccuggacauuuggacuuacaaugccgaacuguugguucuauuggaaaaugaaagaacuuuggacuaccacgauucaaaugugaagaacuuauaugaaaagguaagaagccaguuaaaaaacaaugccaaggaaauuggaaacggcugcuuugaauuuuaccacaaaugcgauaacacgugcauggaaagugucaaaaaugggacuuaugacuacccaaaauacucagaggaagcaaaauuaaacagagaagaaauagaugggguaaagcuggaaucaacaaggauuuaccagauuuuggcgaucuauucaacugucgccaguucauugguacugguagucucccugggggcaaucaguuucuggaugugcucuaaugggucucuacaguguagaauauguauuuaa

SEQ ID NO: 38244 - RNA, 1701 nt, Artificial Sequence; identical to SEQ ID NO: 34681
  derived and/or modified CDS sequence (wt) from hemagglutinin__InfluenzaA__ADQ28039

SEQ ID NO: 38245 - RNA, 1701 nt, Artificial Sequence; identical to SEQ ID NO: 38223
  derived and/or modified CDS sequence (wt) from hemagglutinin__InfluenzaA__ADQ28040

SEQ ID NO: 38246 - RNA, 1701 nt, Artificial Sequence; identical to SEQ ID NO: 38223
  derived and/or modified CDS sequence (wt) from hemagglutinin__InfluenzaA__ADQ28041

SEQ ID NO: 38247 - RNA, 1701 nt, Artificial Sequence
  derived and/or modified CDS sequence (wt) from hemagglutinin__InfluenzaA__ADQ28043
auggaggcaauacuaguaguucugcuauauacauuugcaaccgcaaaugcagacacauuauguauagguuaucaugcgaacaauucaacagacacuguagacacaguacuagaaaagaauguaacaguaacacacucuguuaaccuucuagaagacaagcauaacgggaaacuaugcaaacuaagagggguagccccauugcauuuggguaaauguaacauugcuggcuggauccugggaaauccagagugugaaucacucuccacagcaagcucaugguccuacauuguggaaacaucuaguucagacaauggaacguguuacccaggagauuucaucgauuaugaggagcuaagagagcaauugagcucagugucaucauuugaaagguuugagauauuccccaagacaaguucauggcccaaucaugacucgaacaaagguguaacggcagcauguccucaugauggagcaaaaagcuucuacaaaaauuuaauauggcuaguuaaaaaaggaaauucauacccaaagcucagcaaauccuacauuaaugauaaagggaaagaaguccucgugcuauggggcauucaccauccaucuacuagugcugaccaacaaagucucuaucagaaugcagaugcauauguuuuuguggggucaucaagauacagcaagaaguucaagccggaaauagcaauaagacccaaagugagggaucaagaagggagaaugaacuauuacuggacacuaguagagccgggagacaaaauaacauucgaagcaacuggaaaucuagugguaccgagauaugcauucgcaauggaaagaaaugcuggaucugguauuaucauuucagauacaccaguccacgauugcaauacaacuugucagacacccaagggugcuauaaacaccagccucccauuucauaauauacauccgaucacaauuggaaaauguccaaaauauguaaaaagcacaaaauugagacuggccacaggauugaggaaugucccgucuauucaaucuagaggccuauuuggggccauugccgguuucauugaagggggguggacagggaugguagauggaugguacgguuaucaccaucaaaaugagcaggggucaggauaugcagccgaccugaagagcacacagaaugccauugacgagauuacuaacaaaguaaauucuguuauugaaaagaugaauacacaguucacagcaguagguaaagaguucaaccaccuggaaaaaagaauagagaauuuaaauaaaaaaguugaugaugguuuccuggacauuuggacuuacaaugccgaacuguugguucuauuggaaaaugaaagaacuuuggacuaccacgauucaaaugugaagaacuuauaugaaaagguaagaagccaguuaaaaaacaaugccaaggaaauuggaaacggcugcuuugaauuuuaccacaaaugcgauaacacgugcauggagagugucaaaaaugggacuuaugacuacccaaaauacucagaggaagcaaaauuaaacagagaagaaauagaugggguaaagcuggaaucaacaaggauuuaccagauuuuggcgaucuauucaacugucgccaguucauugguacugguagucucccugggggcaaucaguuucuggaugugcucuaaugggucucuacaguguagaauauguauuuaa

SEQ ID NO: 38248 - RNA, 1701 nt, Artificial Sequence
  derived and/or modified CDS sequence (wt) from hemagglutinin__InfluenzaA__ADQ28044
auggaggcaauacuaguaguucugcuauauacauuugcaaccgcaaaugcagacacauuauguauagguuaucaugcgaacaauucaacagacacuguagacacaguacuagaaaagaauguaacaguaacacacucuguuaaccuucuagaagacaagcauaacgggaaacuaugcaaacuaagagggguagccccauugcauuuggguaaauguaacauugcuggcuggauccuaggaaauccagagugugaaucacucuccacagcaagcucaugguccuacauuguggaaacaucuaguucagacaauggaacguguuacccaggagauuucaucgauuaugaggagcuaagagagcaauugagcucagugucaucauuugaaagguuugagauauuccccaagacaaguucauggcccaaucaugacucgaacaaagguguaacggcagcauguccucaugcuggagcaaaaagcuucuacaaaaauuuaauauggcuaguuaaaaaaggaaauucauacccaaagcucagcaaauccuacauuaaugauaaagggaaagaaguccucgugcuauggggcauucaccauccaucuacuagugcugaccaacaaagucucuaucagaaugcagaugcauauguuuuuguggggucaucaagauacagcaagaaguucaagccggaaauagcaauaagacccaaagugagggaucaagaagggagaaugaacuauuacuggacacuaguagagccgggagacaaaauaacauucgaagcaacuggaaaucuagugguaccgagauaugcauucgcaauggaaagaaaugcuggaucugguauuaucauuucagauacaccaguccacgauugcaauacaacuugucagacacccaagggugcuauaaacaccagccucccauuucauaauauacauccgaucacaauuggaaaauguccaaaauauguaaaaagcacaaaauugagacuggccacaggauugaggaaugucccgucuauucaaucuagaggccuauuuggggccauugccgguuucauugaagggggguggacagggaugguagauggaugguacgguuaucaccaucaaaaugagcaggggucaggauaugcagccgaccugaagagcacacagaaugccauugacgagauuacuaacaaaguaaauucuguuauugaaaagaugaauacacaguucacagcaguagguaaagaguucaaccaucuggaaaaaagaauagagaauuuaaauaaaaaaguugaugaugguuuccuggacauuuggacuuacaaugccgaacuguugguucuauuggaaaaugaaagaacuuuggacuaccacgauucaaaugugaagaacuuauaugaaaagguaagaagccaguuaaaaaacaaugccaaggaaauuggaaacggcugcuuugaauuuuaccacaaaugcgauaacacgugcauggaaagugucaaaaaugggacuuaugacuacccaaaauacucagaggaagcaaaauuaaacagagaagaaauagaugggguaaagcuggaaucaacaaggauuuaccagauuuuggcgaucuauucaacugucgccaguucauugguacugguagucucccugggggcaaucaguuucuggaugugcucuaaugggucucuacaguguagaauauguauuuaa

SEQ ID NO: 38249 - RNA, 1701 nt, Artificial Sequence
  derived and/or modified CDS sequence (wt) from hemagglutinin__InfluenzaA__ADQ28045
augaaggcaauacuaguaguucugcuauauacauuugcaaccgcaaaugcagacacauuauguauagguuaucaugcgaacaauucaacagacacuguagacacaguacuagaaaagaauguaacaguaacacacucuguuaaccuucuagaagacaagcauaacgggaaacuaugcaaacuaagagggguagccccauugcauuuggguaaauguaacauugcuggcuggauccugggaaauccagagugugaaucacucuccacagcaagcucaugguccuacauuguggaaacaucuaguucagacaauggaacguguuacccaggagauuucaucgauuaugaggagcuaagagagcaauugagcucagugucaucauuugaaagguuugagauauuccccaagacaaguucauggcccaaucaugacucgaacaaagguguaacggcagcauguucucaugcuggagcaaaaagcuucuacaaaaauuuaauauggcuaguuaaaaaaggaaauucauacccaaagcucagcaaauccuacauuaaugauaaagggaaagaaguccucgugcuauggggcauucaccauccaucuacuagugcugaccaacaaagucucuaucagaaugcagaugcauauguuuuuguggggacaucaagauacagcaaaaaguucaagccggaaauagcaauaagacccaaagugagggaucaagaagggagaaugaacuauuacuggacacuaguagagccgggagacaaaauaacauucgaagcaacuggaaaucuagugguaccgagauaugcauucgcaauggaaagaaaugcuggaucugguauuaucauuucagauacaccaguccacgauugcaauacaacuugucagacacccaagggugcuauaaacaccagccucccauuucagaauauacauccgaucacaauuggaaaauguccaaaauauguaaaaagcacaaaauugagacuggccacaggauugaggaaugucccgucuauucaaucuagaggccuauuuggggccauugccgguuucauugaagggggguggacagggaugguagauggaugguacgguuaucaccaucaaaaugagcaggggucaggauaugcagccgaccugaagagcacacagaaugccauugacgagauuacuaacaaaguaaauucuguuauugaaaagaugaauacacaguucacagcaguagguaaagaguucaaccaccuggaaaaaagaauagagaauuuaaauaaaaaaguugaugaugguuuccuggacauuuggacuuacaaugccgaacuguugguucuauuggaaaaugaaagaacuuuggacuaccacgauucaaaugugaagaacuuauaugaaaagguaagaaaccaguuaaaaaacaaugccaaggaaauuggaaacggcugcuuugaauuuuaccacaaaugcgauaacacgugcauggaaagugucaaaaaugggacuuaugacuacccaaaauacucagaggaagcaaaauuaaacagagaagaaauagaugggguaaagcuggaaucaacaaggauuuaccagauuuuggcgaucuauucaacugucgccaguucauugguacugguagucucccugggggcaaucaguuucuggaugugcucuaaugggucucuacaguguagaauauguauuuaa

SEQ ID NO: 38250 - RNA, 1701 nt, Artificial Sequence
  derived and/or modified CDS sequence (wt) from hemagglutinin__InfluenzaA__ADQ28047
augaaggcaauacuaguaguucugcuauauacauuugcaaccgcaaaugcagacacauuauguauagguuaucaugcgaacaauucaacagacacuguagacacaguacuagaaaagaauguaacaguaacacacucuguuaaccuucuagaagacaagcauaacgggaaacuaugcaaacuaagagggguagccccauugcauuuggguaaauguaacauugcuggcuggauccugggaaauccagagugugaaucacucuccacagcaagcucaugguccuacauuguggaaacaucuaguucagacaauggaacguguuacccaggagauuucaucgauuaugaggagcuaagagagcaauugagcucagugucaucauuugaaagguuugagauauuccccaagacaaguucauggcccaaucaugacucgaacaaagguguaacggcagcauguccucaugcuggagcaaaaagcuucuacaaaaauuuaauauggcuaguuaaaaaaggaaauucauacccaaagcucagcaaauccuacauuaaugauaaagggaaagaaguccucgugcuauggggcauucaccauccaucuacuagugcugaccaacaaagucucuaucagaaugcagaugcauauguuuuuguggggacaucaagauacagcaagaaguucaagccggaaauagcaauaagacccaaagugagggaucaagaagggagaaugaacuaucacuggacacuaguagagccgggagacaaaauaacauucgaagcaacuggaaaucuaguggugccgagauaugcauucgcaauggaaagaaaugcuggaucugguauuaucauuucagauacaccaguccacgauugcaauacaacuugucagacacccaagggugcuauaaacaccagccucccauuucagaauauacauccgaucacaauuggaaaauguccaaaauauguaaaaagcacaaaauugagacuggccacaggauugaggaaugucccgucuauucaaucuagaggccuauuuggggccauugccgguuucauugaagggggguggacagggaugguagauggaugguacgguuaucaccaucaaaaugagcaggggucaggauaugcagccgaccugaagagcacacagaaugccauugacgagauuacuaacaaaguaaauucuguuauugaaaagaugaauacacaguucacagcaguagguaaagaguucaaccaccuggaaaaaagaauagagaauuuaaauaaaaaaguugaugaugguuuccuggacauuuggacuuacaaugccgaacuguugguucuauuggaaaaugaaagaacuuuggacuaccacgauucaaaugugaagaacuuauaugaaaagguaagaagccaguuaaaaaacaaugccaaggaaauuggaaacggcugcuuugaauuuuaccacaaaugcgauaacacgugcauggaaagugucaaaaaugggacuuaugacuacccaaaauacucagaggaagcaaaauuaaacagagaagaaauagaugggguaaagcuggaaucaacaaggauuuaccagauuuuggcgaucuauucaacugucgccaguucauugguacugguagucucccugggggcaaucaguuucuggaugugcucuaaugggucucuacaguguagaauauguauuuaa

SEQ ID NO: 38251 - RNA, 1701 nt, Artificial Sequence; identical to SEQ ID NO: 34681
  derived and/or modified CDS sequence (wt) from hemagglutinin__InfluenzaA__ADQ28048

SEQ ID NO: 38252 - RNA, 1701 nt, Artificial Sequence
  derived and/or modified CDS sequence (wt) from hemagglutinin__InfluenzaA__ADQ28049
auggaggcaauacuaguaguucugcuauacacauuugcaaccgcaaaugcagacacauuauguauagguuaucaugcgaacaauucaacagacacuguagacacaguacuagaaaagaauguaacaguaacacacucuguuaaccuucuagaagacaagcauaacgggaaacuaugcaaacuaagagggguagccccauugcauuuggguaaauguaacauugcuggcuggauccugggaaauccagagugugaaucacucuccacagcaagcucaugguccuacauuguggaaacaucuaguucagacaauggaacguguuacccaggagauuucaucgauuaugaggagcuaagagagcaauugagcucagugucaucauuugaaagguuugagauauuccccaagacaaguucauggcccaaucaugacucgaacaaagguguaacggcagcauguccucaugcuggagcaaaaagcuucuacaaaaauuuaauauggcuaguuaaaaaaggaaauucauacccaaagcucagcaaauccuacauuaaugauaaagggaaagaaguccucgugcuauggggcauucaccauccaucuacuagugcugaccaacaaagucucuaucagaaugcagaugcauauguuuuuguggggucaucaagauacagcaagaaguucaagccggaaauagcaauaagacccaaagugagggaucaagaagggagaaugaacuauuacuggacacuaguagagccgggagacaaaauaacauucgaagcaacuggaaaucuagugguaccgagauaugcauucgcaauggaaagaaaugcuggaucugguauuaucauuucagauacaccaguccacgauugcaauacaacuugucagacacccaagggugcuauaaacaccagccucccauuucauaauauacauccgaucacaauuggaaaauguccaaaauauguaaaaagcacaaaauugagacuggccacaggauugaggaaugucccgucuauucaaucuagaggccuauuuggggccauugccgguuucauugaagggggguggacagggaugguagauggaugguacgguuaucaccaucaaaaugagcaggggucaggauaugcagccgaccugaagagcacacagaaugccauugacgagauuacuaacaaaguaaauucuguuauugaaaagaugaauacacaguucacagcaguagguaaagaguucaaccaccuggaaaaaagaauagagaauuuaaauaaaaaaguugaugaugguuuccuggacauuuggacuuacaaugccgaacuguugguucuauuggaaaaugaaagaacuuuggacuaccacgauucaaaugugaagaacuuauaugaaaagguaagaagccaguuaaaaaacaaugccaaggaaauuggaaacggcugcuuugaauuuuaccacaaaugcgauaacacgugcauggaaagugucaaaaaugggacuuaugacuacccaaaauacucagaggaagcaaaauuaaacagagaagaaauagaugggguaaagcuggaaucaacaaggauuuaccagauuuuggcgaucuauucaacugucgccaguucauugguacugguagucucccugggggcaaucaguuucuggaugugcucuaaugggucucuacaguguagaauauguauuuaa

SEQ ID NO: 38253 - RNA, 1701 nt, Artificial Sequence
  derived and/or modified CDS sequence (wt) from hemagglutinin__InfluenzaA__ADQ28050
augaaggcaauacuaguaguucugcuauauacauuugcaaccgcaaaugcagacacauuauguauagguuaucaugcgaacaauucaacagacacuguagacacaguacuagaaaagaauguaacaguaacacacucuguuaaccuucuagaagacaagcauaacgggaaacuaugcaaacuaagagggguagccccauugcauuuggguaaauguaacauugcuggcuggauccugggaaauccagagugugaaucacucuccacagcaagcucaugguccuacauuguggaaacaucuaguucagacaauggaacguguuacccaggagauuucaucgauuaugaggagcuaagagagcaauugagcucagugucaucauuugaaagguuugagauauuccccaagacaaguucauggcccaaucaugacucgaacaaagguguaacagcagcauguccucaugcuggagcaaaaagcuucuacaaaaauuuaauauggcuaguuaaaaaaggaaauucauacccaaagcucagcaaauccuacauuaaugauaaagggaaagaaguccucgugcuauggggcauucaccauccaucuacuagugcugaccaacaaagucucuaucagaaugcagaugcauauguuuuuguggggacaucaagauacagcaagaaguucaagccggaaauagcaauaagacccaaagugagggaucaagaagggagaaugaacuauuacuggacacuaguagagccgggagacaaaauaacauucgaagcaacuggaaaucuagugguaccgagauaugcauucgcaauggaaagaaaugcuggaucugguauuaucauuucagauacaccaguccacgauugcaauacaacuugucagacacccaagggugcuauaaacaccagccucccauuucagaauauacauccgaucacaauuggaaaauguccaaaauauguaaaaagcacaaaauugagacuggccacaggauugaggaaugucccgucuauucaaucuagaggccuauuuggggccauugccgguuucauugaagggggguggacagggaugguagauggaugguacgguuaucaccaucaaaaugagcaggggucaggauaugcagccgaccugaagagcacacagaaugccauugacgagauuacuaacaaaguaaauucuguuauugaaaagaugaauacacaguucacagcaguagguaaagaguucaaccaccuggaaaaaagaauagagaauuuaaauaaaaaaguugaugaugguuuccuggacauuuggacuuacaaugccgaacuguugguucuauuggaaaaugaaagaacuuuggacuaccacgauucaaaugugaagaacuuauaugaaaagguaagaagccaguuaaaaaacaaugccaaggaaauuggaaacggcugcuuugaauuuuaccacaaaugcgauaacacgugcauggaaagugucaaaaaugggacuuaugacuacccaaaauacucagaggaagcaaaauuaaacagagaagaaauagaugggguaaagcuggaaucaacaaggauuuaccagauuuuggcgaucuauucaacugucgccaguucauugguacugguagucucccugggggcaaucaguuucuggaugugcucuaaugggucucuacaguguagaauauguauuuaa

SEQ ID NO: 38254 - RNA, 1701 nt, Artificial Sequence
  derived and/or modified CDS sequence (wt) from hemagglutinin__InfluenzaA__ADQ28051
augaaggcaauacuaguaguucugcuauauacauuugcaaccgcaaaugcagacacauuauguauagguuaucaugcgaacaauucaacagacacuguagacacaguacuagaaaagaauguaacaguaacacacucugucaaccuucuagaagacaagcaugacgggaaacuaugcaaacuaagagggguagccccauugcauuuggguaaauguaacauugcuggcuggauccugggaaauccagagugugaaucacucuccacagcaagcucaugguccuacauuguggaaacaucuaguucagacaauggaacguguuacccaggagauuucaucaauuaugaggagcuaagagagcaauugagcucagugucaucauuugaaagguuugagauauuccccaagacaaguucauggcccaaucaugacucgaacaaagguguaacggcagcauguccucaugcuggagcaaaaagcuucuacaaaaauuuaauauggcuaguuaaaaaaggaaauucauacccaaagcucagcaaauccuacauuaaugauaaagggaaagaaguccucgugcuauggggcauucaccauccaucuacuagugcugaccaacaaagucucuaucagaaugcagaugcauauguuuuuguggggacaucaagauacagcaagaaguucaagccagaaauagcaauaagacccaaagugagggaucaagaagggagaaugaacuauuacuggacacuaguagagccgggagacaaaauaacauucgaagcaacuggaaaucuagugguaccgagauaugcauucgcaauggaaagaaaugcuggaucugguauuaucauuucagauacaccaguccacgauugcaauacaacuugucagacacccaagggugcuauaaacaccagccucccauuucagaauauacauccgaucacaauuggaaaauguccaaaauauguaaaaagcacaaaauugagacuggccacaggauugaggaaugucccgucuauucaaucuagaggccuauuuggggccauugccgguuucauugaagggggguggacagggaugguagauggaugguacgguuaucaccaucaaaaugagcaggggucaggauaugcagccgaccugaagagcacacagaaugccauugacgagauuacuaacaaaguaaauucuguuauugaaaagaugaauacacaguucacagcaguagguaaagaguucaaccaccuggaaaaaagaauagagaauuuaaauaaaaaaguugaugaugguuuccuggacauuuggacuuacaaugccgaacuguugguucuauuggaaaaugaaagaacuuuggacuaccacgauucaaaugugaagaacuuauaugaaaagguaagaagccaguuaaaaaacaaugccaaggaaauuggaaacggcugcuuugaauuuuaccacaaaugcgauaacacgugcauggaaagugucaaaaaugggacuuaugacuacccaaaauacucagaggaagcaaaauuaaacagagaagaaauagaugggguaaagcuggaaucaacaaggauuuaccagauuuuggcgaucuauucaacugucgccaguucauugguacugguagucucccugggggcaaucaguuucuggaugugcucuaaugggucucuacaguguagaauauguauuuaa

SEQ ID NO: 38255 - RNA, 1701 nt, Artificial Sequence; identical to SEQ ID NO: 34681
  derived and/or modified CDS sequence (wt) from hemagglutinin__InfluenzaA__ADQ28053

SEQ ID NO: 38256 - RNA, 1701 nt, Artificial Sequence; identical to SEQ ID NO: 34965
  derived and/or modified CDS sequence (wt) from hemagglutinin__InfluenzaA__ADQ28055

SEQ ID NO: 38257 - RNA, 1701 nt, Artificial Sequence
  derived and/or modified CDS sequence (wt) from hemagglutinin__InfluenzaA__ADQ28056
auggaggcaauacuaguaguucugcuauauacauuugcaaccgcagaugcagacacauuauguauagguuaucaugcgaacaauucaacagacacuguagacacaguacuagaaaagaauguaacaguaacacacucuguuaaccuucuagaagacaagcauaacgggaaacuaugcaaacuaagagggguagccccauugcauuuggguaaauguaacauugcuggcuggauccugggaaauccagagugugaaucacucuccacagcaagcucaugguccuacauuguggaaacaucuaguucagacaauggaacguguuacccaggagauuucaucgauuaugaggagcuaagagagcaauugagcucagugucaucauuugaaagguuugagauauuccccaagacaaguucauggcccaaucaugacucgaacaaagguguaacggcagcauguccucaugcuggagcaaaaagcuucuacaaaaauuuaauauggcuaguuaaaaaaggaaauucauacccaaagcucagcaaauccuacauuaaugauaaagggaaagaaguccucgugcuauggggcauucaccauccaucuacuagugcugaccaacaaagucucuaucagaaugcagaugcauauguuuuuguggggucaucaagauacagcaagaaguucaagccggaaauagcaauaagacccaaagugagggaucaagaagggagaaugaacuauuacuggacacuaguagagccgggagacaaaauaacauucgaagcaacuggaaaucuagugguaccgagauaugcauucgcaauggaaagaaaugcuggaucugguauuaucauuucagauacaccaguccacgauugcaauacaacuugucagacacccaagggugcuauaaacaccagccucccauuucauaauauacauccgaucacaauuggaaaauguccaaaauauguaaaaagcacaaaauugagacuggccacaggauugaggaaugucccgucuauucaaucuagaggccuauuuggggccauugccgguuucauugaagggggguggacagggaugguagauggaugguacgguuaucaccaucaaaaugagcaggggucaggauaugcagccgaccugaagagcacacagaaugccauugacgagauuacuaacaaaguaaauucuguuauugaaaagaugaauacacaguucacagcaguagguaaagaguucaaccaccuggaaaaaagaauagagaauuuaaauaaaaaaguugaugaugguuuccuggacauuuggacuuacaaugccgaacuguugguucuauuggaaaaugaaagaacuuuggacuaccacgauucaaaugugaagaacuuauaugaaaagguaagaagccaguuaaaaaacaaugccaaggaaauuggaaacggcugcuuugaauuuuaccacaaaugcgauaacacgugcauggaaagugucaaaaaugggacuuaugacuacccaaaauacucagaggaagcaaaauuaaacagagaagaaauagaugggguaaagcuggaaucaacaaggauuuaccagauuuuggcgaucuauucaacugucgccaguucauugguacugguagucucccugggggcaaucaguuucuggaugugcucuaaugggucucuacaguguagaauauguauuuaa

SEQ ID NO: 38258 - RNA, 1701 nt, Artificial Sequence
  derived and/or modified CDS sequence (wt) from hemagglutinin__InfluenzaA__ADQ28057
augaaggcaauacuaguaguucugcuauauacauuugcaaccgcaaaugcagacacauuauguauagguuaucaugcgaacaauucaacagacacuguagacacaguacuagaaaagaauguaacaguaacacacucuguuaaccuucuagaagacaagcauaaugggaaacuaugcaaacuaagagggguagccccauugcauuuggguaaauguaacauugcuggcuggauccugggaaauccagagugugaaucacucuccacagcaagcucaugguccuacauuguggaaacaucuaguucagacaauggaacguguuacccaggagauuucaucgauuaugaggagcuaagagagcaauugagcucagugucaucauuugaaagguuugagauauuccccaagacaaguucauggcccaaucaugacucgaacaaagguguaacggcagcauguccccaugcuggagcaaaaagcuucuacaaaaauuuaauauggcuaguuaaaaaaggaaauucauacccaaagcucagcaaauccuacauuaaugauaaagggaaagaaguccucgugcuauggggcauucaccauccaucuacuagugcugaccaacaaagucucuaucagaaugcagaugcauauguuuuuguggggacaucaagauacagcaagaaguucaagccggaaauagcaauaagacccaaagugagggaucaagaagggagaaugaacuauuacuggacacuaguagagccgggagacaaaauaacauucgaagcaacuggaaaucuagugguaccgagauaugcauucgcaauggaaagaaaugcuggaucugguauuaucauuucagauacaccaguccacgauugcaauacaacuugucagacacccaagggugcuauaaacaccagccucccauuucagaauauacauccgaucacaauuggaaaauguccaaaauauguaaaaagcacaaaauugagacuggccacaggauugaggaaugucccgucuauucaaucuagaggccuauuuggggccauugccgguuucauugaagggggguggacagggaugguagauggaugguacgguuaucaccaccaaaaugagcaggggucaggauaugcagccgaccugaagagcacacagaaugccaucgacgagauuacuaacaaaguaaauucuguuauugaaaagaugaauacacaguucacagcaguagguaaagaguucaaccaccuggaaaaaagaauagagaauuuaaauaaaaagguugaugaugguuuccuggacauuuggacuuacaaugccgaacuguugguucuauuggaaaaugaaagaacuuuggacuaccacgauucaaaugugaagaacuuauaugaaaagguaagaagccaguuaaaaaacaaugccaaagaaauuggaaacggcugcuuugaauuuuaccacaaaugcgauaacacgugcauggaaagugucaaaaaugggacuuaugacuacccaaaauacucagaggaagcaaaauuaaacagagaagaaauagaugggguaaagcuggaaucaacaaggauuuaccagauuuuggcgaucuauucaacugucgccaguucauugguacugguagucucccugggggcaaucaguuucuggaugugcucuaaugggucucuacaguguagaauauguauuuaa

SEQ ID NO: 38259 - RNA, 1701 nt, Artificial Sequence
  derived and/or modified CDS sequence (wt) from hemagglutinin__InfluenzaA__ADQ28058
augaaggcaauacuaguaguucugcuauauacauuugcaaccgcaaaugcagacacauuauguauagguuaucaugcgaacaauucaacagacacuguagacacaguacuagaaaagaauguaacaguaacacacucuguuaaccuucuagaagacaagcauaacgggaaacuaugcaaacuaagagggguagccccauugcauuuggguaaauguaacauugcuggcuggauccugggaaauccggagugugaaucacucuccacagcaagcucaugguccuacauuguggaaacaucuaguucagacaauggaacguguuacccaggagauuucaucgauuaugaggagcuaagagagcaauugagcucagugucaucauuugaaagguuugagauauuccccaagacaaguucauggcccaaucaugacucgaacaaagguguaacggcagcauguccucaugcuggagcaaaaagcuucuacaaaaauuuaauauggcuaguuaaaaaaggaaauucauacccaaagcucagcaaauccuacauuaaugauaaagggaaagaaguccucgugcuauggggcauucaccauccaucuacuagugcugaccaacaaagucucuaucagaaugcagaugcauaugucuuuguggggacaucaagauacagcaagaaguucaagccggaaauagcaauaagacccaaagugagggaucaagaagggagaaugaacuauuacuggacacuaguagagccgggagacaaaauaacauucgaagcaacuggaaaucuagugguaccgagauaugcauucgcaauggaaagaaaugcuggaucugguauuaucauuucagauacaccaguccacgauugcaauacaacuugucagacacccaagggugcuauaaacaccagccucccauuucagaauauacauccgaucacaauuggaaaauguccaaaauauguaaaaagcacaaaauugagacuggccacaggauugaggaaugucccgucuauucaaucuagaggccuauuuggggccauugccgguuucauugaagggggguggacagggaugguagauggaugguacgguuaucaccaucaaaaugagcaggggucaggauaugcagccgaccugaagagcacacagaaugccauugacgagauuacuaacaaaguaaauucuguuauugaaaagaugaauacacaguucacagcaguagguaaagaguucaaccaccuggaaaaaagaauagagaauuuaaauaaaaagguugaugaugguuuccuagacauuuggacuuacaaugccgaacuguugguucuauuggaaaaugaaagaacuuuggacuaccacgauucaaaugugaaaaacuuauaugaaaagguaagaagccaguuaaaaaacaaugccaaggaaauuggaaacggcugcuuugaauuuuaccacaaaugcgauaacacgugcauggaaagugucaaaaaugggacuuaugacuacccaaaauacucagaggaagcaaaauuaaacagagaagaaauagaugggguaaagcuggaaucaacaaggauuuaccagauuuuggcgaucuauucaacugucgccaguucauugguacugguagucucccugggggcaaucaguuucuggaugugcucuaaugggucucuacaguguagaauauguauuuaa

SEQ ID NO: 38260 - RNA, 1701 nt, Artificial Sequence
  derived and/or modified CDS sequence (wt) from hemagglutinin__InfluenzaA__ADQ28059
augaaggcaauacuaguaguucugcuauauacacuugcaaccgcaaaugcagacacauuauguauagguuaucaugcgaacaauucaacagacacuguagacacaguacuagaaaagaauguaacaguaacacacucuguuaaccuucuagaagacaagcauaacgggaaacuaugcaaacuaagagggguagccccauugcauuuggguaaauguaacauugcuggcuggauccugggaaauccagagugugaaucacucuccacagcaagcucaugguccuacauuguggaaacaucuaguucagacaauggaacguguuacccaggagauuucaucgauuaugaggagcuaagagagcaauugagcucagugucaucauuugaaagguuugagauauuccccaagacaaguucauggcccaaucaugacucgaacaaagguguaacggcagcauguccucaugcuggagcaaaaagcuucuacaaaaauuuaauauggcuaguuaaaaaaggaaauucauacccaaagcucagcaaauccuacauuaaugauaaagggaaagaaguccucgugcuauggggcauucaccauccaucuacuagugcugaccaacaaagucucuaucagaaugcagaugcauauguuuuuguggggacaucaaaauacagcaagaaguucaagccggaaauagcaauaagacccaaagugagggaucaagaagggagaaugaacuauuacuggacacuaguagagccgggagacaaaauaacauucgaagcaacuggaaaucuagugguaccgagauaugcauucgcaauggaaagaaaugcuggaucugguauuaucauuucagauacaccaguccacgauugcaauacaacuugucagacacccaagggugcuauaaacaccagccucccauuucagaauauacauccgaucacaauuggaaaauguccaaaauauguaaaaagcacaaaauugagacuggccacaggauugaggaaugucccgucuauucaaucuagaggccuauuuggggccauugccgguuucauugaagggggguggacagggaugguagauggaugguacgguuaucaccaucaaaaugagcaggggucaggauaugcagccgaccugaagagcacacagaaugccauugacgagauuacuaacaaaguaaauucuguuauugaaaagaugaauacacaguucacagcaguagguaaagaguucaaccaccuggaaaaaagaauagagaauuuaaauaaaaaaguugaugauggcuuccuggacauuuggacuuacaaugccgaacuguugguucuauuggaaaaugaaagaacuuuggacuaccacgauucaaaugugaagaacuuauaugaaaagguaagaagccaguuaaaaaacaaugccaaggaaauuggaaacggcugcuuugaauuuuaccacaaaugcgauaacacgugcauggaaagugucaaaaaugggacuuaugacuacccaaaauacucagaggaagcaaaauuaaacagagaagaaauagaugggguaaagcuggaaucaacaaggauuuaccagauuuuggcgaucuauucaacugucgccaguucauugguacugguagucucccugggggcaaucaguuucuggaugugcucuaaugggucucuacaguguagaauauguauuuaa

SEQ ID NO: 38261 - RNA, 1701 nt, Artificial Sequence
  derived and/or modified CDS sequence (wt) from hemagglutinin__InfluenzaA__ADQ28060
augaaggcaauacuaguaguucugcuauauacauuugcaaccgcaaaugcagacacauuauguauagguuaucaugcgaacaauucaacagacacuguagacacaguacuagaaaagaauguaacaguaacacacucuguuaaccuucuagaagacaagcauaacgggaaacuaugcaaacuaagagggguagccccauugcauuuggguaaauguaacauugcuggcuggauccugggaaauccagagugugaaucacucuccacagcaagcucaugguccuacauuguggaaacaucuaguucagacaauggaacguguuacccaggagauuucaucgauuaugaggagcuaagagagcaauugagcucagugucaucauuugaaagguuugagauauuccccaagacaaguucauggcccaaucaugacucgaacaaagguguaacggcagcauguccucaugcuggagcaaaaagcuucuacaaaaauuuaauauggcuaguuaaaaaaggaaauucauacccaaagcucagcaaauccuacauuaaugauaaagggaaagaaguccucgugcuauggggcauucaccauccaucuacuagugcugaccaacaaagucucuaucagaaugcagaugcauauguuuuuguggggacaucaagauacagcaagaaguucaagccggaaauagcaauaagacccaaagugagggaucaagaagggagaaugaacuauuacuggacacuaguagagccgggagacaaaauaacauucgaagcaacuggaaaucuagugguaccgagauaugcauucgcaauggaaagaaaugcuggaucugguauuaucauuucagauacaccaguccacgauugcaauacaacuugucagacacccaagggugcuauaaacaccagccucccauuucagaauauacauccgaucacaauuggaaaauguccaaaauauguaaaaagcacaaaauugagacuggccacaggauugaggaaugucccgucuauucaaucuagaggccuauuuggggccauugccgguuucauugaagggggguggacagggaugguagauggaugguacgguuaccaccaucaaaaugagcaggggucaggauaugcagccgaccugaagagcacacagaaugccauugacgagauuacuaacaaaguaaauucuguuauugaaaagaugaauacacaguucacagcaguagguaaagaguucaaccaccuggaaaaaagaauagagaauuuaaauaaaaagguugaugaugguuuccuagacauuuggacuuacaaugccgaacuguugguucuauuggaaaaugaaagaacuuuggacuaccacgauucaaaugugaagaacuuauaugaaaagguaagaagccaguuaaaaaacaaugccaaggaaauuggaaacggcugcuuugaauuuuaccacaaaugcgauaacacgugcauggaaagugucaaaaaugggaccuaugacuacccaaaauacucagaggaagcaaaauuaaacagagaagaaauagaugggguaaagcuggaaucaacaaggauuuaccagauuuuggcgaucuauucaacugucgccaguucauugguacugguagucucccugggggcaaucaguuucuggaugugcucuaaugggucucuacaguguagaauauguauuuaa

SEQ ID NO: 38262 - RNA, 1701 nt, Artificial Sequence
  derived and/or modified CDS sequence (wt) from hemagglutinin__InfluenzaA__ADQ28061
augaaggcaauacuaguaguucugcuauauacauuugcaaccgcaaaugcagacacauuauguauagguuaucaugcgaacaauucaacagacacuguagacacaguacuagaaaagaauguaacaguaacacacucuguuaaccuucuagaagacaagcauaacgggaaacuaugcaaacuaagagggguagccccauugcauuuggguagauguaacauugcuggcuggauccugggaaauccagagugugaaucacucuccacagcaagcucaugguccuacauuguggaaacaucuaguucagacaauggaacguguuacccaggagauuucaucgauuaugaggagcuaagagagcaauugagcucagugucaucauuugaaagguuugagauauuccccaagacaaguucauggcccaaucaugacucgaacaaagguguaacggcagcauguccucaugcuggagcaaaaagcuucuacaaaaauuuaauauggcuaguuaaaaaaggaaauucauacccaaagcucagcaaauccuacauuaaugauaaagggaaagaaguccucgugcuauggggcauucaccauccaucuacuagugcugaccaacaaagucucuaucagaaugcagaugcaaauguuuuuguggggacaucaagauacagcaagaaguucaagccggaaauagcaauaagacccaaagugagggaucaagaagggagaaugaacuauuacuggacacuaguagagccgggagacaaaauaacauucgaagcaacuggaaaucuagugguaccgagauaugcauucgcaauggaaagaaaugcuggaucugguauuaucauuucagauacaccaguccacgauugcaauacaacuugucagacacccaagggugcuauaaacaccagccucccauuucagaauauacauccgaucacaauuggaaaauguccaaaauauguaaaaagcacaaaauugagacuggccacaggauugaggaaugucccgucuauucaaucuagaggccuauuuggggccauugccgguuucauugaagggggguggacagggaugguagauggaugguacgguuaucaccaucaaaaugagcaggggucaggauaugcagccgaccugaagagcacacagaaugccauugacgagauuacuaacaaaguaaauucuguuauugaaaagaugaauacacaguucacagcaguagguaaagaguucaaccaccuggaaaaaagaauagagaauuuaaauaaaaaaguugaugaugguuuccuggacauuuggacuuacaaugccgaacuguugguucuauuggaaaaugaaagaacuuuggacuaccacgauucaaaugugaagaacuuauaugaaaagguaagaagccaguuaaaaaacaaugccaaggaaauuggaaacggcugcuuugaauuuuaccacaaaugcgauaacacgugcauggaaagugucaaaaaugggacuuaugacuacccaaaauacucagaggaagcaaaauuaaacagagaagaaauagaugggguaaagcuggaaucaacaaggauuuaccagauuuuggcgaucuauucaacugucgccaguucauugguacugguagucucccugggggcaaucaguuucuggaugugcucuaaugggucucuacaguguagaauauguauuuaa

SEQ ID NO: 38263 - RNA, 1701 nt, Artificial Sequence
  derived and/or modified CDS sequence (wt) from hemagglutinin__InfluenzaA__ADQ28063
augaaggcaauacuaguaguucugcuauauacauuugcaaccgcaaaugcagacacauuauguauagguuaucaugcgaacaauucaacagacacuguagacacaguacuagaaaagaauguaacaguaacacacucuguuaaccuucuagaagacaagcauaacgggaaacuaugcaaacuaagagggguagccccauugcauuuggguaaauguaacauugcuggcuggauccugggaaauccagagugugaaucacucuccacagcaagcucaugguccuacauuguggaaacaucuaguucagacaauggaacauguuacccaggagauuucaucaauuaugaggagcuaagagagcaauugagcucagugucaucauuugaaagguuugagauauuccccaagacaaguucauggcccaaucaugacucgaacaaagguguaacggcagcauguccucaugcuggagcaaaaagcuucuacaaaaauuuaauauggcuaguuaaaaaaggaaauucauacccaaagcucagcaaauccuacauuaaugauaaagggaaagaaguccucgugcuauggggcauucaccauccaucuacuagugcugaccaacaaagucucuaucagaaugcagaugcauauguuuuuguggggacaucaagauacagcaagaaguucaagccggaaauagcaauaagacccaaagugaggaaucaagaagggagaaugaacuaucacuggacacuaguaaagccgggagacaaaauaacauucgaagcaacuggaaaucuagugguaccgagauaugcauucgcaguggaaagaaaugcuggaucugguauuaucauuucagauacaccaguccacgauugcaauacaacuugucagacacccaagggugcuauaaacaccagccucccauuucagaauauacauccgaucacaauuggaaaauguccaaaauauguaaaaagcacaaaauugagacuggccacaggauugaggaaugucccgucuauucaaucuagaggccuauuuggggccauugccgguuucauugaagggggguggacagggaugguagauggaugguacgguuaucaccaucaaaaugagcaggggucaggauaugcagccgaccugaagagcacacagaaugccauugacgagauuacuaacaaaguaaauucuguuauugaaaagaugaauacacaguucacagcaguagguaaagaguucaaccaccuggaaaaaagaauagagaauuuaaauaaaaaaguugaugaugguuuccuggacauuuggacuuacaaugccgaacuguugguucuauuggaaaaugaaagaacuuuggacuaccacgauucaaaugugaagaacuuauaugaaaagguaagaagccaguuaaaaaacaaugccaaggaaauuggaaacggcugcuuugaauuuuaccacaaaugcgauaacacgugcauggaaagugucaaaaaugggacuuaugacuacccaaaauacucagaggaagcaaaauuaaacagagaagaaauagauggggugaagcuggaaucaacaaggauuuaccagauuuuggcgaucuauucaacugucgccaguucauugguacugguagucucccugggggcaaucaguuucuggaugugcucuaaugggucucuacaguguagaauauguauuuaa

SEQ ID NO: 38264 - RNA, 1701 nt, Artificial Sequence
  derived and/or modified CDS sequence (wt) from hemagglutinin__InfluenzaA__ADQ28064
augaaggcaauacuaguaguucugcuauauacauuugcaaccgcaaaugcagacacauuauguauagguuaucaugcgaacaauucaacagacacuguagacacaguacuagaaaagaauguaacaguaacacacucuguuaaccuucuagaagacaagcauaacgggaaacuaugcaaacuaagagggguagccccauugcauuuggguaaauguaacauugcuggcuggauccugggaaauccagagugugaaucacucuccacagcaagcucaugguccuacauuguggaaacaucuaguucagacaauggaacguguuacccaggagauuucaucgauuaugaggagcuaagagagcaauugagcucagugucaucauuugaaagguuugagauauuccccaagacaaguucauggcccaaucaugacucgaacaaagguguaacggcagcauguccucaugcuggagcaaaaagcuucuacaaaaauuuaauauggcuaguuaaaaaaggaaauucauacccaaagcucagcaaauccuacauuaaugauaaagggaaagaaguccucgugcuauggggcauucaccauccaucuacuagugcugaccaacaaagucucuaucagaaugcagaugcauauguuuuuguggggacaucaagauacagcaagaaguucaagccggaaauagcaauaagacccaaagugaggaaucaagaagggagaaugaacuauuacuggacacuaguagagccgggagacaaaauaacauucgaagcaacuggaaaucuagugguaccgagauaugcauucgcaauggaaagaaaugcuggaucugguauuaucauuucagauacaccaguccacgauugcaauacaacuugucagacacccaagggugcuauaaacaccagccucccauuucagaauauacauccgaucacaauuggaaaauguccaaaauauguaaaaagcacaaaauugagacuggccacaggauugaggaaugucccgucuauucaaucuagaggccuauuuggggccauugccgguuucauugaagggggguggacagggaugguagauggaugguacgguuaucaccaucaaaaugagcaggggucaggauaugcagccgaccugaagagcacacagaaugccauugacgagauuacuaacaaaguaaauucuguuauugaaaagaugaauacacaguucacagcaguagguaaagaguucaaccaccuggaaaaaagaauagagaauuuaaauaaaaaaguugaugaugguuuccuggacauuuggacuuacaaugccgaacuguugguucuauuggaaaaugaaagaacuuuggacuaccacgauucaaaugugaagaacuuauaugaaaagguaagaagccaguuaaaaaacaaugccaaggaaauuggaaacggcugcuuugaauuuuaccacaaaugcgauaacacgugcauggaaagugucaaaaaugggacuuaugacuacccaaaauacucagaggaagcaaaacuaaacagagaagaaauagaugggguaaagcuggaaucaacaaggauuuaccagauuuuggcgaucuauucaacugucgccaguucauugguacugguagucucccugggggcaaucaguuucuggaugugcucuaaugggucucuacaguguagaauauguauuuaa

SEQ ID NO: 38265 - RNA, 1701 nt, Artificial Sequence
  derived and/or modified CDS sequence (wt) from hemagglutinin__InfluenzaA__ADQ28065
augaaggcaauacuaguaguucugcuauauacauuugcaaccgcaaaugcagacacauuauguauagguuaucaugcgaacaauucaacagacacuguagacacaguacuagaaaagaauguaacaguaacacacucuguuaaccuucuagaagacaagcauaacgggaaacuaugcaaacuaagagggguagccccauugcauuuggguaaauguaacauugcuggcuggauccugggaaauccagagugugaaucacucuccacagcaagcucaugguccuacauuguggaaacaucuaguucagacaauggaacguguuacccaggagauuucaucgauuaugaggagcuaagagagcaauugagcucagugucaucauuugaaagguuugagauauuccccaagacaaguucauggcccaaucaugacucgaauaaagguguaacggcagcauguccucaugcuggagcaaaaagcuucuacaaaaauuuaauauggcuaguuaaaaaaggaaauucauacccaaagcucagcaaauccuacauuaaugauaaagggaaagaaguccucgugcuauggggcauucaccauccaucuacuagugcuggccaacaaagucucuaucagaaugcagaugcauauguuuuuguggggacaucaagauacagcaagaaguucaagccggaaauagcaauaagacccaaagugagggaucaagaagggagaaugaacuauuacuggacacuaguagagccgggagacaaaauaacauucgaagcaacuggaaaucuagugguaccgagauaugcauucgcaauggaaagaaaugcuggaucugguauuaucauuucagauacacaaguccacgauugcaauacaacuugucagacacccaagggugcuauaaacaccagccucccauuucagaauauacauccgaucacaauuggaaaauguccaaaauauguaaaaagcacaaaauugagacuggccacaggauugaggaaugucccgucuauucaaucuagaggccuauuuggggccauugccgguuucauugaagggggguggacagggaugguagauggaugguacgguuaucaccaucaaaaugagcaggggucaggauaugcagccgaccugaagagcacacagaaugccauugacaagauuacuaacaaaguaaauucuguuauugaaaagaugaauacacaguucacagcaguagguaaagaguucaaccaccuggaaaaaagaauagagaauuuaaauaaaaaaguugaugaugguuuccuggacauuuggacuuacaaugccgaacuguugguucuauuggaaaaugaaagaacuuuggacuaccacgauucaaaugugaagaacuuauaugaaaagguaagaagccaguuaaaaaacaaugccaaggaaauuggaaacggcugcuuugaauuuuaccacaaaugcgauaacacgugcauggaaagugucaaaaaugggacuuaugacuacccaaaauacucagaggaagcaaaauuaaacagagaagaaauagaugggguaaagcuggaaucaacaaggauuuaccagauuuuggcgaucuauucaacugucgccaguucauugguacugguagucucccugggggcaaucaguuucuggaugugcucuaaugggucucuacaauguagaauauguauuuaa

SEQ ID NO: 38266 - RNA, 1701 nt, Artificial Sequence
  derived and/or modified CDS sequence (wt) from hemagglutinin__InfluenzaA__ADQ28066
augaaggcaauacuaguaguucugcuauauacauuugcaaccgcaaaugcagacacauuauguauagguuaucaugcgaacaauucaacagacacuguagacacaguacuagaaaagaauguaacaguaacacacucuguuaaccuucuagaagacaagcauaacgggaaacuaugcaaacuaagagggguagccccauugcauuuggguaaauguaacauugcuggcuggauccugggaaauccagagugugaaucacucuccacagcaagcucaugguccuacauuguggaaacaucuaguucagacaauggaacguguuacccaggagauuucaucgauuaugaggagcuaagagagcaauugagcucagugucaucauuugaaagguuugagauauuccccaagacaaguucauggcccaaucaugacucgaacaaagguguaacggcagcauguccucaugcuggagcaaaaagcuucuacaaaaauuuaauauggcuaguuaaaaaaggaaauucauacccaaagcucagcaaauccuacauuaaugauaaagggaaagaaguccucgugcuauggggcauucaccauccaucuacuagugcugaccaacaaagucucuaucagaaugcagaugcauauguuuuuguggggacaucaagauacagcaagaaguucaagccggaaauagcaauaagacccagagugagggaucaagaagggagaaugaacuauuacuggacacuaguagagccaggagacaaaauaacauucgaagcaacuggaaaucuagugguaccgagauaugcauucgcaauggaaagaaaugcuggaucugguauuaucauuucagauacaccaguccacgauugcaauacaacuugucagacacccaagggugcuauaaacaccagccucccauuucagaauauacauccgaucacaauuggaaaauguccaaaauauguaaaaagcacaaaauugagacuggccacaggauugaggaaugucccgucuauucaaucuagaggccuauuuggggccauugccgguuucauugaagggggguggacagggaugguagauggaugguacgguuaucaccaucaaaaugagcaagggucaggauaugcagccgaccugaagagcacacagaaugccauugacaagauuacuaacaaaguaaauucuguuauugaaaagaugaauacacaguucacagcaguagguaaagaguucaaccaccuggaaaaaagaauagagaauuuaaauaaaaaaguugaugaugguuuccuggacauuuggacuuacaaugccgaacuguugguucuauuggaaaaugaaagaacuuuggacuaccacgauucaaaugugaagaacuuauaugaaaagguaagaagccaguuaaaaaacaaugccaaggaaauuggaaacggcugcuuugaauuuuaccacaaaugcgauaacacgugcauggaaagugucaaaaaugggacuuaugacuacccaaaauacucagaggaagcaaaauuaaacagagaagaaauagaugggguaaagcuggaaucaacaaggauuuaccagauuuuggcgaucuauucaacugucgccaguucauugguacugguagucucccugggggcaaucaguuucuggaugugcucuaaugggucucuacaguguagaauauguauuuaa

SEQ ID NO: 38267 - RNA, 1701 nt, Artificial Sequence
  derived and/or modified CDS sequence (wt) from hemagglutinin__InfluenzaA__ADQ28067
augaaggcaauacuaguaguucugcuauauacauuugcaaccgcaaaugcagacacauuauguauagguuaucaugcgaacaauucaacagacacuguagacacaguacuagaaaagaauguaacaguaacacacucuguuaaccuucuagaagacaagcauaacgggaaacuaugcaaacuaagagggguagccccauugcauuuggguaaauguaacauugcuggcuggauccugggaaauccagagugugaaucacucuccacagcaagcucaugguccuacauuguggaaacaucuaguucagacaauggaacguguuacccaggagauuucaucgauuaugaggagcuaagagagcaauugagcucagugucaucauuugaaagguuugagauauuccccaagacaaguucauggcccaaucaugacucgaacaaagguguaacggcagcauguccucaugcuggagcaaaaagcuucuacaaaaauuuaauauggcuaguuaaaaaaggaaauucauacccaaagcucagcaaauccuacauuaaugauaaagggaaagaaguccucgugcuguggggcauucaccauccaucuacuagugcugaccaacaaagucucuaucagaaugcagaugcauauguuuuuguggggacaucaagauacagcaagaaguucaagccggaaauagcaauaagacccaaagugagggaucaagaagggagaaugaacuauuacuggacacuaguagagccgggagacaaaauaacauucgaagcaacuggaaaucuagugguaccgagauaugcauucgcaauggaaagaaaugcuggaucugguauuaucauuucagauacaccaguccacgauugcaauacaacuugucagacacccaagggugcuauaaacaccagccucccauuucagaauauacauccgaucacaauuggaaaauguccaaaauauguaaaaagcacaaaacugagacuggccacaggauugaggaaugucccgucuauucaaucuagaggccuauuuggggccauugccgguuucauugaagggggguggacagggaugguagauggaugguacgguuaucaccaucaaaaugagcaggggucaggauaugcagccgaccugaagagcacacagaaugccauugacaagauuacuaacaaaguaaauucuguuauugaaaagaugaauacacaguucacagcaguagguaaagaguucaaccaccuggaaaaaagaauagagaauuuaaauaaaaaaguugaugaugguuuccuggacauuuggacuuacaaugccgaacugcugguucuauuggaaaaugaaagaacuuuggacuaccacgauucaaaugugaagaacuuauaugaaaagguaagaagccaguuaaaaaacaaugccaaggaaauuggaaacggcugcuuugaauuuuaccacaaaugcgauaacacgugcauggaaagugucaaaaaugggacuuaugacuacccaaaauacucagaggaagcaaaauuaaacagagaagaaauaaaugggguaaagcuggaaucaacaaggauuuaccagauuuuggcgaucuauucaacugucgccaguucauugguacugguagucucccugggggcaaucaguuucuggaugugcucuaaugggucucuacaguguagaauauguauuuaa

SEQ ID NO: 38268 - RNA, 1701 nt, Artificial Sequence
  derived and/or modified CDS sequence (wt) from hemagglutinin__InfluenzaA__ADQ28068
augaaggcaauacuaguaguucugcuauauacauuuacaaccgcaaaugcagacacauuauguauagguuaucaugcgaacaauucaacagacacuguagacacaguacuagaaaagaauguaacaguaacacacucuguuaaccuucuagaagacaagcauaacgggaaacuaugcaaacuaagagggguagccccauugcauuuggguaaauguaacauugcuggcuggauccugggaaauccagagugugaaucacucuccacagcaagcucaugguccuacauuguggaaacaucuaguucagacaauggaacguguuacccaggagauuucaucaauuaugaggagcuaagagagcaauugagcucagugucaucauuugaaagguuugagauauuccccaagacaaguucauggcccaaucaugacucgaacaaagguguaacggcagcauguccucaugcuggagaaaaaagcuucuacaaaaauuuaauauggcuaguuaaaaaaggaaauucauacccaaagcucagcaaauccuacauuaaugauaaagggaaagaaguccucgugcuauggggcauucaucauccaucuacuagugcugaccaacaaagucucuaucagaaugcagaugcauauguuuuuguggggacaucaagauacagcaagaaguucaagccggaaauagcaauaagacccaaagugagggaucaagaagggagaaugaacuaucacuggacacuaguaaagccgggagacaaaauaacauucgaagcaacuggaaaucuagugguaccgagauaugcauucgcaauggaaagaaaugcuggaucugguauuaucauuucagauacaccaguccacgauugcaauacaacuugucagacacccaagggugcuauaaacaccagccucccauuucagaauauacauccgaucacaauuggaaaauguccaaaauauguaaaaagcacaaaauugagacuggccacaggauugaggaaugucccgucuauucaaucuagaggccuauuuggggccauugccgguuuuauugaagggggguggacagggaugguagauggaugguacgguuaucaccaucaaaaugagcaggggucaggauaugcagccgaccugaagagcacacagaaugccauugacgagauuacuaacaaaguaaauucuguuauugaaaagaugaauacacaguucacagcaguagguaaagaguucaaccaccuggaaaaaagaauagagaauuuaaauaaaaaaguugaugaugguuuccuggacauuuggacuuacaaugccgaacuguugguucuauuggaaaaugaaagaacuuuggacuaccacgauucaaaugugaagaacuuauaugaaaagguaagaagccaguuaaaaaacaaugccaaggaaauuggaaacggcugcuuugaauuuuaccacaaaugcgauaacacgugcauggaaagugucaaaaaugggacuuaugacuacccaaaauacucagaggaagcaaaauuaaacagagaagaaauagaugggguaaagcuggaaucaacaaggauuuaccagauuuuggcgaucuauucaacugucgccaguucauugguacugguagucucccugggggcaaucaguuucuggaugugcucuaaugggucucuacaguguagaauauguauuuaa

SEQ ID NO: 38269 - RNA, 1701 nt, Artificial Sequence
  derived and/or modified CDS sequence (wt) from hemagglutinin__InfluenzaA__ADQ28069
augaaggcaauacuaguaguucugcuauauacauuugcaaccgcaaaugcagacacauuauguauagguuaucaugcgaacaauucaacagacacuguagacacaguacuagaaaagaauguaacaguaacacacucuguuaaccuucuagaagacaagcauaacgggaaacuaugcaaacuaagagggguagccccauugcauuuggguaaauguaacauugcuggcuggauccugggaaauccagagugugaaucacucuccacagcaagcucaugguccuacauuguggaaacaucuaguucagacaauggaacguguuacccaggagauuucaucgauuaugaggagcuaagagagcaauugagcucagugucaucauuugaaagguuugagauauuccccaagacaaguucauggcccaaucaugacucgaacaaagguguaacggcagcauguccucaugcuggagcaaaaagcuucuacaaaaauuuaauauggcuaguuaaaaaaggaaauucauacccaaagcucagcaaauccuacauuaaugauaaagggaaagaaguccucgugcuguggggcauucaccauccaucuacuagugcugaccaacaaagucucuaucagaaugcagaugcauauguuuuuguggggacaucaagauacagcaagaaguucaagccggaaauagcaauaagacccaaagugagggaucaagaagggagaaugaacuauuacuggacacuaguagagccgggagacaaaauaacauucgaagcaacuggaaaucuagugguaccgagauaugcauucgcaauggaaagaaaugcuggaucugguauuaucauuucagauacaccaguccacgauugcaauacaacuugucagacacccaagggugcuauaaacaccagccucccauuucagaauauacauccgaucacaauuggaaaauguccaaaauauguaaaaagcacaaaauugagacuggccacaggauugaggaaugucccgucuauucaaucuagaggccuauuuggggccauugccgguuucauugaagggggguggacagggaugguagauggaugguacgguuaucaccaucaaaaugagcaggggucaggauaugcagccgaccugaagagcacacagaaugccauugacaagauuacuaacaaaguaaauucuguuauugaaaagaugaauacacaguucacagcuguagguaaagaguucaaccaccuggaaaaaagaauagagaauuuaaauaaaaaaguugaugaugguuuccuggacauuuggacuuacaaugcugaacugcugguucuauuggaaaaugaaagaacuuuggacuaccacgauucaaaugugaagaacuuauaugaaaagguaagaagccaguuaaaaaacaaugccaaggaaauuggaaacggcugcuuugaauuuuaccacaaaugcgauaacacgugcauggaaagugucaaaaaugggacuuaugacuacccaaaauacucagaggaagcaaaauuaaacagagaagaaauaaaugggguaaagcuggaaucaacaaggauuuaccagauuuuggcgaucuauucaacugucgccaguucauugguacugguagucucccugggggcaaucaguuucuggaugugcucuaaugggucucuacaguguagaauauguauuuaa

SEQ ID NO: 38270 - RNA, 1701 nt, Artificial Sequence
  derived and/or modified CDS sequence (wt) from hemagglutinin__InfluenzaA__ADQ28070
augaaggcaauacuaguaguucugcuauauacauuugcaaccgcaaaugcagacacauuauguauagguuaucaugcgaacaauucaacagacacuguagacacaguacuagaaaagaauguaacaguaacacacucuguuaaccuucuagaagacaagcauaacgggaaacuaugcaaacuaagagggguagccccauugcauuuggguaaauguaacauugcuggcuggauccugggaaauccagagugugaaucacucuccacagcaagcucaugguccuacauuguggaaacaucuaguucagacaauggaacguguuauccaggagauuucaucgauuaugaggagcuacgagagcaauugagcucagugucaucauuugaaagguuugagauauuccccaagacaaguucauggcccaaucaugacucgaacaaagguguaacggcagcauguccucaugcuggagcaaaaagcuucuacaaaaauuuaauauggcuaguuaaaaaaggaaauucauacccaaagcucagcaaauccuacauuaaugauaaagggaaagaaguccucgugcuauggggcauucaccauccaucuacuagugcugaccaacaaagucucuaucagaaugcagaugcauauguuuuuguggggacaucaagauacagcaagaaguucaagccggaaauagcaauaagacccaaagugagggaucaagaagggagaaugaacuauuacuggacacuaguagagccgggagacaaaauaacauucgaagcaacuggaaaucuagugguaccgagauaugcauucgcaauggaaagaaaugcuggaucugguauuaucauuucagauacaccaguccacgauugcaauacaacuugucagacacccaagggugcuauaaacaccagccucccauuucagaauauacauccgaucacaauuggaaaauguccaaaauauguaaaaagcacaaaauugagacuggccacaggauugaggaaugucccgucuauucaaucuagaggccuauuuggggccauugccgguuucauugaagggggguggacagggaugguagauggaugguacgguuaucaccaucaaaaugagcaggggucaggauaugcagccgaccugaagagcacacagaaugccauugacaagauuacuaacaaaguaaauucuguuauugaaaagaugaauacacaguucacagcaguagguaaagaguucaaccaccuggaaaaaagaauagagaauuuaaauaaaaaaguugaugaugguuuccuggacauuuggacuuacaaugccgaacuguugguucuauuggaaaaugaaagaacuuuggacuaccacgauucuaaugugaagaacuuauaugaaaagguaagaagacaguuaaaaaacaaugccaaggaaauuggaaacggcugcuuugaauuuuaccacaaaugcgauaacacgugcauggaaagugucaaaaaugggacuuaugacuacccaaaauacucagaggaagcaaaauuaaacagagaagaaauagaugggguaaagcuggaaucaacaaggauuuaccagauuuuggcgaucuauucaacugucgccaguucauugguacugguagucucccugggggcaaucaguuucuggaugugcucuaaugggucucuacaguguagaauauguauuuaa

SEQ ID NO: 38271 - RNA, 1701 nt, Artificial Sequence
  derived and/or modified CDS sequence (wt) from hemagglutinin__InfluenzaA__ADQ28071
augaaggcaauacuaguaguucugcuauauacacuugcaaccgcaaaugcagacacauuauguauagguuaucaugcgaacaauucaacagacacuguagacacaguacuagaaaagaauguaacaguaacacacucuguuaaccuucuagaagacaagcauaacgggaaacuaugcaaacuaagagggguagccccauugcauuuggguaaauguaacauugcuggcuggauccugggaaauccagagugugaaucacucuccacagcaagcucaugguccuacauuguggaaacaucuaguucagacaauggaacguguuacccaggagauuucaucgauuaugaggagcuaagagagcaauugagcucagugucaucauuugaaagguuugagauauuccccaagacaaguucauggcccaaucaugacucgaacaaagguguaacggcagcauguccucaugcuggagcaaaaagcuucuacaaaaauuuaauauggcuaguuaaaaaaggaaauucauacccaaagcucagcaaauccuacauuaaugauaaagggaaagaaguccucgugcuauggggcauucaccauccaucuacuagugcugaccaacaaagucucuaucagaaugcagaugcauauguuuuuguggggacaucaagauacagcaagaaguucaagccggaaauagcaauaagacccaaagugagggaucaagaagggagaaugaacuauuacuggacacuaguagagccgggagacaaaauaacauucgaagcaacuggaaaucuagugguaccgagauaugcauucgcaauggaaagaaaugcuggaucugguauuaucauuucagauacaccaguccacgauugcaauacaacuugucagacacccaagggugcuauaaacaccagccucccauuucagaauauacauccgaucacaauuggaaaauguccaaaauauguaaaaagcacaaaauugagacuggccacaggauugaggaaugucccgucuauucaaucuagaggccuauuuggggccauugccgguuucauugaagggggguggacagggaugguagauggaugguacgguuaucaccaucaaaaugagcaggggucaggauaugcagccgaccugaagagcacacagaaugccauugacaagauuacuaacaaaguaaauucuguuauugaaaagaugaauacacaguucacagcaguagguaaagaguucaaccaccuggaaaaaagaauagagaauuuaaauaaaaaaguugaugaugguuuccuggacauuuggacuuacaaugccgaacuguugguucuauuggaaaaugaaagaacuuuggacuaccacgauucaaaugugaagaacuuauaugaaaagguaagaagccaguuaaaaaacaaugccaaggaaauuggaaacggcugcuuugaauuuuaccacaaaugcgauaacacgugcauggaaagugucaaaaaugggacuuaugacuacccaaaauacucagaggaagcaaaauuaaacagagaagaaauagaugggguaaagcuggaaucaacaaggauuuaucagauuuuggcgaucuauucaacugucgccaguucauugguacugguagucucccugggggcaaucaguuucuggaugugcucuaaugggucucuacaguguagaauauguauuuaa

SEQ ID NO: 38272 - RNA, 1701 nt, Artificial Sequence; identical to SEQ ID NO: 35625
  derived and/or modified CDS sequence (wt) from hemagglutinin__InfluenzaA__ADR32361

SEQ ID NO: 38273 - RNA, 1689 nt, Artificial Sequence
  derived and/or modified CDS sequence (wt) from hemagglutinin__InfluenzaA__ADT78887
auggcccucauuuaucucauacuccuguucacaucagugaggggggaccagauaugcauuggauaccaugccaauaauuccacagaaaaggucgacacaauucuagagcggaaugucacugugacucaugccaaggacauccuugagaagacccauaacggaaagcuaugcaaacuaaacggaaucccuccacuugaacuaggggacuguagcauugccggauggcuccuuggaaauccagaaugugauaggcuucuaagggugccagaaugguccuauauaauggagaaagaaaacccgaaauacaguuuguguuacccaggcagcuucaaugacuaugaagaauugaaacaucucaucagcagcguaaaacauuucgagaaaguaaagauucugcccaaagauggauggacacagcauacaacaacuggagguucaagggccugcgcggugucagguaacccaucauucuucaggaacauggucuggcugacaaagaaaggaccaaauuauccgguugccaaaggaucguacaacaauacgagcggagaacaaaugcuaauaauuuggggagugcaccauccuaaugaugaggcagaacaaagagcauuguaccagaaagugggaaccuauguuucugcaagcacaucaacauugaacaaaaggucaaccccagaaauagcagcaaggccugaagugaauggacuaggaaguagaauggaauucucuuggacccucuuggauaugugggacaccauaaauuuugagagcacugguaaucuaguugcaccagaguauggauucaaaauaucgaaaagagguaguucaggggucaugaagacagaaggaacacuugagaacugugagaccaaaugccaaacuccuuugggagcaauaaauacaacacuaccuuuucacaauguccacccacugacaauaggugaaugccccaaauauguaaaaucggagaaauuggucuuagcaacaggacuaaggaauguuccccagauugaaucaagaggauuguuuggggcaauagcugguuuuauagaaggaggauggcaaggaaugguugaugguugguauggauaccaucacagcaaugaccagggaucaggguaugcagcagacaaagaauccacucaaaaggcauuugauggaaucaccaacaagguaaauucugugauugaaaagaugaacacccaauuugaagcuguugggaaagaauucagcaacuuagagaaaagacuggagaacuugaacaaaaagauggaagacggguuucuagauguguggacauacaaugcugagcuucuaguucugauggaaaaugagaggacacuugacuuucaugauucuaaugucaagaaucuguaugauaaagucagaaugcagcugagagacaacgucaaagaacuaggaaauggauguuuugaauuuuaucacaaaugugacgaugaaugcauggauagugugaaaaacgggacauaugauuaucccaaguaugaagaagaaucuaaacuaaauagaaaugaaaucaaagggguaaaauugagcagcauggggguuuaucaaauccuugccauuuaugcuacaguagcagguucucugucacuggcaaucaugauggcugggaucucuuucuggaugugcuccaacgggucucugcagugcagaaucugcauauga

SEQ ID NO: 38274 - RNA, 1701 nt, Artificial Sequence
  derived and/or modified CDS sequence (wt) from hemagglutinin__InfluenzaA__ADT78908
augaaagcaaaacuacugauccuguuaugugcacuuucagcuacagaugcagacacaauauguauaggcuaccaugcgaacaacucaaccgacacuguugacacaguacucgaaaagaaugugacagugacacacucuguaaaccuacucgaagacagccacaaugggaaauuaugcagauuaaaaggaaaagccccacuacaauuggggaaauguaacauugccggaugggucuuaggaaacccagaaugcgaaucauugcuuuccaauagaucaugguccuacauugcagaaacaccaaacucugagaaugggacauguuacccaggagauuucgccgacuaugaggaacugagggagcaauugagcucaguaucaucauucgagagauucgaaauauuccccaaggaaagaucauggcccaaacacaacacaaccagaggagugacggcagcaugcucccaugcgaggaaaagcaguuuuuacaaaaauuuggucuggcugacggaggcaaauggcucauacccaaaucugagcaaguccuaugugaacaaucaagagaaagaaguccuugugcuaugggguguucaucacccgucuaacauagaggaucaaagaacccucuaucggaaagauaaugcuuaugucucuguagugucuucaaauuauaacaggagauucaccccagaaauagcaaaaaggcccaaaguaagagaucaaccagggagaaugaacuauuacuggacuuugcuagaacccggagacacaauaauauuugaggcaacuggaaaucuaauagcaccaugguaugcuuucgcacugaguagaggcccuggaucaggaaucaucaccucaaacgcaccaauggaugaaugugacacgaagugucaaacaccccagggagcuauaaacaguagucucccuuuucagaauauacacccagucacaauaggagagugcccaaaauacgucaggaguacaaaauugaggaugguuacaggacuaaggaacaucccauccauccaauccaggggucuguuuggagccauugccgguuucauugaagggggauggacugggaugauggauggaugguaugguuaccaucaucagaaugaacagggaucuggcuaugcugcggaucaaaaaagcacacaaaaugccauuaacgggauuacaaauaaggugaacucuguuaucgagaaaaugaacacucaauucacagcuguggguaaagaauucaacaaauuagaaaaaagaauggaaaacuuaaauaaaaaaguugaugauggauuucuggauauuuggacauauaaugcagaauuguugguucuacuggaaaaugaaaggacuuuggauuuucaugacucaaaugugaagaaucuguaugagaaaguaaaaaaccaauuaaggaauaaugcaaaggaacuaggaaacggguguuuugaguucuaccacaagugugacaaugaaugcauggaaaguguaaaaaauggaacuuaugauuacccaaaauauucagaggaaucaaaguuaaacagagaaaagauugauggagugaaauuggaaucaaugggggucuaucggauucuggcgaucuacucaacugucgccaguucacuggugcuucuggucucccugggggcaaucagcuucuggauguguucuaaugggucuuuacagugcagaauaugcaucuga

SEQ ID NO: 38275 - RNA, 1701 nt, Artificial Sequence
  derived and/or modified CDS sequence (wt) from hemagglutinin__InfluenzaA__ADT78929
augaaagcaaaacuacugauccuguuaugugcacuuucagcuacagaugcagacacaauauguauaggcuaccaugcgaacaacucaaccgacacuguugacacaguacucgaaaagaaugugacagugacacacucuguaaaccuacucgaagacagccacaacgggaaauuaugcagauuaaaaggaauagccccacuacaauuggggaaauguaacauugccggauggaucuuaggaaacccagaaugcgaaucacugcuuucuaagagaucaugguccuacauugcagaaacaccaaacucugagaauggaacauguuacccaggagauuucgccgacuaugaggaacugagggagcaauugagcucagugucaucauucgagagauucgaaauauuccccaaggaaagaucauggcccaaacacaacauaaccagaggaguaacggcagcaugcucccaugcggggaaaagcaguuuuuacaaaaauuugcucuggcugacggagacaaaaggcucauacccaaaucugagcaaguccuaugugaacaauaaagagaaagaaguccuugugcuaugggguguucaucacccgucuaacauagaggaucaaaagacccucuaucggaaagaaaaugcuuaugucucuguagugucuucaaauuauaacaggagauucaccccggaaauagcagaaagacccaaaguaagaggucaagcagggagaaugaacuauuacuggacuuugcuagaacccggagacacaauaauauuugaggcaaauggaaaucuaauagcgccaugguaugcuuucgcacugaguagaggccuuggaucaggaaucaucaccucaaacgcaucaauggaugaaugugacacgaagugucaaacaccccagggagcuauaaacaguagucucccuuuucagaauauacacccagucacaauaggagagugcccaaaauacgucaagaguaccaaauugaggaugguuacaggauuaaggaacaucccauccauucaauccagaggucuguuuggagccauugccgguuucauugaggggggauggacuggaaugauagauggaugguaugguuaccaucaucagaaugaacagggaucuggcuaugcugcggaucaaaaaagcacacaaaaugccauuaacgggauuacaaauaaggugaacucuguuaucgagaaaaugaacacucaauucacagcuguggguaaagaauucaacaaauuagaaaaaagaauggaaaacuuaaauaaaaaaguugaugauggauuucuggacauuuggacauauaaugcagaauuguugguucuacuggaaaaugaaaggacuuuggauuuccaugacucaaaugugaagaaucuguaugagaaaguaaaaaaccaauuaaggaauaaugcaaaggaaauaggaaacggguguuuugaguucuaccacaaguguaacaaugaaugcauggaaaguguaaaaaauggaacuuaugauuacccaaaauauucagaggaaucaaaguuaaacagggaaaaaauugauggagugaaauuggaaucaaugggggucuaucagauucuggcgaucuacucaacugucgccaguucacuggugcuucuggucucccugggggcaaucagcuucuggauguguucuaaugggucuuugcaaugcagaauaugcaucuga

SEQ ID NO: 38276 - RNA, 1701 nt, Artificial Sequence
  derived and/or modified CDS sequence (wt) from hemagglutinin__InfluenzaA__ADT78936
augaaagcaaaacuacugguccuguuaugugcacuuucagcuacauaugcagacacaauauguauaggcuaccaugcgaacaacucaaccgacacuguugacacaguacucgaaaagaaugugacagugacacacucuguaaaccuacucgaagacagccacaacgggaaauuaugcagauuaaaaggaaaagccccacuacaauuggggaaauguaacauugccggauggaucuuaggaaacccagaaugcgaaucacugcuuuccaaaagaucaugguccuacauugcagaaacaccaaacucugagaauggaacauguuacccaggagauuucgccgacuaugaggaauugagggagcaauugagcucaguaucaucuuucgagagauucgaaauauuccccaaggaaaguucauggcccaaacacaacacaaccagaggagugacggcagcaugcucccaugcgaggaaaagcaguuuuuacaaaaauuugcucuggcugacggaggcaaauggcucauacccaaaucugagcaaguccuaugugaacaaucaagagaaagaaguccuugugcuaugggguguucaucacccgucuaacauagaggaucaaaggacccucuaucggaaagaaaaugcuuaugucucuguagugucuucaaauuauaacaggagauucaccccagaaauagcagaaaggcccaaaguaagaaaucaagcagggagaaugaacuauuacuggacuuugcuagaacccggagacacaauaauauuugaggcaaauggaaaucuaauagcaccaugguaugcuuucgcacugaguagaggccuuggaucaggaaucaucaccucaaacgcaucaauggaugaaugugacacgaagugucaaacaccccagggagcuauaaacaguagucucccuuuucagaauauacacccagucacaauaggagagugcccaaaauacguaaagaguacaaaauugagaaugguuacaggacuaaggaacauaccauccauucaauccaggggucuauuuggagccauugccgguuucauugaagggggauggacugggaugauggauggaugguaugguuaccaucaucagaaugaacagggaucuggcuaugcugcggaucaaaaaagcacacaaaaugccauuaacgggauuacaaauaaggugaacucuguuaucgagaaaaugaacacucaauucacagcuguggguaaagaauucaacaaauuagaaaaaagaauggaaaacuuaaauaaaaaaguugaugauggauuucuggauauuuggacauauaaugcagaauuguuaguucuacuggaaaaugaaaggacuuuggauuuccaugacucaaaugugaagaaucuguaugagaaaguaaaaaaccaauuaaggaauaaugcaaaggaacuaggaaacggguguuuugaguucuaucacaagugugacaaugaaugcauggaaaguguaaaaaauggaacuuaugauuacccaaaauauucagaggaaucaaaguuaaacagggaaaagauugauggagugaaauuggaaucaaugggggucuaucggauucuggcgaucuacucaacugucgccaguucacuggugcuucuggucucccugggggcaaucagcuucuggauguguucuaaugggucuuuacagugcagaauaugcaucuga

SEQ ID NO: 38277 - RNA, 1689 nt, Artificial Sequence
  derived and/or modified CDS sequence (wt) from hemagglutinin__InfluenzaA__ADT78961
auggccaucauuugucucauucuccuguucacagcagugagaggggaccagauaugcauuggauaccaugccaauaauuccacagagaaggucgacacaauucuagagcggaacgucacugugacucaugccaaggacauccuugagaagacccauaacggaaaguuaugcaaacuaaacggaaucccuccacuugaacuaggggacuguaguauugccggauggcuccuuggaaauccagaaugugauaggcuucuaagugugccagaaugguccuauauaauggaaaaagaaaacccgagagacgguuuguguuauccaggcagcuucaaugauuaugaagaauugaaacaucuccucagcagcguaaaacauuucgagaaaguaaagauucugcccaaaaauagauggacacagcauacaacaacuggagguucacgggccugcgcggugucuggcaauccaucauucuucaggaacauggucuggcugacaaagaaaggaucaaauuauccgguugccaaaggaucguacaacaauacaagcggagaacaaaugcuaauaauuuggggggugcaccaucccaaugaugagacagaacaaagaacauuguaccagaauguggaaaccuauguuuccguaagcacaucaacacugaacaaaaggucaaccccaaaaauugcaacaaggccugaagugaauggacuaggaaguagaauggaauucucuuggacccucuuggauaugugggacaccauaaauuuugagagcacugguaaucuaauugcaccagaguauggauucaaaauaucgaaaagagguaguucagggaucaugaagacagaaggaacacuugagaacugugagaccaaaugccaaacuccucugggagcaauaaauacaacauugccuuuucacaauguccacccacugacaauaggugagugccccaaauauguaaaaucggagaaauuggucuuagcaacaggaccaaggaauguuccccagauugaaucaagaggauuguuuggggcaauagcugguuuuauagaaggaggauggcaaggaaugguugaugguugguauggauaccaucacagcaaugaccagggaucaggguaugcagcagacaaagaaucuacucaaaaggcauuugauggaaucaccaacaagguaaauucugugauugaaaagaugaacacccaauuugaagcuguugggaaagaauucaguaacuuagagagaagacuggagaacuugaacaaaaagauggaagacggguuucuagauguguggacauacaaugcugagcuucuaguucugauggaaaaugagaggacacuugacuuccaugauucuaaugucaagaaucuguaugauaaagucagaaugcagcugagagacaacgucaaagaacuaggaaauggauguuuugaauuuuaucacaaaugugaugaugaaugcaugaauagugugaaaaacgggacguaugauuaucccaaguaugaagaagaaucuaaacuaaauagaaaugaaaucaaagggguaaaauugagcagcauggggguuuaucaaauccuugucauuuaugcuacaguagcagguucucugucacuggcaaucaugauggcugggaucucuuucuggaugugcuccaacgggucucugcagugcaggaucugcauauga

SEQ ID NO: 38278 - RNA, 1701 nt, Artificial Sequence; identical to SEQ ID NO: 32776
  derived and/or modified CDS sequence (wt) from hemagglutinin__InfluenzaA__ADT78971

SEQ ID NO: 38279 - RNA, 1701 nt, Artificial Sequence
  derived and/or modified CDS sequence (wt) from hemagglutinin__InfluenzaA__ADT79010
augaagacuaucauugcuuugagcuacauuuucugucugguucucggccaagauuuuccaggaaaugacaacagcacagcaacgcugugccugggacaucaugcggugccaaacggaacacuagugaaaacaaucacaaaugaucagauugaagugacuaaugcuacugagcugguucagaguuccucaacggggaaaauaugcaacaauccucaucgaauccuugauggaauagacugcacacugauagaugcucuauugggggacccucauugugauggcuuucaaaaugagacaugggaccuuuucguugaacgcagcaaagcuuucagcaacuguuacccuuaugaugugccagauuaugccucccuuaggucacuaguugccucgucaggcacucuggaguuuaucaaugaaggcuucacuuggacuggggucacucagaaugggggaagcaaugcuugcaaaaggggaccugauagcgguuuuuucaguagacugaacugguuguacaaaucaggaagcacauauccagugcugaacgugacuaugccaaacaaugacaauuuugacaaacuauacauuugggggguucaccacccgagcacggaccaagaacaaaccagccuauauguucaagcaucagggagagucacagucucuaccaagagaagccagcaaacuauaaucccgaauaucgggucuagacccuggguaaggggucugucuaguagaauaagcaucuauuggacaauaguuaaaccaggagacauacugguaauuaauaguaaugggaaccuaauugcuccucgggguuauuucaaaaugcgcacugggaaaagcucaauaaugaggucagaugcaccuauuggcaccugcauuucugaaugcaucacuccaaauggaagcauucccaaugacaagcccuuucaaaacguaaacaagaucacauauggggcaugucccaaguauguuaagcaaaacacccugaaguuggcaacagggaugcgaaauguaccagagaaacaaacuagaggccuauucggcgcaauagcagguuucauagaaaaugguugggagggaaugauagacgguugguacgguuucaggcaucaaaauucugagggcacaggacaagcagcagaucuuaaaagcacucaagcagccaucgaccaaaucaaugggaaacugaauaggguaaucgagaagacgaacgagaaauuccaucaaaucgaaaaggaauucucagaaguagaagggagaauucaggaccucgagaaauacguugaagacacuaaaauagaucucuggucuuacaaugcggagcuucuugucgcucuggagaaccaacauacaauugaucugacugacucggaaaugaacaaacuguuugaaaaaacaaggaggcaacugagggaaaaugcugaggacaugggcaaugguugcuucaaaauauaccacaaaugugacaaugcuugcauagggucaaucagaaaugggacuuaugaccaugauguauacagagacgaagcauuaaacaaccgguuucagaucaaagguguugaacugaagucaggauacaaagacuggauccuguggauuuccuuugccauaucaugcuuuuugcuuuguguuguuuugcugggguucaucaugugggccugccagaaaggcaacauuaggugcaacauuugcauuuga

SEQ ID NO: 38280 - RNA, 1701 nt, Artificial Sequence; identical to SEQ ID NO: 32776
  derived and/or modified CDS sequence (wt) from hemagglutinin__InfluenzaA__ADT79030

SEQ ID NO: 38281 - RNA, 1701 nt, Artificial Sequence
  derived and/or modified CDS sequence (wt) from hemagglutinin__InfluenzaA__ADT79050
augaagacuaucauugcuuugagcuacauuuuaugucugguuuucgcucaaaaacuucccggaaaugacaacagcacggcaacgcugugccuggggcaccaugcagugccaaacggaacgcuagugaaaacaaucacgaaugaccaaauugaagugacuaaugcuacugagcugguucagaguuccucaacagguagaauaugcgacaguccucaccaaauccuugauggagaaaacugcacacuaauagaugcucuauugggagacccucauugugauggcuuccaaaauaaggaaugggaccuuuucguugaacgcagcaaagccuacagcaacuguuacccuuaugaugugccggauuaugccucccuuaggucacuaguugccucauccggcacacuggaguuuaacaaugaaagcuucaauuggacuggagucgcucagaauggaacaagcucugcuugcaaaaggaggucuaauaaaaguuucuuuaguagauugaauugguugcaccaauuaaaauacaaauacccagcacugaacgugacuaugccaaacaaugaaaaauuugacaaauuguacauuugggggguucaccacccgaguacggacagugaccaaaucagccuauaugcucaagcaucagggagagucacagucucuaccaaaagaagccaacaaacuguaaucccgaauaucggaucuagacccuggguaaggggugucuccagcagaauaagcaucuauuggacaauaguaaaaccgggagacauacuuuugauuaacagcacagggaaucuaauugcuccucgggguuacuucaaaauacgaagugggaaaagcucaauaaugaggucagaugcauccauuggcaaaugcaauucugaaugcaucacuccaaauggaagcauucccaaugacaaaccauuucaaaauguaaacaggaucacauauggggccugucccagauauguuaagcaaaacacucugaaauuggcaacagggaugcggaauguaccagagaaacaaacuagaggcauauucggugcaaucgcggguuucauagaaaaugguugggagggaaugguggacgguugguacgguuucaggcaucaaaauucugagggcacaggacaagcagcagaucuuaaaagcacucaagcagcaaucaaccaaaucaacgggaaacugaauagguuaaucgagaaaacgaacgagaaauuccaucaaauugaaaaagaauucucagaaguagaagggagaauucaggaccucgagaaauauguugaggacacuaaaauagaucucuggucguacaacgcggagcuucuuguugcccuggagaaccaacauacaauugaucuaacugacucagaaaugaacaaacuguuugaaagaacaaagaagcaacugagggaaaaugcugaggauaugggcaauggcuguuucaaaauauaccacaaaugugacaaugccugcauagggucaaucagaaauggaacuuaugaccaugauguauacagagacgaagcauuaaacaaccgguuccagaucaaagguguugagcugaagucaggauacaaagauuggauccuauggauuuccuuugccauaucauguuuuuugcuuuguguuguuuugcugggguucaucaugugggccugccaaaaaggcaacauuaggugcaacauuugcauuuga

SEQ ID NO: 38282 - RNA, 1701 nt, Artificial Sequence
  derived and/or modified CDS sequence (wt) from hemagglutinin__InfluenzaA__ADT79108
augaaagcaagacuacugauccuguuaugugcacuuucagcuacagaugcagacacaauauguauaggcuaccaugcgaacaauucaaccgacacuguugacacaguacucgaaaagaaugugacagugacacacucuguaaaccuacucgaagacagccacaacgggaaauuaugcagauuaaaaggaauagccccacuacaauuggggaaauguaacauugccggauggaucuugggaaacccagaaugcgaaucauugcucucuaauagaucaugguccuacauugcagaaacaccaaacucugagaauggaacauguuacccaggagauuucgccgacuaugaggaacugagggagcaauugagcucaguaucaucauucgagagauucgaaauauuccccaaggaaagaucauggcccaaacacaacauaaccagaggaguaacggcagcaugcucccacgcgaagaaaagcaguuuuuacaaaaauuugcucuggcugacggaggcaaauggcucauacccaaaucugaucaaguccuaugugaacaacaaagagaaagaaguccuugugcuaugggguguucaucacccgucuaacauagaggaucaaaggacccucuaucggaaagaaaaugcuuaugucucuguggugucuucaaauuauaacaggagauucaccccggaaauagcagaaagacccaaaguaagaggucaagcagggagaaugaacuauuacuggacuuugcuagaacccggagacaaaauaauauuugaggcaaauggaaaccuaauagcgccaugguaugcuuucgcacugaguagaggccuuggaucaggaaucaucaccucaaacgcaucaauggaugaaugugacacgaagugucaaacaccccagggagcuauaaacaguagucucccuuuucagaacauacacccagucacaauaggagagugcccaaaauaugucaggaguaccaaauugaggaugguuacaggacuaaggaacaucccauccauucaauccagaggucuguuuggagccauugccgguuucauugaagggggauggacuggaaugguagauggaugguaugguuaccaucaucaaaaugaacagggaucuggcuaugcugcggaucaaaaaagcacacaaaaugccauuaacgggauuacaaauaaggugaacucuguuaucgagaaaaugaacacucaauucacagcuguggguaaagaauucaacaaauuggaaaaaagaauggaaaacuuaaauaaaaaaguugaugauggauuucuggacauuuggacauauaaugcagaauuguugguucuacuggaaaaugaaaggacuuuggauuuccaugacucaaaugugaagaaucuguaugagaaaguaaaaaaccaauugagaaauaaugcaaaggaaauaggaaacggguguuuugaguucuaccacaagugugacaaugaaugcauggaaaguguaaaaaauggaacuuaugauuacccaaaguauucagaggaaucaaaguuaaacagggaaaaaauugauggagugaaauuggaaucaaugggggucuaucagauucuggcgaucuacucaacugucgccaguucacuggugcuucuggucucccugggggcaaucagcuucuggauguguuccaaugggucuuugcaaugcagaauaugcaucuga

SEQ ID NO: 38283 - RNA, 1689 nt, Artificial Sequence
  derived and/or modified CDS sequence (wt) from hemagglutinin__InfluenzaA__ADT79119
auggccaucauuuaucucauucuccuguucacagcagugagaggggaccagauaugcauuggauaccaugccaauaauuccacagagaaggucgacacaauucuagagcggaacgucacugugacucaugccaaggacauucuugagaagacccauaacggaaaguuaugcaaacuaaacggaaucccuccacuugaacuaggggacuguagcauugccggauggcuccuuggaaauccagaaugugauaggcuucuaagugugccagaaugguccuauauaauggagaaagaaaacccgagagacgguuuguguuauccaggcagcuucaaugauuaugaagaauugaaacaucuccucagcagcgugaaacauuucgagaaaguaaagauucugcccaaagauagauggacacagcauacaacaacuggagguucacgggccugcgcggugucugguaauccaucauucuucaggaacauggucuggcugacaaagaaaggaucaaauuauccgguugccaaaggaucguacaacaauacaagcggagaacaaaugcuaauaauuuggggggugcaccaucccaaugaugagacagaacaaagaacauuguaccagaaugugggaaccuauguuuccguaggcacaucaacauugaacaaaaggucaaccccagacauagcaacaaggccuaaagugaauggacuaggagguagaauggaauucucuuggacccuauuggauaugugggacaccauaaauuuugagaguacugguaaucuaauugcaccagaguauggauucaaaauaucgaaaagagguaguucagggaucaugaaaacagaaggaacacuugggaacugugagaccaaaugccaaacuccuuugggagcaauaaauacaacauugccuuuucacaauguccacccacugacaauaggugagugccccaaauauguaaaaucggagaaguuggucuuagcaacaggacuaaggaauguuccccagauugaaucaagaggauuguuuggggcaauagcugguuuuauagaaggaggauggcaaggaaugguugaugguugguauggauaccaucacagcaaugaccagggaucaggguaugcagcagacaaagaauccacucaaaaggcauuugauggaaucaccaacaagguaaauucugugauugaaaagaugaacacccaauuugaagcuguugggaaagaauucaguaacuuagagagaagacuggagaacuugaacaaaaagauggaagacggguuucuagauguguggacauacaaugcugagcuucuaguucugauggaaaaugagaggacacuugacuuucaugauucuaaugucaagaaucuguaugauaaagucagaaugcagcugagagacaacgucaaagaacuaggaaauggauguuuugaauuuuaucacaaaugugaugaugaaugcaugaauagugugaaaaacgggacguaugauuaucccaaguaugaagaagagucuaaacuaaauagaaaugaaaucaaagggguaaaauugagcagcauggggguuuaucaaauccuugccauuuaugcuacaguagcagguucucugucacuggcaaucaugauggcugggaucucuuucuggaugugcuccaacgggucucugcagugcaggaucugcauauga

SEQ ID NO: 38284 - RNA, 1689 nt, Artificial Sequence
  derived and/or modified CDS sequence (wt) from hemagglutinin__InfluenzaA__ADT79129
auggccaucauuuaucucauucuccuguucacagcagugagaggggaccaaauaugcauuggauaccaugccaauaauuccacagagaaggucgacacaauucuagagcggaacgucacugugacucaugccaaggacauucuugagaagacccauaacggaaaguuaugcaaacuaaacggaaucccuccacuugaacuaggggacuguagcauugccggauggcuccuuggaaauccagaaugugauaggcuucuaagagugccagaaugguccuauauaauggagaaagaaaacccgagagacgguuuguguuauccaggcagcuucaaugauuaugaagaauugaaacaucuccucagcagcgugaaacauuucgagaaaguaaagauucugcccaaagauagauggacacagcauacaacaacuggagguucacgggccugcgcggugucugguaauccaucauucuucaggaacaugaucuggcugacaaagaaaggaucaaauuauccgguugccaaaggaucguacaacaacacaagcggagaacaaaugcuaauaauuuggggggugcaccaucccaaugaugagacagaacaaagaacauuguaccagaaugugggaaccuauguuuccguagucacaucaacauugaacaaaaggucaaccccgaaaauagcaacaaggccuaaagugaauggacuaggagguagaauggaauucucuuggacccuauuggauaugugggacaccauaaauuuugagaguacugguaaucuaauugcuccagaguauggauucaaaauaucgaaaagaggcaguucagggaucaugaaaacagaaggaacacuugagaacugugagaccaaaugccaaacuccuuugggagcaauaaauacaacauugccuuuucacaauguccacccacuggcaauaggugagugccccaaauauguaaaaucggagaaguuggucuuagcaacaggacuaaggaauguuccccagauugaaucaagaggauuguuuggggcaauagcuggcuuuauagaaggaggauggcaaggaaugguugaugguugguauggauaccaucacagcaaugaccagggaucaggguaugcagcagacaaagaauccacucaaagggcauuugauggaaucacuaacaagguaaauucugugauugaaaagaugaacacccaauuugaagcuguugggaaagaauucaguaacuuagagagaagacuggagaacuugaacaaaaagauggaagacggguuucuagauguguggacauacaaugcugagcuucuaguucugauggaaaaugagaggacacuugacuuucaugauucuaaugucaagaaucuguaugauaaagucagaaugcagcugagagacaacgucaaagaacuaggaaauggauguuuugaauuuuaucacaaaugugaugaugagugcaugaauagugugaaaaacgggacguaugauuaucccaaguaugaagaagagucuaaacuaaauagaaaugaaaucaaagggguaaaauugagcagcauggggguuuaucaaauccuugccauuuaugcuacaguagcagguucucugucacuggcaaucaugauggcugggaucucuuucuggaugugcuccaacgggucccugcagugcaggaucugcauauga

SEQ ID NO: 38285 - RNA, 1701 nt, Artificial Sequence
  derived and/or modified CDS sequence (wt) from hemagglutinin__InfluenzaA__ADT79232
augaaggcaauacuaguaguucugcuauauacauuugcaaccgcaaaugcagacacauuauguauagguuaucaugcgaacaauucaacagacacuguagacacaguacuagaaaagaauguaacaguaacacacucuguuaaccuucuagaagacaagcauaacgggaaacuaugcaaacuaagagggguagccccauugcauuuggguaaauguaacauugcuggcuggauccugggaaauccagagugugaaucacucuccacagcaagcucaugguccuacauuguggaaacaucuaguucagacaauggaacguguuacccaggagauuucaucgauuaugaggagcuaagagagcaauugagcucagugucaucauuugaaagguuugagauauuccccaagacaaguucauggcccaaucaugacucgaacaaagguguaacggcagcauguccucaugcuggagcaaaaagcuucuacaaaaauuuaauauggcuaguuaaaaaaggaaauucauacccaaagcucagcaaauccuacauuaaugauaaagggaaagaaguccucgugcuauggggcauucaccauccaucuacuagugcugaccaacaaagucucuaucagaaugcagaugcauauguuuuuguggggucaucaagauacagcaagaaguucaagccggaaauagcaauaagacccaaagugagggaucaagaagggagaaugaacuauuacuggacacuaguagagccgggagacaaaauaacauucgaagcaacuggaaaucuagugguaccgagauaugcauucgcaauggaaagaaaugcuggaucugguauuaucauuucagauacaccaguccacgauugcaauacaacuugucagacacccaagggugcuauaaacaccagccucccauuucagaauaaacauccgaucacaauuggaaaauguccaaaauauguaaaaagcacaaaauugagacuggccacaggauugaggaaugucccgucuauucaaucuagaggccuauuuggggccauugcugguuucauugaagggggguggacagggaugguagauggaugguacgguuaucaccaucaaaaugagcaggggucaggauaugcagccgacgugaagagcacacagaaugccauugacgagauuacuaacaaaguaaauucuguuauugaaaagaugaauacacaguucacagcaguagguaaagaguucaaccaccuggaaaaaagaauagagaauuuaaauaaaaaaguugaugaugguuuccuggacauuuggacuuacaaugccgaacuguugguucuauuggaaaaugaaagaacuuuggacuaccacgauucaaaugugaagaacuuauaugaaaagguaagaagccaguuaaaaaacaaugccaaggaaauuggaaacggcugcuuugaauuuuaccacaaaugcgauaacacgugcauggaaagugucaaaaaugggacuuaugacuacccaaaauacucagaggaagcaaaauuaaacagagaagaaauagaugggguaaagcuggaaucaacaaggauuuaccagauuuuggcgaucuauucaacugucgccaguucauugguacugguagucucccugggggcaaucaguuucuggaugugcucuaaugggucucuacaguguagaauauguauuuaa

SEQ ID NO: 38286 - RNA, 1701 nt, Artificial Sequence
  derived and/or modified CDS sequence (wt) from hemagglutinin__InfluenzaA__ADT79242
augaaggcaauacuaguaguucugcuauauacauuugcaaccgcaaaugcagacacauuauguauagguuaucaugcgaacaauucaacagacacuguagacacaguacuagaaaagaauguaacaguaacacacucuguuaaccuucuagaagacaagcauaacgggaaacuaugcaaacuaagagggguagccccauugcauuuggguaaauguaacauugcuggcuggauccugggaaauccagagugugaaucacucuccacagcaagcucaugguccuacauuguggaaacaccuaguucagacaauggaacguguuacccaggagauuucaucgauuaugaggagcuaagagagcaauugagcucagugucaucauuugaaagguuugagauauuccccaagacaaguucauggcccaaucaugacucgaacaaagguguaacggcagcauguccucaugcuggagcaaaaagcuucuacaaaaauuuaauauggcuaguuaaaaaaggaaauucauacccaaagcucagcaaauccuacauuaaugauaaagggaaagaaguccucgugcuauggggcauucaccauccaucuacuagugcugaccaacaaagucucuaucagaaugcagaugcauauguuuuuguggggucaucaagauacagcaagaaguucaagccggaaauagcaauaagacccaaagugagggaucaagaagggagaaugaacuauuacuggacacuaguagagccgggagacaaaauaacauucgaagcaacuggaaaucuagugguaccgagauaugcauucgcaauggaaagaaaugcuggaucugguauuaucauuucagauacaccaguccacgauugcaauacaacuugucagacacccaagggugcuauaaacaccagccucccauuucagaauauacauccgaucacaauuggaaaauguccaaaauauguaaaaagcacaaaauugagacuggccacaggauugaggaaugucccgucuauucaaucuagaggccuauuuggggccauugccgguuucauugaagggggguggacagggaugguagauggaugguacgguuaucaccaucaaaaugagcaggggucaggauaugcagccgaccugaagagcacacagaaugccauugacgagauuacuaacaaaguaaauucuguuauugaaaagaugaauacacaguucacagcaguagguaaagaguucaaccaccuggaaaaaagaauagagaauuuaaauaaaaaaguugaugaugguuuccuggacauuuggacuuacaaugccgaacuguugguucuauuggaaaaugaaagaacuuuggacuaccacgauucaaaugugaagaacuuauaugaaaagguaagaagccagcuaaaaaacaaugccaaggaaauuggaaacggcugcuuugaauuuuaccacaaaugcgauaacacgugcauggaaagugucaaaaaugggacuuaugacuacccaaaauacucagaggaagcaaaauuaaacagagaagaaauagaugggguaaagcuggaaucaacaaggauuuaccagauuuuggcgaucuauucaacugucgccaguucauugguacugguagucucccugggggcaaucaguuucuggaugugcucuaaugggucucuacaguguagaauauguauuuaa

SEQ ID NO: 38287 - RNA, 1701 nt, Artificial Sequence
  derived and/or modified CDS sequence (wt) from hemagglutinin__InfluenzaA__ADT91182
augaaggcaauacuaguaguucugcuauauacauuugcaaccgcaaaugcagacacauuauguauagguuaucaugcgaacaauucaacagacacuguagacacaguacuagaaaagaauguaacaguaacacacucuguuaaccuucuagaagacaagcauaacgggaaacuaugcaaacuaagagggguagccccauugcauuuggguaaauguaacauugcuggcuggauccugggaaauccagagugugaaccacucuccacagcaagcucaugguccuacauuguggaaacaucuaguucagacaauggaacguguuacccaggagauuucaucgauuaugaggagcuaagagagcaauugagcucagugucaucauuugaaagguuugagauauuccccaagacaaguucauggcccaaucaugacucgaacaaagguguaacgacagcauguccucaugcuggagcaaaaagcuucuacaaaaauuuaauauggcuaguuaaaaaaggaaauucauacccaaagcucagcaaauccuacauuaaugauaaagggaaagaaguccucgugcuauggggcauucaccauccaccuacuagugcugaccaacaaagucucuaucagaaugcagaugcauauguuuuuguggggacaucaagauacagcaagaaguucaagccggaaauagcaauaagacccaaagugagggaucaagaagggagaaugaacuauuacuggacacuaguagagccgggagacaaaauaacauucgaagcaacuggaaaucuagugguaccgagauaugcauucgcaauggaaagaaaugcuggaucugguauuaucauuucagauacaccaguccacgauugcaauacaacuugucagacacccaagggugcuauaaacaccagccucccauuucagaauauacauccgaucacaauuggaaaauguccaaaauauguaaaaagcacaaaauugagacuggcaacaggauugaggaaugucccgucuauucaaucuagaggccuauuuggggccauugccgguuucauugaagggggguggacagggaugguagauggaugguacgguuaucaccaucaaaaugagcaggggucaggauaugcagccgaccugaagagcacacagaaugccauugacgggauuacuaacaaaguaaauucuguuauugaaaagaugaauacacaguucacagcaguagguaaagaguucaaccaccuggaaaaaagaauagagaauuuaaauaaaaaaguugaugaugguuuccuggacauuuggacuuacaaugccgaacuguugguucuauuggaaaaugaaagaacuuuggacuaccacgauucaaaugugaagaacuuauacgaaaagguaagaagccaguuaaaaaacaaugccaaggaaauuggaaacggcugcuuugaauuuuaccacaaaugugauaacacgugcauggaaagugucaaaaaugggacuuaugacuacccaaaauacucagaggaagcaaaauuaaacagagaagaaauagaugggguaaagcuggaaucaacaaggauuuaccagauuuuggcgaucuauucaacugucgccaguucauugguacugguagucucccugggggcaaucaguuucuggaugugcucuaaugggucucuacaguguagaauauguauuuaa

SEQ ID NO: 38288 - RNA, 1701 nt, Artificial Sequence
  derived and/or modified CDS sequence (wt) from hemagglutinin__InfluenzaA__ADU20561
augaaggcaauacuaguaguucugcuauauacauuugcaaccgcaaaugcagacacauuauguauagguuaucaugcgaacaauucaacagacacuguagacacaguacuagaaaagaauguaacaguaacacacucuguuaaccuucuagaagacaagcauaacgggaaacuaugcaaacuaggagggguagccccauugcauuuggguaaauguaacauugcuggcuggauccugggaaauccagagugugaaucacucuccacagcaagcucaugguccuacauuguggaaacaucuaguucagacaauggaacguguuacccaggagauuucaucgauuaugaggagcuaagagagcaauugagcucagugucaucauuugaaagguuugagauauuccccaagacaaguucauggcccaaucaugacucgaacaaagguguaacggcagcauguccucaugcuggagcaaaaagcuucuacaaaaauuuaauauggcuaguuaaaaaaggaaauucauacccaaagcucagcaaauccuacauuaaugauaaagggaaagaaguccucgugcuauggggcauucaccauccaucuacuagugcugaccaacaaagucucuaucagaaugcagaugcauauguuuuuguggggacaucaagauacagcaagaaguucaagccggagauagcaauaagacccaaagugagggaucaagaagggagaaugaacuauuacuggacacuaguagagccgggagacaaaauaacauucgaagcaacuggaaaucuagugguaccgagauaugcauucgcaauggaaagaaaugcuggaucugguauuaucauuucagauacaccaguccacgauugcaauacaacuugucagacacccaagggugcuauaaacaccagccucccauuucaaaauauacauccgaucacaauuggaaaauguccaaaauauguaaaaagcacaaaauugagacuggccacaggauugaggaaugucccgucuauucaaucuagaggccuauuuggggccauugccgguuucauugaagggggguggacagggaugguagauggaugguacgguuaucaccaucaaaaugagcaggggucaggauaugcagccgaccugaagagcacacagaaugccauugacaagauuacuaacaaaguaaauucuguuauugaaaagaugaauacacaguucacagcaguagguaaagaguucaaccaccuggaaaaaagaauagagaauuuaaauaaaaaaguugaugaugguuuccuggacauuuggacuuacaaugccgaacuguugguucuauuggaaaaugaaagaacuuuggacuaccacgauucaaaugugaagaacuuauaugaaaagguaagaagccaguuaaaaaauaaugccaaggaaauugggaacggcugcuuugaauuuuaccacaaaugcgauaacacgugcauggaaagugucaaaaaugggacuuaugacuacccaaaauacucagaggaagcaaaauuaaacagagaagaaauagaugggguaaagcuggaaucaacaaggauuuaccagauuuuggcgaucuauucaacugucgccaguucauugguacugguagucucccugggggcaaucaguuucuggaugugcucuaaugggucucuacaguguagaauauguauuuaa

SEQ ID NO: 38289 - RNA, 1701 nt, Artificial Sequence
  derived and/or modified CDS sequence (wt) from hemagglutinin__InfluenzaA__ADU20562
augaaggcaauacuaguaguucugcuauauacauuugcaaccgcaaaugcagacacauuauguauagguuaucaugcgaacaauucaacagacacuguagacacaguacuagaaaagaauguaacaguaacacacucuguuaaccuucuagaagacaagcauaacgggaaacuaugcaaacuaagagggguagccccauugcauuuggguaaauguaaaauugcuggauggauccugggaaauccagagugugaaucacucuccacagcaagcucaugguccuacauuguggaaacaucuaguucagacaauggaacguguuacccaggagauuucaucgauuaugaggagcuaagagagcaauugagcucagugucaucauuugaaagguuugagauauuccccaagacaaguucauggcccaaucaugacucgaacaaagguguaacggcagcauguccucaugcuggagcaaaaagcuucuacaaaaauuuaauauggcuaguuaaaaaaggaaauucauacccaaagcucagcaaauccuacauuaaugauaaagggaaagaaguccucgugcuauggggcauucaccauccaucuacuagugcugaccaacaaagucucuaucagaaugcagaugcauauguuuuuguggggacaucaagauacagcaagaaguucaagccggagauagcaauaagacccaaagugagggaucaagaagggagaaugaacuauuacuggacacuaguagagccgggagacaaaauaacauucgaagcaacuggaaaucuagugguaccgagauaugcauucgcaauggaaagaaaugcuggaucugguauuaucauuucagauacaccaguccacgauugcaauacaacuugucagacacccaagggugcuauaaacaccagccucccauuucaaaauauacauccgaucacaauuggaaaauguccaaaauauguaaaaagcacaaaauugagacuggccacaggauugaggaaugucccgucuauucaaucuagaggccuauuuggggccauugccgguuucauugaagggggguggacagggaugguagauggaugguacgguuaucaccaucaaaaugagcaggggucaggauaugcagccgaccugaagagcacacagaaugccauugacaagauuacuaacaaaguaaauucuguuauugaaaagaugaauacacaguucacagcaguagguaaagaguucaaccaccuggaaaaaagaauagagaauuuaaauaaaaaaguugaugaugguuuccuggacauuuggacuuacaaugccgaacuguugguucuauuggaaaaugaaagaacuuuggacuaccacgauucaaaugugaagaacuuauaugaaaagguaagaagccaguuaaaaaacaaugccaaggaaauugggaacggcugcuuugaauuuuaccacaaaugcgauaacacgugcauggaaagugucaaaaaugggacuuaugacuacccaaaauacucagaggaagcaaaauuaaacagagaagaaauagaugggguaaagcuggaaucaacaaggauuuaccagauuuuggcgaucuauucaacugucgccaguucauugguacugguagucucccugggggcaaucaguuucuggaugugcucuaaugggucucuacaguguagaauauguauuuaa

SEQ ID NO: 38290 - RNA, 1701 nt, Artificial Sequence
  derived and/or modified CDS sequence (wt) from hemagglutinin__InfluenzaA__ADU25478
auggaagcaaaauuguuuguacuauucugugcauucacugcgcugaaagcugacacuauuuguguaggcuaucaugcuaacaauuccacagacacugucgacacaauacuggagaggaaugugacuguuacccauucaguuaauuugcuagaaagcagccacaauggaaaacucugcagccuaaauggaaaggccccauuacaacugggaaacugcaacguagcaggauggauccuuggcaacccagaaugcgacuugcugcucacagugaauucguggucuuacauaauagagacuucaacuucaaaaaauggggcaugcuauccuggagaauucgcugauuaugaggaauuaagggagcagcugaguacgguuucuucauuugaaagauuugaaauuuucccaaaagcaaccucauggccaaaucaugagacaaccaaagguacuacaguugcaugcucccacucuggagcaaacaguuuuuaucggaacuugcuauggauaguaaaaaagggaaacuccuauccuaagcucagcaagucauacacaaacaacaaaggaaaagaagugcuuguaaucuggggaguucaucacccuccgacugacagugaucaacaaacccuuuaccagaauaaucacacauauguuucaguuggaucaucaaaauacuaccaaagguucacaccagaaauagugaccagaccuaaagucagagagcaagcgggcagaaugaauuauuacuggacacuauuagaucaaggagacaccauaacuuuugaagccacggggaauuuaauagcaccauggcaugcauuugcauugaauaaggguucuaguucuggaauuaugaugucggaugcucauguucacaauugcacuacaaagugccaaacuccucauggggcuuugaaaagcaaucuuccuuuucagaauguacaucccaucacuauuggagaaugccccaaauauguuaaaagcacccaacuaagaauggcaacaggauuaaggaauauccccucuauucaauccagaggacuuuuuggggcaauugccggauucauugaaggaggauggacaggaaugauagaugggugguauggauaucaccaucaaaaugagcaggggucugguuacgcagcagaucagaaaaguacacaaauugcaauugaugggaucagcaacaaaguaaacucaguaauugaaaaaaugaauguucaauuuacuucagugggcaaagaguucaauaaucuagaaaaaaggauugagaauuugaauaaaaaggucgaugauggauuuuuggauauauggacuuauaacgcugaauuacucauccugcucgagaacgaaagaacccuagauuuccaugacuuuaacgugaaaaaucuguaugaaagggucaagucacaacuaagaaacaaugccaaggagaucgguaauggcuguuuugaguucuaucacaaauguaauaaugaaugcauggaaagcguaaagaauggcacauauaauuauccuagauauucagaagaauccaaauugaauagagaggaaauagacgguguaaaacuagaaucagugggaguucaucagauuuuggcgaucuacuccacagucgccaguucccugguauugcuagucucccugggggcaaucagcuucuggaugugcucuaaugggucauugcaaugcagaauaugcauuuaa

SEQ ID NO: 38291 - RNA, 1701 nt, Artificial Sequence
  derived and/or modified CDS sequence (wt) from hemagglutinin__InfluenzaA__ADU59558
augaaggcaauacuaguaguucugcuauauacauuugcaaccgcaaaugcagacacauuauguauagguuaucaugcaaacaauucaacagacacuguagacacaguacuagaaaagaauguaacaguaacacacucuguuaaccuucuagaagacaagcauaacgggaaacuaugcaaacuaagagggguagccccauugcauuuggguaaauguaacauugcuggcuggauccugggaaauccagagugugaaucacucuccacagcaagcucaugguccuacauuguggaaacaucuaguucagacaauggaacguguuacccaggagauuucaucgauuaugaggagcuaagagagcaauugagcucagugucaucauuugaaagguuugagauauuccccaagacaaguucauggcccaaucaugacucgaacaaagguguaacggcagcauguccucaugcuggagcaaaaagcuucuacaaaaauuuaauauggcuaguuaaaaaaggaaauucauacccaaagcucagcaaauccuacauuaaugauaaagggaaagaaguccucgugcuauggggcauucaccauccaucuacuagugcugaccaacaaagucucuaucagaaugcagaugcauauguuuuuguggggacaucaagauacagcaagaaguucaagccggaaauagcaauaagacccaaagugaggggucaagaagggagaaugaacuauuacuggacacuaguagagccgggagacaaaauaacauucgaagcaacuggaaaucuagugguaccgagauaugcauucgcaauggaaagaaaugcuggaucugguauuaucauuucagauacaccaguccacgauugcaauacaacuugucagacacccaagggugcuauaaacaccagccucccauuucagaauauacauccgaucacaauuggaaaauguccaaaauauguaaaaagcacaaaauugagacuggccacaggauugaggaaugucccgucuauucaaucuagaggccuauuuggggccauugccgguuucauugaagggggguggacagggaugguagauggaugguacgguuaucaccaucaaaaugagcaggggucaggauaugcagccgaccugaagagcacacagaaugccauugacaagauuacuaacaaagugaauucuguuauugaaaagaugaauacacaguucacagcaguagguaaagaguucaaccaccuggaaaaaagaauagagaauuuaaauaaaaaaguugaugaugguuuccuggacauuuggacuuacaaugccgaacuguugguucuauuggaaaaugaaagaacuuuggacuaccacgauucaaaugugaagaacuuauaugaaaagguaagaagccaguuaaaaaacaaugccaaggaaauuggaaacggcugcuuugaauuuuaccacaaaugcgauaacacgugcauggaaagugucaaaaaugggacuuaugacuacccaaaauacucagaggaagcaaaauuaaacagagaagaaauagaugggguaaagcuggaaucaacaaggauuuaccagauuuuggcgaucuauucaacugucgccaguucauugguacugguagucucccugggggcaaucaguuucuggaugugcucuaaugggucucuacaguguagaauauguauuuaa

SEQ ID NO: 38292 - RNA, 1701 nt, Artificial Sequence
  derived and/or modified CDS sequence (wt) from hemagglutinin__InfluenzaA__ADU59579
augaaggcaauacuaguaguucugcuauauacauuugcaaccgcaaaugcagacacauuauguauagguuaucaugcgaacaauucaacagacacuguagacacaguacuagaaaagaauguaacaguaacacacucuguuaaccuucuagaagacaagcauaacgggaaacuaugcaaacuaagagggguagccccauugcauuuggguaaauguaacauugcuggcuggauccugggaaauccagagugugaaucacucuccacagcaagcucaugguccuacauuguggaaacaucuaguucagacaauggaacguguuacccaggagauuucaucgauuaugaggagcuaagagagcaauugagcucagugucaucauuugaaagguuugagauauuccccaagacaaguucauggcccaaucaugacucgaacaaagguguaacggcagcauguccucaugcuggagcaaaaagcuucuacaaaaauuuaauauggcuaguuaaaaaaggaaauucauacccaaagcucagcaaauccuacauuaaugauaaagggaaagaaguccucgugcuauggggcauucaccauccaucuacuagugcugaccaacaaagucucuaucagaaugcagaugcauauguuuuuguggggacaucaagauacagcaagaaguucaagccggaaauagcaauaagacccaaagugagggaucaagaagggagaaugaacuauuacuggacacuaguagagccgggagacaaaauaacauucgaagcaacuggaaaucuagugguaccgagauaugcauucgcaauggaaagaaaugcuggaucugguauuaucauuucagauacaccaguccacgauugcaauacaacuugucagacacccaagggugcuauaaauaccagccucccauuucagaauauacauccgaucacaauuggaaaauguccaaaauauguaaaaagcacaaaauugagacuggccacaggauugaggaaugucccgucuauucaaucuagaggccuauuuggggccauugccgguuucauugaagggggguggacagggaugguagauggaugguacgguuaucaccaucaaaaugagcaggggucaggauaugcagccgaccugaagagcacacagaaugccauugacgagauuacuaacaaaguaaauucuguuauugaaaagaugaauacacaguucacagcaguagguaaagaguucaaccaccuggaaaaaagaauagagaauuuaaauaaaaaaguugaugaugguuuccuggacauuuggacuuacaaugccgaacuguugguucuauuggaaaaugaaagaacuuuggacuaccacgauucaaaugugaagaacuuauaugaaaagguaagaagccaguuaaaaaacaaugccaaggaaauuggaaacggcugcuuugaauuuuaccacaaaugcgauaacacgugcauggaaagugucaaaaaugggacuuaugacuacccaaaauacucagaggaagcaaaauuaaacagagaagaaauagaugggguaaagcuggaaucaacaaggauuuaccagauuuuggcgaucuauucaacugucgccaguucauugguacugguagucucccugggggcaaucaguuucuggaugugcucuaaugggucucuacaguguagaauauguauuuaa

SEQ ID NO: 38293 - RNA, 1701 nt, Artificial Sequence; identical to SEQ ID NO: 34681
  derived and/or modified CDS sequence (wt) from hemagglutinin__InfluenzaA__ADU59590

SEQ ID NO: 38294 - RNA, 1701 nt, Artificial Sequence
  derived and/or modified CDS sequence (wt) from hemagglutinin__InfluenzaA__ADU59601
augaaggcaauacuaguaguucugcuauauacauuugcaaccgcaaaugcagacacauuauguauagguuaucaugcgaacaauucaacagacacuguagacacaguacuagaaaagaauguaacaguaacacacucuguuaaccuucuagaagacaagcauaacgggaaacuaugcaaacuaagagggguagccccguugcauuuggguaaauguaacauugcuggcuggauccugggaaauccagagugugaaucacucuccacagcaagcucaugguccuacauuguggaaacaucuaguucagacaauggaacguguuacccaggagauuucaucgauuaugaggagcuaagagagcaauugagcucagugucaucauuugaaagguuugagauauuccccaagacaaguucauggcccaaucaugacucgaacaaagguguaacggcagcauguccucaugcuggagcaaaaagcuucuacaaaaauuuaauauggcuaguuaaaaaaggaaauucauacccaaagcucagcaaauccuacauuaaugauaaagggaaagaaguccucgugcuauggggcauucaccauccaucuacuagugcugaccaacaaagucucuaucagaaugcagaugcauauguuuuuguggggacaucaagauacagcaagaaguucaagccggaaauagcaauaagacccaaagugagggaucaagaagggagaaugaacuauuacuggacacuaguagagccgggagacaaaauaacauucgaagcaacuggaaaucuagugguaccgagauaugcauucgcaauggaaagaaaugcuggaucugguauuaucauuucagauacaccaguccacgauugcaauacaacuugucagacacccaagggugcuauaaacaccagccucccauuucagaauauacauccgaucacaauuggaaaauguccaaaauauguaaaaagcacaaaauugagacuggccacaggauugaggaaugucccgucuauucaaucuagaggccuauuuggggccauugccgguuucauugaagggggguggacagggaugguagauggaugguacgguuaucaccaucaaaaugagcaggggucaggauaugcagccgaccugaagagcacacagaaugccauugacgagauuacuaacaaaguaaauucuguuauugaaaagaugaauacacaguucacagcaguagguaaagaguucaaccaccuggaaaaaagaauagagaauuuaaauaaaaaaguugaugaugguuuccuggacauuuggacuuacaaugccgaacuguugguucuauuggaaaaugaaagaacuuuggacuaccacgauucaaaugugaagaacuuauaugaaaagguaagaagccaguuaaaaaacaaugccaaggaaauuggaaacggcugcuuugaauuuuaccacaaaugcgauaacacgugcauggaaagugucaaaaaugggacuuaugacuacccaaaauacucagaggaagcaaaauuaaacagagaagaaauagaugggguaaagcuggaaucaacaaggauuuaccagauuuuggcgaucuauucaacugucgccaguucauugguacugguagucucccugggggcaaucaguuucuggaugugcucuaaugggucucuacaguguagaauauguauuuaa

SEQ ID NO: 38295 - RNA, 1701 nt, Artificial Sequence; identical to SEQ ID NO: 34681
  derived and/or modified CDS sequence (wt) from hemagglutinin__InfluenzaA__ADU59612

SEQ ID NO: 38296 - RNA, 1701 nt, Artificial Sequence; identical to SEQ ID NO: 34681
  derived and/or modified CDS sequence (wt) from hemagglutinin__InfluenzaA__ADU59768

SEQ ID NO: 38297 - RNA, 1701 nt, Artificial Sequence; identical to SEQ ID NO: 37080
  derived and/or modified CDS sequence (wt) from hemagglutinin__InfluenzaA__ADU59769

SEQ ID NO: 38298 - RNA, 1701 nt, Artificial Sequence; identical to SEQ ID NO: 34681
  derived and/or modified CDS sequence (wt) from hemagglutinin__InfluenzaA__ADU59771

SEQ ID NO: 38299 - RNA, 1701 nt, Artificial Sequence; identical to SEQ ID NO: 34681
  derived and/or modified CDS sequence (wt) from hemagglutinin__InfluenzaA__ADU59772

SEQ ID NO: 38300 - RNA, 1701 nt, Artificial Sequence; identical to SEQ ID NO: 34681
  derived and/or modified CDS sequence (wt) from hemagglutinin__InfluenzaA__ADU59774

SEQ ID NO: 38301 - RNA, 1701 nt, Artificial Sequence; identical to SEQ ID NO: 34681
  derived and/or modified CDS sequence (wt) from hemagglutinin__InfluenzaA__ADU59906

SEQ ID NO: 38302 - RNA, 1701 nt, Artificial Sequence
  derived and/or modified CDS sequence (wt) from hemagglutinin__InfluenzaA__ADU59916
augaaggcaauacuaguaguucugcuauauacauuugcaaccgcaaaugcagacacauuauguauagguuaucaugcgaacaauucaacagacacuguagacacaguacuagaaaagaauguaacaguaacacacucuguuaaccuucuagaagacaagcauaacgggaaacuaugcaaacuaagagggguagccccauugcauuuggguaaauguaacauugcuggcuggauccugggaaauccagagugugaaucacucuccacagcaagcucaugguccuacauuguggaaacaucuaguucagacaauggaacguguuacccaggagauuucaucgauuaugaggagcuaagagagcaauugagcucagugucaucauuugaaagguuugagauauuccccaagacaaguucauggcccaaucaugacucgaacaaagguguaacggcagcauguccucaugcuggagcaaaaagcuucuacaaaaauuuaauauggcuaguuaaaaaaggaaauucauacccaaagcucagcaaauccuacauuaaugauaaagggaaagaaguccucgugcuauggggcauucaccauccaucuacuagugcugaccaacaaagucucuaucagaaugcagaugcauauguuuuuguggggacaucaagauacagcaagaaguucaagccggaaauagcaauaagacccaaagugagggaucaagaagggagaaugaacuauuacuggacacuaguagagccgggagacaaaauaacauucgaagcaacuggaaaucuagugguaccgagauaugcauucgcaauggaaagaaaugcuggaucugguauuaucauuucagauacaccaguccacgauugcaauacaacuugucagacacccaagggugcuauaaacaccagccucccauuucagaauauacauccgaucacaauuggaaaauguccaaaauauguaaaaagcacaaaauugagacuggccacaggauugaggaaugucccgucuauucaaucuagaggccuauuuggggccauugccgguuucauugaagggggguggacagggaugguagauggaugguacgguuaucaccaucaaaaugagcaggggucaggauaugcagccgaccugaagagcacacagaaugccauugacgagauuacuaacaaaguaaauucuguuauugaaaagaugaauacacaguucacagcaguagguaaagaguucaaccaccuggaaaaaagaauagagaauuuaaauaaaaaaguugaugaugguuuccuggacauuuggacuuacaaugccgaacuguugguucuauuggaaaaugaaagaacuuuggacuaccacgauucaaaugugaagaacuuauaugaaaagguaagaagccaguuaaaaaacaaugccaaagaaauuggaaacggcugcuuugaauuuuaccacaaaugcgauaacacgugcauggaaagugucaaaaaugggacuuaugacuacccaaaauacucagaggaagcaaaauuaaacagagaagaaauagaugggguaaagcuggaaucaacaaggauuuaccagauuuuggcgaucuauucaacugucgccaguucauugguacugguagucucccugggggcaaucaguuucuggaugugcucuaaugggucucuacaguguagaauauguauuuaa

SEQ ID NO: 38303 - RNA, 1701 nt, Artificial Sequence
  derived and/or modified CDS sequence (wt) from hemagglutinin__InfluenzaA__ADU76756
augaaggcaauacuaguaguucugcuauauacauuugcaaccgcaaaugcagacacauuauguauagguuaucaugcgaacaauucaacagacacuguagacacaguacuagaaaagaauguaacaguaacacacucuguuaaccuucuagaagacaagcauaacgggaaacuaugcaaacuaagagggguagccccauugcauuuggguaaauguaacauugcuggcuggauccugggaaauccagagugugaaucacucuccacagcaaguucaugguccuacauuguggaaacaucuaguucagacaauggaacguguuacccaggagauuucaucgauuaugaggagcuaagagagcaauugagcucagugucaucauuugaaagguuugagauauuccccaagacaaguucauggcccaaucaugacucgaacaaagguguaacggcagcauguccucaugcuggagcaaaaagcuucuacaaaaauuuaauauggcuaguuaaaaaaggaaauucauacccaaagcucagcaaauccuacauuaaugauaaagggaaagaaguccucgugcuauggggcauucaccauccaucuacuagugcugaccaacaaagucucuaucagaaugcagaugcauauguuuuuguggggacaucaagauacagcaagaaguucaagccggaaauagcaauaagacccaaagugagggaucaagaagggagaaugaacuauuacuggacacuaguagagccgggagacaaaauaacauucgaagcaacuggaaaucuagugguaccgagauaugcauucgcaauggaaagaaaugcuggaucugguauuaucauuucagauacaccaguccacgauugcaauacaacuugucagacacccaagggugcuauaaacaccagccucccauuucagaauauacauccgaucacaauuggaaaauguccaaaauauguaaaaagcacaaaauugagacuggccacaggauugaggaaugucccgucuauucaaucuagaggccuauuuggggccauugccgguuucauugaagggggguggacagggaugguagauggaugguacgguuaucaccaucaaaaugagcaggggucaggauaugcagccgaccugaagagcacacagaaugccauugacgagauuacuaacaaaguaaauucuguuauugaaaagaugaauacacaguucacagcaguagguaaagaguucaaccaccuggaaaaaagaauagagaauuuaaauaaaaagguugaugaugguuuccuggacauuuggacuuacaaugccgaacuguugguucuauuggaaaaugaaagaacuuuggacuaccacgauucaaaugugaagaacuuauaugaaaagguaagaagccaguuaaaaaacaaugccaaggaaauuggaaacggcugcuuugaauuuuaccacaaaugcgauaacacgugcauggaaagugucaaaaaugggacuuaugacuacccaaaauacucagaggaagcaaaauuaaacagagaagaaauagaugggguaaagcuggaaucaacaaggauuuaccagauuuuggcgaucuauucaacugucgccaguucauugguacugguagucucccugggggcaaucaguuucuggaugugcucuaaugggucucuacaguguagaauauguauuuaa

SEQ ID NO: 38304 - RNA, 1701 nt, Artificial Sequence; identical to SEQ ID NO: 38303
  derived and/or modified CDS sequence (wt) from hemagglutinin__InfluenzaA__ADU76757

SEQ ID NO: 38305 - RNA, 1701 nt, Artificial Sequence; identical to SEQ ID NO: 38303
  derived and/or modified CDS sequence (wt) from hemagglutinin__InfluenzaA__ADU76758

SEQ ID NO: 38306 - RNA, 1701 nt, Artificial Sequence; identical to SEQ ID NO: 38303
  derived and/or modified CDS sequence (wt) from hemagglutinin__InfluenzaA__ADU76759

SEQ ID NO: 38307 - RNA, 1701 nt, Artificial Sequence
  derived and/or modified CDS sequence (wt) from hemagglutinin__InfluenzaA__ADU76761
augaaggcaauacuaguaguucugcuauauacauuugcaaccgcaaaugcagacacauuauguauagguuaucaugcgaacaauucaacagacacuguagacacaguacuagaaaagaauguaacaguaacacacucuguuaaccuucuagaagacaagcauaacgggaaacuaugcaaacuaagagggguagccccauugcauuuggguaaauguaacauugcuggcuggauccugggaaauccagagugugaaucacucuccacagcaaguucaugguccuacauuguggaaacaucuaguucagacaauggaacguguuacccaggggauuucaucgauuaugaggagcuaagagagcaauugagcucagugucaucauuugaaagguuugagauauuccccaagacaaguucauggcccaaucaugacucgaacaaagguguaacggcagcauguccucaugcuggagcaaaaagcuucuacaaaaauuuaauauggcuaguuaaaaaaggaaauucauacccaaagcucagcaaauccuacauuaaugauaaagggaaagaaguccucgugcuauggggcauucaccauccaucuacuagugcugaccaacaaagucucuaucagaaugcagaugcauauguuuuuguggggacaucaagauacagcaagaaguucaagccggaaauagcaauaagacccaaagugagggaucaagaagggagaaugaacuauuacuggacacuaauagagccgggagacaaaauaacauucgaagcaacuggaaaucuagugguaccgagauaugcauucgcaauggaaagaaaugcuggaucugguauuaucauuucagauacaccaguccacgauugcaauacaacuugucagacacccaagggugcuauaaacaccagccucccauuucagaauauacauccgaucacaauuggaaaauguccaaaauauguaaaaagcacaaaauugagacuggccacaggauugaggaaugucccgucuauucaaucuagaggccuauuuggggccauugccgguuucauugaagggggguggacagggaugguagauggaugguacgguuaucaccaucaaaaugagcaggggucaggauaugcagccgaccugaagagcacacagaaugccauugacgagauuacuaacaaaguaaauucuguuauugaaaagaugaauacacaguucacagcaguagguaaagaguucaaccaccuggaaaaaagaauagagaauuuaaauaaaaagguugaugaugguuuccuggacauuuggacuuacaaugccgaacuguugguucuauuggaaaaugaaagaacuuuggacuaccacgauucaaaugugaagaacuuauaugaaaagguaagaagccaguuaaaaaacaaugccaaggaaauuggaaacggcugcuuugaauuuuaccacaaaugcgauaacacgugcauggaaagugucaaaaaugggacuuaugacuacccaaaauacucagaggaagcaaaauuaaacagagaagaaauagaugggguaaagcuggaaucaacaaggauuuaccagauuuuggcgaucuauucaacugucgccaguucauugguacugguagucucccugggggcaaucaguuucuggaugugcucuaaugggucucuacaguguagaauauguauuuaa

SEQ ID NO: 38308 - RNA, 1701 nt, Artificial Sequence
  derived and/or modified CDS sequence (wt) from hemagglutinin__InfluenzaA__ADU76762
augaaggcaauacuaguaguucugcuauauacauuugcaaccgcaaaugcagacacauuauguauagguuaucaugcgaacaauucaacagacacuguagacacaguacuagaaaagaauguaacaguaacacacucuguuaaccuucuagaagacaagcauaacgggaaacuaugcaaacuaagagggguagccccauugcauuuggguaaauguaacauugcuggcuggauccugggaaauccagagugugaaucacucuccacagcaaguucaugguccuacauuguggaaacaucuaguucagacaauggaacguguuacccaggagauuucaucgauuaugaggagcuaagagagcaauugagcucagugucaucauuugaaagguuugagauauuccccaagacaaguucauggcccaaucaugacucgaacaaagguguaacggcagcauguccucaugcuggagcaaaaagcuucuacaaaaauuuaauauggcuaguuaaaaaaggaaauucauacccaaagcucagcaaauccuacauuaaugauaaagggaaagaaguccucgugcuauggggcauucaccauccaucuacuagugcugaccaacaaagucucuaucagaaugcagaugcauauguuuuuguggggacaucaagauacagcaagaaguucaagccggaaauagcaauaagacccaaagugagggaucaagaagggagaaugaacuauuacuggacacuaguagagccgggagacaaaauaacauucgaagcaacuggaaaucuagugguaccgagauaugcauucgcaauggaaagaaaugcuggaucugguauuaucauuucagauacaccaguccacgauugcaauacaacuugucagacacccaagggugcuauaaacaccagccucccauuucagaauauacauccgaucacaauuggaaaauguccaaaauauguaaaaagcacaaaauugagacuggccacaggauugaggaaugucccgucuauucaaucuagaggacuauuuggggccauugccgguuucauugaagggggguggacagggaugguagauggaugguacgguuaucaccaucaaaaugagcaggggucaggauaugcagccgaccugaagagcacacagaaugccauugacgagauuacuaacaaaguaaauucuguuauugaaaagaugaauacacaguucacagcaguagguaaagaguucaaccaccuggaaaaaagaauagagaauuuaaauaaaaagguugaugaugguuuccuggacauuuggacuuacaaugccgaacuguugguucuauuggaaaaugaaagaacuuuggacuaccacgauucaaaugugaagaacuuauaugaaaagguaagaagccaguuaaaaaacaaugccaaggaaauuggaaacggcugcuuugaauuuuaccacaaaugcgauaacacgugcauggaaagugucaaaaaugggacuuaugacuacccaaaauacucagaggaagcaaaauuaaacagagaagaaauagaugggguaaagcuggaaucaacaaggauuuaccagauuuuggcgaucuauucaacugucgccaguucauugguacugguagucucccugggggcaaucaguuucuggaugugcucuaaugggucucuacaguguagaauauguauuuaa

SEQ ID NO: 38309 - RNA, 1701 nt, Artificial Sequence
  derived and/or modified CDS sequence (wt) from hemagglutinin__InfluenzaA__ADU76764
augaaggcaauacuaguaguucugcuauauacauuugcaaccgcaaaugcagacacauuauguauagguuaucaugcgaacaauucaacagacacuguagacacaguacuagaaaagaaugugacaguaacacacucuguuaaccuucuagaagacaagcauaacgggaaacuaugcaaacuaagagggguagccccauugcauuuggguaaauguaacauugcuggcuggauccugggaaauccagagugugaaucacucuccacagcaagcucaugguccuacauuguggaagcaucuaguucaaacaauggaacguguuacccaggagauuucaucgauuaugaggagcuaagagagcaauugagcucagugucaucauuugaaagguuugagauauuccccaagacaaguucauggcccaaucaugacucgaacaaagguguaacggcagcauguccucaugcuggagcaaaaagcuucuacaaaaauuuaauauggcuaguuaaaaaaggaaauucauacccaaagcucagcaaauccuacauuaaugauaaagggaaagaaguccucgugcuauggggcauucaccauccaucuacuagugcugaccaacaaagucucuaucagaaugcagaugcauauguuuuuguggggacaucaagauacagcaagaaguucaagccggaaauagcaauaagacccaaagugagggaucaagaagggagaaugaacuauuacuggacacuaguagagccgggagacaaaauaacauucgaagcaacuggaaaucuagugguaccgagauaugcauucgcaauggaaagaaaugcuggaucugguauuauuauuucagauacaccaguccacgauugcaauacaacuugucagacacccaagggugcuauaaacaccagccucccauuucagaauauacauccgaucacaauuggaaaauguccaaaauauguaaaaagcacaaaauugagacuggccacaggauugaggaaugucccgucuauucaaucuagaggccuauuuggggccauugccgguuucauugaagggggguggacagggaugguagauggaugguacgguuaucaccaucaaaaugagcaggggucaggauaugcagccgaccugaagagcacacagaaugccauugacgagauuacuaacaaaguaaauucuguuauugaaaagaugaacacacaguucauagcaguagguaaagaguucaaccaccuggaaaaaagaauagagaauuuaaauaaaaaaguugaugaugguuuccuggacauuuggacuuacaaugccgaacuguugguucuauuggaaaaugaaagaaccuuggacuaccacgauucaaaugugaagaacuuauaugaaaagguaagaagccaguuaaaaaacaaugccaaggaaauuggaaacggcugcuuugaauuuuaccacaaaugcgauaacacgugcauggaaagugucaaaaaugggacuuaugacuacccaaaauacucagaggaagcaaaauuaaacagagaagaaauagaugggguaaagcuggaaucaacaaggauuuaccagauuuuggcgaucuauucaacugucgccaguucauugguacugguagucucccugggggcaaucaguuucuggaugugcucuaaugggucucuacaguguagaauauguauuuaa

SEQ ID NO: 38310 - RNA, 1701 nt, Artificial Sequence
  derived and/or modified CDS sequence (wt) from hemagglutinin__InfluenzaA__ADU76765
augaaggcaauacuaauaguucugcuauauacauuugcaaccgcaaaugcagacacauuauguauagguuaucaugcgaacaauucaacagacacuguagacacaguacuagaaaagaauguaacaguaacacacucuguuaaccuucuagaagacaagcauaacgggaaacuaugcaaacuaagagggguagccccauugcauuuggguaaauguaacauugcuggcuggauccugggaaauccagagugugaaucacucuccacagcaagcucaugguccuacauuguggaaacaucuaguucagacaauggaacguguuacccaggagauuucaucgauuaugaggagcuaagagagcaauugagcucagugucaucauuugaaagguuugagauauuccccaagacaaguucauggcccaaucaugacucgaacaaagguguaacggcagcauguccucaugcuggagcaaaaagcuucuacaaaaauuuaauauggcuaguuaaaaaaggaaauucauacccaaagcucagcaaauccuacauuaaugauaaagggaaagaaguccucgugcuauggggcauucaccauccaucuacuagugcugaccaacaaagucucuaucagaaugcagaugcauauguuuuuguggggacaucaagauacagcaagaaguucaagccggaaauagcaauaagacccaaagugagggaucaagaagggagaaugaacuauuacuggacacuaguagagccgggagacaaaauaacauucgaagcaacuggaaaucuagugguaccgagauaugcauucgcaauggaaagaaaugcuggaucugguauuaucauuucagauacaccaguccacgauugcaauacaacuugucagacacccaagggugcuauaaacaccagccucccauuucagaauauacauccgaucacaauuggaaaauguccaaaauauguaaaaagcacaaaauugagacuggccacaggauugaggaaugucccgucuauucaaucuagaggccuauuuggggccauugccgguuucauugaagggggguggacagggaugguagauggaugguacgguuaucaccaucaaaaugagcaggggucaggauaugcagccgaccugaagagcacacagaaugccauugacgagauuacuaacaaaguaaauucuguuauugaaaagaugaauacacaguucacagcaguagguaaagaguucaaccaccuggaaaaaagaauagagaauuuaaauaaaaagguugaugaugguuuccuggacauuuggacuuacaaugccgaacuguugguucuauuggaaaaugaaagaacuuuggacuaccacgauucaaaugugaagaacuuauaugaaaagguaagaagccaguuaaaaaacaaugccaaggaaauuggaaacggcugcuuugaauuuuaccacaaaugcgauaacacgugcauggaaagugucaaaaaugggacuuaugacuacccaaaauacucagaggaagcaaaauuaaacagagaagaaauagaugggguaaagcuggaaucaacaaggauuuaccagauuuuggcgaucuauucaagugucgccaguucauugguacugguagucucccugggggcaaucaguuucuggaugugcucuaaugggucucuacaguguagaauauguauuuaa

SEQ ID NO: 38311 - RNA, 1701 nt, Artificial Sequence; identical to SEQ ID NO: 36866
  derived and/or modified CDS sequence (wt) from hemagglutinin__InfluenzaA__ADU76766

SEQ ID NO: 38312 - RNA, 1701 nt, Artificial Sequence
  derived and/or modified CDS sequence (wt) from hemagglutinin__InfluenzaA__ADU76767
augaaggcaauacuaguaguucugcuauauacauuugcaaccgcaaaugcagacacauuauguauagguuaucaugcgaacaauucaacagacacuguagacacaguacuagaaaagaauguaacaguaacacacucuguuaaccuucuagaagacaagcauaacgggaaacuaugcaaacuaagagggguagccccauugcauuuggguaaauguaacauugcuggcuggauccugggaaauccagagugugaaucacucuccacagcaagcucaugguccuacauuguggaaacaucuaguucagacaauggaacguguuacccaggagauuucaucgauuaugaggagcuaagagagcaauugagcucagugucaucauuugaaagguuugagauauuccccaagacaaguucauggcccaaucaugacucgaacaaagguguaacggcagcauguccucaugcuggagcaaaaagcuucuacaaaaauuuaauauggcuaguuaaaaaaggaaauucauacccaaagcucagcaaauccuacauuaaugauaaagggaaagaaguccucgugcuauggggcauucaccauccaucuacuagugcugaccaacaaagucucuaucagaaugcagaugcauauguuuuuguggggacaucaagauacagcaagaaguucaagccggaaauagcaauaagacccaaagugagggaacaagaagggagaaugaacuauuacuggacacuaguagagccgggagacaaaauaacauucgaagcaacuggaaaucuagugguaccgagauaugcauucgcaauggaaagaaaugcuggaucugguauuaucauuucagauacaccaguccacgauugcaauacaacuugucagacacccaagggugcuauaaacaccagccucccauuucagaauauacauccgaucacaauuggaaaauguccaaaauauguaaaaagcacaaaauugagacuggccacuggauugaggaaugucccgucuauucaaucuagaggccuauuuggggccauugccgguuucauugaagggggguggacagggaugguagauggaugguacgguuaucaccaucaaaaugagcagggaucaggauaugcagccgaccugaagagcacacagaaugccauugacaagauuacuaacaaaguaaauucuguuauugaaaagaugaauacacaguucacagcaguggguaaagaguucaaccaccuggaaaaaagaauagagaauuuaaauaaaaaaguugaugaugguuuccuggacauuuggacuuacaaugccgaacuguugguucuauuggaaaaugaaagaacuuuggacuaccacgauucaaaugugaagaacuuauaugaaaagguaagaagccaguuaaaaaacaaugccaaggaaauuggaaacggcugcuuugaauuuuaccacaaaugcgauaacacgugcauggaaagugucaaaaaugggacuuaugacuacccaaaauacucagaggaagcaaaauuaaacagagaagaaauagaugggguaaagcuggaaucaacaaggauuuaccagauuuuggcgaucuauucaacugucgccaguucauugguacugguagucucccugggggcaaucaguuucuggaugugcucuaaugggucucuacaguguagaauauguauuuaa

SEQ ID NO: 38313 - RNA, 1701 nt, Artificial Sequence
  derived and/or modified CDS sequence (wt) from hemagglutinin__InfluenzaA__ADU76768
augaaggcaauacuaguaguucugcuauauacauuugcaaucgcaaaugcagacacauuauguauagguuaucaugcgaacaauucaacagacacuguagacacaguacuagaaaagaauguaacaguaacacacucuguuaaccuucuagaagacaagcauaacgggaaacuaugcaaacuaagagggguagccccauugcaucuggguaaauguaacauugcuggcuggauccugggaaauccagagugugaaucacucuccacagcaagcucaugguccuacauuguggaaacaucuaguucagacaauggaacguguuacccaggagauuucaucgauuaugaggagcuaagagagcaauugagcucagugucaucauuugaaagguuugagauauuccccaagacaaguucauggcccaaucaugacucgaacaaagguguaacggcagcauguccucaugcuggagcaaaaagcuucuacaaaaauuuaauauggcuaguuaaaaaaggaaauucauacccaaagcucagcaaauccuacauuaaugauaaagggaaagaaguccucgugcuauggggaauucaccauccaucuacuagugcugaccaacaaagucucuaucagaaugcagaugcauauguuuuuguggggacaucaaaauacagcaagaaguucaagccggaaauagcaauaagacccaaagugagggaucaagaagggagaaugaacuauuacuggacacuaguagagccgggagacaaaauaacauucgaagcaacuggaaaucuagugguaccgagauaugcauucgcaauggaaagaaaugcuggaucugguauuaucauuucagauacaccaguccacgauugcaauacaacuugucagacacccaagggugcuauaaacaccagccucccauuucagaauauacauccgaucacaauuggaaaauguccaaaauauguaaaaagcacaaaauugagacuggccacaggauugaggaaugucccgucuauucaaucuagaggccuauuuggggccauugccgguuucauugaagggggguggacagggaugguagauggaugguacgguuaucaccaucaaaaugagcaggggucaggauaugcagccgaccugaagagcacacagcaugccauugacgagauuacuaacaaaguaaauucuguuauugaaaagaugaauacacaguucacagcaguagguaaagaguucaaccaccuggaaaaaagaauagagaauuuaaauaaaaaaguugaugaugguuuccuggacauuuggacuuacaaugccgaacuguugguucuauuggaaaaugaaagaacuuuggacuaccacgauucaaaugugaagaacuuauaugaaaagguaagaagccaguuaaaaaacaaugccaaggaaauuggaaacggcugcuuugaauuuuaccacaaaugcgauaacacgugcauggaaagugucaaaaaugggacuuaugacuacccaaaauacucagaggaagcaaaauuaaacagagaagaaauaaaugggguaaagcuggaaucaacaaggauuuaccagauuuuggcgaucuauucaacugucgccaguucauugguacugguagucucccugggggcaaucaguuucuggaugugcucuaaugggucucuacaguguagaauauguauuuaa

SEQ ID NO: 38314 - RNA, 1701 nt, Artificial Sequence; identical to SEQ ID NO: 38303
  derived and/or modified CDS sequence (wt) from hemagglutinin__InfluenzaA__ADU76769

SEQ ID NO: 38315 - RNA, 1701 nt, Artificial Sequence; identical to SEQ ID NO: 38303
  derived and/or modified CDS sequence (wt) from hemagglutinin__InfluenzaA__ADU76770

SEQ ID NO: 38316 - RNA, 1701 nt, Artificial Sequence; identical to SEQ ID NO: 38303
  derived and/or modified CDS sequence (wt) from hemagglutinin__InfluenzaA__ADU76771

SEQ ID NO: 38317 - RNA, 1701 nt, Artificial Sequence
  derived and/or modified CDS sequence (wt) from hemagglutinin__InfluenzaA__ADU76772
augaaggcaauacuaguaguucugcuauauacauuugcaaccgcaaaugcagacacauuauguauagguuaucaugcgaacaauucaacagacacuguagacacaguacuagaaaagaauguaacaguaacacacucuguuaaccuucuagaagacaagcauaacgggaaacuaugcaaacuaagagggguagccccauugcauuuggguaaauguaacauugcuggcuggauccugggaaauccagagugugaaucacucuccacagcaaguucaugguccuacauuguggaaacaucuaguucagacaauggaacguguuacccaggagauuucaucgauuaugaggagcuaagagagcaauugagcucagugucaucauuugaaagguuugagauauuccccaagacaaguucauggcccaaucaugacucgaacaaagguguaacggcagcauguccucaugcuggagcaaaaagcuucuacaaaaauuuaauauggcuaguuaaaaaaggaaauucauacccaaagcucagcaaauccuacauuaaugauaaagggaaagaaguccucgugcuauggggcauucaccauccaucuacuagugcugaccaacaaagucucuaucagaaugcagaugcauauguuuuuguggggacaucaagauacagcaagaaguucaagccggaaauagcaauaagacccaaagugaggggucaagaagggagaaugaacuauuacuggacacuaguagagccgggagacaaaauaacauucgaagcaacuggaaaucuagugguaccgagauaugcauucgcaauggaaagaaaugcuggaucugguauuaucauuucagauacaccaguccacgauugcaauacaacuugucagacacccaagggugcuauaaacaccagccucccauuucagaauauacauccgaucacaauuggaaaauguccaaaauauguaaaaagcacaaaauugagacuggccacaggauugaggaaugucccgucuauucaaucuagaggccuauuuggggccauugccgguuucauugaagggggguggacagggaugguagauggaugguacgguuaucaccaucaaaaugagcaggggucaggauaugcagccgaccugaagagcacacagaaugccauugacgagauuacuaacaaaguaaauucuguuauugaaaagaugaauacacaguucacagcaguagguaaagaguucaaccaccuggaaaaaagaauagagaauuuaaauaaaaagguugaugaugguuuccuggacauuuggacuuacaaugccgaacuguugguucuauuggaaaaugaaagaacuuuggacuaccacgauucaaaugugaagaacuuauaugaaaagguaagaagccaguuaaaaaacaaugccaaggaaauuggaaacggcugcuuugaauuuuaccacaaaugcgauaacacgugcauggaaagugucaaaaaugggacuuaugacuacccaaaauacucagaggaagcaaaauuaaacagagaagaaauagaugggguaaagcuggaaucaacaaggauuuaccagauuuuggcgaucuauucaacugucgccaguucauugguacugguagucucccugggggcaaucaguuucuggaugugcucuaaugggucucuacaguguagaauauguauuuaa

SEQ ID NO: 38318 - RNA, 1701 nt, Artificial Sequence; identical to SEQ ID NO: 38303
  derived and/or modified CDS sequence (wt) from hemagglutinin__InfluenzaA__ADU76774

SEQ ID NO: 38319 - RNA, 1701 nt, Artificial Sequence; identical to SEQ ID NO: 38303
  derived and/or modified CDS sequence (wt) from hemagglutinin__InfluenzaA__ADU76775

SEQ ID NO: 38320 - RNA, 1701 nt, Artificial Sequence; identical to SEQ ID NO: 38303
  derived and/or modified CDS sequence (wt) from hemagglutinin__InfluenzaA__ADU76776

SEQ ID NO: 38321 - RNA, 1701 nt, Artificial Sequence
  derived and/or modified CDS sequence (wt) from hemagglutinin__InfluenzaA__ADU76777
augaaggcaauacuaguaguucugcuauauacauuugcaaccgcaaaugcagacacauuauguauagguuaucaugcgaacaauucaacagacacuguagacacaguacuagaaaagaauguaacaguaacacacucuguuaaccuucuagaagacaagcauaacgggaaacuaugcaaacuaagagggguagccccauugcauuuggguaaauguaacauugcuggcuggauccugggaaauccagagugugaaucacucuccacagcaaguucaugguccuacauuguggaaacaucuaguucagacaauggaacguguuacccaggggauuucaucgauuaugaggagcuaagagagcaauugagcucagugucaucauuugaaagguuugagauauuccccaagacaaguucauggcccaaucaugacucgaacaaagguguaacggcagcauguccucaugcuggagcaaaaagcuucuacaaaaauuuaauauggcuaguuaaaaaaggaaauucauacccaaagcucagcaaauccuacauuaaugauaaagggaaagaaguccucgugcuauggggcauucaccauccaucuacuagugcugaccaacaaagucucuaucagaaugcagaugcauauguuuuuguggggacaucaagauacagcaagaaguucaagccggaaauagcaauaagacccaaagugagggaucaagaagggagaaugaacuauuacuggacacuaguagagccgggagacaaaauaacauucgaagcaacuggaaaucuagugguaccgagauaugcauucgcaauggaaagaaaugcuggaucugguauuaucauuucagauacaccaguccacgauugcaauacaacuugucagacacccaagggugcuauaaacaccagccucccauuucagaauauacauccgaucacaauuggaaaauguccaaaauauguaaaaagcacaaaauugagacuggccacaggauugaggaaugucccgucuauucaaucuagaggccuauuuggggccauugccgguuucauugaagggggguggacagggaugguagauggaugguacgguuaucaccaucaaaaugagcaggggucaggauaugcagccgaccugaagagcacacagaaugccauugacgagauuacuaacaaaguaaauucuguuauugaaaagaugaauacacaguucacagcaguagguaaagaguucaaccaccuggaaaaaagaauagagaauuuaaauaaaaagguugaugaugguuuccuggacauuuggacuuacaaugccgaacuguugguucuauuggaaaaugaaagaacuuuggacuaccacgauucaaaugugaagaacuuauaugaaaagguaagaagccaguuaaaaaacaaugccaaggaaauuggaaacggcugcuuugaauuuuaccacaaaugcgauaacacgugcauggaaagugucaaaaaugggacuuaugacuacccaaaauacucagaggaagcaaaauuaaacagagaagaaauagaugggguaaagcuggaaucaacaaggauuuaccagauuuuggcgaucuauucaacugucgccaguucauugguacugguagucucccugggggcaaucaguuucuggaugugcucuaaugggucucuacaguguagaauauguauuuaa

SEQ ID NO: 38322 - RNA, 1701 nt, Artificial Sequence; identical to SEQ ID NO: 38321
  derived and/or modified CDS sequence (wt) from hemagglutinin__InfluenzaA__ADU76778

SEQ ID NO: 38323 - RNA, 1701 nt, Artificial Sequence
  derived and/or modified CDS sequence (wt) from hemagglutinin__InfluenzaA__ADU76779
augaaggcaauacuaguaguucugcuauauacauuugcaaccgcaaaugcagacacauuauguauagguuaucaugcgaacaauucaacagacacuguagacacaguacuagaaaagaauguaacaguaacacacucuguuaaccuucuagaagacaagcauaacgggaaacuaugcaaacuaagagggguagccccauugcauuuggguaaauguaacauugcuggcuggauccugggaaauccagagugugaaucacucuccacagcaagcucaugguccuacauuguggaaacaucuaguucagacaauggaacguguuacccaggagauuucaucgauuaugaggagcuaagagagcaauugagcucagugucaucauuugaaagguuugagauauuccccaagacaaguucauggcccaaucaugaaucgaacaaagguguaacggcagcauguccucaugcuggagcaaaaagcuucuacaaaaauuuaauauggcuaguuaaaaaaggaaauucauacccaaagcucagcaaauccuacauuaaugauaaagggaaagaaguccucgugcuauggggcauucaccauccaucuacuagugcugaccaacaaagucucuaucagaaugcagaugcauauguuuuuguggggacaucaagauacagcaagaaguucaagccggaaauagcaauaagacccaaagugagggaucaagaagggagaaugaacuauuacuggacacuaguagagccgggagacaaaauaacauucgaagcaacuggaaaucuagugguaccgagauaugcauucgcaauggaaagaaaugcuggaucugguauuaucauuucagauacaccaguccacgauugcaauacaacuugucagacacccaagggugcuauaaacaccagccucccauuucagaauauacauccgaucacaauuggaaaauguccaaaauauguaaaaagcacaaaauugagacuggccacaggauugaggaaugucccgucuauucaaucuagaggccuauuuggggccauugccgguuucauugaagggggguggacagggaugguagauggaugguacgguuaucaccaucaaaaugagcaggggucaggauaugcagccgaccugaagagcacacagaaugccauugacgagauuacuaacaaaguaaauucuguuauugaaaagaugaauacacaguucacagcaguagguaaagaguucaaccaccuggaaaaaagaauagagaauuuaaauaaaaagguugaugaugguuuccuggacauuuggacuuacaaugccgaacuguugguucuauuggaaaaugaaagaacuuuggacuaccacgauucaaaugugaagaacuuauaugaaaagguaagaagccaguuaaaaaacaaugccaaggaaauuggaaacggcugcuuugaauuuuaccacaaaugcgauaacacgugcauggaaagugucaaaaaugggacuuaugacuacccaaaauacucagaggaagcaaaauuaaacagagaagaaauagaugggguaaagcuggaaucaacaaggauuuaccagauuuuggcgaucuauucaacugucgccaguucauugguacugguagucucccugggggcaaucaguuucuggaugugcucuaaugggucucuacaguguagaauauguauuuaa

SEQ ID NO: 38324 - RNA, 1701 nt, Artificial Sequence; identical to SEQ ID NO: 34714
  derived and/or modified CDS sequence (wt) from hemagglutinin__InfluenzaA__ADU76780

SEQ ID NO: 38325 - RNA, 1701 nt, Artificial Sequence
  derived and/or modified CDS sequence (wt) from hemagglutinin__InfluenzaA__ADU76781
augaaggcaauacuaguaguucugcuauauacauuugcaaccgcaaaugcagacacauuauguauagguuaucaugcgaacaauucaacagacacuguagacacaguacuagaaaagaauguaacaguaacacacucuguuaacauucuagaagacaagcauaacgggaaacuaugcaaacuaagagggguagccccauugcauuuggguaaauguaacauugcuggcuggauccugggaaauccagagugugaaucacucuccacagcaagcucaugguccuacauuguggaaacaucuaguucagacaauggaacguguuacccaggagauuucaucgauuaugaggagcuaagagagcaauugagcucagugucaucauuugaaagguuugagauauuccccaagacaaguucauggcccaaucaugacucgaacaaagguguaacggcagcauguccucaugcuggagcaaaaagcuucuacaaaaauuuaauauggcuaguuaaaaaagggaauucauacccaaagcucagcaaauccuacauuaaugauaaagggaaagaaguccucgugcuauggggcauucaccauccaucuacuagugcugaccaacaaagucucuaucagaaugcagaugcauauguuuuuguggggacaucaagauacagcaagaaguucaagccggaaauagcaauaagacccaaagugagggaucaagaagggagaaugaacuauuacuggacacuaguagagccgggagacaaaauaacauucgaagcaacuggaaaucuagugguaccgagauaugcauucgcaauggaaagaaaugcuggaucugguauuaucauuucagauacaccaguccacgauugcaauacaacuugucagacacccaagggugcuauaaacaccagccucccauuucagaauauacauccgaucacaauuggaaaauguccaaaauauguaaaaagcacaaaauugagacuggccacaggauugaggaaugucccgucuauucaaucuagaggccuauuuggggccauugccgguuucauugaagggggguggacagggaugguagauggaugguacgguuaucaccaucaaaaugagcaggggucaggauaugcagccgaccugaagagcacacagaaugccauugacgagauuacuaacaaaguaaauucuguuauugaaaagaugaauacacaguucacagcaguagguaaagaguucaaccaccuggaaaaaagaauagagaauuuaaauaaaaaaguugaugaugguuuccuggacauuuggacuuacaaugccgaacuguugguucuauuggaaaaugaaagaacuuuggacuaccacgauucaaaugugaagaacuuauaugaaaagguaagaagccaguuaaaaaacaaugccaaggaaauuggaaacggcugcuuugaauuuuaccacaaaugcgauaacacgugcauggaaagugucaaaaaugggacuuaugacuaccccaaauacucagaggaagcaaaauuaaacagagaagaaauagaugggguaaagcuggaaucaacaaggauuuaccagauuuuggcgaucuauucaacugucgccaguucauugguacugguagucucccugggggcaaucaguuucuggaugugcucuaaugggucucuacaguguagaauauguauuuaa

SEQ ID NO: 38326 - RNA, 1701 nt, Artificial Sequence; identical to SEQ ID NO: 38307
  derived and/or modified CDS sequence (wt) from hemagglutinin__InfluenzaA__ADU76782

SEQ ID NO: 38327 - RNA, 1701 nt, Artificial Sequence
  derived and/or modified CDS sequence (wt) from hemagglutinin__InfluenzaA__ADU76784
augaaggcaauacuaguaguucugcuauauacauuugcaaccgcaaaugcagacacauuauguauagguuaucaugcgaacaauucaacagacacuguagacacaguacuagaaaagaauguaacaguaacacacucuguuaaccuucuagaagacaagcauaacgggaaacuaugcaaacuaagagggguagccccauugcauuuggguaaauguaacauugcuggcuggauccugggaaauccagagugugaaucacucuccacagcaagcucaugguccuacauuguggaaacaucuaguucaaacaauggaacguguuacccaggagauuucaucgauuaugaggagcuaagagagcaauugagcucagugucaucauuugaaagguuugagauauuccccaagacaaguucauggcccaaucaugacucgaacaaagguguaacggcagcaugcccucaugcuggagcaaaaagcuucuacaaaaauuuaauauggcuaguuaaaaaaggaaauucauacccaaagcucagcaaauccuacauuaaugauaaagggaaagaaguccucgugcuauggggcauucaccauccaucuacuagugcugaccaacaaagucucuaucagaaugcagaugcauauguuuuuguggggacaucaagauacagcaagaaguucaagccggaaauagcaauaagacccaaagugagggaucaagaagggagaaugaacuauuacuggacacuaguagagccgggagacaaaauaacauucgaagcaacuggaaaucuagugguaccgagauaugcauucgcaauggaaagaaaugcuggaucugguauuaucauuucagauacaccaguccacgauugcaauacaacuugucagacacccaagggugcuauaaacaccagccucccauuucagaauauacauccgaucacaauuggaaaauguccaaaauauguaaaaagcacaaaauugagacuggccacaggauugaggaaugucccgucuauucaaucuagaggccuauuuggggccauugccgguuucauugaagggggguggacagggaugguagauggaugguacgguuaucaccaucaaaaugagcaggggucaggauaugcagccgaccugaagagcacacagaaugccauugacgagauuacuaacaaaguaaauucuguuauugaaaagaugaauacacaguucacagcaguagguaaagaguucaaccaccuggaaaaaagaauagagaauuuaaauaaaaaaguugaugaugguuuccuggacauuuggacuuacaaugccgaacuguugguucuauuggaaaaugaaagaacuuuggacuaccacgauucaaaugugaagaacuuauaugaaaagguaagaagccaguuaaaaaacaaugccaaggaaauuggaaacggcugcuuugaauuuuaccacaaaugcgauaacacgugcauggaaagugucaaaaaugggacuuaugacuacccaaaauacucagaggaagcaaaauuaaacagagaagaaauagaugggguaaagcuggaaucaacaaggauuuaccagauuuuggcgaucuauucaacugucgccaguucauugguacugguagucucccugggggcaaucaguuucuggaugugcucuaaugggucucuacaguguagaauauguauuuaa

SEQ ID NO: 38328 - RNA, 1701 nt, Artificial Sequence; identical to SEQ ID NO: 38303
  derived and/or modified CDS sequence (wt) from hemagglutinin__InfluenzaA__ADU76785

SEQ ID NO: 38329 - RNA, 1701 nt, Artificial Sequence; identical to SEQ ID NO: 38303
  derived and/or modified CDS sequence (wt) from hemagglutinin__InfluenzaA__ADU76786

SEQ ID NO: 38330 - RNA, 1701 nt, Artificial Sequence
  derived and/or modified CDS sequence (wt) from hemagglutinin__InfluenzaA__ADU76787
augaaggcaauacuaguaguucugcuauauacauuugcaaccgcaaaugcagacacauuauguauagguuaucaugcgaacaauucaacagacacuguagacacaguacuagaaaagaauguaacaguaacacacucuguuaaccuucuagaagacaagcauaacgggaaacuaugcaaacuaagagggguagccccauugcauuuggguaaauguaacauugcuggcuggauccugggaaauccagagugugaaucacucuccacagcaagcucaugguccuacauuguggaaacaucuaguucagacaauggaacguguuacccaggagauuucaucgauuaugaggagcuaagagagcaauugagcucagugucaucauuugaaagguuugagauauuccccaagacaaguucauggcccaaucaugacucgaacaaagguguaacggcagcauguccucaugcuggagcaaaaagcuucuacaaaaauuuaauauggcuaguuaaaaaaggaaauucauacccaaagcucagcaaauccuacauuaaugauaaagggaaagaaguccucgugcuauggggcauucaccauccaucuacuagugcugaccaacaaagucucuaucagaaugcagaugcauauguuuuuguggggacaucaagauacagcaagaaguucaagccggaaauagcaauaagacccaaagugagggaacaagaagggagaaugaacuauuacuggacacuaguagagccgggagacaaaauaacauucgaagcaacuggaaaucuagugguaccgagauaugcauucgcaauggaaagaaaugcuggaucugguauuaucauuucagauacaccaguccacgauugcaauacaacuugucagacacccaagggugcuauaaacaccagccucccauuucauaauauacauucgaucacaauuggaaaauguccaaaauauguaaaaagcacaaaauugagacuggccacaggauugaggaaugucccgucuauucaaucuagaggccuauuuggggccauugccgguuucauugaagggggguggacagggaugguagauggaugguacgguuaucaccaucaaaaugagcaggggucaggauaugcagccgaccugaagagcacacagaaugccauugacgagauuacuaacaaaguaaauucuguuauugaaaagaugaauacacaguucacagcaguagguaaagaguucaaccaccuggaaaaaagaauagagaauuuaaauaaaaaaguugaugaugguuuccuggacauuuggacuuacaaugccgaacuguugguucuauuggaaaaugaaagaacuuuggacuaccacgauucaaaugugaagaacuuauaugaaaagguaagaagccaguuaaaaaacaaugccaaggaaauuggaaacggcugcuuugaauuuuaccacaaaugcgauaacacgugcauggaaagugucaaaaaugggacuuaugacuacccaaaauacucagaggaagcaaaauuaaacagagaagaaauagaugggguaaagcuggaaucaacaaggauuuaccagauuuuggcgaucuauucaacugucgccaguucauugguacugguagucucccugggggcaaucaguuucuggaugugcucuaaugggucucuacaguguagaauauguauuuaa

SEQ ID NO: 38331 - RNA, 1701 nt, Artificial Sequence
  derived and/or modified CDS sequence (wt) from hemagglutinin__InfluenzaA__ADU76788
augaaggcaauacuaguaguucugcuauauacauuugcaaccgcaaaugcagacacauuauguauagguuaucaugcgaacaauucaacagacacuguagacacaguacuagaaaagaauguaacaguaacacacucuguuaaccuucuagaagacaagcauaacgggaaacuaugcaaacuaagagggguagccccauugcauuuggguaaauguaacauugcuggcuggauccugggaaauccagagugugaaucacucuccacggcaagcucaugguccuacauuguggaaacaucuaguucagacaauggaacguguuacccaggagauuucaucgauuaugaggagcuaagagagcaauugagcucagugucaucauuugaaagguuugagauauuccccaagacaaguucauggcccaaucaugacucgaacaaagguguaacggcagcauguccucaugcuggagcaaaaagcuucuacaaaaauuuaauauggcuaguuaaaaaaggaaauucauacccaaagcucagcaaauccuacauuaaugauaaagggaaagaaguccucgugcuauggggcauucaccauccaucuacuagugcugaccaacaaagucucuaucagaaugcagaugcauauguuuuuguggggacaucaagauacagcaagaaguucaagccggaaauagcaauaagacccaaagugagggaacaagaagggagaaugaacuauuacuggacacuaguagagccgggagacaaaauaacauucgaagcaacuggaaaucuagugguaccgagauaugcauucgcaauggaaagaaaugcuggaucugguauuaucauuucagauacaccaguccacgauugcaauacaacuugucagacacccaagggugcuauaaacaccagccucccauuucagaauauacauccgaucacaauuggaaaauguccaaaauauguaaaaagcacaaaauugagacuggccacuggauugaggaaugucccgucuauucaaucuagaggccuauuuggggccauugccgguuucauugaagggggguggacagggaugguagauggaugguacgguuaucaccaucaaaaugagcaggggucaggauaugcagccgaccugaagagcacacagaaugccauugacaagauuacuaacaaaguaaauucuguuauugaaaagaugaauacacaguucacagcaguggguaaagaguucaaccaccuggaaaaaagaauagagaauuuaaauaaaaaaguugaugaugguuuccuggacauuuggacuuacaaugccgaacuguugguucuauuggaaaaugaaagaacuuuggacuaccacgauucaaaugugaagaacuuauaugaaaagguaagaagccaguuaaaaaacaaugccaaggaaauuggaaacggcugcuuugaauuuuaccacaaaugcgauaacacgugcauggaaagugucaaaaaugggacuuaugacuacccaaaauacucagaggaagcaaaauuaaacagagaagaaauagaugggguaaagcuggaaucaacaaggauuuaccagauuuuggcgaucuauucaacugucgccaguucauugguacugguagucucccugggggcaaucaguuucuggaugugcucuaaugggucucuacaguguagaauauguauuuaa

SEQ ID NO: 38332 - RNA, 1701 nt, Artificial Sequence
  derived and/or modified CDS sequence (wt) from hemagglutinin__InfluenzaA__ADU76789
augaaggcaauacuaguaguucugcuauauacauuugcaaccgcaaaugcagacacauuauguauagguuaucaugcgaacaauucaacagacacuguagacacaguacuagaaaagaauguaacaguaacacacucuguuaaccuucuagaagacaagcauaacgggaaacuaugcaaacuaagagggguagccccauugcauuuggguaaauguaacauugcuggcuggauccugggaaauccagagugugaaucacucuccacagcaagcucaugguccuacauuguggaaacaucuaguucagacaauggaacguguuacccaggagauuucaucgauuaugaggagcuaagagagcaauugagcucagugucaucauuugaaagguuugagauauuccccaagacaaguucauggcccaaucaugacucgaacaaagguguaacggcagcauguccucaugcuggagcaaaaagcuucuacaaaaauuuaauauggcuaguuaaaaaaggaaauucauacccaaagcucagcaaauccuacauuaaugauaaagggaaagaaguccucgugcuauggggcauucaccauccaucuacuagugcugaccaacaaagucucuaucagaaugcagaugcauauguuuuuguggggacaucaagauacagcaagaaguucaagccggaaauagcaauaagacccaaagugagggaacaagaagggagaaugaacuauuacuggacacuaguagagccgggagacaaaauaacauucgaagcaacuggaaaucuagugguaccgagauaugcauucgcaauggaaagaaaugcuggaucugguauuaucauuucagauacaccaguccacgauugcaauacaacuugucagacacccaagggugcuauaaacaccagccucccauuucagaauauacauccgaucacaauuggaaaauguccaaaauauguaaaaagcacaaaauugagacuggccacuggauugaggaaugucccgucuauucaaucuagaggccuauuuggggccauugccgguuucauugaagggggguggacagggaugguagauggaugguacgguuaucaccaucaaaaugagcaggggucaggauaugcagccgaccugaagagcacacagaaugccauugacaagauuacuaacaaaguaaauucuguuauugaaaagaugaauacacaguucacagcaguggguaaagaguucaaccaccuggaaaaaagaauagagaauuuaaauaaaaaaguugaugaugguuuccuggacauuuggacuuacaaugccgaacuguugguucuauuggaaaaugaaagaacuuuggacuaccacgauucaaaugugaagaacuuauaugaaaagguaagaagccaguuaaaaaacaaugccaaggaaauuggaaacggcugcuuugaauuuuaccacaaaugcgauaacacgugcauggaaagugucaaaaaugggacuuaugacuacccaaaauacucagaggaagcaaaauuaaacagagaagaaauagaugggguaaagcuggaaucaacaaggauuuaccagauuuuggcgaucuauucaacugucgccaguucauugguacugguagucucccugggggcaaucaguuucuggaugugcucuaaugggucucuacaguguagaauauguauuuaa

SEQ ID NO: 38333 - RNA, 1701 nt, Artificial Sequence
  derived and/or modified CDS sequence (wt) from hemagglutinin__InfluenzaA__ADU76790
augaaggcaauacuaguaguucugcuauauacauuugcaaccgcaaaugcagacacauuauguauagguuaucaugcgaacaauucaacagacacuguagacacaguacuagaaaagaauguaacaguaacacacucuguuaaccuucuagaagacaagcauaacgggaaacuaugcaaacuaagagggguagccccauugcauuuggguaaauguaacauugcuggcuggauccugggaaauccagagugugaaucacucuccacagcaaguucaugguccuacauuguggaaacaucuaguucagacaauggaacguguuacccaggagauuucaucgauuaugaggagcuaagagagcaauugagcucagugucaucauuugaaagguuugagauauuccccaagacaaguucauggcccaaucaugacucgaacaaagguguaacggcagcauguccucaugcuggagcaaaaagcuucuacaaaaauuuaauauggcuaguuaaaaaaggaaauucauacccaaagcucagcaaauccuacauuaaugauaaagggaaagaaguccucgugcuauggggcauucaccauccaucuacuagugcugaccaacaaagucucuaucagaaugcagaugcauauguuuuuguggggacaucaagauacagcaagaaguucaagccggaaauagcaauaagacccaaagugagggaucaagaagggagaaugaacuauuacuggacacuaguagagccgggagacaaaauaacauucgaagcaacuggaaaucuagugguaccgagauaugcauucgcaauggaaagaaaugcuggaucugguauuaucauuucagauacaccaguccacgauugcaauacaacuugucagacacccaagggugcuauaaacaccagccucccauuucagaauauacauccgaucacaauuggaaaauguccaaaauauguaaaaagcacaaaauugagacuggccacaggauugaggaaugucccgucuauucaaucuagaggccuauuuggggccauugccgguuucauugaagggggguggacagggaugguagauggaugguacgguuaucaccaucaaaaugagcaggggucaggauaugcagccgaccugaagagcacacagaaugccauugacgagauuacuaacaaaguaaauucuguuauugaaaagaugaauacacaguucacagcaguagguaaagaguucaaccaccuggaaaaaagaauagagaauuuaaauaaaaaaguugaugaugguuuccuggacauuuggacuuacaaugccgaacuguugguucuauuggaaaaugaaagaacuuuggacuaccacgauucaaaugugaagaacuuauaugaaaagguaagaagccaguuaaaaaacaaugccaaggaaauuggaaacggcugcuuugaauuuuaccacaaaugcgauaacacgugcauggaaagugucaaaaaugggacuuaugacuacccaaaauacucagaggaagcaaaauuaaacagagaagaaauagaugggguaaagcuggaaucaacaaggauuuaccagauuuuggcgaucuauucaacugucgccaguucauugguacugguagucucccugggggcaaucaguuucuggaugugcucuaaugggucucuacaguguagaauauguauuuaa

SEQ ID NO: 38334 - RNA, 1701 nt, Artificial Sequence; identical to SEQ ID NO: 38308
  derived and/or modified CDS sequence (wt) from hemagglutinin__InfluenzaA__ADU76791

SEQ ID NO: 38335 - RNA, 1701 nt, Artificial Sequence
  derived and/or modified CDS sequence (wt) from hemagglutinin__InfluenzaA__ADU76792
augaaggcaauacuaguaguucugcuauauacauuugcaaccgcaaaugcagacacauuauguauagguuaucaugcgaacaauucaacagacacuguagacacaguacuagaaaagaauguaacaguaacacacucuguuaaccuucuagaagacaagcauaacgggaaacuaugcaaacuaagagggguagccccauugcauuuggguaaauguaacauugcuggcuggauccugggaaauccagagugugaaucacucuccacagcaagcucaugguccuacauuguggaaacaucuaguucagacaauggaacguguuacccaggagauuucaucgauuaugaggagcuaagagagcaauugagcucagugucaucauuugaaagguuugagauauuccccaagacaaguucauggcccaaucaugacucgaacaaagguguaacggcagcauguccucaugcuggagcaaaaagcuucuacaaaaauuuaauauggcuaguuaaaaaaggaaauucauacccaaagcucagcaaauccuacauuaaugauaaagggaaagaaguccucgugcuauggggcauucaccauccaucuacuagugcugaccaacaaagucucuaucagaaugcagaugcauauguuuuuguggggacaucaagauacagcaagaaguucaagccggaaauagcaauaagacccaaagugagggaacaagaagggagaaugaacuacuacuggacacuaguagagccgggagacaaaauaacauucgaagcaacuggaaaucuagugguaccgagauaugcauucgcaauggaaagaaaugcuggaucugguauuaucauuucagauacaccaguccacgauugcaauacaacuugucagacacccaagggugcuauaaacaccagccucccauuucagaauauacauccgaucacaauuggaaaauguccaaaauauguaaaaagcacaaaauugagacuggccacuggauugaggaaugucccgucuauucaaucuagaggccuauuuggggccauugccgguuucauugaagggggguggacagggaugguagauggaugguacgguuaucaccaucaaaaugagcaggggucaggauaugcagccgaccugaagagcacacagaaugccauugacaagauuacuaacaaaguaaauucuguuauugaaaagaugaauacacaguucacagcaguggguaaagaguucaaccaccuggaaaaaagaauagagaauuuaaauaaaaaaguugaugaugguuuccuggacauuuggacuuacaaugccgaacuguugguucuauuggaaaaugaaagaacuuuggacuaccacgauucaaaugugaagaacuuauaugaaaagguaagaagccaguuaaaaaacaaugccaaggaaauuggaaacggcugcuuugaauuuuaccacaaaugcgauaacacgugcauggaaagugucaaaaaugggacuuaugacuacccaaaauacucagaggaagcaaaauuaaacagagaagaaauagaugggguaaagcuggaaucaacaaggauuuaccagauuuuggcgaucuauucaacugucgccaguucauugguacugguagucucccugggggcaaucaguuucuggaugugcucuaaugggucucuacaguguagaauauguauuuaa

SEQ ID NO: 38336 - RNA, 1701 nt, Artificial Sequence
  derived and/or modified CDS sequence (wt) from hemagglutinin__InfluenzaA__ADU76793
augaaggcaauacuaguaguucugcuauauacauuugcaaccgcaaaugcagacacauuauguauagguuaucaugcgaacaauucaacagacacuguagacacaguacuagaaaagaauguaacaguaacacacucuguuaaccuucuagaagacaagcauaacgggaaacuaugcaaacuaagagggguagccccauugcauuuggguaaauguaacauugcuggcuggauccugggaaauccagagugugaaucacucuccacagcaagcucaugguccuacauuguggaaacaucuaguucagacaauggaacguguuacccaggagauuucaucgauuaugaggagcuaagagagcaauugagcucagugucaucauuugaaaaguuugagauauuccccaagacaaguucauggcccaaucaugacucgaacaaagguguaacagcagcauguccucaugcuggaacaaaaagcuucuacaaaaauuuaauauggcuaguuaaaaaaggaaauucauacccaaagcucagcaaauccuacauuaaugauaaagggaaagaaguccucgugcuauggggcauucaccauccaucuacuagugcugaccaacaaagucucuaucagaaugcagaugcauauguuuuuguggggacaucaagauacagcaagaaguucaagccggaaauagcaauaagacccaaagugagggaucaagaagggagaaugaacuauuacuggacacuaguagagccgggagacaaaauaacauucgaagcaacuggaaaucuagugguaccgagauaugcauucgcaauggaaagaaaugcuggaucugguauuaucauuucagauacaccaguccacgauugcaauacaacuugucagacacccaagggugcuauaaacaccagccucccauuucagaauauacauccgaucacaauuggaaaauguccaaaauauguaaaaagcacaaaauugagacuggccacaggauugaggaaugucccgucuauucaaucuagaggccuauuuggggccauugccgguuucauugaagggggguggacagggaugguagauggaugguacgguuaucaccaucaaaaugagcaggggucaggauaugcagccgaccugaagagcacacagaaugccauugacaagauuacuaacaaaguaaauucuguuauugaaaagaugaauacacaguucacagcaguagguaaagaguucaaccaccuggaaaaaagaauagagaauuuaaauaaaaaaguugaugaugguuuccuggacauuuggacuuacaaugccgaacuguugguucuauuggaaaaugaaagaacuuuggacuaccaugauucaaaugugaagaacuuauaugaaaagguaagaagccaguuaaaaaacaaugccaaggaaauuggaaacggcugcuuugaauuuuaccacaaaugcgauaacacgugcauggaaagugucaaaaaugggacuuaugacuacccaaaauacucagaggaagcaaaauuaaacagagaagaaauagaugggguaaagcuggaaucaacaaggauuuaccagauuuuggcgaucuauucaacugucgccaguucauugguacugguagucucccugggggcaaucaguuucuggaugugcucuaaugggucucuacaguguagaauauguauuuaa

SEQ ID NO: 38337 - RNA, 1701 nt, Artificial Sequence
  derived and/or modified CDS sequence (wt) from hemagglutinin__InfluenzaA__ADU85911
augaaggcaauaauaguagucuugcuauauacauuugcaacugcagaugcugacacauuauguauaggcuaucaugcaaauaauucaacugacacuguugacacaguacuagaaaagaauguaacaguaacacacucuguuaaccuucuagaaaacaagcauaacgggaaacuauguaaacuaggagggauagccccauugcauuuagguaaaugugacauugcuggauggcucuugggaaacccagagugugaaucacuauucacagcaagcucaugguccuacauaguggaaacgccuaauucagacaaugggacauguuacccaggagauuucaucaauuaugaggaacuaagagagcauuugagcucugugucgucauuugaaagguuugaaauauuccccaaggcaaauucauggcccaaucaugauacgaauaagggggugacggcagcauguccuuaugcuggagcaaacagcuuuuacagaaauuuaauauggcuaguaaaaaaaggaaauucauacccaaagcucagcaaauccuacauuaacaauaagaagaaggaaguccucgugauauggggcauccaccauccaccuaccaguacugaccaacaaacucucuaccagaaugcagaugccuauguuuuuguggggucaucaaaauacagcaaaagauucaagccagaaauagcagcaagacccaaggugagggaucaagcaggaagaauggacuauuacuggacacuaauagaaccuggagacacaauaacauucgaagcaacuggaaaucuagugguaccaagauaugccuucgcaaugaaaagaggcucuggaucugguauuaucguuucagaugcaccaguccacgauuguaauacgacuugucaaacacccaaaggugcuauaaacaccagccuuccauuucagaauauacauccagucacaauuggagaauguccaaaauaugucaaaagcacaaaguugaggauggcuacaggauuaagaaauaucccgucuauucaaucaagaggccuauuuggggccauugcuggcuuccuugaagggggguggacaggaaugauagauggaugguacgguuaccaccaucaaaaugagcagggaucaggauaugcagccgaccaaaagagcacacagaaugccauugacgggaucacuaacaagguaaauucuaucauugaaaagaugaacacacaauucacagcaguggguaaagaauucagccaauuggaaaaaagaauagagaguuuaaacaauaagguugaugauggguucuuagauauuuggacuuacaaugccgaacugcugguccuauuggaaaaugaaagaacucuagauuaucacgauucaaaugugaagaaccuauaugaaaaaguaagaagccagcuaaaaaacaaugccaaagaaauuggaaauggcugcuuugaauuuuaccacaaaugcgauaacacgugcauggagagugucaaaaaugggacuuaugauuacccaaaauacucagaagaagcaaagcuaaacagagaggagauagaugggguaaagcuggaaucagcaaggauuuaccagauuuuggcgaucuauucaacugucgccagcucauuggugcuguuagucucucugggggcaaucaguuucuggaugugcuccaaugggucuuuacagugcagaauaugcaucuga

SEQ ID NO: 38338 - RNA, 1701 nt, Artificial Sequence
  derived and/or modified CDS sequence (wt) from hemagglutinin__InfluenzaA__ADV17283
augaaggcaauacuaguaguucugcuauauacauuugcaaccgcaaaugcagacacauuauguauagguuaucaugcgaacaauucaacagacacuguagacacaguacuagaaaagaauguaacaguaacacacucuguuaaccuucuagaagacaagcauaacgggaaacuaugcaaacuaagagggguagccccauugcauuuggguaaauguaacauugcuggcuggauccugggaaauccagagugugaaucacucuccacagcaagcucaugguccuacauuguggaaacaucuaguucagacaauggaacguguuacccaggagauuucaucgauuaugaggagcuaagagagcaauugagcucagugucaucauuugaaagguuugagauauuccccaagacaaguucauggcccaaucaugacucgaacaaagguguaacggcagcauguccucaugcuggagcaaaaagcuucuacaaaaauuuaauauggcuaguuaaaaaaggaaauucauacccaaagcucagcaaauccuacauuaaugauaaagggaaagaaguccucgugcuauggggcauucaucauccaucuacuagugcugaccaacaaagucucuaucagaaugcagaugcauauguuuuuguggggacaucaagauacagcaagaaguucaagccggaaauagcaauaagacccaaagugagggaucaagaagggagaaugaacuauuacuggacacuaguagagccgggagacaaaauaacauucgaagcaacuggaaaucuagugguaccgagauaugcauucgcaauggaaagaaaugcuggaucugguauuaucauuucagauacaccaguccacgauugcaauacaacuugucagacacccaagggugcuauaaacaccagccucccauuucagaauauacauccgaucacaauuggaaaauguccaaaauauguaaaaagcacaaaauugagacuggccacaggauugaggaaugucccgucuauucaaucuagaggccuauuuggggccauugccgguuucauugaagggggguggacagggaugguagauggaugguacgguuaucaccaucaaaaugagcaggggucaggauaugcagccgaccugaagagcacacagaaugccauugacaagauuacuaacaaaguaaauucuguuauugaaaagaugaauacacaguucacagcaguagguaaagaguucaaccaccuggaaaaaagaauagagaauuugaauaaaaaaguugaugaugguuuccuggacauuuggacuuacaaugccgaacuguugguucuauuggaaaaugaaagaacuuuggacuaccacgauucaaaugugaagaacuuauaugaaaagguaagaagccaguuaaaaaacaaugccaaggaaauuggaaacggcugcuuugaauuuuaccacaaaugcgauaacacgugcauggaaagugucaaaaaugggacuuaugacuacccaaaauacucagaggaagcaaaauuaaacagagaagaaauagaugggguaaagcuggaaucaacaaggauuuaccagauuuuggcgaucuauucaacugucgccaguucauugguacugguagucucccugggggcaaucaguuucuggaugugcucuaaugggucucuacaguguagaauauguauuuaa

SEQ ID NO: 38339 - RNA, 1701 nt, Artificial Sequence; identical to SEQ ID NO: 35845
  derived and/or modified CDS sequence (wt) from hemagglutinin__InfluenzaA__ADV17293

SEQ ID NO: 38340 - RNA, 1701 nt, Artificial Sequence
  derived and/or modified CDS sequence (wt) from hemagglutinin__InfluenzaA__ADV17303
augaaggcaauacuaguaguucugcuauauacauuugcaaccgcaaaugcagacacauuauguauagguuaucaugcgaacaauucaacagacacuguagacacaguacuagaaaagaauguaacaguaacacacucuguuaaccuucuagaagacaagcauaacgggaaacuaugcaaacuaagagggguagccccauugcauuuggguaaauguaacauugcuggcuggauccugggaaauccagagugugaaucacucuccacagcaagcucaugguccuacauuguggaaacaucuaguucagacaauggaacguguuacccaggagauuucaucgauuaugaggagcuaagagagcaauugagcucagugucaucauuugaaagguuugagauauuccccaagacaaguucauggcccaaucaugacucgaacaaagguguaacggcagcauguccucaugcuggagcaaaaagcuucuacaaaaauuuaauauggcuaguuaaaaaaggaaauucauacccaaagcucagcaaauccuacauuaaugauaaagggaaagaaguccucgugcuauggggcauucaccauccaucuacuagugcugaccaacaaagucucuaucagaaugcagaugcauauguuuuuguggggacaucaagauacagcaagaaguucaagccggaaauagcaauaagacccaaagugagggaucaagaagggagaaugaacuauuacuggacacuaguagagccgggagacaaaauaacauucgaagcaacuggaaauuuagugguaccgagauaugcauucgcaauggaaagaaaugcuggaucugguauuaucauuucagauacaccaguccacgauugcaauacaacuugucagacacccaagggugcuauaaacaccagccucccauuucagaauauacauccgaucacaauuggaaaauguccaaaauauguaaaaagcacaaaauugagacuggccaaaggauugaggaaugucccgucuauucaaucuagaggccuauuuggggccauugccgguuucauugaagggggguggacagggaugguagauggaugguacgguuaucaccaucaaaaugagcaggggucaggauaugcagccgaccugaagagcacacagaaugccauugacgagauuacuaacaaaguaaauucuguuauugaaaagaugaauacacaguucacagcaguagguaaagaguucaaccaccuggaaaaaagaauagagaauuuaaauaaaaagguugaugaugguuuccuggacauuuggacuuacaaugccgaacuguugguucuauuggaaaaugaaagaacuuuggacuaccacgauucaaaugugaagaacuuauaugaaaagguaagaagccaguuaaaaaacaaugccaaggaaauuggaaacggcugcuuugaauuuuaccacaaaugcgauaacacgugcauggaaagugucaaaaaugggacuuaugacuacccaaaauacucagaggaagcaaaauuaaacagagaagaaauagaugggguaaagcuggaaucaacaaggauuuaccagauuuuggcgaucuauucaacugucgccaguucauugguacugguagucucccugggggcaaucaguuucuggaugugcucuaaugggucucuacaguguagaauauguauuuaa

SEQ ID NO: 38341 - RNA, 1701 nt, Artificial Sequence; identical to SEQ ID NO: 38338
  derived and/or modified CDS sequence (wt) from hemagglutinin__InfluenzaA__ADV17313

SEQ ID NO: 38342 - RNA, 1701 nt, Artificial Sequence
  derived and/or modified CDS sequence (wt) from hemagglutinin__InfluenzaA__ADV17323
augaaggcaauacuaguaguucugcuauauacauuugcaaccacaaaugcagacacauuauguauagguuaucaugcgaacaauucaacagacacuguagacacaguacuagaaaagaauguaacaguaacacacucuguuaaccuucuagaagacaagcauaacgggaaacuaugcaaacuaagagggguagccccauugcauuuggguaaauguaacauugcuggcuggauccugggaaacccagagugugaaucacucuccacagcaagcucaugguccuacauuguggaaacaucuaguucagacaauggaacguguuacccaggagauuucaucgauuaugaggagcuaagagagcaauugagcucagugucaucauuugaaagguuugagauauuccccaagacaaauucauggcccaaucaugacucgaacaaagguguaacggcagcauguccucaugcuggagcaaaaagcuucuacaaaaauuuaauauggcuaguuaaaaaaggaaauucauacccaaagcucagcaaauccuacauuaaugauaaagggaaagaaguccucgugcuauggggcauucaccauccaucuacuagugcugaccaacaaggucucuaucagaaugcagaugcauauguuuuuguggggacaucaagauauagcaagaaguucaagccggaaauagcaauaagacccaaagugagggaucaagaagggagaaugaacuacuacuggacacuaguagagccgggagacaaaauaacauucgaagcaacuggaaaucuagugguaccgagauaugcauucgcaauggaaagaaaugcuggaucugguauuaucauuucagauacaccaguccacgauugcaauacaacuugucagacacccgagggugcuauaaacaccagccucccauuucagaauauacauccgaucacaauuggaaaauguccaaaauauguaaaaagcacaaaauugagacuggccacaggauugaggaaugucccgucuauucaaucuagaggccuauuuggggccauugccgguuucauugaagggggguggacagggaugguagauggaugguacgguuaucaccaucaaaaugagcaggggucaggauaugcagccgaccugaagagcacacagaaugccauugacaagauuacuaacaaaguaaauuauguuauugaaaagaugaauacacaguucacagcaguagguaaagaguucaaccaccuggaaaaaagaauagagaauuuaaauaaaaaaguugaugaugguuuccuggacauuuggacuuacaaugccgaacuguugguucuauuggaaaaugaaagaacuuuggacuaccacgauucaaaugugaagaacuuauaugaaaagguaagaagccaguuaaaaaacaaugccaaggaaauuggaaacggcugcuuugaauuuuaccacaaaugcgauaacacgugcauggaaagugucaaaaaugggacuuaugacuaccccaaauacucagaggaagcaaaauuaaacagagaagaaauagauggggugaagcuggaaucaacaaggauuuaccagauuuuggcgaucuauucaacugucgccaguucauugguacugguagucucccugggggcaaucaguuucuggaugugcucuaaugggucucuacaguguagaauauguauuuaa

SEQ ID NO: 38343 - RNA, 1701 nt, Artificial Sequence
  derived and/or modified CDS sequence (wt) from hemagglutinin__InfluenzaA__ADV17333
augaaggcaauacuaguaguucugcuauauacauuugcaaccgcaaaugcagacacauuauguauagguuaucaugcgaacaauucaacagacacuguagacacaguacuagaaaagaauguaacaguaacacacucuguuaaccuucuagaagacaagcauaacgggaaauuaugcaaacuaagagggguagccccauugcauuuggguaaauguaacauugcuggcuggauccugggaaauccagagugugaaucacucuccacagcaagcucaugguccuacauuguggaaacaucuaguucagacaauggaacguguuacccaggagauuucaucgauuaugaggagcuaagagaacaauugagcucagugucaucauuugaaagguuugagauauuccccaagacaaguucauggcccaaucaugacucgaacaaagguguaacggcagcauguccucaugcuggagcaaaaagcuucuacaaaaauuuaauauggcuaguuaaaaaaggaaauucauacccaaagcucagcaaauccuacauuaaugauaaagggaaagaaguccucgugcuauggggcauucaccauccaucuacuagugcugaccaacaaaaucucuaucagaaugcagaugcauauguuuuuguggggacaucaagauacagcaagaaguucaagccggaaauagcaauaagacccaaagugagggaucaagaagggagaaugaacuauuacuggacacuaguagagccgggagacaaaauaacauucgaagcaacuggaaaucuagugguacugagauaugcauucgcaauggaaagaaaugcuggaucugguauuaucauuucagauacaccaguccacgauugcaauacaacuugucagacacccaagggugcuauaaacaccagccucccauuucagaauauacauccgaucacaauuggaaaauguccaaaauauguaaaaagcacaaaauugagacuggccacaggauugaggaaugucccgucuauucaaucuagaggccuauuuggggccauugccgguuucauugaagggggguggacagggaugguagauggaugguacgguuaucaccaucaaaaugagcaggggucaggauaugcagccgaccugaagagcacacagaaugccauugacaagauuacuaacaaaguaaauucuguuauugaaaagaugaauacacaguucacagcaguagguaaagaguucaaccaccuggaaaaaagaauagagaauuuaaauaaaaaaguugaugaugguuuccuggacauuuggacuuacaaugccgaacuguugguucuauuggaaaaugaaagaacuuuggacuacuacgauucaaaugugaagaacuuauaugaaaagguaagaagccaguuaaaaaacaaugccaaggaaauuggaaacggcugcuuugaauuuuaccacaaaugcgauaacacgugcauggaaagugucaaaaaugggacuuaugacuacccaaaauacucagaggaagcaaaauuaaacagagaagaaauagaugggguaaagcuggaaucaacaaggauuuaccagauuuuggugaucuauucaacugucgccaguucauugguacugguagucucccugggggcaaucaguuucuggaugugcucuaaugggucucuacaguguagaauauguauuuaa

SEQ ID NO: 38344 - RNA, 1701 nt, Artificial Sequence; identical to SEQ ID NO: 34681
  derived and/or modified CDS sequence (wt) from hemagglutinin__InfluenzaA__ADV19019

SEQ ID NO: 38345 - RNA, 1701 nt, Artificial Sequence
  derived and/or modified CDS sequence (wt) from hemagglutinin__InfluenzaA__ADV41677
augaaggcaauacuaguaguucugcuauauacauuugcaaccgcaaaugcagacacauuauguauagguuaucaugcaaacaauucaacagacacuguagacacaguacuagaaaagaauguaacaguaacacacucuguuaaccuucuagaagacaagcauaacgggaaacuaugcaaacuaagagggguagccccauugcauuuggguaaauguaacauugcuggcuggauccugggaaauccagagugugaaucacucuccacagcaagcucaugguccuacauuguggaaacaucuaguucagacaauggaacguguuacccaggagauuucaucgauuaugaggagcuaagagagcaauugagcucagugucaucauuugaaagguuugagauauuccccaagacaaguucauggcccaaucaugacucgaacaaagguguaacggcagcauguccucaugcuggagcaaaaagcuucuacaaaaauuuaauauggcuaguuaaaaaaggaaauucauacccaaagcucagcaaaucauacauuaaugauaaagggaaagaaguccucgugcuauggggcauucaccauccaucuacuagugcugaccaacaaagucucuaucagaaugcagaugcauauguuuuuguggggacaucaagauacagcaagaaguucaagccggaaauagcaauaagacccaaagugagggaucgagaagggagaaugaacuauuacuggacacuaguagagccgggagacaaaauaacauucgaagcaacuggaaaucuagugguaccgagauaugcauucgcaauggaaagaaaugcuggaucugguauuaucauuucagauacaccaguccacgauugcaauacaacuugucagacacccaagggugcuauaaacaccagccucccauuucagaauauacauccgaucacaauuggaaaauguccaaaauauguaaaaagcacaaaauugagacuggccacaggauugaggaaugucccgucuauucaaucuagaggccuauuuggggccauugccgguuucauugaagggggguggacagggaugguagauggaugguacgguuaucaccaucaaaaugagcaggggucaggauaugcagccgaccugaagagcacacagaaugccauugacgagauuacuaacaaaguaaauucuguuauugaaaagaugaauacacaguucacagcaguagguaaagaguucaaccaucuggaaaaaagaauagagaauuuaaauaaaaaaguugaugaugguuuccuggacauuuggacuuacaaugccgaacuguugguucuauuggaaaaugaaagaacuuuggacuaccacgauucaaaugugaagaacuuauaugaaaagguaagaagccaguuaaaaaacaaugccaaggaaauuggaaacggcugcuuugaauuuuaccacaaaugcgauaacacgugcauggaaagugucaaaaaugggacuuaugacuacccaaaauacucagaggaagcaaaauuaaacagagaagaaauagaugggguaaagcuggaaucaacaaggauuuaccagauuuuggcgaucuauucaacugucgccaguucauugguacugguagucucccugggggcaaucaguuucuggaugugcucuaaugggucucuacaguguagaauauguauuuaa

SEQ ID NO: 38346 - RNA, 1701 nt, Artificial Sequence
  derived and/or modified CDS sequence (wt) from hemagglutinin__InfluenzaA__ADV58939
augaaggcaauacuaguaguucugcuauauacauuugcaaccgcaaaugcagacacauuauguauagguuaccaugcgaacaauucaacagacacuguagacacaguacuagaaaagaauguaacaguaacacacucuguuaaucuucuagaagacaagcauaacgggaaacuaugcaaacuaagagggguagccccauugcauuuggguaaauguaacauugcuggcuggauccugggaaauccagagugugaaucacucuccacagcaagcucaugguccuacauuguggaaacaucuaguucagacaauggaacguguuacccaggagauuucaucgauuaugaggagcuaagagagcaauugagcucagugucaucauuugaaagguuugagauauuccccaagacaaguucauggcccaaucaugauucgaacaaagguguaacggcagcauguccucaugcuggagcaaaaggcuucuacaaaaauuuaauauggcuaguuaaaaaaggaaauucauacccaaagcucagcaaauccuacauuaaugauaaagggaaagaaguccucgugcuauggggcauucaccauccaucuacuacugcugaccaacaaagucucuaucagaaugcagauacauauguuuuuguggggacaucaagauacagcaagaaguucaagccggaaauagcaauaagacccaaagugagggaucaagaagggagaaugaacuauuacuggacacuaguagagccgggagacaaaauaacauucgaagcaacuggaaaucuagugguaccgagauaugcauucgcaauggaaagaaaugcuggaucugguauuaucauuucagauacaccaguccacgauugcaauacaacuugucagacacccaagggugcuauaaacaccagccucccauuucagaauauacauccgaucacaauuggaaaauguccaaaauauguaaaaagcacaaaauugagacuggccacaggauugaggaaugucccgucuauucaaucuagaggccuauuuggggccauugccggcuucauugaagggggguggacagggaugguagauggaugguacgguuaucaccaucaaaaugagcaggggucaggauaugcagccgaccugaagagcacacagaaugccauugacaagauuacuaacaaaguaaauucuguuauugaaaagaugaauacacaguucacagcaguagguaaagaguucaaccaccuggaaaaaagaauagagaauuuaaauaaaaaaguugaugaugguuuccuggacauuuggacuuacaaugccgaacuguugguucuauuggaaaaugaaagaacuuuggacuaccacgauucaaaugugaagaacuuauaugaaaagguaagaaaccaguuaaaaaacaaugccaaggaaauuggaaauggcugcuuugaauuuuaccacaaaugcgauaacacgugcauggaaagugucaaaaaugagacuuaugacuacccaaaauacucagaggaagcaaaauuaaacagagaagaaauagaugggguaaagcuggaaucaacaaggauuuaccagauuuuggcgaucuauucaacugucgccaguucauugguacugguagucucccugggggcaaucaguuuuuggaugugcucuaaugggucucuacaguguagaauauguauuuaa

SEQ ID NO: 38347 - RNA, 1698 nt, Artificial Sequence
  derived and/or modified CDS sequence (wt) from hemagglutinin__InfluenzaA__ADV69074
augaaaguaaaacuacugguucuguuauguacauuuacagcuacauaugcagacacaauauguauaggcuaucaugccaacaacucaaccgacacuguugacacaguacuugagaagaacgugacaguaacacacucugucaaccuacuugaggacagucacaauggaaaauuaugucuacuaaaaggaauagcuccacuacaauuggguaauugcaacguugccggauggaucuuaggaaacccagagugcgaauugcugauuuccaaggaaucauggucuuacauuguagaaacaccagauccugagaauggaacauguuacccaggguauuucaccgauuaugaagaacugagggagcaauugaguucaguaucuucauuuaagagguuugaaauauuccccaaagagagcucauggcccaaccacaccguaaccggaguaucagcaucaugcucccauaacgggaaaagcagcuuuuacagaaauuugcuauggcugacggugaaaaacgguuuguacccaaaccugagcaaauccuauacaaacgacaaagagaaagaaguccuuguacuaugggguguucaucacccaccuagcauaggggaccaaaggacccucuaucacacagaaaaugcuuaugucucuguagugucuucacauuauaguagaagauucaccccagagauagucaaaagacccaaggugagagaucaggaaggaagaaucaacuacuacuggacucugcuggaacccggggauacaauaauaugugaggcaaauggaaaucuaauagcgccaagguaugcuuucgcacugaguagaggcuuaggaucaggaaucaucaccucaaaugcaccaaugggugaauguaaugcaaagugucaaacaccucagggagcuauaaacagcagucucccuuuccagaauguacacccagucacaauaggagaguguccaaaguaugucaagagugcaaaacugagaaugguuacaggacuaaggaacaccccauccauucaauccagagguuuguuuggagccauugccgguuucauugaaggaggguggacuggaaugguagaugguugguaugguuaucaucaucagaaugagcaaggaucuggauaugcugcagaucaaaaaagcacacaaaaugccauuaaugggaucacaaacaaggugaauucuguaauugagaaaaugaacacucaauucacagcugugggcaaagaauucaacaaauuggaaagaaggauggaaaacuuaaauaaaaagguugaugauggguuucuagacauuuggacauauaaugcagaauuguuaguucuacuggaaaaugaaaggacuuuggauuuccaugacuccaacgugaagaaucuguaugagaaaguaaaaagccaguuaaagaauaaugccaaagaaauaggaaacggguguuuugaauucuaucauaaguguaacgaugaaugcauggagagugugaaaaauggaacuuaugacuauccaaaauauuccgaagagucaaagcuaaacagggagaaaauugauggagugaaauuggaaucaauggaagucuaucagauccuggcgaucuacucaacagucgccaguucucuagucuuuuuagucgcccugggggcaaucugcuucuggauguguuccaaugggucuuugcaguguaaaauaugcaucuaa

SEQ ID NO: 38348 - RNA, 1698 nt, Artificial Sequence
  derived and/or modified CDS sequence (wt) from hemagglutinin__InfluenzaA__ADV69075
augaaaguaaaacuacugguucuguuauguacauuuacagcuacauaugcagacacaauauguauaggcuaucaugccaacaacucaaccgacacuguugacacaguacuugagaagaacgugacaguaacacacucugucaaccuacuugaggacagucacaauggaaaauuaugucuacuaaaaggaauagcuccacuacaauuggguaauugcaacguugccggauggaucuuaggaaacccagagugcgaauugcugauuuccaaggaaucauggucuuacauuguagaaacaccagauccugagaauggaacauguuacccaggguaugucaccgauuaugaagaacugagggagcaauugaguucaguaucuucauuuaagagguuugaaauauuccccaaagagagcucauggcccaaccacaccguaaccggaguaucagcaucaugcucccauaacgggaaaagcagcuuuuacagaaauuugcuauggcugacggugaaaaacgguuuguacccaaaccugagcaaauccuauacaaacgacaaagagaaagaaguccuuguacuaugggguguucaucacccaccuagcauaggggaccaaaggacccucuaucacacagaaaaugcuuaugucucuguagugucuucacauuauaguagaagauucaccccagagauagucaaaagacccaaggugagagaucaggaaggaagaaucaacuacuacuggacucugcuggaacccggggauacaauaauaugugaggcaaauggaaaucuaauagcgccaagguaugcuuucgcacugaguagaggcuuuggaucaggaaucaucaccucaaaugcaccaaugggugaauguaaugcaaagugucaaacaccucagggagcuauaaacagcagucucccuuuccagaauguacacccagucacaauaggagaguguccaaaguaugucaagagugcaaaacugagaaugguuacaggacuaaggaacaccccauccauucaauccagagguuuguuuggagccauugccgguuucauugaaggaggguggacuggaaugguagaugguugguaugguuaucaucaucccaaugagcaaggaucuggauaugcugcagaucaaaaaagcacacaaaaugccauuaaugggaucacaaacaaggugaauucuguaauugagaaaaugaacacucaauucacagcugugggcaaagaauucaacaaauuggaaagaaggauggaaaacuuaaauaaaaagguugaugauggguuucuagacauuuggacauauaaugcagaauuguuaguucuacuggaaaaugaaaggacuuuggauuuccaugacuccaacgugaagaaucuguaugagaaaguaaaaagccaguuaaagaauaaggucaaagaaauaggaaacggguguuuugaauucuaucauaaguguaacgaugaaugcauggagagugugaaaaauggaacuuaugacuauccaaaauauuccgaagagucaaagcuaaacagggagaaaauugauggagugaaauuggaaucaauggaagucuaucagauccuggcgaucuacucaacagucgccaguucucuagucuuuuuagucgcccugggggcaaucugcuucuggauguguuccaaugggucuuugcaguguaaaauaugcaucuaa

SEQ ID NO: 38349 - RNA, 1698 nt, Artificial Sequence
  derived and/or modified CDS sequence (wt) from hemagglutinin__InfluenzaA__ADV69077
augaaaguaaaacuacugguucuguuauguacauuuacagcuacauaugcagacacaauauguauaggcuaucaugccaacaacucaaccgacacuguugacacaguacuugagaagaacgugacaguaacacacucugucaaccuacuugaggacagucacaauggaaaauuaugucuacuaaaaggaauagcuccacuacaauuggguaauugcaacguugccggauggaucuuaggaaacccagagugcgaauugcugauuuccaaggaaucauggucuuacauuguagaaacaccagauccugagaauggaacauguuacccaggguauuucaccgauuaugaagaacugagggagcaauugaguucaguaucuucauuuaagagguuugaaauauuccccaaagagagcucauggcccaaccacaccguaaccggaguaucagcaucaugcucccauaacgggaaaagcagcuuuuacagaaauuugcuauggcugacggugaaaaacgguuuguacccaaaccugagcaaauccuauacaaacgacaaagagaaagaaguccuuguacuaugggguguucaucacccaccuagcauaggggaccaaaggacccucuaucacacagaaaaugcuuaugucucuguagugucuucacauuauaguagaagauucaccccagagauagucaaaagacccaaggugagagaucaggaaggaagaaucaacuacuacuggacucugcuggaacccggggauacaauaauauuugaggcaaauggaaaucuaauagcgccaagguaugcuuucgcacugaguagaggcuuuggaucaggaaucaucaccucaaaugcaccaaugggugaauguaaugcaaagugucaaacaccucagggagcuauaaacagcagucucccuuuccagaauguacacccagucacaauaggagaguguccaaaguaugucaagagugcaaaacugagaaugguuacaggacuaaggaacaccccauccauucaauccagagguuuguuuggagccauugccgguuucauugaaggaggguggacuggaaugguagaugguugguaugguuaucaucaucagaaugagcaaggaucuggauaugcugcagaucaaaaaagcacacaaaaugccauuaaugggaucacaaacaaggugaauucuguaauugagaaaaugaacacucaauucacagcugugggcaaagaauucaacaaauuggaaagaaggauggaaaacuuaaauaaaaagguugaugauggguuucuagacauuuggacauauaaugcagaauuguuaguucuacuggaaaaugaaaggacuuuggauuuccaugacuccaacgugaagaaucuguaugagaaaguaaaaagccaguuaaagaauaaugccaaagaaauaggaaacggguguuuugaauucuaucauaaguguaacgaugaaugcauggagagugugaaaaauggaacuuaugacuauccaaaauauuccgaagagucaaagcuaaacagggagaaaauugauggagugaaauuggaaucaauggaagucuaucagauccuggcgaucuacucaacagucgccaguucucuagucuuuuuagucgcccugggggcaaucugcuucuggauguguuccaaugggucuuugcaguguaaaauaugcaucuaa

SEQ ID NO: 38350 - RNA, 1698 nt, Artificial Sequence
  derived and/or modified CDS sequence (wt) from hemagglutinin__InfluenzaA__ADV69078
augaaaguaaaacuacugauccuguuaugcacauuuacagcuacauaugcggacacaauauguauaggauaccaugccaacaacucaaccgacacuguugacacaguacuugaaaagaaugugacaguaacacacucugucaaccuacuugaggacagucacaaugggaagcugugccuacuaaagggaauagccccccuacaauuggguaauugcagcguugccggauggauauuaggaaacccagaaugcgaaucacugauuuccaagaaaucaugguccuacauuguagaaacaccaaauccugagaauggagcauguuacccaggggaguucgccgacuaugaggagcuaagggagcaauugaguucaguaucuucauuugagagauucgaaauauuccccaaagaaagcucauggcccaaccacacugcagccggagugucagcaucaugcucccauaauggggaaaaaaguuuuuacagaaaucugauauggcugacaaagaaaaaugguuuguacccaaaccugagcaaguccuaugaaaacgacaaagagaaagaaguccuuauacuaugggguguucaucauccgccuaacauagagaaccaaaggacccucuaucgcacagaaaaugcuuaugucucuguagugucuucacauuauagcggaagguucaccccagaaauaaccaaaaggcccaaaguaagaaaucaggaagggagaaucaacuacuacuggacucugcuggaacccggggauacaauaauauuugaggcaaauggaaaucuaauagcgccaugguaugcuuucacacugaguagaggccuuggaucaggaaucaucaccucuaaugcaccaauggacgaaugugaugcaaagugucaaacaccucagggagcuauaaacagcagucuuccuuuccagaauguacacccagucacaauaggagaauguccaaaguaugucaggagcucuaaauuaaggaugguuacaggacuaaggaacaucccauccauucaauccagagguuuguuuggggccauugccgguuucauugaagggggguggacuggaaugguagaugggugguaugguuaucaucaucagaaugagcagggaucuggcuaugcugcagaucaagaaagcacacaaaaugccauuaacgggauuacaaacaaggugaauucuguaauugagaaaaugaauacucaauucacagcugugggcaaggaauucaacaaauuggaaagaaggauggaaaacuuaaauaaaaagguugaugauggguuucuagacauuuggacauacaaugcagaguuguugguucuacuggaaaaugaaagaacuuuggacuuccacgacuccaaugugaagagucuguacgagaaaguaaaaagccaauuaaagaauaaugcuaaagaaauagggaaugggugcuuugaauucuaucacaaguguaacaacgaaugcauggagagugugaaaaauggaacuuaugacuauccaaaauauuccgaagaaucaaaguuaaacagggaaaaaauugauggaguuaaauuggacucaaugggggucuaucggauucuggcgaucuacucaacugucgccaguucccuaguucuuuuggucucccugggggcaaucagcuucuggauguguuccaaugggucuuugcaauguagaauaugcaucuaa

SEQ ID NO: 38351 - RNA, 1698 nt, Artificial Sequence
  derived and/or modified CDS sequence (wt) from hemagglutinin__InfluenzaA__ADV69079
augaaaguaaaacuacugauccuguuauguacauuuacagcuacauaugcggacacaauauguauaggcuaccaugccaacaacucaaccgacacaguugacacaguacuugagaagaaugugacaguuacacacucugucaaccuacuugaggacagucacaauggaaagcugugccuacuaaagggaauagccccccuacaauuggguaauugcagcguugccggauggaucuuaggaaacccagaaugcgaguuacugauuuccaagaaaucaugguccuacauuguaaaaacaccaaauccugaaaauggaucauguuacccaggguauuucgccgacuaugaggagcuaagggagcaauugaguucaguaucuucauuugagagauucgaaauguuccccaaagaaagcucauggcccaaccacaacguaaacggaguaucagcaucaugcucccauaaugggaaaagaaguuuuuacagaaaucugcuauggcugacgggaaaaaaugguuuguauccaaaccugaccaaguccuaugaaaacaacaaugagaaagagguccuuauacuaugggguguucaucacccgucuaauauaggggaccaaaggacccucuaucacacagaaaaugcuuaugucucuguaaugucuucacauuauagcagaagauucaccccagaaauaaacaaaaggcccaaaguaagagaucaggaaggaagaaucaacuauuacuggacucugcuagaacccggggauacaauaauauuugaggcaaaugggaaucuaauagcgccaugguaugcuuucgcacugaguagaggcuuuggaucaggaaucaucaccucaagugcaccaauggaugaaugugaugcgaagugucaaacaccucggggagcuauaaacagcagucuuccuuuccagaauguacacccagucacaauaggagaauguccaaaguaugucaggagugcaaaauuaaggaugguuacaggacuuaggaacaucccauccauucaauccagagguuuguuuggggccauugccgguuucauugaagggggguggacuggaaugguagaugggugguaugguuaccaucaucagaaugagcaaggaucuggcuaugcugcagaucaagaaagcacacaaaaugccauuaacgggauuacaaacaaggugaauucuguaauugagaaaaugaacacucaauucacagcugugggcaaagaauucaacaaauuggaaagaaggauggaaaacuuaaauaaaaagguugaugauggguuucuagacauuuggacauauaaugcagaguuguugguucuacuggaaaaugaaagaacuuuggauuuccacgacuccaaugugaagagucuguacgagaaaguaaaaagccaauuaaagaauaaugccaaagaaauaggaaaugggugcuuugaauucuaucacaaguguaacaacgaaugcauggagagugugaaaaauggaacuuaugacuauccaaaauauuccgaagaaucaaaguuaaacagggaaaaaauugauggagugaaauuggacucaaugggggucuaucagauucuggcgaucuacucaacugucgccaguucccugguucuuuuggucucccugggggcaaucagcuucuggauguguuccaaugggucuuugcaauguagaauaugcaucuaa

SEQ ID NO: 38352 - RNA, 1698 nt, Artificial Sequence
  derived and/or modified CDS sequence (wt) from hemagglutinin__InfluenzaA__ADV69080
augaaaguaaaacuacugauccuguuauguacauuuacagcuacauaugcggacacaauauguauaggauaccaugccaacaacucaaccgacacuguugacacaguacuugaaaagaaugugacagugacacacucugucaaccuacuugaggacagucacaaugggaagcugugccuacuaaagggaauagccccccuacaauuggguaauugcagcguugccggauggauauuaggaaauccagaaugcgaaucacugauuuccaagaaaucaugguccuacauuguagaaacaccaaauccugagaauggagcauguuacccaggggaguucgccgacuaugaggagcuaagggagcaauugaguucaguaucuucauuugagagauucgaaauauuccccaaagaaagcucauggcccaaccacacugcagccggagugucagcaucaugcucccacaauggggaaagaaguuuuuacagaaaucugauauggcugacaaugaaaaaugguuuguacccaaaccugagaaaguccuaugaaaacgacaaagagaaagaaguccuuauacuaugggguguccaucauccgccuaacauagagaaccaaaggacccucuaucacacagaaaaugcuuaugucucuguagugucuucacauuauagcggaagauucaccccagaaauaaccaaaaggcccaaaguaagagaucaggaaggaagaaucaacuacuacuggacucuucuggaacccggggauacaauaauauuugaggcaaauggaaaucuaauagcgccaugguaugcuuucacacugaguagaggccuuggaucaggaaucaucaccucuaaugcaccaauggacgcaugugaugcaaagugucaaacaccucagggagcuauaaacagcagucuuccuuuccagaauguacacccagucacaauaggagaauguccaaaguaugucaggagugcaaaauuaaggaugguuacaggacuaaggaacaucccauccauucaauccagagguuuguuuggggccauugccgguuucauugaagggggguggacuggaaugguagaugggugguaugguuaucaucaucagaaugagcagggaucuggcuaugcugcagaucaagaaagcacacaaaaugccauuaacgggauuacaaacaaggugaauucuguaauugagaaaaugaacacucaauucacagcugugggcaaggaauucaacaaauuggaaagaaggauagaaaacuuaaauaaaaagguugaugauggguuuauagacauuuggacuuacaaugcagaguuguugguucuacuggaaaaugaaagaacuuuggacuuccacgacuccaaugugaagagucuguacgagaaaguaaaaagccaauuaaagaauaaugcuaaagaaauagggaaugggugcuuugaauucuaucacaaguguaacaacgaaugcauggagagugugaaaaauggaacuuaugacuauccaaaauauuccgaagaaucaaaguuaaacagggaaaaaauugauggaguuaaauuggacucaaugggggucuaucggauucuggcgaucuacucaacugucgccaguucccuaguucuuuuggucucccugggggcaaucagcuucuggauguguuccaaugggucuuugcaauguagaauaugcaucuag

SEQ ID NO: 38353 - RNA, 1698 nt, Artificial Sequence
  derived and/or modified CDS sequence (wt) from hemagglutinin__InfluenzaA__ADV69081
augaaaguaaaacuacugguucuguuauguacauuuacagcuacauaugcagacacaauauguauaggcuaucaugccaacaacucaaccgacacuguugacacaguacuugagaagaacgugacaguaacacacucugucaaccuacuugaggacagucacaauggaaaauuaugucuacuaaaaggaauagcuccacuacaauuggguaauugcaacguugccggauggaucuuaggaaacccagagugcgaauugcugauuuccaaggaaucauggucuuacauuguagaaacaccaaauccugagaauggaacauguuacccaggguauuucaccgauuaugaagaacugagggagcaauugaguucaguaucuucauuuaagagguuugaaauauuccccaaagagagcucauggcccaaccacaccguaaccggaguaucagcaucaugcucccauaacggggaaagcagcuuuuacagaaauuugcuauggcugacggugaaaaacgguuuguacccaaaacugagcaaauccuauacaaacgacaaagagaaagaaguccuuguacuaugggguguucaucacccgccuaacauaagggaccaaaggacccucuaucauacagaaaaugcuuaugucucuguagugucuucacauuauaguagaagauucaccccagaaauagucaaaagacccaaggugagagaucaggaaggaagaaucaacuacuacuggacucugcuggaacccggggauacaauaauauuugaggcaaauggaaaucuaauagcgccaagguaugcuuucgcacugaguagaggcuuuggaucaggaaucaucaccucaaaugcaccaaugggugaguguaaugcaaagugucaaacaccucagggagcuauaaucagcagucugccuuuccagaauguacacccagucacaauaggagaguguccaaaguaugucaagagugcaaaacugaggaugguuacaggacuaaggaacaccccauccauucaauccagagguuuguuuggggcuauugccgguuucauugaaggaggguggacuggaaugguagaugguugguaugguuaucaucaucagaaugagcaaggaucuggauaugcugcagaucaaaaaagcacacaaaaugccauuaaugggaucacaaacaaggugaauucuguaauugagaaaaugaacacucaauucacagcugugggcaaagaauucaacaaauuggaaagaaggauggaaaacuuaaauaaaaagguugaugauggguuucuagacauuuggacauauaaugcagaauuguuaguucuacuggaaaaugaaaggacuuuggauuuccaugacuccaacgugaagaaucuguaugagaaaguaaaaagccaauuaaagaauaaugccaaagaaauaggaaacggguguuuugaauucuaucauaaguguaacgaugaaugcauggagagugugaaaaauggaacuuaugacuauccaaaauauuccgaagagucaaagcuaaacagggagaaaauugauggagugaaauuggaaucaauggaagucuaucagauccuggcgaucuacucaacagucgccaguucucuagucuuuuuagucgcccugggggcaaucugcuucuggauguguuccaaugggucuuugcaguguaaaauaugcaucuaa

SEQ ID NO: 38354 - RNA, 1698 nt, Artificial Sequence
  derived and/or modified CDS sequence (wt) from hemagglutinin__InfluenzaA__ADV69083
augaaaguaaaacuaaugguucuguuauguacauuuacagcuacauaugcagacacaauauguguaggcuaccaugccaacaacucaacugacacuguugacacaguacuugagaagaaugugacagugacacacucugucaaccuacuugaggacagccacaauggaaaacuaugucuacuaaaaggaauagcuccacuacaauuggguaguugcagcguugccggauggaucuuaggaaacccagagugcgaauugcugauuuccaaggaaucaugguccuacauuguagaaacaccaaauccugagaauggaacauguuacccaggguauuucacagacuaugaagaacugagggagcaauugaguucaguaucuucauuuaagagguucgaaauauuccccaaagagagcucauggcccaaccacaacguaaccggaguaucaucaucaugcucccauaacgggaaaagcagcuucuacagaaauuugcuauggcugacggugaagaacggucuguacccaaaccugagcaaguccuauacaaacaaaaaggagaaagaaguccuuguacuaugggguguucaucacccaucuaacauaggggaccaaagggcccucuaucauacagaaaaugcuuaugucucuguagugucuucacauuauagcagaagauucaccccagaaauagccaaaagacccaaggugagaaaucaggaaggaagaaucaacuacuacuggacccugcuagaacccggggauacaauaauauuagaggcaaauggaaaucuaauagcaccaagguaugccuucgaacugaguaaggguuugggaucaggaaucaucacaucaaaugcaccaaugggugaauguaaugcaaagugucaaacaccucagggagcuauaaacagcagucuuccuuuccagaauguacacccaguaacaauaggagaguguccaaaguaugucaaaagugcaaaauuaaggaugguuacaggacuaaggaacaccccauccauucaauccagagguuuguuuggagccauugccgguuucauugaaggaggguggacuggaaugguagaugguugguaugguuaucaccaucagaaugagcaaggaucuggguaugcugcagaccaacaaagcacacaaaaugccauuaaugggauuacaaacaaggugaauucugugauugaaaaaaugaacacucaauucacagcugugggcaaagaauucaacaaacuggaaagaagaauggaaaacuuaaauaaaaagguugaugauggguuucuagacauuuggacauauaaugcagaauuguuaguucuacuggaaaaugaaaggacuuuggauuuccaugacuccaacgugaagaaucuguaugagaaaguaaaaagccaauuaaaaaauaaugccaaagaaauaggaaacggguguuuugaauucuaucauaaguguaacgaugaaugcauggagagugugaaaaauggaacuuaugacuauccaaaauauuccgaagaaucaaaguuaaacagggagaaaauugauggagugaaauuggaaucaaugggagucuauaauauccuggcgaucuacucaacagucgccaguucccuaguucuuuuagucucccugggggcaaucagcuucuggauguguuccaaugggucuuuacaguguagaauaugcaucuaa

SEQ ID NO: 38355 - RNA, 1698 nt, Artificial Sequence
  derived and/or modified CDS sequence (wt) from hemagglutinin__InfluenzaA__ADV69084
augaaaguaaaacuaaugguucuguuauguacauuuacagcuacauaugcagacacaauauguguaggauaccaugccaacaacucaacugacacuguugacacaguacuugagaagaaugugacagugacacacucugucaaccuacuugaggacagccacaauggaaaacuaugucuacuaaaaggaauagcuccacuacaauuggguaguugcagcguugccggauggaucuuaggaaacccagagugcgaauugcugauuuccaaggaaucaugguccuacauuguagaaacaccaaauccugagaauggaacauguuacccaggguauuucacagacuaugaagaacugagggaacaauugaguucaguaucuucauuuaagagguucgaaauauuccccaaagagagcucauggcccaaucacaacguaaccggagugucaucaucaugcucccauaacgggaaaagcagcuucuacagaaauuugcuauggcugacggugaagaacgguuuguacccaaaccugagcaaguccuauacaaacaaaaaggagaaagaaguucuuauacuaugggguguucaucacccaucuaacauaagggaccaaagggcccucuauuauacagaaaaugcuuaugucucuguagugucuucacauuauagcagaagauucaccccagaaauagccaaaagacccaaggugagaaaucaggaaggaagaaucaacuacuacuggacucugcuagaacccggggauacaauaauauuugaggcaaauggaaaucuaauagcaccaagguaugccuucgaauugaguaaggguuuuggaucagggaucaucacaucagacgcaccaaugggugaauguaaugcaaagugucaaacaccucagggagcuauaaacagcagucuuccuuuccagaauguacacccaguaacaauaggagaguguccaaaguaugucaggagugcaaaauuaaggaugguuacaggacuaaggaacaccccauccauucaauccagagguuuguuuggagccauugccgguuucauugaaggaggguggacuggaaugguagaugguugguaugguuaucaucaucagaaugagcaaggaucuggguaugcugcagaccaacaaagcacacaaaaugccauuaaugggauuacaaacaaggugaauucuguaauugaaaaaaugaacacucaauucacagcugugggcaaagaauucaacaaauuggaaagaagaauggaaaacuuaaauaaaaagauugaugauggguuucuagacauuuggacauauaaugcagaauuguuaguuuuacuggaaaaugaaaggacuuuggauuuccaugacuccaacgugaagaaucuguaugagaaaguaaaaagccaauuaaaaaauaaugccaaagaaauaggaaacggguguuuugaauucuaucauaaguguaacgaugaaugcauggagagugugaaaaauggaacuuaugacuauccaaaauauuccgaagaaucaaaguuaaacagggagaaaauugauggagugaaauuggaaucaaugggagucuauaauauccuggcgaucuacucaacagucgccaguucccuaguucuuuuagucucccugggggcaaucagcuucuggauguguuccaaugggucuuuacaguguagaauaugcaucuaa

SEQ ID NO: 38356 - RNA, 1698 nt, Artificial Sequence
  derived and/or modified CDS sequence (wt) from hemagglutinin__InfluenzaA__ADV69085
augaaaguaaaacuaaugguucuguuauguacauuuacagcuacauaugcagacacaauauguguaggcuaccaugccaacaacucaacugacacuguugacacaguacuugagaagaaugugacaguaacacacucugucaaccuacuugaggacagccacaauggaaaacuaugucuacuaaaaggaauagcuccacuacaauuggguaguugcagcguugccggauggaucuuaggaaacccagagugcgaauugcugauuuccaaggaaucaugguccuacauuguagaaacaccaaauccugagaauggaacauguuacccaggguauuucacagacuaugaagaacugagggagcaauugaguucaguaucuucauuuaagagguucgaaauauuccccaaagagagcucauggcccaaccacaccguaaccggagugucaucaucaugcucccauaacgggaaaagcagcuucuacagaaauuugcuauggcugacgaugaagaacgguuuguacccaaaccugagcaaguccuauacaaacaaaaaggagaaagaaguccuuguacuaugggguguucaucacccaucuaacauaggggaccaaagggcccucuaucauacagaaaaugcuuaugucucuguagugucuucacauuauagcagaagauucaccccagaaauagccaaaagacccaaggugagaaaucaggaaggaagaaucaacuacuacuggacucugcuagaacccggggauacaauaauauuugaggcaaauggaaaucuaauagcaccaagguaugccuucgaacugaguaaggguuuuggaucaggaaucaucacaucaaaugcaccaaugggugaauguaaugcaaagugucaaacaccucagggagcuauaaacagcagucuuccuuuccagaauguacacccaguaacaauaggagaguguccaaaguaugucaggaguucaaaauuaaggaugguuacaggacuaaggaacaccccauccauucaauccagagguuuguuuggagccauugccgguuucauugaaggaggguggacuggaaugguagaugguugguaugguuaucaucaucagaaugagcaaggaucuggguaugcugcagaccaacaaagcacacaaaaugccauuaaugggauuacaaacaaggugaauucuguaauugaaaaaaugaacacucaauucacagcugugggcaaagaauucaacaaauuggaaagaagaauggaaaacuuaaauaaaaagauugaugauggguuucuagacauuuggacauauaaugcagaauuguuaguucuacuggaaaaugaaaggacuuuggauuuccaugacuccaacgugaagaaucuguaugagaaaguaaaaagccaauuaaaaaauaaugccaaagaaauaggaaacggguguuuugaauucuaucauaaguguaacgaugaaugcauggagagugugaaaaauggaacuuaugacuauccaaaauauuccgaagaaucaaaguuaaacagggagaaaauugauggagugaaauuggaaucaaugggagucuauaauauccuggcgaucuacucaacagucgccaguucccuaguucuuuuagucucccugggggcaaucagcuucuggauguguuccaaugggucuuuacaguguagaauaugcaucuaa

SEQ ID NO: 38357 - RNA, 1698 nt, Artificial Sequence
  derived and/or modified CDS sequence (wt) from hemagglutinin__InfluenzaA__ADV69086
augaaaguaaaacuacugguucuguuauguacauuuacagcuacauaugcagacacaauauguauaggcuaucaugccaacaacucaaccgacacuguugacacaguacuugagaagaaugugacaguaacacacucugucaaucuacuugaggacagucacaauggaaaauuaugucuacuaaaaggaauagcuccacuacaauuggguaauugcaacguugccggauggaucuuaggaaacccagagugcgaauugcugauuuccaaggaaucauggucuuacauuguagaaacaccaaacccugagaauggaacauguuacccaggguauuucaccgacuaugaagaacugagggaacaauugaguucaguaucuucauuuaagagguuugaaauauuccccaaagagagcucauggcccaaacacaccguaaccggagugucagcaucaugcucccauaacgggaaaagcagcuuuuacagaaauuugcuauggcuaacggggaagaacgguuuguacccaaaccugagcaaauccuauacaaacgacaaagaaaaagaaguccuuguauuaugggguguucaucacccgucaaacauaggggaccaaagggcccucuaucauaaagaaaaugcuuaugucucuguagugucuucacauuauagcagaagauucaccccagaaauagucaaaagacccaaggugagagaucaggaaggaagaaucaacuacuacuggacucugcuggaacccggggauacaauaauauuugaggcaaauggaaauuuaauagcgccaagguaugcuuucgcacugaguagaggcuuuggaucaggaaucaucaccucaaaugcaccaauggaugaauguaauacaaagugucaaacaccucagggagcuauaaacagcagccuuccuuuccagaauguacacccagucacaauaggagaguguccaaaauaugucaagagugcaaaauuaaggaugguuacaggacuaaggaacaccccauccauucaauccagagguuuguuuggagccauugccgguuucauugaaggaggguggacuggaaugguagaugguugguaugguuaucaucaucaaaaugagcaaggaucuggauaugcugcagaucaaaaaagcacacaaaaugccauuaaugggaucacaaacaaggugaauucuguaauugagaaaaugaacacucaauucacagcagugggcaaagaauucaacaaauuggaaagaaggauggaaaacuuaaauaaaaagguugaugauggguuucuagacauuuggacauauaaugcagaauuguuaguucuacuggaaaaugaaaggacuuuggauuuccacgacuccaacgugaaaaaucuguaugagaaaguaaaaagccaauuaaaaaauaaugccaaagaaauaggaaacgggugcuuugaauucuaucacaaguguaacgaugaaugcauggagagugugaaaaauggaacuuaugacuauccaaaauauuccgaagagucaaaguuaaacagggagaaaauugauggagugaaauuggaaucaauggaagucuaucagauccuggcgaucuacucaacagucgccaguucucuagucuuuuuagucucccugggggcaaucugcuucuggauguguuccaaugggucuuugcaguguagaauaugcaucuaa

SEQ ID NO: 38358 - RNA, 1698 nt, Artificial Sequence
  derived and/or modified CDS sequence (wt) from hemagglutinin__InfluenzaA__ADV69087
augaaaguaaaacuaaugguucuguuauguacauuuacagcuacauaugcagacacaauauguguaggcuaccaugccaacaacucaacugacacuguugacacaguacuugagaagaaugugacagugacacacucugucaaccuacuugaggacagccacaauggaaaacuaugucuacuaaaaggaauagcuccacuacaauuggguaguugcagcguugccggauggaucuuaggaaacccagaaugcgaauugcugauuuccaaggaaucaugguccuacauuguagaaacaccaaauccugagaauggaacauguuacccaggguauuucacagacuaugaagaacugagggagcaauugaguucaguaucuucauuuaagagguucgaaauauuccccaaagagagcucauggcccaaccacaccguaaacggagugucaucaucaugcucccauaacggggaaagcagcuucuacagaaauuugcuauggcugacggugaaggacgguuuguacccaaaccugagcaaguccuauacaaacaaaaaggagaaagaaguccuuguacuaugggguguucaucacccaucuaacauaggggaccaaagggcccucuaucauacagaaaaugcuuaugucucuguagugucuucacauuauagcagaagauucaccccagaaauagccaaaagacccaaggugagaaaucaggaaggaagaaucaacuacuacuggacucugcuagaacccggggauacaauaauauuugaggcaaauggaaaucuaauagcaccaagguaugccuucgaacugaguaaggguuuuggaucaggaaucaucacaucaaaugcaccaaugggugaauguaaugcaaagugucaaacaccucagggagcuauaaacagcagucucccuuuccagaauguacacccaguaacaauaggagaguguccaaaguaugucaggaguacaaaauuaaggaugguuacaggacuaaggaacaccccauccauucaauccagagguuuguuuggagccauugccgguuucauugaaggaggguggacuggaaugguagaugguugguaugguuaucaucaucagaaugagcaaggaucuggguaugcugcagaucaacaaagcacacaaaaugccauuaaugggauuacaaacaaggugaauucuguaauugaaaaaaugaacacucaauucacagcugugggcaaagaauucaacaaauuggaaagaagaauggaaaacuuaaauaaaaagauugaugauggguuucuagacauuuggacauauaaugcagaauuguuaguucuacuggaaaaugaaaggacuuuggauuuccaugacuccaacgugaagaaucuguaugagaaaguaaaaagccaauuaaaaaauaaugccaaagaaauaggaaacggguguuuugaauucuaucauaaguguaacgaugaaugcauggagagugugaaaaauggaacuuaugacuauccaaaauauuccgaagaaucaaaguuaaacagggagaaaauugauggagugaaauuggaaucaaugggagucuauaauauccuggcgaucuacucaacagucgccaguucccuaguucuuuuagucucccugggggcaaucagcuucuggauguguuccaaugggucuuuacaguguagaauaugcaucuaa

SEQ ID NO: 38359 - RNA, 1698 nt, Artificial Sequence
  derived and/or modified CDS sequence (wt) from hemagglutinin__InfluenzaA__ADV69088
augaaaguaaaacuacugauccuguuauguacauuuacagcuacauaugcggacacaauauguauaggcuaccaugccaacaacucaaccgacacaguugacacaguacuugagaagaaugugacaguuacacacucugucaaucuacuugaggacagucacaauggaaagcugugccuacuaaagggaauagccccucuacaauuggguaauugcagcguuaccggauggaucuuaggaaacccagaaugcgaauuacugauuuccaagaaaucaugguccuacauuguagaaacaccaaauccugagaauggagcauguuacccaggguauuucgccgacuaugaggagcuaagggagcaauugaguucaguaucuucauuugagagauucgaaauauuccccaaagaaagcucauggcccaaccacaacguaaacggaguaucagcaucaugcucccauaaugggaaaagcaguuuuuacagaaaucugcuauggcugacggggaaaaaugguuuguacccaagccugaccaaauccuaugcaaacgacaaagagaaagaaguccuuauacuaugggguguucaucacccgucuaacauaggggaccaaaggacccucuaucacacagaaaaugcuuaugucucuguaaugucuucacauuauagcagaagauucaccccagaaauauccaaaaggcccaaaguaagagaucaggaaggaagaaucaacuacuacuggacucugcuagaacccggggauacaauaauauuugaggcaaaugggaaucuaauagcgccaugguaugcuuucgcacugaguagaggcuuuggaucaggaaucaucaccucaagugcaccaauggaugcaugcgaugcgaagugucaaacaccucagggagcuauaaacagcagucuuccuuuccagaauguacacccagucacaauaggagaauguccaaaguaugucaggaguacaaaauuaaggaugguuacaggacuaaggaacaucccauccauucaauccagagguuuguuuggagccauugccgguuucauugaagggggguggacuggaaugguagaugggugguaugguuaucaucaucagaaugagcaaggaucuggcuaugcugcagaucaagaaagcacacaaaaugcccuucaugggauuacaaacaaggugaauucuguaauugagaaaaugaacacucaauucacagcugugggcaaagaauucaacaaauuggaaagaaggauggaaaacuugaauaaaaaaguugaugauggguuucuagacauuuggacauauaaugcagaguuguugguucuacuggaaaaugaaagaacuuuggauuuccacgacuccaaugugaagagucuguacgagaaaguaaaaauccaauuaaagaauaaugccaaagaaauaggaaaugggugcuuugaauucuaucacaaguguaacaaugaaugcauggagagugugagaaauggaacuuaugacuauccaaaauauuccgaagaaucaaaguuaaacagggaaaaaauugauggagugaaauuggacucaaugggggucuaucagauucuggcgaucuacucaacugucgccaguucccugguucuuuuggucucccugggggcaaucagcuucuggauguguuccaaugggucuuugcaauguagaauaugcaucuag

SEQ ID NO: 38360 - RNA, 1698 nt, Artificial Sequence
  derived and/or modified CDS sequence (wt) from hemagglutinin__InfluenzaA__ADV69089
augaaaguaaaacuacugauccuguuauguacauuuacagcuacauaugcggacacaauauguauaggcuaccaugccaacaacucaaccgacacaguugacacaguacuugagaagaaugugacaguuacacacucugucaaucuacuugaggacagucacaauggaaagcuuugccuacuaaagggaauagccccccuacaauuggguaauugcagcguugccggauggaucuuaggaaacccagagugcgaauuacugauuuccaagaaaucaugguccuacauuguagaaacaccaaauccugagaauggagcauguuacccaggguauuucgccgacuaugaggagcuaagggagcaauugaguucaguaucuucauuugagagauucgaaauauuccccaaagaaagcucauggcccaaccacaacguaaacggaguaucagcaucaugcucccauaaugggaaaagcaguuuuuacagaaaucugcuauggcugacggggaaaaaugguuuguacccaaaccugaccaaguccuaugcaaacaacaaagagaaagaaguccuuauacugugggguguucaucacccgucuaacauaggggaccaaaggacccucuaucacacagaaaaugcuuaugucucuguaaugucuucacacuauagcagaagauucaccccagaaauaaccaaaaggcccaaaauaagagaucaggaaggaagaaucaacuacuacuggacucugcuagaacccggggauacaauaauauaugaggcaaaugggaaucuaauagcgccaugguaugcuuucgcacugaguagaggcuuuggaucaggaaucaucaccucaagugcaccaauggaugaaugugaugcgaagugucaaacaccucagggagcuauaaacagcagucuuccuuuccagaauguacacccagucacaauaggagaauguccaaaguaugucaggagugcaaaauuaaggaugguuacaggacuaaggaacaucccauccauucaauccagagguuuguuuggagccauugccgguuucauugaagggggguggacuggaaugguaaaugggugguaugguuaucgucuucacaaugaccaaggaucuggcuaugcugcagaucaaaaaagcacacaaaacgcccuuaacgggauuacaaacaaggugaauucuguaauugagaaaaugaacacucaauucacagcugugggcaaggaauucaacaaauuggaaagaagaauggaaaacuuaaauaaaaaaguugaugauggguuucuagacauuuggacauauaaugcagagauguugguucuacuggaaaaugaaagaacuuuggauuuccacgacuccaaugugaagagucuauacgagagaguaaaaauucaauuaaagaauaaugccaaagaaauaggaaaugggugcuuugaauucuaucacaaguguaacaaugaaugcauggagagugugagaaauggaacuuaugacuauccaaaauauuccgaagaaucaaaauuaaacagggaaaaaauugauggagugaaauuggacucaaugggggucuaucagauucuggcgaucuacucaacugucgccaguucccugguucuuuuggucucccugggggcaaucagcuucuggauguguuccaaugggucuuugcaauguagaauaugcaucuaa

SEQ ID NO: 38361 - RNA, 1698 nt, Artificial Sequence
  derived and/or modified CDS sequence (wt) from hemagglutinin__InfluenzaA__ADV69090
augaaaguaaaacuacugguucuguuauguacauuuacagcuacauaugcagacacaauauguauaggguaccaugccaacaacucgaccgacacuguugacacaguacuugagaagaaugugacagugacacacucugucaaccuacuugaggacagucacaauggaaaacuaugucuacuaaaaggaauagccccacuacaauuggguaauugcagcguugccggauggaucuuaggaaacccagaaugcgaaucacugauuuccaaggaaucaugguccuacauuguagagacaccaaauccugagaauggaacauguuacccaggguauuucgccgacuaugaggagcugagagagcaauugaguucaguaucuucauuugagagguucgaaauauuccccaaagagagcucauggcccaaccacaccguaaccggaguaucagcaucaugcucccauaacgggaaaagcaguuuuuacagaaauuugcuauggcugacgaggaagaaugguuuguauccaaaccugagcaaguccuaugcaaacaacaaagagaaagaaguccuuguacugugggguguucaucacccgccuaaccuaggggaccaaagggcccucuaucauacagaaaaugcuuaugucucuguagugucuucacauuauagcagaagauucaccccagaaauagccaaaagacccaaggugagagaucaggaaggaagaaucaacuacuacuggacucugcuugaacccggggauacaauaauauuugaggcaaauggaaaucuaauagcgccaagguuugcuuucgcacugaguagaggcuuuggaucaggaaucaucaccucaaaugcaccaauggaugaaugugaugcgaaaugucaaacaccucagggagcuauaaacagcagucuuccuuuccagaauguacacccagucacaauaggagaguguccaaaguaugucaggaguacaaaauuaagaaugguuacaggacuaaggaacaucccauccauucaauccagagguuuguuuggagccauugccgguuucauugaagggggguggacuggaaugguagaugguugguaugguuaucaccaucagaaugagcaaggaucuggguaugcugcagaucaaaaaagcacacaaaaugccauuaacgggauuacaaacaaggugaauucuguaauugagaaaaugaacacucaauucacagcugugggcaaagaauucaacaaauuggaaagaaggauggaaaacuuaaauaaaaaaguugaugauggguuucuagacauuuggacauauaacgcagaauuguugguucuacuggaaaaugaaaggacuuuggacuuccaugacuccaacgugaagaaucuguaugagaaaguaaaaagccaauuaaagaauaaugccaaagaaauaggaaacggguguuuugaauucuaucacaaguguaacgaugaaugcauggaaagugugaaaaauggaacuuaugacuauccaaaauauuccgaagaaucaaaguugaacagggagaaaauugauggagugaaauuggaaucaaugggagucuaucagauuuuggcgaucuacucaacagucgccaguucccugguucuuuuggucucccugggggcaaucagcuucuggauguguuccaaugggucuuugcaguguagaauaugcaucuaa

SEQ ID NO: 38362 - RNA, 1698 nt, Artificial Sequence
  derived and/or modified CDS sequence (wt) from hemagglutinin__InfluenzaA__ADV69091
augaaaguaaaacuacugguucuguuauguacauuuacagcuacauaugcagacacaauauguauaggcuaucaugccaacaacucaaccgacacuguugacacaguacuugagaagaaugugacaguaacacacucugucaaccuacuugaggacagucacaauggaaaauuaugucuacuaaaaggaauagcuccacuacaauugggcaauugcaacguugccggauggaucuuaggaaacccagagugcgaauugcugauuuccaaggaaucauggucuuacauuguagaaacaccaaauccugagaauggaacauguuacccaggguauuucaccgacuaugaagaacugagggaacaauugaguucaguaucuucauuuaagagguuugaaauauuccccaaagaaagcucauggcccaaccacaccguaaccggaguaucagcaucaugcucccauaacgggaaaagcagcuuuuacagaaauuugcuauggcuaacgaggaagaacgguuuguacccaaaccugagcaaauccuauacaaacgacaaagagaaagaaguccuuguauuaugggguguucaucacccgucaaacauaggggaccaaagggcccucuaucauaaagaaaaugcuuaugucucuguagugucuucacauuauagcagaagauucaccccagaaauagucaaaagacccaaggugagagaucaggaaggaagaaucaacuauuacuggacucugcuggaacccggggauacaauaauauuugaggcaaauggaaauuuaauagcgccaagguaugcuuucgcacugaguagaggcuuuggaucaggaaucaucaccucaaaugcaccaauggaugaauguaauacaaagugucaaacaccucagggagcuauaaacagcagucuuccuuuccagaauguacacccagucacaauaggagaguguccaaaauaugucaagagugcaaaauuaaggaugguuacaggacuaaggaacaccccauccauucaauccagagguuuguuuggagccauugccgguuucauugaaggaggguggacuggaaugguagaugguugguaugguuaucaucaucagaaugagcaaggaucuggauaugcugcagaucaaaaaagcacacaaaaugccauuaaugggaucacaaacaaggugaauucuguaauugagaaaaugaacacucaauucacagcugugggcaaggaauucaacaaauuggaaagaaggauggaaaacuuaaauaaaaagguugaugauggguuucuagacauuuggacauauaaugcagaauuguuaguucuacuggaaaaugaaaggacuuuggauuuccaugacuccaacgugaaaaaucuguaugagaaaguaaaaaaccaauuaaagaauaaugccaaagaaauaggaaacgggugcuuugaauucuaucacaaguguaacgaugaaugcauggagagugugaaaaauggaacuuaugacuauccaaaauauuccgaagagucaaaguuaaacagggagaaaauugauggagugaaauuggaaucgauggaagucuaucagauccuggcgaucuacucaacagucgccaguucucuagucuuuuuagucucccugggggcaaucugcuucuggauguguuccaaugggucuuugcaguguagaauaugcaucuaa

SEQ ID NO: 38363 - RNA, 1698 nt, Artificial Sequence
  derived and/or modified CDS sequence (wt) from hemagglutinin__InfluenzaA__ADV69092
augaaaguaaaacuacugguucuguuauguacauuuacagcuacauaugcagacacaauauguauaggcuaucaugccaacaacucaaccgacacuguugacacaguacuugagaagaaugugacaguaacacacucugucaaccuacuugaggacagucacaauggaaaauuaugucuacuaaaaggaauagcuccacuacaauugggcaauugcaacguugccggauggaucuuaggaaacccagagugcgaauugcugauuuccaaggaaucauggucuuacauuguagaaacaccaaauccugagaauggaacauguuacccaggguauuucaccgacuaugaagaacugagggaacaauugaguucaguaucuucauuuaagagguuugaaauauuccccaaagagagcucauggcccaaccacaccguaaccggaguaucagcaucaugcucccauaacgggaaaagcagcuuuuacagaaauuugcuauggcuaacggggaagaacgguuuguacccaaaccugagcaaauccuauacaaacgacaaagagaaagaaguccuuguauuaugggguguucaucacccgucaaacauaggggaccaaagggcccucuaucauaaagaaaaugcuuaugucucuguagugucuucacauuauagcagaagauucaccccagaaauagucaaaagacccaaggugagagaucaggaaggaagaaucaacuacuacuggacucugcuggaacccggggauacaauaauauuugaggcaaauggaaauuuaauagcgccaagguaugcuuucgcacugaguagaggcuuuggaucaggaaucaucaccucaaaugcaccaauggaugaauguaauacaaagugucaaacaccucagggagcuauaaacagcagucuuccuuuccagaauguacacccagucacaauaggagaguguccaaaauaugucaagagugcaaaauuaaggaugguuacaggacuaaggaacacccuauccauucaauccaaagguuuguuuggagccauugccgguuucauugaaggaggguggacuggaaugguagaugguugguaugguuaucaucaucagaaugagcaaggaucuggauaugcugcagaucaaaaaagcacacaaaaugccauuaaugggaucacaaacaaggugaauucuguaauugagaaaaugaacacucaauucacagcugugggcaaagaauucaacaaauuggaaagaaggauggaaaacuuaaauaaaaagguugaugauggguuucuagacauuuggacauauaaugcagaauuguuaguucuacuggaaaaugaaaggacuuuggauuuccaugacuccaacgugaaaaaucuguaugagaaaguaaaaagccaauuaaagaauaaugccaaagaaauaggaaacgggugcuuugaauucuaucacaaguguaacgaugaaugcauggagagugugaaaaauggaacuuaugacuauccaaaauauuccgaagagucaaaguuaaacagggagaagauugauggagugaaauuggaaucgauggaagucuaucagauccuggcgaucuacucaacagucgccaguucucuagucuuuuuagucucccugggggcaaucugcuucuggauguguuccaaugggucuuugcaguguagaauaugcaucuaa

SEQ ID NO: 38364 - RNA, 1698 nt, Artificial Sequence
  derived and/or modified CDS sequence (wt) from hemagglutinin__InfluenzaA__ADV69093
augaaaguaaaacuaaugguucuguuauguacauuuacagcuacauaugcagacacaauauguguaggcuaccaugccaacaacucaacugacacuguugacacaguacuugagaagaaugugacagugacacacucugucaaccuacuugaggacagccacaauggaaaacuaugucuacuaaaagggauagcuccacuacaauuggguaguugcagcguugccggauggaucuuaggaaacccagagugcgaauugcugauuuccaaggaaucuugguccuacauuguagaaacaccaaauccugagaauggaacauguuacccaggguaugucacagacuaugaagaacugagggagcaauugaguucaguaucuucauuuaagagguucgaaauauuccccaaagagagcucauggcccaaccacaccguaaccggagugucaucaucaugcucccauaacgggaaaagcagcuucuacagaaauuugcuauggcugacggugaagaacggucuguacccaaaccugagcaaguccuauacaaacaaaaaggagaaagaaguccuuguacuaugggguguucaucacccaucuaacauaggggaccaaagggcccucuaucauacagaaaaugcuuaugucucuguagugucuucacauuauagcagaagauucaccccagaaauagccaaaagacccaaggugagaaaucaggaaggaagaaucaacuacuacuggacccugcuagaacccggggauacaauaauauuugaggcaaauggaaaucuaauagcaccaagguaugccuucgaacugaguaaggguuuuggaucaggaaucaucacaucaaaugcaccaaugggugaauguaaugcaaagugucaaacaccucagggagcuauaaacagcagucuuccuuuccagaauguacacccaguaacaauaggagaguguccaaaguaugucaaaagugcaaaauuaaggaugguuacaggacuaaggaacaccccauccauucaauccagagguuuguuuggagccauugccgguuucauugaaggaggguggacuggaaugguagaugguugguaugguuaucaccaucagaaugagcaaggaucuggguaugcugcagaccaacaaagcacacaaaaugccauuaaugggauuacaaacaaggugaauucuguaauugagaaaaugaacacucaauucacagcugugggcaaagaauucaacaaacuggaaagaagaauggaaaacuuaaauaaaaggguugaugauggguuucuagacauuuggacauauaaugcagaauuguuaguucuacuggaaaaugaaaggacuuuggauuuccaugacuccaacgugaagaaucuguaugagaaaguaaaaagccaauuaaaaaauaaugccaaagaaauaggaaacggguguuuugaauucuaucauaaguguaacgaugaaugcauggagagugugaaaaauggaacuuaugacuauccaaaauauuccgaagaaucaaaguuaaacagggagaaaauugauggagugaaauuggaaucaaugggagucuauaauauccuggcgaucuacucaacagucgccaguucccuaguucuuuuagucucccugggggcaaucagcuucuggauguguuccaaugggucuuuacaguguagaauaugcaucuaa

SEQ ID NO: 38365 - RNA, 1698 nt, Artificial Sequence
  derived and/or modified CDS sequence (wt) from hemagglutinin__InfluenzaA__ADV69094
augaaaguaaaacuaaugguucuguuauguacauuuacagcuacauaugcagacacaauauguguaggcuaccaugccaacaacucaacugacacuguugacacaguacuugagaagaaugugacagugacacacucugucaaccuacuugaggacagccacaauggaaaacuaugucuacuaaaaggaauagcuccacuacaauuggguaguugcagcguugccggauggaucuuaggaaacccagagugcgaauugcugauuuccaaggaaucuugguccuacauuguagaaacaccaaauccugagaauggaacauguuacccaggguauuucacagacuaugaagaacugagggagcaauugaguucaguaucuucauuuaagagguucgaaauauuccccaaagagagcucauggcccaaccacaccguaaccggagugucaucaucaugcucccauaacgggaaaagcagcuucuacagaaauuugcuauggcugacggugaagaacggucuguacccaaaccugagcaaguccuauacaaacaaaaaggagaaagaaguccuuguacuaugggguguucaucacccaucuaacauaggggaccaaagggcccucuaucauacagaaaaugcuuaugucucuguagugucuucacauuauagcagaagauucaccccagaaauagccaaaagacccaaggugagaaaucaggaaggaagaaucaacuacuacuggacccugcuagaacccggggauacaauaauauuugaggcaaauggaaaucuaauagcaccaagguaugccuucgaacugaguaaggguuuuggaucaggaaucaucacaucaaaugcaccaaugggugaauguaaugcaaagugucaaacaccucagggagcuauaaacagcagucuuccuuuccagaauguacacccaguaacaauaggagaguguccaaaguaugucaaaagugcaaaauuaaggaugguuacaggacuaaggaacaccccauccauucaauccagagguuuguuuggagccauugccgguuucauugaaggaggguggacuggaaugguacaugguugguaugguuaucaccaucagaaugagcaaggaucuggguaugcugcagaacaacaaagcacacaauaugccauuaaugggauuacaaacaaggugaauucuguaauugagaaaaugaacacucaauucacagcugugggcaaagaauucaacaaacuggaaagaagaauggaaaacuuaaauaaaaggguugaugauggguuucuagacauuuggacauauaaugcagaauuguuaguucuacuggaaaaugaaaggacuuuggauuuccaugacuccaacgugaagaaucuguaugagaaaguaaaaagccaauuaaaaaauaaugccaaagaaauaggaaacggguguuuugaauucuaucauaaguguaacgaugaaugcauggagagugugaaaaauggaacuuaugacuauccaaaauauuccgaagaaucaaaguuaaacagggagaaaauugauggagugaaauuggaaucaaugggagucuauaauauccuggcgaucuacucaacagucgccaguucccuaguucuuuuagucucccugggggcaaucagcuucuggauguguuccaaugggucuuuacaguguagaauaugcaucuaa

SEQ ID NO: 38366 - RNA, 1698 nt, Artificial Sequence
  derived and/or modified CDS sequence (wt) from hemagglutinin__InfluenzaA__ADV69095
augaaaguaaaacuaaugguucuguuauguacauuuacagcuacauaugcagacacaauauguguaggcuaccaugccaacaacucaacugacacuguugacacaguacuugagaagaaugugacagugacacacucugucaaccuacuugaggacagccacaauggaaaacuaugucuacuaaaaggaauagcuccacuacaauuggguaguugcagcguugccggauggaucuuaggaaacccagaaugcgaauugcugauuuccaaggaaucaugguccuacauuguagaaccaccaaauccugagaauggaacauguuacccaggguauuucacagacuaugaagaacugagggagcaauugaguucaguaucuucauuuaagagguucgaaauauuccccaaagagagcucauggcccaaccacaccguaaacggagugucaucaucaugcucccauaacggggaaagcagcuucuacagaaauuugcuauggcugacggugaaggacgguuuguacccaaaccugagcaaguccuauacaaacaaaaaggagaaagaaguccuuguacuaugggguguucaucacccaucuaacauaggggaccaaagggcccucuaucauacagaaaaugcuuaugucucuguagugucuucacauuauagcagaagauucaccccagaaauagccaaaagacccaaggugagaaaucaggaaggaagaaucaacuacuacuggacucugcuagaacccggggauacaauaauauuugaggcaaauggaaaucuaauagcaccaagguaugccuucgaacugaguaaggguuuuggaucaggaaucaucacaucaaaugcaccaaugggugaauguaaugcaaagugucaaacaccucagggagcuauaaacagcagucuuccuuuccagaauguacacccaguaacaauaggagaguguccaaaguaugucaggaguacaaaauuaaggaugguuacaggacuaaggaacaccccauccauucaauccagagguuuguuuggagccauugccgguuucauugaaggaggguggacuggaaugguagaugguugguaugguuaucaucaucagaaugagcaaggaucuggguaugcugcagaucaacaaagcacacaaaaugccauuaaugggauuacaaacaaggugaauucuguaauugaaaaaaugaacacucaauucacagcugugggcaaagaauucaacaaauuggaaagaagaauggaaaacuuaaauaaaaagauugaugauggguuucuagacauuuggacauauaaugcagaauuguuaguucuacuggaaaaugaaaggacuuuggauuuccaugacuccaacgugaagaaucuguaugagaaaguaaaaagccaauuaaaaaauaaugccaaagaaauaggaaacggguguuuugaauucuaucauaaguguaacgaugaaugcauggagagugugaaaaauggaacuuaugacuauccaaaauauuccgaagaaucaaaguuaaacagggagaaaauugauggagugaaauuggaaucaaugggagucuauaauauccuggcgaucuacucaacagucgccaguucccuaguucuuuuagucucccugggggcaaucagcuucuggauguguuccaaugggucuuuacaguguagaauaugcaucuaa

SEQ ID NO: 38367 - RNA, 1698 nt, Artificial Sequence
  derived and/or modified CDS sequence (wt) from hemagglutinin__InfluenzaA__ADV69096
augaaaguaaaacuaaugguucuguuauguacauuuacagcuacauaugcagacacaauauguguaggcuaccaugccaacaacucaacugacacuguugacacaguacuugagaagaaugugacagugacacacucugucaaccuacuugaggacagccacaauggaaaacuaugucuacuaaaaggaauagcuccacuacaauuggguaguugcagcguugccggauggaucuuaggaaacccagagugcgaauugcugauuuccaaggaaucuugguccuacauuguagaaacaccaaauccugagaauggaacauguuacccaggguaugucacagacuaugaagaacugagggagcaauugaguucaguaucuucauuuaagagguucgaaauauuccccaaagagagcucauggcccaaccacaccguaaccggagugucaucaucaugcucccauaacgggaaaagcagcuucuacagaaauuugcuauggcugacggugaagaacggucuguacccaaaccugagcaaguccuauacaaacaaaaaggagaaagaaguccuuguacuaugggguguucaucacccaucuaacauaggggaccaaagggcccucuaucauacagaaaaugcuuaugucucuguagugucuucacauuauagcagaagauucaccccagaaauagccaaaagacccaaggugagaaaucaggaaggaagaaucaacuacuacuggacccugcuagaacccggggauacaauaauauuugaggcaaauggaaaucuaauagcaccaagguaugccuucgaacugaguaaggguuuuggaucaggaaucaucacaucaaaugcaccaaugggugaauguaaugcaaagugucaaacaccuaagggagcuauaaacagcagucuuccuuuccagaauguacacccaguaacaauaggagaguguccaaaguaugucaaaagugcaaaauuaaggaugguuacaggacuaaggaacaccccauccauucaauccagagguuuguuuggagccauugccgguuucauugaaggaggguggacuggaaugguagaugguugguaugguuaucaccaucagaaugagcaaggaucuggguaugcugcagaccaacaaagcacacaaaaugccauuaaugggauuacaaacaaggugaauucugugauugaaaaaaugaacacucaauucacagcugugggcaaagaauucaacaaacuggaaagaagaauggaaaacuuaaauaaaaagguugaugauggguuucuagacauuuggacauauaaugcagaauuguuaguucuacuggaaaaugaaaggacuuuggauuuccaugaauccaacgugaagaaucuguaugagaaaguaaaaagccaauuaaaaaauaaugccaaagaaauaggaaacggguguuuugaauucuaucauaaguguaacgaugaaugcauggagagugugaaaaauggaacuuaugacuauccaaaauauuccgaagaaucaaaguuaaacagggagaaaauugauggagugaaauuggaaucaaugggagucuauaauauccuggcgaucuacucaacagucgccaguucccuaguucuuuuagucucccugggggcaaucagcuucuggauguguuccaaugggucuuuacaguguagaauaugcaucuaa

SEQ ID NO: 38368 - RNA, 1698 nt, Artificial Sequence
  derived and/or modified CDS sequence (wt) from hemagglutinin__InfluenzaA__ADV69097
augaaaguaaaacuacugauccuguuauguacauuuacagcuacauaugcggacacaauauguauaggcuaccaugccaacaacucaaccgacacagucgacacaguacuugagaagaaugugacaguuacacacucugucaaucuacuugaggacagucacaauggaaagcugugccuacuaaagggaauagccccccuacaauuggguaauugcagcguugccggauggaucuuaggaaacccagaaugcgaauuacugauuuccaagaaaucaugguccuacauuguagaaacaccaaauccugggaauggagcauguuacccaggguauuucgccgacuaugaggagcuaagggagcaauugaguucaguaucuucauuugagagauucgaaauauuccccaaagaaagcucaugguccaaccacaacguaaacggaguaucagcaucaugcucccauaaugggaaaagcaguuuuuacagaaaucugcuauggcugacggggaaaaaugguuuguacccaacccugaccaaguccuaugcaaacgacaaagagaaagaaguccuuauacuaugggguguucaucacccgucuaacauaggggaccaaaggacccucuaucacacagaaaaugcuuaugucucuguaaugucuucacauuauagcagaagauucaccccagaaauauccaaaaggcccaaaguaagagaucaggaaggaagaaucaacuacuacuggacucugcuagaaccaggggauacaauaauauuugaggcaaaugggaaucuaauagcgccaugguaugcuuucgcacugaguagaggcuuuggaucaggaaucaucaccucaaaugcaccaauggaugaaugcgaugcgaagugucaaacaccucagggagcuauaaacagcagucuuccuuuccagaauauacacccagucacaauaggagaguguccaaaguaugucaggagugcaaaauuaaggaugguuacaggacuaaggaacaccccauccauucaauccagagguuuguuuggagccauugccgguuucauugaaggaggguggacuggaaugguagaugguugguaugguuaucaucaucagaaugagcaaggaucuggauaugcugcagaucaagaaagcacacaaaaugccauuaacgagauuacaaacaaagagaauucuguaauugagaaaaugaacacucaauucacaucugugggcaaagaauucaacaaauuggaaagaaggauggaaaacuuaaauaaaaaaguugaugauggguuucuagacauuuggacauauaaugcagaguuguugguucuacuggaaaaugaaagaacuuuggauuuccacgacuccaaugugaagagucuguacgagaaaguaaaaauccaauuaaagaauaaugccaaagaaauaggaaaugggugcuuugaauucuaucacaaguguaacaaugaaugcauggagagugugagaaauggaacuuaugacuauccaaaauauuccgaagaaucaaaguuaaacagggaaaaaauugauggagugaaauuggacucaaugggagucuaucagauucuggcgaucuacucaacugucgccaguucccugguucuuuuggucucccugggggcaaucagcuucuggauguguuccaaugggucuuugcaauguagaauaugcaucuaa

SEQ ID NO: 38369 - RNA, 1698 nt, Artificial Sequence
  derived and/or modified CDS sequence (wt) from hemagglutinin__InfluenzaA__ADV69098
augaaaguaaaacuaauuguucuguuauguacauuuacagcuacauaugcagacacaauauguguaggcuaccaugccaacaacucaacugacacuguugacacaguacuugagaagaaugugacagugacacacucugucaaccuacuugaggacagccacaauggaaaacuaugucuacuaaaaggaauagcuccacuacaauuggguaguugcagcguugccggauggaucuuagggaacccagagugcgaacugcugauuuccaaggaaucaugguccuacauuguagaaacaccaaauccugagaauggaacauguuacccaggguauuucacagacuaugaagaacugagggagcaauugaguucaguaucuucauuuaagagguucgaaauauuccccaaagagagcucauggcccaaccacaccguaaccggagugucaucaucaugcucccauaacgggaacagcagcuucuacagaaauuugcuauggcugacggugaagaacgguuuguacccaaaccugagcaaguccuauacaaacaaaaaggagaaagaaguccuuguacuaugggguguucaucacccaucuaacauagaggaccaaagggcccucuaucauacagaaaaugcuuaugucucuguagugucuucacauuauagcagaagauucaacccagaaauagccaagagacccaaggugagaaaucaggaaggaagaaucaacuacuacuggacucugcuagaacccggggauacaauaauauuugaggcaaauggaaaucuaauagcaccaagguaugccuucgaacugaguaaggguuuuggaucaggaaucaucacaucaaaugcaccaaugggugaauguaaugcaaagugucaaacaccucagggagcuauaaacagcaaucuuccuuuccagaauguacacccaguaacaauaggagaguguccaaaguaugucaggagugcaaaauuaaggaugguuacaggacuaaggaacaccccauccauccaauccagagguuuguuuggagccauugccgguuucauugaaggaggauggacuggaaugguagaugguugguaugguuaucaucaucacaaugagcaaggaucuggauaugcugcaaaccaaaaaagcacaccaaaugccauuaacgguauuacaaacaaagugaauucuguaauugaaaaaaugaacacucaauucacagcugugggcaaagaauucaacaaauuggaaagaagaauggaaaaccuaaauaaaaagguugaugauggguuucuagacauuuggacauauaaugcagaauuguuaguucuacuggaaaaugaaaggacuuuggauuuccaugacuccaacgugaagaaucuguaugagaaaguaagaagccaauuaaaaaauaaugccaaagaaauaggaaacggguguuuugaauucuaucauaaguguaacgaugaaugcauggagagugugaaaaauggaacuuaugacuauccaaaauauuccgaagaaucaaaguuaaacagggagaaaauugauggagugaaauuggaaucaaugggagucuauaauauccuggcgaucuacucaacagucgccaguucccuaguucuuuuagucucccugggggcaaucagcuucuggauguguuccaaugggucuuuacaguguagaauaugcaucuaa

SEQ ID NO: 38370 - RNA, 1698 nt, Artificial Sequence
  derived and/or modified CDS sequence (wt) from hemagglutinin__InfluenzaA__ADV69099
augaaaguaaaacuaauuguucuguuauguacauuuacagcuacauaugcagacacaauauguguaggcuaccaugccaacaacucaacugacacuguugacacaguacuugagaagaaugugacagugacacacucugucaaccuacuugaggacagccacaauggaaaacuaugucuacuaaaaggaauagcuccacuacaauuggguaguugcagcguugccggauggaucuuagggaacccagagugcgaacugcugauuuccaaggaaucaugguccuacauuguagaaacaccaaauccugagaauggaacauguuacccaggguauuucacagacuaugaagaacugagggagcaauugaguucaguaucuucauuuaagagguucgaaauauuccccaaagagagcucauggcccaaccacaccguaaccggagugucaucaucaugcucccauaacgggaacagcagcuucuacagaaauuugcuauggcugacggugaagaacgguuuguacccaaaccugagcaaguccuauacaaacaaaaaggagaaagaaguccuuguacuaugggguguucaucacccaucuaacauagaggaccaaagggcccucuaucauacagaaaaugcuuaugucucuguagugucuucacauuauagcagaagauucaacccagaaauagccaagagacccaaggugagaaaucaggaaggaagaaucaacuacuacuggacucugcuagaacccggggauacaauaauauuugaggcaaauggaaaucuaauagcaccaagguaugccuucgaacugaguaaggguuuuggaucaggaaucaucacaucaaaugcaccaaugggugaauguaaugcaaagugucaaacaccucagggagcuauaaacagcaaucuuccuuuccagaauguacacccaguaacaauaggagaguguccaaaguaugucaggagugcaaaauuaaggaugguuacaggacuaaggaacaccccauccauccaauccagagguuuguuuggagccauugccgguuucauugaaggaggauggacuggaaugguaaaugguugguaugguuaucaucaucacaaugagcaaggaucuggauaugcugcaaaccaacaaagcccaccaaaugccauuaacgguauuacaaacaaagugaauucuguaauugaaaaaaugaacacucaauucacagcugugggcaaagaauucaacaaauuggaaagaagaauggaaaaccuaaauaaaaagguugaugauggguuucuagacauuuggacauauaaugcagaauuguuaguucuacuggaaaaugaaaggacuuuggauuuccaugacuccaacgugaagaaucuguaugagaaaguaagaagccaauuaaaaaauaaugccaaagaaauaggaaacggguguuuugaauucuaucauaaguguaacgaugaaugcauggagagugugaaaaauggaacuuaugacuauccaaaauauuccgaagaaucaaaguuaaacagggagaaaauugauggagugaaauuggaaucaaugggagucuauaauauccuggcgaucuacucaacagucgccaguucccuaguucuuuuagucucccugggggcaaucagcuucuggauguguuccaaugggucuuuacaguguagaauaugcaucuaa

SEQ ID NO: 38371 - RNA, 1698 nt, Artificial Sequence
  derived and/or modified CDS sequence (wt) from hemagglutinin__InfluenzaA__ADV69100
augaaaguaaaacuacugauccuguuauguacauuuacagcuacguaugcggacacaauauguauaggauaccaugccaacaacucaaccgacacuguugacacagugcuugaaaagaaugugacagugacacacucugucaaccuacuugaggacagucacaaugggaaacugugccuacuaaagggaauagccccccuacaauuggguaauugcagcguugccggauggauauuaggaaacccagaaugcgaaucacugauuuccaagaaaucaugguccuacauuguagaaacaccaaagccugagaauggaacauguuacccaggggaguucgcugacuaugaggagcuaagagagcaauugaguucaguaucuucauuugagagauucgaaauauuccccaaagaaagcucauggcccaaccacacugcagccggagugucagcaucaugcucccauaauggggaaagaaguuuuuacaaaaaucugauauggcugacagugaaaaaugguuuguacccaaacuugagcaaguccuauaaaaacgacaaagagaaagaaguccuuauacuaugggguguucaucauccgccuaacauagagaaccaaaggacccucuaucacacagaaaauacuuaugucucuguagugucuucacauuauagcggaagauucaccccagaaauaaccaaaaggcccaaaguaagagaucaggaaggaagaaucaacuacuacuggacucugcuggaacccggggauacaauaauauuugaggcaaaugguaaucuaauagcgccaugguaugcuuucacacugaguagaggccuuggaucaggaaucgucaccucuaaugcaccaauggacaaaugugaugcgaagugucaaacaccucauggagcuauaaacagcagucuuccuuuccagaauguacacccagucacaauaggagaauguccaaaguaugucaggagugcaaaauuaaggaugguuacaggacuaaggaacaucccauccauucaauccagagguuuguuuggggccauugccgguuucauugaagggggguggacuggaaugguagaugggugguaugguuaucaucaucagaaugagcagggaucuggcuaugcugcagaucaagaaagcacacaaaaugccauuaacgggauuacaaacaaagugaauucuguaauugaaaaaaugaacacucaauucacagcugugggcaaggaauucaacaaauuggaaagaaggauggaaaacuuaaauaaaaagguugaugauggguuucuagacauuuggacauacaaugcagaguuguugguucuacuggaaaaugaaagaacuuuggacuuccacgauuccaaugugaagagucuguacgagaaaguaaaaagccaauuaaagaauaaugcuaaagaaauagggaaugggugcuuugaauucuaucacaaguguaacaacgaaugcauggagagugugaaaaauggaacuuaugacuauccaaaauauuccgaagaaucaaaguuaaacagggaaaaaauugauggaguuaaauuggacucaaugggggucuaucggauuuuggcgaucuacucgacugucgccaguucccuaguucuuuuggucucccugggggcaaucagcuucuggauguguuccaaugggucuuugcaauguagaauaugcaucuag

SEQ ID NO: 38372 - RNA, 1698 nt, Artificial Sequence
  derived and/or modified CDS sequence (wt) from hemagglutinin__InfluenzaA__ADV69101
augaaaguaaaacuacugauccuguuuuguacauuuacagcuacauaugcggacacaauauguauaggauaccaugccaacaacucaaccgacacuguugacacaguacuugaaaagaaugugacagugacacacucugucaaccuacuugaggacagucacaaugggaagcugugccuacuaaagggaauagccccccuacaauuggguaauugcagcguugccggauggauauuaggaaacccagaaugcgaaucacugauuuccaagaaaucaugguccuacauuguagaaacaccaaauccugagaauggagcauguuacccaggggaguucgccgacuaugaggagcuaagggagcaauugaguucaguaucuucauuugagagauucgaaauauuccccaaagaaagcucauggcccaaccacacugcaaccggagugucagccucaugcucccauaauggggaaagaaguuuuuacagaaaucugauauggcugacagugaaaaaugguuuguacccaaaccugagcaaguccuaugaaaacgacaaagagaaagaaguccuuauacuaugggguguucaucauccgccuaacauagagaaccaaaggacccucuaucacacagaaaaugcuuaugucucuguagugucuucacauuauagcggaagauucaccccagaaauaaccaaaaggcccaaaguaagagaucaggaaggaagaaucaacuacuacuggacucugcuggaacccggggauacaauaauauuugaggcaaauggaaaucuaauagcgccaugguaugcuuucacacugaguagaggccuuggaucaggaaucaucaccucuaaugcaccaauggacgaaugugauucgaagugucaaacaccucaaggagcuauaaacagcagucuuccuuuccagaauguacacccagucacaauaggagaauguccaaaguaugucaggagugcaaaauuaaggaugguuacaggacuaaggaacaucccauccauucaauccagagguuuguuuggggccauugccgguuucauugaagggggguggacuggaaugguagaugggugguaugguuaucaucaucagaaugagcagggaucuggcuaugcugcagaucaagaaagcacacaaaaugccauuaacgggauuacaaacaaggugaauucuguaauugagaaaaugaacccucaauucacagcugugggcaaggaauucaacaaauuggaaagaaggauggaaaacuuaaacaaaaagguugaugauggguuucuagacauuuggacauacaaugcagaguuguugguucuacuggaaaaugaaagaacuuuggacuuccacgacuccaaugugaagagucuguacgagaaaguaaaaagccaauuaaagaauaaugcuaaagaaauagggaaugggugcuuugaauucuaucacaaguguaacaacgaaugcauggagagugugaaaaauggaacuuaugacuauccaaaauauuccgaagaaucaaaguuaaacagggaaaaaauugauggaguuaaauuggacucaaugggggucuaucggauucuggcgaucuacucaacugucgccaguucccugguucuuuuggucucccugggggcaaucagcuucuggauguguuccaaugggucuuugcaauguagaauaugcaucuag

SEQ ID NO: 38373 - RNA, 1698 nt, Artificial Sequence
  derived and/or modified CDS sequence (wt) from hemagglutinin__InfluenzaA__ADV69102
augaaaguaaaacuacugauccuguuuuguacauuuacagcuacauaugcggacacaauauguauaggauaccaugccaacaacucaaccgacacuguugacacaguacuugaaaagaaugugacagugacacacucugucaaccuacuugaggacagucacaaugggaagcugugccuacuaaagggaauagccccccuacaauuggguaauugcagcguugccggauggauauuaggaaacccagaaugcgaaucacugauuuccaagaaaucaugguccuacauuguagaaacaccaaauccugagaauggagcauguuacccaggggaguucgccgacuaugaggagcuaagggagcaauugaguucaguaucuucauuugagagauucgaaauauuccccaaagaaagcucauggcccaaccacacugcaaccggagugucagccucaugcucccauaauggggaaagaaguuuuuacagaaaucugauauggcugacagugaaaaaugguuuguacccaaaccugagcaaguccuaugaaaacgacaaagagaaagaaguccuuauacuaugggguguucaucauccgccuaacauagagaaccaaaggacccucuaucacacagaaaaugcuuaugucucuguagugucuucacauuauagcggaagauucaccccagaaauaaccaaaaggcccaaaguaagagaucaggaaggaagaaucaacuacuacuggacucugcuggaacccggggauacaauaauauuugaggcaaauggaaaucuaauagcgccaugguaugcuuucacacugaguacaggccuuggaucaggaaucaucaccucuaaugcaccaauggacgaaugugauucgaagugucaaacaccucaaggagcuauaaacagcagucuuccuuuccagaauguacacccagucacaauaggagaauguccaaaguaugucaggagugcaaaauuaaggaugguuacaggacuaaggaacaucccauccauucaauccagagguuuguuuggggccauugccgguuucauugaagggggguggacuggaaugguagaugggugguaugguuaucaucaucagaaugagcagggaucuggauaugcugcagaucaagaaagcacacaaaaugccauuaacgggauuacaaacaaggugaauucuguaauugagaaaaugaacacucaauucacagcugugggcaaggaauucaacaaauuggaaagaaggauggaaaacuuaaacaaaaagguugaugauggguuucuagacauuuggacauacaaugcagaguuguugguucuacuggaaaaugaaagaacuuuggacuuccacgacuccaaugugaagagucuguacgagaaaguaaaaagccaauuaaagaauaaugcuaaagaaauagggaaugggugcuuugaauucuaucacaaguguaacaacgaaugcauggagagugugaaaaauggaacuuaugacuauccaaaauauuccgaagaaucaaaguuaaacagggaaaaaauugauggaguuaaauuggacucaaugggggucuaucggauucuggcgaucuacucaacugucgccaguucccugguucuuuuggucucccugggggcaaucagcuucuggauguguuccaaugggucuuugcaauguagaauaugcaucuag

SEQ ID NO: 38374 - RNA, 1698 nt, Artificial Sequence
  derived and/or modified CDS sequence (wt) from hemagglutinin__InfluenzaA__ADV69103
augaaaguaaaacuaaugguucuguuauguacauuuacagcuacauaugcagacacaauauguguaggcuaccaugccaacaacucaacugacacuguugacacaguacuugagaagaaugugacagugacacacucugucaaccuacuugaggacagccacaauggaaaacuaugucuacuaaaaggaauagcuccacuacaauuggguaguugcagcguugccggauggaucuuaggaaacccagagugcgaauugcugauuuccaaggaaucaugguccuacauuguagaaacaccaaauccugagaauggaacauguuacccaggguauuucacagacuaugaagaacugagggagcaauugaguucaguaucuucauuuaagagguucgaaauauuccccaaagagagcucauggcccaaccacaacguaaccggagugucaucaucaugcucccauaacgggaaaagcagcuucuacagaaauuugcuauggcugacggugaagaacggucuguacccaaaccugagcaaguccuauacaaacaaaaaggagaaagaaguccuuguacuaugggguguucaucacccaucuaacauaggggaccaaagggcccucuaucauacagaaaaugcuuaugucucuguagugucuucacauuauagcagaagauucaccccagaaauagccaaaagacccaaggugagaaaucaggaaggaagaaucaacuacuacuggacccugcuagaacccggggauacaauaauauuugaggcaaauggaaaucuaauagcaccaagguaugccuucgaauugaguaaggguuuuggaucaggaaucaucacaucaaaugcaccaauaggugaauguaaugcaaagugucaaacaccucagggagcuauaaacagcagucuuccuuuccagaauguaaacccaguaacaauaggagaguguccaaaguaugucaaaagugcaaaauuaaggaugguuacaggacuaaggaacaccccauccauucaauccagagguuuguuuggagccauugccgguuucauugaaggaggguggacuggaaugguagaugguugguaugguuaucaccaucagaaugagcaaggaucuggguaugcugcagaccaacaaagcacacaaaaugccauuaaugggauuacaaacaaggugaacucugugauugaaaaaaugaacacucaauucacagcugugggcaaagaauucaacaaacuggaaagaagaauggaaaacuuaaauaaaaagguugaugauggguuucuagacauuuggacauauaaugcagaauuguuaguucuacuggaaaaugaaaggacuuuggauuuccaugacuccaacgugaagaaucuguaugagaaaguaaaaagccaauuaaaaaauaaugccaaagaaauaggaaacggguguuuugaauucuaucauaaguguaacgaugaaugcauggagagugugaaaaauggaacuuaugacuauccaaaauauuccgaagaaucaaaguuaaacagggagaaaauugauggagugaaauuggaaucaaugggagucuauaauauccuggcgaucuacucaacaguagccaguucccuaguucuuuuagucucccugggggcaaucagcuucuggauguguuccaaugggucuuuacaguguagaauaugcaucuaa

SEQ ID NO: 38375 - RNA, 1698 nt, Artificial Sequence
  derived and/or modified CDS sequence (wt) from hemagglutinin__InfluenzaA__ADV69104
augaaaguaaaacuacugauccuguuuuguacauuuacagcuacauaugcggacacaauauguauaggauaccaugccaacaacucaaccgacacuguugacacaguacuugaaaagaaugugacagugacacacucugucaaccuacuugaggacagucacaaugggaagcugugccuacuaaagggaauagccccccuacaauuggguaauugcagcguugccggauggauauuaggaaacccagaaugcgaaucacugauuuccaagaaaucaugguccuacauuguagaaacaccaaauccugagaauggagcauguuacccaggggaguucgccgacuaugaggagcuaagggagcaauugaguucaguaucuucauuugagagauucgagauauuccccaaagaaagcucauggcccaaccacacugcaaccggagugucagccucaugcucccauaauggggaaagaaguuuuuacagaaaucugauauggcugacagugaaaaaugguuuguacccaaaccugagcaaguccuaugaaaacgacaaagagaaagaaguccuuauacuaugggguguucaucauccgccuaacauagagaaccaaaggacccucuaucacacagaaaaugcuuaugucucuguagugucuucacauuauagcggaagauucaccccagaaauaaccaaaaggcccaaaguaagagaucaggaaggaagaaucaacuacuacuggacucugcuggaacccggggauacaauaauauuugaggcaaauggaaaucuaauagcgccaugguaugcuuucacacugaguagaggccuuggaucaggaaucauuaccucuaaugcaccaauggacgaaugugauucgaagugucaaacaccucaaggagcuauaaacagcagucuuccuuuccagaauguacacccagucacaauaggagaauguccaaaguaugucaggagugcaaaauuaaggaugguuacaggacuaaggaacaucccauccauucaauccagagguuuguuuggggccauugccgguuucauugaagggggguggacuggaaugguagaugggugguaugguuaucaucaucagaaugagcaaggaucuggauaugcugcagaucaagaaagcacacaaaaugccauuaacgggauuacaaacaaggugaauucuguaauugagaaaaugaacacucaauucacagcugugggcaaggaauucaacaaauuggaaagaaggauggaaaacuuaaacaaaaagguugaugauggguuucuagacauuuggacauacaaugcagaguuguugguucuacuggaaaaugaaagaacuuuggacuuccacgacuccaaugugaagagucuguacgagaaaguaaaaagccaauuaaagaauaaugcuaaagaaauagggaaugggugcuuugaauucuaucacaaguguaacaacgaaugcauggagagugugaaaaauggaacuuaugacuauccaaaauauuccgaagaaucaaaguuaaacagggaaaaaauugauggaguuaaauuggacucaaugggggucuaucggauucuggcgaucuacucaacugucgccaguucccugguucuuuuggucucccugggggcaaucagcuucuggauguguuccaaugggucuuugcaauguagaauaugcaucuag

SEQ ID NO: 38376 - RNA, 1698 nt, Artificial Sequence
  derived and/or modified CDS sequence (wt) from hemagglutinin__InfluenzaA__ADV69105
augaaaguaaaacuacugauccuguuauguacauuuacagcuacauaugcggacacaauauguauaggauaccaugccaacaacucaaccgacacuguugacacaguacuugaaaagaaugugacagugacacacucugucaaccuacuugaggacagucacaaugggaagcugugccuacuaaagggaauagccccccuacaauuggguaauugcagcguugccggauggauauuaggaaacccagaaugcgaaucacugauuuccaagaaaucaugguccuacauuguagaaacaccaaauccugagaauggagcauguuacccaggggaguucgccgacuaugaggagcuaagggagcaauugaguucaguaucuucauuugagagauucgaaauauuccccaaagaaagcucauggcccaaccacacugcagccggagugucagcaucaugcucccauaauggggaaagaaguuuuuacagaaaucugauauggcugacagugaaaaaugguuuguacccaaaccugagcaaguccuauaaaaacgacaaagagaaagaaguccuuauaauaugggguguucaucauccgccuaacauagagaaccaaaggacccucuaucacacagaaaaugcuuaugucucuguagugucuucacauuauagcggaagauucaccccagaaauaaccaaaaggcccaaaguaagagaucaggaaggaagaaucaacuacuacuggacucugcuggaacccggggauacaauaauauuugaggcaaauggaaaucuaauagcgccaugguaugcuuucacacugaguagaggccuuggaucaggaaucaucaccucuaaugcaccaauggacgaaugugaugcgaagugucaaacaccucagggagcuauaaacagcagucuuccuuuccagaauguacacccagucacaauaggagaauguccaaaguaugucaggagugcaaaauuaaggaugguuacaggacuaaggaacaucccauccauucaauccagagguuuguuuggggccauugccgguuucauugaagggggauggacuggaaugguagaugggugguaugguuaucaucaucagaaugagcagggaucuggcuaugcugcagaucaagaaagcacacaaaaugccauuaacgggauuacaaacaaggugaauucuguaauugaaaaaaugaacacccaauucacagcugugggcaaggaauucaacaaauuggaaagaaggauggaaaacuuaaauaaaaagguugaugauggguuucuagacauuuggacauacaaugcagaguuguugguucuacuggaaaaugaaagaacuuuggacuuccacgacuccaaugugaagagucuguacgagaaaguaaaaagccaauuaaagaauaaugcuaaagaaauagggaaugggugcuuugaauucuaucacaaguguaacaacgaaugcauggagagugugaaaaauggaacuuaugacuauccaaaauauuccgaagaaucaaaguuaaacagggaaaaaauugauggaguuaaauuggacucaaugggggucuaucggauucuggcgaucuacucaacugucgccaguucccuaguucuuuuggucucccugggggcaaucagcuucuggauguguuccaaugggucuuugcaauguagaauaugcaucuag

SEQ ID NO: 38377 - RNA, 1698 nt, Artificial Sequence
  derived and/or modified CDS sequence (wt) from hemagglutinin__InfluenzaA__ADV69106
augaaaguaaaacuacugauccuguuauguacauuuacagcuacauaugcggacacaauauguauaggcuaccaugccaacaacucaaccgacacaguugacacaguacuugagaaaaaugugacaguuacacacucugucaaccuacuugaggacagucacaauggaaagcugugccuacuaaagggaauagccccccuacaauuggguaauugcagcguugccggauggauauuaggaaacccagaaugcgaaucacugauuuccaagaagucaugguccuacauuguagaaacaccaaauccugggaauggagcauguuacccaggguauuucgccgacuaugaggagcuaagggagcaauugaguucaguaucuucauuugagagauucgaaauguuccccaaagaaagcucauggcccaaccacaacguaaacggaguaucagcaucaugcucccauaacgggaaaagcaguuuuuacaggaaucugcuauggcugacgaggaaaaaugguuuguauccaaaccugaccaaguccuaugcaaacaacaaugauaaagaaguccuuauacuaugggguguucaucacccgucuaacauaggggaccaaaggacccucuaucacacagaaaaugcuuaugucucuguaaugucuucacauuauagcagaagauucaccccagaaauaaccaaaaggcccaaaguaagagaucaggaaggaagaaucaacuacuacuggacucugcuagaacccggggauacaauaauauuugaggcaaaugggaaucuaauagcgccaugguaugcuuucgcacugaguagaagcuuuggaucaggaaucaucaccucaagugcaccaauggaugaaugugaugcgaagugucaaacaccucagggagcuauaaacagcagucuuccuuuccagaauguacacccagucacaauaggagaauguccaaaguaugucaggagugcaaaauuaaagaugguuacaggacuaaggaacaucccauccauucaauccagagguuuguuuggagccauugccgguuucauugaagggggguggacuggaaugguagaugggugguaugguuaucaucaucagaaugagcaaggaucuggcuaugcugcagaucaagaaagcacacaaaaugccauuaacgggauuacaaacaaggugaauucuguaauugagaaaaugaacacucaauucacagcugugggcaaagaauucaacaaauuggaaaaaaggauggaaaacuuaaauaaaaaaguugaugauggguuucuagacauuuggacauauaaugcagaguuguugguucuacuggaaaaugaaagaacuuuggauuuccacgacuccaaugugaaaagucuguacgagaaaguaaaaauccaauuaaagaauaaugccaaagaaauaggaaaugggugcuuugaauucuaucacaaguguaacaaugaaugcauggagagugugagaaauggaacuuaugacuauccaaaauauuccgaagaaucaaaguuaaacagggaaaaaauugauggagugaaauuggacucaaugggggucuaucagauucuggcgaucuacucaacugucgccaguucccugguucuuuuggucucccugggggcaaucagcuucuggauguguuccaaugggucuuugcaauguagaauaugcaucuaa

SEQ ID NO: 38378 - RNA, 1698 nt, Artificial Sequence
  derived and/or modified CDS sequence (wt) from hemagglutinin__InfluenzaA__ADV69107
augaaaguaaaacuacugauccuguuauguacauuuacagcuacauaugcggacacaauauguauaggauaccaugccaacaacucaaccgacacuguugacacaguacuugaaaagaaugugacagugacacacucugucaaccuacuugaggacagucacaauggaaagcugugccuacuaaagggaauagccccccuacaauuggguaauugcagcguugccggauggauauuaggaaacccagaaugcgaaucacugauuuccaaggaaucaugguccuacauuguagaaacaccuaauucugauaauggagcauguuacccagggcaguucaccgacuaugaggagcuaagggagcaauugaguucaguaucuucauuugagagauucgagauauuccccaaagaaagcucauggcccaaccacacuguaaccggagugucagcaucaugcucccauaauggggaaagaaguuuuuacagaaaucugauauggcugacagugaaaaaugguuuguacccaaaccugagcaaguccuaugaaaacgacaaagagaaagaaguccuuauauuaugggguguucaucauccgcccaacauaggggaccaaaggacacucuaucacacagaaaaugcuuauaucucuguagugucuucacauuauagcggaagauucaccccagaaauaaccaaaaggcccaaaguaagagaucaggaaggaagaaucaacuacuacuggacucugcuggaacccggggauacaauaauauuugaggcaaauggaaaucuaauagcgccaugguaugcuuucgcacugaguagaggccuuggaucaggaaucaucaccucuaaugcaccaauggacaaaugugaugcaaagugucaaacaccucagggagcuauaaacagcagucuuccuuuccagaauguacacccagucacaauaggagaauguccaaaauaugucaggaguacaaaauuaaggaugguuacaggacuaaggaacaucccauccauucaauccagagguuuguuuggggccauugccgguuucauugaagggggauggacuggaaugguagaugggugguaugguuaucaucaucagaaugagcaaggaucuggcuaugcugcagaucaagaaagcacacaaaaugccauuaacgggauuacaaacaaggugaauucuguaauugagaaaaugaacacucaauucacagcugugggcaaggaauucaacaaauuggaaagaaggauggaaaacuuaaauaaaaagguugaugauggguuucuagacauuuggacauacaaugcagaguuguugguucuacuggaaaaugaaagaacuuuggacuuccacgacuccaaugugaagagucuguacgagaaaguaaaaagccaauuaaagaauaaugcuaaagaaauaggaaaugggugcuuugaauucuaucacaaguguaacaacgaaugcauggagagugugagaaauggaacuuaugacuauccaaaauauuccgaagaaucaaaguuaaacagggaaaaaauugauggagugaaauuggacucaaugggggucuaucggauucuggcgaucuacucaacugccgccaguucccugguucuuuuggucucccugggggcaaucagcuuuuggauguguuccaaugggucuuugcaauguagaauaugcaucuaa

SEQ ID NO: 38379 - RNA, 1698 nt, Artificial Sequence
  derived and/or modified CDS sequence (wt) from hemagglutinin__InfluenzaA__ADV69108
augaaaguaaaacuacugguucuguuauguacauuuacagcuacauaugcagacacaauauguguaggcuaccaugccaacaacucaacugacacuguugacacaguacuugagaagaaugugacaguaacacacucugucaaccuacucgaggacagccacaauggaaaacuaugucuacuaaaaggaauagcuccacuacaauuggguaguugcagcguugccggauggaucuuaggaaacccagagugcgaauugcugauuuccaaggaaucaugguccuacauuguagaaacaccaaauccugagaauggaacauguuacccaggguauuucacagacuaugaagaacugagggagcaauugaguucaguaucuucauuuaagagguucgaaauauuccccaaagagagcucauggcccaaccacaccguaaccggagugucaucaucaugcucccauaacgggaaaagcagcuucuacagaaauuugcuauggcugacgaugaagaacgguuuguacccaaaccugagcaaguccuauacaaacaaaaaggagaaagaaguccuuguacuaugggguguucaucacccaucuaacauaggggaccaaagggcccucuaucauacagaaaaugcuuaugucucuguagugucuucacauuauagcagaagauucaccccagaaauagccaaaagacccaaggugagaaaucaggaaggaagaaucaacuacuacuggacucugcuagaacccgaggauacaauaauauuugaggcaaauggaaaucuaauagcaccaagguaugccuucgaacugaguaaggguuuuggaucaggaaucaucacaucaaaugcaccaaugggugaauguaaugcaaagugucaaacaccucagggagcuauaaacagcagucuuccuuuccagaauguacacccaguaacaauaggagaguguccaaaguaugucaggaguucaaaauuaaggaugguuacaggacuaaggaacaccccauccauucaauccagagguuuguuuggagccauugccgguuucauugaaggaggguggacuggaaugguagaugguugguaugguuaucaucaucagaaugagcaaggaucuggauaugcugcagaccaacaaagcacacaaaaugccauuaaugggauuacaaacaaggugaauucuguaauugaaaaaaugaacacucaauucacagcugugggcaaagaauucaacaaauuggaaagaagaauggaaaacuuaaauaaaaagauugaugauggguuucuagacauuuggacauauaaugcagaauuguuaguucuacuggaaaaugaaaggacuuuggauuuccaugacuccaacgugaagaaucuguaugagaaaguaaaaagccaauuaaaaaauaaugccaaagaaauaggaaacggguguuuugaauucuaucauaaguguaacgaugaaugcauggagagugugaaaaauggaacuuaugacuauccaaaauauuccgaagaaucaaaguuaaacagggagaaaauugauggagugaaauuggaaucaaugggagucuauaauauccuggcgaucuacucaacagucgccaguucccuaguucuuuuagucucccugggggcaaucagcuucuggauguguuccaaugggucuuuacaguguagaauaugcaucuaa

SEQ ID NO: 38380 - RNA, 1698 nt, Artificial Sequence
  derived and/or modified CDS sequence (wt) from hemagglutinin__InfluenzaA__ADV69109
augaaaguaaaacuacugauccuguuauguacauuuaaagcuacauaugcggacacaauauguauaggauaccaugccaacaacucaaccgaaacuguugacacaguacuugaaaagaaugugacagugacacacucugucaaccuacuugaggacagucacaaugggaagcugugccuacuaaagggaauagccccccuacaauuggguaauugcagcguugccggauggauauuaggaaacccagaaugcgaaucacugauuuccaagaaaucaugguccuacauuguagaaacaccaaauccugagaauggagcauguuauccaggggaguuugccgacuaugaggagcuaagggagcaauugaguucaguaucuucauuugagagauucgaaauauuccccaaagaaagcucauggcccaaccacacugcaaccggagugucagcgucaugcucccauaauggggaaagaaguuuuuacagaaaucugauauggcugacagugaaaaaugguuuguacccaaaccugagcaaguccuaugaaaacgacaaaaagaaagaaguccuuauacuaugggguguucaucauccgccuaacauagagaaccaaaggacccucuaucacacagaaaaugcuuaugucucuguagugucuucacauuauaguggaagauucaccccagaaauaaccaaaaggcccaaaguaagagaucaggaaggaagaaucaacuacuacuggacuuugcuggaacccggggauacaauaauauuugaggcaaauggaaaucuaauagcgccaugguaugcuuucacacugaguagaggccuuggaucaggaaucaucaccucuaaugcaccaauggacgaaugugaugcgaagugucaaacaccuaagggagcuauaaacagcagucuuccuuuccagaauguacacccagucacaauaggagaauguccaaaguaugucaggagugcaaaauuaaggaugguuacaggacuaaggaacaucccauccauucaauccagagguuuguuuggggccauugccgguuucauugaagggggguggacuggaaugguagaugggugguaugguuaucaucaucagaaugagcagggaucuggcuaugcugcagaucaagaaagcacacaaaaugccauuaacgggaucacaaacaaagugaauucuguaauugagaaaaugaacacucaauucacagcugugggcaaggaauucaacaaauuggaaagaaggauggagaacuuaaauaaaaagguugaugauggguuucuagacauuuggacauacaaugcagaguuguugguuuuacuggaaaaugaaagaacuuuggacuuccacgacuccaaugugaagagucuguacgagaaaguaaaaagccaauuaaagaauaaugcuaaagaaauagggaaugggugcuuugaauucuaucacaaguguaacaacgaaugcauggagagugugaaaaauggaacuuaugacuauccaaaauauuccgaagaaucaaaguuaaacagggaaaaaauugauggaguuaaauuggacucaaugggggucuaucggauucuggcgaucuacucaacugucgccaguucccuaguucuuuuggucucccugggggcaaucagcuucuggauguguuccaaugggucuuugcaauguagaauaugcaucuag

SEQ ID NO: 38381 - RNA, 1701 nt, Artificial Sequence
  derived and/or modified CDS sequence (wt) from hemagglutinin__InfluenzaA__ADV76579
augaagacuaucauugcuuugagcuacauucuaugucugguuuucgcucaaaaacuuccuggaaaugacgacagcacggcaacucugugccuugggcaccaugcaguaccaaacggaacgauagugaaaacaauaacgaaugaccaaauugaaguuacuaaugcuacugagcugguucagaguuccucaacaggugaaauaugcgacaguccucaucagauccuugauggagaaaacugcacacuaauagaugcucuauugggagacccucagugugauggcuuccaaaauaagaaaugggaccuuuuuguugaacgcagcaaagccuacagcaacuguuacccuuaugaugugccggauuaugccucccuuaggucacuaguugccucauccggcacacuggaguuuaacaaugaaagcuucaauuggacuggagucacucaaaauggaacaagcucugcuugcauaaggagaucuaauaacaguuucuuuaguagauuaaauugguugacccacuuaagauucaaguacccagcauugaacgugacuaugccaaacaaugaacaauuugacaaauuguacauuugggggguucaccacccggguacggacaaugaccaaaucuuccuguaugcucaagcaucaggaagaaucacagucucuaccaaaagaagccaacaaacuguaaucccgaauaucggaucuagacccagaguaaggaauaucccuagcagaauaagcaucuauuggacaauaguaaaaccgggagacauacuuuugauuaacagcacagggaaucuaauugcuccuagggguuacuucaaaauacgaagugggaaaagcucaauaaugagaucagaugcacccauuggcaaaugcaauucugaaugcaucacaccaaauggaagcauucccaaugacaaaccauuccaaaauguaaacaggaucacauacggggccugucccagauauguuaagcaaaacacucugaaauuggcaacagggaugcgaaauguaccagagaaacaaacuagaggcauauuuggcgcaaucgcggguuucauagaaaaugguugggagggaaugguggaugguugguacgguuucaggcaucaaaauucugagggaagaggacaagcagcagaucucaaaagcacucaagcagcaaucgaucaaaucaaugggaagcugaauagauugaucggaaaaaccaacgagaaauuccaucagauugaaaaagaauucucagaagucgaagggagaauucaggaccuugagaaauauguugaggacaccaaaauagaucucuggucauacaacgcggagcuucuuguugcccuggagaaccaacauacaauugaucuaacugacucagaaaugaacaaacuguuugaaaaaacaaagaagcaacugagggaaaaugcugaggauaugggcaaugguuguuucaaaauauaccacaaaugugacaaugccugcauaggaucaaucagaaauggaacuuaugaccacgauguauacagagaugaagcauuaaacaaccgguuccagaucaagggaguugagcugaagucaggguacaaagauuggauccuauggauuuccuuugccauaucauguuuuuugcuuuguguugcuuuguugggguucaucaugugggccugccaaaaaggcaacauuaggugcaacauuugcauuuga

SEQ ID NO: 38382 - RNA, 1701 nt, Artificial Sequence; identical to SEQ ID NO: 35600
  derived and/or modified CDS sequence (wt) from hemagglutinin__InfluenzaA__ADV76587

SEQ ID NO: 38383 - RNA, 1701 nt, Artificial Sequence; identical to SEQ ID NO: 35600
  derived and/or modified CDS sequence (wt) from hemagglutinin__InfluenzaA__ADV76598

SEQ ID NO: 38384 - RNA, 1701 nt, Artificial Sequence
  derived and/or modified CDS sequence (wt) from hemagglutinin__InfluenzaA__ADV76609
augaagacuaucauugcuuugagcuacauucuaugucugguuuucgcucaaaaacuuccuggaaaugacaacagcacggcaacgcugugccuugggcaccaugcaguaccaaacggaacgauagugaaaacaaucacgaaugaccaaauugaaguuacuaaugcuacugagcugguucagaguuccucaacaggugaaauaugcgacaguccucaucagauccuugauggagaaaacugcacacuaauagaugcucuauugggagacccucagugugauggcuuccaaaauaagaaaugggaccuuuuuguugaacgaagcaaagccuacagcaacuguuacccuuaugaugugccggauuaugccucccuuaggucacuaguugccucauccggcacacuggaguuuaacaaugaaagcuucaauuggacuggagucacucaaaacggaacaagcucugcuugcauaaggagaucuaauaauaguuucuuuaguagauugaauugguugacccacuuaaacuucaaauacccagcauugaacgugacuaugccaaacaaugaacaauuugacaaauuguacauuugggggguucaccacccggguacggacaaggaccaaaucuuccuguaugcucaagcaucaggaagaaucacaguaucuaccaaaagaagccaacaagcuguaaucccgaauaucggaucuagacccagaguaaggaauaucccuagcagaauaagcaucuauuggacaauaguaaagccgggagacauacuuuugauuaacagcacagggaaucuaauugcuccuagggguuacuucaaaauacgaagugggaaaagcucaauaaugagaucagaugcacccauuggcaaaugcaauucugaaugcaucacuccaaauggaagcauucccaaugacaaaccauuccaaaauguaaacaggaucacauacggggccugucccagauauguuaagcaaaacacucugaaauuggcaacaggaaugcgaaauguaccagagaaacaaacuagaggcauauuuggcgcaauagcggguuucauagaaaaugguugggagggaaugguggaugguugguacgguuucaggcaucaaaauucugagggaagaggacaagcagcagaucucaaaagcacucaagcagcaaucgaucaaaucaaugggaagcugaauagauugaucgggaaaaccaacgagaaauuccaucagauugaaaaagaauucucagaagucgaagggagaauucaggaccuugagaaauauguugaggacacuaaaauagaucucuggucauacaacgcggagcuucuuguugcccuggagaaccaacauacaauugaucuaacugacucagaaaugaacaaacuguuugaaaaaacaaagaagcaacugagggaaaaugcugaggauaugggcaaugguuguuucaaaauauaccacaaaugugacaaugccugcauaggaucaaucagaaauggaacuuaugaccacgauguauacagagaugaagcauuaaacaaccgguuccagaucaagggaguugagcugaagucaggguacaaagauuggauccuauggauuuccuuugccauaucauguuuuuugcuuuguguugcuuuguugggguucaucaugugggccugccaaaaaggcaacauuaggugcaacauuugcauuuga

SEQ ID NO: 38385 - RNA, 1701 nt, Artificial Sequence
  derived and/or modified CDS sequence (wt) from hemagglutinin__InfluenzaA__ADV76620
augaagacuaucauugcuuugagcuacauucuaugucugguuuucgcucaaaaacuuccuggaaaugacaacagcacggcaacgcugugccuugggcaccaugcaguaccaaacggaacgauagugaaaacaaucacgaaugaccaaauugaaguuacuaaugcuacugagcugguucagaguuccucaacaggugaaauaugcgacaguccucaucagauccuugauggaaaaaacugcacacuaauagaugcucuauugggagacccucagugugauggcuuccaaaauaagaaaugggaccuuuuuguugaacgcagcaaagccuacagcaacuguuacccuuaugaugugccggauuaugccucccuuaggucacuaguugccucauccggcacacuggaguuuaacaaugaaagcuucaauuggacuggagucacucaagacggaacaagcucugcuugcauaaggagaucuaaaaacaguuucuuuaguagauugaauugguugacccacuuaaacuucaaauacccagcauugaacgugacuaugccaaacaaugaacaauuugacaaauuguacauuugggggguucaccacccggguacggacaaagaccaaaucuuccuguaugcucaagcaucaggaagaaucacagucucuaccaaaagaagccaacaaacugcaaucccgaauaucggaucuagacccagaguaaggaauaucccuagcagaauaagcaucuauuggacaauaguaaaaccgggagacauacuuuugauuaacagcacagggaaucuaauugcuccuagggguuacuucaaaauacgaaguggaaaaagcucaauaaugagaucagaugcacccauuggcaaaugcaauucugaaugcaucacuccaaauggaagcauucccaaugacaaaccauuccaaaauguaaacaggaucacauacggggccugucccagauauguuaagcaaaacacucugaaauuggcaacagggaugcgaaauguaccagagaaacaaacuagagguauauuuggcgcaaucgcggguuucauagaaaaugguugggagggaaugguggaugguugguacgguuucaggcaucaaaauucugagggaagaggacaagcagcagaucucaaaagcacucaagcagcaaucgaucaaaucaauggaaagcugaauagauugaucgggaaaaccaacgagaaauuccaucagauugaaaaagaauucucagaagucgaagggagaauucaggaccuugagaaauauguugaggacacuaaaauagaucucuggucauacaacgcggagcuucuuguugcccuggagaaccaacauacaauugaucuaacugacucagaaaugaacaaacuguuugaaaaaacaaagaagcaacugagggaaaaugcugaggauaugggcaaugguuguuucaaaauauaccacaaaugugacaaugccugcauaggaucaaucagaaauggaacuuaugaccacgauguauacagagaugaagcauuaaacaaccgguuucagaucaagggaguugagcugaagucaggguacaaagauuggauccuauggauuuccuuugccauaucauguuuuuugcuuuguguugcuuuguugggguucaucaugugggccugccaaaaaggcaacauuaggugcaacauuugcauuuga

SEQ ID NO: 38386 - RNA, 1701 nt, Artificial Sequence
  derived and/or modified CDS sequence (wt) from hemagglutinin__InfluenzaA__ADV76631
augaagacuaucauugcuuugagcuacauucuaugucugguuuucgcucaaaaacuuccuggaaaugacaacagcacggcaacgcugugccuugggcaccaugcaguaccaaacggaacgauagugaaaacaaucacgaaugaccaaauugaaguuacuaaugcuacugagcugguucagaguuccucaacaggugaaauaugcgacaguccucaucagauccuugauggaaaaaacugcacacuaauagaugcucuauugggagacccucagugugauggcuuccaaaauaagaaaugggaccuuuuuguugaacgcagcaaagccuacagcaacuguuacccuuaugaugugccggauuaugccucccuuaggucacuaguugccucauccggcacacuggaguuuaacaaugaaagcuucaauuggacuggagucacucaaaacggaacaagcucugcuugcauaaggagaucuaaaaacaguuucuuuaguagauugaauugguugacccacuuaaacuucaaauacccagcauugaacgugacuaugccaaacaaugaacaauuugacaaauuguacauuugggggguucaccacccggguacggacaaagaccaaaucuuccuguaugcucaagcaucaggaagaaucacagucucuaccaaaagaagccaacaaacuguaaucccgaauaucggaucuagacccagaguaaggaauaucccuagcagaauaagcaucuauuggacaaugguaaaaccgggagacauacuuuugauuaacagcacagggaaucuaauugcuccuagggguuacuucaaaauacgaagugggaaaagcucaauaaugagaucagauacacccauuggcaaaugcaauucugaaugcaucacuccaaauggaagcauucccaaugacaaaccauuccaaaauguaaacaggaucacauacggggccugucccagauauguuaagcaaaacacucugaaauuggcaacagggaugcgaaauguaccagagaaacaaacuagaggcauauuuggcgcaaucgcggguuucauagaaaaugguugggagggaaugguggaugguugguacgguuucaggcaucaaaauucugagggaagaggacaagcagcagaucucaaaagcacucaagcagcaaucgaucaaaucaauggaaagcugaauagauugaucgggaaagccaacgagaaauuccaucagauugaaaaagaauucucagaagucgaagggagaauucaggaccuugagaaauauguugaggacacuaaaauagaucucuggucauacaacgcggagcuucuuguugcccuggagaaccaacauacaauugaucuaacugacucagaaaugaacaaacuguuugaaaaaacaaagaagcaacugagggaaaaugcugaggauaugggcaaugguuguuucaaaauauaccacaaaugugacaaugccugcauaggaucaaucagaaauggaacuuaugaccacgauguauacagagaugaagcauuaaacaaccgguuucagaucaagggaguugagcugaagucaggguacaaagauuggauccuauggauuuccuuugccauaucauguuuuuugcuuuguguugcuuuguugggguucaucaugugggccugccaaaaaggcaacauuaggugcaacauuugcauuuga

SEQ ID NO: 38387 - RNA, 1701 nt, Artificial Sequence; identical to SEQ ID NO: 37604
  derived and/or modified CDS sequence (wt) from hemagglutinin__InfluenzaA__ADV76642

SEQ ID NO: 38388 - RNA, 1701 nt, Artificial Sequence; identical to SEQ ID NO: 37608
  derived and/or modified CDS sequence (wt) from hemagglutinin__InfluenzaA__ADV76664

SEQ ID NO: 38389 - RNA, 1701 nt, Artificial Sequence
  derived and/or modified CDS sequence (wt) from hemagglutinin__InfluenzaA__ADV76673
augaagaccaucauugcuuugagcuacauuuucugucuggcucucggccaagaccuuccaggaaaugacaacagcacagcaacgcugugccugggacaucaugcggugccaaacggaacacuagugaaaacaaucacagaugaucagauugaagugacuaaugcuacugagcuaguucagagcuccucaacggggaaaauaugcaacaauccucaucgaauccuugauggaauagacugcacacugauagaugcucuauugggggacccucauugugauguuuuucaaaaugagacaugggaccuuuucguugaacgcagcaaagcuuucagcaacuguuacccuuaugaugugccagauuaugccucccuuaggucacuaguugccucgucaggcacucuggaguuuaucacugaggguuucacuuggacuggggucacucagaaugggggaagcaaugcuugcaaaaggggaccugguagcgguuuuuucaguagacugaacugguugaccaaaucaggaagcacauauccagugcugaacgugacuaugccaaacaaugacaauuuugacaaacuauacauuugggggguucaccacccgagcacgaaccaagaacaaaccagccuguauguucaagcaucagggagagucacagucucuaccaggagaagccagcaaacuauaaucccgaauaucgaguccagacccuggguaaggggucugucuaguagaauaagcaucuauuggacaauaguuaauccgggagacguacugguaauuaauaguaaugggaaccuaaucgcuccucgggguuauuucaaaaugcgcacugggaaaagcucaauaaugaggucagaugcaccuauugauaccuguauuucugaaugcaucacuccaaauggaagcauucccaaugacaagcccuuucaaaacguaaacaagaucacauauggagcaugccccaaguauguuaagcaaaacacccugaaguuggcaacagggaugcggaauguaccagagaaacaaacuagaggccuauucggcgcaaaagcagguuucauagaaaaugguugggagggaaugauagacgguugguacgguuucaggcaucaaaauucugagggcacaggacaagcagcagaucuuaaaagcacucaagcagccaucgaccaaaucaaugggaaauugaacaggguaaucgagaagacgaacgagaaauuccaucaaaucgaaaaggaauucucagaaguagaagggagaauucaggaccucgagaaauacguugaagacacuaaaauagaucucuggucuuacaaugcggagcuucuugucgcucuggagaaucaacauacaauugaccugacugacucggaaaugaacaagcuguuugaaaaaacaaggaggcaacugagggaaaaugcugaagacaugggcaaugguugcuucaaaauauaccacaaaugugacaacgcuugcauagagucaaucagaaaugggacuuaugaccaugauguauacagagacgaagcauuaaacaaccgguuucagaucaaagguguugaacugaagucuggauacaaagacuggauccuguggauuuccuuugccauaucaugcuuuuugcuuuguguuguuuugcugggguucaucaugugggccugccagagaggcaacauuaggugcaacauuugcauuuga

SEQ ID NO: 38390 - RNA, 1701 nt, Artificial Sequence
  derived and/or modified CDS sequence (wt) from hemagglutinin__InfluenzaA__ADV76682
augaagacuaucauugcuuugagcuacauucuaugucugguuuucgcucaaaaacuuccuggaaaugacaacagcacggcaacgcugugccuugggcaccaugcaguaccaaacggaacgauagugaaaacaaucacgaaugaccaaauugaaguuacuaaugcuacugagcugguucagaguuccucaacaggugaaauaugcgacaguccucaucagauccuugauggagaaaacugcacacuaauagaugcucuauugggagacccucagugugauggcuuccaaaauaagaaaugggaccuuuuuguugaacgaagcaaagccuacagcaacuguuacccuuaugaugugccggauuaugccucccuuaggucacuaguugccucauccggcacacuggaguuuaacaaugaaagcuucaauuggacuggagucacucaaaacggaacaagcucugcuugcauaaggagaucuaauaauaguuucuuuaguagauugaauugguugacccacuuaaacuucaaauacccagcauugaacgugacuaugccaaacaaugaacaauuugacaaauuguacauuugggggguucaccacccggguacggacaaggaccaaaucuuccuguaugcucaagcaucaggaagaaucacaguaucuaccaaaagaagccaacaagcuguaaucccgaauaucggaucuagacccagaguaaggaauaucccuagcagaauaagcaucuauuggacaauaguaaaaccgggagacauacuuuugauuaacagcacagggaaucuaauugcuccuagggguuacuucaaaauacgaaguggggaaagcucaauaaugagaucagaugcacccauuggcaaaugcaauucugaaugcaucacuccaaauggaagcauucccaaugacaaaccauuccaaaauguaaacaggaucacauacggggccugucccagauauguuaagcaaaacacucugaaauuggcaacaggaaugcgaaauguaccagagaaacaaacuagaggcauauuuggcgcaauagcggguuucauagaaaaugguugggagggaaugguggaugguugguacgguuucaggcaucaaaauucugagggaagaggacaagcagcagaucucaaaagcacucaagcagcaaucgaucaaaucaaugggaagcugaauagauugaucgggaaaaccaacgagaaauuccaucagauugaaaaagaauucucagaagucgaagggagaauucaggaccuugagaaauauguugaggacacuaaaauagaucucuggucauacaacgcggagcuucuuguugcccuggagaaccaacauacaauugaucuaacugacucagaaaugaacaaacuguuugaaaaaacaaagaagcaacugagggaaaaugcugaggauaugggcaaugguuguuucaaaauauaucacaaaugugacaaugccugcauaggaucaaucagaaauggaacuuaugaccacgauguauacagagaugaagcauuaaacaaccgguuccagaucaagggaguugagcugaagucaggguacaaagauuggauccuauggauuuccuuugccauaucauguuuuuugcuuuguguugcuuuguugggguucaucaugugggccugccaaaaaggcaacauuaggugcaacauuugcauuuga

SEQ ID NO: 38391 - RNA, 1701 nt, Artificial Sequence
  derived and/or modified CDS sequence (wt) from hemagglutinin__InfluenzaA__ADV76694
augaagacuaucauugcuuugagcuacauucuaugucugguuuucgcucaaaaacuuccuggaaaugacaacagcacggcaacgcugugccuugggcaccaugcaguaccaaacggaacgauagugaaaacaaucacgaaugaccaaauugaaguuacuaaugcuacugagcugguucagaguuccucaacaggugaaauaugcgacaguccucaucagauccuugauggaaaaaacugcacacuaauagaugcucuauugggagacccucagugugauggcuuccaaaauaagaaaugggaccuuuuuguugaacgcagcaaagccuacagcaacuguuacccuuaugaugugccggauuaugccucccuuaggucacuaguugccucauccggcacacuggaguuuaacaaugaaagcuucaauuggacuggagucacucaaaacggaacaagcucugcuugcauaaggagaucuaaaaacaguuucuuuaguagauugaauugguugacccacuuaaacuucaaauacccagcauugaacgugacuaugccaaacaaugaacaauuugacaaauuguacauuugggggguucaccacccggguacagacaaagaccaaaucuuccuguaugcucaagcaucaggaagaaucacagucucuaccaaaagaagccaacaaacugcaaucccgaauaucggaucuagacccagaguaaggaauaucccuagcagaauaagcaucuauuggacaauaguaaaaccgggagacauacuuuugauuaacagcacagggaaucuaauugcuccuagggguuacuucaaaauacgaagugggaaaagcucaauaaugagaucagaugcacccauuggcaaaugcaauucugaaugcaucacuccaaauggaagcauucccaaugacaaaccauuccaaaauguaaacaggaucacauacggggccugucccagauauguuaagcaaaacacucugaaauuggcaacagggaugcgaaauguaccagagaaacaaacuagaggcauauuuggcgcaaucgcggguuucauagaaaaugguugggagggaaugguggaugguugguacgguuucaggcaucaaaauucugagggaagaggacaagcagcagaucucaaaagcacucaagcagcaaucgaucaaaucaaugggaagcugaauagauugaucgggaaaaccaacgagaaauuccaucagauugaaaaagaauucucagaagucgaagggagaauucaggaccuugagaaauauguugaggacacuaaaauagaucucuggucauacaacgcggagcuucuuguugcccuggagaaccaacauacaauugaucuaacugacucagaaaugaacaaacuguuugaaaaaacaaagaagcaacugagggaaaaugcugaggauaugggcaaugguuguuucaaaauauaccacaaaugugacaaugccugcauaggaucaaucagaaauggaacuuaugaccacgauguauacagagaugaagcauuaaacaaccgguuucagaucaagggaguugagcugaagucaggguacaaagauuggauccuauggauuuccuuugccauaucauguuuuuugcuuuguguugcuuuguugggguucaucaugugggccugccaaaaaggcaacauuaggugcaacauuugcauuuga

SEQ ID NO: 38392 - RNA, 1701 nt, Artificial Sequence
  derived and/or modified CDS sequence (wt) from hemagglutinin__InfluenzaA__ADV76705
augaagacuaucauugcuuugagcuacauucuaugucugguuuucgcucaaaaacuuccuggaaaugacaacagcacggcaacgcugugccuugggcaccaugcaguaccaaacggaacgauagugaaaacaaucacgaaugaccaaauugaaguuacuaaugcuacugagcugguucagaguuccucaacaggugaaauaugcgacaguccucaucagauccuugauggagaaaacugcacacuaauagaugcucuauugggagacccucagugugauggcuuccaaaauaagaaaugggaccuuuuuguugaacgaagcaaagccuacagcaacuguuacccuuaugaugugccggauuaugccucccuuaggucacuaguugccucauccggcacacuggaguuuaacaaugaaagcuucaauuggacuggagucacucaaaacggaacaagcucugcuugcauaaggagaucuaauaauaguuucuuuaguagauugaauugguugacccacuuaaacuucaaauacccagcauugaacgugacuaugccaaacaaugaacaauuugacaaauuguacauuugggggguucaccacccggguacggacaaggaccaaaucuuccuguaugcucaagcaucaggaagaaucacaguaucuaccaaaagaagccaacaagcuguaaucccgaauaucggaucuagacccagaguaaggaauaucccuagcagaauaagcaucuauuggacaauaguaaaaccgggagacauacuuuugauuaacagcacagggaaucuaauugcuccuagggguuacuucaaaauacgaagugggaaaagcucaauaaugagaucagaugcacccauuggcaaaugcaauucugaaugcaucacuccaaauggaagcauucccaaugacaaaccauuccaaaauguaaacaggaucacauacggggccugucccagauauguuaagcaaaacacucugaaauuggcaacaggaaugcgaaauguaccagagaaacaaacuagaggcauauuuggcgcaauagcggguuucauagaaaaugguugggagggaaugguggaugguugguacgguuucaggcaucaaaauucugagggaagaggacaagcagcagaucucaaaagcacucaagcagcaaucgaucaaaucaaugggaagcugaauagauugaucgggaaaaccaacgagaaauuccaucagauugaaaaagaauucucagaagucgaagggagaauucaggaccuugagaaauauguugaggacacuaaaauagaucucuggucauacaacgcggagcuucuuguugcccuggagaaccaacauacaauugaucugacugacucagaaaugaacaaacuguuugaaaaaacaaagaagcaacugagggaaaaugcugaggauaugggcaaugguuguuucaaaauauaccacaaaugugacaaugccugcauaggaucaaucagaaauggaacuuaugaccacgauguauacagagaugaagcauuaaacaaccgguuccagaucaagggaguugagcugaagucaggguacaaagauuggauccuauggauuuccuuugccauaucauguuuuuugcuuuguguugcuuuguugggguucaucaugugggccugccaaaaaggcaacauuaggugcaacauuugcauuuga

SEQ ID NO: 38393 - RNA, 1701 nt, Artificial Sequence; identical to SEQ ID NO: 35625
  derived and/or modified CDS sequence (wt) from hemagglutinin__InfluenzaA__ADV76716

SEQ ID NO: 38394 - RNA, 1701 nt, Artificial Sequence
  derived and/or modified CDS sequence (wt) from hemagglutinin__InfluenzaA__ADV76727
augaagacuaucauugcuuugagcuacauucuaugucugguuuucgcucaaaaacuuccuggaaaugacaacagcacggcaacgcugugccuugggcaccaugcaguaccaaacggaacgauagugaaaacaaucacgaaugaccaaauugaaguuacuaaugcuacugagcugguucagaguuccucaacaggugaaauaugcgacaguccucaucagauccuugauggaaaaaacugcacacuaauagaugcucuauugggagacccucagugugauggcuuccaaaauaagaaaugggaccuuuuuguugaacgcagcaaagccuacagcaacuguuacccuuaugaugugccggauuaugccucccuuaggucacuaguugccucauccggcacacuggaguuuaacaaugaaagcuucaauuggacuggagucacucaaaacggaaaaagcucugcuugcauaaggagaucuaaaaacaguuucuuuaguagauugaauugguugacccacuuaaacuucaaauacccagcauugaacgugacuaugccaaacaaugaacaauuugacaaauuguacauuugggggguucaccacccggguacggacaaagaccaaaucuuccuguaugcucaagcaucaggaagaaucacagucucuaccaaaagaagccaacaaacuguaaucccgaauaucggaucuagacccagaguaaggaauaucccuagcagaauaagcaucuauuggacaauaguaaaaccgggagacauacuuuugauuaacagcacagggaaucuaauugcuccuagggguuacuucaaaauacgaaguggaaaaagcucaauaaugagaucagaugcacccauuggcaaaugcaauucugaaugcaucacuccaaauggaagcauucccaaugacaaaccauuccaaaauguaaacaggaucacauacggggccugucccagauauguuaagcaaaacacucugaaauuggcaacagggaugcgaaauguaccagagaaacaaacuagaggcauauuuggcgcaaucgcggguuucauagaaaaugguugggagggaaugguggaugguugguacgguuucaggcaucaaaauucugagggaaggggacaagcagcagaucucaaaagcacucaagcagcaaucgaucaaaucaaugggaagcugaauagauugaucgggaaaaccaacgagaaauuccaucagauugaaaaagaauucucagaagucgaagggagaauucaggaccuugagaaauauguugaggacacuaaaauagaucucuggucauacaacgcggagcuucuuguugcccuggagaaccaacauacaauugaucuaacugacucagaaaugaacaaacuguuugaaaaaacaaagaagcaacugagggaaaaugcugaggauaugggcaaugguuguuucaaaauauaccacaaaugugacaaugccugcauaggaucaaucagaaauggaacuuaugaccacgauguauacagagaugaagcauuaaacaaccgguuucagaucaagggaguugagcugaagucaggguacaaagauuggauccuauggauuuccuuugccauaucauguuuuuugcuuuguguugcuuuguugggguucaucaugugggccugccaaaaaggcaacauuaggugcaacauuugcauuuga

SEQ ID NO: 38395 - RNA, 1701 nt, Artificial Sequence
  derived and/or modified CDS sequence (wt) from hemagglutinin__InfluenzaA__ADV91009
augaaggcaauacuagcaguucugcuauauacauuugcaaccgcaaaugcagacacauuauguauagguuaucaugcgaacaauucaacagacacuguagacacaguacuagaaaagaauguaacaguaacacacucuguuaaccuucuagaagacaagcauaacgggaaacuaugcaaacuaagagggauagccccauugcauuuggguaaauguaacauugcuggcuggauccugggaaauccagagugugaaucacucuccacagcaagcucaugguccuacauuguggaaacaccuaguucagacaauggaacguguuacccaggagauuucaucgauuaugaggagcuaagagagcaauugagcucagugucaucauuugaaagguuugagauauuccccaagacaaguucauggcccaaucaugacucgaacaaagguguaacggcagcauguccucaugcuggagcaaaaagcuucuacaaaaauuuaauauggcuaguuaaaaaaggaaauucauacccaaagcucagcaaauccuacauuaaugauaaagggaaaaaaguccucgugcuauggggcauucaccauccaucuacuagugcugaccaacaaagucucuaucagaaugcagaugcauauguuuuuguggggacaucaagauacagcaagaaguucaagccggaaauagcaauaagacccaaagugagggaucaagaagggagaaugaacuauuacuggacacuaguagagccgggagacaaaauaacauucgaagcaacuggaaaucuagugguaccgagauaugcauucgcaauggaaagaaaugcuggaucugguauuaucauuucagauacaccaguccacgauugcaauacaacuugccagacacccaagggugcuauaaacaccagccucccauuucagaauauacauccgaucacaauuggaaaauguccaaaauauguagaaagcacaaaauugagacuggccacaggauugaggaaugucccgucuauucaaucuagaggccuauuuggggccauugccgguuucauugaagggggguggacaggaaugguagauggaugguacgguuaucaccaucaaaaugagcaggggucaggauaugcagccgacuugaagagcacacagaaugccauugacaagauuacuaacaaaguaaauucugucauugaaaagaugaauacacaguucacagcaguagguaaagaguucaaccaccuggaaaaaagaauagagaauuuaaauaaaaaaguugaugaugguuuccuggacauuuggacuuacaaugccgaacuguugguucuauuggaaaaugaaagaacuuuggacuaccacgauucaaaugugaagaacuuauaugaaaaaguaagaagucaguuaaaaaacaaugccaaggaaauuggaaacggcugcuuugaauuuuaccacaaaugcgauaacacgugcauggaaagugucaaaaaugggacuuaugacuacccaaaauacucagaagaagcaaaauuaaacagagaagaaauagaugggguaaagcuggaaucaacaaggauuuaccagauuuuggcgaucuauucaacugucgccaguucauugguacugguagucucccugggggcaaucaguuucuggaugugcucuaaugggucucuacaguguagaauauguauuuaa

SEQ ID NO: 38396 - RNA, 1701 nt, Artificial Sequence
  derived and/or modified CDS sequence (wt) from hemagglutinin__InfluenzaA__ADV91010
augaaggcaauacuaguaguucugcuauauacauuugcaaccgcaaaugcagacacauuauguauagguuaucaugcgaacaauucaacagacacuguagacacaguacuagaaaagaauguaacaguaacacacucuguuaaccuucuagaagacaagcauaacgggaaacuaugcaaacuaagagggguagccccauugcauuuggguaaauguaacauugcuggcuggauccugggaaauccagagugugaaucacucuccacagcaagcucaugguccuacauuguggaaacaucuaguucagacaauggaacguguuacccaggagauuucaccgauuaugaggagcuaagagagcaauugagcucagugucaucauuugaaagguuugagauauuccccaagacaaguucauggcccaaucaugacucgaacaaagguguaacgacagcauguccucaugcuggagcaaaaagcuucuacaaaaauuuaauauggcuaguuaaaaaaggaaauucauacccaaaacucagcaaauccuacauuaaugauaaagggaaagaaguccucgugcuauggggcauucaccauccaccuacuagugcugaccaacaaagucucuaucagaaugcagaugcauauguuuuuguggggacaucaagauacagcaagaaguucaagccggaaauagcaauaagacccaaagugagggaucaagaagggagaaugaacuauuacuggacacuaguagagccgggagacaaaauaacauucgaagcaacuggaaaucuagugguaccgagauaugcauucgcaauggaaagaaaugcuggaucugguauuaucauuucagauacaccaguccacgauugcaauacaacuugucagacacccaagggugcuauaaacaccagccuuccauuucagaauauacauccgaucacaauuggaaaauguccaaaauauguaaaaagcacaaaauugagacuggccacaggauugaggaaugucccgucuauucaaucuagaggccuauuuggggccauugccgguuucauugaagggggguggacagggaugguagauggaugguacgguuaucaccaucaaaaugagcaggggucaggguaugcagccgaccugaagagcacacagaaugccauugacgagauuacuaacaaaguaaauucuguuauugaaaagaugaauacacaguucacagcaguagguaaagaguucaaccaccuggaaaaaagaauagagaauuuaaauaaaaaaguugaugaugguuuccuggacauuuggacuuacaaugccgaacuguugguucuauuggaaaaugaaagaacuuuggacuaccacgauucaaaugugaagaacuuauaugaaaagguaagaagccaguuaaaaaacaaugccaaggaaauuggaaacggcugcuuugaauuuuaccacaaaugugauaacacgugcauggaaagugucaaaaaugggacuuaugacuacccaaaauacucagaggaagcaaaauuaaacagagaagaaauagaugggguaaagcuggaaucaacaaggauuuaccagauuuuggcgaucuauucaacugucgccaguucauugguacugguagucucccugggggcaaucaguuucuggaugugcucuaaugggucucuacaguguagaauauguauuuaa

SEQ ID NO: 38397 - RNA, 1701 nt, Artificial Sequence
  derived and/or modified CDS sequence (wt) from hemagglutinin__InfluenzaA__ADW01407
auggaagcaaaauuauuuguauuauucugugcauucacugcacuaaaagcugacaccauuuguguaggcuaccaugccaacaauuccacagacacugucgacacaauacuggagaaaaaugugacuguuacccauucaguuaauuuacuggaaaacagccauaaugggaaacucugcagccugaauggaaagauccccuuacaacuggggaacugcaacguagcaggauggauccuuggcaacccaaaaugugacuugcugcucacagcgaauucguggucuuacauaauagagacuucaaauucaaaaaauggagcaugcuaccccggagaauucgcugauuaugaagaguuaaaggagcagcugaguacaguuucuucauuugaaagauuugaaauuuucccaaaggcaaccucauggccaaaccaugauaccaccagagguaccacaguugcaugcucccacucuggagccaacagcuuuuaucggaauuuacuauggauaguaaagaaaggaaacuccuauccuaagcucagcaagucauacacaaacaauaagggaaaggaagugcuuguaauuuggggagugcaccacccuccgaccgacagugaccaacaaacccucuaccagaauaaucauacauauguuucaguuggaucaucaaaauacuacaaaaggcucacaccagaaauaguagcaagaccuaaagucagagaacaagcaggcagaaugaauuauuacuggacacuguuagaucaaggggacaccauaacuuuugaagccacugggaauuuaauagcaccauggcacgcauuugcauugaaaaaaggcucuaguucuggaauuaugaggucggaugcucagguucacaauugcacuacaaagugccaaacuccccauggggccuugaaaggcaaucuuccuuuucagaauguacaucccgucacuauuggagaaugccccaaauauguuaaaagcacccaacugagaauggcaacaggacuaaggaauauccccucuauucaauccagaggacuuuucggggcaauugccggauucauugaaggaggauggacaggaaugguagauggaugguauggauaucaccaucgaaaugagcagggaucugguuacgcagcagaucagaaaagcacacaaauugcaauugaugggauaaguaacaaagugaacucagugauugaaaaaaugaacauucaauuuacuucagugggcaaggaguucaauagucuagagaaaaggauggaaaauuugaauaagaagguugaugauggguuuuuggauguauggacauauaacgcugaguugcucauuuuacucgagaaugaaaggacucuagauuuccaugaccuuaacguaaaaaauuuauaugaaaaggucaaaucacaacuaaggaacaaugccaaggaaaucggaaauggcugcuuugaguucuaucacaaaugugauaaugagugcauggaaagcguaaagaauggcacauacaauuaucccaaauauucagaagaauccaaauuaaauagggaggaaauagauggugugaaacuagaaucaaugggaauucaccagauuuuggcgaucuacuccacagucgccaguucccuggucuuauuagucucccugggggcaaucagcuucuggauguguucuaaugggucauugcaaugcagaguaugcauuuaa

SEQ ID NO: 38398 - RNA, 1698 nt, Artificial Sequence
  derived and/or modified CDS sequence (wt) from hemagglutinin__InfluenzaA__ADW09101
augaaaguaaaacuacugguccuguuaugcacauuuacagcuacauaugcagacacaauauguauaggcuaccaugcuaacaacucgaccgacacuguugacacaguacuugaaaagaaugugacagugacacacucugucaaccugcuugagaacagucacaauggaaaacuaugucuauuaaaaggaauagccccacuacaauuggguaacugcagcguugccggguggaucuuaggaaacccagaaugcgaauuacugauuuccaaggagucaugguccuacauuguagaaaaaccaaauccugagaauggaacauguuacccagggcauuucgcugacuaugaggaacugagggagcaauugaguucaguaucuucauuugagagguucgaaauauuccccaaagaaagcucauggcccaaccacaccguaaccggagugucagcaucaugcucccauaauggggaaagcaguuuuuacagaaauuugcuauggcugacggggaagaaugguuuguacccaaacuugagcaaguccuaugcaaacaacaaagaaaaagaaguccuuguacuaugggguguucaucacccgccaaacauaguugaccaaaagacccucuaucguacagaaaaugcuuauguuucuguagugucuucacauuauagcagaaaauucaccccagaaauagccaaaagacccaaaguaagagaucaagaaggaagaaucaacuacuacuggacucugcuugaacccggggauacaauaauauuugaggcaaauggaaaucuaauagcgccaagauaugcuuucgcacugaguagaggcuuuggaucaggaaucaucaacucaaaugcaccaauggauaaaugugaugcgaagugccaaacaccucagggagcuauaaacagcagucuuccuuuccagaacguacacccagucacaauaggagaguguccaaaguaugucaggagugcaaaauuaaggaugguuacaggacuaaggaacaucccauccauucaauccagagguuuguuuggagccauugccgguuucauugaagggggguggacuggaaugguagaugguugguaugguuaucaucaucagaaugagcaaggaucuggcuaugcugcagaucaaaaaagcacacaaaaugccauuaaugggauuacaaacaaggugaauucuguaauugagaaaaugaacacucaauucacagcagugggcaaagaauucaacaaauuggaaagaaggauggaaaacuugaauaaaaaaguugaugauggguuuauagacauuuggacauauaaugcagaacuguugguucuacuggaaaaugaaaggacuuuggauuuccaugacuccaaugugaagaaucuguaugagaaaguaaaaagccaguuaaagaauaaugcuaaagaaauaggaaauggguguuuugaauucuaucacaaguguaacgaugaaugcauggagaguguaaagaauggaacuuaugacuauccaaaauauuccgaagaaucaaaguuaaacagggagaaaauugauggagugaaauuggaaucaaugggagucuaucagauucuggcgaucuacucaacagucgccaguucucugguucuuuuggucucccugggggcaaucagcuucuggauguguuccaaugggucuuugcaguguagaauaugcaucuaa

SEQ ID NO: 38399 - RNA, 1698 nt, Artificial Sequence
  derived and/or modified CDS sequence (wt) from hemagglutinin__InfluenzaA__ADW09111
augaaaguaaaacuacugguccuguuaugcacauuuacagcuacauaugcagacacaauauguauaggcuaccaugcuaacaacucgaccgacacuguugacacaguacuugaaaagaaugugacagugacacacucugucaaccugcuugagaacagucacaauggaaaacuauguuuauuaaaaggaauagccccacuacaauuggguaacugcagcguugccggguggaucuuaggaaacccagaaugcgaauuacugauuuccaaggagucaugguccuacauuguagaaaaaccaaauccugagaauggaacauguuacccagggcauuucgcugacuaugaggaacugagggagcaauugaguucaguaucuucauuugagagguucgaaauauuccccaaagaaaguucauggcccaaccacaccguaaccggagugucagcaucaugcucccauaauggggaaagcaguuuuuacagaaauuugcuauggcugacggggaagaaugguuuguacccaaacuugagcaaguccuaugcaaacaacaaagaaaaagaaguccuuguacuaugggguguucaucacccgccaaacauaguugaccaaaagacccucuaucguacagaaaaugcuuauguuucuguagugucuucacauuauagcagaaaauucaccccagaaauagccaaaagacccaaaguaagagaucaagaaggaagaaucaacuacuacuggacucugcuugaacccggggauacaauaauauuugaggcaaauggaaaucuaauagcgccaagauaugcuuucgcacugaguagaggcuuuggaucaggaaucaucaacucaaaugcaccaauggauaaaugugaugcgaagugccaaacaccucggggagcuauaaacagcagucuuccuuuccagaacguacacccagucacaauaggagaguguccaaaguaugucaggagugcaaaauuaaggaugguuacaggacuaaggaacaucccauccauucaauccagagguuuguuuggagccauugccgguuucauugaagggggguggacuggaaugguagaugguugguaugguuaucaucaucagaaugaucaaggaucuggcuaugcugcagaucaaaaaagcacacaaaaugccauuaaugggauuacaaacaaggugaauucuguaauugagaaaaugaacacucaauucacagcagugggcaaagaauucaacaaauuggaaagaaggauggaaaacuugaauaaaaaaguugaugauggguuuauagacauuuggacauauaaugcagaacuguugguucuacuggaaaaugaaaggacuuuggauuuccaugacuccaaugugaagaaucuguaugagaaaguaaaaagccaguuaaagaauaaugcuaaagaaauaggaaauggguguuuugaauucuaucacaaguguaacgaugaaugcauggagaguguaaagaauggaaccuaugacuauccaaaauauuccgaagaaucaaaguuaaacagggagaaaauugauggagugaaauuggaaucaaugggagucuaucagauucuggcgaucuacucaacagucgccaguucucugguucuuuuggucucccugggggcaaucagcuucuggauguguuccaaugggucuuugcaguguagaauaugcaucuaa

SEQ ID NO: 38400 - RNA, 1698 nt, Artificial Sequence
  derived and/or modified CDS sequence (wt) from hemagglutinin__InfluenzaA__ADW09120
augaaaguaaaacuacugguccuguuaugcacauuuacagcuacauaugcagacacaauauguauaggcuaccaugcuaacaacucgaccgacacuguugacacaguacuugaaaagaaugugacagugacacacucugucaaccugcuugagaacagucacaauggaaaacuauguuuauuaaaaggaauagccccacuacaauuggguaacugcagcguugccggguggaucuuaggaaacccagaaugcgaauuacugauuuccaaggagucaugguccuacauuguagaaaaaccaaauccugagaauggaacauguuacccagggcauuucgcugacuaugaggaacugagggagcaauugaguucaguaucuucauuugagagguucgaaauauuccccaaagaaagcucauggcccaaccacaccguaaccggagugucagcaucaugcucccauaauggggaaagcaguuuuuacagaaauuugcuauggcugacggugaagaaugguuuguacccaaacuugagcaaguccuaugcaaacaacaaagaaaaagaaguccuuguacuaugggguguucaucacccgccaaacauaguugaccaaaagacccucuaucauacagaaaaugcuuauguuucuguagugucuucacauuauagcagaaaauucaccccagaaauagccaaaagacccaaaguaagagaucaagaaggaagaaucaacuacuacuggacucugcuugaacccggggauacaauaauauuugaggcaaauggaaaucuaauagcgccaagauaugcuuucgcacugaguaaaggcuuuggaucaggaaucaucaacucaaaugcaccaauggauaaaugugaugcgaagugccaaacaccucggggagcuauaaacagcagucuuccuuuccagaacguacacccagucacaauaggagaguguccaaaguaugucaggagugcaaaauuaaggaugguuacaggacuaaggaacaucccauccauucaauccagagguuuguuuggagccauugccgguuucauugaagguggguggacuggaaugguagaugguugguaugguuaucaucaucagaaugagcaaggaucuggcuaugcugcagaucaaaaaagcacacaaaaugccauuaaugggauuacaaacaaggugaauucuguaauugagaaaaugaacacucaauucacagcagugggcaaagaauucaacaaauuggaaagaaggauggaaaacuugaauaaaaaaguugaugauggguuuauagacauuuggacauauaaugcagaacuguugguucuacuggaaaaugaaaggacuuuggauuuccaugacuccaaugugaagaaucuguaugagaaaguaaaaagccaguuaaagaauaaugcuaaagaaauaggaaauggguguuuugaauucuaucacaaguguaacgaugaaugcauggagaguguaaagaauggaaccuaugacuauccaaaauauuccgaagaaucaaaguuaaacagggagaaaauugauggagugaaauuggaaucaaugggagucuaucagauucuggcgaucuacucaacagucgccaguucucugguucuuuuggucucccugggggcaaucagcuucuggauguguuccaaugggucuuugcaguguagaauaugcaucuaa

SEQ ID NO: 38401 - RNA, 1698 nt, Artificial Sequence
  derived and/or modified CDS sequence (wt) from hemagglutinin__InfluenzaA__ADW09131
augaaaguaaaacuacugguccuguuaugcacauuuacagcuacauaugcagacacaauauguauaggcuaccaugcuaacaacucgaccgacacuguugacacaguacuugaaaagaaugugacagugacacacucugucaaccugcuugagaacagucacaaugggaaacuauguuuauuaaaaggaauagccccacuacaauuggguaacugcagcguugccggguggaucuuaggaaacccagaaugcgaauuacugauuuccaaggagucaugguccuacauuguagaaaaaccaaauccugagaauggaacauguuacccagggcauuucgcugacuaugaggaacugagggagcaauugaguucaguaucuucauuugagagguucgaaauauuccccaaagaaagcucauggcccaaccacaccguaaccggagugucagcaucaugcucccauaauggggaaagcaguuuuuacagaaauuugcuauggcugacggugaagaaugguuuguacccaaacuugagcaaguccuaugcaaacaacaaagaaaaagaaguccuuguacuaugggguguucaucacccgccaaacauaguugaccaaaagacccucuaucguacagaaaaugcuuauguuucuguagugucuucacauuauagcagaaaauucaccccagaaauagccaaaagacccaaaguaagagaucaagaaggaagaaucaacuacuacuggacucugcuugaacccggggauacaauaauauuugaggcaaauggaaaucuaauagcgccaagauaugcuuucgcacugaguagaggcuuuggaucaggaaucaucaacucaaaugcaccaauggauaaaugugaugcgaagugccaaacaccucggggagcuauaaacagcagucuuccuuuccagaacguacacccagucacaauaggagaguguccaaaguaugucaggagugcaaaauuaaggaugguuacaggacuaaggaacaucccauccauucaauccagagguuuguuuggagccauugccgguuucauugaagggggguggacuggaaugguagaugguugguaugguuaucaucaucagaaugagcaaggaucuggcuaugcugcagaucaaaaaagcacacaaaaugccauuaaugggauuacaaacaaggugaauucuguaauugagaaaaugaacacucaauucacagcagugggcaaagaauucaacaaauuggaaagaaggauggaaaacuugaauaaaaaaguugaugauggguuuauagacauuuggacauauaaugcagaacuguugguucuacuggaaaaugaaaggacuuuggauuuccaugacuccaaugugaagaaucuguaugagaaaguaaaaagccaguuaaagaauaaugcuaaagaaauaggaaauggguguuuugaauucuaucacaaguguaacgaugaaugcauggagaguguaaagaauggaaccuaugacuauccaaaauauuccgaagaaucaaaguuaaacagggagaaaauugauggagugaaauuggaaucaaugggagucuaucagauucuggcgaucuacucaacagucgccaguucucugguucuuuuggucucccugggggcaaucagcuucuggauguguuccaaugggucuuugcaguguagaauaugcaucuaa

SEQ ID NO: 38402 - RNA, 1698 nt, Artificial Sequence
  derived and/or modified CDS sequence (wt) from hemagglutinin__InfluenzaA__ADW09153
augaaaguaaaacuacugguccuguuaugcacauuuacagcuacauaugcagacacaauauguauaggcuaccaugcuaacaacucgaccgacacuguugacacaguacuugaaaagaaugugacagugacacacucugucaaccugcuugagaacagucacaaugggaaacuauguuuauuaaaaggaauagccccacuacaauuggguaacugcagcguugccggguggaucuuaggaaacccagaaugcgaauuacugauuuccaaggagucaugguccuacauuguagaaaaaccaaauccugagaauggaacauguuacccagggcauuucgcugacuaugaggaacugagggagcaauugaguucaguaucuucauuugagagguucgaaauauuccccaaagaaagcucauggcccaaccacaccguaaccggagugucagcaucaugcucccauaauggggaaagcaguuuuuacagaaauuugcuauggcugacggugaagaaugguuuguacccaaacuugagcaaguccuaugcaaacaacaaagaaaaagaaguccuuguacuaugggguguucaucacccgccaaacauaguugaccaaaagacccucuaucguacagaaaaugcuuauguuucuguagugucuucacauuauagcagaaaauucaccccagaaauagccaaaagacccaaaguaagagaucaagaaggaagaaucaacuacuacuggacucugcuugaacccggggauacaauaauauuugaggcaaauggaaaucuaauagcgccaagauaugcuuucgcacugaguagaggcuuuggaucaggaaucaucaacucaaaugcaccaauggauaaaugugaugcgaagugccaaacaccucggggagcuauaaacagcagucuuccuuuccagaacguacacccagucacaauaggagaguguccaaaguaugucaggagugcaaaauuaaggaugguuacaggacuaaggaacaucccauccauucaauccagagguuuguuuggagccauugccgguuucauugaagggggguggacuggaaugguagaugguugguaugguuaucaucaucagaaugagcaaggaucuggcuaugcugcagaucaaaaaagcacacaagaugccauuaaugggauuacaaacaaggugaauucuguaauugagaaaaugaacacucaauucacagcagugggcaaagaauucaacaaauuggaaagaaggauggaaaacuugaauaaaaaaguugaugauggguuuauagacauuuggacauauaaugcagaacuguugguucuacuggaaaaugaaaggacuuuggacuuccaugacuccaaugugaagaaucuguaugagaaaguaaaaagccaguuaaagaauaaugcuaaagaaauaggaaauggguguuuugaauucuaucacaaguguaacgaugaaugcauggagaguguaaagaauggaaccuaugacuauccaaaauauuccgaagaaucaaaguuaaacagggagaaaauugauggagugaaauuggaaucaaugggagucuaucagauucuggcgaucuacucaacagucgccaguucucugguucuuuuggucucccugggggcaaucagcuucuggauguguuccaaugggucuuugcaguguagaauaugcaucuaa

SEQ ID NO: 38403 - RNA, 1698 nt, Artificial Sequence; identical to SEQ ID NO: 38401
  derived and/or modified CDS sequence (wt) from hemagglutinin__InfluenzaA__ADW09164

SEQ ID NO: 38404 - RNA, 1698 nt, Artificial Sequence
  derived and/or modified CDS sequence (wt) from hemagglutinin__InfluenzaA__ADW09186
augaaaguaaaacuacugguccuguuaugcacauuuacagcuacauaugcagacacaauauguauaggcuaccaugcuaacaacucgaccgacacuguugacacaguacuugaaaagaaugugacagugacacacucugucaaccugcuugagaacagucacaauggaaaacuaugucuauuaaaaggaauagccccacuacaauuggguaacugcagcguugccggguggaucuuaggaaacccagaaugcgaauuacugauuuccaaggagucaugguccuacauuguagaaaaaccaaauccugagaauggaacauguuacccagggcauuucgcugacuaugaggaacugagggagcaauugaguucaguaucuucauuugagagguucgaaauauuccccaaagaaagcucauggcccaaccacaccguaaccggagugucagcaucaugcucccauaauggggaaagcaguuuuuacagaaauuugcuauggcugacggggaagaaugguuuguacccaaacuugagcaaguccuaugcaaacaacaaagaaaaagaaguccuuguacuaugggguguucaucacccgccaaacauaguugaccaaaagacccucuaucguacagaaaaugcuuauguuucuguagugucuucacauuauagcagaaaauucaccccagaaauagccaaaagacccaaaguaagagaucaagaaggaagaaucaacuacuacuggacucugcuugaacccggggauacaauaauauuugaggcaaauggaaaucuaauagcgccaagauaugcuuucgcacugaguagaggcuuuggaucaggaaucaucaacucaaaugcaccaauggauaaaugugaugcgaagugccaaacaccucagggagcuauaaacagcagucuuccuuuccagaacguacacccagucacaauaggagaguguccaaaguaugucaggagugcaaaauuaaggaugguuacaggacuaaggaacaccccauccauucaauccagagguuuguuuggagccauugccgguuucauugaagggggguggacuggaaugguagaugguugguaugguuaucaucaucagaaugagcaaggaucuggcuaugcugcagaucaaaaaagcacacaaaaugccauuaaugggauuacaaacaaggugaauucuguaauugagaaaaugaacacucaauucacagcagugggcaaagaauucaacaaauuggaaagaaggauggaaaacuugaauaaaaaaguugaugauggguuuauagacauuuggacauauaaugcagaacuguugguucuacuggaaaaugaaaggacuuuggauuuccaugacuccaaugugaagaaucuguaugagaaaguaaaaagccaguuaaagaauaaugcuaaagaaauaggaaauggguguuuugaauucuaucacaaguguaacgaugaaugcauggagaguguaaagaauggaacuuaugacuauccaaaauauuccgaagaaucaaaguuaaacagggagaaaauugauggagugaaauuggaaucaaugggagucuaucagauucuggcgaucuacucaacagucgccaguucucugguucuuuuggucucccugggggcaaucagcuucuggauguguuccaaugggucuuugcaguguagaauaugcaucuaa

SEQ ID NO: 38405 - RNA, 1698 nt, Artificial Sequence
  derived and/or modified CDS sequence (wt) from hemagglutinin__InfluenzaA__ADW09197
augaaagugaaacuacugguccuguuaugcacauuuacagcuacauaugcagacacaauauguauaggcuaccaugcuaacaacucgaccgacacuguugacacaguacuugaaaagaaugugacagugacacacucugucaaccugcuugagaacagucacaauggaaaacuaugucuauuaaaaggaauagccccacuacaauuggguaacugcagcguugccggguggaucuuaggaaacccagaaugcgaauuacugauuuccaaggagucaugguccuacauuguagaaaaaccaaauccugagaauggaacauguuacccagggcauuucgcugacuaugaggaacugagggagcaauugaguucaguaucuucauuugagagguucgaaauauuccccaaagaaagcucauggcccaaccacaccguaaccggagugucagcaucaugcucccauaauggggaaagcaguuuuuacagaaauuugcuauggcugacggggaagaaugguuuguacccaaacuugagcaaguccuaugcaaacaacaaagaaaaagaaguccuuguacuaugggguguucaucacccgccaaacauaguugaccaaaagacccucuaucguacagaaaaugcuuauguuucuguagugucuucacauuauagcagaaaauucaccccagaaauagccaaaagacccaaaguaagagaucaagaaggaagaaucaacuacuacuggacucugcuugaacccggggauacaauaauauuugaggcaaauggaaaucuaauagcgccaagauaugcuuucgcacugaguagaggcuuuggaucaggaaucaucaacucaaaugcaccaauggauaaaugugaugcgaagugccaaacaccucagggagcuauaaacagcagucuuccuuuccagaacguacacccagucacaauaggagaguguccaaaguaugucaggagugcaaaauuaaggaugguuacaggacuaaggaacaucccauccauucaauccagagguuuguuuggagccauugccgguuucauugaagggggguggacuggaaugguagaugguugguaugguuaucaucaucagaaugagcaaggaucuggcuaugcugcagaucaaaaaagcacacaaaaugccauuaaugggauuacaaacaaggugaauucuguaauugagaaaaugaacacucaauucacagcagugggcaaagaauucaacaaauuggaaagaaggauggaaaacuugaauaaaaaaguugaugauggguuuauagacauuuggacauauaaugcagaacuguugguucuacuggaaaaugaaaggacuuuggauuuccaugacuccaaugugaagaaucuguaugagaaaguaaaaagccaguuaaagaauaaugcuaaagaaauaggaaauggguguuuugaauucuaucacaaguguaacgaugaaugcauggagaguguaaagaauggaacuuaugacuauccaaaauauuccgaagaaucaaaguuaaacagggagaaaauugauggagugaaauuggaaucaaugggagucuaucagauucuggcgaucuacucaacagucgccaguucucugguucuuuuggucucccugggggcaaucagcuucuggauguguuccaaugggucuuugcaguguagaauaugcaucuaa

SEQ ID NO: 38406 - RNA, 1698 nt, Artificial Sequence; identical to SEQ ID NO: 38401
  derived and/or modified CDS sequence (wt) from hemagglutinin__InfluenzaA__ADW09208

SEQ ID NO: 38407 - RNA, 1698 nt, Artificial Sequence; identical to SEQ ID NO: 38401
  derived and/or modified CDS sequence (wt) from hemagglutinin__InfluenzaA__ADW09219

SEQ ID NO: 38408 - RNA, 1698 nt, Artificial Sequence; identical to SEQ ID NO: 38398
  derived and/or modified CDS sequence (wt) from hemagglutinin__InfluenzaA__ADW09230

SEQ ID NO: 38409 - RNA, 1698 nt, Artificial Sequence
  derived and/or modified CDS sequence (wt) from hemagglutinin__InfluenzaA__ADW09241
augaaaguaaaacuacugguccuguuaugcacauuuacagcuacauaugcagacacaauauguauaggcuaccaugcuaacaacucgaccgacacuguugacacaguacuugaaaagaaugugacagugacacacucugucaaccugcuugagaacagucacaaugggaaacuauguuuauuaaaaggaauagccccacuacaauuggguaacugcagcguugccggguggaucuuaggaaacccagaaugcgaauuacugauuuccaaggagucaugguccuacauuguagaaaaaccaaauccugagaauggaacauguuacccagggcauuucgcugacuaugaggaaaugagggagcaauugaguucaguaucuucauuugagagguucgaaauauuccccaaagaaagcucauggcccaaccacaccguaaccggagugucagcaucaugcucccauaauggggaaagcaguuuuuacagaaauuugcuauggcugacggugaagaaugguuuguacccaaacuugagcaaguccuaugcaaacaacaaagaaaaagaaguccuuguacuaugggguguucaucacccgccaaacauaguugaccaaaagacccucuaucguacagaaaaugcuuauguuucuguagugucuucacauuauagcagaaaauucaccccagaaauagccaaaagacccaaaguaagagaucaagaaggaagaaucaacuacuacuggacucugcuugaacccggggauacaauaauauuugaggcaaauggaaaucuaauagcgccaagauaugcuuucgcacugaguagaggcuuuggaucaggaaucaucaacucaaaugcaccaauggauaaaugugaugcgaagugccaaacaccucggggagcuauaaacagcagucuuccuuuccagaacguacacccagucacaauaggagaguguccaaaguaugucaggagugcaaaauuaaggaugguuacaggacuaaggaacaucccauccauucaauccagagguuuguuuggagccauugccgguuucauugaagggggguggacuggaaugguagaugguugguaugguuaucaucaucagaaugagcaaggaucuggcuaugcugcagaucaaaaaagcacacaaaaugccauuaaugggauuacaaacaaggugaauucuguaauugagaaaaugaacacucaauucacagcagugggcaaagaauucaacaaauuggaaagaaggauggaaaacuugaauaaaaaaguugaugauggguuuauagacauuuggacauauaaugcagaacuguugguucuacuggaaaaugaaaggacuuuggauuuccaugacuccaaugugaagaaucuguaugagaaaguaaaaagccaguuaaagaauaaugcuaaagaaauaggaaauggguguuuugaauucuaucacaaguguaacgaugaaugcauggagaguguaaagaauggaaccuaugacuauccaaaauauuccgaagaaucaaaguuaaacagggagaaaauugauggagugaaauuggaaucaaugggagucuaucagauucuggcgaucuacucaacagucgccaguucucugguucuuuuggucucccugggggcaaucagcuucuggauguguuccaaugggucuuugcaguguagaauaugcaucuaa

SEQ ID NO: 38410 - RNA, 1698 nt, Artificial Sequence; identical to SEQ ID NO: 38401
  derived and/or modified CDS sequence (wt) from hemagglutinin__InfluenzaA__ADW09252

SEQ ID NO: 38411 - RNA, 1698 nt, Artificial Sequence
  derived and/or modified CDS sequence (wt) from hemagglutinin__InfluenzaA__ADW09274
augaaaguaaaacuacugguccuguuaugcacauuuacagcuacauaugcagacacaauauguauaggcuaccaugcuaacaacucgaccgacacuguugacacaguacuugaaaagaaugugacagugacacacucugucaaccugcuugagaacagucacaaugggaaacuauguuuauuaaaaggaauagccccacuacaauuggguaacugcagcguugccggguggaucuuaggaaacccagaaugcgaauuacugauuuccaaggagucaugguccuacauuguagaaaaaccaaauccugagaauggaacauguuacccagggcauuucgcugacuaugaggaacugagggagcaauugaguucaguaucuucauuugagagguucgaaauauuccccaaagaaagcucauggcccaaccacaccguaaccggagugucagcaucaugcucccauaauggggaaagcaguuuuuacagaaauuugcuauggcugacggugaagaaugguuuguacccaaacuugagcaagcccuaugcaaacaacaaagaaaaagaaguccuuguacuaugggguguucaucacccgccaaacauaguugaccaaaagacccucuaucguacagaaaaugcuuauguuucuguagugucuucacauuauagcagaaaauucaccccagaaauagccaaaagacccaaaguaagagaucaagaaggaagaaucaacuacuacuggacucugcuugaacccggggauacaauaauauuugaggcaaauggaaaucuaauagcgccaagauaugcuuucgcacugaguagaggcuuuggaucaggaaucaucaacucaaaugcaccaauggauaaaugugaugcgaagugccaaacaccucggggagcuauaaacagcagucuuccuuuccagaacguacacccagucacaauaggagaguguccaaaguaugucaggagugcaaaauuaaggaugguuacaggacuaaggaacaucccauccauucaauccagagguuuguuuggagccauugccgguuucauugaagggggguggacuggaaugguagaugguugguaugguuaucaucaucagaaugagcaaggaucuggcuaugcugcagaucaaaaaagcacacaaaaugccauuaaugggauuacaaacaaggugaauucuguaauugagaaaaugaacacucaauucacagcagugggcaaagaauucaacaaauuggaaagaaggauggaaaacuugaauaaaaaaguugaugauggguuuauagacauuuggacauauaaugcagaacuguugguucuacuggaaaaugaaaggacuuuggauuuccaugacuccaaugugaagaaucuguaugagaaaguaaaaagccaguuaaagaauaaugcuaaagaaauaggaaauggguguuuugaauucuaucacaaguguaacgaugaaugcauggagaguguaaagaauggaaccuaugacuauccaaaauauuccgaagaaucaaaguuaaacagggagaaaauugauggagugaaauuggaaucaaugggagucuaucagauucuggcgaucuacucaacagucgccaguucucugguucuuuuggucucccugggggcaaucagcuucuggauguguuccaaugggucuuugcaguguagaauaugcaucuaa

SEQ ID NO: 38412 - RNA, 1698 nt, Artificial Sequence
  derived and/or modified CDS sequence (wt) from hemagglutinin__InfluenzaA__ADW09285
augaaaguaaaacuacugguccuguuaugcacauuuacagcuacauaugcagacacaauauguauaggcuaccaugcuaacaacucgaccgacacuguugacacaguacuugaaaagaaugugacagugacacacucugucaaccugcuugagaacagucacaauggaaaacuaugucuauuaaaaggaauagccccacuacaauuggguaacugcagcguugccggguggaucuuaggaaacccagaaugcgaauuacugauuuccaaggagucaugguccuacauuguagaaaaaccaaauccugagaauggaacauguuacccagggcauuucgcugacuaugaggaacugagggagcaauugaguucaguaucuucauuugagagguucgaaauauuccccaaagaaagcucauggcccaaccacaccguaaccggagugucagcaucaugcucccauaauggggaaagcaguuuuuacagaaauuugcuauggcugacggggaagaaugguuuguacccaaacuugagcaaguccuaugcaaacaacaaagaaaaagaaguccuuguacuaugggguguucaucacccgccaaacauaguugaccaaaagacccucuaucguacagaaaaugcuuauguuucuguagugucuucacauuauagcagaaaauucaccccagaaauagccaaaagacccaaaguaagagaucaagaaggaagaaucaacuacuacuggacucugcuugaacccggggauacaauaacauuugaggcaaauggaaaucuaauagcgccaagauaugcuuucgcacugaguagaggcuuuggaucaggaaucaucaacucaaaugcaccaauggauaaaugugaugcgaagugccaaacaccucagggagcuauaaacagcagucuuccuuuccagaacguacacccagucacaauaggagaguguccaaaguaugucaggagugcaaaauuaaggaugguuacaggacuaaggaacaucccauccauucaauccagagguuuguuuggagccauugccgguuucauugaagggggguggacuggaaugguagaugguugguaugguuaucaucaucagaaugagcaaggaucuggcuaugcugcagaucaaaaaagcacacaaaaugccauuaaugggauuacaaacaaggugaauucuguaauugagaaaaugaacacucaauucacagcagugggcaaagaauucaacaaauuggaaagaaggauggaaaacuugaauaaaaaaguugaugauggguuuauagacauuuggacauauaaugcagaacuguugguucuacuggaaaaugaaaggacuuuggauuuccaugacuccaaugugaagaaucuguaugagaaaguaaaaagccaguuaaagaauaaugcuaaagaaauaggaaauggguguuuugaauucuaucacaaguguaacgaugaaugcauggagaguguaaagaauggaacuuaugacuauccaaaauauuccgaagaaucaaaguuaaacagggagaaaauugauggagugaaauuggaaucaaugggagucuaucagauucuggcgaucuacucaacagucgccaguucucugguucuuuuggucucccugggggcaaucagcuucuggauguguuccaaugggucuuugcaguguagaauaugcaucuaa

SEQ ID NO: 38413 - RNA, 1698 nt, Artificial Sequence
  derived and/or modified CDS sequence (wt) from hemagglutinin__InfluenzaA__ADW09296
augaaaguaaaacuacugguccuguuaugcacauuuacagcuacauaugcagacacaauauguauaggcuaccaugcuaacaacucgaccgacacuguugacacaguacuugaaaagaaugugacagugacacacucugucaaccugcuugagaacagucacaaugggaaacuauguuuauuaaaaggaauagccccacuacaauuggguaacugcagcguugccggguggaucuuaggaaacccagaaugcgaauuacugauuuccaaggagucaugguccuacauuguagaaaaaccaaauccugagaauggaacauguuacccagggcauuucgcugacuaugaggaacugagggagcaauugaguucaguaucuucauuugagagguucgaaauauuccccaaagaaagcucauggcccaaccacaccguaaccggagugucagcaucaugcucccauaauggggaaagcaguuuuuacagaaauuugcuauggcugacggugaagaaugguuuguacccaaacuugagcaaguccuaugcaaacaacaaagaaaaagaaguccuuguacuaugggguguucaucacccgccaaacauaguugaccaaaagacccucuaucguacagaaaaugcuuauguuucuguagugucuucacauuauagcagaaaauucaccccagaaauagccaaaagacccaaaguaagagaucaagaaggaagaaucaacuacuacuggacucugcuugaacccggggauacaauaauauuugaggcaaauggaaaucuaauagcgccaagauaugcuuucgcacugaguagaggcuuuggaucaggaaucaucaacucaaaugcaccaauggauaaaugugaugcgaagugccaaacaccucggggagcuauaaacagcagucuuccuuuccagaacguacacccagucacaauaggagaguguccaaaguaugucaggagugcaaaauuaaggaugguuacaggacuaaggaacaucccauccauucaauccagagguuuguuuggagccauugccgguuucauugaagggggguggacuggaaugguagaugguugguaugguuaucaucaucagaaugagcaaggaucuggcuaugcugcagaucaaaaaagcacacaaaaugccauuaauggaauuacaaacaaggugaauucuguaauugagaaaaugaacacucaauucacagcagugggcaaagaauucaacaaauuggaaagaaggauggaaaacuugaauaaaaaaguugaugauggguuuauagacauuuggacauauaaugcagaacuguugguucuacuggaaaaugaaaggacuuuggauuuccaugacuccaaugugaagaaucuguaugagaaaguaaaaagccaguuaaagaauaaugcuaaagaaauaggaaauggguguuuugaauucuaucacaaguguaacgaugaaugcauggagaguguaaagaauggaaccuaugacuauccaaaauauuccgaagaaucaaaguuaaacagggagaaaauugauggagugaaauuggaaucaaugggagucuaucagauucuggcgaucuacucaacagucgccaguucucugguucuuuuggucucccugggggcaaucagcuucuggauguguuccaaugggucuuugcaguguagaauaugcaucuaa

SEQ ID NO: 38414 - RNA, 1698 nt, Artificial Sequence; identical to SEQ ID NO: 38398
  derived and/or modified CDS sequence (wt) from hemagglutinin__InfluenzaA__ADW09307

SEQ ID NO: 38415 - RNA, 1698 nt, Artificial Sequence
  derived and/or modified CDS sequence (wt) from hemagglutinin__InfluenzaA__ADW09327
augaaaguaaaacuacugguccuguuaugcacauuuacagcuacauaugcagacacaauauguauaggcuaccaugcuaacaacucgaccgacacuguugacacaguacuugaaaagaaugugacagugacacacucugucaaccugcuugagaacagucacaauggaaaacuaugucuauuaaaaggaauagccccacuacaauuggguaacugcagcguugccggguggaucuuaggaaacccagaaugcgaauuacugauuuccaaggagucaugguccuacauuguagaaaaaccaaauccugagaauggaacauguuacccagggcauuucgcugacuaugaggaacugagggagcaauugaguucaguaucuucauuugagagguucgaaauauuccccaaagaaagcucauggcccaaccacaccguaaccggagugucagcaucaugcucccauaauggggaaagcaguuuuuacagaaauuugcuauggcugacggggaagaaugguuuguacccaaaccugagcaaguccuaugcaaacaacaaagaaaaagaaguccuuguacuaugggguguucaucacccgccaaacauaguugaccaaaagacccucuaucguacagaaaaugcuuauguuucuguagugucuucacauuauagcagaaaauucaccccagaaauagccaaaagacccaaaguaagagaucaagaaggaagaaucaacuacuacuggacucugcuugaacccggggauacaauaauauuugaggcaaauggaaaucuaauagcgccaagauaugcuuucgcacugaguagaggcuuuggaucaggaaucaucaacucaaaugcaccaauggauaaaugugaugcgaaaugccaaacaccucagggagcuauaaacagcagucuuccuuuccagaacguacacccagucacaauaggagaguguccaaaguaugucaggagugcaaaauuaaggaugguuacaggacuaaggaacaucccauccauucaauccagagguuuguuuggagccauugccgguuucauugaagggggguggacuggaaugguagaugguugguaugguuaucaucaucagaaugagcaaggaucuggcuaugcugcagaucaaaaaagcacacaaaaugccauuaaugggauuacaaacaaggugaauucuguaauugagaaaaugaacacucaauucacagcagugggcaaagaauucaacaaauuggaaagaaggauggaaaacuugaauaaaaaaguugaugauggguuuauagacauuuggacauauaaugcagaacuguugguucuacuggaaaaugaaaggacuuuggauuuccaugacuccaaugugaagaaucuguaugagaaaguaaaaagccaguuaaagaauaaugcuaaagaaauaggaaauggguguuuugaauucuaucacaaguguaacaaugaaugcauggagaguguaaagaauggaacuuaugacuauccaaaauauuccgaagaaucaaaauuaaacagggagaaaauugauggagugaaauuggagucaaugggagucuaucagauucuggcgaucuacucaacagucgccaguucucugguucuuuuggucucccugggggcaaucagcuucuggauguguuccaaugggucuuugcaguguagaauaugcaucuaa

SEQ ID NO: 38416 - RNA, 1698 nt, Artificial Sequence; identical to SEQ ID NO: 38401
  derived and/or modified CDS sequence (wt) from hemagglutinin__InfluenzaA__ADW10483

SEQ ID NO: 38417 - RNA, 1698 nt, Artificial Sequence
  derived and/or modified CDS sequence (wt) from hemagglutinin__InfluenzaA__ADW10494
augaaaguaaaacuacugguccuguuaugcacauuuacagcuacauaugcagacacaauauguauaggcuaccaugcuaacaacucgaccgacacuguugacacaguacuugaaaagaaugugacagugacacacucugucaaccugcuugagaacagucacaauggaaaacuaugucuauuaaaaggaauagccccacuacaauuggguaacugcagcguugccggguggaucuuaggaaacccagaaugcgaauuacugauuuccaaggagucaugguccuacauuguagaaaaaccaaauccugagaauggaacauguuacccagggcauuucgcugacuaugaggaacugagggagcaauugaguucaguaucuucauuugagagguucgaaauauuccccaaagaaagcucauggcccaaccacaccguaaccggagugucagcaucaugcucccauaauggggaaagcaguuuuuacagaaauuugcuauggcugacggggaagaaugguuuguacccaaacuugagcaaguccuaugcaaacaacaaagaaaaagaaguccuuguacuaugggguguucaucacccgccaaacauaguugaccaaaagacccucuaucguacagaaaaugcuuauguuucuguagugucuucacauuauagcagaaaauucaccccagaaauagccaaaagacccaaaguaagagaucaagaaggaagaaucaacuauuacuggacucugcuugaacccggggauacaauaauauuugaggcaaauggaaaucuaauagcgccaagauaugcuuucgcacugaguagaggcuuuggaucaggaaucaucaacucaaaugcaccaauggauaaaugugaugcgaagugccaaacaccucagggagcuauaaacagcagucuuccuuuccagaacguacacccagucacaauaggagaguguccaaaguaugucaggagugcaaaauuaaggaugguuacaggacuaaggaacaucccauccauucaauccagagguuuguuuggagccauugccgguuucauugaagggggguggacuggaaugguagaugguugguaugguuaucaucaucagaaugagcaaggaucuggcuaugcugcagaucaaaaaagcacacaaaaugccauuaaugggauuacaaacaaggugaauucuguaauugagaaaaugaacacucaauucacagcagugggcaaagaauucaacaaauuggaaagaaggauggaaaacuugaauaaaaaaguugaugauggguuuauagacauuuggacauauaaugcagaacuguugguucuacuggaaaaugaaaggacuuuggauuuccaugacuccaaugugaagaaucuguaugagaaaguaaaaaaccaguuaaagaauaaugcuaaagaaauaggaaauggguguuuugaauucuaucacaaguguaacgaugaaugcauggagaguguaaagaauggaacuuaugacuauccaaaauauuccgaagaaucaaaguuaaacagggagaaaauugauggagugaaauuggaaucaaugggagucuaucagauucuggcgaucuacucaacagucgccaguucucugguucuuuuggucucccugggggcaaucagcuucuggauguguuccaaugggucuuugcaguguagaauaugcaucuaa

SEQ ID NO: 38418 - RNA, 1698 nt, Artificial Sequence; identical to SEQ ID NO: 38401
  derived and/or modified CDS sequence (wt) from hemagglutinin__InfluenzaA__ADW10505

SEQ ID NO: 38419 - RNA, 1698 nt, Artificial Sequence
  derived and/or modified CDS sequence (wt) from hemagglutinin__InfluenzaA__ADW10516
augaaaguaaaacuacugguccuguuaugcacauuuacagcuacauaugcagacacaauauguauaggcuaccaugcuaacaacucgaccgacacuguugacacaguacuugaaaagaaugugacagugacacacucugucaaccugcuugagaacagucacaauggaaaacuauguuuauuaaaaggaauagccccacuacaauuggguaacugcagcguugccggguggaucuuaggaaacccagaaugcgaauuacugauuuccaaggagucaugguccuacauuguagaaaaaccaaauccugagaauggaacauguuacccagggcauuucgcugacuaugaggaacugagggagcaauugaguucaguaucuucauuugagagguucgaaauauuccccaaagaaagcucauggcccaaccacaccguaaccggagugucagcaucaugcucccauaauggggaaagcaguuuuuacagaaauuugcuauggcugacggugaagaaugguuuguacccaaacuugagcaaguccuaugcaaacaacaaagaaaaagaaguccuuguacuaugggguguucaucacccgccaaacauaguugaccaaaagacccucuaucguacagaaaaugcuuauguuucuguagugucuucacauuauagcagaaaauucaccccagaaauagccaaaagacccaaaguaagagaucaagaaggaagaaucaacuacuacuggacucugcuugaacccggggauacaauaauauuugaggcaaauggaaaucuaauagcgccgagauaugcuuucgcacugaguagaggcuuuggaucaggaaucaucaacucaaaugcaccaauggauaaaugugaugcgaagugccaaacaccucggggagcuauaaacagcagucuuccuuuccagaacguacacccagucacaauaggagaguguccaaaguaugucaggagugcaaaauuaaggaugguuacaggacuaaggaacaucccauccauucaauccagagguuuguuuggagccauugccgguuucauugaagggggguggacuggaaugguagaugguugguaugguuaucaucaucagaaugagcaaggaucuggcuaugcugcagaucaaaaaagcacacaaaaugccauuaaugggauuacaaacaaggugaauucuguaauugagaaaaugaacacucaauucacagcagugggcaaagaauucaacaaauuggaaagaaggauggaaaacuugaauaaaaaaguugaugauggguuuauagacauuuggacauauaaugcagaacuguugguucuacuggaaaaugaaaggacuuuggauuuccaugacuccaaugugaagaaucuguaugagaaaguaaaaagccaguuaaagaauaaugcuaaagaaauaggaaauggguguuuugaauucuaucacaaguguaacgaugaaugcauggagaguguaaagaauggaaccuaugacuauccaaaauauuccgaagaaucaaaguuaaacagggagaaaauugauggagugaaauuggaaucaaugggagucuaucagauucuggcgaucuacucaacagucgccaguucucugguucuuuuggucucccugggggcaaucagcuucuggauguguuccaaugggucuuugcaguguagaauaugcaucuaa

SEQ ID NO: 38420 - RNA, 1698 nt, Artificial Sequence
  derived and/or modified CDS sequence (wt) from hemagglutinin__InfluenzaA__ADW10527
augaaaguaaaacuacugguccuguuaugcacauuuacagcuacauaugcagacacaauauguauaggcuaccaugcuaacaacucgaccgacacuguugacacaguacuugaaaagaaugugacagugacacacucugucaaccugcuugagaacagucacaauggaaaacuaugucuauuaaaaggaauagccccacuacaauuggguaacugcagcguugccggguggaucuuaggaaacccagaaugcgaauuacugauuuccaaggagucaugguccuacauuguagaaaaaccaaauccugagaauggaacauguuacccagggcauuucgcugacuaugaggaacugagggagcaauugaguucaguaucuucauuugagagguucgaaauauuccccaaagaaagcucauggcccaaccacaccguaaccggagugucagcaucaugcucccauaauggggaaagcaguuuuuacagaaauuugcuauggcugacggggaagaaugguuuguacccaaacuugagcaaguccuaugcaaacaacaaagaaaaagaaguccuuguacuaugggguguucaucacccgccaaacauaguugaccaaaagacccucuaucguacagaaaaugcuuauguuucuguagugucuucacauuauagcagaaaauucaccccagaaauagccaaaagacccaaaguaagagaucaagaaggaagaaucaacuacuacuggacucugcuugaacccggggauacaauaauauuugaggcaaauggaaaucuaauagcgccaagauaugcuuucgcacugaguagaggcuuuggauuaggaaucaucaacucaaaugcaccaauggauaaaugugaugcgaagugccaaacaccucagggagcuauaaacagcagucuuccuuuccagaacguacacccagucacaauaggagaguguccaaaguaugucaggagugcaaaauuaaggaugguuacaggacuaaggaacaucccauccauucaauccagagguuuguuuggagccauugccgguuucauugaagggggguggacuggaaugguagaugguugguaugguuaucaucaucagaaugagcaaggaucuggcuaugcugcagaucaaaaaagcacacaaaaugccauuaaugggauuacaaacaaggugaauucuguaauugagaaaaugaacacucaauucacagcagugggcaaagaauucaacaaauuggaaagaaggauggaaaacuugaauaaaaaaguugaugauggguuuauagacauuuggacauauaaugcagaacuguugguucuacuggaaaaugaaaggacuuuggauuuccaugacuccaaugugaagaaucuguaugagaaaguaaaaagccaguuaaagaauaaugcuaaagaaauaggaaauggguguuuugaauucuaucacaaguguaacgaugaaugcauggagaguguaaagaauggaacuuaugacuauccaaaauauuccgaagaaucaaaguuaaacagggagaaaauugauggagugaaauuggaaucaaugggagucuaucagauucuggcgaucuacucaacagucgccaguucucugguucuuuuggucucccugggggcaaucagcuucuggauguguuccaaugggucuuugcaguguagaauaugcaucuaa

SEQ ID NO: 38421 - RNA, 1698 nt, Artificial Sequence
  derived and/or modified CDS sequence (wt) from hemagglutinin__InfluenzaA__ADW10538
augaaaguaaaacuacugguccuguuaugcacauuuacagcuacauaugcagacacaauauguauaggcuaccaugcuaacaacucgaccgacacuguugacacaguacuugaaaagaaugugacagugacacacucugucaaccugcuugagaacagucacaauggaaaacuaugucuauuaaaaggaauagccccacuacaauuggguaacugcagcguugccggguggaucuuaggaaacccagaaugcgaauuacugauuuccaaggagucaugguccuacauuguagaaaaaccaaauccugagaauggaacauguuacccagggcauuucgcugacuaugaggaacugagggagcaauugaguucaguaucuucauuugagagguucgaaauauuccccaaagaaagcucauggcccaaccacaccguaaccggagugucagcaucaugcucccauaauggggaaagcaguuuuuacagaaauuugcuauggcugacggggaagaaugguuuguacccaaacuugagcaaguccuaugcaaacaacaaagaaaaagaaguccuuguacuaugggguguucaucacccgccaaacauaguugaccaaaagacccucuaucguacagaaaaugcuuauguuucuguaaugucuucacauuauagcagaaaauucaccccagaaauagccaaaagacccaaaguaagagaucaagaaggaagaaucaacuacuacuggacucugcuugaacccggggauacaauaauauuugaggcaaauggaaaucuaauagcgccaagauaugcuuucgcacugaguagaggcuuuggaucaggaaucaucaacucaaaugcaccaauggauaaaugugaugcgaagugccaaacaccucagggagcuauaaacagcagucuuccuuuccagaacguacacccagucacaauaggagaguguccaaaguaugucaggagugcaaaauuaaggaugguuacaggacuaaggaacaucccauccauucaauccagagguuuguuuggagccauugccgguuucauugaagggggguggacuggaaugguagaugguugguaugguuaucaucaucagaaugagcaaggaucuggcuaugcugcagaucaaaaaagcacacaaaaugccauuaaugggauuacaaacaaggugaauucuguaauugagaaaaugaacacucaauucacagcagugggcaaagaauucaacaaauuggaaagaaggauggaaaacuugaauaaaaaaguugaugauggguuuauagacauuuggacauauaaugcagaacuguugguucuacuggaaaaugaaaggacuuuggauuuccaugacuccaaugugaagaaucuguaugagaaaguaaaaagccaguuaaagaauaaugcuaaagaaauaggaaauggguguuuugaauucuaucacaaguguaacgaugaaugcauggagaguguaaagaauggaacuuaugacuauccaaaauauuccgaagaaucaaaguuaaacagggagaaaauugauggagugaaauuggaaucaaugggagucuaucagauucuggcgaucuacucaacagucgccaguucucugguucuuuuggucucccugggggcaaucagcuucuggauguguuccaaugggucuuugcaguguagaauaugcaucuaa

SEQ ID NO: 38422 - RNA, 1698 nt, Artificial Sequence
  derived and/or modified CDS sequence (wt) from hemagglutinin__InfluenzaA__ADW10549
augaaaguaaaacuacugguccuguuaugcacauuuacagcuacauaugcagacacaauauguauaggcuaccaugcuaacaacucgaccgacacuguugacacaguacuugaaaagaaugugacagugacacacucugucaaccugcuugagaacagucacaaugggaaacuauguuuauuaaaaggaauagccccacuacaauuggguaacugcagcguugccggguggaucuuaggaaacccagaaugcgaauuacugauuuccaaggagucaugguccuacauuguagaaaaaccaaauccugagaauggaacauguuacccagggcauuucgcugacuaugaggaacugagggagcaauugaguucaguaucuucauuugagagguucgaaauauuccccaaagaaagcucauggcccaaccacaccguaaccggagugucagcaucaugcucccauaauggggaaagcaguuuuuacagaaauuugcuauggcugacggugaagaaugguuuguacccaaacuugagcaaguccuaugcaaacaacaaagaaaaagaaguccuuguacuaugggguguucaucacccgccaaacauaguugaccaaaagacccucuaucguacagaaaaugcuuauguuucuguagugucuucacauuauagcagaaaauucaccccagaaauagccaaaagacccaaaguaagagaucaagaaggaagaaucaacuacuacuggacucugcuugaacccggggauacaauaauauuugaggcaaauggaaaucuaauagcgccaagauaugcuuucgcacugaguagaggcuuuggaucaggaaucaucaacucaaaugcaccaauggauaaaugugaugcgaagugccaaacaccucggggagcuauaaacagcagucuuccuuuccagaacguacacccagucacaauaggagaguguccaaaguaugucaggagugcaaaauuaaggaugguuacaggacuaaggaacaucccauccauucaauccagagguuuguuuggagccauugccgguuucauugaagggggguggacuggaaugguagaugguugguaugguuaucaucaucagaaugagcaaggaucuggcuaugcugcagaucaaaaaagcacacaaaaugccauuaaugggauuacaaacaaggugaauucuguaauugagaaaaugaacacucaauucacagcagugggcaaagaauucaacaaauuggaaagaaggauggaaaacuugaauaaaaaaguugaugauggguuuauagacauuuggacauauaaugcagaacuguugguucuacuggaaaaugaaaggacuuuggauuuccaugacuccaaugugaagaaucuguaugagaaaguaaaaagccaguuaaagaauaaugcuaaagaaauaggaaauggguguuuugaauucuaucacaaguguaaugaugaaugcauggagaguguaaagaauggaaccuaugacuauccaaaauauuccgaagaaucaaaguuaaacagggagaaaauugauggagugaaauuggaaucaaugggagucuaucagauucuggcgaucuacucaacagucgccaguucucugguucuuuuggucucccugggggcaaucagcuucuggauguguuccaaugggucuuugcaguguagaauaugcaucuaa

SEQ ID NO: 38423 - RNA, 1698 nt, Artificial Sequence
  derived and/or modified CDS sequence (wt) from hemagglutinin__InfluenzaA__ADW10560
augaaaguaaaacuacugguccuguuaugcacauuuacagcuacauaugcagacacaauauguauaggcuaccaugcuaacaacucgaccgacacuguugacacaguauuugaaaagaauguuacagugacacacucugucaaccugcuugagaacagucacaauggaaaacugugucuauuaaaaggaauagccccacuacaauuggguaacugcagcguugccggguggaucuuaggaaauccagaaugcgaauuacugauuuccaaggagucaugguccuacauuguagaaaaaccaaauccugagaauggaacauguuacccagggcauuucgcugacuaugaggaacugagggagcaauugaguucaguaucuucauuugagagguucgaaauauuccccaaagaaagcucauggcccaaccacaccguaaccggagugucagcaucaugcucccauaauggggaaagaaguuuuuacagaaauuugcuauggcugacggggaagaaugguuuguacccaaaccugagcaaguccuaugcaaacaacaaagaaaaagaaguccuuguacuaugggguguucaucacccgccagacauaggugaccaaaagacccucuaucauacagaaaaugcuuauguuucuguagugucuucacauuauagcagaaaauucaccccagaaauagccaaaagacccaaaguaagagaucaagaaggaagaaucaacuacuacuggacucugcuugaacccggggauacaauaauauuugaggcaaauggaaaucuaauagcgccaagauaugcuuucgcacugaguagaggcuuuggaucaggaaucaucaacucaaaugcaccaauggauaaaugugaugcgaagugccaaacaccucagggagcuauaaacagcagucuuccuuuccagaacguacacccagucacaauaggagaguguccaaaguaugucaggagugcaaaauuaaggaugguuacuggacuaaggaacaucccauccauucaauccagagguuuguuuggagccauugccgguuucauugaagggggguggacuggaaugguagaugguugguaugguuaucaucaucagaaugagcaagggucuggcuaugcugcagaucaaaaaagcacacaaaaugccauuaaugggauuacaaacaaggugaauucuguaauugagaaaaugaacacucaauucacagcagugggcaaagaauucaacaaauuggaaagaaggauggaaaacuugaauaaaaaaguugaugauggguuuauagacauuuggacauauaaugcagaacuguugguucuacuggaaaaugaaaggacuuuggauuuccaugauuccaaugugaagaaucuguaugagaaaguaaaaagccaguuaaagaauaaugcuaaagaaauaggaaauggguguuuugaauucuaucacaaguguaacgaugagugcauggagaguguaaagaauggaacuuaugacuauccaaaauauuccgaagaaucaaaguuaaacagggagaaaauugauggagugaaauuggaaucaaugggagucuaucagauucuggcgaucuacucaacagucgccaguucucuuguucuuuuggucucccugggggcaaucaguuucuggauguguuccaaugggucuuugcaguguagaauaugcaucuaa

SEQ ID NO: 38424 - RNA, 1698 nt, Artificial Sequence
  derived and/or modified CDS sequence (wt) from hemagglutinin__InfluenzaA__ADW10571
augaaaguaaaacuacugguccuguuaugcacauuuacagcuacauaugcagacacaauauguauuggcuaccaugcuaacaacucgaccgacacuguugacacaguacuugaaaagaaugugacagugacacacucugucaaccugcuugagaacagucacaauggaaaacuaugucuauuaaaaggaauagccccacuacaauuggguaacugcagcguugccggguggaucuuaggaaacccagaaugcgaauuacugauuuccaaggagucaugguccuacauuguagaaaaaccaaauccugagaauggaacauguuacccaggacauuucgcugacuaugaggaacugagggagcaauugaguucaguaucuucauuugagagguucgaaauauuccccaaagaaagcucauggcccaaccacaccguaaccggagugucagcaucaugcucccauaauggggaaaacaguuuuuacagaaauuugcuauggcugacggggaagaaugguuuguacccaaaccugagcaaguccuaugcaaacaacaaagaaaaagaaguccuuguacuaugggguguucaucacccgccaaacauggcugaccaaaagacccucuaucauacagaaaaugcuuauguuucuguagugucuucacauuauagcagaaaauucaccccagaaauagccaaaagacccaaaguaagagaucaagaaggaagaaucaacuacuacuggacucugcuugaacccggggauacaauaauauuugaggcaaauggaaaucuaauagcgccaagauaugcuuucgcacugaguagaggcuuuggaucaggaaucaucaacucaaaugcaccaauggauaaaugugaugcgaagugccaaacaccucaaggagcuauaaacagcagucuuccuuuccagaacguacacccagucacaauaggagaguguccaaaguaugucaggagugcaaaauuaaggaugguuacaggacuaaggaacaucccauccauucaauccagagguuuguuuggagccauugccgguuucauugaagggggguggacuggaaugguagaugguugguaugguuaucaucaucagaaugagcaaggaucuggcuaugcugcagaucaaaaaagcacacaaaaugccauuaaugggauuacaaacaaggugaauucuguaauugagaaaaugaacacucaauucacagcagugggcaaagaauucaacaaauuggaaagaaggauggaaaacuugaauaaaaaaguugaugauggguuuauagacauuuggacauauaaugcagaacuguugguucuacuggaaaaugaaaggacuuuggauuuccaugacuccaaugugaagaaucuguaugagaaaguaaaaagccaguuaaagaauaaugcuaaagaaauaggaaauggguguuuugaauucuaucacaaguguaacgaugaaugcauggagaguguaaagaauggaacuuaugacuauccaaaauauuccgaagaaucaaaguuaaacagggagaaaauugauggagugaaauuggaaucaaugggagucuaucagauucuggcgaucuacucaacagucgccaguucucugguucuuuuggucucccugggggcaaucagcuucuggauguguuccaaugggucuuugcaguguagaauaugcaucuaa

SEQ ID NO: 38425 - RNA, 1698 nt, Artificial Sequence
  derived and/or modified CDS sequence (wt) from hemagglutinin__InfluenzaA__ADW10582
augaaaguaaaacuacugguccuguuaugcacauuuacagcuacauaugcagacacaauauguauaggcuaccaugcuaacaacucgaccgacacuguugacacaguacuugaaaagaaugugacagugacacacucugucaaccugcuugagaacagucacaauggaaaacuaugucuauuaaaaggaauagccccacuacaauuggguaacugcagcguugccggguggaucuuaggaaacccagaaugcgaauuacugauuuccaaagagucaugguccuacauuguagaaaaaccaaauccugagaauggaacauguuacccagggcauuucgcugacuaugaggaacugagggagcaauugaguucaguaucuucauuugagagguucgaaauauuccccaaagaaagcucauggcccaaccacaccguaaccggagugucagcaucaugcucccauaauggggaaagcaguuuuuacagaaauuugcuauggcugacggggaagaaugguuuguacccaaaccugagcaaguccuaugcaaacaacaaagaaaaagaaguccuuguacuaugggguguucaucacccgccaaacauaguugaccaaaagacccucuaucguacagaaaaugcuuauguuucuguagugucuucacauuauagcagaaaauucaccccagaaauagccaaaagacccaaaguaagagaucaagaaggaagaaucaacuacuacuggacucugcuugaacccggggauacaauaauauuugaggcaaauggaaaucuaauagcgccaagauaugcuuucgcacugaguagaggcuuuggaucaggaaucaucaacucaaaugcaccaauggauaaaugugaugcgaagugccaaacaccucagggagcuauaaacagcagucuuccuuuccagaacguacacccagucacaauaggagaguguccaaaguaugucaggagugcaaaauuaaggaugguuacaggacuaaggaacaucccauccauucaauccagagguuuguuuggagccauugccgguuucauugaagggggguggacuggaaugguagaugguugguaugguuaucaucaucagaaugagcaaggaucuggcuaugcugcagaucaaaaaagcacacaaaaugccauuaaugggauuacaaacaaggugaauucuguaauugagaaaaugaacacucaauucacagcagugggcaaagaauucaacaaauuggaaagaaggauggaaaacuugaauaaaaaaguugaugauggguuuauagacauuuggacauauaaugcagaacuguugguucuacuggaaaaugaaaggacuuuggauuuccaugacuccaaugugaagaaucuguaugagaaaguaaaaagccaguuaaagaauaaugcuaaagaaauaggaaauggguguuuugaauucuaucacaaguguaacgaugaaugcauggagaguguaaagaauggaacuuaugacuauccaaaauauuccgaagaaucaaaguuaaacagggagaaaauugauggagugaaauuggaaucaaugggagucuaucagauucuggcgaucuacucaacagucgccaguucucugguucuuuuggucucccugggggcaaucagcuucuggauguguuccaaugggucuuugcaguguagaauaugcaucuaa

SEQ ID NO: 38426 - RNA, 1698 nt, Artificial Sequence; identical to SEQ ID NO: 38401
  derived and/or modified CDS sequence (wt) from hemagglutinin__InfluenzaA__ADW10593

SEQ ID NO: 38427 - RNA, 1698 nt, Artificial Sequence
  derived and/or modified CDS sequence (wt) from hemagglutinin__InfluenzaA__ADW10604
augaaaguaaaacuacugguccuguuaugcacauuuacagcuacauaugcagacacaauauguauaggcuaccaugcuaacaacucgaccgacacuguugacacaguacuugaaaagaaugugacagugacacacucugucaaccugcuugagaacagucacaaugggaaacuauguuuauuaaaaggaauagccccacuacaauuggguaacugcagcguugccggguggaucuuaggaaacccagaaugcgaauuacugauuuccaaggagucaugguccuacauuguagaaaaaccaaauccugagaauggaacauguuacccagggcauuucgcugacuaugaggaacugagggagcaauugaguucaguaucuucauuugagagguucgaaauauuccccaaagaaagcucauggcccaaccacaccguaaccggagugucagcaucaugcucccauaauggggaaagcaguuuuuacagaaauuugcuauggcugacggugaagaaugguuuguacccaaacuugagcaaguccuaugcaaacaacaaagaaaaagaaguccuuguacuaugggguguucaucacccgccaaacauaguugaccaaaagacccucuaucguacagaaaaugcuuauguuucuguagugucuucacauuauagcagaaaauucaccccagaaauagccaaaagacccaaaguaagagaucaagaaggaagaaucaacuacuacuggacucugcuugaacccggggauacaauaauauuugaggcaaauggaaaucuaauagcgccaagauaugcuuucgcacugaguagaggcuuuggaucaggaaucaucaacucaaaugcaccaauggauaaaugugaugcgaagugccaaacaccucggggagcuauaaacagcagucuuccuuuccagaacguacacccagucacaauaggagaguguccaaaguaugucaggagugcaaaauuaaggaugguuacaggacuaaggaacaucccauccauucaauccagagguuuguuuggagccauugccgguuucauugaagggggguggacuggaaugguagaugguugguaugguuaucaucaucagaaugagcaaggaucuggcuaugcugcagaucaaaaaagcacacaaaaugccauuaaugggauuacaaacaaggugaauucuguaauugaaaaaaugaacacucaauucacagcagugggcaaagaauucaacaaauuggaaagaaggauggaaaacuugaauaaaaaaguugaugauggguuuauagacauuuggacauauaaugcagaacuguugguucuacuggaaaaugaaaggacuuuggauuuccaugacuccaaugugaagaaucuguaugagaaaguaaaaagccaguuaaagaauaaugcuaaagaaauaggaaauggguguuuugaauucuaucacaaguguaacgaugaaugcauggagaguguaaagaauggaaccuaugacuauccaaaauauuccgaagaaucaaaguuaaacagggagaaaauugauggagugaaauuggaaucaaugggagucuaucagauucuggcgaucuacucaacagucgccaguucucugguucuuuuggucucccugggggcaaucagcuucuggauguguuccaaugggucuuugcaguguagaauaugcaucuaa

SEQ ID NO: 38428 - RNA, 1698 nt, Artificial Sequence
  derived and/or modified CDS sequence (wt) from hemagglutinin__InfluenzaA__ADW10615
augaaaguaaaacuacugguccuguuaugcacauuuacagcuacauaugcagacacaauauguauaggcuaccaugcuaacaacucgaccgacacuguugacacaguacuugaaaagaaugugacagugacacacucugucaaccugcuugagaacagucacaaugggaaacuauguuuauuaaaaggaauagccccacuacaauuggguaacugcagcguugccggguggaucuuaggaaacccagaaugcgaauuacugauuuccaaggagucaugguccuacauuguagaaaaaccaaauccugagaauggaacauguuacccagggcauuucgcugacuaugaggaacugagggagcaacugaguucaguaucuucauuugagagguucgaaauauuccccaaagaaagcucauggcccaaccacaccguaaccggagugucagcaucaugcucccauaauggggaaagcaguuuuuacagaaauuugcuauggcugacggugaagaaugguuuguacccaaacuugagcaaguccuaugcaaacaacaaagaaaaagaaguccuuguacuaugggguguucaucacccgccaaacauaguugaccaaaagacccucuaucguacagaaaaugcuuauguuucuguagugucuucacauuauagcagaaaauucaccccagaaauagccaaaagacccaaaguaagagaucaagaaggaagaaucaacuacuacuggacucugcuugaacccggggauacaauaauauuugaggcaaauggaaaucuaauagcgccaagauaugcuuucgcacugaguagaggcuuuggaucaggaaucaucaacucaaaugcaccaauggauaaaugugaugcgaagugccaaacaccucggggagcuauaaacagcagucuuccuuuccagaacguacacccagucacaauaggagaguguccaaaguaugucaggagugcaaaauuaaggaugguuacaggacuaaggaacaucccauccauucaauccagagguuuguuuggagccauugccgguuucauugaagggggguggacuggaaugguagaugguugguaugguuaucaucaucagaaugagcaaggaucuggcuaugcugcagaucaaaaaagcacacaaaaugccauuaaugggauuacaaacaaggugaauucuguaauugagaaaaugaacacucaauucacagcagugggcaaagaauucaacaaauuggaaagaaggauggaaaacuugaauaaaaaaguugaugauggguuuauagacauuuggacauauaaugcagaacuguugguucuacuggaaaaugaaaggacuuuggauuuccaugacuccaaugugaagaaucuguaugagaaaguaaaaagccaguuaaagaauaaugcuaaagaaauaggaaauggguguuuugaauucuaucacaaguguaacgaugaaugcauggagaguguaaagaauggaaccuacgacuauccaaaauauuccgaagaaucaaaguuaaacagggagaaaauugauggagugaaauuggaaucaaugggagucuaucagauucuggcgaucuacucaacagucgccaguucucugguucuuuuggucucccugggggcaaucagcuucuggauguguuccaaugggucuuugcaguguagaauaugcaucuaa

SEQ ID NO: 38429 - RNA, 1698 nt, Artificial Sequence
  derived and/or modified CDS sequence (wt) from hemagglutinin__InfluenzaA__ADW10626
augaaaguaaaacuacugguccuguuaugcacauuuacagcuacauaugcagacacaauauguauaggcuaccaugcuaacaacucgaccgacacuguugacacaguacuugaaaagaaugugacagugacacacucugucaaccugcuugagaacagucacaaugggaaacuauguuuauuaaaaggaauagccccacuacaauuggguaacugcagcguugccggguggaucuuaggaaacccagaaugcgaauuacugauuuccaaggagucaugguccuacauuguagaaaaaccaaauccugagaauggaacauguuacccagggcauuucgcugacuaugaggaacugagggagcaauugaguucaguaucuucauuugagagguucgaaauauuccccaaagaaagcucauggcccaaccacaccguaaccggagugucagcaucaugcucccauaauggggaaagcaguuuuuacagaaauuugcuauggcugacggugaagaaugguuuguacccaaacuugagcaaguccuaugcaaacaacaaagaaaaagaaguccuuguacuaugggguguucaucacccgccaagcauaguugaccaaaagacccucuaucguacagaaaaugcuuauguuucuguagugucuucacauuauagcagaaaauucaccccagaaauagccaaaagacccaaaguaagagaucaagaaggaagaaucaacuacuacuggacucugcuugaacccggggauacaauaauauuugaggcaaauggaaaucuaauagcgccaagauaugcuuucgcacugaguagaggcuuuggaucaggaaucaucaacucaaaugcaccaauggauaaaugugaugcgaagugccaaacaccucggggagcuauaaacagcagucuuccuuuccagaacguacacccagucacaauaggagaguguccaaaguaugucaggagugcaaaauuaaggaugguuacaggacuaaggaacaucccauccauucaauccagagguuuguuuggagccauugccgguuucauugaagggggguggacuggaaugguagaugguugguaugguuaucaucaucagaaugagcaaggaucuggcuaugcugcagaucaaaaaagcacacaaaaugccauuaaugggauuacaaacaaggugaauucuguaauugagaaaaugaacacucaauucacagcagugggcaaagaauucaacaaauuggaaagaaggauggaaaacuugaauaaaaaaguugaugauggguuuauagacauuuggacauauaaugcagaacuguugguucuacuggaaaaugaaaggacuuuggauuuccaugacuccaaugugaagaaucuguaugagaaaguaaaaagccaguuaaagaauaaugcuaaagaaauaggaaauggguguuuugaauucuaucacaaguguaacgaugaaugcauggagaguguaaagaauggaaccuaugacuauccaaaauauuccgaagaaucaaaguuaaacagggagaaaauugauggagugaaauuggaaucaaugggagucuaucagauucuggcgaucuacucaacagucgccaguucucugguucuuuuggucucccugggggcaaucagcuucuggauguguuccaaugggucuuugcaguguagaauaugcaucuaa

SEQ ID NO: 38430 - RNA, 1698 nt, Artificial Sequence
  derived and/or modified CDS sequence (wt) from hemagglutinin__InfluenzaA__ADW10721
augaaaguaaaacuacugguccuguuaugcacauuuacagcuacauaugcagacacaauauguauaggcuaccaugcuaacaacucgaccgacacuguugacacaguacuugaaaagaaugugacagugacacacucugucaaccugcuugagaacagucacaauggaaaacuauguuuauuaaaaggaauagccccacuacaauuggguaacugcagcguugccggguggaucuuaggaaacccagaaugcgaauuacugauuuccaaggagucaugguccuacauuguagaaaaaccaaauccugagaauggaacauguuacccagggcauuucgcugacuaugaggaacugagggagcaauugaguucaguaucuucauuuaagagguucgaaauauuccccaaagaaagcucauggcccaaccacaccguaaccggagugucagcaucaugcucccauaauggggaaagcaguuuuuacagaaauuugcuauggcugacggugaagaaugguuuguacccaaacuugagcaaguccuaugcaaacaacaaagaaaaagaaguccuuguacuaugggguguucaucacccgccaaacauaguugaccaaaggacccucuaucauacagaaaaugcuuauguuucuguagugucuucacauuauagcagaaaauucaccccagaaauagccaaaagacccaaaguaagaaaucaagaaggaagaaucaacuacuacuggacucugcuugaacccggggauacaauaauauuugaggcaaauggaaaucuaauagcgccaagauaugcuuucgcacugaguagaggcuuuggaucaggaaucaucaacucaaaugcaccaauggauaaaugugaugcgaagugccaaacaccucggggagcuauaaacagcagucuuccuuuccagaacguacacccagucacaauaggagaguguccaaaguaugucaggagugcaaaauuaaggaugguuacaggacuaaggaacaucccauccauucaauccagagguuuguuuggagccauugccgguuucauugaagggggguggacuggaaugguagaugguugguaugguuaucaucaucagaaugagcaaggaucuggcuaugcugcagaucaaaaaagcacacaaaaugccauuaaugggauuacaaacaaggugaauucuguaauugagaaaaugaacacucaauucacagcagugggcaaagaauucaacaaauuggaaagaaggauggaaaacuugaauaaaaaaguugaugauggguuuauagacauuuggacauauaaugcagaacuguugguucuacuggaaaaugaaaggacuuuggauuuccaugacuccaaugugaagaaucuguaugagaaaguaaaaagccaguuaaagaauaaugcuaaagaaauaggaaauggguguuuugaauucuaucacaaguguaacgaugaaugcauggagaguguaaagaauggaaccuaugacuauccaaaauauuccgaagaaucaaaguuaaacagggagaaaauugauggagugaaauuggaaucaaugggagucuaucagauucuggcgaucuacucaacagucgccaguucucugguucuuuuggucucccugggggcaaucagcuucuggauguguuccaaugggucuuugcaguguagaauaugcaucuaa

SEQ ID NO: 38431 - RNA, 1698 nt, Artificial Sequence
  derived and/or modified CDS sequence (wt) from hemagglutinin__InfluenzaA__ADW10743
augaaaguaaaacuacugguccuguuaugcacauuuacagcuacauaugcagacacaauauguauaggcuaccaugcuaacaacucgaccgacacuguugacacaguacuugaaaagaaugugacagugacacacucugucaaccugcuugagaacagucacaaugggaaacuauguuuauuaaaaggaauagccccacuacaauuggguaacugcagcguugccggguggaucuuaggaaacccagaaugcgaauuacugauuuccaaggagucaugguccuacauuguagaaaaaccaaauccugagaauggaacauguuacccagggcauuucgcugacuaugaggaacugagggagcaauugaguucaguaucuucauuugagagguucgaaauauuccccaaagaaagcucauggcccaaccacaccguaaccggagugucagcaucaugcucccauaauggggaaagcaguuuuuacagaaauuugcuauggcugacggugaagaaugguuuguacccaaacuugagcaaguccuaugcaaacaacaaagaaaaagaaguccuuguacuaugggguguucaucacccgccaaacauaguugaccaaaagacccucuaucguacagaaaauacuuauguuucuguagugucuucacauuauagcagaaaauucaccccagaaauagccaaaagacccaaaauaagagaucaagaaggaagaaucaacuacuacuggacucugcuugaacccggggauacaauaauauuugaggcaaauggaaaucuaauagcgccaagauaugcuuucgcacugaguagaggcuuuggaucaggaaucaucaacucaaaugcaccaauggauaaaugugaugcgaagugccaaacaccucggggagcuauaaacagcagucuuccuuuccagaacguacacccagucacaauaggagaguguccaaaguaugucaggaguguaaaauuaaggaugguuacaggacuaaggaacaucccauccauucaauccagagguuuguuuggagccauugccgguuucauugaagggggguggacuggaaugguagaugguugguaugguuaucaucaucagaaugagcaaggaucuggcuaugcugcagaucaaaaaagcacacaaaaugccauuaaugggauuacaaacaaggugaauucuguaauugagaaaaugaacacucaauucacagcagugggcaaagaauucaacaaauuggaaagaaggauggaaaacuugaauaaaaaaguugaugauggguuuauagacauuuggacauauaaugcagaacuguugguucuacuggaaaaugaaaggacuuuggauuuccaugacuccaaugugaagaaucuguaugagaaaguaaaaagccaguuaaagaauaaugcuaaagaaauaggaaauggguguuuugaauucuaucacaaguguaacgaugaaugcauggagaguguaaagaauggaaccuaugacuauccaaaauauuccgaagaaucaaaguuaaacagggagaaaauugauggagugaaauuggaaucaaugggagucuaucagauucuggcgaucuacucaacagucgccaguucucugguucuuuuggucucccugggggcaaucagcuucuggauguguuccaaugggucuuugcaguguagaauaugcaucuaa

SEQ ID NO: 38432 - RNA, 1698 nt, Artificial Sequence
  derived and/or modified CDS sequence (wt) from hemagglutinin__InfluenzaA__ADW10754
augaaaguaaaacuacugguccuguuaugcacauuuacagcuacauaugcagacacaauauguauaggcuaccaugcuaacaacucgaccgacacuguugacacaguacuugaaaagaaugugacagugacacacucugucaaccugcuugagaacagucacaauggaaaacuaugucuauuaaaaggaauagccccacuacaauuggguaacugcagcguugccggguggaucuuaggaaacccagaaugcgaauuacugauuuccaaggagucaugguccuacauuguagaaaaaccaaauccugagaauggaacauguuacccagggcauuucgcugacuaugaggaacugagggagcaauugaguucaguaucuucauuugagagguucgaaauauuccccaaagaaagcucauggcccaaccacaccguaaccggagugucagcaucaugcucacauaauggggaaaacaguuuuuacagaaauuugcuauggcugacggggaagaaugguuuguacccaaaccugagcaaguccuaugcaaacaacaaagaaaaagaaguccuuguacuaugggguguucaucacccgccaaacauagcugaccaaaagacccucuaucauacagaaaaugcuuauguuucuguagugucuucacauuacagcagaaaauucaccccagaaauagccaaaagacccaaaguaagagaucaagaaggaagaaucaacuacuacuggacucugcuugaacccggggauacaauaauauuugaggcaaauggaaaucuaauagcgccaagauaugcuuucgcacugaguagaggcuuuggaucaggaaucaucaacucaaaugcaccaauggauaaaugugaugcgaagugccaaacaccucaaggagcuauaaacagcagucuuccuuuccagaacguacacccagucacaauaggagaguguccaaaguaugucaggagugcaaaauuaaggaugguuacaggacuaaggaacaucccauccguucaauccagagguuuguuuggagccauugccgguuucauugaagggggguggacuggaaugguagaugguugguaugguuaucaucaucagaaugaacaaggaucuggcuaugcugcagaucaaaaaagcacacaaaaugccauuaaugggauuacaaacaaggugaauucuguaauugagaaaaugaacacucaauucacagcagugggcaaagaauucaacaaauuggaaagaaggauggaaaacuugaauaaaaaaguugaugauggguuuauagacauuuggacauauaaugcagaacuguugguucuacuggaaaaugaaaggacuuuggauuuccaugacuccaaugugaagaaucuguaugagaaaguaaaaagccaguuaaagaauaaugcuaaagaaauaggaaauggguguuuugaauucuaucacaaguguaacgaugaaugcauggagaguguaaagaauggaacuuaugacuauccaaaauauuccgaagaaucaaaguuaaacagggagaaaauugauggagugaaauuggaaucaaugggagucuaucagauucuggcgaucuacucaacagucgccaguucucugguucuuuuggucucccugggggcaaucagcuucuggauguguuccaaugggucuuugcaguguagaauaugcaucuaa

SEQ ID NO: 38433 - RNA, 1698 nt, Artificial Sequence
  derived and/or modified CDS sequence (wt) from hemagglutinin__InfluenzaA__ADW10765
augaaaguaaaacuacugguccuguuaugcacauuuacagcuacauaugcagacacaauauguauaggcuaccaugcuaacaacucgaccgacacuguugacacaguacuugaaaagaaugugacagugacacacucugucaaccugcuugagaacagucacaauggaaaacuauguuuauuaaaaggaauagccccacuacaauuggguaacugcagcguugccggguggaucuuaggaaacccagaaugcgaauuacugauuuccaaggagucaugguccuacauuguagaaaaaccaaauccugagaauggaacauguuacccagggcauuucgcugacuaugaggaacugagggagcaauugaguucaguaucuucauuugagagguucgaaauauuccccaaagaaagcucauggcccaaccacaccguaaccggagugucagcaucaugcucccauaauggggaaagcaguuuuuacagaaauuugcuauggcugacggugaagaaugguuuguacccaaacuugagcaaguccuaugcaaacaacaaagaaaaagaaguccuuguacuaugggguguucaucacccgccaaacauaguugaccaaaagacccucuaucauacagaaaaugcuuauguuucuguagugucuucacauuauagcagaaaauucaccccagaaauagccaaaagacccaaaguaagaaaucaagaaggaagaaucaacuacuacuggacucugcuugaacccggggauacaauaauauuugaggcaaauggaaaucuaauagcgccaagauaugcuuucgcacugaguagaggcuuuggaucaggaaucaucaacucaaaugcaccaauggauaaaugugaugcgaagugccaaacaccucggggagcuauaaacagcagucuuccuuuccagaacguacacccagucacaauaggagaguguccaaaguaugucaggagugcaaaauuaaggaugguuacaggacuaaggaacaucccauccauucaauccagagguuuguuuggagccauugccgguuucauugaagggggguggacuggaaugguagaugguugguaugguuaucaucaucagaaugagcaaggaucuggcuaugcugcagaucaaaaaagcacacaaaaugccauuaaugggauuacaaacaaggugaauucuguaauugagaaaaugaacacucaauucacagcagugggcaaagaauucaacaaauuggaaagaaggauggaaaacuugaauaaaaaaguugaugauggguuuauagacauuuggacauauaaugcagaacuguugguucuacuggaaaaugaaaggacuuuggauuuccaugacuccaaugugaagaaucuguaugagaaaguaaaaagccaguuaaagaauaaugcuaaagaaauaggaaauggguguuuugaauucuaucacaaguguaacgaugaaugcauggagaguguaaagaauggaaccuaugacuauccaaaauauuccgaagaaucaaaguuaaacagggagaaaauugauggagugaaauuggaaucaaugggagucuaucagauucuggcgaucuacucaacagucgccaguucucugguucuuuuggucucccugggggcaaucagcuucuggauguguuccaaugggucuuugcaguguagaauaugcaucuaa

SEQ ID NO: 38434 - RNA, 1698 nt, Artificial Sequence
  derived and/or modified CDS sequence (wt) from hemagglutinin__InfluenzaA__ADW10776
augaaaguaaaacuacugguccuguuaugcacauuuacagcuacauaugcagacacaauauguauaggcuaccaugcuaacaacucgaccgacacuguugacacaguacuugaaaagaaugugacagugacacacucugucaaccugcuugagaacagucacaauggaaaacuaugucuauuaaaaggaauagccccacuacaauuggguaacugcagcguugccggguggaucuuaggaaacccagaaugcgaauuacugauuuccaaggagucaugguccuacauuguagaaaaaccaaauccugagaauggaacauguuacccagggcauuucgcugacuaugaggaacugagggagcaauugaguucaguaucuucauuugagagguucgaaauauuccccaaagaaagcucauggcccaaccacaccguaaccggagugucagcaucaugcucccauaauggggaaagcaguuuuuacagaaauuugcuauggcugacggggaagaaugguuuguacccaaacuugagcaaguccuaugcaaacgacaaagaaaaagaaguccuuguacuaugggguguucaucacccgccaaacauaguugaccaaaagacccucuaucguacagaaaaugcuuauguuucuguagugucuucacauuauagcagaaaauucaccccagaaauagccaaaagacccaaaguaagagaucaagaaggaagaaucaacuacuacuggacucugcuugaacccggggauacaauaauauuugaggcaaauggaaaucuaauagcgccaagauaugcuuucgcacugaguagaggcuuuggaucaggaaucaucaacucaaaugcaccaauggauaaaugugaugcgaagugccaaacaccucagggagcuauaaacagcagucuuccuuuccagaacguacacccagucacaauaggagaguguccaaaguaugucaggagugcaaaauuaaggaugguuacaggacuaaggaacaucccauccauucaauccagagguuuguuuggagccauugccgguuucauugaagggggguggacuggaaugguagaugguugguaugguuaucaucaucagaaugagcaaggaucuggcuaugcugcagaucaaaaaagcacacaaaaugccauuaaugggauuacaaacaaggugaauucuguaauugagaaaaugaacacucaauucacagcagugggcaaagaauucaacaaauuggaaagaaggauggaaaacuugaauaaaaaaguugaugauggguuuauagacauuuggacauauaaugcagaacuguugguucuacuggaaaaugaaaggacuuuggauuuccaugacuccaaugugaagaaucuguaugagaaaguaaaaagccaguuaaagaauaaugcuaaagaaauaggaaauggguguuuugaauucuaucacaaguguaacgaugaaugcauggagaguguaaagaauggaacuuaugacuauccaaaauauuccgaagaaucaaaguuaaacagggagaaaauugauggagugaaauuggaaucaaugggagucuaucagauucuggcgaucuacucaacagucgccaguucucugguucuuuuggucucccugggggcaaucagcuucuggauguguuccaaugggucuuugcaguguagaauaugcaucuaa

SEQ ID NO: 38435 - RNA, 1698 nt, Artificial Sequence
  derived and/or modified CDS sequence (wt) from hemagglutinin__InfluenzaA__ADW10787
augaaaguaaaaauacugguccuguuaugcacauuuacagcuacauaugcagacacaauauguauaggcuaccaugcuaacaacucgaccgacacuguugacacaguacuugaaaagaaugugacagugacacacucugucaaccugcuugagaacagucacaauggaaaacuauguuuauuaaaaggaauagccccacuacaauuggguaacugcagcguugccggguggaucuuaggaaacccagaaugcgaauuacugauuuccaaggagucaugguccuacauuguagaaaaaccaaauccugagaauggaacauguuacccagggcauuucgcugacuaugaggaacugagggagcaauugaguucaguaucuucauuugagagguucgaaauauuccccaaagaaagcucauggcccaaccacaccguaaccggagugucagcaucaugcucccauaauggggaaagcaguuuuuacagaaauuugcuauggcugacggugaagaaugguuuguacccaaacuugagcaaguccuaugcaaacaacaaagaaaaagaaguccuuguacuaugggguguucaucacccgccaaacauaguugaccaaaagacccucuaucguacagaaaaugcuuauguuucuguagugucuucacauuauagcagaaaauucaccccagaaauagccaaaagacccaaaguaagagaucaagaaggaagaaucaacuacuacuggacucugcuugaacccggggauacaauaauauuugaggcaaauggaaaucuaauagcgccgagauaugcuuucgcacugaguagaggcuuuggaucaggaaucaucaacucaaaugcaccaauggauaaaugugaugcgaagugccaaacaccucggggagcuauaaacagcagucuuccuuuccagaacguacacccagucacaauaggagaguguccaaaguaugucaggagugcaaaauuaaggaugguuacaggacuaaggaacaucccauccauucaauccagagguuuguuuggagccauugccgguuucauugaagggggguggacuggaaugguagaugguugguaugguuaucaucaucagaaugagcaaggaucuggcuaugcugcagaucaaaaaagcacacaaaaugccauuaaugggauuacaaacaaggugaauucuguaauugagaaaaugaacacucaauucacagcagugggcaaagaguucaacaaauuggaaagaaggauggaaaacuugaauaaaaaaguugaugauggguuuauagacauuuggacauauaaugcagaacuguugguucuacuggaaaaugaaaggacuuuggauuuccaugacuccaaugugaagaaucuguaugagaaaguaaaaagccaguuaaagaauaaugcuaaagaaauaggaaauggguguuuugaauucuaucacaaguguaacgaugaaugcauggagaguguaaagaauggaaccuaugacuauccaaaauauuccgaagaaucaaaguuaaacagggagaaaauugauggagugaaauuggaaucaaugggagucuaucagauucuggcgaucuacucaacagucgccaguucucugguucuuuuggucucccugggggcaaucagcuucuggauguguuccaaugggucuuugcaguguagaauaugcaucuaa

SEQ ID NO: 38436 - RNA, 1698 nt, Artificial Sequence
  derived and/or modified CDS sequence (wt) from hemagglutinin__InfluenzaA__ADW10798
augaaaguaaaacuacugguccuguuaugcacauuuacagcuacauaugcagacacaauauguauaggcuaccaugcuaacaacucgaccgacacuguugacacaguacuugaaaagaaugugacagugacacacucugucaaccugcuugagaacagucacaauggaaaacuaugucuauuaaaaggaauagccccacuacaauuggguaacugcagcguugccggguggaucuuaggaaacccagaaugcgaauuacugauuuccaaagagucaugguccuacauuguagaaaaaccaaauccugagaauggaacauguuacccagggcauuucgcugacuaugaggaacugagggagcaauugaguucaguaucuucauuugagagguucgaaauauuccccaaagaaagcucauggcccaaccacaccguaaccggagugucagcaucaugcucccauaauggggaaagcaguuuuuacagaaauuugcuauggcugacggggaagaaugguuuguacccaaaccugagcaaguccuaugcaaacaacaaagagaaagaaguccuuguacuaugggguguucaucacccgccaaacauaguugaccaaaagacccucuaccguacagaaaaugcuuauguuucuguagugucuucacauuauagcagaaaauucaccccagaaauagccaaaagacccaaaguaagagaucaagaaggaagaaucaacuacuacuggacucugcuugaacccggggauacaauaauauuugaggcaaauggaaaucuaauagcgccaagauaugcuuucgcacugaguagaggcuuuggaucaggaaucaucaacucaaaugcaccaauggguaaaugugaugcgaagugccaaacaccucagggagcuauaaacagcagucuuccuuuccagaacguacacccagucacaauaggagaguguccaaaguaugucaggagugcaaaauuaaggaugguuacaggacuaaggaacaucccauccauucaauccagagguuuguuuggagccauugccgguuucauugaagggggguggacuggaaugguagaugguugguaugguuaucaucaucagaaugagcaaggaucuggcuaugcugcagaucaaaaaagcacacaaaaugccauuaaugggauuacaaacaaggugaauucuguaauugagaaaaugaacacucaauucacagcagugggcaaagaauucaacaaauuggaaagaaggguggaaaacuugaauaaaaaaguugaugauggguuuauagacauuuggacauauaaugcagaacuguugguucuacuggaaaaugaaaggacuuuggauuuccaugacuccaaugugaagaaucuguaugagaaaguaaaaagccaguuaaagaauaaugcuaaagaaauaggaaauggguguuuugaauucuaucacaaguguaacgaugaaugcauggagaguguaaagaauggaacuuaugacuauccaaaauauuccgaagaaucaaaguuaaacagggagaaaauugauggagugaaauuggaaucaaugggagucuaucagauucuggcgaucuacucaacagucgccaguucucugguucuuuuggucucccugggggcaaucagcuucuggauguguuccaaugggucuuugcaguguagaauaugcaucuaa

SEQ ID NO: 38437 - RNA, 1698 nt, Artificial Sequence; identical to SEQ ID NO: 38433
  derived and/or modified CDS sequence (wt) from hemagglutinin__InfluenzaA__ADW10809

SEQ ID NO: 38438 - RNA, 1698 nt, Artificial Sequence; identical to SEQ ID NO: 38401
  derived and/or modified CDS sequence (wt) from hemagglutinin__InfluenzaA__ADW10820

SEQ ID NO: 38439 - RNA, 1698 nt, Artificial Sequence; identical to SEQ ID NO: 38398
  derived and/or modified CDS sequence (wt) from hemagglutinin__InfluenzaA__ADW10831

SEQ ID NO: 38440 - RNA, 1698 nt, Artificial Sequence
  derived and/or modified CDS sequence (wt) from hemagglutinin__InfluenzaA__ADW10842
augaaaguaaaacuacugguccuguuaugcacauuuacagcuacauaugcagacacaauauguauaggcuaccaugcuaacaacucgaccgacacuguugacacaguacuugaaaagaaugugacagugacacacucugucaaccugcuugagaacagucacaaugggaaacuauguuuauuaaaaggaauagccccacuacaauuggguaacugcagcguugccggguggaucuuaggaaacccagaaugcgaauuacugauuuccaaggagucaugguccuacauuguagaaaaaccaaauccugagaauggaacauguuacccagggcauuucgcugacuaugaggaacugagggagcaauugaguucaguaucuucauuugagagguucgaaauauuccccaaagaaagcucauggcccaaccacaccguaaccggagugucagcaucaugcucccauaauggggaaagcaguuuuuacagaaauuugcuauggcugacggugaagaaugguuuguacccaaacuugagcaaguccuaugcaaacaacaaagaaaaagaaguccuuguacuaugggguguucaucacccgccaaacauaguugaccaaaagacccucuaucguacagaaaaugcuuauguuucuguagugucuucacauuauagcagaaaauucgccccagaaauagccaaaagacccaaaguaagagaucaagaaggaagaaucaacuacuacuggacucugcuugaacccggggauacaauaauauuugaggcaaauggaaaucuaauagcgccaagauaugcuuucgcacugaguagaggcuuuggaucaggaaucaucaacucaaaugcaccaauggauaaaugugaugcgaagugccaaacaccucggggagcuauaaacagcagucuuccuuuccagaacguacauccagucacaauaggagaguguccaaaguaugucaggagugcaaaauuaaggaugguuacaggacuaaggaacaucccauccauucaauccagagguuuguuuggagccauugccgguuucauugaagggggguggacuggaaugguagaugguugguaugguuaucaucaucagaaugagcaaggaucuggcuaugcugcagaucaaaaaagcacacaaaaugccauuaaugggauuacaaacaaggugaauucuguaauugagaaaaugaacacucaauucacagcagugggcaaagaauucaacaaauuggaaagaaggauggaaaacuugaauaaaaaaguugaugauggguuuauagacauuuggacauauaaugcagaacuguugguucuacuggaaaaugaaaggacuuuggauuuccaugacuccaaugugaagaaucuguaugagaaaguaaaaagccaguuaaagaauaaugcuaaagaaauaggaaauggguguuuugaauucuaucacaaguguaacgaugaaugcauggagaguguaaagaauggaaccuaugacuauccaaaauauuccgaagaaucaaaguuaaacagggagaaaauugauggagugaaauuggaaucaaugggagucuaucagauucuggcgaucuacucaacagucgccaguucucugguucuuuuggucucccugggggcaaucagcuucuggauguguuccaaugggucuuugcaguguagaauaugcaucuaa

SEQ ID NO: 38441 - RNA, 1698 nt, Artificial Sequence
  derived and/or modified CDS sequence (wt) from hemagglutinin__InfluenzaA__ADW10853
augaaaguaaaacuacugguccuguuaugcacauuuacagcuacauaugcagacacaauauguauaggcuaccaugcuaacaacucgaccgacacuguugacacaguacuugaaaagaaugugacagugacacacucugucaaccugcuugagaacagucacaauggaaaacugugucuauuaaaaggaauagccccacuacaauuggguaacugcagcguugccggguggaucuuaggaaauccagaaugcgaauuacugauuuccaaggaaucaugguccuacauuguagaaaaaccaaacccugagaauggaacauguuacccagggcauuucgcugacuaugaggaacugagggagcaauugaguucaguaucuucauuugagagguucgaaauauuccccaaagaaagcucauggcccaaccacaccguaaccggagugucagcaucaugcucccauaauggggaaagaaguuuuuacagaaauuugcuauggcugacggggaagaaugguuuguacccaaaccugagcaaguccuaugcaaacaacaaagaaaaagaaguccuuguacuaugggguguucaucacccgccagacauaggugaccaaaagacccucuaucauacagaaaaugcuuauguuucuguagugucuucacauuauagcagaaaauucaccccagaaauagccaaaagacccaaaguaagagaucaagaaggaagaaucaacuacuacuggacucugcuugaacccggggauacaauaauauuugaggcaaauggaaaucuaauagcgccaagauaugcuuucgcacugaguagaggcuuuggaucaggaaucaucaacucaaaugcaccaauggauaaaugugaugcgaagugccaaacaccucagggagcuauaaacagcagucuuccuuuccagaacguacacccagucacaauaggagaguguccaaaguaugucaggagugcaaaauuaaggaugguuacuggacuaaggaacaucccauccauucaauccagagguuuguuuggagccauugccgguuucauugaagggggguggacuggaaugguagaugguugguaugguuaucaucaucagaaugagcaagggucuggcuaugcugcagaucaaaaaagcacacaaaaugccauuaaugggauuacaaacaaggugaauucuguaauugagaaaaugaacacucaauucacagcagugggcaaagaauucaacaaauuggaaagaaggauggaaaacuugaauaaaaaaguugaugauggguuuauagacauuuggacauauaaugcagaacuguugguucuacuggaaaaugaaaggacuuuggauuuccaugauuccaaugugaagaaucuguaugagaaaguaaaaagccaguuaaagaauaaugcuaaagaaauaggaaauggguguuuugaauucuaucacaaguguaacgaugagugcauggagaguguaaagaauggaacuuaugacuauccaaaauauuccgaagaaucaaaguuaaacagggagaaaauugauggagugaaauuggaaucaaugggagucuaucagauucuggcgaucuacucaacagucgccaguucucugguucuuuuggucucccugggggcaaucaguuucuggauguguuccaaugggucuuugcaguguagaauaugcaucuaa

SEQ ID NO: 38442 - RNA, 1698 nt, Artificial Sequence; identical to SEQ ID NO: 38433
  derived and/or modified CDS sequence (wt) from hemagglutinin__InfluenzaA__ADW10864

SEQ ID NO: 38443 - RNA, 1698 nt, Artificial Sequence
  derived and/or modified CDS sequence (wt) from hemagglutinin__InfluenzaA__ADW10875
augaaaguaaaacuacugguccuguuaugcacauuuacagcuacauaugcagacacaauauguauaggcuaccaugcuaacaacucgaccgacacuguugacacaguacuugaaaagaaugugacagugacacacucugucaaccugcuugagaacagucacaauggaaaacuaugcuuauuaaaaggaauagccccacuacaauuggguaacugcagcguugccggguggaucuuaggaaacccagaaugcgaauuacugauuuccaaggagucaugguccuacauuguagaaaaaccaaauccugagaauggaacauguuacccagggcauuucgcugacuaugaggaacugagggagcaauugaguucaguaucuucauuugagagguucgaaauauuccccaaagaaagcucauggcccaaccacaccguaaccggagugucagcaucaugcucccauaauggggaaagcaguuuuuacagaaauuugcuauggcugacggugaagaaugguuuguacccaaacuugagcaaguccuaugcaaacaacaaagaaaaagaaguccuuguacuaugggguguucaucacccgccaaacauaguugaccaaaagacccucuaucauacagaaaaugcuuauguuucuguagugucuucacauuauagcagaaaauucaccccagaaauagccaaaagacccaaaguaagaaaucaagaaggaagaaucaacuacuacuggacucugcuugaacccggggauacaauaauauuugaggcaaauggaaaucuaauagcgccaagauaugcuuucgcacugaguagaggcuuuggaucaggaaucaucaacucaaaugcaccaauggauaaaugugaugcgaagugccaaacaccucggggagcuauaaacagcagucuuccuuuccagaacguacacccagucacaauaggagaguguccaaaguaugucaggagugcaaaauuaaggaugguuacaggacuaaggaacaucccauccauucaauccagagguuuguuuggagccauugccgguuucauugaagggggguggacuggaaugguagaugguugguaugguuaucaucaucagaaugagcaaggaucuggcuaugcugcagaucaaaaaagcacacaaaaugccauuaaugggauuacaaacaaggugaauucuguaauugagaaaaugaacacucaauucacagcagugggcaaagaauucaacaaauuggaaagaaggauggaaaacuugaauaaaaaaguugaugauggguuuauagacauuuggacauauaaugcagaacuguugguucuacuggaaaaugaaaggacuuuggauuuccaugacuccaaugugaagaaucuguaugagaaaguaaaaagccaguuaaagaauaaugcuaaagaaauaggaaauggguguuuugaauucuaucacaaguguaacgaugaaugcauggagaguguaaagaauggaaccuaugacuauccaaaauauuccgaagaaucaaaguuaaacagggagaaaauugauggagugaaauuggaaucaaugggagucuaucagauucuggcgaucuacucaacagucgccaguucucugguucuuuuggucucccugggggcaaucagcuucuggauguguuccaaugggucuuugcaguguagaauaugcaucuaa

SEQ ID NO: 38444 - RNA, 1698 nt, Artificial Sequence; identical to SEQ ID NO: 38401
  derived and/or modified CDS sequence (wt) from hemagglutinin__InfluenzaA__ADW10886

SEQ ID NO: 38445 - RNA, 1698 nt, Artificial Sequence
  derived and/or modified CDS sequence (wt) from hemagglutinin__InfluenzaA__ADW10897
augaaaguaaaacuacugguccuguuaugcacauuuacagcuacauaugcagacacaauauguauaggcuaccaugcuaacaacucgaccgacacuguugacacaguacuugaaaagaaugugacagugacacacucugucaaccugcuugagaacagucacaauggaaaacuaugucuauuaaaaggaauagccccacuacaauuggguaacugcagcguugccggguggaucuuaggaaacccagaaugcgaauuacugauuuccaaggagucaugguccuacauuguagaaaaaccaaauccugagaauggaacauguuacccagggcauuucgcugacuaugaggaacugagggagcaauugaguucaguaucuucauuugagagguucgaaauauuccccaaagaaagcucauggcccaaucacaccguaaccggagugucagcaucaugcucccauaauggggaaagcaguuuuuacagaaauuugcuauggcugacggggaagaaugguuuguacccaaaccugagcaaguccuaugcaaacaacaaagaaaaagaaguccuuguacuaugggguguucaucacccgccaagcauaagugaccaaaagacccucuaucauacagaaaaugcuuauguuucuguagugucuucacauuauagcagaaaauucaccccagaaauagccaaaagacccaaaguaagagaucaagaaggaagaaucaacuacuacuggacucugcuugaacccggggauacaauaauauuugaggcaaauggaaaucuaauagcgccaagauaugcuuucgcacugaguagaggcuuuggaucaggaaucaucaacucaaaugcaccaauggauaaaugugauacgaagugccaaacaccucagggagcuauaaacagcagucuuccuuuccagaacguacacccagucacaauaggagaguguccaaaguaugucaggagugcaaaauuaaggaugguuacaggacuaaggaacaucccauccauucaauccagagguuuguuuggagccauugccgguuucauugaagggggguggacuggaaugguagaugguugguaugguuaucaucaucagaaugagcaaggaucuggcuaugcugcagaucaaaaaagcacacaaaaugccauuaaugggauuacaaacaaggugaauucuguaauugagaaaaugaacacccaauucacagcagugggcaaagaauucaacaaauuggaaagaaggauggaaaacuugaauaaaaaaguugaugauggguuuauagacauuuggacauauaaugcagaacuguugguucuacuggaaaaugaaaggacuuuggauuuccaugacuccaaugugaagaaucuguaugagaaaguaaaaagccaguuaaagaauaaugcuaaagaaguaggaaauggguguuuugaauucuaucacaaguguaacgaugaaugcauggagaguguaaagaauggaacuuaugacuauccaaaauauuccgaagaaucaaaguuaaacagggagaaaauugauggagugaaauuggaaucaaugggagucuaucagauucuggcgaucuacucaacagucgccaguucucugguucuuuuggucucccugggggcaaucagcuucuggauguguuccaaugggucuuugcaguguagaauaugcaucuaa

SEQ ID NO: 38446 - RNA, 1701 nt, Artificial Sequence
  derived and/or modified CDS sequence (wt) from hemagglutinin__InfluenzaA__ADW23115
augaagacuaucauugcuuugagcuacauucuaugucugguuuucgcucaaaaacuuccuggaaauggcaacagcacggcaacgcugugccuugggcaccaugcaguaccaaacggaacgauagugaaaacaaucacgaaugaccaaauugaaguuacuaaugcuacugagcugguucagaguuccucaacaggugaaauaugcgacaguccucaucagauccuugauggagaaaacugcacacuaauagaugcucuauugggagacccucagugugauggcuuccaaaauaagaaaugggaccuuuuuguugaacgaagcaaagccuacagcaacuguuacccauaugaugugccggauuaugccucccuuaggucacuaguugccucauccggcacacuggaguuuaacaaugaaagcuucaauuggacuggagucacccaaaacggaacaagcucugcuugcauaaggagaucuaauaacaguuucuuuaguagauugaauugguugacccacucaaaauucaaauacccagcauugaacgugacuaugccaaacaaugaacaauuugacaaauuguacauuugggggguucaccacccggguacggacaaugaccaaaucuuccuguaugcucaagcaucaggaagaaucacaguaucuaccaaaagaagccaacaaacuguaaucccgaauaucggaucuagacccagaguaaggaauaucccuagcagaauaagcaucuauuggacaauaguaaaaccgggagacauacuuuugauuaacagcacagggaaucuaauugcuccuagggguuacuucaaaauacgaagugggaaaagcucaauaaugagaucagaugcacccauuggcaaaugcaauucugaaugcaucacuccaaauggaagcauucccaaugacaaaccauuccaaaauguaaacaggaucacauacggggccugucccagauauguuaagcaaaacacucugaaauuggcaacaggaaugcgaaauguaccagagaaacaaacuagaggcauauuuggcgcaaucgcggguuucauagaaaaugguugggagggaaugguggaugguugguacgguuucaggcaucaaaauucugagggaagaggacaagcagcagaucucaaaagcacucaagcagcaaucgaucaaaucaaugggaagcugaauagauugaucgggaaaaccaacgagaaauuccaucagauugaaaaagaauucucagaagucgaagggagaauccaggaccuugagaaauauguugaggacacuaaaauagaucucuggucauacaacgcggagcuucuuguugcccuggagaaccaacauacaauugaucuaacugacucagaaaugaacaaacuguuugaaaaaacaaagaagcaacugagggaaaaugcugaggauaugggcaaugguuguuucaaaauauaccacaaaugugacaaugccugcauaggaucaaucagaaauggaacuuaugaccacgauguauacagagaugaagcauugaacaaccgguuccagaucaagggaguugagcugaagucaggguacaaagauuggauccuauggauuuccuuugccauaucauguuuuuugcuuuguguugcuuuguugggguucaucaugugggccugccaaaaaggcaacauuaggugcaacauuugcauuuga

SEQ ID NO: 38447 - RNA, 1701 nt, Artificial Sequence
  derived and/or modified CDS sequence (wt) from hemagglutinin__InfluenzaA__ADW54481
augaaggcaauacuaguaguucugcuauauacauuugcaaccgcaaaugcagacacauuauguauagguuaucaugcgaacaauucaacagacacuguagacacaguacuagaaaagaauguaacaguaacacacucuguuaaucuucuagaagacaagcauaacgggaaacuaugcaaacuaagagggguagccccauugcauuuggguaaauguaacauugcuggcuggauccugggaaauccagagugugaaucacucuccacagcaagcucaugguccuacauuguggaaacaucuaguucagacaauggaacguguuacccaggagauuucaucgauuaugaggagcuaagagagcaauugagcucagugucaucauuugaaagguuugagauauuccccaagacaaguucauggcccaaucaugacucgaacaaagguguaacggcagcauguccucaugcuggagcaaaaagcuucuacaaaaauuuaauauggcuaguuaaaaaaggaaauucauacccaaagcucagcaaauccuacauuaaugauaaagggaaagaaguccucgugcuauggggcauucaccauccaucuacuacugcugaccaacaaagucucuaucagaaugcagauacauauguuuuuguggggacaucaagauacagcaagaaguucaagccggaaauagcaauaagacccaaagugagggaucaagaagggagaaugaacuauuacuggacacuaguagagccgggagacaaaauaacauucgaagcaacuggaaaucuagugguaccgagauaugcauucgcaauggaaagaaaugcuggaucugguauuaucauuucagauacaccaguccacgauugcaauacaacuugucagacacccaagggugcuauaaacaccagccucccauuucagaauauacauccgaucacaauuggaaaauguccaaaauauguaaaaagcacaaaauugagacuggccacaggguugaggaaugucccgucuauucaaucuagaggccuauuuggggccauugccggcuucauugaagggggguggacagggaugguagauggaugguacgguuaucaccaucaaaaugagcaggggucaggauaugcagccgaccugaagagcacacagaaugccauugacaagauuacuaacaaaguaaauucuguuauugaaaagaugaauacacaguucacagcaguagguaaagaguucaaccaccuggaaaaaagaauagagaauuuaaauaaaaaaguugaugaugguuuccuggacauuuggacuuacaaugccgaacuguugguucuauuggaaaaugaaagaacuuuggacuaccacgauucaaaugugaagaacuuauaugaaaagguaagaaaccaguuaaaaaacaaugccaaggaaauuggaaauggcugcuuugaauuuuaccacaaaugcgauaacacgugcauggaaagugucaaaaaugggacuuaugacuacccaaaauacucagaggaagcaaaauuaaacagagaagaaauagaugggguaaagcuggaaucaacaaggauuuaccagauuuuggcgaucuauucaacugucgccaguucauugguacugguagucucccugggggcaaucaguuuuuggaugugcucuaaugggucucuacaguguagaauauguauuuaa

SEQ ID NO: 38448 - RNA, 1701 nt, Artificial Sequence
  derived and/or modified CDS sequence (wt) from hemagglutinin__InfluenzaA__ADW54512
augaaggcaauacuaguaguucugcuauauacauuugcaaccgcaaaugcagacacauuauguauagguuaucaugcgaacaauucaacagacacuguagacacaguacuagaaaagaauguaacaguaacacacucuguuaaccuucuagaagacaagcauaacgggaaacuaugcaaacuaagagggguagccccauugcauuuggguaaauguaacauugcuggcuggauccugggaaauccagagugugaaucacucuccacagcaagcucaugguccuacauuguggaaacaucuaguucagacaauggaacguguuacccaggagauuucaucgauuaugaggagcuaagagagcaauugagcucagugucaucauuuaaaagguuugagauauuccccaagacaaguucauggcccaaucaugacucgaacaaagguguaacgacagcauguccucaugcuggagcaaaaagcuucuacaaaaauuuaauauggcuaguuaaaaaaggaaauucauacccaaaacucagcaaauccuacauuaaugauaaagggaaagaaguccucgugcuauggggcauucaccauccaccuacuagugcugaccaacaaagucucuaucagaaugcagaugcauauguuuuuguggggacaucaagauacagcaagaaguucaagccggaaauagcaauaagacccaaagugagggaucaagaagggagaaugaacuauuacuggacacuaguagagccgggagacaaaauaacauucgaagcaacuggaaaucuagugguaccgagauaugcauucgcaauggaaagaaaugcuggaucugguauuaucauuucagauacaccaguccacgauugcaauacaacuugucagacacccaagggugcuauaaacaccagccuuccauuucagaauauacauccgaucacaauuggaaaauguccaaaauauguaaaaagcacaaaauugagacuggccacaggauugaggaaugucccgucuauucaaucuagaggccuauuuggggccauugccgguuucauugaagggggguggacagggaugguagauggaugguacgguuaucaccaucaaaaugagcaggggucaggguaugcagccgaccugaagagcacacagaaugccauugacgagauuacuaacaaaguaaauucuguuauugaaaagaugaauacacaguucacagcaguagguaaagaguucaaccaccuggaaaaaagaauagagaauuuaaauaaaaaaguugaugaugguuuccuggacauuuggacuuacaaugccgaacuguugguucuauuggaaaaugaaagaacuuuggacuaccacgauucaaaugugaagaacuuauaugaaaagguaagaagccaguuaaaaaacaaugccaaggaaauuggaaacggcugcuuugaauuuuaccacaaaugugauaacacgugcauggaaagugucaaaaaugggacuuaugacuacccaaaauacucagaggaagcaaaauuaaacagagaagaaauagaugggguaaagcuggaaucaacaaggauuuaccagauuuuggcgaucuauucaacugucgccaguucauugguacugguagucucccugggggcaaucaguuucuggaugugcucuaaugggucucuacaguguagaauauguauuuaa

SEQ ID NO: 38449 - RNA, 1701 nt, Artificial Sequence
  derived and/or modified CDS sequence (wt) from hemagglutinin__InfluenzaA__ADW54527
augaaggcaauacuaguaguucugcuauauacauuugcaaccgcaagugcagacacauuauguauagguuaucaugcgaacaauucaacagacacuguagacacaguacuagaaaagaauguaacaguaacacacucuguuaaccuucuagaagacaagcauaacgggaaacuaugcaaacuaagagggguagccccauugcauuuggguaaauguaacauugcuggcuggauccugggaaauccagagugugaaucacucuccacagcaagcucaugguccuacauuguggaaacaucuaguucagacaauggaacguguuacccaggagauuucaucgauuaugaggagcuaagagagcaauugagcucagugucaucauuugaaagguuugagauauuccccaagacaaguucauggcccaaucaugacucgaacaaagguguaacgacagcauguccucaugcuggagcaaaaagcuucuacaaaaacuuaauauggcuaguuaaaaaaggaaauucauacccaaaacucagcaaauccuacauuaaugacaaagggaaagaaguccucgugcuauggggcauucaccauccaccuacuagugcugaccaacaaagucucuaucagaaugcagaugcauauguuuuuguggggacaucaagauacagcaagaaguucaagccggaaauagcaauaagacccaaagugagggaucaagaagggaggaugaacuauuacuggacacuaguagagccgggagacaaaauaacauucgaagcaacuggaaaucuagugguaccgagauaugcauucgcaauggaaagaaaugcuggaucugguauuaucauuucagauacaccaguccacgauugcaauacaacuugucagacacccaauggugcuauaaacaccagccucccauuucagaauauacauccgaucacaauuggaaaauguccaaaauauguaaaaagcacaaaauugagacuggccacaggauugaggaaugucccgucuauucaaucuagaggccuauuuggggccauugccgguuucauugaagggggguggacagggaugguagauggaugguacgguuaucaccaucaaaaugagcaggggucaggguaugcagccgaccugaagagcacacagaaugccauugacgagauuacuaacaaaguaaauucuguuauugaaaagaugaauacacaguucacagcaguagguaaagaguucaaccaccuggaaaaaagaauagagaauuuaaauaaaaaaguugaugaugguuuccuggacauuuggacuuacaaugccgaacuguugguucuauuggaaaaugaaagaacuuuggacuaccacgauucaaaugugaagaacuuauaugaaaagguaagaagccaguuaaaaaacaaugccaaggaaauuggaaacggcugcuuugaauuuuaccacaaaugugauaacacgugcauggaaagugucaaaaaugggacuuaugacuacccaaaauacucagaggaagcaaaauuaaacagagaagaaauagaugggguaaaacuggaaucaacaaggauuuaccagauuuuggcgaucuauucaacugucgccaguucauugguacugguagucucccugggggcaaucaguuucuggaugugcucuaaugggucucuacaguguagaauauguauuuaa

SEQ ID NO: 38450 - RNA, 1701 nt, Artificial Sequence
  derived and/or modified CDS sequence (wt) from hemagglutinin__InfluenzaA__ADW65825
augaaggcaauacuaguaguucugcuauauacauuugcaaccgcaaaugcagacacauuauguauagguuaucaugcgaacaauucaacagacacuguagacacaguacuagaaaagaauguaacaguaacacacucuguuaaucuucuagaagacaagcauaacgggaaacuaugcaaacuaagagggguagccccauugcauuuggguaaauguaacauugcuggcuggauccugggaaauccagagugugaaucacucuccacagcaagcucaugguccuacauuguggaaacaucuaguucagacaauggaacguguuacccaggagauuucaucgauuaugaggagcuaagagagcaauugagcucagugucaucauuugaaagguuugagauauuccccaagacaaguucauggcccaaucaugacucgaacaaagguguaacggcagcauguccucaugcuggagcaaaaagcuucuacaaaaauuuaauauggcuaguuaaaaaaggaaauucauacccaaagcucagcaaauccuacauuaaugauaaagggaaagaaguccucgugcuauggggcauucaccauccaucuacuacugcugaccaacaaagucucuaucagaaugcagauacauauguuuuuguggggacaucaagauacagcaagaaguucaagccggaaauagcaauaagacccaaagugagggaucaagaagggagaaugaacuauuacuggacacuaguagagccgggagacaaaauaacauucgaagcaacuggaaaucuagugguaccgagauaugcauucgcaauggaaagaaaugcuggaucugguauuaucauuucagauacaccaguccacgauugcaauacaacuugucagacacccaagggugcuauaaacaccagccucccauuucagaauauacauccgaucacaauuggaaaauguccaaaauauguaaaaagcacaaaauugagacuggccacaggauugaggaaugucccgucuauucaaucuagaggccuauuuggggccauugccggcuucauugaagggggguggacagggaugguagauggaugguacgguuaucaccaucaaaaugagcaggggucaggauaugcagccgaccugaagagcacacagaaugccauugacaagauuacuaacaaaguaaauucuguuauugaaaagaugaauacacaguucacagcaguagguaaagaguucaaccaccuggaaaaaagaauagagaauuuaaauaaaaaaguugaugaugguuuccuggacauuuggacuuacaaugccgaacuguugguucuauuggaaaaugaaagaacuuuggacuaccacgauucaaaugugaagaacuuauaugaaaagguaagaaaccaguuaaaaaacaaugccaaggaaauuggaaauggcugcuuugaauuuuaccacaaaugcgauaacacgugcauggaaagugucaaaaaugggacuuaugacuacccaaaauacucagaggaagcaaaauuaaacagagaagaaauagaugggguaaagcuggaaucaacaaggauuuaccagauuuuggcgaucuauucaacugucgccaguucauugguacugguagucucccugggggcaaucaguuuuuggaugugcucuaaugggucucuacaguguagaauauguauuuaa

SEQ ID NO: 38451 - RNA, 1701 nt, Artificial Sequence
  derived and/or modified CDS sequence (wt) from hemagglutinin__InfluenzaA__ADW82135
augaagacuaucauugcuuugagcuacauucuaugucugguuuucgcucaaaaacuuccuggaaaugacaacagcacggcaacgcugugccuugggcaccaugcaguaccaaacggaacgguagugaaaacaaucacgaaugaccaaauugaaguuacuaaugcuacugagcugguucagaguuccucaacaggugaaauaugcgacaguccucaucagauccuugauggaaaaaacugcacacuaauagaugcucuauugggagacccucagugugauggcuuccaaaauaagaaaugggaccuuuuuguugaacgcagcaaagccuacagcaacuguuacccuuaugaugugccggauuaugccucccuuaggucacugguugccucauccggcacacuggaguuuaacaaugaaagcuucaauuggacuggagucacucaaaacggaacaagcucugcuugcauaaggagaucuaaaaacaguuucuuuaguagauugaauugguugacccacuuaaacuucaaauacacagcauugaacgugacuaugccaaacaaugaacaauuugacaaauuguacauuugggggguucaccacccgggcacggacaaagaccaaaucuuccuguaugcucaagcaucaggaagaaucacagucucuaccaaaagaagccaacaaacuguaaucccgaauaucggaucuagacccagaguaaggaauaucccuagcagaauaagcaucuauuggacaauaguaaaaccgggagacauacuuuugauuaacagcacagggaaucuaauugcuccuagggguuacuucaaaauacgaagugggaaaagcucaauaaugagaucagaugcacccauuggcaaaugcaauucugaaugcaucacuccaaauggaagcauucccaaugacaaaccauuccaaaauguaaacaggaucacauacggggccugucccagauauguuaagcaaaacacucugaaauuggcaacagggaugcgaaauguaccagagaaacaaacuagaggcauauuuggcgcaaucgcggguuucauagaaaaugguugggagggaaugguggaugguugguacgguuucaggcaucaaaauucugagggaagaggacaagcagcagaucucaaaagcacucaagcagcaaucgaucaaaucaaugggaagcugaauagauugaucgggaaaaccaacgagaaauuccaucagauugaaaaagaauucucagaagucgaagggagaauucaggaccuugagaaauauguugaggacacuaaaauagaucucuggucauacaacgcggagcuucuuguugcccuggagaaccaacauacaauugaucuaacugacucagaaaugaacaaacuguuugaaaaaacaaagaagcaacugagggaaaaugcugaggauaugggcaaugguuguuucaaaauauaccacaaaugugacaaugccugcauaggaucaaucagaaauggaacuuaugaccacgauguauacagagaugaagcauuaaacaaccgguuucagaucaagggaguugagcugaagucaggguacaaagauuggauccuauggauuuccuuugccauaucauguuuuuugcuuuguguugcuuuguugggguucaucaugugggccugccaaaaaggcaacauuaggugcaacauuugcauuuga

SEQ ID NO: 38452 - RNA, 1701 nt, Artificial Sequence; identical to SEQ ID NO: 38451
  derived and/or modified CDS sequence (wt) from hemagglutinin__InfluenzaA__ADW82155

SEQ ID NO: 38453 - RNA, 1701 nt, Artificial Sequence; identical to SEQ ID NO: 38451
  derived and/or modified CDS sequence (wt) from hemagglutinin__InfluenzaA__ADW82166

SEQ ID NO: 38454 - RNA, 1701 nt, Artificial Sequence; identical to SEQ ID NO: 38451
  derived and/or modified CDS sequence (wt) from hemagglutinin__InfluenzaA__ADW82177

SEQ ID NO: 38455 - RNA, 1701 nt, Artificial Sequence
  derived and/or modified CDS sequence (wt) from hemagglutinin__InfluenzaA__ADW82188
augaaggcaauacuaguaguucugcuauauacauuugcaaccgcaaaugcagacacauuauguauagguuaucaugcgaacaauucaacagacacuguagacacaguacuagaaaagaauguaacaguaacacacucuguuaaccuucuagaagacaagcauaacgggaaacuaugcaaacuaagagggguagccccauugcauuuggguaaauguaacauugcuggcuggauccugggaaauccagagugugaaucacucuccacagcaagcucaugguccuacauuguggaaacaucuaguucagacaauggaacguguuacccaggagauuucaucgauuaugaggagcuaagagagcaauugagcucagugucaucauuugaaagguuugagauauuccccaagacaaguucauggcccaaucaugacucgaacaaagguguaacggcagcauguccucaugcuggagcaaaaagcuucuacaaaaauuuaauauggcuaguuaaaaaaggaaauucauacccaaagcucagcaaauccuacauuaaugauaaagggaaagaaguccucgugcuauggggcauucaccauccaucuacuagugcugaccaacaaagucucuaucagaaugcagaugcauauguuuuuguggggacaucaagauacagcaagaaguucaagccggaaauagcaauaagacccaaagugagggaucaagaagggagaaugaacuauuacuggacacuaguagagccgggagacaaaauaacauucgaagcaacuggaaaucuagugguaccgagauaugcauucgcaauggaaagaaaugcuggaucugguauuaucauuucagauacaccaguccacgauugcaauacaacuugucagacacccaagggugcuauaaacaccagccucccauuucagaauauacauccgaucacaauuggaaaaugucccaaauauguaaaaagcacaaaauuaagacuggccacaggauugaggaaugucccuucuauucaaucuagaggccuauuuggggccauugccgguuucauugaagggggguggacagggaugguagauggaugguacgguuaucaccaucaaaaugagcaggggucaggauaugcagccgaccugaagagcacacagaaugccauugacgaaauuacuaacaaaguaaauucuguuauugaaaagaugaauacacaguucacagcaguagguaaagaguucaaccaccuggaaaaaagaauagagaauuuaaauaaaaaaguugaugaugguuuccuggacauuuggacuuacaaugccgaacuguugguucuauuggaaaaugaaagaacuuuggacuaccacgauucaaaugugaagaacuuauaugaaaagguaagaagccaguuaaaaaacaaugccaaggaaauuggaaacggcugcuuugaauuuuaccacaaaugcgauaacacgugcauggaaagugucaaaaaugggacuuaugacuacccaaaauacucagaggaagcaaaauuaaacagagaagaaauagaugggguaaagcuggaaucaacaaggauuuaccagauuuuggcgaucuauucaacugucgccaguucauugguacugguagucucccugggggcaaucaguuucuggaugugcucuaaugggucucuacaguguagaauauguauuuaa

SEQ ID NO: 38456 - RNA, 1701 nt, Artificial Sequence; identical to SEQ ID NO: 38455
  derived and/or modified CDS sequence (wt) from hemagglutinin__InfluenzaA__ADW82198

SEQ ID NO: 38457 - RNA, 1701 nt, Artificial Sequence; identical to SEQ ID NO: 38455
  derived and/or modified CDS sequence (wt) from hemagglutinin__InfluenzaA__ADW82208

SEQ ID NO: 38458 - RNA, 1701 nt, Artificial Sequence; identical to SEQ ID NO: 38455
  derived and/or modified CDS sequence (wt) from hemagglutinin__InfluenzaA__ADW82218

SEQ ID NO: 38459 - RNA, 1701 nt, Artificial Sequence; identical to SEQ ID NO: 38455
  derived and/or modified CDS sequence (wt) from hemagglutinin__InfluenzaA__ADW82228

SEQ ID NO: 38460 - RNA, 1701 nt, Artificial Sequence; identical to SEQ ID NO: 38455
  derived and/or modified CDS sequence (wt) from hemagglutinin__InfluenzaA__ADW82238

SEQ ID NO: 38461 - RNA, 1701 nt, Artificial Sequence; identical to SEQ ID NO: 38455
  derived and/or modified CDS sequence (wt) from hemagglutinin__InfluenzaA__ADW82248

SEQ ID NO: 38462 - RNA, 1701 nt, Artificial Sequence; identical to SEQ ID NO: 38455
  derived and/or modified CDS sequence (wt) from hemagglutinin__InfluenzaA__ADW82258

SEQ ID NO: 38463 - RNA, 1701 nt, Artificial Sequence
  derived and/or modified CDS sequence (wt) from hemagglutinin__InfluenzaA__ADW82268
augaaggcaauacuaguaguucugcuauauacauuugcaaccgcaaaugcagacacauuauguauagguuaucaugcgaacaauucaacagacacuguagacacaguacuagaaaagaauguaacaguaacacacucuguuaaccuucuagaagacaagcauaacgggaaacuaugcaaacugagagggguagccccauugcauuuggguaaauguaacauugcuggcuggauccugggaaauccagagugugaaucacucuccacagcaagcucaugguccuacauuguggaaacaucuaguucagacaauggaacguguuacccaggagauuucaucgauuaugaggagcuaagagagcaauugagcucagugucaucauuugaaagguuugagauauuccccaagacaaguucauggcccaaucaugacucgaacaaagguguaacggcagcauguccucaugcuggagcaaaaagcuucuacaaaaauuuaauauggcuaguuaaaaaaggaaauucauacccaaagcucagcaaauccuacauuaaugauaaagggaaagaaguccucgugcuauggggcauucaccauccaucuacuagugcugaccaacaaagucucuaucagaaugcagaugcauauguuuuuguggggacaucaagauacagcaagaaguucaagccggaaauagcaauaagacccaaagugagggaucaagaagggagaaugaacuauuacuggacacuaguagagccgggagacaaaauaacauucgaagcaacuggaaaucuagugguaccgagauaugcauucgcaauggaaagaaaugcuggaucugguauuaucauuucagauacaccaguccacgauugcaauacaacuugucagacacccaagggugcuauaaacaccagccucccauuucagaauauacauccgaucacaauuggaaaauguccaaaauauguaaaaagcacaaaauugagacuggccacaggauugaggaaugucccgucuauucaaucuagaggccuauuuggggccauugccgguuucauugaagggggguggacagggaugguagauggaugguacgguuaucaccaucaaaaugagcaggggucaggauaugcagccgaccugaagagcacacagaaugccauugacgagauuacuaacaaaguaaauucuguuauugaaaagaugaauacacaguucacagcaguagguaaagaguucaaccaccuggaaaaaagaauagagaauuuaaauaaaaaaguugaugaugguuuccuggacauuuggacuuacaaugccgaacuguugguccuauuggaaaaugaaagaacuuuggacuaccacgauucaaaugugaagaacuuauaugaaaagguaagaagccaguuaaaaaacaaugccaaggaaauuggaaacggcugcuuugaauuuuaccacaaaugcgauaacacgugcauggaaagugucaaaaaugggacuuaugacuacccaaaauacucagaggaagcaaaauuaaacagagaagaaauagaugggguaaagcuggaaucaacaaggauucaccagauuuuggcgauuuauucaacugucgccaguucauugguacugguagucucccugggggcaaucaguuucuggaugugcucuaaugggucucuacaguguagaauauguauuuaa

SEQ ID NO: 38464 - RNA, 1701 nt, Artificial Sequence; identical to SEQ ID NO: 38451
  derived and/or modified CDS sequence (wt) from hemagglutinin__InfluenzaA__ADW93760

SEQ ID NO: 38465 - RNA, 1701 nt, Artificial Sequence
  derived and/or modified CDS sequence (wt) from hemagglutinin__InfluenzaA__ADW95319
augaaggcaauacuaguaguucugcuauauacauuugcaaccgcaaaugcagacacauuauguauagguuaccaugcgaacaauucaacagacacuguagacacaguacuagaaaagaauguaacaguaacacacucuguuaaucuucuagaagacaagcauaacgggaaacuaugcaaacuaagagggguagccccauugcauuuggguaaauguaacauugcuggcuggauccugggaaauccagagugugaaucacucuccacagcaagcucaugguccuacauuguggaaacaucuaguucagacaauggaacguguuacccaggagauuucaucgauuaugaggagcuaagagagcaauuaagcucagugucaucauuugaaagguuugagauauuccccaagacaaguucauggcccaaucaugacucgaacaaagguguaacggcagcauguccucaugcuggagcaaaaggcuucuacaaaaauuuaauauggcuaguuaaaaaaggaaauucauacccaaagcucagcaaauccuacauuaaugauaaagggaaagaaguccucgugcuauggggcauucaccauccaucuacuacugcugaccaacaaagucucuaucagaaugcagauacauauguuuuuguggggacaucaagauacagcaagaaguucaagccggaaauagcaauaagacccaaagugagggaucaagaagggagaaugaacuauuacuggacacuaguagagccgggagacaaaauaacauucgaagcaacuggaaaucuagugguaccgagauaugcauucgcaauggaaagaaaugcuggaucugguauuaucauuucagauacaccaguccacgauugcaauacaacuugucagacaccaaagggugcuauaaacaccagccucccauuucagaauauacauccgaucacaauuggaaaauguccaaaauauguaaaaagcacaaaauugagacuggccacaggauugaggaaugucccgucuauucaaucuagaggccuauuuggggccauugccgguuucauugaagggggguggacagggaugguagauggaugguacgguuaucaccaucaaaaugagcaggggucaggauaugcagccgaccugaagagcacacagaaugccauugacgagauuacuaacaaaguaaauucuguuauugaaaagaugaauacgcaguucacagcaguagguaaagaguucaaccaccuggaaaaaagaauagagaauuuaaauaaaaaaguugaugaugguuuccuggacauuuggacuuacaaugccgaacuguugguucuauuggaaaaugaaagaacuuuggacuaccacgauucaaaugugaagaacuuauaugaaaagguaagaaaccaguuaaaaaacaaugccaaggaaauuggaaauggcugcuuugaauuuuaccacaaaugcgauaacacgugcauggaaagugucaaaaaugggacuuaugacuacccaaaauacucagaggaagcaaaauuaaacagagaagaaauagaugggguaaagcuggaaucaacaaggauuuaccagauuuuggcgaucuauucaacugucgccaguucauugguacugguagucucccugggggcaaucaguuuuuggaugugcucuaaugggucucuacaguguagaauauguauuuaa

SEQ ID NO: 38466 - RNA, 1701 nt, Artificial Sequence
  derived and/or modified CDS sequence (wt) from hemagglutinin__InfluenzaA__ADW95332
augaaggcaauacuaguaguucugcuauauacauuugcaaccgcaaaugcagacacauuauguauagguuaccaugcgaacaauucaacagacacuguagacacaguacuagaaaagaauguaacaguaacacacucuguuaaucuucuagaagacaagcauaacgggaaacuaugcaaacuaagagggguagccccauugcauuuggguaaauguaacauugcuggcuggauccugggaaauccagagugugaaucacucuccacagcaagcucaugguccuacauuguggaaacaucuaguucagacaauggaacguguuacccaggagauuucaucgauuaugaggagcuaagagagcaauuaagcucagugucaucauuugaaagguuugagauauuccccaagacaaguucauggcccaaucaugacucgaacaaagguguaacggcagcauguccucaugcuggagcaaaaggcuucuacaaaaauuuaauauggcuaguuaaaaaaggaaauucauacccaaagcucagcaaauccuacauuaaugauaaagggaaagaaguccucgugcuauggggcauucaccauccaucuacuacugcugaccaacaaagucucuaucagaaugcagauacauauguuuuuguggggacaucaagauacagcaagaaguucaagccggaaauagcaauaagacccaaagugagggaucaagaagggagaaugaacuauuacuggacacuaguagagccgggagacaaaauaacauucgaagcaacuggaaaucuagugguaccgagauaugcauucgcaauggaaagaaaugcuggaucugguauuaucauuucagauacaccaguccacgauugcaauacaacuugucagacacccaagggugcuauaaacaccagccucccauuucagaauauacauccgaucacaauuggaaaauguccaaaauauguaaaaagcacaaaauugagacuggccacaggauugaggaaugucccgucuauucaaucuagaggccuauuuggggccauugccggcuucauugaagggggguggacagggaugguagauggaugguacgguuaucaccaucaaaaugagcaggggucaggauaugcagccgaccugaagagcacacagaaugccauugacaagauuacuaacaaaguaaauucuguuauugaaaagaugaauacacaguucacagcaguagguaaagaguucaaccaccuggaaaaaagaauagagaauuuaaauaaaaaaguugaugaugguuuccuggacauuuggacuuacaaugccgaacuguugguucuauuggaaaaugaaagaacuuuggacuaccacgauucaaaugugaagaacuuauaugaaaagguaagaaaccaguuaaaaaacaaugccaaggaaauuggaaauggcugcuuugaauuuuaccacaaaugcgauaacacgugcauggaaagugucaaaaaugggacuuaugacuacccaaaauacucagaggaagcaaaauuaaacagagaagaaauagaugggguaaagcuggaaucaacaaggauuuaccagauuuuggcgaucuauucaacugucgccaguucauugguacugguagucucccugggggcaaucaguuuuuggaugugcucuaaugggucucuacaguguagaauauguauuuaa

SEQ ID NO: 38467 - RNA, 1701 nt, Artificial Sequence
  derived and/or modified CDS sequence (wt) from hemagglutinin__InfluenzaA__ADX21078
augaagacuaucauugcuuugagcuacauucuaugucugguuuucgcucaaaaacuuccuggaaaugacaacagcacggcaacgcugugccuugggcaccaugcaguaccaaacggaacgguagugaaaacaaucacgaaugaccaaauugaaguuacuaaugcuacugagcugguucagaguuccucaacaggugaaauaugcgacaguccucaucagauccuugauggaaaaaacugcacacuaauagaugcucuauugggagacccucagugugauggcuuccaaaauaagaaaugggaccuuuuuguugaacgcagcaaagccuacagcaacuguuacccuuaugaugugccggauuaugccucccuuaggucacugguugccucauccggcacacuggaguuuaacaaugaaagcuucaauuggacuggagucacucaaaacggaacaagcucugcuugcauaaggagaucuaaaaacaguuucuuuaguagauugaauugguugacccacuuaaacuucaaauacacagcauugaacgugacuaugccaaacaaugaacaauuugacaaauuguacauuugggggguucaccacccgggcacggacaaagaccaaaucuuccuguaugcucaagcaucaggaagaaucacagucucuaccaaaagaagccaacaaacuguaaucccgaauaucggaucuagacccagaguaaggaauaucccuagcagaauaagcaucuauuggacaauaguaaaaccgggagacauacuuuugauuaacagcacagggaaucuaauugcuccuagggguuacuucaaaauacgaagugggaaaagcucaauaaugagaucagaugcacccauuggcaaaugcaauucugaaugcaucacuccaaauggaagcauucccaaugacaaaccauuccaaaauguaaacaggaucacauacggggccugucccagauauguuaagcaaaacacucugaaauuggcaacagggaugcgaaauguaccagagaaacaaacuagaggcauauuuggcgcaaucgcggguuucauagaaaaugguugggagggaaugguggaugguugguacgguuucaggcaucaaaauucugagggaagaggacaagcagcagaucucaaaagcacucaagcagcaaucgaucaaaucaaugggaagcugaauagauugaucaggaaaaccaacgagaaauuccaucagauugaaaaagaauucucagaagucgaagggagaauucaggaccuugagaaauauguugaggacacuaaaauagaucucuggucauacaacgcggagcuucuuguugcccuggagaaccaacauacaauugaucuaacugacucagaaaugaacaaacuguuugaaaaaacaaagaagcaacugagggaaaaugcugaggauaugggcaaugguuguuucaaaauauaccacaaaugugacaaugccugcauaggaucaaucagaaauggaacuuaugaccacgauguauacagagaugaagcauuaaacaaccgguuucagaucaagggaguugagcugaagucaggguacaaagauuggauccuauggauuuccuuugccauaucauguuuuuugcuuuguguugcuuuguugggguucaucaugugggccugccaaaaaggcaacauuaggugcaacauuugcauuuga

SEQ ID NO: 38468 - RNA, 1701 nt, Artificial Sequence; identical to SEQ ID NO: 38467
  derived and/or modified CDS sequence (wt) from hemagglutinin__InfluenzaA__ADX21088

SEQ ID NO: 38469 - RNA, 1701 nt, Artificial Sequence
  derived and/or modified CDS sequence (wt) from hemagglutinin__InfluenzaA__ADX21098
augaaggcaauacuaguaguucugcuauauacauuugcaaccgcaaaugcagacacauuauguauagguuaucaugcgaacaauucaacagacacuguagacacaguacuagaaaagaauguaacaguaacacacucuguuaaccuucuagaagacaagcauaacgggaaacuaugcaaacugagagggguagccccauugcauuuggguaaauguaacauugcuggcuggauccugggaaauccagagugugaaucacucuccacagcaagcucaugguccuacauuguggaaacaucuaguucagacaauggaacguguuacccaggagauuucaucgauuaugaggagcuaagagagcaauugagcucagugucaucauuugaaagguuugagauauuccccaagacaaguucauggcccaaucaugacucgaacaaagguguaacggcagcauguccucaugcuggagcaaaaagcuucuacaaaaauuuaauauggcuaguuaaaaaaggaaauucauacccaaagcucagcaaauccuacauuaaugauaaagggaaagaaguccucgugcuauggggcauucaccauccaucuacuagugcugaccaacaaagucucuaucagaaugcagaugcauauguuuuuguggggacaucaagauacagcaagaaguucaagccggaaauagcaauaagacccaaagugagggaucaagaagggagaaugaacuauuacuggacacuaguagagccgggagacaaaauaacauucgaagcaacuggaaaucuagugguaccgagauaugcauucgcaauggaaagaaaugcuggaucugguauuaucauuucagauacaccaguccacgauugcaguacaacuugucagacacccaagggugcuauaaacaccagccucccauuucagaauauacauccgaucacaauuggaaaauguccaaaauauguaaaaagcacaaaauugagacuggccacaggauugaggaaugucccgucuauucaaucuagaggccuauuuggggccauugccgguuucauugaagggggguggacagggaugguagauggaugguacgguuaucaccaucaaaaugagcaggggucaggauaugcagccgaccugaagagcacacagaaugccauugacgagauuacuaacaaaguaaauucuguuauugaaaagaugaauacacaguucacagcaguagguaaagaguucaaccaccuggaaaaaagaauagagaauuuaaauaaaaaaguugaugaugguuuccuggacauuuggacuuacaaugccgaacuguugguccuauuggaaaaugaaagaacuuuggacuaccacgauucaaaugugaagaacuuauaugaaaagguaagaagccaguuaaaaaacaaugccaaggaaauuggaaacggcugcuuugaauuuuaccacaaaugcgauaacacgugcauggaaagugucaaaaaugggacuuaugacuacccaaaauacucagaggaagcaaaauuaaacagagaagaaauagaugggguaaagcuggaaucaacaaggauucaccagauuuuggcgauuuauucaacugucgccaguucauugguacugguagucucccugggggcaaucaguuucuggaugugcucuaaugggucucuacaguguagaauauguauuuaa

SEQ ID NO: 38470 - RNA, 1701 nt, Artificial Sequence; identical to SEQ ID NO: 35602
  derived and/or modified CDS sequence (wt) from hemagglutinin__InfluenzaA__ADX36109

SEQ ID NO: 38471 - RNA, 1701 nt, Artificial Sequence
  derived and/or modified CDS sequence (wt) from hemagglutinin__InfluenzaA__ADX96278
augaaggcaauacuaguaguucugcuauauacauuugcaaccgcaaaugcagacacauuauguauagguuaucaugcgaacaauucaacagacacuguagacacaguacuagaaaagaauguaacaguaacacacucuguuaacauucuagaagacaagcauaacgggaaacuaugcaaacuaagagggguagccccauugcauuuggguaaauguaacauugcuggcuggauccugggaaauccagagugugaaucacucuccacagcaagcucaugguccuacauuguggaaacaucuaguucagacaauggaacguguuacccaggagauuucaucgauuaugaggagcuaagagagcaauugagcucagugucaucauuugaaagguuugagauauuccccaagacaaguucauggcccaaucaugacucgaacaaagguguaacggcagcauguccucaugcuggagcaaaaggcuucuacaaaaauuuaauuuggcuaguuaaaaaaggaaauucauacccaaagcucagcaaauccuacauuaaugauaaagggaaagaaguccucgugcuauggggcauucaccauccaucuacuagugcugaccaacaaagucucuaucagaaugcagaugcauauguuuuuguggggucaucaagauacagcaagaaguucaagccggaaauagcaauuagacccaaagugagggaucaagaagggagaaugaacuauuacuggacacuaguagagccgggagacaaaauaacauucgaagcaacuggaaaucuagugguaccaagauaugcauucgcaauggaaagaaaugcuggaucugguauuaucauuucagauacaccaguccaugauugcaauacaacuugucagacacccaagggugcuguaaacaccagccucccauuucagaauauacauccgaucacaauuggaaaauguccaaaauauguaaaaagcacaaaauugagacuggccacaggauugaggaaugucccgucuauucaaucuagaggccuauuuggggccauugccgguuucauugaagggggguggacagggaugguagauggaugguacgguuaucaccaucaaaaugagcaggggucaggauaugcagcugaccugaagagcacacagaaugccauugacgagauuacuaacaaaguaaauucuguuauugaaaagaugaauacacaguucacagcaguagguaaagaguucaaccaccuggaaaaaagaauagagaauuuaaauaaaaaaguugaugaugguuuccuggacauuuggacuuacaaugccgaacuguugguucuauuggaaaaugaaagaacuuuggacuaccacgauucaaaugugaagaacuuauaugaaaagguaagaagccagcuaaaaaacaaugccaaggaaguuggaaacggcugcuuugaauuuuaucacaaaugcgauaacacgugcauggaaagugucaaaaaugggacuuaugacuacccaaaauacucagaggaagcaaaauuaaacagagaagaaauagaugggguaaagcuggagucaacaaggauuuaccagauuuuggcgaucuauucaacugccgccaguucauugguacugguagucucccugggggcaaucaguuucuggaugugcucuaaugggucucuacaguguagaauauguauuuaa

SEQ ID NO: 38472 - RNA, 1701 nt, Artificial Sequence
  derived and/or modified CDS sequence (wt) from hemagglutinin__InfluenzaA__ADX96288
augaaggcaauacuaguaguucugcuauauacauuugcaaccgcaaaugcagacacauuauguauagguuaucaugcgaacaauucaacagacacuguagacacaguacuagaaaagaauguaacaguaacacacucuguuaacauucuagaagacaagcauaacgggaaacuaugcaaacuaagagggguagccccauugcauuuggguaaauguaacauugcuggcuggauccugggaaauccagagugugaaucacucuccacagcaagcucaugguccuacauuguggaaacaucuaguucagacaauggaacguguuacccaggagauuucaucgauuaugaggagcuaagagagcaauugagcucagugucaucauuugaaagguuugagauauuccccaagacaaguucauggcccaaucaugacucgaacaaagguguaacggcagcauguccucaugcuggagcaaaaagcuucuacaaaaauuuaauuuggcuaguuaaacaaggaaauucauacccaaagcucagcaaauccuacauuaaugauaaagggaaagaaguccucgugcuauggggcauucaccauccaucuacuagugcugaccaacaaagucucuaucagaaugcagaugcauauguuuuuguggggucaucaagauacagcaagaaguucaagccggaaauagcaauuagacccaaagugagggaucaagaagggagaaugaacuauuacuggacacuaguagagccgggagacaaaauaacauucgaagcaacuggaaaucuagugguaccaagauaugcauucgcaauggaaagaaaugcuggaucugguauuaucauuucagauacaccaguccaugauugcaauacaacuugucagacacccaagggugcuauaaacaccagccucccauuucagaauauacauccgaucacaauuggaaaauguccaaaauauguaaaaagcacaaaauugagacuggccacaggauugaggaaugucccgucuauucaaucuagaggccuauuuggggccauugccgguuucauugaagggggguggacagggaugguagauggaugguacgguuaucaccaucaaaaugagcaggggucaggauaugcagccgaccugaagagcacacagaaugccauugacgagauuacuaacaaaguaaauucuguuauugaaaagaugaauacacaguucacagcaguagguaaagaguucaaccaccuggaaaaaagaauagagaauuuaaauaaaaaaguugaugaugguuuccuggacauuuggacuuacaaugccgaacuguugguucuauuggaaaaugaaagaacuuuggacuaccacgauucaaaugugaagaacuuauaugaaaagguaagaagccagcuaaaaaacaaugccaaggaaguuggaaacggcugcuuugaauuuuaccacaaaugcgauaacacgugcauggaaagugucaaaaaugggacuuaugacuacccaaaauacucagaggaagcaaaauuaaacagagaagaaauagaugggguaaagcuggaaucaacaaggauuuaccagauuuuggcgaucuauucaacugccgccaguucauugguacugguagucucccugggggcaaucaguuucuggaugugcucuaaugggucucuacaguguagaauauguauuuaa

SEQ ID NO: 38473 - RNA, 1701 nt, Artificial Sequence
  derived and/or modified CDS sequence (wt) from hemagglutinin__InfluenzaA__ADX96298
augaaggcaauacuaguaguucugcuauauacauuugcaaccgcaaaugcagacacauuauguauagguuaucaugcgaacaauucaacagacacuguagacacaguacuagaaaagaauguaacaguaacacacucuguuaacauucuagaagacaagcauaacgggaaacuaugcaaacuaagagggguagccccauugcauuuggguaaauguaacauugcuggcuggauccugggaaauccagagugugaaucacucuccacagcaagcucaugguccuacauuguggaaacaucuaguucagacaauggaacguguuacccaggagauuucaucgauuaugaggagcuaagagagcaauugagcucagugucaucauuugaaagguuugagauauuccccaagacaaguucauggcccaaucaugacucgaacaaagguguaacggcagcauguccucaugcuggagcaaaaagcuucuacaaaaauuuaauauggcuaguuaaaaaaggaaauucauacccaaagcucagcaaauccuacauuaaugauaaagggaaagaaguccucgugcuauggggcauucaccauccaucuacuagugcugaccaacaaagucucuaucagaaugcagaugcauauguuuuuguggggacaucaagauacagcaagaaguucaagccggaaauaguaauaagacccaaagugagggaucaagaagggagaaugaacuauuacuggacacuaguagagccgggagacaaaauaacauucgaagcaacuggaaaucuagugguaccgagauaugcauucgcaauggaaagaaaugcuggaucugguauuaucauuucagauacaccaguccaugauugcaauacaacuugucagacacccaagggugcuauaaacaccagccucccauuucagaauauacauccgaucacaauuggaaaauguccaaaauauguaaaaagcacaaaauugagacuggccacaggauugaggaaugucccgucuauucaaucuagaggccuauuuggggccauugccgguuucauugaagggggguggacagggaugguagauggaugguacgguuaucaccaucaaaaugagcaggggucaggauaugcagccgaccugaagagcacacagaaugccauugacgagauuacuaacaaaguaaauucuguuauugaaaagaugaauacacaguucacagcaguagguaaagaguucaaccaccuggaaaaaagaauagagaauuuaaauaaaaaaguugaugaugguuuccuggacauuuggacuuacaaugccgaacuguugguucuauuggaaaaugaaagaacuuuggacuaccacgauucaaaugugaagaacuuauaugaaaagguaagaagccaguuaaaaaacaaugccaaggaaauuggaaacggcugcuuugaauuuuaccacaaaugcgauaacacgugcauggaaagugucaaaaaugggacuuaugacuacccaaaauacucagaggaagcaaaauuaaacagagaagaaauagaugggguaaagcuggaaucaacaaggauuuaccagauuuuggcgaucuauucaacugucgccaguucauugguacugguagucucccugggggcaaucaguuucuggaugugcucuacugggucucuacaguguagaauauguauuuaa

SEQ ID NO: 38474 - RNA, 1701 nt, Artificial Sequence
  derived and/or modified CDS sequence (wt) from hemagglutinin__InfluenzaA__ADX96308
augaaggcaauacuaguaguucugcuauauacauuugcaaccgcaaaugcagacacauuauguauagguuaucaugcgaacaauucaacagacacuguagacacaguacuagaaaagaauguaacaguaacacacucuguuaacauucuagaagacaagcauaacgggaaacuaugcaaacuaagagggguagccccauugcauuuggguaaauguaacauugcuggcuggauccugggaaauccagagugugaaucacucuccacagcaagcucaugguccuacauuguggaaacaucuaguucagacaauggaacguguuacccaggagauuucaucgauuaugaggagcuaagagagcaauugagcucagugucaucauuugaaagguuugagauauuccccaagacaaguucauggcccaaucaugacucgaacaaagguguaacggcagcauguccucaugcuggagcaaaaagcuucuacaaaaauuuaauauggcuaguuaaaaaaggaaacucauacccaaagcucagcaaauccuacauuaaugauaaagggaaagaaguccucgugcuauggggcauucaccauccaucuacuagugcugaccaacaaagucucuaucagaaugcagaugcauauguuuuuguggggacaucaagauacagcaagaaguucaagccggaaauagcaauaagacccaaagugagggaucaagaagggagaaugaacuauuacuggacacuaguagagccgggagacaaaauaacauucgaagcaacuggaaaucuagugguaccgagauaugcauucgcaauggaaagaaaugcuggaucugguauuaucauuucagauacaccaguccacgauugcaauacaacuugucagacacccaagggugcuauaaacaccagccucccauuucagaauauacauccgaucacaauuggaaaauguccaaaauauguaaaaagcacaaaauugagacuggccacaggauugaggaaugucccgucuauucaaucuagaggccuauuuggggccauugccgguuucauugaagggggguggacagggaugguagauggaugguacgguuaucaccaucaaaaugagcagggaucaggauaugcagccgaccugaagagcacacagaaugccauugacgagauuacuaacaaaguaaauucuguuauugaaaagaugaauacacaguucacagcaguagguaaagaguucaaccaccuggaaaaaagaauagagaauuuaaauaaaaagguugaugaugguuuccuggacauuuggacuuacaaugccgaacuguugguucuauuggaaaaugaaagaacuuuggacuaccaugauucaaaugugaagaacuuauaugaaaagguaagaagccaguuaaaaaacaaugccaaggaaauuggaaacggcugcuuugaauuuuaccacaaaugcgauaacacgugcauggaaagugucaaaaaugggacuuaugacuacccaaaauacucagaggaagcaaaauuaaacagagaagaaauagaugggguaaagcuggaaucaacaaggauuuaccagauuuuggcgaucuauucaacugucgccaguucauugguacugguagucucccugggggcaaucaguuucuggaugugcucuaaugggucucuacaguguagaauauguauuuaa

SEQ ID NO: 38475 - RNA, 1701 nt, Artificial Sequence
  derived and/or modified CDS sequence (wt) from hemagglutinin__InfluenzaA__ADX96318
augaaggcaauacuaguaguucugcuauauacauuugcaaccgcaaaugcagacacauuauguauagguuaucaugcgaacaauucaacagacacuguagacacaguacuagaaaagaauguaacaguaacacacucuguuaaccuucuagaagacaagcauaacgggaaacuaugcaaacuaagagggguagccccauugcauuuggguaaauguaacauugcuggcuggauccugggaaauccagagugugaaucacucuccacagcaagcucaugguccuacauuguggaaacaucuaguucagacaauggaacguguuacccaggagauuucaucgauuaugaggagcuaagagagcaauugagcucagugucaucauuugaaagguuugagauauuccccaagacaaguucauggcccaaucaugacucaaacaaagguguaacggcagcauguccucaugcuggagcaaaaagcuucuacaaaaauuuaauauggcuaguuaaaaaaggaaauucauacccaaagcucagcaaauccuacauuaaugauaaagggaaagaaguccucgugcuauggggcauucaccauccaucuacuagugcugaccaacaaagucucuaucagaaugcagauucauauguuuuuguggggacaucaagauacagcaagaaguucaagccggaaauagcaauaagacccaaagugagggaucaagaagggagaaugaacuauuacuggacacuaguagagccgggagacaaaauaacauucgaagcaacuggaaaucuagugguaccgagauaugcauucgcaauggaaagaaaugcuggaucugguauuaucauuucagauacaccaguccacgauugcaauacaacuugucagacacccaagggugcuauaaacaccagccucccauuucagaauauacauccgaucacaauuggaaaauguccaaaauauguaaaaagcacaaaauugagacuggccacaggauugaggaaugucccgucuauucaaucuagaggccuauuuggggccauugccgguuucauugaagggggguggacagggaugguagauggaugguacgguuaucaccaucaaaaugagcaggggucaggauaugcagccgaccugaagagcacacagaaugccauugacaagauuacuaacaaaguaaauucuguuauugaaaagaugaauacacaguucacagcaguagguaaagaguucaaccaccuggaaaaaagaauagagaauuuaaauaaaaagguugaugaugguuuccuggacauuuggacuuacaaugccgaacuguugguucuauuggaaaaugaaagaacuuuggacuaccacgauucaaaugugaagaacuuauaugaaaagguaagaagccaguuaaaaaacaaugccaaggaaauuggaaacggcugcuuugaauuuuaccacaaaugcgauaacacgugcauggaaagugucaaaaaugggacuuaugacuacccaaaauacucagaggaagcaaaauuaaacagagaagaaauagaugggguaaagcuggaaucaacaaggauuuaucagauuuuggcgaucuauucaacugucgccaguucauugguacugguagucucccugggggcaaucaguuucuggaugugcucuaaugggucucuacaguguagaauauguauuuaa

SEQ ID NO: 38476 - RNA, 1701 nt, Artificial Sequence
  derived and/or modified CDS sequence (wt) from hemagglutinin__InfluenzaA__ADX96328
augaaggcaauacuaguaguucugcuauauacauuugcaaccgcaaaugcagacacauuauguauagguuaucaugcgaacaauucaacagacacuguagacacaguacuagaaaagaauguaacaguaacacacucuguuaaccuucuagaagacaagcauaacgggaaacuaugcaaacuaagagggguagccccauugcauuuggguaaauguaacauugcuggcuggauccugggaaauccagagugugaaucacucuccacagcaagcucaugguccuacauuguggaaacaucuaguucagacaauggaacguguuacccaggagauuucaucgauuaugaggagcuaagagagcaauugagcucagugucaucauuugaaagguuugagauauuccccaagacaaguucauggcccaaucaugacucaaacaaagguguaacggcagcauguccucaugcuggagcaaaaagcuucuacaaaaauuuaauauggcuaguuaaaaaaggaaauucauacccaaagcucagcaaauccuacauuaaugauaaagggaaagaaguccucgugcuauggggcauucaccauccaucuacuagugcugaccaacaaagucucuaucagaaugcagaugcauauguuuuuguggggacaucaagauacagcaagaaguucaagccggaaauagcaauaagacccaaagugagggaucaagaagggagaaugaacuauuacuggacacuaguagagccgggagacaaaauaacauucgaagcaacuggaaaucuaguggcaccgagauaugcauucgcaauggaaagaaaugcuggaucugguauuaucauuucagauacaccaguccacgauugcaauacaacuugucagacacccaagggugcuauaaacaccagccucccauuucagaauauacauccgaucacaauuggaaaauguccaaaauauguaaaaagcacaaaauugagacuggccacaggauugaggaaugucccgucuauucaaucuagaggccuauuuggggccauugccgguuucauugaagggggguggacagggaugguagauggaugguacgguuaucaccaucaaaaugagcaggggucaggauaugcagccgaccugaagagcacacagaaugccauugacaagauuacuaacaaaguaaauucuguuauugaaaagaugaauacacaguucacagcaguagguaaagaguucaaccaccuggaaaaaagaauagagaauuuaaauaaaaagguugaugaugguuuccuggacauuuggacuuacaaugccgaacuguugguucuauuggaaaaugaaagaacuuuggacuaccacgauucaaaugugaagaacuuauaugaaaagguaagaagccaguuaaaaaacaaugccaaggaaauuggaaacggcugcuuugaauuuuaccacaaaugcgauaacacgugcauggaaagugucaaaaaugggacuuaugacuacccaaaauacucagaggaagcaaaauuaaacagagaagaaauagaugggguaaagcuggaaucaacaaggauuuaccagauuuuggcgaucuauucaacugucgccaguucauugguacugguagucucccugggggcaaucaguuucuggaugugcucuaaugggucucuacaguguagaauauguauuuaa

SEQ ID NO: 38477 - RNA, 1701 nt, Artificial Sequence
  derived and/or modified CDS sequence (wt) from hemagglutinin__InfluenzaA__ADX96347
augaaggcaauacuaguaguucugcuauauacauuugcaaccgcaaaugcagacacauuauguauagguuaucaugcgaacaauucaacagacacuguagacacaguacuagaaaagaauguaacaguaacacacucuguuaaccuucuagaagacaagcauaacgggaaacuaugcaaacuaagagggguagccccauugcauuuggguaaauguaacauugcuggcuggauccugggaaauccagagugugaaucacucuccacagcaagcucaugguccuacauuguggaaacaucuaguucagacaauggaacguguuacccaggagauuucaucgauuaugaggagcuaagagagcaauugagcucagugucaucauuugaaagguuugagauauuccccaagacaaguucauggcccaaucaugacucgaacaaagguguaacggcagcauguccucaugcuggagcaaaaagcuucuacaaaaauuuaauauggcuaguuaaaaaaggaaauucauacccaaagcucagcaaauccuacauuaaugauaaagggaaagaaguccucgugcuauggggcauucaccauccaucuacuagugcugaccaacaaagucucuaucagaaugcagaugcauauguuuuuguggggacaucaagauacagcaagaaguucaagccggaaauagcaauaagacccaaagugagggaucaagaagggagaaugaacuauuacuggacacuaguagagccgggagacaaaauaacauucgaagcaacuggaaaucuagugguaccgagauaugcauucgcaauggaaagaaaugcuggaucugguauuaucauuucagauacaccaguccacaauugcaauacaacuugucagacacccaagggugcuauaaacaccagccucccauuucagaauauacauccgaucacaauuggaaaauguccaaaauauguaaaaagcacaaaauugagacuggccacaggauugaggaaugucccgucuauucaaucuagaggccuauuuggggccauugccgguuucauugaagggggguggacagggaugguagauggaugguacgguuaucaccaucaaaaugagcaggggucaggauaugcagccgaccugaagagcacacagaaugccauugacaagauuacuaacaaaguaaauucuguuauugaaaagaugaauacacaguucacagcaguagguaaagaguucaaccaccuggaaaaaagaauagagaauuuaaauaaaaagguugaugaugguuuccuggacauuuggacuuacaaugccgaacuguugguucuauuggaaaaugaaagaacuuuggacuaccacgauucaaaugugaagaacuuauaugaaaagguaagaagccaguuaaaaaacaaugccaaggaaauuggaaacggcugcuuugaauuuuaccacaaaugcgauaacacgugcauggaaagugucaaaaaugggacuuaugacuacccaaaauacucagaggaagcaaaauuaaacagagaagaaauagaugggguaaagcuggaaucaacaaggauuuaccagauuuuggcgaucuauucaacugucgccaguucauugguacugguagucucccugggggcaaucaguuucuggaugugcucuaaugggucucuacaguguagaauauguauuuaa

SEQ ID NO: 38478 - RNA, 1701 nt, Artificial Sequence
  derived and/or modified CDS sequence (wt) from hemagglutinin__InfluenzaA__ADX96357
augaaggcaauacuaguaguucugcuauauacauuugcaaccgcaaaugcagacacauuauguauagguuaucaugcgaacaauucaacagacacuguagacacaguacuagaaaagaauguaacaguaacacacucuguuaacauucuagaagacaagcauaacgggaaacuaugcaaacuaagagggguagccccauugcauuuggguaaauguaacauugcuggcuggauccugggaaauccagagugugaaucacucuccacagcaagcucaugguccuacauuguggaaacaucuaguucagacaauggaacguguuacccaggagauuucaucgauuaugaggagcuaagagagcaauugagcucagugucaucauuugaaagguuugagauauuccccaagacaaguucauggcccaaucaugacucgaacaaagguguaacggcagcauguccucaugcuggagcaaaaagcuucuacaaaaauuuaauauggcuaguuaaaaaaggaaauucauacccaaagcucagcaaauccuacauuaaugauaaagggaaagaaguccucgugcuauggggcauucaccauccaucuacuagugcugaccaacaaagucucuaucagaaugcagaugcauauguuuuuguggggacaucaagauacagcaagaaguucaagccggaaauaguaauaagacccaaagugagggaucaagaagggagaaugaacuauuacuggacacuaguagagccgggagacaaaauaacauucgaagcaacuggaaaucuagugguaccgagauaugcauucgcaauggaaagaaaugcuggaucugguauuaucauuucagauacaccaguccacgauugcaauacaacuugucagacacccaagggugcuauaaacaccagccucccauuucagaauauacauccgaucacaauuggaaaauguccaaaauauguaaaaagcacaaaauugagacuggccacaggauugaggaaugucccgucuauucaaucuagaggccuauuuggggcuauugccgguuucauugaagggggguggacagggaugguagauggaugguacgguuaucaccaucaaaaugagcaggggucaggauaugcagccgaccugaagagcacacagaaugccauugacgagauuacuaacaaaguaaauucuguuauugaaaagaugaauacacaguucacagcaguagguaaagaguucaaccaccuggaaaaaagaauagagaauuuaaauaaaaaaguugaugaugguuuccuggacauuuggacuuacaaugccgaacuguugguucuauuggaaaaugaaagaacuuuggacuaccacgauucaaaugugaagaacuuauaugaaaagguaagaagccaguuaaaaaacaaugccaaggaaauuggaaacggcugcuuugaauuuuaccacaaaugcgauaacacgugcauggaaagugucaaaaaugggacuuaugacuacccaaaauacucagaggaagcaaaauuaaacagagaagaaauagaugggguaaagcuggaaucaacaaggauuuaccagauuuuggcgaucuauucaacugucgccaguucauugguacugguagucucccugggggcaaucaguuucuggaugugcucuaaugggucucuacaguguagaauauguauuuaa

SEQ ID NO: 38479 - RNA, 1701 nt, Artificial Sequence
  derived and/or modified CDS sequence (wt) from hemagglutinin__InfluenzaA__ADX96367
augaaggcaauacuaguaguucugcuauauacauuugcaaccgcaaaugcagacacauuauguauagguuaucaugcgaacaauucaacagacacuguagacacaguacuagaaaagaauguaacaguaacacacucuguuaaccuucuagaagacaagcauaacgggaaacuaugcaaacuaagagggguagccccauugcauuuggguaaauguaacauugcuggcuggauccugggaaauccagagugugaaucacucuccacagcaagcucaugguccuacauuguggaaacaucuaguucagacaauggaacguguuacccaggagauuucaucgauuaugaggagcuaagagagcaauugagcucagugucaucauuugaaagguuugagauauuccccaagacaaguucauggcccaaucaugacucgaacaaagguguaacggcagcauguccucaugcuggagcaaaaagcuucuacaaaaauuuaauauggcuaguuaaaaaaggaaauucauacccaaagcucagcaaauccuacauuaaugauaaagggaaagaaguccuagugcuauggggcauucaccauccaucuacuagugcugaccaacaaagucucuaucagaaugcagaugcauauguuuuuguggggacaucaagauacagcaagaaguucaagccggaaauaguaauaagacccaaagugagggaucaagaagggagaaugaacuauuacuggacacuaguagagccgggagacaaaauaacauucgaagcaacuggaaaucuagugguaccgagauaugcauucgcaauggaaagaaaugcuggaucugguauuaucauuucagauacaccaguccacgauugcaauacaacuugucagacacccaagggugcuauaaacaccagccucccauuucagaauauacauccgaucacaauuggaaaauguccaaaauauguaaaaagcacaaaauugagacuggccacaggauugaggaaugucccgucuauucaaucuagaggccuauuuggggccauugccgguuucauugaagggggguggacagggaugguagauggaugguacgguuaucaccaucaaaaugagcaggggucaggauaugcagccgaccugaagagcacacagaaugccauugacgagauuacuaacaaaguaaauucuguuauugaaaagaugaauacacaguucacagcaguagguaaagaguucaaccaccuggaaaaaagaauagagaauuuaaauaaaaaaguugaugaugguuuccuggacauuuggacuuacaaugccgaacuguugguucuauuggaaaaugaaagaacuuuggacuaccacgauucaaaugugaagaacuuauaugaaaagguaagaagccaguuaaaaaacaaugccaaggaaauuggaaacggcugcuuugaauuuuaccacaaaugcgauaacacgugcauggaaagugucaaaaaugggacuuaugacuacccaaaauacucagaggaagcaaaauuaaacagagaagaaauagaugggguaaagcuggaaucaacaaggauuuaccagauuuuggcgaucuauucaacugucgccaguucauugguacugguagucucccugggggcaaucaguuucuggaugugcucuaaugggucucuacaguguagaauauguauuuaa

SEQ ID NO: 38480 - RNA, 1701 nt, Artificial Sequence
  derived and/or modified CDS sequence (wt) from hemagglutinin__InfluenzaA__ADX96378
augaaggcaauacuaguaguucugcuauauacauuugcaaccgcaaaugcagacacauuauguauagguuaucaugcgaacaauucaacagacacuguagacacaguacuagaaaagaauguaacaguaacacacucuguuaaccuucuagaagacaagcauaacgggaaacuaugcaaacuaagagggguagccccauugcauuuggguaaauguaacauugcuggcuggauccugggaaauccagagugugaaucacucuccacagcaagcucaugguccuacauuguggaaacaucuaguucagacaauggaacguguuacccaggagauuucaucgauuaugaggagcuaagagagcaauugagcucagugucaucauuugaaagguuugagauauuccccaagacaaguucauggcccaaucaugacucgaacaaagguguaacggcagcauguccucaugcuggagcaaaaagcuucuacaaaaauuuaauauggcuaguuaaaaaaggaaauucauacccaaagcucagcaaauccuacauuaaugauaaagggaaagaaguccucgugcuauggggcauucaccauccaucuacuagugcugaccaacaaagucucuaucagaaugcagaugcauauguuuuuguggggacaucaagauacagcaagaaguucaagccggaaauagcaauaagacccaaagugagggaucaagaagggagaaugaacuauuacuggacacuaguagagccgggagacaaaauaacauucgaagcaacuggaaaucuagugguaccgagauaugcauucgcaauggaaagaaaugcuggaucugguauuaucauuucagauacaccaauccacgauugcaauacaacuugucagacacccaagggugcuauaaacaccagccucccauuucagaauauacauccgaucacaauuggaaaauguccaaaauauguaaaaagcacaaaauugagacuggccacaggauugaggaaugucccgucuauucaaucuagaggccuauuuggggccauugccgguuucauugaagggggguggacagggaugguagauggaugguaugguuaucaccaucaaaaugagcaggggucaggauaugcagccgaccugaagagcacacagaaugccauugacgagauuacuaacaaaguaaauucuguuauugaaaagaugaacacacaguucacagcaguagguaaagaguucaaccaccuggaaaaaagaauagagaauuuaaauaaaaaaguugaugaugguuuccuggacauuuggacuuacaaugccgaacuguugguucuauuggaaaaugaaagaacuuuggacuaccacgauucaaaugugaagaacuuauaugaaaagguaagaagccaguuaaaaaacaaugccaaggaaauuggaaacggcugcuuugaauuuuaccacaaaugcgauaacacgugcauggaaagugucaaaaaugggacuuaugacuacccaaaauacucagaggaagcaaaauuaaacagagaagaaauagaugggguaaagcuggaaucaacaaggauuuaccagauuuuggcgaucuauucaacugucgccaguucauugguacugguagucucccugggggcaaucaguuucuggaugugcucuaaugggucucuacaguguagaauauguauuuaa

SEQ ID NO: 38481 - RNA, 1701 nt, Artificial Sequence
  derived and/or modified CDS sequence (wt) from hemagglutinin__InfluenzaA__ADX96398
augaaggcaauacuaguaguucugcuauauacauuugcaaccgcaaaugcagacacauuauguauagguuaucaugcgaacaauucaacagacacuguagacacaguacuagaaaagaauguaacaguaacacacucuguuaaccuucuagaagacaagcauaacgggaaacuaugcaaacuaagagggguagccccauugcauuuggguaaauguaacauugcuggcuggauccugggaaauccagagugugaaucacucuccacagcaagcucaugguccuacauuguggaaacaucuaguucagacaauggaacguguuacccaggagauuucaucgauuaugaggagcuaagagagcaauugagcucagugucaucauuugaaagguuugagauauuccccaagacaaguucauggcccaaucaugacucgaacaaagguguaacggcagcauguccucaugcuggagcaaaaagcuucuacaaaaauuuaauauggcuaguuaaaaaaggaaauucauacccaaagcucagcaaauccuacauuaaugauaaagggaaagaaguccucgugcuauggggcauucaccauccaucuacuagugcugaccaacaaagucucuaucagaaugcagaugcauauguuuuuguggggacaucaagauacagcaagaaguucaagccggaaauagcaauaagacccaaagugagggaucaagaagggagaaugaacuauuacuggacacuaguagagccgggagacaaaauaacauucgaagcaacuggaaaucuagugguaccgagauaugcauucgcaauggaaagaaaugcuggaucugguauuaucauuucagauacaccaauccacgauugcaauacaacuugucagacacccaagggugcuauaaacaccagccucccauuucagaauauacauccgaucacaauuggaaaauguccaaaauauguaaaaagcacaaaauugagacuggccacaggauugaggaaugucccgucuauucaaucuagaggccuauuuggggccauugccgguuucauugaagggggguggacagggaugguagauggaugguacgguuaucaccaucaaaaugagcaggggucaggauaugcagccgaccugaagagcacacagaaugccauugacgagauuacuaacaaaguaaauucuguuauugaaaagaugaacacacaguucacagcaguagguaaagaguucaaccaccuggaaaaaagaauagagaauuuaaauaaaaaaguugaugaugguuuccuggacauuuggacuuacaaugccgaacuguugguucuauuggaaaaugaaagaacuuuggacuaccacgauucaaaugugaagaacuuauaugaaaagguaagaagccaguuaaaaaacaaugccaaggaaauuggaaacggcugcuuugaauuuuaccacaaaugcgauaacacgugcauggaaagugucaaaaaugggacuuaugacuacccaaaauacucagaggaagcaaaauuaaacagagaagaaauagaugggguaaagcuggaaucaacaaggauuuaccagauuuuggcgaucuauucaacugucgccaguucauugguacugguagucucccugggggcaaucaguuucuggaugugcucuaaugggucucuacaguguagaauauguauuuaa

SEQ ID NO: 38482 - RNA, 1701 nt, Artificial Sequence
  derived and/or modified CDS sequence (wt) from hemagglutinin__InfluenzaA__ADX96408
augaaggcaauacuaguaguucugcuauauacauuugcaaccgcaaaugcagacacauuauguauagguuaucaugcgaacaauucaacagacacuguagacacaguacuagaaaagaauguaacaguaacacacucuguuaacauucuagaagacaagcauaacgggaaacuaugcaaacuaagagggguagccccauugcauuuggguaaauguaacauugcuggcuggauccugggaaauccagagugugaaucacucuccacagcaagcucaugguccuacauuguggaaacaucuaguucagacaauggaacguguuacccaggagauuucaucgauuaugaggagcuaagagagcaauugagcucagugucaucauuugaaagguuugagauauuccccaagacaaguucauggcccaaucaugacucgaacaaagguguaacggcagcauguccucaugcuggagcaaaaagcuucuacaaaaauuuaauauggcuaguuaaaaaaggaaauucauacccaaagcucagcaaauccuacauuaaugauaaagggaaagaaguccucgugcuauggggcauucaccauccaucuacuagugcugaccaacaaagucucuaucagaaugcagaugcauauguuuuuguggggacaucaagauacagcaagaaguucaagccggaaauagcaauaagacccaaagugagggaucaagaagggagaaugaacuauuacuggacacuaguagagccgggagacaaaauaacauucgaagcaacuggaaaucuagugguaccgagauaugcauucgcaauggaaagaaaugcuggaucugguauuaucauuucagauacaccaauccacgauugcaauacaacuugucagacacccaagggugcuauaaacaccagccucccauuucagaauauacauccgaucacaauuggaaaauguccaaaauauguaaaaagcacaaaauugagacuggccacaggauugaggaaugucccgucuauucaaucuagaggccuauuuggggccauugccgguuucauugaagggggguggacagggaugguagauggaugguacgguuaucaccaucaaaaugagcaggggucaggauaugcagccgaccugaagagcacacagaaugccauugacgagauuacuaacaaaguaaauucuguuauugaaaagaugaauacacaguucacagcaguagguaaagaguucaaccaccuggaaaaaagaauagagaauuuaaauaaaaaaguugaugaugguuuccuggacauuuggacuuacaaugccgaacuguugguucuauuggaaaaugaaagaacuuuggacuaccacgauucaaaugugaagaacuuauaugaaaagguaagaagccaguuaaaaaacaaugccaaggaaauuggaaacggcugcuuugaauuuuaccacaaaugcgauaacacgugcauggaaagugucaaaaaugggacuuaugacuacccaaaauacucagaggaagcaaaauuaaacagagaagaaauagaugggguaaagcuggaaucaacaaggauuuaccagauuuuggcgaucuauucaacugucgccaguucauugguacugguagucucccugggggcaaucaguuucuggaugugcucuaaugggucucuacaguguagaauauguauuuaa

SEQ ID NO: 38483 - RNA, 1701 nt, Artificial Sequence
  derived and/or modified CDS sequence (wt) from hemagglutinin__InfluenzaA__ADX96427
augaaggcaauacuaguaguucugcuauauacauuugcaaccgcaaaugcagacacauuauguauagguuaucaugcgaacaauucaacagacacuguagacacaguacuagaaaagaauguaacaguaacacacucuguuaacauucuagaagacaagcauaacgggaaacuaugcaaacuaagagggguagccccauugcauuuggguaaauguaacauugcuggcuggauccugggaaauccagagugugaaucacucuccacagcaagcucaugguccuacauuguggaaacaucuaguucagacaauggaacguguuacccaggagauuucaucgauuaugaggagcuaagagagcaauugagcucagugucaucauuugaaagguuugagauauuccccaagacaaguucauggcccaaucaugacucgaacaaagguguaacggcagcauguccucaugcuggagcaaaaagcuucuacaaaaauuuaauuuggcuaguuaaaaaaggaaauucauacccaaagcucagcaaauccuacauuaaugauaaagggaaagaaguccucgugcuauggggcauucaccauccaucuacuagugcugaccaacaaagucucuaucagaaugcagaugcauauguuuuuguggggucaucaagauacagcaagaaguucaagccggaaauagcaauaagacccaaagugagggaucaagaagggagaaugaacuauuacuggacacuaguagagccgggagacaaaauaacauucgaagcaacuggaaaucuagugguaccgagauaugcauucgcaauggaaagaaaugcuggaucugguauuaucauuucagauacaccaguccaugauugcaauacaacuugucagacacccaagggugcuauaaacaccagccucccauuucagaauauacauccgaucacaauuggaaaauguccaaaauauguaaaaagcacaaaauugagacuggccacaggauugaggaaugucccgucuauucaaucuagaggccuauuuggggccauugccgguuucauugaagggggguggacagggaugguagauggaugguacgguuaucaccaucaaaaugagcaggggucaggauaugcagccgaccugaagagcacacagaaugccauugacgagauuacuaacaaaguaaauucuguuauugaaaagaugaauacacaguucacagcaguagguaaagaguucaaccaccuggaaaaaagaauagagaauuuaaauaaaaaaguugaugaugguuuccuggacauuuggacuuacaaugccgaacuguugguucuauuggaaaaugaaagaacuuuggacuaccacgauucaaaugugaagaacuuauaugaaaagguaagaagccagcuaaaaaacaaugccaaggaaguuggaaacggcugcuuugaauuuuaccacaaaugcgauaacacgugcauggaaagugucaaaaaugggacuuaugacuacccaaaauacucagaggaagcaaaauuaaacagagaagaaauagaugggguaaagcuggaaucaacaaggauuuaccagauuuuggcgaucuauucaacugucgccaguucauugguacugguagucucccugggggcaaucaguuucuggaugugcucuaaugggucuuugcaguguagaauaugcauuuaa

SEQ ID NO: 38484 - RNA, 1701 nt, Artificial Sequence
  derived and/or modified CDS sequence (wt) from hemagglutinin__InfluenzaA__ADX96437
augaaggcaauacuaguaguucugcuauauacauuugcaaccgcaaaugcagacacauuauguauagguuaucaugcgaacaauucaacagacacuguagacacaguacuagaaaagaauguaacaguaacacacucuguuaacauucuagaagacaagcauaacgggaaacuaugcaaacuaagagggguagccccauugcauuuggguaaauguaacauugcuggcuggauccugggaaauccagagugugaaucacucuccacagcaagcucaugguccuacauuguggaaacaucuaguucagacaauggaacguguuacccaggagauuucaucgauuaugaggagcuaagagagcaauugagcucagugucaucauuugaaagguuugagauauuccccaagacaaguucauggcccaaucaugacucgaacaaagguguaacggcagcauguccucaugcuggagcaaaaagcuucuacaaaaauuuaauuuggcuaguuaaaaaaggaaauucauacccaaagcucagcaaauccuacauuaaugauaaagggaaagaaguccucgugcuauggggcauucaccauccaucuacuagugcugaccaacaaagucucuaucagaaugcagaugcauauguuuuuguggggucaucaagauacagcaagaaguucaagccggaaauagcaauuagacccaaagugagggaucaagaagggagaaugaacuauuacuggacacuaguagagccgggagacaaaauaacauucgaagcaacuggaaaucuagugguaccaagauaugcauucgcaauggaaagaaaugcuggaucugguauuaucauuucagauacaccaguccaugauugcaauacaacuugucagacacccaagggugcuauaaacaccagccucccauuucagaauauacauccgaucacaauuggaaaauguccaaaauauguaaaaagcacaaaauugagacuggccacaggauugaggaaugucccgucuauucaaucuagaggccuauuuggggccauugccgguuucauugaagggggguggacagggaugguagauggaugguacgguuaucaccaucaaaaugagcaggggucaggauaugcagccgaccugaagagcacacagaaugccauugacgagauuacuaacaaaguaaauucuguuauugaaaagaugaauacacaguucacagcaguagguaaagaguucaaccaccuggaaaaaagacuagagaauuuaaauaaaaaaguugaugaugguuuccuggacauuuggacuuacaaugccgaacuguugguucuauuggaaaaugaaagaacuuuggacuaccacgauucaaaugugaagaacuuauaugaaaagguaagaagccagcuaaaaaacaaugccaaggaaguuggaaacggcugcuuugaauuuuaccacaaaugcgauaacacgugcauggaaagugucaaaaaugggacuuaugacuacccaaaauacucagaggaagcaaaauuaaacagagaagaaauagaugggguaaagcuggaaucaacaaggauuuaccagauuuuggcgaucuauucaacugccgccaguucauugguacugguagucucccugggggcaaucaguuucuggaugugcucuaaugggucucuacaguguagaauauguauuuaa

SEQ ID NO: 38485 - RNA, 1701 nt, Artificial Sequence
  derived and/or modified CDS sequence (wt) from hemagglutinin__InfluenzaA__ADX96447
augaaggcaauacuaguaguucugcuauauacauuugcaaccgcaaaugcagacacauuauguauagguuaucaugcgaacaauucaacagacacuguagacacaguacuagaaaagaauguaacaguaacacacucuguuaaccuucuagaagacaagcauaacgggaaacuaugcaaacuaagagggguagccccauugcauuuggguaaauguaacauugcuggcuggauccugggaaauccagagugugaaucacucuccacagcaagcucaugguccuacauuguggaaacaucuaguucagacaauggaacguguuacccaggagauuucaucgauuaugaggagcuaagagagcaauugagcucagugucaucauuugaaagguuugagauauuccccaagacaaguucauggcccaaucaugacucgaacaaagguguaacggcagcauguccucaugcuggagcaaaaagcuucuacaaaaauuuaauauggcuaguuaaaaaaggaaauucauacccaaagcucagcaaauccuacauuaaugauaaagggaaagaaguccucgugcuauggggcauucaccauccaucuacuagugcugaccaacaaagucucuaucagaaugcagaugcauauguuuuuguggggucaucaagauacagcaagaaguucaagccggaaauagcaauaagacccaaagugagggaucaagaagggagaaugaacuauuacuggacacuaguagagccgggagacaaaauaacauucgaagcaacuggaaaucuagugguaccgagauaugcauucgcaauggaaagaaaugcuggaucugguauuaucauuucagauacaccaguccacgauugcaauacaacuugucagacacccaagggugcuauaaacaccagccucccauuucagaauauacauccgaucacaauuggaaaauguccaaaauauguaaaaagcacaaaauugagacuggccacaggauugaggaaugucccgucuauucaaucuagaggccuauuuggggccauugccgguuucauugaagggggguggacagggaugguagauggaugguacgguuaucaccaucaaaaugagcaggggucaggauaugcagccgaccugaagagcacacagaaugccauugacgagauuacuaacaaaguaaauucuguuauugaaaagaugaauacacaguucacagcaguagguaaagaguucaaccaccuggaaaaaagaauagagaauuuaaauaaaaaaguugaugaugguuuccuggacauuuggacuuacaaugccgaacuguugguucuauuggaaaaugaaagaacuuuggacuaccacgauucaaaugugaagaacuuauaugaaaagguaagaagccaguuaaaaaacaaugccaaggaaauuggaaacggcugcuuugaauuuuaccacaaaugcgauaacacgugcauggaaagugucaaaaaugggacuuaugacuacccaaaauacucagaggaagcaaaauuaaacagagaagaaauagaugggguaaagcuggaaucaacaaggauuuaccagauuuuggcgaucuauucaacugucgccaguucauugguacugguagucucccugggggcaaucaguuucuggaugugcucuaaugguucucuacaguguagaauauguauuuaa

SEQ ID NO: 38486 - RNA, 1701 nt, Artificial Sequence
  derived and/or modified CDS sequence (wt) from hemagglutinin__InfluenzaA__ADX96497
augaaggcaauacuaguaguucugcuauauacauuugcaaccgcaaaugcagacacauuauguauagguuaucaugcgaacaauucaacagacacuguagacacaguacuagaaaagaauguaacaguaacacacucuguuaaccuucuagaagacaagcauaacgggaaacuaugcaaacuaagagggguagccccauugcauuuggguaaauguaacauugcuggcuggauccugggaaauccagagugugaaucacucuccacagcaagcucaugguccuacauuguggaaacaucuaguucagacaauggaacguguuacccaggagauuucaucgauuaugaggagcuaagagagcaauugagcucagugucaucauuugaaagguuugagauauuccccaagacaaguucauggcccaaucaugacucgaacaaagguguaacggcagcauguccucaugcuggagcaaaaagcuucuacaaaaauuuaauauggcuaguuaaaaaaggaaauucauacccaaagcucagcaaauccuacauuaaugauaaagggaaagaaguccucgugcuauggggcauucaccauccaucuacuagugcugaccaacaaagucucuaucagaaugcagaugcauauguuuuuguggggacaucaagauacagcaagaaguucaagccggaaauagcaauaagacccaaagugagggaucaagaagggagaaugaacuauuacuggacacuaguagagccgggagacaaaauaacauucgaagcaacuggaaaucuagugguaccgagauaugcauucgcaauggaaagaaaugcuggaucugguauuaucauuucagauacaccaguccacgauugcaauacaacuugucagacacccaagggugcuauaaacaccagccucccauuucagaauauacauccgaucacaauuggaaaauguccaaaauauguaaaaagcacaaaauugagacuggccacaggauugaggaaugucccgucuauucaaucuagaggccuauuuggggccauugccgguuucauugaagggggguggacagggaugguagauggaugguaugguuaucaccaucaaaaugagcaggggucaggauaugcagccgaccugaagagcacacagaaugccauugacgagauuacuaacaaaguaaauucuguuauugaaaagaugaauacacaguucacagcaguagguaaagaguucaaccaccuggaaaaaagaauagagaauuuaaauaaaaaaguugaugaugguuuccuggacauuuggacuuacaaugccgaacuguugguucuauuggaaaaugaaagaacuuuggacuaccacgauucaaaugugaagaacuuauaugaaaagguaagaagccaguuaaaaaacaaugccaaggaaauuggaaacggcugcuuugaauuuuaccacaaaugcgauaacacgugcauggaaagugucaaaaaugggacuuaugacuacccaaaauacucagaggaagcaaaauuaaacagagaagaaauagaugggguaaagcuggaaucaacaaggauuuaccagauuuuggcgaucuauucaacugucgccaguucauugguacugguagucucccugggggcaaucaguuucuggaugugcucuaaugggucuuuacaguguagaauauguauuuaa

SEQ ID NO: 38487 - RNA, 1701 nt, Artificial Sequence
  derived and/or modified CDS sequence (wt) from hemagglutinin__InfluenzaA__ADX96507
augaaggcaauacuaguaguucugcuauauacauuugcaaccgcaaaugcagacacauuauguauagguuaucaugcgaacaauucaacagacacuguagacacaguacuagaaaagaauguaacaguaacacacucuguuaaccuucuagaagacaagcauaacgggaaacuaugcaaacuaagagggguagccccauugcauuuggguaaauguaacauugcuggcuggauccugggaaauccagagugugaaucacucuccacagcaagcucaugguccuacauuguggaaacaucuaguucagacaauggaacguguuacccaggagauuucaucgauuaugaggagcuaagagagcaauugagcucagugucaucauuugaaagguuugagauauuccccaagacaaguucauggcccaaucaugacucgaacaaagguguaacggcagcauguccucaugcuggagcaaaaagcuucuacaaaaauuuaauauggcuaguuaaaaaaggaaauucauacccaaagcucagcaaauccuacauuaaugauaaagggaaagaaguccucgugcuauggggcauucaccauccaucuacuagugcugaccaacaaagucucuaucagaaugcagaugcauauguuuuuguggggacaucaagauacagcaagaaguucaagccggaaauagcaauaagacccaaagugagggaucaagaagggagaaugaacuauuacuggacacuaguagagccgggagacaaaauaacauucgaagcaacuggaaaucuagugguaccgagauaugcauucgcaauggaaagaaaugcuggaucugguauuaucauuucagauacaccaguccacgauugcaauacaacuugucagacacccaagggugcuauaaacaccagccucccauuucagaauauacauccgaucacaauuggaaaauguccaaaauauguaaaaagcacaaaauugagacuggccacaggauugaggaaugucccgucuauucaaucuagaggccuauuuggggccauugccgguuucauugaagggggguggacagggaugguagauggaugguacgguuaucaccaucaaaaugagcaggggucaggauaugcagccgaccugaagagcacacagaaugccauugacgagauuacuaacaaaguaaauucuguuauugaaaagaugaauacacaguucacagcaguagguaaagaguucaaccaccuggaaaaaagaauagagaauuuaaauaaaaaaguugaugaugguuuccuggacauuuggacuuacaaugccgaacuguugguucuauuggaaaaugaaagaacuuuggacuaccacgauucaaaugugaagaacuuauaugaaaagguaagaagccaguuaaaaaacaaugccaaggaaauuggaaacggcugcuuugaauuuuaccacaaaugcgauaacacgugcauggaaagugucaaaaaugggacuuaugacuacccaaaauacucagaggaagcaaaauuaaacagagaagaaauagaugggguaaagcuggaaucaacaaggauuuaccagauuuuggcgaucuauucaacugucgccaguucauugguacugguagucucccugggggcaaucaguuucuggaugugcucuacugggucuuuacaguguagaauauguauuuaa

SEQ ID NO: 38488 - RNA, 1701 nt, Artificial Sequence
  derived and/or modified CDS sequence (wt) from hemagglutinin__InfluenzaA__ADX96517
augaaggcaauacuaguaguucugcuauauacauuugcaaccgcaaaugcagacacauuauguauagguuaucaugcgaacaauucaacagacacuguagacacaguacuagaaaagaauguaacaguaacacacucuguuaaccuucuagaagacaagcauaacgggaaacuaugcaaacuaagagggguagccccauugcauuuggguaaauguaacauugcuggcuggauccugggaaauccagagugugaaucacucuccacagcaagcucaugguccuacauuguggaaacaucuaguucagacaauggaacguguuacccaggagauuucaucgauuaugaggagcuaagagagcaauugagcucagugucaucauuugaaagguuugagauauuccccaagacaaguucauggcccaaucaugacucgaacaaagguguaacggcagcauguccucaugcuggagcaaaaagcuucuacaaaaauuuaauauggcuaguuaaaaaaggaaauucauacccaaagcucagcaaauccuacauuaaugauaaagggaaagaaguccucgugcuauggggcauucaccauccaucuacuagugcugaccaacaaagucucuaucagaaugcagaugcauauguuuuuguggggacaucaagauacagcaagaaguucaagccggaaauagcaauaagacccaaagugagggaucaagaagggagaaugaacuauuacuggacacuaguagagccgggagacaaaauaacauucgaagcaacuggaaaucuagugguaccgagauaugcauucgcaauggaaagaaaugcuggaucugguauuaucauuucagauacaccaguccacgauugcaacacaacuugucagacacccaagggugcuauaaacaccagccucccauuucagaauauacauccgaucacaauuggaaaauguccaaaauauguaaaaagcacaaaauugagacuggccacaggauugaggaaugucccgucuauucaaucuagaggccuauuuggggccauugccgguuucauugaagggggguggacagggaugguagauggaugguacgguuaucaccaucaaaaugagcaggggucaggauaugcagccgaccugaagagcacacagaaugccauugacgagauuacuaacaaaguaaauucuguuauugaaaagaugaauacacaguucacagcaguagguaaagaguucaaccaccuggaaaaaagaauagagaauuuaaauaaaaaaguugaugaugguuuccuggacauuuggacuuacaaugccgaacuguugguucuauuggaaaaugaaagaacuuuggacuaccacgauucaaaugugaagaacuuauaugaaaagguaagaagccaguuaaaaaacaaugccaaggaaauuggaaacggcugcuuugaauuuuaccacaaaugcgauaacacgugcauggaaagugucaaaaaugggacuuaugacuacccaaaauacucagaggaagcaaaauuaaacagagaagaaauagaugggguaaagcuggaaucaacaaggauuuaccagauuuuggcgaucuauucaacugucgccaguucauugguacugguagucucccugggggcaaucaguuucuggaugugcucuacugggucuuuacaguguagaauauguauuuaa

SEQ ID NO: 38489 - RNA, 1701 nt, Artificial Sequence
  derived and/or modified CDS sequence (wt) from hemagglutinin__InfluenzaA__ADX96527
augaaggcaauacuaguaguucugcuauauacauuugcaaccgcaaaugcagacacauuauguauagguuaucaugcgaacaauucaacagacacuguagacacaguacuagaaaagaauguaacaguaacacacucuguuaaccuucuagaagacaagcauaacgggaaacuaugcaaacuaagagggguagccccauugcauuuggguaaauguaacauugcuggcuggauccugggaaauccagagugugaaucacucuccacagcaagcucaugguccuacauuguggaaacaucuaguucagacaauggaacguguuacccaggagauuucaucgauuaugaggagcuaagagagcaauugagcucagugucaucauuugaaagguuugagauauuccccaagacaaguucauggcccaaucaugacucgaacaaagguguaacggcagcauguccucaugcuggagcaaaaagcuucuacaaaaauuuaauauggcuaguuaaaaaaggaaauucauacccaaagcucagcaaauccuacauuaaugauaaagggaaagaaguccucgugcuauggggcauucaccauccaucuacuagugcugaccaacaaagucucuaucagaaugcagaugcauauguuuuuguggggacaucaagauacagcaagaaguucaagccggaaauagcaauaagacccaaagugagggaucaagaagggagaaugaacuauuacuggacacuaguagagccgggagacaaaauaacauucgaagcaacuggaaaucuagugguaccgagauaugcauucgcaauggaaagaaaugcuggaucugguauuaucauuucagauacaccaguccacgauugcaacacaacuugucagacacccaagggugcuauaaacaccagccucccauuucagaauauacauccgaucacaauuggaaaauguccaaaauauguaaaaagcacaaaauugagacuggccacaggauugaggaaugucccgucuauucaaucuagaggccuauuuggggccauugccgguuucauugaagggggguggacagggaugguagauggaugguacgguuaucaccaucaaaaugagcaggggucaggauaugcagccgaccugaagagcacacagaaugccauugacgagauuacuaacaaaguaaauucuguuauugaaaagaugaauacacaguucacagcaguagguaaagaguucaaccaccuggaaaaaagaauagagaauuuaaauaaaaaaguugaugaugguuuccuggacauuuggacuuacaaugccgaacuguugguucuauuggaaaaugaaagaacuuuggacuaccacgauucaaaugugaagaacuuauaugaaaagguaagaagccaguuaaaaaacaaugccaaggaaauuggaaacggcugcuuugaauuuuuccacaaaugcgauaacacgugcauggaaagugucaaaaaugggacuuaugacuacccaaaauacucagaggaagcaaaauuaaacagagaagaaauagaugggguaaagcuggaaucaacaaggauuuaccagauuuuggcgaucuauucaacugucgccaguucauugguacugguagucucccugggggcaaucaguuucuggaugugcucuaaugggucucuacaguguagaauauguauuuaa

SEQ ID NO: 38490 - RNA, 1701 nt, Artificial Sequence; identical to SEQ ID NO: 34681
  derived and/or modified CDS sequence (wt) from hemagglutinin__InfluenzaA__ADX96537

SEQ ID NO: 38491 - RNA, 1701 nt, Artificial Sequence
  derived and/or modified CDS sequence (wt) from hemagglutinin__InfluenzaA__ADX96547
augaaggcaauacuaguaguucugcuauauacauuugcaaccgcaaaugcagacacauuauguauagguuaucaugcgaacaauucaacagacacuguagacacgguacuagaaaagaauguaacaguaacacacucuguuaaccuucuagaagacaagcauaacgggaaacuaugcaaacuaagagggguagccccauugcauuuggguaaauguaacauugcuggcuggauccugggaaauccagagugugaaucacucuccacagcaagcucaugguccuacauuguggaaacaucuaguucagacaauggaacguguuacccaggagauuucaucgauuaugaggagcuaagagagcaauugagcucagugucaucauuugaaagguuugagauauuccccaagacaaguucauggcccaaucaugacucgaacaaagguguaacggcagcauguccucaugcuggagcaaaaagcuucuacaaaaauuuaauauggcuaguuaaaaaaggaaauucauacccaaagcucagcaaauccuacauuaaugauaaagggaaagaaguccucgugcuauggggcauucaccauccaucuacuagugcugaccaacaaagucucuaucagaaugcagaugcauauguuuuuguggggacaucaagauacagcaagaaguucaagccggaaauagcaauaagacccaaagugagggaucaagaagggagaaugaacuauuacuggacacuaguagagccgggagacaaaauaacauucgaagcaacuggaaaucuagugguaccgagauacgcauucgcaauggaaagaaaugcuggaucugguauuaucauuucagauacaccaguccacgauugcaauacaacuugucagacacccaagggugcuauaaacaccagccucccauuucagaauauacauccgaucacaauuggaaaauguccaaaauauguaaaaagcacaaaauugagacuggccacaggauugaggaaugucccgucuauucaaucuagaggccuauuuggggccauugccgguuucauugaagggggguggacagggaugguagauggaugguacgguuaucaccaucaaaaugagcaggggucaggauaugcagccgaccugaagagcacacagaaugccauugacgagauuacuaacaaaguaaauucuguuauugaaaagaugaacacacaguucacagcaguagguaaagaguucaaccaccuggaaaaaagaauagagaauuuaaauaaaaaaguugaugaugguuuccuggacauuuggacuuacaaugccgaacuguugguucuauuggaaaaugaaagaacuuuggacuaccacgauucaaaugugaagaacuuauaugaaaagguaagaagccaguuaaaaaacaaugccaaggaaauuggaaacggcugcuuugaauuuuaccacaaaugcgauaacacgugcauggaaagugucaaaaaugggacuuaugacuacccaaaauacucagaggaagcaaaauuaaacagagaagaaauagaugggguaaagcuggaaucaacaaggauuuaccagauuuuggcgaucuauucaacugucgccaguucauugguacugguagucucccugggggcaaucagcuucuggauguguuccaaugggucuuugcaguguagaauaugcauuuaa

SEQ ID NO: 38492 - RNA, 1701 nt, Artificial Sequence
  derived and/or modified CDS sequence (wt) from hemagglutinin__InfluenzaA__ADX96557
augaaggcaauacuaguaguucugcuauauacauuugcaaccgcaaaugcagacacauuauguauagguuaucaugcgaacaauucaacagacacuguagacacaguacuagaaaagaauguaacaguaacacacucuguuaaccuucuagaagacaagcauaacgggaaacuaugcaaacuaagagggguagccccauugcauuuggguaaauguaacauugcuggcuggauccugggaaauccagagugugaaucacucuccacagcaagcucaugguccuacauuguggaaacaucuaguucagacaauggaacguguuacccaggagauuucaucgauuaugaggagcuaagagagcaauugagcucagugucaucauuugaaagguuugagauauuccccaagacaaguucauggcccaaucaugacucgaacaaagguguaacggcagcauguccucaugcuggagcaaaaagcuucuacaaaaauuuaauauggcuaguuaaaaaaggaaauucauacccaaagcucagcaaauccuacauuaaugauaaagggaaagaaguccucgugcuauggggcauucaccauccaucuacuagugcugaccaacaaagucucuaucagaaugcagaugcauauguuuuuguggggacaucaagauacagcaagaaguucaagccggaaauagcaauaagacccaaagugagggaucaagaagggagaaugaacuauuacuggacacuaguagagccgggagacaaaauaacauucgaagcaacuggaaaucuagugguaccgagauaugcauucgcaauggaaagaaaugcuggaucugguauuaucauuucagauacaccaguccacgauugcaauacaacuugucagacacccaagggugcuauaaacaccagccucccauuucagaauauacauccgaucacaauuggaaaauguccaaaauauguaaaaagcacaaaauugagacuggccacaggauugaggaauaucccgucuauucaaucuagaggccuauuuggggccauugccgguuucauugaagggggguggacagggaugguagauggaugguacgguuaucaccaucaaaaugagcaggggucaggauaugcagccgaccugaagagcacacagaaugccauugacgagauuacuaacaaaguaaauucuguuauugaaaagaugaauacacaguucacagcaguagguaaagaguucaaccaccuggaaaaaagaauagagaauuuaaauaaaaaaguugaugaugguuuccuggacauuuggacuuacaaugccgaacuguugguucuauuggaaaaugaaagaacuuuggacuaccacgauucaaaugugaagaacuuauaugaaaagguaagaagccaguuaaaaaacaaugccaaggaaauuggaaacggcugcuuugaauuuuaccacaaaugcgauaacacgugcauggaaagugucaaaaaugggacuuaugacuacccaaaauacucagaggaagcaaaauuaaacagagaagaaauagaugggguaaagcuggaaucaacaaggauuuaccagauuuuggcgaucuauucaacugucgccaguucauugguacugguagucucccugggggcaaucaguuucuggaugugcucuaaugggucucuacaguguagaauauguauuuaa

SEQ ID NO: 38493 - RNA, 1701 nt, Artificial Sequence; identical to SEQ ID NO: 34681
  derived and/or modified CDS sequence (wt) from hemagglutinin__InfluenzaA__ADX96587

SEQ ID NO: 38494 - RNA, 1701 nt, Artificial Sequence; identical to SEQ ID NO: 34705
  derived and/or modified CDS sequence (wt) from hemagglutinin__InfluenzaA__ADX96597

SEQ ID NO: 38495 - RNA, 1701 nt, Artificial Sequence
  derived and/or modified CDS sequence (wt) from hemagglutinin__InfluenzaA__ADX96607
augaaggcaauacuaguaguucugcuauauacauuugcaaccgcaaaugcagacacauuauguauagguuaucaugcgaacaauucaacagacacuguagacacaguacuagaaaagaauguaacaguaacacacucuguuaaccuucuagaagacaagcauaacgggaaacuaugcaaacuaagagggguagccccauugcauuuggguaaauguaacauugcuggcuggauccugggaaauccagagugugaaucacucuccacagcaagcucaugguccuacauuguggaaacaucuaguucagacaauggaacguguuacccaggagauuucaucgauuaugaggagcuaagagagcaauugagcucagugucaucauuugaaagguuugagauauuccccaagacaaguucauggcccaaucaugacucgaacaaagguguaacggcagcauguccucaugcuggagcaaaaagcuucuacaaaaauuuaauauggcuaguuaaaaaaggaaauucauacccaaagcucagcaaauccuacauuaaugauaaagggaaagaaguccucgugcuauggggcauucaccauccaucuacuagugcugaccaacaaagucucuaucagaaugcagaugcauauguuuuuguggggucaucaagauacagcaagaaguucaagccggaaauagcaauaagacccaaagugagggaccaagaagggagaaugaacuauuacuggacacuaguagagccgggagacaaaauaacauucgaagcaacuggaaaucuagugguaccgagauaugcauucgcaauggaaagaaaugcuggaucugguauuaucauuucagauacaccaguccacgauugcaauacaacuugucagacacccaagggugcuauaaacaccagccucccauuucagaauauacauccgaucacaauuggaaaauguccaaaauauguaaaaagcacaaaauugagacuggccacaggauugaggaaugucccgucuauucaaucuagaggccuauuuggggccauugccgguuucauugaagggggguggacagggaugguagauggaugguacgguuaucaccaucaaaaugagcaggggucaggauaugcagccgaccugaagagcacacagaaugccauugacgagauuacuaacaaaguaaauucuguuauugaaaagaugaauacacaguucacagcaguagguaaagaguucaaccaccuggaaaaaagaauagagaauuuaaauaaaaaaguugaugaugguuuccuggacauuuggacuuacaaugccgaacuguugguucuauuggaaaaugaaagaacuuuggacuaccacgauucaaaugugaagaacuuauaugaaaagguaagaagccagcuaaaaaacaaugccaaggaaauuggaaacggcugcuuugaauuuuaccacaaaugcgauaacacgugcauggaaagugucaaaaaugggacuuaugacuacccaaaauacucagaggaagcaaaauuaaacagagaagaaauagaugggguaaagcuggaaucaacaaggauuuaccagauuuuggcgaucuauucaacugucgccaguucauugguacugguagucucccugggggcaaucaguuucuggaugugcucuaaugggucucuacaguguagaauauguauuuaa

SEQ ID NO: 38496 - RNA, 1701 nt, Artificial Sequence
  derived and/or modified CDS sequence (wt) from hemagglutinin__InfluenzaA__ADX96627
augaaggcaauacuaguaguucugcuauauacauuugcaaccgcaaaugcagacacauuauguauagguuaucaugcgaacaauucaacagacacuguagacacaguacuagaaaagaauguaacaguaacacacucuguuaaccuucuagaagacaagcauaacgggaaacuaugcaaacuaagagggguagccccauugcauuuggguaaauguaacauugcuggcuggauccugggaaauccagagugugaaucacucuccacagcaagcucaugguccuacauuguggaaacaucuaguucagacaauggaacguguuacccaggagauuucaucgauuaugaggagcuaagagagcaauugagcucagugucaucauuugaaagguuugagauauuccccaagacaaguucauggcccaaucaugacucgaacaaagguguaacggcagcauguccucaugcuggagcaaaaagcuucuacaaaaauuuaauauggcuaguuaaaaaaggaaauucauacccaaagcucagcaaauccuacauuaaugauaaagggaaagaaguccucgugcuauggggcauucaccauccaucuacuagugcugaccaacaaagucucuaucagaaugcagaugcauauguuuuuguggggacaucaagauacagcaagaaguucaagccggaaauagcaauaagacccaaagugagggaucaagaagggagaaugaacuauuacuggacacuaguagagccgggagacaaaauaacauucgaagcaacuggaaaucuagugguaccgagauaugcauucgcaauggaaaaaaaugcuggaucugguauuaucauuucagauacaccaguccacgauugcaauacaacuugucagacacccaagggugcuauaaacaccagccucccauuucagaauauacauccgaucacaauuggaaaauguccaaaauauguaaaaagcacaaaauugagacuggccacaggauugaggaaugucccgucuauucaaucuagaggccuauuuggggccauugccgguuucauugaagggggguggacagggaugguagauggaugguacgguuaucaccaucaaaaugagcaggggucaggauaugcagccgaccugaagagcacacagaaugccauugacgagauuacuaacaaaguaaauucuguuauugaaaagaugaauacacaguucacagcaguagguaaagaguucaaccaccuggaaaaaagaauagagaauuuaaauaaaaaaguugaugaugguuuccuggacauuuggacuuacaaugccgaacuguugguucuauuggaaaaugaaagaacuuuggacuaccacgauucaaaugugaagaacuuauaugaaaagguaagaagccaguuaaaaaacaaugccaaggaaauuggaaacggcugcuuugaauuuuaccacaaaugcgauaacacgugcauggaaagugucaaaaaugggacuuaugacuacccaaaauacucagaggaagcaaaauuaaacagagaagaaauagaugggguaaagcuggaaucaacaaggauuuaccagauuuuggcgaucuauucaacugucgccaguucauugguacugguagucucccugggggcaaucaguuucuggaugugcucuacugggucucuacaguguagaauauguauuuaa

SEQ ID NO: 38497 - RNA, 1701 nt, Artificial Sequence; identical to SEQ ID NO: 35128
  derived and/or modified CDS sequence (wt) from hemagglutinin__InfluenzaA__ADX96637

SEQ ID NO: 38498 - RNA, 1701 nt, Artificial Sequence
  derived and/or modified CDS sequence (wt) from hemagglutinin__InfluenzaA__ADX96647
augaaggcaauacuaguaguucugcuauauacauuugcaaccgcaaaugcagacacauuauguauagguuaucaugcgaacaauucaacagacacuguagacacaguacuagaaaagaauguaacaguaacacacucuguuaaccuucuagaagacaagcauaacgggaaacuaugcaaacuaagagggguagccccauugcauuuggguaaauguaacauugcuggcuggauccugggaaauccagagugugaaucacucuccacagcaagcucaugguccuacauuguggaaacaucuaguucagacaauggaacguguuacccaggagauuucaucgauuaugaggagcuaagagagcaauugagcucagugucaucauuugaaagguuugagauauuccccaagacaaguucauggcccaaucaugacucgaacaaagguguaacggcagcauguccucaugcuggagcaaaaagcuucuacaaaaauuuaauauggcuaguuaaaaaaggaaauucauacccaaagcucagcaaauccuacauuaaugauaaagggaaagaaguccucgugcuauggggcauucaccauccaucuacuagugcugaccaacaaagucucuaucagaaugcagaugcauauguuuuuguggggacaucaagauacagcaagaaguucaagccggaaauagcaauaagacccaaagugagggaucaagaagggagaaugaacuauuacuggacacuaguagagccgggagacaaaauaacauucgaagcaacuggaaaucuagugguaccgagauaugcauucgcaauggaaagaaaugcuggaucugguauuaucauuucagauacaccaguccacgauugcaauacaacuugucagacacccaagggugcuauaaacaccagccucccauuucagaauauacauccgaucacaauuggaaaauguccaaaauauguaaaaagcacaaaauugagacuggccacaggauugaggaaugucccgucuauucaaucuagaggccuauuuggggccauugccgguuucauugaagggggguggacagggaugguagauggaugguacgguuaucaccaucaaaaugagcaggggucaggauaugcagccgaccugaagagcacacagaaugccauugacgagauuacuaacaaaguaaauucuguuauugaaaagaugaauacacaguucacagcaguagguaaagaguucaaccaccuggaaaaaagaauagagaauuuaaauaaaaaaguugaugaugguuuccuggacauuuggacuuacaaugccgaacuguugguucuauuggaaaaugaaagaacuuuggacuaccacgauucaaaugugaagaacuuauaugaaaagguaagaagccaguuaaaaaacaaugccaaggaaauuggaaacggcugcuuugaauuuuaccacaaaugcgauaacacgugcauggaaagugucaaaaaugggacuuaugacuacccaaaauacucagaggaagcaaaauuaaacagagaagaaauagaugggguaaagcuggaaucaacaaggauuuaccagauuuuggcgaucuauucaacugucgccaguucauugguacugguagucucccugggggcaaucaguuucuggaugugcucuaaugguucucuacaguguagaauauguauuuaa

SEQ ID NO: 38499 - RNA, 1701 nt, Artificial Sequence
  derived and/or modified CDS sequence (wt) from hemagglutinin__InfluenzaA__ADX96657
augaaggcaauacuaguaguucugcuauauacauuugcaaccgcaaaugcagacacauuauguauagguuaucaugcgaacaauucaacagacacuguagacacaguacuagaaaagaauguaacaguaacacacucuguuaaccuucuagaagacaagcauaacgggaaacuaugcaaacuaagagggguagccccauugcauuuggguaaauguaacauugcuggcuggauccugggaaauccagagugugaaucacucuccacagcaagcucaugguccuacauuguggaaacaucuaguucagacaauggaacguguuacccaggagauuucaucgauuaugaggagcuaagagagcaauugagcucagugucaucauuugaaagguuugagauauuccccaagacaaguucauggcccaaucaugacucgaacaaagguguaacggcagcauguccucaugcuggagcaaaaagcuucuacaaaaauuuaauauggcuaguuaaaaaaggaaauucauacccaaagcucagcaaauccuacauuaaugauaaagggaaagaaguccucgugcuauggggcauucaccauccaucuacuagugcugaccaacaaagucucuaucagaaugcagaugcauauguuuuuguggggucaucaagauauagcaagaaguucaagccggaaauagcaauaagacccaaagugagggaucaagaagggagaaugaacuauuacuggacacuaguagagccgggagacaaaauaacauucgaagcaacuggaaaucuagugguaccgagauaugcauucgcaauggaaagaaaugcuggaucugguauuaucauuucagauacaccaguccacgauugcaauacaacuugucagacacccaagggugcuauaaacaccagccucccauuucagaauauacauccgaucacaauuggaaaauguccuaaauauguaaaaagcacaaaauugagacuggccacaggauugaggaaugucccgucuauucaaucuagaggccuauuuggggccauugccgguuucauugaagggggguggacagggaugguagauggaugguacgguuaucaccaucaaaaugagcaggggucaggauaugcagccgaccugaagagcacacagaaugccauugacgagauuacuaacaaaguaaauucuguuauugaaaagaugaauacgcaguucacagcaguagguaaagaguucaaccaccuggaaaaaagaauagagaauuuaaauaaaaaaguugaugaugguuuccuggacauuuggacuuacaaugccgaacuguugguucuauuggaaaaugaaagaacuuuggacuaccacgauucgaaugugaagaacuuauaugaaaagguaagaagccagcuaaaaaacaaugccaaggaaauuggaaacggcugcuuugaauuuuaccacaaaugcgauaacacgugcauggaaagugucaaaaaugggacuuaugacuacccaaaauacucagaggaagcaaaauuaaacagagaagaaauagaugggguaaagcuggaaucaacaaggauuuaccagauuuuggcgaucuauucaacugucgccaguucauugguacugguagucucccugggggcaaucaguuucuggaugugcucuaaugggucucuacaguguagaauauguauuuaa

SEQ ID NO: 38500 - RNA, 1701 nt, Artificial Sequence; identical to SEQ ID NO: 34714
  derived and/or modified CDS sequence (wt) from hemagglutinin__InfluenzaA__ADX96667

SEQ ID NO: 38501 - RNA, 1701 nt, Artificial Sequence
  derived and/or modified CDS sequence (wt) from hemagglutinin__InfluenzaA__ADX96677
augaaggcaauacuaguaguucugcuauauacauuugcaaccgcaaaugcagacacauuauguauagguuaucaugcgaacaauucaacagacacuguagacacaguacuagaaaagaauguaacaguaacacacucuguuaaccuucuagaagacaagcauaacgggaaacuaugcaaacuaagagggguagccccauugcauuuggguaaauguaacauugcuggcuggauccugggaaauccagagugugaaucacucuccacagcaagcucaugguccuacauuguggaaacaucuaguucagacaauggaacguguuacccaggagauuucaucgauuaugaggagcuaagagagcaauugagcucagugucaucauuugaaagguuugagauauuccccaagacaaguucauggcccaaucaugacucgaacaaagguguaacggcagcauguccucaugcuggagcaaaaagcuucuacaaaaauuuaauauggcuaguuaaaaaaggaaauucauacccaaagcucagcaaauccuacauuaaugauaaagggaaagaaguccucgugcuauggggcauucaccauccaucuacuagugcugaccaacaaagucucuaucagaaugcagaugcauauguuuuuguggggucaucaagauacagcaagaaguucaagccggaaauagcaauaagacccaaagugagggaucaagaagggagaaugaacuauuacuggacaguaguagagccgggagacaaaauaacauucgaagcaacuggaaaucuagugguaccgagauaugcauucgcaauggaaagaaaugcuggaucugguauuaucauuucagauacaccaguccacgauugcaauacaacuugucagacacccaagggugcuauaaacaccagccucccauuucauaauauacauccgaucacaauuggaaaauguccaaaauauguaaaaagcacaaaauugagacuggccacaggauugaggaaugucccgucuauucaaucuagaggccuauuuggggccauugccgguuucauugaagggggguggacagggaugguagauggaugguacgguuaucaccaucaaaaugagcaggggucaggauaugcagccgaccugaagagcacacagaaugccauugacgagauuacuaacaaaguaaauucuguuauugaaaagaugaauacacaguucacagcaguagguaaagaguucaaccaccuggaaaaaagaauagagaauuuaaauaaaaaaguugaugaugguuuccuggacauuuggacuuacaaugccgaacuguugguucuauuggaaaaugaaagaacuuuggacuaccacgauucaaaugugaagaacuuauaugaaaagguaagaagccaguuaaaaaacaaugccaaggaaauuggaaacggcugcuuugaauuuuaccacaaaugcgauaacacgugcauggaaagugucaaaaaugggacuuaugacuacccaaaauacucagaggaagcaaaauuaaacagagaagaaauagaugggguaaagcuggaaucaacaaggauuuaccagauuuuggcgaucuauucaacugucgccaguucauugguacugguagucucccugggggcaaucaguuucuggaugugcucuaaugggucucuacaguguagaauauguauuuaa

SEQ ID NO: 38502 - RNA, 1701 nt, Artificial Sequence
  derived and/or modified CDS sequence (wt) from hemagglutinin__InfluenzaA__ADX96687
augaaggcaauacuaguaguucugcuauauacauuugcaaccgcaaaugcagacacauuauguauagguuaucaugcgaacaauucaacagacacuguagacacaguacuagaaaagaauguaacaguaacacacucuguuaaccuucuagaagacaagcauaacgggaaacuaugcaaacuaagagggguagccccauugcauuuggguaaauguaacauugcuggcuggauccugggaaauccagagugugaaucacucuccacagcaagcucaugguccuacauuguggaaacaucuaguucagacaauggaacguguuacccaggagauuucaucgauuaugaggagcuaagagagcaauugagcucagugucaucauuuaaaagguuugagauauuccccaagacaaguucauggcccaaucaugacucgaacaaagguguaacggcagcauguccucaugcuggagcaaaaagcuucuacaaaaauuuaauauggcuaguuaaaaaaggaaauucauacccaaagcucagcaaauccuacauuaaugauaaagggaaagaaguccucgugcuauggggcauucaccauccaucuacuagugcugaccaacaaagucucuaucagaaugcagaugcauauguuuuuguggggacaucaagauacagcaagaaguucaagccggaaauagcaauaagacccaaagugagggaucaagaagggagaaugaacuauuacuggacacuaguagagccgggagacaaaauaacauucgaagcaacuggaaaucuagugguaccgagauaugcauucgcaauggaaagaaaugcuggaucugguauuaucauuucagauacaccagucuacgauugcaauacaacuugucagacacccaagggugcuauaaacaccagccucccauuucagaauauacauccgaucacaauuggaaaauguccaaaauauguaaaaagcacaaaauugagacuggccacaggauugaggaaugucccgucuauucaaucuagaggccuauuuggggccauugccgguuucauugaagggggguggacagggaugguagauggaugguacgguuaucaccaucaaaaugagcaggggucaggauaugcagccgaccugaagagcacacagaaugccauugacgagauuacuaacaaaguaaauucuguuauugaaaagaugaauacacaguucacagcaguagguaaagaguucaaccaccuggaaaaaagaauagagaauuuaaauaaaaagguugaugaugguuuccuggacauuuggacuuacaaugccgaacuguugguucuauuggaaaaugaaagaacuuuggacuaccacgauucaaaugugaagaacuuauaugaaaagguaagaagccaguuaaaaaacaaugccaaggaaauuggaaacggcugcuuugaauuuuaccacaaaugcgauaacacgugcauggaaagugucaaaaaugggacuuaugacuacccaaaauacucagaggaagcaaaauuaaacagagaagaaauagaugggguaaagcuggaaucaacaaggauuuaccagauuuuggcgaucuauucaacugucgccaguucauugguacugguagucucccugggggcaaucaguuucuggaugugcucuaaugggucucuacaguguagaauauguauuuaa

SEQ ID NO: 38503 - RNA, 1701 nt, Artificial Sequence
  derived and/or modified CDS sequence (wt) from hemagglutinin__InfluenzaA__ADX96697
augaaggcaauacuaguaguucugcuauauacauuugcaaccgcaaaugcagacacauuauguauagguuaucaugcgaacaauucaacagacacuguagacacaguacuagaaaagaauguaacaguaacacacucuguuaaccuucuagaagacaagcauaacgggaaacuaugcaaacuaagagggguagccccauugcauuuggguaaauguaacauugcuggcuggauccugggaaauccagagugugaaucacucuccacagcaagcucaugguccuacauuguggaaacaucuaguucagacaauggaacguguuacccaggagauuucaucgauuaugaggagcuaagagagcaauugagcucagugucaucauuugaaagguuugagauauuccccaagacaaguucauggcccaaucaugacucgaacaaagguguaacggcagcauguccucaugcuggagcaaaaagcuucuacaaaaauuuaauauggcuaguuaaaaaaggaaauucauacccaaagcucagcaaauccuacauuaaugauaaagggaaagaaguccucgugcuauggggcauucaccauccaucuacuagugcugaccaacaaagucucuaucagaaugcagaugcauauguuuuuguggggacaucaagauacagcaagaaguucaagccggaaauagcaauaagacccaaagugagggaucaagaagggagaaugaacuauuacuggacacuaguagagccgggagacaaaauaacauucgaagcaacuggaaaucuagugguaccgagauaugcauucgcaauggaaagaaaugcuggaucugguauuaucauuucagauacaccaguccacgauugcaauacaacuugucagacacccaagggugcuauaaacaccagccucccauuucagaauauacauccgaucacaauuggaaaauguccaaaauauguaaaaagcacaaaauugagacuggccacaggauugaggaaugucccgucuauucaaucuagaggccuauuuggggccauugccgguuucauugaagggggguggacagggaugguagauggaugguacgguuaucaccaucaaaaugagcaggggucaggauaugcagccgaccugaagagcacacagaaugccauugacgagauuacuaacaaaguaaauucuguuauugaaaagaugaauacacaauucacagcaguagguaaagaguucaaccaccuggaaaaaagaauagagaauuuaaauaaaaagguugaugaugguuuccuggacauuuggacuuacaaugccgaacuguugguucuauuggaaaaugaaagaacuuuggacuaccacgauucaaaugugaagaacuuauaugaaaagguaagaagccaguuaaaaaacaaugccaaggaaauuggaaacggcugcuuugaauuuuaccacaaaugcgauaacacgugcauggaaagugucaaaaaugggacuuaugacuacccaaaauacucagaggaagcaaaauuaaacagagaagaaauagaugggguaaagcuggaaucaacaaggauuuaccagauuuuggcgaucuauucaacugucgccaguucauugguacugguagucucccugggggcaaucaguuucuggaugugcucuaaugggucucuacaguguagaauauguauuuaa

SEQ ID NO: 38504 - RNA, 1701 nt, Artificial Sequence
  derived and/or modified CDS sequence (wt) from hemagglutinin__InfluenzaA__ADX96707
augaaggcaauacuaguaguucugcuauauacauuugcaaccgcaaaugcagacacauuauguauagguuaucaugcgaacaauucaacagacacuguagacacaguacuagaaaagaauguaacaguaacacacucuguuaaccuucuagaagacaagcauaacgggaaacuaugcaaacuaagagggguagccccauugcauuuggguaaauguaacauugcuggcuggauccugggaaauccagagugugaaucacucuccacagcaagcucaugguccuacauuguggaaacaucuaguucagacaauggaacguguuacccaggagauuucaucgauuaugaggagcuaagagagcaauugagcucagugucaucauuugaaagguuugagauauuccccaagacaaguucauggcccaaucaugacucgaacaaagguguaacggcagcauguccucaugcuggagcaaaaagcuucuacaaaaauuuaauauggcuaguuaaaaaaggaaauucauacccaaagcucagcaaauccuacauuaaugauaaagggaaagaaguccucgugcuauggggcauucaccauccaucuacuagugcugaccaacaaagucucuaucagaaugcagaugcauauguuuuuguggggacaucaagauacagcaagaaguucaagccggaaauagcaauaagacccaaagugagggaucaagaagggagaaugaacuauuacuggacacuaguagagccgggagacaaaauaacauucgaagcaacuggaaaucuagugguaccgagauaugcauucgcaauggaaagaaaugcuggaucugguauuaucauuucagauacaccaguccacgauugcgauacaacuugucagacacccaagggugcuauaaacaccagccucccauuucagaauauacauccgaucacaauuggaaaauguccaaaauauguaaaaagcacaaaauugagacuggccacaggauugaggaaugucccgucuauucaaucuagaggccuauuuggggccauugccgguuucauugaagggggguggacagggaugguagauggaugguacgguuaucaccaucaaaaugagcaggggucaggauaugcagccgaccugaagagcacacagaaugccauugacaagauuacuaacaaaguaaauucuguuauugaaaagaugaauacacaguucacagcaguagguaaagaguucaaccaccuggaaaaaagaauagagaauuuaaauaaaaaaguugaugaugguuuccuggacauuuggacuuacaaugccgaacuguugguucuauuggaaaaugaaagaacuuuggacuaccacgauucaaaugugaagaacuuauaugaaaagguaagaagccaguuaaaaaacaaugccaaggaaauuggaaacggcugcuuugaauuuuaccacaaaugcgauaacacgugcauggaaagugucaaaaaugggacuuaugacuacccaaaauacucagaggaagcaaaauuaaacagagaagaaauagaugggguaaagcuggaaucaacaaggauuuaccagauuuuggcgaucuauucaacugucgccaguucauugguacugguagucucccugggggcaaucaguuucuggaugugcucuacugggucucuacaguguagaauauguauuuaa

SEQ ID NO: 38505 - RNA, 1701 nt, Artificial Sequence
  derived and/or modified CDS sequence (wt) from hemagglutinin__InfluenzaA__ADX96727
augaaggcaauacuaguaguucugcuauauacauuugcaaccgcaaaugcagacacauuauguauagguuaucaugcgaacaauucaacagacacuguagacacaguacuagaaaagaauguaacaguaacacacucuguuaaccuucuagaagacaagcauaacgggaaacuaugcaaacuaagagggguagccccauugcauuuggguaaauguaacauugcuggcuggauccugggaaauccagagugugaaucacucuccacagcaagcucaugguccuacauuguggaaacaucuaguucagacaauggaacguguuacccaggagauuucaucgauuaugaggagcuaagagagcaauugagcucagugucaucauuugaaagguuugagauguuccccaagacaaguucauggcccaaucaugacucgaacaaagguguaacggcagcauguccucaugcuggagcaaaaagcuucuacaaaaauuuaauauggcuaguuaaaaaaggaaauucauacccaaagcucagcaaauccuacauuaaugauaaagggaaagaaguccucgugcuauggggcauucaccauccaucuacuagugcugaccaacaaagucucuaucagaaugcagaugcauauguuuuuguggggacaucaagauacagcaagaaguucaagccggaaauagcaauaagacccaaagugagggaucaagaagggagaaugaacuauuacuggacacuaguagagccgggagacaaaauaacauucgaagcaacuggaaaucuagugguaccgagauaugcauucgcaauggaaagaaaugcuggaucugguauuaucauuucagauacaccaguccacgauugcaauacaacuugucagacacccaagggugcuauaaacaccagccucccauuucagaauauacauccgaucacaauuggaaaauguccaaaauauguaaaaagcacaaaauugagacuggccacaggauugaggaaugucccgucuauucaaucuagaggccuauuuggggccauugccgguuucauugaagggggguggacagggaugguagauggaugguacgguuaucaccaucaaaaugagcaggggucaggauaugcagccgaccugaagagcacacagaaugccauugacgagauuacuaacaaaguaaauucuguuauugaaaagaugaauacacaguucacagcaguagguaaagaguucaaccaccuggaaaaaagaauagagaauuuaaauaaaaaaguugaugaugguuuccuggacauuuggacuuacaaugccgaacuguugguucuauuggaaaaugaaagaacuuuggacuaccacgauucaaaugugaagaacuuauaugaaaagguaagaagccaguuaaaaaacaaugccaaggaaauuggaaacggcugcuuugaauuuuaccacaaaugcgauaacacgugcauggaaagugucaaaaaugggacuuaugacuacccaaaauacucagaggaagcaaaauuaaacagagaagaaauagaugggguaaagcuagaaucaacaaggauuuaccagauuuuggcgaucuauucaacugucgccaguucauugguacugguagucucccugggggcaaucaguuucuggaugugcucuaaugggucucuacaguguagaauauguauuuaa

SEQ ID NO: 38506 - RNA, 1701 nt, Artificial Sequence
  derived and/or modified CDS sequence (wt) from hemagglutinin__InfluenzaA__ADX96737
augaaggcaauacuaguaguucugcuauauacauuugcaaccgcaaaugcagacacauuauguauagguuaucaugcgaacaauucaacagacacuguagacacaguacuagaaaagaauguaacaguaacacacucuguuaaccuucuagaagacaagcauaacgggaaacuaugcaaacuaagagggguagccccauugcauuuggguaaauguaacauugcuggcuggauccugggaaauccagagugugaaucacucuccacagcaagcucaugguccuacauuguggaaacaucuaguucagacaauggaacguguuacccaggagauuucaucgauuaugaggagcuaagagagcaauugagcucagugucaucauuugaaagguuugagauauuccccaagacaaguucauggcccaaucaugacucgaacaaagguguaacggcagcauguccucaugcuggagcaaaaagcuucuacaaaaauuuaauauggcuaguuaaaaaaggaaauucauacccaaagcucagcaaauccuacauuaaugauaaagggaaagaaguccucgugcuauggggcauucaccauccaucuacuagugcugaccaacaaagucucuaucagaaugcagaugcauauguuuuuguggggacaucaagauacagcaagaaguucaagccggaaauagcaauaagacccaaagugaaggaacaagaagggagaaugaacuauuacuggacacuaguagagccgggagacaaaauaacauucgaagcaacuggaaaucuagugguaccgagauaugcauucgcaauggaaagaaaagcuggaucugguauuaucauuucagauacaccaguccacgauugcaauacaacuugucagacacccaagggugcuauaaacaccagccucccauuucagaauauacauucgaucacaauuggaaaauguccaaaauauguaaaaagcacaaaauugagacuggccacaggauugaggaaugucccgucuauucaaucuagaggccuauuuggggccauugccgguuucauugaagggggguggacagggaugguagauggaugguacgguuaucaccaucaaaaugagcaggggucaggauaugcagccgaccugaagagcacacagaaugccauugacgagauuacuaacaaaguaaauucuguuauugaaaagaugaauacacaguucacagcaguagguaaagaguucaaccaccuggaaaaaagaauagagaauuuaaauaaaaaaguugaugaugguuuccuggacauuuggacuuacaaugccgaacuguugguucuauuggaaaaugaaagaacuuuggacuaccacgauucaaaugugaagaacuuauaugaaaagguaagaagccaguuaaaaaacaaugccaaggaaauuggaaacggcugcuuugaauuuuaccacaaaugcgauaacacgugcauggaaagugucaaaaaugggacuuaugacuacccaaaauacucagaggaagcaaaauuaaacagagaagaaauagaugggguaaagcuggaaucaacaaggauuuaccagauuuuggcgaucuauucaacugucgccaguucauugguacugguaaucucccugggggcaaucaguuucuggaugugcucuacugggucucuacaguguagaauauguauuuaa

SEQ ID NO: 38507 - RNA, 1701 nt, Artificial Sequence; identical to SEQ ID NO: 34714
  derived and/or modified CDS sequence (wt) from hemagglutinin__InfluenzaA__ADX96747

SEQ ID NO: 38508 - RNA, 1701 nt, Artificial Sequence
  derived and/or modified CDS sequence (wt) from hemagglutinin__InfluenzaA__ADX96757
augaaggcaauacuaguaguucugcuauauacauuugcaaccgcaaaugcagacacauuauguauagguuaucaugcgaacaauucaacagacacuguagacacaguacuagaaaagaauguaacaguaacacacucuguuaaccuucuagaagacaagcauaacgggaaacuaugcaaacuaagagggguagccccauugcauuuggguaaauguaacauugcuggcuggauccugggaaauccagagugugaaucacucuccacagcaagcucaugguccuacauuguggaaacaucuaguucaggcaauggaacguguuacccaggagauuucaucgauuaugaggagcuaagagagcaauugagcucagugucaucauuugaaagguuugagauauuccccaagacaaguucauggcccaaucaugacucgaacaaagguguaacggcagcauguccucaugcuggagcaaaaagcuucuacaaaaauuuaauauggcuaguuaaaaaaggaaacucauacccaaagcucagcaaauccuacauuaaugauaaagggaaagaaguccucgugcuauggggcauucaccauccaucuacuagugcugaccaacaaagucucuaucagaaugcagaugcauauguuuuuguggggacaucaagauacagcaagaaguucaagccggaaauagcaauaagacccaaagugagggaucaagaagggagaaugaacuauuacuggacacuaguagugccgggagacaaaauaacauucgaagcaacuggaaaucuagugguaccgagauaugcauucgcaauggaaagaaaugcuggaucugguauuaucauuucagauacaccaguccacgauugcaauacaacuugucagacacccaagggugcuauaaacaccagccucccauuucagaacauacauccgaucacaauuggaaaauguccaaaauauguaaaaagcacaaaauugagacuggccacaggauugaggaaugucccgucuauucaaucuagaggccuauuuggggccauugccgguuucauugaagggggguggacagggaugguagauggaugguacgguuaucaccaucaaaaugagcaggggucaggauaugcagccgaccugaagagcacacagaaugccauugacgagauuacuaacaaaguaaauucuguuauugaaaagaugaauacacaguucacagcaguagguaaagaguucaaccaccuggaaaaaagaauagagaauuuaaauaaaaaaguugaugaugguuuccuggacauuuggacuuacaaugccgaacuguugguucuauuggaaaaugaaagaacuuuggacuaccacgauucaaaugugaagaacuuauaugaaaagguaagaagccaguuaaaaaacaaugccaaggaaauugggaacggcugcuuugaauuuuaccacaaaugcgauaacacgugcauggaaagugucaaaaaugggacuuaugacuacccaaaauacucagaggaagcaaaauuaaacagagaagaaauagaugggguaaagcuggaaucaacaaggauuuaccagauuuuggcgaucuauucaacugucgccaguucauugguacugguagucucccugggggcaaucaguuucuggaugugcucuacugggucucuacaguguagaauauguauuuaa

SEQ ID NO: 38509 - RNA, 1701 nt, Artificial Sequence
  derived and/or modified CDS sequence (wt) from hemagglutinin__InfluenzaA__ADX96767
augaaggcaauacuaguaguucugcuauauacauuugcaaccgcaaaugcagacacauuauguauagguuaucaugcgaacaauucaacagacacuguagacacaguacuagaaaagaauguaacaguaacacacucuguuaaccuucuagaagacaagcauaacgggaaacuaugcaaacuaagagggguagccccauugcauuuggguaaauguaacauugcuggcuggauccugggaaauccagagugugaaucacucuccacagcaagcucaugguccuacauuguggaaacaucuaguucagacaauggaacguguuacccaggagauuucaucgauuaugaggagcuaagagagcaauugagcucagugucaucauuugaaagguuugagauauuccccaagacaaguucauggcccaaucaugacucgaacaaagguguaacggcagcauguccucaugcuggagcaaaaagcuucuacaaaaauuuaauauggcuaguuaaaaaaggaaauucauacccaaagcucaguaaauccuacauuaaugauaaagggaaagaaguccucgugcuauggggcauucaccauccaucuacuagugcugaccaacaaagucucuaucagaaugcagaugcauauguuuuuguggggacaucaagauacagcaagaaguucaagccggaaauagcaauaagacccaaagugagggaucaagaagggagaaugaacuauuacuggacacuaguagagucgggagacaaaauaacauucgaagcaacuggaaaucuagugguaccgagauaugcauucgcaauggaaagaaaugcuggaucugguauuaucauuucagauacaccaguccacgauugcaauacaacuugucagacacccaagggugcuauaaacaccagccucccauuucagaauauacauccgaucacaauuggaaaauguccaaaauauguaaaaagcacaaaauugagacuggccacaggauugaggaaugucccgucuauucaaucuagaggccuauuuggggccauugccgguuucauugaagggggguggacagggaugguagauggaugguacgguuaucaccaucaaaaugagcaggggucaggauaugcagccgaccugaagagcacacagaaugccauugacgagauuacuaacaaaguaaauucuguuauugaaaagaugaauacacaguucacagcaguagguaaagaguucaaccaccuggaaaaaagaauagagaauuuaaauaaaaaaguugaugaugguuuccuggacauuuggacuuacaaugccgaacuguugguucuauuggaaaaugaaagaacuuuggacuaccacgauucaaaugugaagaaauuauaugaaaagguaagaagccaguuaaaaaacaaugccaaggaaauuggaaacggcugcuuugaauuuuaccacaaaugcgauaacacgugcauggaaagugucaaaaaugggacuuaugacuacccaaaauacucagaggaagcaaaauuaaacagagaagaaauagaugggguaaagcuggaaucaacaaggauuuaccagauuuuggcgaucuauucaacugucgccaguucauugguacugguagucucccugggggcaaucaguuucuggaugugcucuacugggucucuacaguguagaauauguauuuaa

SEQ ID NO: 38510 - RNA, 1701 nt, Artificial Sequence
  derived and/or modified CDS sequence (wt) from hemagglutinin__InfluenzaA__ADX96777
augaaggcaauacuaguaguucugcuauauacauuugcaaccgcaaaugcagacacauuauguauagguuaucaugcgaacaauucaacagacacuguagacacaguacuagaaaagaauguaacaguaacacacucuguuaaccuucuagaagacaagcauaacgggaaacuaugcaaacuaagagggguagccccauugcauuuggguaaauguaacauugcuggcuggauccugggaaauccagagugugaaucacucuccacagcaagcucaugguccuacauuguggaaacaucuaguucagacaauggaacguguuacccaggagauuucaucgauuaugaggagcuaagagagcaauugagcucagugucaucauuugaaagguuugagauauuccccaagacaaguucauggcccaaucaugacucgaacaaagguguaacggcagcauguccucaugcuggagcaaaaagcuucuacaaaaauuuaauauggcuaguuaaaaaaggaaauucauacccaaagcucagcaaauccuacauuaaugauaaagggaaagaaguccucgugcuauggggcauucaccauccaucuacuagugcugaccaacaaagucucuaucagaaugcagaugcauauguuuuuguggggacaucaagauacagcaagaaguucaagccggaaauagcaauaagacccaaagugagggaucaagaagggagaaugaacuauuacuggacacuaguagugccgggagacaaaauaacauucgaagcaacuggaaaucuagugguaccgagauaugcauucgcaauggaaagaaaugcuggaucugguauuaucauuucagauacaccaguccacgauugcaauacaacuugucagacacccaagggugcuauaaacaccagccucccauuucagaauauacauucgaucacaauuggaaaauguccaaaauauguaaaaagcacaaaauugagacuggccacaggauugaggaaugucccgucuauucaaucuagaggccuauuuggggccauugccgguuucauugaagggggguggacagggaugguagauggaugguacgguuaucaccaucaaaaugagcaggggucaggauaugcagccgaccugaagagcacacagaaugccauugacgagauuacuaacaaaguaaauucuguuauugaaaagaugaauacacaguucacagcaguagguaaagaguucaaccaccuggaaaaaagaauagagaauuuaaauaaaaaaguugaugaugguuuccuggacauuuggacuuacaaugccgaacuguugguucuauuggaaaaugaaagaacuuuggacuaccacgauucaaaugugaagaacuuauaugaaaagguaagaagccaguuaaaaaacaaugccaaggaaauuggaaacggcugcuuugaauuuuaccacaaaugcgauaacacgugcauggaaagugucaaaaaugggacuuaugacuacccaaaauacucagaggaagcaaaauuaaacagagaagaaauagaugggguaaagcuggaaucaacaaggauuuaccagauuuuggcgaucuauucaacugucgccaguucauugguacugguagucucccugggggcaaucaguuucuggaugugcucuaaugggucucuacaguguagaauauguauuuaa

SEQ ID NO: 38511 - RNA, 1701 nt, Artificial Sequence
  derived and/or modified CDS sequence (wt) from hemagglutinin__InfluenzaA__ADX96787
augaaggcaauacuaguaguucugcuauauacauuugcaaccgcaaaugcagacacauuauguauagguuaucaugcgaacaauucaacagacacuguagacacaguacuagaaaagaauguaacaguaacacacucuguuaaccuucuagaagacaagcauaacggaaaacuaugcaaacuaagagggguagccccauugcauuuggguaaauguaacauugcuggcuggauccugggaaauccagagugugaaucacucuccacagcaagcucaugguccuacauuguggaaacaucuaguucagacaauggaacguguuacccaggagauuucaucgauuaugaggagcuaagagagcaauugagcucagugucaucauuugaaagguuugagauauuccccaagacaaguucauggcccaaucaugacucgaacaaagguguaacggcagcauguccucaugcuggagcaaaaagcuucuacaaaaauuuaauauggcuaguuaaaaaaggaaauucauacccaaagcucagcaaauccuacauuaaugauaaagggaaagaaguccucgugcuauggggcauucaccauccaucuacuagugcugaccaacaaagucucuaucagaaugcagaugcauauguuuuuguggggacaucaagauacagcaagaaguucaagccggaaauagcaauaagacccaaagugagggaucaagaagggagaaugaacuauuacuggacacuaguagagccgggagacaaaauaacauucgaagcaacuggaaaucuagugguaccgagauaugcauucgcaauggaaagaaaugcuggaucugguauuaucauuucagauacaccaguccacgauugcaauacaacuugucagacacccaagggugcuauaaacaccagccucccauuucagaauauacauccgaucacaauuggaaaauguccaaaauauguaaaaagcacaaaauugagacuggccacaggauugaggaaugucccgucuauucaaucuagaggccuauuuggggccauugccgguuucauugaagggggguggacagggaugguagauggaugguacgguuaucaccaucaaaaugagcaggggucaggauaugcagccgaccugaagagcacacagaaugccauugacgagauuacuaacaaaguaaauucuguuauugaaaagaugaauacacaguucacagcaguagguaaagaguucaaccaccuggaaaaaagaauagagaauuuaaauaaaaaaguugaugaugguuuccuggacauuuggacuuacaaugccgaacuguugguucuauuggaaaaugaaagaacuuuggacuaccacgauucaaaugugaagaacuuauaugaaaagguaagaagccaguuaaaaaacaaugccaaggaaauuggaaacggcugcuuugaauuuuaccacaaaugcgauaacacgugcauggaaagugucaaaaaugggacuuaugacuacccaaaauacucagaggaagcaaaauuaaacagagaagaaauagaugggguaaagcuggaaucaacaaggauuuaccagauuuuggcgaucuauucaacugucgccaguucauugguacugguagucucccugggggcaaucaguuucuggaugugcucuaaugggucucuacagugcagaauauguauuuaa

SEQ ID NO: 38512 - RNA, 1701 nt, Artificial Sequence
  derived and/or modified CDS sequence (wt) from hemagglutinin__InfluenzaA__ADX96797
augaaggcaauacuaguaguucugcuauauacauuugcaaccgcaaaugcagacacauuauguauagguuaucaugcgaacaauucaacagacacuguagacacaguacuagaaaagaauguaacaguaacacacucuguuaaccuucuagaagacaagcauaacgggaaacuaugcaaacuaagagggguagccccauugcauuuggguaaauguaacauugcuggcuggauccugggaaauccagagugugaauuacucuccacagcaagcucaugguccuacauuguggaaacaucuaguucagacaauggaacguguuacccaggagauuucaucgauuaugaggagcuaagagagcaauugagcucagugucaucauuugaaagguuugagauauuccccaagacaaguucauggcccaaucaugacucgaacaaagguguaacggcagcauguccucaugcuggagcaaaaagcuucuacaaaaauuuaauauggcuaguuaaaaaaggaaauucauacccaaagcucagcaaauccuacauuaaugauaaagggaaagaaguccucgugcuauggggcauucaccauccaucuacuagugcugaccaacaaagucucuaucagaaugcagaugcauauguuuuuguggggacaucaagauacagcaagaaguucaagccggaaauagcaauaagacccaaagugagggaucaagaagggagaaugaacuauuacuggacacuaguagagccgggagacaaaauaacauucgaagcaacuggaaaucuagugguaccgagauaugcauucgcaauggaaagaaaugcuggaucugguauuaucauuucagauacaccaguccacgauugcaauacaacuugucagacacccaagggugcuauaaacaccagccucccauuucagaauauacauccgaucacaauuggaaaauguccaaaauauguaaaaagcacaaaauugagacuggccacaggauugaggaaugucccgucuauucaaucuagaggccuauuuggggccauugccgguuucauugaagggggguggacagggaugguagauggaugguaugguuaucaccaucaaaaugagcaggggucaggauaugcagccgaccugaagagcacacagaaugccauugacgagauuacuaacaaaguaaauucuguuauugaaaagaugaauacacaguucacagcaguagguaaagaguucaaccaccuggaaaaaagaauagagaauuuaaauaaaaaaguugaugaugguuuccuggacauuuggacuuacaaugccgaacuguugguucuauuggaaaaugaaagaacuuuggacuaccacgauucaaaugugaagaacuuauaugaaaagguaagaagccaguuaaaaaacaaugccaaggaaauuggaaacggcugcuuugaauuuuaccacaaaugcgauaacacgugcauggaaagugucaaaaaugggacuuaugacuacccaaaauacucagaggaagcaaaauuaaacagagaagaaauagaugggguaaagcuggaaucaacaaggauuuaccagauuuuggcgaucuauucaacugucgccaguucauugguacugguagucucccugggggcaaucagcuucuggaugugcuccaaugggucuuugcaguguagaauaugcauuuaa

SEQ ID NO: 38513 - RNA, 1701 nt, Artificial Sequence
  derived and/or modified CDS sequence (wt) from hemagglutinin__InfluenzaA__ADX96807
augaaggcaauacuaguaguucugcuauauacauuugcaaccgcaaaugcagacacauuauguauagguuaucaugcgaacaauucaacagacacuguagacacaguacuagaaaagaauguaacaguaacacacucuguuaacauucuagaagacaagcauaacgggaaacuaugcaaacuaagagggguagccccauugcauuuggguaaauguaacauugcuggcuggauccugggaaauccagagugugaaucacucuccacagcaagcucaugguccuacauuguggaaacaucuaguucagacaauggaacguguuacccaggagauuucaucgauuaugaggagcuaagagagcaauugagcucagugucaucauuugaaagguuugagauauuccccaagacaaguucauggcccaaucaugacucgaacaaagguguaacggcagcauguccucaugcuggagcaaaaagcuucuacaaaaauuuaauauggcuaguuaaaaaaggaaauucauacccaaagcucagcaaauccuacauuaaugauaaagggaaagaaguccucgugcuauggggcauucaccauccaucuacuagugcugaccaacaaagucucuaucagaaugcagaugcauauguuuuugugggaucaucaagauucagcaagaaguucaagccggaaauagcaauaagacccaaagugagggaucaagaagggagaaugaacuauuacuggacacuaguagagccgggagacaaaauaacauucgaagcaacuggaaaucuagugguaccgagauaugcauucgcaauggaaagaaaugcuggaucugguauuaucauuucagauacaccaguccacgauugcaauacaacuugucagacacccaagggugcuauaaacaccagccucccauuucagaauauacauccgaucacaauuggaaaauguccaaaauauguaaaaagcacaaaauugagacuggccacaggauugaggaaugucccgucuauucaaucuagaggccuauuuggggccauugccgguuucauugaagggggguggacagggaugguagauggaugguacgguuaucaccaucaaaaugagcaggggucaggauaugcagccgaccugaagagcacacagaaugccauugacgagauuacuaacaaaguaaauucuguuauugaaaagaugaauacacaguucacagcaguagguaaagaguucaaccaccuggaaaaaagaauagagaauuuaaauaaaaaaguugaugaugguuuccuggacauuuggacuuacaaugccgaacuguugguucuauuggaaaaugaaagaacuuuggacuaccacgauucaaaugugaagaacuuauaugaaaagguaagaagccagcuaaaaaacaaugccaaggaaguuggaaacggcugcuuugaauuuuaccacaaaugcgauaacacgugcauggaaagugucaaaaaugggacuuaugacuacccaaaauacucagaggaagcaaaauuaaacagagaagaaauagaugggguaaagcuggaaucaacaaggauuuaccagauuuuggcgaucuauucaacugucgccaguucauugguacugguagucucccugggggcaaucaguuucuggaugugcucuaaugggucucuacaguguagaauauguauuuaa

SEQ ID NO: 38514 - RNA, 1701 nt, Artificial Sequence; identical to SEQ ID NO: 34705
  derived and/or modified CDS sequence (wt) from hemagglutinin__InfluenzaA__ADX96817

SEQ ID NO: 38515 - RNA, 1701 nt, Artificial Sequence
  derived and/or modified CDS sequence (wt) from hemagglutinin__InfluenzaA__ADX96837
augaaggcaauacuaguaguucugcuauauacauuugcaaccgcaaaugcagacacauuauguauagguuaucaugcgaacaauucaacagacacuguagacacaguacuagaaaagaauguaacaguaacacacucuguuaacauucuagaagacaagcauaacgggaaacuaugcaaacuaagagggguagccccauugcauuuggguaaauguaacauugcuggcuggauccugggaaauccagagugugaaucacucuccacagcaagcucaugguccuacauuguggaaacaucuaguucagacaauggaacguguuacccaggagauuucaucgauuaugaggagcuaagagagcaauugagcucagugucaucauuugaaagguuugagauauuccccaagacaaguucauggcccaaucaugacucgaacaaagguguaacggcagcauguccuuaugcuggagcaaaaagcuucuacaaaaauuuaauuuggcuaguuaaaaaaggaaauucauacccaaagcucagcaaauccuacauuaaugauaaagggaaagaaguccucgugcuauggggcauucaccauccaucuacuagugcugaccaacaaagucucuaucagaaugcagaugcauauguuuuuguggggucaucaagauacagcaagaaguucaagccggaaauagcaauuagacccaaagugagggaucaagaagggagaaugaacuauuacuggacacuaguagagccgggagacaaaauaacauucgaagcaacuggaaaucuagugguaccgagauaugcauucgcaauggaaagaaaugcuggaucugguauuaucauuucagauacaccaguccaugauugcaauacaacuugucagacacccaagggugcuauaaacaccagccucccauuucagaauauacauccgaucacaauuggaaaauguccaaaauauguaaaaagcacaaaauugagacuggccacaggauugaggaaugucccgucuauucaaucuagaggccuauuuggggccauugccgguuucauugaagggggguggacagggaugguagauggaugguacgguuaucaccaucaaaaugagcaggggucaggauaugcagccgaccugaagagcacacagaaugccauugacgagauuacuaacaaaguaaauucuguuauugaaaagaugaauacacaguucacagcaguagguaaagaguucaaccaccuggaaaaaagaauagagaauuuaaauaaaaaaguugaugaugguuuccuggacauuuggacuuacaaugccgaacuguugguucuauuggaaaaugaaagaacuuuggacuaccacgauucaaaugugaagaacuuauaugaaaagguaagaagccagcuaaaaaacaaugccaaggaaguuggaaacggcugcuuugaauuuuaccacaaaugcgauaacacgugcauggaaagugucaaaaaugggacuuaugacuacccaaaauacucagaggaagcaaaauuaaacagagaagaaauagaugggguaaagcuggaaucaacaaggauuuaccagauuuuggcgaucuauucaacugucgccaguucauugguacugguagucucccugggggcaaucaguuucuggaugugcucuacugggucucuacaguguagaauauguauuuaa

SEQ ID NO: 38516 - RNA, 1701 nt, Artificial Sequence; identical to SEQ ID NO: 34681
  derived and/or modified CDS sequence (wt) from hemagglutinin__InfluenzaA__ADX96847

SEQ ID NO: 38517 - RNA, 1701 nt, Artificial Sequence; identical to SEQ ID NO: 34681
  derived and/or modified CDS sequence (wt) from hemagglutinin__InfluenzaA__ADX96857

SEQ ID NO: 38518 - RNA, 1701 nt, Artificial Sequence
  derived and/or modified CDS sequence (wt) from hemagglutinin__InfluenzaA__ADX96867
augaaggcaauacuaguaguucugcuauauacauuugcaaccgcaaaugcagacacauuauguauagguuaucaugcgaacaauucaacagacacuguagacacaguacuagaaaagaauguaacaguaacacacucuguuaacauucuagaagacaagcauaacgggaaacuaugcaaacuaagagggguagccccauugcauuuggguaaauguaacauugcuggcuggauccugggaaauccagagugugaaucacucuccacagcaagcucaugguccuacauuguggaaacaucuaguucagacaauggaacguguuacccaggagauuucaucgauuaugaggagcuaagagagcaauugagcucagugucaucauuugaaagguuugagauauuccccaagacaaguucauggcccaaucaugacucgaacaaagguguaacggcagcauguccucaugcuggagcaaaaagcuucuacaaaaauuuaauauggcuaguuaaaaaaggaaauucauacccaaagcucagcaaauccuacauuaaugauaaagggaaagaaguccucgugcuauggggcauucaccauccaucuacuagugcugaccaacaaagucucuaucagaaugcagaugcauauguuuuuguggggucaucaagauacagcaagaaguucaagccggaaauagcaauaagacccaaagugagggaucaagaagggagaaugaacuauuacuggacacuaguagagccgggagacaaaauaacauucgaagcaacuggaaaucuagugguaccgagauaugcauucgcaauggaaagaaaugcuggaucugguauuaucauuucagauacaccaguccacgauugcaauacaacuugucagacacccaagggugcuauaaacaccagccucccauuucagaauauacauccgaucacaauuggaaaauguccaaaauauguaaaaagcacaaaauugagacuggccacaggauugaggaaugucccgucuauucaaucuagaggccuauuuggggccauugccgguuucauugaagggggguggacagggaugguagauggaugguacgguuaucaccaucaaaaugagcaggggucaggauaugcagccgaccugaagagcacacagaaugccauugacgagauuacuaacaaaguaaauucuguuauugaaaagaugaauacacaguucacagcaguagguaaagaguucaaccaccuggaaaaaagaauagagaauuuaaauaaaaaaguugaugaugguuuccuggacauuuggacuuacaaugccgaacuguugguucuauuggaaaaugaaagaacuuuggacuaccacgauucaaaugugaagaacuuauaugaaaagguaagaagccaguuaaaaaacaaugccaaggaaauuggaaacggcugcuuugaauuuuaccacaaaugcgauaacacgugcauggaaagugucaaaaaugggacuuaugacuacccaaaauacucagaggaagcaaaauuaaacagagaagaaauagaugggguaaagcuggaaucaacaaggauuuaccagauuuuggcgaucuauucaacugucgccaguucauugguacugguagucucccugggggcaaucaguuucuggaugugcucuaaugggucuuugcaguguagaauaugcauuuaa

SEQ ID NO: 38519 - RNA, 1701 nt, Artificial Sequence
  derived and/or modified CDS sequence (wt) from hemagglutinin__InfluenzaA__ADX96877
augaaggcaauacuaguaguucugcuauauacauuugcaaccgcaaaugcagacacauuauguauagguuaucaugcgaacaauucaacagacacuguagacacaguacuagaaaagaauguaacaguaacacacucuguuaaccuucuagaagacaagcauaacgggaaacuaugcaaacuaagagggguagccccauugcauuuggguaaauguaacauugcuggcuggauccugggaaauccagagugugaaucacucuccacagcaagcucaugguccuacauuguggaaacaucuaguucagacaauggaacguguuacccaggagauuucaucgauuaugaggagcuaagagagcaauugagcucagugucaucauuugaaagguuugagauauuccccaagacaaguucauggcccaaucaugacucgaacaaagguguaacggcagcauguccucaugcuggagcaaaaagcuucuacaaaaauuuaauauggcuaguuaaaaaaggaaauucauacccaaagcucagcaaauccuacauuaaugauaaagggaaagaaguccuagugcuauggggcauucaccauccaucuacuagugcugaccaacaaagucucuaucagaaugcagaugcauauguuuuuguggggacaucaagauacagcaagaaguucaagccggaaauaguaauaagacccaaagugagggaucaagaagggagaaugaacuauuacuggacacuaguagagccgggagacaaaauaacauucgaagcaacuggaaaucuagugguaccgagauaugcauucgcaauggaaagaaaugcuggaucugguauuaucauuucagauacaccaguccacgauugcaauacaacuugucagacacccaagggugcuauaaacaccagccucccauuucagaauauacauccgaucacaauuggaaaauguccaaaauauguaaaaagcacaaaauugagacuggccacaggauugaggaaugucccgucuauucaaucuagaggccuauuuggggccauugccgguuucauugaagggggguggacagggaugguagauggaugguacgguuaucaccaucagaaugagcaggggucaggauaugcagccgaccugaagagcacacagaaugccauugacgagauuacuaacaaaguaaauucuguuauugaaaagaugaauacacaguucacagcaguagguaaagaguucaaccaccuggaaaaaagaauagagaauuuaaauaaaaaaguugaugaugguuuccuggacauuuggacuuacaaugccgaacuguugguucuauuggaaaaugaaagaacuuuggacuaccacgauucaaaugugaagaacuuauaugaaaagguaagaagccaguuaaaaaacaaugccaaggaaauuggaaacggcugcuuugaauuuuaccacaaaugcgauaacacgugcauggaaagugucaaaaaugggacuuaugacuacccaaaauacucagaggaagcaaaauuaaacagagaagaaauagaugggguaaagcuggaaucaacaaggauuuaccagauuuuggcgaucuauucaacugucgccaguucauugguacugguagucucccugggggcaaucaguuucuggaugugcucuaaugggucuuuacaguguagaauauguauuuaa

SEQ ID NO: 38520 - RNA, 1701 nt, Artificial Sequence
  derived and/or modified CDS sequence (wt) from hemagglutinin__InfluenzaA__ADX96897
augaaggcaauacuaguaguucugcuauauacauuugcaaccgcaaaugcagacacauuauguauagguuaucaugcgaacaauucaacagacacuguagacacaguacuagaaaagaauguaacaguaacacacucuguuaaccuucuagaagacaagcauaacgggaaacuaugcaaacuaagagggguagccccauugcauuuggguaaauguaacauugcuggcuggauccugggaaauccagagugugaaucacucuccacagcaagcucaugguccuacauuguggaaacaucuaguucagacaauggaacguguuacccaggagauuucaucgauuaugaggagcuaagagagcaauugagcucagugucaucauuugaaagguuugagauauuccccaagacaaguucauggcccaaucaugacucaaacaaagguguaacggcagcauguccucaugcuggagcaaaaagcuucuacaaaaauuuaauauggcuaguuaaaaaaggaaauucauacccaaagcucagcaaauccuacauuaaugauaaagggaaagaaguccucgugcuauggggcauucaccauccaucuacuagugcugaccaacaaagucucuaucagaaugcagaugcauauguuuuuguggggacaucaagauacagcaagaaguucaagccggaaauagcaauaagacccaaagugagggaucaagaagggagaaugaacuauuacuggacacuaguagagccgggagacaaaauaacauucgaagcaacuggaaaucuagugguaccgagauaugcauucgcaauggaaagaaaugcuggaucugguauuaucauuucagauacaccaauccacgauugcaauacaacuugucagacacccaagggugcuauaaacaccagccucccauuucagaauauacauccgaucacaauuggaaaauguccaaaauauguaaaaagcacaaaauugagacuggccacaggauugaggaaugucccgucuauucaaucuagaggccuauuuggggccauugccgguuucauugaagggggguggacagggaugguagauggaugguacgguuaucaccaucaaaaugagcaggggucaggauaugcagccgaccugaagagcacacagaaugccauugacaagauuacuaacaaaguaaauucuguuauugaaaagaugaauacacaguucacagcaguagguaaagaguucaaccaccuggaaaaaagaauagagaauuuaaauaaaaaaguugaugaugguuuccuggacauuuggacuuacaaugccgaacuguugguucuauuggaaaaugaaagaacuuuggacuaccacgauucaaaugugaagaacuuauaugaaaagguaagaagccaguuaaaaaacaaugccaaggaaauuggaaacggcugcuuugaauuuuaccacaaaugcgauaacacgugcauggaaagugucaaaaaugggacuuaugacuacccaaaauacucagaggaagcaaaauuaaacagagaagaaauagaugggguaaagcuggaaucaacaaggauuuaccagauuuuggcgaucuauucaacugucgccaguucauugguacugguagucucccugggggcaaucaguuucuggaugugcucuaaugggucucuacaguguagaauauguauuuaa

SEQ ID NO: 38521 - RNA, 1701 nt, Artificial Sequence
  derived and/or modified CDS sequence (wt) from hemagglutinin__InfluenzaA__ADX96907
augaaggcaauacuaguaguucugcuauauacauuugcaaccgcaaaugcagacacauuauguauagguuaucaugcgaacaauucaacagacacuguagacacaguacuagaaaagaauguaacaguaacacauucuguuaaccuucuagaagacaagcauagcgggaaacuaugcaaacuaagagggguagccccauugcauuuggguaaauguaacauugcuggcuggauucugggaaauccagagugugaaucacucuccacagcaagcucaugguccuacauuguggaaacaucuaguucagacaauggaacguguuacccaggagauuucaucgauuaugaggagcuaagagagcaauugagcucagugucaucauuugaaagguuugagauauuccccaagacaaguucauggcccaaucaugacucgagcaaagguguaacggcagcauguccucaugcuggagcaaaaagcuucuacaaaaauuuaauauggcuaguuaaaaaaggaaauucauacccaaagcucagcaaauccuacauuaaugauaaagggaaagaaguccucgugcuauggggcauucaccauccaucuacuagugcugaccaacaaagucucuaucagaaugcagaugcauauguuuuuguggggacaucaagauacagcaagaaguucaagccggaaauagcaauaagacccaaagugagggaucaagaagggagaaugaacuauuacuggacacuaguagagccgggagacaaaauaacauucgaagcaacuggaaaucuagugguaccgagauaugcauucgcaauggaaagaaaugcuggaucugguauuaucauuucagauacaccaguccacgauugcaauacaacuugucagacacccaagggugcuauaaacaccagccucccauuucagaauauacauccgaucacaauuggaaaauguccaaaauauguaaaaagcacaaaauugagacuggccacaggauugaggaaugucccgucuauucaaucuagaggccuauuuggggccauugccgguuucauugaagggggguggacagggaugguagauggaugguacgguuaucaccaucaaaaugagcaggggucaggauaugcagccgaccugaagagcacacagaaugccauugacaagauuacuaacaaaguaaauucuguuauugaaaagaugaauacacaguucacagcaguagguaaagaguucaaccaccuggaaaaaagaauagagaauuuaaauaaaaaaguugaugaugguuuccuggacauuuggacuuacaaugccgaacuguugguucuauuggaaaaugaaagaacuuuggacuaccacgauucaaaugugaagaacuuauaugaaaagguaagaagccaguuaaaaaacaaugccaaggaaauuggaaacggcugcuuugaauuuuaccacaaaugcgauaacacgugcauggaaagugucaaaaaugggacuuaugacuacccaaaauacucagaggaagcaaaauuaaacagagaagaaauagaugggguaaagcuggaaucaacaaggauuuaccagauuuuggcgaucuauucaacugucgccaguucauugguacugguggucucccugggggcaaucaguuucuggaugugcucuaaugggucucuacaguguagaauauguauuuaa

SEQ ID NO: 38522 - RNA, 1701 nt, Artificial Sequence
  derived and/or modified CDS sequence (wt) from hemagglutinin__InfluenzaA__ADX96927
augaaggcaauacuaguaguucugcuauauacauuugcaaccgcaaaugcagacacauuauguauagguuaucaugcgaacaauucaacagacacuguagacacauuacuagaaaagaauguaacaguaacacacucuguuaaccuucuagaagacaagcauaacgggaagcuaugcaaacuaagagggguagccccauugcauuuggguaaauguaacauugcuggcuggauccugggaaauccagagugugaaucacucuccacagcaagcucaugguccuacauuguggaaacaucuaguucagacaauggaacguguuacccaggagauuucaucgauuaugaggagcuaagagagcaauugagcucagugucaucauuugaaagguuugagauauuccccaagacaaguucauggcccaaucaugacucgaacaaagguguaacggcagcauguccucaugcuggagcaaaaagcuucuacaaaaauuuaauauggcuaguuaaaaaaggaaauucauacccaaagcucagcaaauccuacauuaaugauaaagggaaagaaguccucgugcuauggggcauucaccauccaucuacuagugcugaccaacaaagucucuaucagaaugcagaugcauauguuuuuguggggacaucaagauacagcaagaaguucaagccggaaauagcaauaagacccaaagugagggaucaagaagggagaaugaacuauuacuggacacuaguagagccgggagacaaaauaacauucgaagcaacuggaaaucuagugguaccgagauaugcauucgcaauggacagaaaugcuggaucugguauuaucauuucagauacaccaguccacgauugcaauacaacuugucagacacccaagggugcuauaaacaccagccucccauuucagaauauacauccgaucacaauuggaaaauguccaaaauauguaaaaagcacaaaauugagacuggccacaggauugaggaaugucccgucuauucaaucuagaggccuauuuggggccauugccgguuucauugaagggggguggacagggaugguagauggaugguacgguuaucaccaucaaaaugagcaggggucaggauaugcagccgaccugaagagcacacagaaugccauugacgagauuacuaacaaaguaaauucuguuauugaaaagaugaauacacaauucacagcaguagguaaagaguucaaccaccuggaaaaaagaauagagaauuuaaauaaaaaaguugaugaugguuuccuggacauuuggacuuacaaugccgaacuguugguucuauuggaaaaugaaagaacuuuggacuaccacgauucaaaugugaagaacuuauaugaaaagguaagaagccaguuaaaaaacaaugccaaggaaauuggaaacggcugcuuugaauuuuaccacaaaugcgauaacacgugcauggagagugucaaaaaugggacuuaugauuacccaaaauacucagaggaagcaaaauuaaacagagaagaaauagaugggguaaagcuggaaucaacaaggauuuaccagauuuuggcgaucuauucaacugucgccaguucauugguacugguagucucccugggggcaaucaguuucuggaugugcucuaaugggucucuacaguguagaauauguauuuaa

SEQ ID NO: 38523 - RNA, 1701 nt, Artificial Sequence; identical to SEQ ID NO: 37294
  derived and/or modified CDS sequence (wt) from hemagglutinin__InfluenzaA__ADX96937

SEQ ID NO: 38524 - RNA, 1701 nt, Artificial Sequence; identical to SEQ ID NO: 34705
  derived and/or modified CDS sequence (wt) from hemagglutinin__InfluenzaA__ADX96947

SEQ ID NO: 38525 - RNA, 1701 nt, Artificial Sequence
  derived and/or modified CDS sequence (wt) from hemagglutinin__InfluenzaA__ADX96957
augaaggcaauacuaguaguucugcuauauacauuugcaaccgcaaaugcagacacauuauguauagguuaucaugcgaacaauucaacagacacuguagacacaguacuagaaaagaauguaacaguaacacacucuguuaaccuucuagaagacaagcauaacgggaaacuaugcaaacuaagagggguagccccauugcauuuggguaaauguaacauugcuggcuggauccugggaaauccagagugugaaucacucuccacagcaagcucaugguccuacauuguggaaacaucuaguucagacaauggaacguguuacccaggagauuucaucgauuaugaggagcuaagagagcaauugagcucagugucaucauuugaaagguuugagauauuccccaagacaaguucauggcccaaucaugacucaaacaaagguguaacggcagcauguccucaugcuggagcaaaaagcuucuacaaaaauuuaauauggcuaguuaaaaaaggaaauucauacccaaagcucagcaaauccuacauuaaugauaaagggaaagaaguccucgugcuauggggcauucaccauccaucuacuagugcugaccaacaaagucucuaucagaaugcagaugcauauguuuuuguggggacaucaagauacagcaagaaguucaagccggaaauagcaauaagacccaaagugagggaucaagaagggagaaugaacuauuacuggacacuaguagagccgggagacaaaauaacauucgaagcaacuggaaaucuagugguaccgagauaugcauucgcaauggaaagaaaugcuggaucugguauuaucauuucagauacaccaguccacgauugcaauacaacuugucagacacccaagggugcuauaaacaccagccucccauuucagaauauacauccgaucacaauuggaaaauguccaaaauauguaaaaagcacaaaauugagacuggccacaggauugaggaaugucccgucuauucaaucuagaggccuauuuggggccauugccgguuucauugaagggggguggacagggaugguagauggaugguacgguuaucaccaucaaaaugagcaggggucaggauaugcagccgaccugaagagcacacagaaugccauugacaagauuacuaacaaaguaaauucuguuauugaaaagaugaauacacaguucacagcaguagguaaagaguucaaccaccuggaaaaaagaauagagaauuuaaauaaaaaaguugaugaugguuuccuggacauuuggacuuacaaugccgaacuguugguucuauuggaaaaugaaagaacuuuggacuaccacgauucaaaugugaagaacuuauaugaaaagguaagaagccaguuaaaaaacaaugccaaggaaauuggaaacggcugcuuugaauuuuaccacaaaugcgauaacacgugcauggaaagugucaaaaaugggacuuaugacuacccaaaauacucagaggaagcaaaauuaaacagagaagaaauagaugggguaaagcuggaaucaacaaggauuuaccagauuuuggcgaucuauucaacugucgccaguucauugguacugguagucucccugggggcaaucaguuucuggaugugcucuaaugggucucuacaguguagaauauguauuuaa

SEQ ID NO: 38526 - RNA, 1701 nt, Artificial Sequence
  derived and/or modified CDS sequence (wt) from hemagglutinin__InfluenzaA__ADX96967
augaaggcaauacuaguaguucugcuauauacauuugcaaccgcaaaugcagacacauuauguauagguuaucaugcgaacaauucaacagacacuguagacacaguacuagaaaagaauguaacaguaacacacucuguuaacauucuagaagacaagcauaacgggaaacuaugcaaacuaagagggguagccccauugcauuuggguaaauguaacauugcuggcuggauccugggaaauccagagugugaaucacucuccacagcaagcucaugguccuacauuguggaaacaucuaguucagacaauggaacguguuacccaggagauuucaucgauuaugaggagcuaagagagcaauugagcucagugucaucauuugaaagguuugagauauuccccaagacaaguucauggcccaaucaugacucgaacaaagguguaacggcagcauguccucaugcuggagcaaaaagcuucuacaaaaauuuaauauggcuaguuaaaaaaggaaauucauacccaaagcucagcaaauccuacauuaaugauaaagggaaagaaguccucgugcuauggggcauucaccauccaucuacuagugcugaccaacaaagucucuaucagaaugcagaugcauauguuuuugugggaucaucaagauacagcaagaaguucaagccggaaauagcaauaagacccaaagugagggaucaggaagggagaaugaacuacuacuggacacuaguagagccgggagacaaaauaacauucgaagcaacuggaaaucuagugguaccgagauaugcauucgcaauggaaagaaaugcuggaucugguauuaucauuucagauacaccaguccaugauugcaauacaacuugucagacacccaagggugcuauaaacaccagccucccauuucagaauauacauccgaucacaauuggaaaauguccaaaauauguaaaaagcacaaaauugagacuggccacaggauugaggaaugucccgucuauucaaucuagaggccuauuuggggccauugccgguuucauugaagggggguggacagggaugguagauggaugguacgguuaucaccaucaaaaugagcaggggucaggauaugcagccgaccugaagagcacacagaaugccauugacgagauuacuaacaaaguaaauucuguuauugaaaagaugaauacacaguucacagcaguagguaaagaguucaaccaccuggaaaaaagaauagagaauuuaaauaaaaaaguugaugaugguuuccuggacauuuggacuuacaaugccgaacuguugguucuauuggaaaaugaaagaacuuuggacuaccacgauucaaaugugaagaacuuauaugaaaagguaagaagccagcuaaaaaacaaugccaaggaaguuggaaacggcugcuuugaauuuuaccacaaaugcgauaacacgugcauggaaagugucaaaaaugggacuuaugacuacccaaaauacucagaggaagcaaaauuaaacagagaagaaauagaugggguaaagcuggaaucaacaaggauuuaccagauuuuggcgaucuauucaacugucgccaguucauugguacugguagucucccugggggcaaucaguuucuggaugugcucuaaugggucucuacaguguagaauauguauuuaa

SEQ ID NO: 38527 - RNA, 1701 nt, Artificial Sequence
  derived and/or modified CDS sequence (wt) from hemagglutinin__InfluenzaA__ADX96977
augaaggcaauacuaguaguucugcuauauacauuugcaaccgcaaaugcagacacauuauguauagguuaucaugcgaacaauucaacagacacuguagacacaguacuagaaaagaauguaacaguaacacacucuguuaacauucuagaagacaagcauaacgggaaacuaugcaaacuaagagggguagccccauugcauuuggguaaauguaacauugcuggcuggauccugggaaauccagagugugaaucacucuccacagcaagcucaugguccuacauuguggaaacaucuaguucagacaauggaacguguuacccaggagauuucaucgauuaugaggagcuaagagagcaauugagcucagugucaucauuugaaagguuugagauauuccccaagacaaguucauggcccaaucaugacucgaacaaagguguaacggcagcauguccucaugcuggagcaaaaagcuucuacaaaaauuuaauauggcuaguuaaaaaaggaaauucauacccaaagcucagcaaauccuacauuaaugauaaagggaaagaaguccucgugcuauggggcauucaccauccaucuacuagugcugaccaacaaagucucuaucagaaugcagaugcauauguuuuuguggggucaucaagauacagcaagaaguucaagccggaaauagcaauaagacccaaagugagggaucaagaagggagaaugaacuauuacuggacacuaguagagccgggagacaaaauaacauucgaagcaacuggaaaucuagugguaccgagauaugcauucgcaauggaaagaaaugcuggaucugguauuaucauuucagauacaccaguccacgauugcaauacaacuugucagacacccaagggugcuauaaacaccagccucccauuucagaauauacauccgaucacaauuggaaaauguccaaaauauguaaaaagcacaaaauugagacuggccacaggauugaggaaugucccgucuauucaaucuagaggccuauuuggggccauugccgguuucauugaagggggguggacagggaugguagauggaugguacgguuaucaccaucaaaaugagcaggggucaggauaugcagccgaccugaagagcacacagaaugccauugacgagauuacuaacaaaguaaauucuguuauugaaaagaugaauacacaguucacagcaguagguaaagaguucaaccaccuggaaaaaagaauagagaauuuaaauaaaaaaguugaugaugguuuccuggacauuuggacuuacaaugccgaacuguugguucuauuggaaaaugaaagaacuuuggacuaccacgauucaaaugugaagaacuuauaugaaaagguaagaagccaguuaaaaaacaaugccaaggaaauuggaaacggcugcuuugaauuuuaccacaaaugcgauaacacgugcauggaaagugucaaaaaugggacuuaugacuacccaaaauacucagaggaagcaaaauuaaacagagaagaaauagaugggguaaagcuggaaucaacaaggauuuaccagauuuuggcgaucuauucaacugucgccaguucauugguacugguagucucccugggggcaaucaguuucuggaugugcucuaaugggucucuacaguguagaauauguauuuaa

SEQ ID NO: 38528 - RNA, 1701 nt, Artificial Sequence
  derived and/or modified CDS sequence (wt) from hemagglutinin__InfluenzaA__ADX96987
augaaggcaauacuaguaguucugcuauauacauuugcaaccgcaaaugcagacacauuauguauagguuaucaugcgaacaauucaacagacacuguagacacaguacuagaaaagaauguaacaguaacacacucuguuaacauucuagaagacaagcauaacgggaaacuaugcaaacuaagagggguagccccauugcauuuggguaaauguaacauugcuggcuggauccugggaaauccagagugugaaucacucuccacagcaagcucaugguccuacauuguggaaacaucuaguucagacaauggaacguguuacccaggagauuucaucgauuaugaggagcuaagagagcaauugagcucagugucaucauuugaaagguuugagauauuccccaagacaaguucauggcccaaucaugacucgaacaaagguguaacggcagcauguccucaugcuggagcaaaaagcuucuacaaaaauuuaauauggcuaguuaaaaaaggaaauucauacccaaagcucagcaaauccuacauuaaugauaaagggaaagaaguccucgugcuauggggcauucaccauccaucuacuagugcugaccaacaaagucucuaucagaaugcagaugcauauguuuuuguggggucaucaagauacagcaagaaguucaagccggaaauagcaauaagacccaaagugagggaucaagaagggagaaugaacuauuacuggacacuaguagagccgggagacaaaauaacauucgaagcaacuggaaaucuagugguaccgagauaugcauucgcaauggaaagaaaugcuggaucugguauuaucauuucagauacaccaguccacgauugcaauacaacuugucagacacccaagggugcuauaaacaccagccucccauuucagaauauacauccgaucacaauuggaaaauguccaaaauauguaaaaagcacaaaauugagacuggccacaggauugaggaaugucccgucuauucaaucuagaggccuauuuggggccauugccgguuucauugaagggggguggacagggaugguagauggaugguacgguuaucaccaucaaaaugagcaggggucaggauaugcagccgaccugaagagcacacagaaugccauugacgagauuacuaacaaaguaaauucuguuauugaaaagaugaauacacaguucacagcaguagguaaagaguucaaccaccuggaaaaaagaauagagaauuuaaauaaaaaaguugaugaugguuuccuggacauuuggacuuacaaugccgaacuguugguucuauuggaaaaugaaagaacuuuggacuaccacgauucaaaugugaagaacuuauaugaaaagguaagaagccagcuaaaaaacaaugccaaggaaauuggaaacggcugcuuugaauuuuaccacaaaugcgauaacacgugcauggaaagugucaaaaaugggacuuaugacuacccaaaauacucagaggaagcaaaauuaaacagagaagaaauagaugggauaaagcuggaaucaacaaggauuuaccagauuuuggcgaucuauucaacugucgccaguucauugguacugguagucucccugggggcaaucaguuucuggaugugcucuaaugggucucuacaguguagaauauguauuuaa

SEQ ID NO: 38529 - RNA, 1701 nt, Artificial Sequence; identical to SEQ ID NO: 34898
  derived and/or modified CDS sequence (wt) from hemagglutinin__InfluenzaA__ADX96997

SEQ ID NO: 38530 - RNA, 1701 nt, Artificial Sequence
  derived and/or modified CDS sequence (wt) from hemagglutinin__InfluenzaA__ADX97007
augaaggcaauacuaguaguucugcuauauacauuugcaaccgcaaaugcagacacauuauguauagguuaucaugcgaacaauucaacagacacuguagacacaguacuagaaaagaauguaacaguaacacacucuguuaaccuucuagaagacaagcauaacgggaaacuaugcaaacuaagagggguagccccauugcauuuggguaaauguaacauugcuggcuggauccugggaaauccagagugugaaucacucuccacagcaagcucaugguccuacauuguggaaacaucuaguucagacaauggaacguguuacccaggagauuucaucgauuaugaggagcuaagagagcaauugagcucagugucaucauuugaaagguuugagauauuccccaagacaaguucauggcccaaucaugacucgaacaaagguguaacggcagcauguccucaugcuggagcaaaaagcuucuacaaaaauuuaauauggcuaguuaaaaaaggaaauucauacccaaagcucagcaaauccuacauuaaugauaaagggaaagaaguccucgugcuauggggcauucaccauccaucuacuagugcugaccaacaaagucucuaucagaaugcagaugcauauguuuuuguggggacaucaagauacagcaagaaguucaagccggaaauagcaauaagacccaaagugagggaucaagaagggagaaugaacuauuacuggacacuaguagagccgggagacaaaauaacauucgaagcaacuggaaaucuagugguaccgagauaugcauucgcaauggaaagaaaugcuggaucugguauuaucauuucagaugcaccaguccacgauugcaauacaacuugucagacacccaagggugcuauaaacaccagccucccauuucagaauauacauccgaucacaauuggaaaauguccaaaauauguaaaaagcacaaaauugagacuggccacaggauugaggaaugucccgucuauucaaucuagaggccuauuuggggccauugccgguuucauugaagggggguggacagggaugguagauggaugguacgguuaucaccaucaaaaugagcaggggucaggauaugcagccgaccugaagagcacacagaaugccauugacgagauuacuaacaaaguaaauucuguuauugaaaagaugaauacacaguucacagcaguagguaaagaguucaaccaccuggaaaaaagaauagagaauuuaaauaaaaaaguugaugaugguuuccuggacauuuggacuuacaaugccgaacuguugguucuauuggaaaaugaaagaacuuuggacuaccacgauucaaaugugaagaacuuauaugaaaagguaagaagccaguuaaaaaacaaugccaaggaaauuggaaacggcugcuuugaauuuuaccacaaaugcgauaacacgugcauggaaagugucaaaaaugggacuuaugacuacccaaaauacucagaggaagcaaaauuaaacagagaagaaauagaugggguaaagcuggaaucaacaaggauuuaccagauuuuggcgaucuauucaacugucgccaguucauugguacugguagucucccugggggcaaucaguuucuggaugugcucuaaugggucucuacaguguagaauauguauuuaa

SEQ ID NO: 38531 - RNA, 1701 nt, Artificial Sequence
  derived and/or modified CDS sequence (wt) from hemagglutinin__InfluenzaA__ADX97018
augaaggcaauacuaguaguucugcuauauacauuugcaaccgcaaaugcagacacauuauguauagguuaucaugcgaacaauucaacagacacuguagacacaguacuagaaaagaauguaacaguaacacacucuguuaaccuucuagaagacaagcauaacgggaaacuaugcaaacuaagagggguagccccauugcauuuggguaaauguaacauugcuggcuggauccugggaaauccagagugugaaucacucuccacagcaagcucaugguccuacauuguggaaacaucuaguucagacaauggaacguguuacccaggagauuucaucgauuaugaggagcuaagagagcaauugagcucagugucaucauuugaaagguuugagauauuccccaagacaaguucauggcccaaucaugacucgaacaaagguguaacggcagcauguccucaugcuggagcaaaaagcuucuacaaaaauuuaauauggcuaguuaaaaaaggaaauucauacccaaagcucagcaaauccuacauuaaugauaaagggaaagaaguccucgugcuauggggcauucaccauccaucuacuagugcugaccaacaaagucucuaucagaaugcagaugcauauguuuuuguggggacaucaagauacagcaagaaguucaagccggaaauagcaauaagacccaaagugagggaucaagaagggagaaugaacuauuacuggacacuaguagagccgggagacaaaauaacauucgaagcaacuggaaaucuagugguaccgagauaugcauucgcaauggaaagaaaugcuggaucugguauuaucauuucagauacaccaauccacgauugcaauacaacuugucagacacccaagggugcuauaaacaccagccucccauuucagaauauacauccgaucacaauuggaaaauguccaaaauauguaaaaagcacaaaauugagacuggccacaggauugaggaaugucccgucuauucaaucuagaggccuauuuggggccauugccgguuucauugaagggggguggacagggaugguagauggaugguacgguuaucaccaucaaaaugagcaggggucaggauaugcagccgaccugaagagcacacagaaugccauugacgagauuacuaacaaaguaaauucuguuauugaaaagaugaauacacaguucacagcaguagguaaagaguucaaccaccuggaaaaaagaauagagaauuuaaauaaaaaaguugaugaugguuuccuggacauuuggacuuacaaugccgaacuguugguucuauuggaaaaugaaagaacuuuggacuaccacgauucaaaugugaagaacuuauaugaaaagguaagaagccaguuaaaaaacaaugccaaggaaauuggaaacggcugcuuugaauuuuaccacaaaugcgauaacacgugcauggaaagugucaaaaaugggacuuaugacuacccaaaauacucagaggaagcaaaauuaaacagagaagaaauagaugggguaaagcuggaaucaacaaggauuuaccagauuuuggcgaucuauucaacugucgccaguucauugguacugguagucucccugggggcaaucaguuucuggaugugcucuaaugggucucuacaguguagaauauguauuuaa

SEQ ID NO: 38532 - RNA, 1701 nt, Artificial Sequence
  derived and/or modified CDS sequence (wt) from hemagglutinin__InfluenzaA__ADX97028
augaaggcaauacuaguaguucugcuauauacauuugcaaccgcaaaugcagacacauuauguauagguuaucaugcgaacaauucaacagacacuguagacacaguacuagaaaagaauguaacaguaacacacucuguuaacauucuagaagacaagcauaacgggaaacuaugcaaacuaagagggguagccccauugcauuuggguaaauguaacauugcuggcuggauccugggaaauccagagugugaaucacucuccacagcaagcucaugguccuacauuguggaaacaucuaguucagacaauggaacguguuacccaggagauuucaucgauuaugaggagcuaagagagcaauugagcucagugucaucauuugaaagguuugagauauuccccaagacaaguucauggcccaaucaugacucgaacaaagguguaacggcagcauguccucaugcuggagcaaaaagcuucuacaaaaauuuaauuuggcuaguuaaacaaggaaauucauacccaaagcucagcaaauccuacauuaaugauaaagggaaagaaguccucgugcuauggggcauucaccauccaucuacuacugcugaccaacaaagucucuaucagaaugcagaugcauauguuuuuguggggucaucaagauacagcaagaaguucaagccggaaauagcaauuagacccaaagugagggaucaagaagggagaaugaacuauuacuggacacuaguagagccgggagacaaaauaacauucgaagcaacuggaaaucuagugguaccaagauaugcauucgcaauggaaagaaaugcuggaucugguauuaucauuucagauacaccaguccaugauugcaauacaacuugucagacacccaagggugcuauaaacaccagccucccauuucagaauauacauccgaucacaauuggaaaauguccaaaauauguaaaaagcacaaaauugagacuggccacaggauugaggaaugucccgucuauucaaucuagaggccuauuuggggccauugccgguuucauugaagggggguggacagggaugguagauggaugguacgguuaucaccaucaaaaugagcaggggucaggauaugcagccgaccugaagagcacacagaaugccauugacgagauuacuaacaaaguaaauucuguuauugaaaagaugaauacacaguucacagcaguagguaaagaguucaaccaccuggaaaaaagaauagagaauuuaaauaaaaaaguugaugaugguuuccuggacauuuggacuuacaaugccgaacuguugguucuauuggaaaaugaaagaacuuuggacuaccacgauucaaaugugaagaacuuauaugaaaagguaagaagccagcuaaaaaacaaugccaaggaaguuggaaacggcugcuuugaauuuuaccacaaaugcgauaacacgugcauggaaagugucaaaaaugggacuuaugacuacccaaaauacucagaggaagcaaaauuaaacagagaagaaauagaugggguaaagcuggaaucaacaaggauuuaccagauuuuggcgaucuauucaacugccgccaguucauugguacugguagucucccugggggcaaucaguuucuggaugugcucuaaugggucucuacaguguagaauauguauuuaa

SEQ ID NO: 38533 - RNA, 1701 nt, Artificial Sequence; identical to SEQ ID NO: 37234
  derived and/or modified CDS sequence (wt) from hemagglutinin__InfluenzaA__ADX98640

SEQ ID NO: 38534 - RNA, 1701 nt, Artificial Sequence; identical to SEQ ID NO: 36233
  derived and/or modified CDS sequence (wt) from hemagglutinin__InfluenzaA__ADX98650

SEQ ID NO: 38535 - RNA, 1701 nt, Artificial Sequence
  derived and/or modified CDS sequence (wt) from hemagglutinin__InfluenzaA__ADX98665
augaaggcaauacuaguaguucugcuauacacauuugcaaccgcaaaugcagacacauuauguauagguuaucaugcgaacaauucaacagacacuguagacacaguacuagaaaagaauguaacaguaacacacucuguuaaccuucuagaagacaagcauaacgggaaacuaugcaaacuaagagggguagccccauugcauuuggguaaauguaacauugcuggcuggauccugggaaauccagagugugaaucacucuccacagcaagcucaugguccuacauuguggaaacaucuaguucaggcaauggaacguguuacccaggagauuucaucgauuaugaggagcuaagagagcaauugagcucagugucaucauuugaaagguuugagauauuccccaagacaaguucauggcccaaucaugacucgaacaaagguguaacggcagcauguccucaugcuggagcaaaaagcuucuacaaaaauuuaauauggcuaguuaaaaaaggaaauucauacccaaagcucagcaaauccuacauuaaugauaaagggaaagaaguccucgugcuauggggcauucaccauccaucuacuagugcugaccaacaaagucucuaucagaaugcagaugcauauguuuuuguggggacaucaagauacagcaagaaguucaagccggaaauagcaauaagacccaaagugagggaucaagaagggagaaugaacuauuacuggacacuaguagagccgggagacaaaauaacauucgaagcaacuggaaaucuagugguaccgagauaugcauucgcaauggaaagaaaugcuggaucugguauuaucauuucagauacaccaguccacgauugcaauacaacuugucagacacccaagggugcuauaaacaccagccucccauuucagaauauacauccgaucacaauuggaaaauguccaaaauauguaaaaagcacaaaauugagacuggccacaggauugaggaaugucccgucuauucaaucuagaggccuauuuggggccauugccgguuucauugaagggggguggacagggaugguagauggaugguacgguuaucaccaucaaaaugagcaggggucaggauaugcagccgaccugaagagcacacagaaugccauugacgagauuacuaacaaaguaaauucuguuauugaaaagaugaauacacaguucacagcaguagguaaagaguucaaccaccuggaaaaaagaauagagaauuuaaauaaaaaaguugaugaugguuuccuggacauuuggacuuacaaugccgaacuguugguucuauuggaaaaugaaagaacuuuggacuaccacgauucaaaugugaagaacuuauaugaaaagguaagaagccaguuaaaaaacaaugccaaggaaauuggaaacggcugcuuugaauuuuaccacaaaugcgauaauacgugcauggaaagugucaaaaaugggacuuaugacuacccaaaauauucagaggaagcaaaauuaaacagagaagaaauagaugggguaaagcuggaaucaacaaggauuuaccagauuuuggcgaucuauucaacugccgccaguucauugguacugguagucucccugggggcaaucaguuucuggaugugcucuaauggaucucuacaguguagaauauguauuuaa

SEQ ID NO: 38536 - RNA, 1701 nt, Artificial Sequence
  derived and/or modified CDS sequence (wt) from hemagglutinin__InfluenzaA__ADX98675
augaaggcaauacuaguaguucugcuauauacauuugcaaccgcaaaugcagacacauuauguauagguuaucaugcgaacaauucaacagacacuguagacacaguacuagaaaagaauguaacaguaacacacucuguuaaccuucuagaagacaagcauaacgggaaacuaugcaaacuaagagggguagccccauugcauuuggguaaauguaacauugcuggcuggauccugggaaauccagagugugaaucacucuccacagcaagcucaugguccuacauuguggaaacaucuaguucagacaauggaacguguuacccaggagauuucaucgauuaugaggagcuaagagagcaauugagcucagugucaucauuugaaagguuugagauauuccccaagacaaguucauggcccaaucaugacucgaacaaagguguaacggcagcauguccucaugcuggagcaaaaagcuucuacaaaaauuuaauauggcuaguuaaaaaaggaaauucauacccaaagcucagcaaauccuacauuaaugauaaagggaaagaaguccucgugcuauggggcauucaccauccaucuacuagugcugaccaacaaagucucuaucagaaugcagaugcauauguuuuuguggggacaucaagauacagcaagaaguucaagccggaaauagcaauaagacccaaagugagggaucaagaagggagaaugaacuauuacuggacacuaguagagccgggagacaaaauaacauucgaagcaacuggaaaucuagugguaccgagauaugcauucgcaauggaaagaaaugcuggaucugguauuaucauuucagauacaccaguccacgauugcaauacaacuugucagacacccaagggugcuauaaacaccagccucccauuucagaauauacauccgaucacaauuggaaaauguccaaaauauguaaaaagcacaaaauugagacuggccacaggauugaggaaugucccgucuauucaaucuagaggccuauuuggggccauugccgguuucauugaagggggguggacagggaugguagauggaugguacgguuaucaccaucaaaaugagcagggaucaggauaugcagccgaccugaagagcacacagaaugccauugacaagauuacuaacaaaguaaauucuguuauugaaaagaugaauacacaguucacagcaguagguaaagaguucaaccaccuggaaaaaagaauagagaauuuaaauaaaaaaguugaugaugguuuccuggacauuuggacuuacaaugccgaacuguugguucuauuggaaaaugaaagaacuuuggacuaccacgauucaaaugugaagaacuuauaugaaaagguaagaagccaguuaaaaaacaaugccaaggaaauuggaaacggcugcuuugaauuuuaccacaaaugcgauaacacgugcauggaaagugucaaaaaugggacuuaugacuacccaaaauacucagaggaagcaaaauuaaacagagaagaaauagaugggguaaagcuggaaucaacaaggauuuaccagauuuuggcgaucuauucaacugucgccaguucauugguacugguagucucccugggggcaaucaguuucuggaugugcucuaaugggucucuacaguguagaauauguauuuaa

SEQ ID NO: 38537 - RNA, 1701 nt, Artificial Sequence; identical to SEQ ID NO: 35845
  derived and/or modified CDS sequence (wt) from hemagglutinin__InfluenzaA__ADX98695

SEQ ID NO: 38538 - RNA, 1701 nt, Artificial Sequence
  derived and/or modified CDS sequence (wt) from hemagglutinin__InfluenzaA__ADX98729
augaaggcaauacuaguaguucugcuauauacauuugcaaccgcaaaugcagacacauuauguauagguuaucaugcgaacaauucaacagacacuguagacacaguacuagaaaagaauguaacaguaacacacucuguuaaccuucuagaagacaagcauaacgggaaacuaugcaaacuaagagggguagccccauugcauuuggguaaauguaacauugcuggcuggauccugggaaauccagagugugaaucacucuccacagcaagcucaugguccuacauuguggaaacaucuaguucagacaauggaacguguuacccaggagauuucaucaacuaugaggagcuaagagagcaauugagcucagugucaucauuugaaagguuugagauauuccccaagacaaguucauggcccaaucaugacucgaacaaagguguaacggcugcauguccucaugcuggagcaaaaagcuucuacaaaaauuuaauauggcuaguuaaaaaaggaaauucauacccaaagcucagcaaauccuacauuaaugauaaagggaaagaaguccucgugcuauggggcauucaccauccaucuacuagugcugaccaacaaagucucuaucagaaugcagaugcauauguuuuuguggggacaucaagauacagcaagaaguucaagccggaaauagcaauaagacccaaagugagggaucaagaagggagaaugaacuauuacuggacacuaguagagccgggagacaaaauaacauucgaagcaacuggaaaucuagugguaccgagauaugcauucgcaauggagagaaaugcuggaucugguauuaucaucucagauacaccaguccacgauugcaauacaacuugucagacacccaagggugcuauaaacaccagccucccauuucagaauauacauccgaucacaauuggaaaauguccaaaauauguaaaaagcacaaaauugagacuggccacaggauugaggaaugucccgucuauucaaucuagaggccuauuuggggccauugccgguuucauugaagggggguggacagggaugguagauggaugguacgguuaucaccaucaaaaugagcaggggucaggauaugcagccgaccugaagagcacacagaaugccauugacaagauuacuaacaaaguaaauucuguuauugaaaagaugaauacacaguucacagcaguagguaaagaguucaaccaccuggaaaaaagaauagagaauuuaaauaaaaaaguugaugaugguuuccuggacauuuggacuuacaaugccgaacuguugguucuauuggaaaaugaaagaacuuuggacuaccacgauucaaaugugaagaacuuauaugaaaagguaagaagccaguuaaaaaacaaugccaaggaaauuggaaacggcugcuuugaauuuuaccacaaaugcgauaacacgugcauggaaagugucaaaaaugggacuuaugacuacccaaaauacucagaggaagcaaaauuaaacagagaagaaauagaugggguaaagcuggaaucaacaaggauuuaccagauuuuggcgaucuauucaacugucgccaguucauugguacugguagucucccugggggcaaucaguuucuggaugugcucuaaugggucucuacaguguagaauauguauuuaa

SEQ ID NO: 38539 - RNA, 1701 nt, Artificial Sequence; identical to SEQ ID NO: 37564
  derived and/or modified CDS sequence (wt) from hemagglutinin__InfluenzaA__ADX98739

SEQ ID NO: 38540 - RNA, 1701 nt, Artificial Sequence; identical to SEQ ID NO: 37313
  derived and/or modified CDS sequence (wt) from hemagglutinin__InfluenzaA__ADX98748

SEQ ID NO: 38541 - RNA, 1701 nt, Artificial Sequence; identical to SEQ ID NO: 34681
  derived and/or modified CDS sequence (wt) from hemagglutinin__InfluenzaA__ADX98758

SEQ ID NO: 38542 - RNA, 1701 nt, Artificial Sequence; identical to SEQ ID NO: 37243
  derived and/or modified CDS sequence (wt) from hemagglutinin__InfluenzaA__ADX98767

SEQ ID NO: 38543 - RNA, 1701 nt, Artificial Sequence
  derived and/or modified CDS sequence (wt) from hemagglutinin__InfluenzaA__ADX98777
augaaggcaauacuaguaguucugcuauauacauuugcaaccgcaaaugcagacacauuauguauagguuaucaugcgaacaauucaacagacacuguagacacaguacuagaaaagaauguaacaguaacacacucuguuaacauucuagaagacaagcauaacgggaaacuaugcaaacuaagagggguagccccauugcauuuggguaaauguaacauugcuggcuggauccugggaaauccagagugugaaucacucuccacagcaagcucaugguccuacauuguggaaacaucuaguucagacaauggaacguguuacccaggagauuucaucgauuaugaggagcuaagagagcaauugagcucagugucaucauuugaaagguuugagauauuccccaagacaaguucauggcccaaucaugacucgaacaaagguguaacggcagcauguccucaugcuggagcaaaaagcuucuacaaaaauuuaauauggcuaguuaaaaaaggaaauucauacccaaagcucagcaaauccuacauuaaugauaaagggaaagaaguccucgugcuauggggcauucaccauccaucuacuagugcugaccaacaaagucucuaucagaaugcagaugcauauguuuuuguggggacaucaagauacagcaagaaguucaagccggaaauagcaauaagacccaaagugagggaucaagaagggagaaugaacuauuacuggacacuaguagagccgggagacaaaauaacauucgaagcaacugggaaucuagugguaccgagauaugcauucgcaauggaaagaaaugcuggaucugguauuaucauuucagauacaccaguccacgauugcaauacaacuugucagacacccaagggugcuauaaacaccagccucccauuucagaauauacauccgaucacaauuggaaaauguccaaaauauguaaaaagcacaaaauugagacuggccacaggauugaggaaugucccgucuauucaaucuagaggccuauuuggggccauugccgguuucauugaagggggguggacagggaugguagauggaugguacgguuaucaccaucaaaaugagcaggguucaggauaugcagccgaccugaagagcacacagaaugccauugacgagauuacuaacaaaguaaauucuguuauugaaaagaugaauacacaguucacagcaguagguaaagaguucaaccaccuggaaaaaagaauagagaauuuaaauaaaaaaguugaugaugguuuccuggacauuuggacuuauaaugccgaacuguugguucuauuggaaaaugaaagaacuuuggacuaccacgauucaaaugugaagaacuuauaugaaaagguaagaagccaguuaaaaaacaaugccaaggaaauuggaaacggcugcuuugaauuuuaccacaaaugcgauaacacgugcauggaaagugucaaaaaugggacuuaugacuaccccaaauacucagaggaagcaaaauuaaacagagaagaaauagaugggguaaagcuggaaucaacaaggauuuaccagauuuuggcgaucuauucaacugucgccaguucauugguacugguagucucccugggggcaaucaguuucuggaugugcucuaaugggucucuacaguguagaauauguauuuaa

SEQ ID NO: 38544 - RNA, 1701 nt, Artificial Sequence
  derived and/or modified CDS sequence (wt) from hemagglutinin__InfluenzaA__ADX98785
augaaggcaauacuaguaguucugcuauauacacuugcaaccgcaaaugcagacacauuauguauagguuaucaugcgaacaauucaacagacacuguagacacaguacuagaaaagaauguaacaguaacacacucuguuaaccuucuagaagacaagcauaacgggaaacuaugcaaacuaagagggauagccccauugcauuuggguaaauguaacauugcuggcuggauccugggaaauccagagugugaaucacucuccacagcaagcucaugguccuacauuguggaaacaucuaguucagacaauggaacguguuacccaggagauuucaucgauuaugaggagcuaagagagcaauugagcucagugucaucauuugaaagguuugagauauuccccaagacaaguucauggcccaaucaugacucgaacaaagguguaacggcagcauguccucaugcuggagcaaaaagcuucuacaaaaauuuaauauggcuaguuaaaaaaggaaauucauacccaaagcucagcaaauccuacauuaaugauaaagggaaagaaguccucgugcuauggggcauucaccauccaucuacuagugcugaccaacaaagucucuaucagaaugcagaugcauauguuuuuguggggacaucaagauacagcaagaaguucaagccggaaauagcaauaagacccaaagugagggaucaagaagggagaaugaacuauuacuggacacuaguagagccgggagacaaaauaacauucgaagcaacuggaaaucuagugguaccgagauaugcauucgcaauggaaagaaaugcuggaucugguauuaucauuucagauacaccaguccacgauugcaauacaacuugucagacacccaagggugcuauaaacaccagccucccauuucagaauauacauccgaucacaauuggaaaauguccaaaauauguaaaaagcacaaaauugagacuggccacaggauugaggaaugucccgucuauucaaucuagaggccuauuuggggccauugccgguuucauugaagggggguggacagggaugguagauggaugguacgguuaucaccaucaaaaugagcaggggucaggauaugcagccgaccugaagagcacacagaaugccauugacgagauuacuaacaaaguaaauucuguuauugaaaagaugaauacacaguucacagcaguagguaaagaguucaaccaccuggaaaaaagaauagagaauuuaaauaaaaaaguugaugaugguuuccuggacauuuggacuuacaaugccgaacuguugguucuauuggaaaaugaaagaacuuuggacuaccacgauucaaaugugaagaacuuauaugaaaagguaagaagccaguuaaaaaacaaugccaaggaaauuggaaacggcugcuuugaauuuuaccacaaaugcgauaacacgugcauggaaagugucaaaaaugggacuuaugacuacccaaaauacucagaggaagcaaaauuaaacagagaagaaauaggugggguaaagcuggaaucaacaaggauuuaccagauuuuggcgaucuauucaacugucgccaguucauugguacugguagucucccugggggcaaucaguuucuggaugugcucuaaugggucucuacaguguagaauauguauuuaa

SEQ ID NO: 38545 - RNA, 1701 nt, Artificial Sequence
  derived and/or modified CDS sequence (wt) from hemagglutinin__InfluenzaA__ADX98792
augaaggcaauacuaguaguucugcuauauacauuugcaaccgcaaaugcagacacauuauguauagguuaucaugcgaacaauucaacagacacuguagacacaguacuagaaaagaauguaacaguaacacacucuguuaaccuucuagaagacaagcauaacgggaaacuaugcaaacuaagagggguagccccauugcauuuggguaaaugcaacauugcuggcuggauccugggaaauccagagugugaaucacucuccacagcaagcucaugguccuacauuguggaaacaucuaguucagacaauggaacguguuacccaggagauuucaucgauuaugaggagcuaagagagcaauugagcucagugucaucauuugaaagguuugagauauuccccaagacaaguucauggcccaaucaugacucgaacaaagguguaacggcagcauguccucaugcuggagcaaaaagcuucuacaaaaauuuaauauggcuaguuaaaaaaggaaauucauacccaaagcucagcaaauccuacauuaaugauaaagggaaagaaguccuagugcuauggggcauucaccauccaucuacuagugcugaccaacaaagucucuaucagaaugcagaugcauauguuuuuguggggacaucaagauacagcaagaaguucaagccggaaauagcaauaagacccaaagugagggaucaagaagggagaaugaacuauuacuggacacuaguagagccgggagacaaaauaacauucgaagcaacuggaaaucuagugguaccgagauaugcauucgcaauggaaagaaaugcuggaucugguauuaucauuucagauacaccaguccacgauugcaauacaacuugucagacacccaagggugcuauaaacaccagccucccauuucagaauauacauccgaucacaauuggaaaauguccaaaauauguaaaaagcacaaaauugagacuggccacaggauugaggaauaucccgucuauucaaucuagaggccuauuuggggccauugccgguuucauugaagggggguggacagggaugguagauggaugguacgguuaucaccaucaaaaugagcaggggucaggauaugcagccgaccugaagagcacacagaaugccauugacgagauuacuaacaaaguaaacucuguuauugaaaagaugaauacacaguucacagcaguagguaaagaguucaaccaccuggaaaaaagaauagagaauuuaaauaaaaagguugaugaugguuuccuggacauuuggacuuacaaugccgaacuguugguucuauuggaaaaugaaagaacuuuggacuaccacgauucaaaugugaagaacuuauaugaaaagguaagaagccaguuaaaaaacaaugccaaggaaauuggaaacggcugcuuugaauuuuaccacaaaugcgauaacacgugcauggaaagugucaaaaaugggacuuaugacuacccaaaauacucagaggaagcaaaauuaaacagagaagaaauagaugggguaaagcuggaaucaacaaggauuuaccagauuuuggcgaucuauucaacugucgccaguucauugguacugguagucucccugggggcaaucaguuucuggaugugcucuaaugggucucuacaguguagaauauguauuuaa

SEQ ID NO: 38546 - RNA, 1701 nt, Artificial Sequence; identical to SEQ ID NO: 36327
  derived and/or modified CDS sequence (wt) from hemagglutinin__InfluenzaA__ADX98806

SEQ ID NO: 38547 - RNA, 1701 nt, Artificial Sequence; identical to SEQ ID NO: 37722
  derived and/or modified CDS sequence (wt) from hemagglutinin__InfluenzaA__ADX98818

SEQ ID NO: 38548 - RNA, 1701 nt, Artificial Sequence; identical to SEQ ID NO: 35308
  derived and/or modified CDS sequence (wt) from hemagglutinin__InfluenzaA__ADX98828

SEQ ID NO: 38549 - RNA, 1701 nt, Artificial Sequence
  derived and/or modified CDS sequence (wt) from hemagglutinin__InfluenzaA__ADX98843
augaaggcaauacuaguaguucugcuauauacauuugcaaccgcaaaugcagacacauuauguauagguuaucaugcgaacaauucaacagacacuguagacacaguacuagaaaagaauguaacaguaacacacucuguuaaccuucuagaagacaagcauaacgggaaacuaugcaaacuaagagggguagccccauugcauuuggguaaauguaacauugcuggcuggauccugggaaauccagaguguggaucacucuccacagcaagcucaugguccuacauuguggaaacaucuaguucagacaauggaacguguuacccaggagauuucaucgauuaugaggagcuaagagagcaauugagcucagugucaucauuugaaagguuugagauauuccccaagacaaguucauggcccaaucaugacucgaacaaagguguaacggcagcauguccucaugcuggagcaaaaagcuucuacaaaaauuuaauauggcuaguuaaaaaaggaaauucauacccaaagcucagcaaauccuacauuaaugauaaagggaaagaaguccucgugcuauggggcauucaccauccaucuacuagugcugaccaacaaagucucuaucagaaugcagaugcauauguuuuuguggggacaucaagauacagcaagaaguucaagccggaaauagcaauaagacccaaagugagggaucaagaagggagaaugaacuauuacuggacacuaguagagccgggagacaaaauaacauucgaagcaacuggaaaucuaguggugccgagauaugcauucgcaauggaaagaaaugcuggaucugguauuaucauuucagauacaccaguccacgauugcaauacaacuugucagacacccaagggugcuauaaacaccagccucccauuucagaauauacauccgaucacaauuggaaaauguccaaaauauguaaaaagcacaaaauugagacuggccacaggauugaggaaugucccgucuauucaaucuagaggccuauuuggggccauugccgguuucauugaagggggguggacagggaugguagauggaugguacgguuaucaccaucaaaaugagcaggggucaggauaugcagccgaccugaagagcacacagaaugccauugacgggauuacuaacaaaguaaauucuguuauugaaaagaugaauacacaguucacagcaguagguaaagaguucaaccaccuggaaaaaagaauagagaauuuaaauaaaaagguugaugaugguuuccuggacauuuggacuuacaaugccgaacuguugguucuauuagaaaaugaaagaacuuuggacuaccacgauucaaaugugaagaacuuauaugaaaagguaagaagccaguuaaaaaacaaugccaaggaaauuggaaacggcugcuuugaauuuuaccacaaaugcgauaacacgugcauggaaagugucaaaaaugggacuuaugacuacccaaaauacucagaggaagcaaaauuaaacagagaagaaauagaugggguaaagcuggaaucaacaaggauuuaccagauuuuggcgaucuauucaacugucgccaguucauugguacugguagucucccugggggcaaucaguuucuggaugugcucuaaugggucucuacaguguagaauauguauuuaa

SEQ ID NO: 38550 - RNA, 1701 nt, Artificial Sequence
  derived and/or modified CDS sequence (wt) from hemagglutinin__InfluenzaA__ADX98853
augaaggcaauacuaguaguucugcuauauacauuugcaaccgcaaaugcagacacauuauguauagguuaucaugcgaacaauucaacagacacuguagacacaguauuagaaaagaauguaacaguaacacacucuguuaaccuucuagaagacaagcauaacgggaaacuaugcaaacuaagagggguagccccauugcauuuggguaaauguaacauugcuggcuggauccugggaaauccagagugugaaucacucuccauagcaagcucaugguccuacauuguggaaacaucuaguucagacaauggaacguguuacccaggagauuucaucgauuaugaggagcuaagagagcaauugagcucagugucaucauuugaaagguuugagauauuccccaagacaaguucauggcccaaucaugacucgaacaaagguguaacggcagcauguccucaugcuggagcaaaaagcuucuacaaaaauuuaauauggcuaguuaaaaaaggaaauucauacccaaagcucagcaaauccuacauuaaugauaaagggaaagaaguccucgugcuauggggcauucaccauccaucuacuagugcugaccaacaaagucucuaucagaaugcagaugcauauguuuuuguggggacaucaagauacagcaagaaguucaagccggaaauagcaauaagacccaaagugagggaucaagaagggagaaugaacuaucacuggacacuaguagagccgggagacaaaauaacauucgaagcaacuggaaaucuagugguaccgagauaugcauucgcaauggaaagaaaugcuggaucugguauuaucauuucagauacaccaguccacgauugcaauacaacuugucagacacccaagggugcuauaaacaccagccucccauuucagaauauacauccgaucacaauuggaaaauguccaaaauauguaaaaagcacaaaauugagacuggccacaggauugaggaaugucccgucuauucaaucuagaggccuauuuggggccauugccggguucauugaagggggguggacagggaugguagauggaugguacgguuaucaccaucaaaaugagcaggggucaggauaugcagccgaccugaagagcacacagaaugccauugacaagauuacuaacaaaguaaauucuguuauugaaaagaugaauacacaguucacagcaguagguaaagaguucaaccaccuggaaaaaagaauagagaauuuaaauaaaaaaguugaugaugguuuccuggacauuuggacuuacaaugccgaacuguugguucuauuggaaaaugaaagaacuuuggacuaccacgauucaaaugugaagaacuuauaugaaaagguaagaagccaguuaaaaaacaaugccaaggaaauuggaaacggcugcuuugaauuuuaccacaaaugcgauaacacgugcauggaaagugucaaaaaugggacuuaugacuacccaaaauacucagaggaagcaaaauuaaacagagaagaaauagaugggguaaagcuggaaucaacaaggauuuaccagauuuuggcgaucuauucaacugucgccaguucauugguacugguagucucccugggggcaaucaguuucuggaugugcucuaaugggucucuacaguguagaauauguauuuaa

SEQ ID NO: 38551 - RNA, 1701 nt, Artificial Sequence; identical to SEQ ID NO: 36222
  derived and/or modified CDS sequence (wt) from hemagglutinin__InfluenzaA__ADX98860

SEQ ID NO: 38552 - RNA, 1701 nt, Artificial Sequence; identical to SEQ ID NO: 37233
  derived and/or modified CDS sequence (wt) from hemagglutinin__InfluenzaA__ADX98870

SEQ ID NO: 38553 - RNA, 1701 nt, Artificial Sequence
  derived and/or modified CDS sequence (wt) from hemagglutinin__InfluenzaA__ADX98880
augaaggcaauacuaguaguucugcuauauacauuugcaaccgcaaaugcagacacauuauguauagguuaucaugcgaacaauucaacagacacuguagacacaguacuagaaaagaauguaacaguaacacacucuguuaaccuucuagaagacaagcauaacgggaaacuaugcaaacuaagagggguagccccauugcauuuggguaaauguaacauugcuggcuggauccugggaaauccagagugugaaucacucuccacagcaagcucaugguccuacauuguggaaacaucuaguucagacaauggaacguguuacccaggagauuucaucgauuaugaggagcuaagagagcaauugagcucagugucaucauuugaaagguuugagauauuccccaagacaaguucauggcccaaucaugacucgaacaaagguguaacggcagcauguccucaugcuggagcaaaaagcuucuacaaaaauuuaauauggcuaguuaaaaaaggaaauucauacccaaagcucagcaaauccuacauuaaugauaaagggaaagaaguccucgugcuguggggcauucaccauccaucuacuagugcugaccaacaaagucucuaucagaaugcagaugcauauguuuuuguggggacaucaagauacagcaagaaguucaagccggaaauagcaauaagacccaaagugagggaucaagaagggagaaugaacuauuacuggacacuaguagagccgggagacaaaauaacauucgaagcaacuggaaaucuagugguaccgagauaugcauucgcaauggaaagaaaugcuggaucugguauuaucauuucagauacaccaguccacgauugcaauacaacuugucagacacccaagggugcuauaaacaccagccucccauuucagaauauacauccgaucacaauuggaaaauguccaaaauauguaaagagcacaaaauugagacuggccacaggauugaggaaugucccgucuauucaaucuagaggccuauuuggggccauugccgguuucauugaagggggguggacagggaugguagauggaugguacgguuaucaccaucaaaaugagcaggggucaggauaugcagccgaccugaagagcacacagaaugccauugacgagauuacuaacaaaguaaauucuauuauugaaaagaugaauacacaguucacagcaguagguaaagaguucaaccaccuggaaaaaagaauagagaauuuaaauaaaaaaguugaugaugguuuccuggacauuuggacuuacaaugccgaacuguugguucuauuggaaaaugaaagaacuuuggacuaccacgauucaaaugugaagaacuuauaugaaaagguaagaagccaguuaaaaaacaaugccaaggaaauuggaaacggcugcuuugaauuuuaccacaaaugcgauaacacgugcauggaaagugucaaaaaugggacuuaugacuauccaaaauacucagaggaagcaaaauuaaacagagaagaaauagaugggguaaagcuggaaucaacaaggauuuaccagauuuuggcgaucuauucaacugucgccaguucauugguacugguagucucccugggggcaaucaguuucuggaugugcucuaaugggucucuacaguguagaauauguauuuaa

SEQ ID NO: 38554 - RNA, 1701 nt, Artificial Sequence
  derived and/or modified CDS sequence (wt) from hemagglutinin__InfluenzaA__ADX98890
augaaggcaauacuaguaguucugcuauauacauuugcaaccgcaaaugcagacacauuauguauagguuaucaugcgaacaauucaacagacacuguagacacaguacuagaaaagaauguaacaguaacacacucuguuaaccuucuagaagacaagcauaacgggaaacuaugcaaacuaagagggguagccccauugcauuuggguaaauguaacauugcuggcuggauccugggaaauccagagugugaaucacucuccacagcaagcucaugguccuacauuguggaaacaucuaguucagacaauggaacguguuacccaggagauuucaucgauuaugaggagcuaagagagcaauugagcucagugucaucauuugaaagguuugagauauuccccaagacaaguucauggcccaaucaugacucgaacaaagguguaacggcagcauguccucaugcuggagcaaaaagcuucuacaaaaauuuaauauggcuaguuaaaaaaggaaauucauacccaaagcucagcaaauccuacauuaaugauaaagggaaagaaguccucgugcuauggggcauucaccauccaucuacuagugcugaccaacaaagucucuaucagaaugcagaugcauauguuuuuguggggacaucaagauacagcaagaaguucaagccggaaauagcaauaagacccaaagugagggaucaagaagggagaaugaacuauuacuggacacuaguagagccgggagacaaaauaacauucgaagcaacuggaaaucuagugguaccgagauaugcauucgcaauggaaagaaaugcugaaucugguauuaucaucucagauacaccaguccacgauugcaauacaacuugucagacacccaagggugcuauaaacaccagccucccauuucagaauauacauccgaucacaauuggaaaauguccaaaauauguaaaaagcacaaaauugagacuggccacaggauugaggaaugucccgucuauucaaucuagaggccuauuuggggccauugccgguuucauugaagggggguggacagggaugguagauggaugguacgguuaucaccaucaaaaugagcaggggucaggauaugcagccgaccugaagagcacacagaaugccauugacaagauuacuaacaaaguaaauucuguuauugaaaagaugaauacacaguucacagcaguagguaaagaguucaaccaccuggaaaaaagaauagagaauuuaaauaaaaaaguugaugaugguuuccuggacauuuggacuuacaaugccgaacuguugguucuauuggaaaacgaaagaacuuuggacuaccacgauucaaaugugaagaacuuauaugaaaagguaagaagccaguuaaaaaacaaugccaaggaaauuggaaacggcugcuuugaauuuuaccacaaaugcgauaacacgugcauggaaagugucaaaaaugggacuuaugacuacccaaaauacucagaggaagcaaaauuaaacagagaagaaauagaugggguaaagcuggaaucaacaaggauuuaccagauuuuggcgaucuauucaacugucgccaguucauugguacugguagucucccugggggcaaucaguuucuggaugugcucuaaugggucucuacaguguagaauauguauuuaa

SEQ ID NO: 38555 - RNA, 1701 nt, Artificial Sequence
  derived and/or modified CDS sequence (wt) from hemagglutinin__InfluenzaA__ADX98900
augaaggcaauacuaguaguucugcuauauacauuugcaaccgcaaaugcagacacauuauguauagguuaucaugcgaacaauucaacagacacuguagacacaguacuagaaaagaauguaacaguaacacacucuguuaaccuucuagaagacaagcauaacgggaaacuaugcaaacuaagagggguagccccauugcauuuggguaaauguaacauugcuggcuggauccugggaaauccagagugugaaucacucuccacagcaagcucaugguccuacauuguggaaacaucuaguucagacaauggaacguguuacccaggagauuucaucaauuaugaggagcuaagagagcaauugagcucagugucaucauuugaaagguuugagauauuccccaagacaaguucauggcccaaucaugacucgaacaaagguguaacggcugcauguccucaugcuggagcaaaaagcuucuacaaaaauuuaauauggcuaguuaaaaaaggaaauucauacccaaagcucagcaaauccuacauuaaugauaaagggaaagaaguccucgugcuauggggcauucaccauccaucuacuagugcugaccaacaaagucucuaucagaaugcagaugcauauguuuuuguggggacaucaagauacagcaagaaguucaagccggaaauagcaauaagacccaaagugagggaucaagaagggagaaugaacuauuacuggacacuaguagagccgggagacaaaauaacauucgaagcaacuggaaaucuagugguaccgagauaugcauucgcaauggaaagaaaugcuggaucugguauuaucaucucagauacaccaguccacgauugcaauacaacuugucagacacccaagggugcuauaaacaccagccucccauuucagaauauacauccgaucacaauuggaaaauguccaaaauauguaaaaagcacaaaauugagacuggccacaggauugaggaaugucccgucuauucaaucuagaggccuauuuggggccauugccgguuucauugaagggggguggacagggaugguagauggaugguacgguuaucaccaucaaaaugagcaggggucaggauaugcagccgaccugaagagcacacagaaugccauugacaagauuacuaacaaaguaaauucuguuauugaaaagaugaauacacaguucacagcaguagguaaagaguucaaccaccuggaaaaaagaauagagaauuuaaauaaaaaaguugaugaugguuuccuggacauuuggacuuacaaugccgaacuguugguucuauuggaaaaugaaagaacuuuggacuaccacgauucaaaugugaagaacuuauaugaaaagguaagaagccaguuaaaaaacaaugccaaggaaauuggaaacggcugcuuugaauuuuaccacaaaugcgauaacacgugcauggaaagugucaaaaaugggacuuaugacuacccaaaauacucagaggaagcaaaauuaaacagagaagaaauagaugggguaaagcuggaaucaacaaggauuuaccagauuuuggcgaucuauucaacugucgccaguucauugguacuuguagucucccugggggcaaucaguuucuggaugugcucuaaugggucucuacaguguagaauauguauuuaa

SEQ ID NO: 38556 - RNA, 1701 nt, Artificial Sequence
  derived and/or modified CDS sequence (wt) from hemagglutinin__InfluenzaA__ADX98910
augaaggcaauacuaguaguucugcuauauacauuugcaaccgcaaaugcagacacauuauguauagguuaucaugcgaacaauucaacagacacuguagacacaguacuagaaaagaauguaacaguaacacacucuguuaaccuucuagaagacaagcauaacgggaaacuaugcaaacuaagagggguagccccauugcauuuggguaaauguaacauugcuggcuggauccugggaaauccagagugugaaucacucuccacagcaaucucaugguccuacauuguggaaacaucuaguucagacaauggaacguguuacccaggagauuucaucgauuaugaggagcuaagagagcaauugagcucagugucaucauuugaaagguuugagauauuccccaagacaaguucauggcccaaucaugacucgaacaaagguguaacggcagcauguccucaugcuggagcaaaaagcuucuacaaaaauuuaauauggcuaguuaaaaaaggaaauucauacccaaagcucagcaaauccuacauuaaugauaaagggaaagaaguccucgugcuauggggcauucaccauccaucuacuagugcugaccaacaaagucucuaucagaaugcagaugcauauguuuuuguggggacaucaagauacagcaagaaguucaagccggaaauagcaauaagacccaaagugagggaucaagaagggagaaugaacuauuacuggacacuaguagagccgggagacaaaauaacauucgaagcaacuggaaaucuagugguaccgagauaugcauucgcaauggaaagaaaugcuggaucugguauuaucauuucagauacaccaguccacgauugcaauacaacuugucagacacccaagggugcuauaaacaccagccucccauuucagaauauacauccgaucacaauuggaaaauguccaaaauauguaaaaagcacaaaauugagacuggccacaggauugaggaaugucccgucuauucaaucuagaggccuauuuggggccauugccgguuucauugaagggggguggacagggaugguagauggaugguacgguuaucaccaucaaaaugagcaggggucaggauaugcagccgaccugaagagcacacagaaugccauugacaagauuacuaacaaaguaaauucuguuauugaaaagaugaauacacaguucacagcaguagguaaagaguucaaccaccuggaaaaaagaauagagaauuuaaauaaaaaaguugaugaugguuuccuggacauuuggacuuacaaugccgaacuguugguucuauuggaaaaugaaagaacuuuggacuaccacgauucaaaugugaagaacuuauaugaaaagguaagaagccaguuaaaaaacaaugccaaggaaauuggaaacggcugcuuugaauuuuaccacaaaugcgauaacacgugcauggaaagugucaaaaaugggacuuaugacuacccaaaauacucagaggaagcaaaauuaaacagagaagaaauagaugggguaaagcuggaaucaacaaggauuuaccagauuuuggcgaucuauucaacugucgccaguucauugguacugguagucucccugggggcaaucaguuucuggaugugcucuaaugggucucuacaguguagaauauguauuuaa

SEQ ID NO: 38557 - RNA, 1701 nt, Artificial Sequence
  derived and/or modified CDS sequence (wt) from hemagglutinin__InfluenzaA__ADX98920
augaaggcaauacuaguaguucugcuauauacauuugcaaccgcaaaugcagacacauuauguauagguuaucaugcgaacaauucaacagacacuguagacacaguacuagaaaagaauguaacaguaacacacucuguuaaccuucuagaagacaagcauaacgggaaacuaugcaaacuaagaggaguagccccauugcauuuggguaaauguaacauugcuggcuggauccugggaaauccagagugugaaucacucuccacagcaagcucaugguccuacauuguggaaacaucuaguucagacaauggaacguguuacccaggagauuucaucaauuaugaggagcuaagagagcaauugagcucagugucaucauuugaaagguuugagauauuccccaagacaaguucauggcccaaucaugacucgaacaaagguguaacggcagcauguccucaugcuggagcaaaaagcuucuacaaaaauuuaauauggcuaguuaaaaaaggaaauucauacccaaagcucagcaaauccuacauuaaugauaaagggaaagaaguccucgugcuauggggcauucaccauccaucuacuagugcugaccaacaaagucucuaucagaaugcagaugcauauguuuuuguggggacaucaagauacagcaagaaguucaagccggaaauagcaauaagacccaaagugagggaucaagaagggagaaugaacuauuacuggacacuaguagagccgggagacaaaauaacauucgaagcaacuggaaaucuagugguaccgagauaugcauucgcaauggaaagaaaugcuggaucugguauuaucauuucagauacaccaguccacgauugcaauacaacuugucagacacccaagggugcuauaaacaccagccucccauuucagaauauacauccgaucacaauuggaaaauguccaaaauauguaaaaagcacaaaauugagacuggccacaggauugaggaaugucccgucuauucaaucuagaggccuauuuggggccauugccgguuucauugaagggggguggacagggaugguagauggaugguacgguuaucaccaucaaaaugagcaggggucaggauaugcagccgaccugaagagcacacagaaugccauugacaagauuacuaacaaaguaaauucuguuauugaaaagaugaauacacaguucacagcaguagguaaagaguucaaccaccuggaaaaaagaauagagaauuuaaauaaaaaaguugaugaugguuuccuggacauuuggacuuacaaugccgaacuguugguucuauuggaaaaugaaagaacuuuggacuaccacgauucaaaugugaagaacuuauaugaaaagguaagaagccaguuaaaaaacaaugccaaggaaauuggaaacggcugcuuugaauuuuaccacaaaugcgauaacacgugcauggaaagugucaaaaaugggacuuaugacuacccaaaauacucagaggaagccaaauuaaacagagaagaaauagaugggguaaagcuggaaucaacaaggauuuaccagauuuuggcgaucuauucaacugucgccaguucauugguacugguagucucccugggggcaaucaguuucuggaugugcucuaaugggucucuacaguguagaauauguauuuaa

SEQ ID NO: 38558 - RNA, 1701 nt, Artificial Sequence; identical to SEQ ID NO: 36243
  derived and/or modified CDS sequence (wt) from hemagglutinin__InfluenzaA__ADX98930

SEQ ID NO: 38559 - RNA, 1701 nt, Artificial Sequence
  derived and/or modified CDS sequence (wt) from hemagglutinin__InfluenzaA__ADX98940
augaaggcaauacuaguaguucugcuauauacauuugcaaccgcaaaugcagacacauuauguauagguuaucaugcgaacaauucaacagacacuguagacacaguacuagaaaagaauguaacaguaacacacucuguuaaccuucuagaagacaagcauaacgggaaacuaugcaaacuaagagggguagccccauugcauuuggguaaauguaacauugcuggcuggauccugggaaauccagagugugaaucacucuccacagcaagcucaugguccuacauuguggaaacaucuaguucagacaauggaacauguuacccaggagauuucaucgauuaugaggagcuaagagagcaauugagcucagugucaucauuugaaagguuugagauauuccccaagacaaguucauggcccaaucaugacucgaacaaagguguaacggcagcauguccucaugcuggagcaaaaagcuucuacaaaaauuuaauauggcuaguuaaaaaaggaaauucguacccaaagcucagcaaauccuacauuaaugauaaagggaaagaaguccucgugcuauggggcauucaccauccaucuacuagugcugaccaacaaagucucuaucagaaugcagaugcauauguuuuuguggggacaucaagauacagcaagaaguucaagccggaaauagcaauaagacccaaagugagggaucaagaagggagaaugaacuauuacuggacacuaguagggccgggagacaaaauaacauucgaagcaacuggaaaucuagugguaccgagauaugcauucgcaauggaaagaaaugcuggaucugguauuaucauuucagauacaccaguccacgauugcaauacaacuugucagacacccaagggugcuauaaacaccagccucccauuucagaauauacauccgaucacaauuggaaaauguccaaaauauguaaaaagcacaaaauugagacuggccacaggauugaggaaugucccgucuauucaaucuagaggccuauuuggggccauugccgguuucauugaagggggguggacagggaugguagauggaugguacgguuaucaccaucaaaaugagcaggggucaggauaugcagccgaccugaagagcacacagaaugccauugacgagauuacuaacaaaguaaauucuguuauugaaaagaugaauacacaguucacagcaguagguaaagaguucaaccaccuggaaaaaagaauagagaauuuaaauaaaaagguugaugaugguuuccuggacauuuggacuuacaaugccgaacuguugguucuauuggaaaaugaaagaacuuuggacuaccacgauucaaaugugaagaacuuauaugaaaagguaagaagccaguuaaaaaacaaugccaaggaaauuggaaacggcugcuuugaauuuuaccacaaaugcgauaacacgugcauggaaagugucaaaaaugggacuuaugacuacccaaaauacucagaggaagcaaaauuaaacagagaagaaauagaugggguaaagcuggaaucaacaaggauuuaccagauuuuggcgaucuauucaacugucgccaguucauugguacugguagucucccugggggcaaucaguuucuggaugugcucuaaugggucucuacaguguagaauauguauuuaa

SEQ ID NO: 38560 - RNA, 1701 nt, Artificial Sequence; identical to SEQ ID NO: 37301
  derived and/or modified CDS sequence (wt) from hemagglutinin__InfluenzaA__ADX98950

SEQ ID NO: 38561 - RNA, 1701 nt, Artificial Sequence; identical to SEQ ID NO: 37282
  derived and/or modified CDS sequence (wt) from hemagglutinin__InfluenzaA__ADX98960

SEQ ID NO: 38562 - RNA, 1701 nt, Artificial Sequence
  derived and/or modified CDS sequence (wt) from hemagglutinin__InfluenzaA__ADX98970
augaaggcaauacuaguaguucugcuauauacguuugcaaccgcaaaugcagacacauuauguauagguuaucaugcgaacaauucaacagacacuguagacacaguacuagaaaagaauguaacaguaacacacucuguuaaccuucuagaagacaagcauaacgggaaacuaugcaaacuaagagggguagccccauugcauuuggguaaauguaacauugcuggcuggauccugggaaauccagagugugaaucacucuccacagcaagcucaugguccuacauuguggaaacaucuaguucagacaauggaacguguuacccaggagauuucaucgauuaugaggagcuaagagagcaauugagcucagugucaucauuugaaagguuugagauauuccccaagacaaguucauggcccaaucaugacucgaacaaagguguaacggcagcauguccucaugcuggagcaaaaagcuucuacaaaaauuuaauauggcuaguuaaaaaaggaaauucauacccaaagcucagcaaauccuacauuaaugauaaagggaaagaaguccucgugcuauggggcauucaccauccaucuacuagugcugaccaacaaggucucuaucagaaugcagaugcauauguuuuuguggggacaucaagauacagcaagaaguucaagccggaaauagcaauaagacccaaagugagggaucaagaagggagaaugaacuauuacuggacacuaguagagccgggagacaaaauaacauucgaagcaacuggaaaucuagugguaccgagauaugcauucgcaauggaaagaaaugcuggaucugguauuaucauuucagauacaccaguccacgauugcaauacaacuugucagacacccaagggugcuauaaacaccagccucccauuucagaauauacauccgaucacaauuggaaaauguccaaaauauguaaaaagcacaaaauugagacuggccacaggauugaggaauaucccgucuauucaaucuagaggccuauuuggggccauugccgguuucauugaagggggguggacagggaugguagauggaugguacgguuaucaccaucaaaaugagcaggggucaggauaugcagccgaccugaagagcacacagaaugccauugacaagauuacuaacaaaguaaauucuguuauugaaaagaugaauacacaguucacagcaguagguaaagaguucaaucaccuggaaaaaagaauagagaauuuaaauaaaaagguugaugaugguuuccuggacauuuggacuuacaaugccgaacuguugguucuauuggaaaaugaaagaacuuuggacuaccacgauucaaaugugaagaacuuauacgaaaagguaagaagccaguuaaaaaacaaugccaaggaaauuggaaacggcugcuuugaauuuuaccacaaaugcgauaacacgugcauggaaagugucaaaaaugggacuuaugacuacccaaaauacucagaggaagcaaaauuaaacagagaagaaauagaugggguaaagcuggaaucaacaaggauuuaccagauuuuggcgaucuauucaacugucgccaguucauugguacugguagucucccugggggcaaucaguuucuggaugugcucuaaugggucucuacaguguagaauauguauuuaa

SEQ ID NO: 38563 - RNA, 1701 nt, Artificial Sequence; identical to SEQ ID NO: 35967
  derived and/or modified CDS sequence (wt) from hemagglutinin__InfluenzaA__ADX98980

SEQ ID NO: 38564 - RNA, 1701 nt, Artificial Sequence; identical to SEQ ID NO: 34714
  derived and/or modified CDS sequence (wt) from hemagglutinin__InfluenzaA__ADX98990

SEQ ID NO: 38565 - RNA, 1701 nt, Artificial Sequence; identical to SEQ ID NO: 35845
  derived and/or modified CDS sequence (wt) from hemagglutinin__InfluenzaA__ADX99000

SEQ ID NO: 38566 - RNA, 1698 nt, Artificial Sequence
  derived and/or modified CDS sequence (wt) from hemagglutinin__InfluenzaA__ADX99581
augaaggcaaaccuacugguccuguuaagugcacuugcagcugcagaugcagacacaauauguauaggcuaccaugcgaacaauucaaccgacacuguugacacaguacucgagaagaaugugacagugacacacucuguuaaccugcucgaagacagccacaacggaaaacuauguagauuaaaaggaauagccccacuacaauuggggaaauguaacaucgccggauggcucuugggaaacccagaaugcgacccacugcuuccagugagaucaugguccuacauuguagaaacaccaaacucugagaauggaauauguuauccaggagauuucaucgacuaugaggagcugagggagcaauugagcucagugucaucauucgaaagauucgaaauauuucccaaagaaagcucauggcccaaccacaacacaaacggaguaacggcagcaugcucccaugaggggaaaagcaguuuuuacagaaauuugcuauggcugacggagaaggagggcucauacccaaagcugaaaaauucuuaugugaacaaaaaagggaaagaaguccuuguacugugggguauucaucacccgccuaacaguaaggaacaacagaaucucuaucagaaugaaaaugcuuaugucucuguagugacuucaaauuauaacaggagauuuaccccggaaauagcagaaagacccaaaguaagagaucaagcugggaggaugaacuauuacuggaccuugcuaaaacccggagacacaauaauauuugaggcaaauggaaaucuaauagcaccaauguaugcuuucgcacugaguagaggcuuuggguccggcaucaucaccucaaacgcaucaaugcaugaguguaacacgaagugucaaacaccccugggagcuauaaacagcagucucccuuaccagaauauacacccagucacaauaggagagugcccaaaauacgucaggagugccaaauugaggaugguuacaggacuaaggaacacuccguccauucaauccagaggucuauuuggagccauugccgguuuuauugaagggggauggacuggaaugauagauggaugguaugguuaucaucaucagaaugaacagggaucaggcuaugcagcggaucaaaaaagcacacaaaaugccauuaacgggauuacaaacaaggugaacacuguuaucgagaaaaugaacauucaauucacagcuguggguaaagaauucaacaaauuagaaaaaaggauggaaaauuuaaauaaaaaaguugaugauggauuucuggacauuuggacauauaaugcagaauuguuaguucuacuggaaaaugaaaggacucuggauuuccaugacucaaaugugaagaaucuguaugagaaaguaaaaagccaauuaaagaauaaugccaaagaaaucggaaauggauguuuugaguucuaccacaagugugacaaugaaugcauggaaaguguaagaaaugggacuuaugauuaucccaaauauucagaagagucaaaguugaacagggaaaagguagauggagugaaauuggaaucaauggggaucuaucagauucuggcgaucuacucaacugucgccaguucacuggugcuuuuggucucccugggggcaaucaguuucuggauguguucuaauggaucuuugcagugcagaauaugcaucuga

SEQ ID NO: 38567 - RNA, 1698 nt, Artificial Sequence; identical to SEQ ID NO: 38566
  derived and/or modified CDS sequence (wt) from hemagglutinin__InfluenzaA__ADX99592

SEQ ID NO: 38568 - RNA, 1698 nt, Artificial Sequence; identical to SEQ ID NO: 38566
  derived and/or modified CDS sequence (wt) from hemagglutinin__InfluenzaA__ADX99603

SEQ ID NO: 38569 - RNA, 1698 nt, Artificial Sequence
  derived and/or modified CDS sequence (wt) from hemagglutinin__InfluenzaA__ADX99614
augaaggcaaaccuacugguccuguuaagugcacuugcagcugcagaugcagacacaauauguauaggcuaccaugcgaacaauucaaccgacacuguugacacaguacucgagaagaaugugacagugacacacucuguuaaccugcucgaagacagccacaacggaaaacuauguagauuaaaaggaauagccccacuacaauuggggaaauguaacaucgccggauggcucuugggaaacccagaaugcgacccacugcuuccagugagaucaugguccuacauuguagaaacaccaaacucugagaauggaauauguuauccaggagauuucaucgacuaugaggagcugagggagcaauugagcucagugucaucauucgaaagauucgaaauauuucccaaagaaagcucauggcccaaccacaacacaaacggaguaacggcagcaugcucccaugaggggaaaagcaguuuuuacagaaauuugcuauggcugacggagaagaagggcucauacccaaagcugaaaaauucuuaugugaacaaaaaagggaaagaaguccuuguacugugggguauucaucacccgccuaacaguaaggaacaacagaaucucuaucagaaugaaaaugcuuaugucucuguagugacuucaaauuauaacaggagauuuaccccggaaauagcagaaagacccaaaguaagagaucaagcugggaggaugaacuauuacuggaccuugcuaaaacccggagacacaauaauauuugaggcaaauggaaaucuaauagcaccaauguaugcuuucgcacugaguagaggcuuuggguccggcaucaucaccucaaacgcaucaaugcaugaguguaacacgaagugucaaacaccccugggagcuauaaacagcagucucccuuaccagaauauacacccagucacaauaggagagugcccaaaauacgucaggagugccaaauugaggaugguuacaggacuaaggaacacuccguccauucaauccagaggucuauuuggagccauugccgguuuuauugaagggggauggacuggaaugauagauggaugguaugguuaucaucaucagaaugaacagggaucaggcuaugcagcggaucaaaaaagcacacaaaaugccauuaacgggauuacaaacaaggugaacacuguuaucgagaaaaugaacauucaauucacagcuguggguaaagaauucaacaaauuagaaaaaaggauggaaaauuuaaauaaaaaaguugaugauggauuucuggacauuuggacauauaaugcagaauuguuaguucuacuggaaaaugaaaggacucuggauuuccaugacucaaaugugaagaaucuguaugagaaaguaaaaagccaauuaaagaauaaugccaaagaaaucggaaauggauguuuugaguucuaccacaagugugacaaugaaugcauggaaaguguaagaaaugggacuuaugauuaucccaaauauucagaagagucaaaguugaacagggaaaagguagauggagugaaauuggaaucaauggggaucuaucagauucuggcgaucuacucaacugucgccaguucacuggugcuuuuggucucccugggggcaaucaguuucuggauguguucuaauggaucuuugcagugcagaauaugcaucuga

SEQ ID NO: 38570 - RNA, 1698 nt, Artificial Sequence
  derived and/or modified CDS sequence (wt) from hemagglutinin__InfluenzaA__ADX99625
augaaggcaaaccuacugguccuguuaagugcacuugcagcugcagaugcagacacaauauguauaggcuaccaugcgaacaauucaaccgacacuguugacacaguacucgagaagaaugugacagugacacacucuguuaaccugcucgaagacagccacaacggaaaacuauguagauuaaaaggaauagccccacuacaauuggggaaauguaacaucgccggauggcucuugggaaacccagaaugcgacccacugcuuccagugagaucaugguccuacauuguagaaacaccaaacucugagaauggaauauguuauccaggagauuucaucgacuaugaggagcugagggagcaauugagcucagugucaucauucgaaagauucgaaauauuucccaaagaaagcucauggcccaaccacaacacaaacggaguaacggcagcaugcucccaugaggggaaaagcaguuuuuacagaaauuugcuauggcugacggagaaggagggcucauacccaaagcugaaaaauucuuaugugaacaaaaaagggaaagaaguccuuguacugugggguauucaucacccgccuaacaguaaggaacaacagaaucucuaucagaaugaaaaugcuuaugucucuguagugacuucaaauuauaacaggagauuuaccccggaaauagcagaaagacccaaaguaagagaucaagcugggaggaugaacuauuacuggaccuugcuaaaacccggagacacaauaauauuuggggcaaauggaaaucuaauagcaccaauguaugcuuucgcacugaguagaggcuuuggguccggcaucaucaccucaaacgcaucaaugcaugaguguaacacgaagugucaaacaccccugggagcuauaaacagcagucucccuuaccagaauauacacccagucacaauaggagagugcccaaaauacgucaggagugccaaauugaggaugguuacaggacuaaggaacacuccguccauucaauccagaggucuauuuggagccauugccgguuuuauugaagggggauggacuggaaugauagauggaugguaugguuaucaucaucagaaugaacagggaucaggcuaugcagcggaucaaaaaagcacacaaaaugccauuaacgggauuacaaacaaggugaacacuguuaucgagaaaaugaacauucaauucacagcuguggguaaagaauucaacaaauuagaaaaaaggauggaaaauuuaaauaaaaaaguugaugauggauuucuggacauuuggacauauaaugcagaauuguuaguucuacuggaaaaugaaaggacucuggauuuccaugacucaaaugugaagaaucuguaugagaaaguaaaaagccaauuaaagaauaaugccaaagaaaucggaaauggauguuuugaguucuaccacaagugugacaaugaaugcauggaaaguguaagaaaugggacuuaugauuaucccaaauauucagaagagucaaaguugaacagggaaaagguagauggagugaaauuggaaucaauggggaucuaucagauucuggcgaucuacucaacugucgccaguucacuggugcuuuuggucucccugggggcaaucaguuucuggauguguucuaauggaucuuugcagugcagaauaugcaucuga

SEQ ID NO: 38571 - RNA, 1698 nt, Artificial Sequence
  derived and/or modified CDS sequence (wt) from hemagglutinin__InfluenzaA__ADX99636
augaaggcaaaccuacugguccuguuaagugcacuugcagcugcagaugcagacacaauauguauaggcuaccaugcgaacaauucaaccgacacuguugacacaguacucgagaagaaugugacagugacacacucuguuaaccugcucgaagacagccacaacggaaaacuauguagauuaaaaggaauagccccacuacaauuggggaaauguaacaucgccggauggcucuugggaaacccagaaugcgacccacugcuuccagugagaucaugguccuacauuguagaaacaccaaacucugagaauggaauauguuauccaggagauuucaucgacuaugaggagcugagggagcaauugagcucagugucaucauucgaaagauucgaaauauuucccaaagaaagcucauggcccaaccacaacacaaacggaguaacggcagcaugcucccaugaggggaaaagcaguuuuuacagaaauuugcuauggcugacgaagaaggagggcucauacccaaagcugaaaaauucuuaugugaacaaaaaagggaaagaaguccuuguacugugggguauucaucacccgccuaacaguaaggaacaacagaaucucuaucagaaugaaaaugcuuaugucucuguagugacuucaaauuauaacaggagauuuaccccggaaauagcagaaagacccaaaguaagagaucaagcugggaggaugaacuauuacuggaccuugcuaaaacccggagacacaauaauauuugaggcaaauggaaaucuaauagcaccaauguaugcuuucgcacugaguagaggcuuuggguccggcaucaucaccucaaacgcaucaaugcaugaguguaacacgaagugucaaacaccccugggagcuauaaacagcagucucccuuaccagaauauacacccagucacaauaggagagugcccaaaauacgucaggagugccaaauugaggaugguuacaggacuaaggaacacuccguccauucaauccagaggucuauuuggagccauugccgguuuuauugaagggggauggacuggaaugauagauggaugguaugguuaucaucaucagaaugaacagggaucaggcuaugcagcggaucaaaaaagcacacaaaaugccauuaacgggauuacaaacaaggugaacacuguuaucgagaaaaugaacauucaauucacagcuguggguaaagaauucaacaaauuagaaaaaaggauggaaaauuuaaauaaaaaaguugaugauggauuucuggacauuuggacauauaaugcagaauuguuaguucuacuggaaaaugaaaggacucuggauuuccaugacucaaaugugaagaaucuguaugagaaaguaaaaagccaauuaaagaauaaugccaaagaaaucggaaauggauguuuugaguucuaccacaagugugacaaugaaugcauggaaaguguaagaaaugggacuuaugauuaucccaaauauucagaagagucaaaguugaacagggaaaagguagauggagugaaauuggaaucaauggggaucuaucagauucuggcgaucuacucaacugucgccaguucacuggugcuuuuggucucccugggggcaaucaguuucuggauguguucuaauggaucuuugcagugcagaauaugcaucuga

SEQ ID NO: 38572 - RNA, 1698 nt, Artificial Sequence; identical to SEQ ID NO: 35290
  derived and/or modified CDS sequence (wt) from hemagglutinin__InfluenzaA__ADX99647

SEQ ID NO: 38573 - RNA, 1698 nt, Artificial Sequence
  derived and/or modified CDS sequence (wt) from hemagglutinin__InfluenzaA__ADX99680
augaaggcaaaccuacugguccuguuaugugcacuugcagcugcagaugcagacacaauauguauaggcuaccaugcgaacaauucaaccgacacuguugacacaguacucgagaagaaugugacagugacacacucuguuaaccugcucgaagacagccacaacggaaaacuauguagauuaaaaggaauagccccacuacaauuggggaaauguaacaucgccggauggcucuugggaaacccagaaugcgacccacugcuuccagugagaucaugguccuacauuguagaaacaccaaacucugagaauggaauauguuauccaggagauuucaucgacuaugaggagcugagggagcaauugagcucagugucaucauucgaaagauucgaaauauuucccaaagaaagcucaugguccaaccacaacacaaacggaguaacggcagcaugcucccaugaggggaaaagcaguuuuuacagaaauuugcuauggcugacggagaaggagggcucauacccaaagcugaaaaauucuuaugugaacaaaaaagggaaagaaguccuuguacugugggguauucaucacccgccuaacaguaaggaacaacagaaucucuaucagaaugaaaaugcuuaugucucuguagugacuucaaauuauaacaggagauuuaccccggaaauagcagaaagacccaaaguaagagaucaagcugggaggaugaacuauuacuggaccuugcuaaaacccggagacacaauaauauuugaggcaaauggaaaucuaauagcaccaauguaugcuuucgcacugaguagaggcuuuggguccggcaucaucaccucaaacgcaucaaugcaugaguguaacacgaagugucaaacaccccugggagcuauaaacagcagucucccuuaccagaauauacacccagucacaauaggagagugcccaaaauacgucaggagugccaaauugaggaugguuacaggacuaaggaacauuccguccauucaauccagaggucuauuuggagccauugccgguuuuauugaagggggauggacuggaaugauagauggaugguaugguuaucaucaucagaaugaacagggaucaggcuaugcagcggaucaaaaaagcacacaaaaugccauuaacgggauuacaaacaaggugaacacuguuaucgagaaaaugaacauucaauucacagcuguggguaaagaauucaacaaauuagaaaaaaggauggaaaauuuaaauaaaaaaguugaugauggauuucuggacauuuggacauauaaugcagaauuguuaguucuacuggaaaaugaaaggacucuggauuuccaugacucaaaugugaagaaucuguaugagaaaguaaaaagccaauuaaagaauaaugccaaagaaaucggaaauggauguuuugaguucuaccacaagugugacaaugaaugcauggaaaguguaagaaaugggacuuaugauuaucccaaauauucagaagagucaaaguugaacagggaaaagguagauggagugaaauuggaaucaauggggaucuaucagauucuggcgaucuacucaacugucgccaguucacuggugcuuuuggucucccugggggcaaucaguuucuggauguguucuaauggaucuuugcagugcagaauaugcaucuga

SEQ ID NO: 38574 - RNA, 1698 nt, Artificial Sequence
  derived and/or modified CDS sequence (wt) from hemagglutinin__InfluenzaA__ADX99702
augaaggcaaaccuacugguccuguuaugugcacuugcagcugcagaugcagacacaauauguauaggcuaccaugcgaacaauucaaccgacacuguugacacaguacucgagaagaaugugacagugacacacucuguuaaccugcucgaagacagccacaacggaaaacuauguagauuaaaaggaauagccccacuacaauuggggaaauguaacaucgccggauggcucuugggaaacccagaaugcgacccacugcuuccagugagaucaugguccuacauuguagaaacaccaaacucugagaauggaauauguuauccaggagauuucaucgacuaugaggagcugagggagcaauugagcucagugucaucauucgaaagauucgaaauauuucccaaagaaagcucauggcccaaccacaacacaaacggaguaacggcagcaugcucccaugaggggaaaagcaguuuuuacagaaauuugcuauggcugacggagaaggagggcucauacccaaagcugaaaaaaucuuaugugaacaaaaaagggaaagaaguccuuguacugugggguauucaucacccgccuaacaguaaggaacaacagaaucucuaucagaaugaaaaugcuuaugucucuguagugacuucaaauuauaacaggagauuuaccccggaaauagcagaaagacccaaaguaagagaucaagcugggaggaugaacuauuacuggaccuugcuaaaacccggagacacaauaauauuugaggcaaauggaaaucuaauagcaccaauguaugcuuucgcacugaguagaggcuuuggguccggcaucaucaccucaaacgcaucaaugcaugaguguaacacgaagugucaaacaccccugggagcuauaaacagcagucucccuuaccagaauauacacccagucacaauaggagagugcccaaaauacgucaggagugccaaauugaggaugguuacaggacuaaggaacauuccguccauucaauccagaggucuauuuggagccauugccgguuuuauugaagggggauggacuggaaugauagauggaugguaugguuaucaucaucagaaugaacagggaucaggcuaugcagcggaucaaaaaagcacacaaaaugccauuaacgggauuacaaacaaggugaacacuguuaucgagaaaaugaacauucaauucacagcuguggguaaagaauucaacaaauuagaaaaaaggauggaaaauuuaaauaaaaaaguugaugauggauuucuggacauuuggacauauaaugcagaauuguuaguucuacuggaaaaugaaaggacucuggauuuccaugacucaaaugugaagaaucuguaugagaaaguaaaaagccaauuaaagaauaaugccaaagaaaucggaaauggauguuuugaguucuaccacaagugugacaaugaaugcauggaaaguguaagaaaugggacuuaugauuaucccaaauauucagaagagucaaaguugaacagggaaaagguagauggagugaaauuggaaucaauggggaucuaucagauucuggcgaucuacucaacugucgccaguucacuggugcuuuuggucucccugggggcaaucaguuucuggauguguucuaauggaucuuugcagugcagaauaugcaucuga

SEQ ID NO: 38575 - RNA, 1698 nt, Artificial Sequence
  derived and/or modified CDS sequence (wt) from hemagglutinin__InfluenzaA__ADX99843
augaaggcaaaccuacugguccuguuaugugcacuugcagcugcagaugcagacacaauauguauaggcuaccaugcgaacaauucaaccgacacuguugacacaguacucgagaagaaugugacagugacacacucuguuaaccugcucgaagacagccacaacggaaaacuauguagauuaaaaggaauagccccacuacaauuggggaaauguaacaucgccggauggcucuugggaaacccagaaugcgacccacugcuuccagugagaucaugguccuacauuguagaaacaccaaacucugagaauggaauauguuauccaggagauuucaucgacuaugaggagcugagggagcaauugagcucagugucaucauucgaaagauucgaaauauuucccaaagaaagcucauggcccaaccacaacacaaacggaguaacggcagcaugcucccaugaggggaaaagcaguuuuuacagaaauuugcuauggcugacggagaaggagggcucauacccaaagcugaaaaagucuuaugugaacaaaaaagggaaagaaguccuuguacugugggguauucaucacccgccuaacaguaaggaacaacagaaucucuaucagaaugaaaaugcuuaugucucuguagugacuucaaauuauaacaggagauuuaccccggaaauagcagaaagacccaaaguaagagaucaagcugggaggaugaacuauuacuggaccuugcuaaaacccggagacacaauaauauuugaggcaaauggaaaucuaauagcaccaauguaugcuuucgcacugaguagaggcuuuggguccggcaucaucaccucaaacgcaucaaugcaugaguguaacacgaagugucaaacaccccugggagcuauaaacagcagucucccuuaccagaauauacacccagucacaauaggagagugcccaaaauacgucaggagugccaaauugaggaugguuacaggacuaaggaacauuccguccauucaauccagaggucuauuuggagccauugccgguuuuauugaagggggauggacuggaaugauagauggaugguaugguuaucaucaucagaaugaacagggaucaggcuaugcagcggaucaaaaaagcacacaaaaugccauuaacgggauuacaaacaaggugaacacuguuaucgagaaaaugaacauucaauucacagcuguggguaaagaauucaacaaauuagaaaaaaggauggaaaauuuaaauaaaaaaguugaugauggauuucuggacauuuggacauauaaugcagaauuguuaguucuacuggaaaaugaaaggacucuggauuuccaugacucaaaugugaagaaucuguaugagaaaguaaaaagccaauuaaagaauaaugccaaagaaaucggaaauggauguuuugaguucuaccacaagugugacaaugaaugcauggaaaguguaagaaaugggacuuaugauuaucccaaauauucagaagagucaaaguugaacagggaaaagguagauggagugaaauuggaaucaauggggaucuaucagauucuggcgaucuacucaacugucgccaguucacuggugcuuuuggucucccugggggcaaucaguuucuggauguguucuaauggaucuuugcagugcagaauaugcaucuga

SEQ ID NO: 38576 - RNA, 1698 nt, Artificial Sequence
  derived and/or modified CDS sequence (wt) from hemagglutinin__InfluenzaA__ADX99854
augaaggcaaaccuacugguccuguuaugugcacuugcagcugcagaugcagacacaauauguauaggcuaccaugcgaacaauucaaccgacacuguugacacaguacucgagaagaaugugacagugacacacucuguuaaccugcucgaagacagccacaacggaaaacuauguagauuaaaaggaauagccccacuacaauuggggaaauguaacaucgccggauggcucuugggaaacccagaaugcgacccacugcuuccagugagaucaugguccuacauuguagaaacaccaaacucugagaauggaauauguuauccaggagauuucaucgacuaugaggagcugagggagcaauugagcucagugucaucauucgaaagauucgaaauauuucccaaagaaagcucauggcccaaccacaacacaaacggaguaacggcagcaugcucccaugaggggaaaagcaguuuuuacagaaauuugcuauggcugacggagaaggagggcucauaccuaaagcugaaaaauucuuaugugaacaaaaaagggaaagaaguccuuguacugugggguauucaucacccgccuaacaguaaggaacaacagaaucucuaucagaaugaaaaugcuuaugucucuguagugacuucaaauuauaacaggagauuuaccccggaaauagcagaaagacccaaaguaagagaucaagcugggaggaugaacuauuacuggaccuugcuaaaacccggagacacaauaauauuugaggcaaauggaaaucuaauagcaccaauguaugcuuucgcacugaguagaggcuuuggguccggcaucaucaccucaaacgcaucaaugcaugaguguaacacgaagugucaaacaccccugggagcuauaaacagcagucucccuuaccagaauauacacccagucacaauaggagagugcccaaaauacgucaggagugccaaauugaggaugguuacaggacuaaggaacauuccguccauucaauccagaggucuauuuggagccauugccgguuuuauugaagggggauggacuggaaugauagauggaugguaugguuaucaucaucagaaugaacagggaucaggcuaugcagcggaucaaaaaagcacacaaaaugccauuaacgggauuacaaacaaggugaacacuguuaucgagaaaaugaacauucaauucacagcuguggguaaagaauucaacaaauuagaaaaaaggauggaaaauuuaaauaaaaaaguugaugauggauuucuggacauuuggacauauaaugcagaauuguuaguucuacuggaaaaugaaaggacucuggauuuccaugacucaaaugugaagaaucuguaugagaaaguaaaaagccaauuaaagaauaaugccaaagaaaucggaaauggauguuuugaguucuaccacaagugugacaaugaaugcauggaaaguguaagaaaugggacuuaugauuaucccaaauauucagaagagucaaaguugaacagggaaaagguagauggagugaaauuggaaucaauggggaucuaucagauucuggcgaucuacucaacugucgccaguucacuggugcuuuuggucucccugggggcaaucaguuucuggauguguucuaauggaucuuugcagugcagaauaugcaucuga

SEQ ID NO: 38577 - RNA, 1698 nt, Artificial Sequence
  derived and/or modified CDS sequence (wt) from hemagglutinin__InfluenzaA__ADX99865
augaaggcaaaccuacugguccuguuaugugcacuugcagcugcagaugcagacacaauauguauaggcuaccaugcgaacaauucaaccgacacuguugacacaguacucgagaagaaugugacagugacacacucuguuaaccugcucgaagacagccacaacggaaaacuauguagauuaaaaggaauagccccacuacaauuggggaaauguaacaucgccggauggcucuugggaaacccagaaugcgacccacugcuuccagugagaucaugguccuacauuguagaaacaccaaacucugagaauggaauauguuauccaggagauuucaucgacuaugaggagcugagggagcaauugagcucagugucaucauucgaaagauucgaaauauuucccaaagaaagcucauggcccaaccacaacacaaacggaguaacggcagcaugcucccaugaggggaaaagcaguuuuuacagaaauuugcuauggcugacggagaaggagggcucauacccaaagcagaaaaauucuuaugugaacaaaaaagggaaagaaguccuuguacugugggguauucaucacccgccuaacaguaaggaacaacagaaucucuaucagaaugaaaaugcuuaugucucuguagugacuucaaauuauaacaggagauuuaccccggaaauagcagaaagacccaaaguaagagaucaagcugggaggaugaacuauuacuggaccuugcuaaaacccggagacacaauaauauuugaggcaaauggaaaucuaauagcaccaauguaugcuuucgcacugaguagaggcuuuggguccggcaucaucaccucaaacgcaucaaugcaugaguguaacacgaagugucaaacaccccugggagcuauaaacagcagucucccuuaccagaauauacacccagucacaauaggagagugcccaaaauacgucaggagugccaaauugaggaugguuacaggacuaaggaacauuccguccauucaauccagaggucuauuuggagccauugccgguuuuauugaagggggauggacuggaaugauagauggaugguaugguuaucaucaucagaaugaacagggaucaggcuaugcagcggaucaaaaaagcacacaaaaugccauuaacgggauuacaaacaaggugaacacuguuaucgagaaaaugaacauucaauucacagcuguggguaaagaauucaacaaauuagaaaaaaggauggaaaauuuaaauaaaaaaguugaugauggauuucuggacauuuggacauauaaugcagaauuguuaguucuacuggaaaaugaaaggacucuggauuuccaugacucaaaugugaagaaucuguaugagaaaguaaaaagccaauuaaagaauaaugccaaagaaaucggaaauggauguuuugaguucuaccacaagugugacaaugaaugcauggaaaguguaagaaaugggacuuaugauuaucccaaauauucagaagagucaaaguugaacagggaaaagguagauggagugaaauuggaaucaauggggaucuaucagauucuggcgaucuacucaacugucgccaguucacuggugcuuuuggucucccugggggcaaucaguuucuggauguguucuaauggaucuuugcagugcagaauaugcaucuga

SEQ ID NO: 38578 - RNA, 1698 nt, Artificial Sequence
  derived and/or modified CDS sequence (wt) from hemagglutinin__InfluenzaA__ADX99887
augaaggcaaaccuacugguccuguuaugugcacuugcagcugcagaugcagacacaauauguauaggcuaccaugcgaacaauucaaccgacacuguugacacaguacucgagaagaaugugacagugacacacucuguuaaccugcucgaagacagccacaacggaaaacuauguagauuaaaaggaauagccccacuacaauuggggaaauguaacaucgccggauggcucuugggaaacccagaaugcgacccacugcuuccagugagaucaugguccuacauuguagaaacaccaaacucugagaauggaauauguuauccaggagauuucaucgacuaugaggagcugagggagcaauugagcucagugucaucauucgaaagauucgaaauauuucccaaagaaagcucauggcccaaccacaacacaaacggaguaacggcagcaugcucccaugaggggaaaagcaguuuuuacagaaauuugcuauggcugacggagaaggagggcucauacccaaagcuggaaaauucuuaugugaacaaaaaagggaaagaaguccuuguacugugggguauucaucacccgccuaacaguaaggaacaacagaaucucuaucagaaugaaaaugcuuaugucucuguagugacuucaaauuauaacaggagauuuaccccggaaauagcagaaagauccaaaguaagagaucaagcugggaggaugaacuauuacuggaccuugcuaaaacccggagacacaauaauauuugaggcaaauggaaaucuaauagcaccaauguaugcuuucgcacugaguagaggcuuuggguccggcaucaucaccucaaacgcaucaaugcaugaguguaacacgaagugucaaacaccccugggagcuauaaacagcagucucccuuaccagaauauacacccagucacaauaggagagugcccaaaauacgucaggagugccaaauugaggaugguuacaggacuaaggaacauuccguccauucaauccagaggucuauuuggagccauugccgguuuuauugaagggggauggacuggaaugauagauggaugguaugguuaucaucaucagaaugaacagggaucaggcuaugcagcggaucaaaaaagcacacaaaaugccauuaacgggauuacaaacaaggugaacacuguuaucgagaaaaugaacauucaauucacagcuguggguaaagaauucaacaaauuagaaaaaaggauggaaaauuuaaauaaaaaaguugaugauggauuucuggacauuuggacauauaaugcagaauuguuaguucuacuggaaaaugaaaggacucuggauuuccaugacucaaaugugaagaaucuguaugagaaaguaaaaagccaauuaaagaauaaugccaaagaaaucggaaauggauguuuugaguucuaccacaagugugacaaugaaugcauggaaaguguaagaaaugggacuuaugauuaucccaaauauucagaagagucaaaguugaacagggaaaagguagauggagugaaauuggaaucaauggggaucuaucagauucuggcgaucuacucaacugucgccaguucacuggugcuuuuggucucccugggggcaaucaguuucuggauguguucuaauggaucuuugcagugcagaauaugcaucuga

SEQ ID NO: 38579 - RNA, 1698 nt, Artificial Sequence
  derived and/or modified CDS sequence (wt) from hemagglutinin__InfluenzaA__ADX99898
augaaggcaaaccuacugguccuguuaugugcacuugcagcugcagaugcagacacaauauguauaggcuaccaugcgaacaauucaaccgacacuguugacacaguacucgagaagaaugugacagugacacacucuguuaaccugcucgaagacagccacaacggaaaacuauguagauuaaaaggaauagccccacuacaauuggggaaauguaacaucgccggauggcucuugggaaacccagaaugcgacccacugcuuccagugagaucaugguccuacauuguagaaacaccaaacucugagaauggaauauguuauccaggagauuucaucgacuaugaggagcugagggagcaauugagcucagugucaucauucgaaagauucgaaauauuucccaaagaaagcucauggcccaaccacaacacaaacggaguaacggcagcaugcucccaugaggggaaaagcaguuuuuacagaaauuugcuauggcugacggagaaggagggcucauacccaaagcugaaaaauuauuaugugaacaaaaaagggaaagaaguccuuguacugugggguauucaucacccgccuaacaguaaggaacaacagaaucucuaucagaaugaaaaugcuuaugucucuguagugacuucaaauuauaacaggagauuuaccccggaaauagcagaaagacccaaaguaagagaucaagcugggaggaugaacuauuacuggaccuugcuaaaacccggagacacaauaauauuugaggcaaauggaaaucuaauagcaccaauguaugcuuucgcacugaguagaggcuuuggguccggcaucaucaccucaaacgcaucaaugcaugaguguaacacgaagugucaaacaccccugggagcuauaaacagcagucucccuuaccagaauauacacccagucacaauaggagagugcccaaaauacgucaggagugccaaauugaggaugguuacaggacuaaggaacauuccguccauucaauccagaggucuauuuggagccauugccgguuuuauugaagggggauggacuggaaugauagauggaugguaugguuaucaucaucagaaugaacagggaucaggcuaugcagcggaucaaaaaagcacacaaaaugccauuaacgggauuacaaacaaggugaacacuguuaucgagaaaaugaacauucaauucacagcuguggguaaagaauucaacaaauuagaaaaaaggauggaaaauuuaaauaaaaaaguugaugauggauuucuggacauuuggacauauaaugcagaauuguuaguucuacuggaaaaugaaaggacucuggauuuccaugacucaaaugugaagaaucuguaugagaaaguaaaaagccaauuaaagaauaaugccaaagaaaucggaaauggauguuuugaguucuaccacaagugugacaaugaaugcauggaaaguguaagaaaugggacuuaugauuaucccaaauauucagaagagucaaaguugaacagggaaaagguagauggagugaaauuggaaucaauggggaucuaucagauucuggcgaucuacucaacugucgccaguucacuggugcuuuuggucucccugggggcaaucaguuucuggauguguucuaauggaucuuugcagugcagaauaugcaucuga

SEQ ID NO: 38580 - RNA, 1698 nt, Artificial Sequence
  derived and/or modified CDS sequence (wt) from hemagglutinin__InfluenzaA__ADX99909
augaaggcaaaccuacugguccuguuaugugcacuugcagcugcagaugcagacacaauauguauaggcuaccaugcgaacaauucaaccgacacuguugacacaguacucgagaagaaugugacagugacacacucuguuaaccugcucgaagacagccacaacggaaaacuauguagauuaaaaggaauagccccacuacaauuggggaaauguaacaucgccggauggcucuugggaaacccagaaugcgacccacugcuuccagugagaucaugguccuacauuguagaaacaccaaacucugagaauggaauauguuauccaggagauuucaucgacuaugaggagcugagggagcaauugagcucagugucaucauucgaaagauucgaaauauuucccaaagaaagcucauggcccaaccacaacacaaacggaguaacggcagcaugcucccaugaggggaaaagcaguuuuuacagaaauuugcuauggcugacggagaaggagggcucauacccaaagcugaaaaauuuuuaugugaacaaaaaagggaaagaaguccuuguacugugggguauucaucacccgccuaacaguaaggaacaacagaaucucuaucagaaugaaaaugcuuaugucucuguagugacuucaaauuauaacaggagauuuaccccggaaauagcagaaagacccaaaguaagagaucaagcugggaggaugaacuauuacuggaccuugcuaaaacccggagacacaauaauauuugaggcaaauggaaaucuaauagcaccaauguaugcuuucgcacugaguagaggcuuuggguccggcaucaucaccucaaacgcaucaaugcaugaguguaacacgaagugucaaacaccccugggagcuauaaacagcagucucccuuaccagaauauacacccagucacaauaggagagugcccaaaauacgucaggagugccaaauugaggaugguuacaggacuaaggaacauuccguccauucaauccagaggucuauuuggagccauugccgguuuuauugaagggggauggacuggaaugauagauggaugguaugguuaucaucaucagaaugaacagggaucaggcuaugcagcggaucaaaaaagcacacaaaaugccauuaacgggauuacaaacaaggugaacacuguuaucgagaaaaugaacauucaauucacagcuguggguaaagaauucaacaaauuagaaaaaaggauggaaaauuuaaauaaaaaaguugaugauggauuucuggacauuuggacauauaaugcagaauuguuaguucuacuggaaaaugaaaggacucuggauuuccaugacucaaaugugaagaaucuguaugagaaaguaaaaagccaauuaaagaauaaugccaaagaaaucggaaauggauguuuugaguucuaccacaagugugacaaugaaugcauggaaaguguaagaaaugggacuuaugauuaucccaaauauucagaagagucaaaguugaacagggaaaagguagauggagugaaauuggaaucaauggggaucuaucagauucuggcgaucuacucaacugucgccaguucacuggugcuuuuggucucccugggggcaaucaguuucuggauguguucuaauggaucuuugcagugcagaauaugcaucuga

SEQ ID NO: 38581 - RNA, 1698 nt, Artificial Sequence; identical to SEQ ID NO: 38580
  derived and/or modified CDS sequence (wt) from hemagglutinin__InfluenzaA__ADX99920

SEQ ID NO: 38582 - RNA, 1698 nt, Artificial Sequence
  derived and/or modified CDS sequence (wt) from hemagglutinin__InfluenzaA__ADX99931
augaaggcaaaccuacugguccuguuaugugcacuugcagcugcagaugcagacacaauauguauaggcuaccaugcgaacaauucaaccgacacuguugacacaguacucgagaagaaugugacagugacacacucuguuaaccugcucgaagacagccacaacggaaaacuauguagauuaaaaggaauagccccacuacaauuggggaaauguaacaucgccggauggcucuugggaaacccagaaugcgacccacugcuuccagugagaucaugguccuacauuguagaaacaccaaacucugagaauggaauauguuauccaggagauuucaucgacuaugaggagcugagggagcaauugagcucagugucaucauucgaaagauucgaaauauuucccaaagaaagcucauggcccaaccacaacacaaacggaguaacggcagcaugcucccaugaggggaaaagcaguuuuuacagaaauuugcuauggcugacggagaaggagggcucauacccaaagcuggaaaauucuuaugugaacaaaaaagggaaagaaguccuuguacugugggguauucaucacccgccuaacaguaaggaacaacagaaucucuaucagaaugaaaaugcuuaugucucuguagugacuucaaauuauaacaggagauuuaccccggaaauagcaggaagacccaaaguaagagaucaagcugggaggaugaacuauuacuggaccuugcuaaaacccggagacacaauaauauuugaggcaaauggaaaucuaauagcaccaauguaugcuuucgcacugaguagaggcuuuggguccggcaucaucaccucaaacgcaucaaugcaugaguguaacacgaagugucaaacaccccugggagcuauaaacagcagucucccuuaccagaauauacacccagucacaauaggagagugcccaaaauacgucaggagugccaaauugaggaugguuacaggacuaaggaacauuccguccauucaauccagaggucuauuuggagccauugccgguuuuauugaagggggauggacuggaaugauagauggaugguaugguuaucaucaucagaaugaacagggaucaggcuaugcagcggaucaaaaaagcacacaaaaugccauuaacgggauuacaaacaaggugaacacuguuaucgagaaaaugaacauucaauucacagcuguggguaaagaauucaacaaauuagaaaaaaggauggaaaauuuaaauaaaaaaguugaugauggauuucuggacauuuggacauauaaugcagaauuguuaguucuacuggaaaaugaaaggacucuggauuuccaugacucaaaugugaagaaucuguaugagaaaguaaaaagccaauuaaagaauaaugccaaagaaaucggaaauagauguuuugaguucuaccacaagugugacaaugaaugcauggaaaguguaagaaaugggacuuaugauuaucccaaauauucagaagagucaaaguugaacagggaaaagguagauggagugaaauuggaaucaauggggaucuaucagauucuggcgaucuacucaacugucgccaguucacuggugcuuuuggucucccugggggcaaucaguuucuggauguguucuaauggaucuuugcagugcagaauaugcaucuga

SEQ ID NO: 38583 - RNA, 1698 nt, Artificial Sequence
  derived and/or modified CDS sequence (wt) from hemagglutinin__InfluenzaA__ADX99964
augaaggcaaaccuacugguccuguuaugugcacuugcagcugcagaugcagacacaauauguauaggcuaccaugcgaacaauucaaccgacacuguugacacaguacucgagaagaaugugacagugacacacucuguuaaccugcucgaagacagccacaacggaaaacuauguagauuaaaaggaauagccccacuacaauuggggaaauguaacaucgccggauggcucuugggaaacccagaaugcgacccacugcuuccagugagaucaugguccuacauuguagaaacaccaaacucugagaauggaauauguuauccaggagauuucaucgacuaugaggagcugagggagcaauugagcucagugucaucauucgaaagauucgaaauauuucccaaagaaagcucauggcccaaacacaacacaaacggaguaacggcagcaugcucccaugaggggaaaagcaguuuuuacagaaauuugcuauggcugacggagaaggagggcucauacccaaagcugaaaaauucuuaugugaacaaaaaagggaaagaaguccuuguacugugggguauucaucacccgccuaacaguaaggaacaacagaaucucuaucagaaugaaaaugcuuaugucucuguagugacuucaaauuauaacaggagauuuaccccggaaauagcagaaagacccaaaguaagagaucaagcugggaggaugaacuauuacuggaccuugcuaaaacccggagacacaauaauauuugaggcaaauggaaaucuaauagcaccaauguaugcuuucgcacugaguagaggcuuuggguccggcaucaucaccucaaacgcaucaaugcaugaguguaacacgaagugucaaacaccccugggagcuauaaacagcagucucccuuaccagaauauacacccagucacaauaggagagugcccaaaauacgucaggagugccaaauugaggaugguuacaggacuaaggaacauuccguccauucaauccagaggucuauuuggagccauugccgguuuuauugaagggggauggacuggaaugauagauggaugguaugguuaucaucaucagaaugaacagggaucaggcuaugcagcggaucaaaaaagcacacaaaaugccauuaacgggauuacaaacaaggugaacacuguuaucgagaaaaugaacauucaauucacagcuguggguaaagaauucaacaaauuagaaaaaaggauggaaaauuuaaauaaaaaaguugaugauggauuucuggacauuuggacauauaaugcagaauuguuaguucuacuggaaaaugaaaggacucuggauuuccaugacucaaaugugaagaaucuguaugagaaaguaaaaagccaauuaaagaauaaugccaaagaaaucggaaauggauguuuugaguucuaccacaagugugacaaugaaugcauggaaaguguaagaaaugggacuuaugauuaucccaaauauucagaagagucaaaguugaacagggaaaagguagauggagugaaauuggaaucaauggggaucuaucagauucuggcgaucuacucaacugucgccaguucacuggugcuuuuggucucccugggggcaaucaguuucuggauguguucuaauggaucuuugcagugcagaauaugcaucuga

SEQ ID NO: 38584 - RNA, 1698 nt, Artificial Sequence
  derived and/or modified CDS sequence (wt) from hemagglutinin__InfluenzaA__ADX99975
augaaggcaaaccuacugguccuguuaugugcacuugcagcugcagaugcagacacaauauguauaggcuaccaugcgaacaauucaaccgacacuguugacacaguacucgagaagaaugugacagugacacacucuguuaaccugcucgaagacagccacaacggaaaacuauguagauuaaaaggaauagccccacuacaauuggggaaauguaacaucgccggauggcucuugggaaacccagaaugcgacccacugcuuccagugagaucaugguccuacauuguagaaacaccaaacucugagaauggaauauguuauccaggagauuucaucgacuaugaggagcugagggagcaauugagcucagugucaucauucgaaagauucgaaauauuucccaaagaaagcucauggcccaaccacaacacaaacggaguaacggcaacaugcucccaugaggggaaaagcaguuuuuacagaaauuugcuauggcugacggagaaggagggcucauacccagagcugaaaaauucuuaugugaacaaaaaagggaaagaaguccuuguacugugggguauucaucacccgccuaacaguaaggaacaacagaaucucuaucagaaugaaaaugcuuaugucucuguagugacuucaaauuauaacaggagauuuaccccggaaauagcagaaagacccaaaguaagagaucaagcugggaggaugaacuauuacuggaccuugcuaaaacccggagacacaauaauauuugaggcaaauggaaaucuaauagcaccaauguaugcuuucgcacugaguagaggcuuuggguccggcaucaucaccucaaacgcaucaaugcaugaguguaacacgaagugucaaacaccccugggagcuauaaacagcagucucccuuaccagaauauacacccagucacaauaggagagugcccaaaauacgucaggagugccaaauugaggaugguuacaggacuaaggaacauuccguccauucaauccagaggucuauuuggagccauugccgguuuuauugaagggggauggacuggaaugauagauggaugguaugguuaucaucaucagaaugaacagggaucaggcuaugcagcggaucaaaaaagcacacaaaaugccauuaacgggauuacaaacaaggugaacacuguuaucgagaaaaugaacauucaauucacagcuguggguaaagaauucaacaaauuagaaaaaaggauggaaaauuuaaauaaaaaaguugaugauggauuucuggacauuuggacauauaaugcagaauuguuaguucuacuggaaaaugaaaggacucuggauuuccaugacucaaaugugaagaaucuguaugagaaaguaaaaagccaauuaaagaauaaugccaaagaaaucggaaauggauguuuugaguucuaccacaagugugacaaugaaugcauggaaaguguaagaaaugggacuuaugauuaucccaaauauucagaagagucaaaguugaacagggaaaagguagauggagugaaauuggaaucaauggggaucuaucagauucuggcgaucuacucaacugucgccaguucacuggugcuuuuggucucccugggggcaaucaguuucuggauguguucuaauggaucuuugcagugcagaauaugcaucuga

SEQ ID NO: 38585 - RNA, 1698 nt, Artificial Sequence
  derived and/or modified CDS sequence (wt) from hemagglutinin__InfluenzaA__ADX99986
augaaggcaaaccuacugguccuguuaugugcacuugcagcugcagaugcagacacaauauguauaggcuaccaugcgaacaauucaaccgacacuguugacacaguacucgagaagaaugugacagugacacacucuguuaaccugcucgaagacagccacaacggaaaacuauguagauuaaaaggaauagccccacuacaauuggggaaauguaacaucgccggauggcucuugggaaacccaaaaugcgacccacugcuuccagugagaucaugguccuacauuguagaaacaccaaacucugagaauggaauauguuauccaggagauuucaucgacuaugaggagcugagggagcaauugagcucagugucaucauucgaaagauucgaaauauuucccaaagaaagcucauggcccaaccacaacacaaacggaguaacggcagcaugcucccaugaggggaaaagcaguuuuuacagaaauuugcuauggcugacggagaaggagggcucauacccaaagcuggaaaauucuuaugugaacaaaaaagggaaagaaguccuuguacugugggguauucaucacccgccuaacaguaaggaacaacagaaucucuaucagaaugaaaaugcuuaugucucuguagugacuucaaauuauaacaggagauuuaccccggaaauagcagaaagacccaaaguaagagaucaagcugggaggaugaacuauuacuggaccuugcuaaaacccggagacacaauaauauuugaggcaaauggaaaucuaauagcaccaauguaugcuuucgcacugaguagaggcuuuggguccggcaucaucaccucaaacgcaucaaugcaugaguguaacacgaagugucaaacaccccugggagcuauaaacagcagucucccuuaccagaauauacacccagucacaauaggagagugcccaaaauacgucaggagugccaaauugaggaugguuacaggacuaaggaacauuccguccauucaauccagaggucuauuuggagccauugccgguuuuauugaagggggauggacuggaaugauagauggaugguaugguuaucaucaucagaaugaacagggaucaggcuaugcagcggaucaaaaaagcacacaaaaugccauuaacgggauuacaaacaaggugaacacuguuaucgagaaaaugaacauucaauucacagcuguggguaaagaauucaacaaauuagaaaaaaggauggaaaauuuaaauaaaaaaguugaugauggauuucuggacauuuggacauauaaugcagaauuguuaguucuacuggaaaaugaaaggacucuggauuuccaugacucaaaugugaagaaucuguaugagaaaguaaaaagccaauuaaagaauaaugccaaagaaaucggaaauggauguuuugaguucuaccacaagugugacaaugaaugcauggaaaguguaagaaaugggacuuaugauuaucccaaauauucagaagagucaaaguugaacagggaaaagguagauggagugaaauuggaaucaauggggaucuaucagauucuggcgaucuacucaacugucgccaguucacuggugcuuuuggucucccugggggcaaucaguuucuggauguguucuaauggaucuuugcagugcagaauaugcaucuga

SEQ ID NO: 38586 - RNA, 1698 nt, Artificial Sequence
  derived and/or modified CDS sequence (wt) from hemagglutinin__InfluenzaA__ADX99997
augaaggcaaaccuacugguccuguuaugugcacuugcagcugcagaugcagacacaauauguauaggcuaccaugcgaacaauucaaccgacacuguugacacaguacucgagaagaaugugacagugacacacucuguuaaccugcucgaagacagccacaacggaaaacuauguagauuaaaaggaauagccccacuacaauuggggaaauguaacaucgccggauggcucuugggaaacccagaaugcgacccacugcuuccagugagaucaugguccuacauuguagaaacaccaaacucugagaauggaauauguuauccaggagauuucaucgacuaugaggagcugagggagcaauugagcucagugucaucauucgaaagauucgaaauauuucccaaagaaagcucauggcccaaccacaacacaaacggaguaacggcagcaugcucccaugaggggaaaagcaguuuuuacagaaauuugcuauggcugacggagaaggagggcucauacccaaagcuggaaaauucuuaugugaacaaaaaagggaaagaaguccuuguacugugggguauucaucacccgccuaacaguaaggaacaacagaaucucuaucagaaugaaaaugcuuaugucucuguagugacuucaaauuauaacaggagauuuaccccggaaauagcagaaagacccaaaguaagagaucaagcugggaggaugaaauauuacuggaccuugcuaaaacccggagacacaauaauauuugaggcaaauggaaaucuaauagcaccaauguaugcuuucgcacugaguagaggcuuuggguccggcaucaucaccucaaacgcaucaaugcaugaguguaacacgaagugucaaacaccccugggagcuauaaacagcagucucccuuaccagaauauacacccagucacaauaggagagugcccaaaauacgucaggagugccaaauugaggaugguuacaggacuaaggaacauuccguccauucaauccagaggucuauuuggagccauugccgguuuuauugaagggggauggacuggaaugauagauggaugguaugguuaucaucaucagaaugaacagggaucaggcuaugcagcggaucaaaaaagcacacaaaaugccauuaacgggauuacaaacaaggugaacacuguuaucgagaaaaugaacauucaauucacagcuguggguaaagaauucaacaaauuagaaaaaaggauggaaaauuuaaauaaaaaaguugaugauggauuucuggacauuuggacauauaaugcagaauuguuaguucuacuggaaaaugaaaggacucuggauuuccaugacucaaaugugaagaaucuguaugagaaaguaaaaagccaauuaaagaauaaugccaaagaaaucggaaauggauguuuugaguucuaccacaagugugacaaugaaugcauggaaaguguaagaaaugggacuuaugauuaucccaaauauucagaagagucaaaguugaacagggaaaagguagauggagugaaauuggaaucaauggggaucuaucagauucuggcgaucuacucaacugucgccaguucacuggugcuuuuggucucccugggggcaaucaguuucuggauguguucuaauggaucuuugcagugcagaauaugcaucuga

SEQ ID NO: 38587 - RNA, 1698 nt, Artificial Sequence
  derived and/or modified CDS sequence (wt) from hemagglutinin__InfluenzaA__ADY00009
augaaggcaaaccuacugguccuguuaugugcacuugcagcugcagaugcagacacaauauguauaggcuaccaugcgaacaauucaaccgacacuguugacacaguacucgagaagaaugugacagugacacacucuguuaaccugcucgaagacagccacaacggaaaacuauguagauuaaaaggaauagccccacuacaauuggggaaauguaacaucgccggauggcucuugggaaacccagaaugcgacccacugcuuccagugagaucaugguccuacauuguagaaacaccaaacucugagaauggaauauguuauccaggagauuucaucgacuaugaggagcugagggagcaauugagcucagugucaucauucgaaagauucgaaauauuucccaaagaaagcucauggcccaaccacaacacaaacggaguaacggcagcaugcucccaugaggggaaaagcaguuuuuacagaaauuugcuauggcugacggagaagaagggcucauacccaaagcuggaaaauucuuaugugaacaaaaaagggaaagaaguccuuguacugugggguauucaucacccgccuaacaguaaggaacaacagaaucucuaucagaaugaaaaugcuuaugucucuguagugacuucaaauuauaacaggagauuuaccccggaaauagcagaaagacccaaaguaagagaucaagcugggaggaugaacuauuacuggaccuugcuaaaacccggagacacaauaauauuugaggcaaauggaaaucuaauagcaccaauguaugcuuucgcacugaguagaggcuuuggguccggcaucaucaccucaaacgcaucaaugcaugaguguaacacgaagugucaaacaccccugggagcuauaaacagcagucucccuuaccagaauauacacccagucacaauaggagagugcccaaaauacgucaggagugccaaauugaggaugguuacaggacuaaggaacauuccguccauucaauccagaggucuauuuggagccauugccgguuuuauugaagggggauggacuggaaugauagauggaugguaugguuaucaucaucagaaugaacagggaucaggcuaugcagcggaucaaaaaagcacacaaaaugccauuaacgggauuacaaacaaggugaacacuguuaucgagaaaaugaacauucaauucacagcuguggguaaagaauucaacaaauuagaaaaaaggauggaaaauuuaaauaaaaaaguugaugauggauuucuggacauuuggacauauaaugcagaauuguuaguucuacuggaaaaugaaaggacucuggauuuccaugacucaaaugugaagaaucuguaugagaaaguaaaaagccaauuaaagaauaaugccaaagaaaucggaaauggauguuuugaguucuaccacaagugugacaaugaaugcauggaaaguguaagaaaugggacuuaugauuaucccaaauauucagaagagucaaaguugaacagggaaaagguagauggagugaaauuggaaucaauggggaucuaucagauucuggcgaucuacucaacugucgccaguucacuggugcuuuuggucucccugggggcaaucaguuucuggauguguucuaauggaucuuugcagugcagaauaugcaucuga

SEQ ID NO: 38588 - RNA, 1698 nt, Artificial Sequence; identical to SEQ ID NO: 35290
  derived and/or modified CDS sequence (wt) from hemagglutinin__InfluenzaA__ADY00020

SEQ ID NO: 38589 - RNA, 1698 nt, Artificial Sequence
  derived and/or modified CDS sequence (wt) from hemagglutinin__InfluenzaA__ADY04727
augaaagcaaaacuacugguccuguuauguacauuuacagcuacauacgcagacacaauauguauaggcuaccaugccaacaacucaaccgacacuguugacacaguacuugagaagaaugugacagugacacacucugucaaccuacuugaggacagucacaauggaaaacuaugucuacuaaaaggaauagccccacuacaauuggguaauugcagcguugccggauggaucuuaggaaacccagaaugcgaauuacugauuuccaaggaaucaugguccuacauuguagaaacaccaaaucccgagaauggaacauguuacccaggguauuucgccgacuaugaggaacugagggagcaauugaguucaguaucuucauuugagagauucgaaauauuccccaaaggaagcucauggcccaaccacaccgugaccggaguaucagcaucaugcucccauaaugggaaaagcaguuuuuacagaaauuugcuauggcugacggggaaaaaugguuuguacccaaaccugagcauguccuauguaaacaacaaagaaaaagaaguccuugugcuaugggguguucaucacccaccuaacauagggaaccaaagggcccucuaccauacagaaaaugcuuaugucucuguagugucuucacauuauagcagaagauucaccccagaaauagccaaaagacccaaaguaagagaucaggaaggaagaaucaacuacuacuggacucugcuggaacccggggacacaauaauauuugaggcaaauggaaaucuaauagcgccaugguaugcuuucgcacugaguagaggcuuuggaucaggaaucaucaccucaaaugcaccaaugggugaaugugaugcgaagugucaaacaccucagggagcuauaaacaguagucuuccuuuccagaauguacacccaguuacaauaggagaguguccaaaguaugucaggagugcaaaauuaaggaugguuacaggacuaaggaacaucccauccauucaauccagagguuuguuuggagccauugccgguuucauugaaggaggguggacuggaaugguagaugggugguaugguuaucaucaucagaaugagcaaggaucuggcuaugcugcagaucaaaaaagcacacaaaaugccauuaacgggauuacaaacaaggugaauucuguaauugagaaaaugaacacucaauucacagcugugggcaaagaauucaacaaauuagaaagaaggauggaaaacuuaaauaaaaaaguugaugauggguuucuagacauuuggacauauaaugcagaauuguugguucuacuggaaaaugaaaggacuuuggauuuccaugacuccaauuugaagaaucuguaugagaaaguaaaaagccaauuaaagaauaaugccaaagaaauaggaaacggguguuuugaauucuaucacaaguguaacaaugaaugcauggaaagugugaaaaauggaacuuaugacuauccaaaauauuccgaagaaucaaaguuaaacagggagaaaauugauggaguaaaauuggaaucaaugggagucuaucagauucuggcgaucuacucaacugucgccaguucccugguucuuuuggucucccugggggcaaucagcuucuggauguguuccaaugggucuuugcaguguagaauaugcaucuga

SEQ ID NO: 38590 - RNA, 1701 nt, Artificial Sequence; identical to SEQ ID NO: 35625
  derived and/or modified CDS sequence (wt) from hemagglutinin__InfluenzaA__ADY11836

SEQ ID NO: 38591 - RNA, 1701 nt, Artificial Sequence; identical to SEQ ID NO: 35602
  derived and/or modified CDS sequence (wt) from hemagglutinin__InfluenzaA__ADY17654

SEQ ID NO: 38592 - RNA, 1701 nt, Artificial Sequence
  derived and/or modified CDS sequence (wt) from hemagglutinin__InfluenzaA__ADY17665
augaagacuaucauugcuuugagcuacauucuaugucugauuuucgcucaaaaacuuccuggaaaugacaacagcacggcaacgcugugccuugggcaccaugcaguaccaaacggaacgauagugaaaacaaucacgaaugaccaaauugaaguuacuaaugcuacugagcugguucagaguuccucaacaggugaaauaugcgacaguccucaucagauccuugauggaaaaaacugcacacuaauagaugcucuauugggagacccucagugugauggcuuccaaaauaagaaaugggaccuuuuuguugaacgcagcaaagccuacagcaacuguuacccuuaugaugugccggauuaugccucccuuaggucacuaguugccucauccggcacacuggaguuuaacaaugaaagcuucaauuggacuggagucacucaagacggaacaagcucugcuugcauaaggagaucuaaaaacaguuucuuuaguagauugaauugguugacccacuuaaacuucaaauacccagcauuaaacgugacuaugccaaacaaugaacaauuugacaaauuguacauuugggggguucaccacccggguacggacaaagaccaaaucuuccuguaugcucaagcaucaggaagaaucacagucucuaccaaaagaagccaacaaacugcaaucccgaauaucggaucuagacccagaguaaggaauaucccuagcagaauaagcaucuauuggacaauaguaaaaccgggagacauacuuuugauuaacagcacagggaaucuaauugcuccuagggguuacuucaaaauacgaagugggaaaagcucaauaaugagaucagaugcacccauuggcaaaugcaauucugaaugcaucacuccaaauggaagcauucccaaugacaaaccauuccaaaauguaaacaggaucacauacggggccugucccagauauguuaagcaaaacacucugaaauuggcaacagggaugcgaaauguaccagagaaacaaacuagaggcauauuuggcgcaaucgcggguuucauagaaaaugguugggagggaaugguggaugguugguacgguuucaggcaucaaaauucugagggaagaggacaagcagcagaucucaaaagcacucaagcagcaaucgaucaaaucaaugggaagcugaauagauugaucgggaaaaccaacgagaaauuccaucagauugaaaaagaauucucagaagucgaagggagaauucaggaccuugagaaauauguugaggacacuaaaauagaucucuggucauacaacgcggagcuucuuguugcccuggagaaccaacauacaauugaucuaacugacucagaaaugaacaaacuguuugaaaaaacaaagaagcaacugagggaaaaugcugaggauaugggcaaugguuguuucaaaauauaccacaaaugugacaaugccugcauaggaucaaucagaaauggaacuuaugaccacgauguauacagagaugaagcauuaaacaaccgguuucagaucaagggaguugagcugaagucaggguacaaagauuggauccuauggauuuccuuugccauaucauguuuuuugcuuuguguugcuuuguugggguucaucaugugggccugccaaaaaggcaacauuaggugcaacauuugcauuuga

SEQ ID NO: 38593 - RNA, 1701 nt, Artificial Sequence; identical to SEQ ID NO: 35625
  derived and/or modified CDS sequence (wt) from hemagglutinin__InfluenzaA__ADY17676

SEQ ID NO: 38594 - RNA, 1701 nt, Artificial Sequence
  derived and/or modified CDS sequence (wt) from hemagglutinin__InfluenzaA__ADY17687
augaagacuaucauugcuuugagcuacauucuaugucugguuuucgcucaaaaacuuccuggaaaugacaacagcacggcaacgcugugccuugggcaccaugcaguaccaaacggaacgauagugaaaacaaucacgaaugaccaaauugaaguuacuaaugcuacugagcugguucagaguuccucaacaggugaaauaugcgacaguccucaucagauccuugauggaaaaaacugcacacuaauagaugcucuauugggagacccucagugugauggcuuccaaaauaagaaaugggaccuuuuuguugaacgcagcaaagccuacagcaacuguuacccuuaugaugugccggauuaugccucccuuaggucacuaguugccucauccggcacacuggaguuuaacaaugaaagcuucaauuggacuggagucacucaagacggaacaagcucugcuugcauaaggagaucuaaaaacaguuucuuuaguagauugaauugguugacccacuuaaacuucaaauacccagcauugaacgugacuaugccaaacaaugaacaauuugacaaauuguacauuugggggguucaccacccggguacggacaaagaccaaaucuuccuguaugcucaagcaucaggaagaaucacagucucuaccaaaagaagccaacaaacugcaaucccgaauaucggaucuagacccagaguaaggaauaucccuagcagaauaagcaucuauuggacaauaguaaaaccgggagacauacuuuugauuaacagcacagggaaucuaauugcuccuagggguuacuucaaaauacgaagugggaaaagcucaauaaugagaucagaugcacccauuggcaaaugcaauucugaaugcaucacuccaaauggaagcauucccaaugacaaaccauuccaaaauguaaacaggaucacauauggggccugucccagauauguuaagcaaaacacucugaaauuggcaacagggaugcgaaauguaccagagaaacaaacuagaggcauauuuggcgcaaucgcggguuucauagaaaaugguugggagggaaugguggaugguugguacgguuucaggcaucaaaauucugagggaagaggacaagcagcagaucucaaaagcacucaagcagcaaucgaucaaaucaaugggaagcugaauagauugaucgggaaaaccaacgagaaauuccaucagauugaaaaagaauucucagaagucgaagggagaauucaggaccuugagaaauauguugaggacacuaaaauagaucucuggucauacaacgcggagcuucuuguugcccuggagaaccaacauacaauugaucuaacugacucagaaaugaacaaacuguuugaaaaaacaaagaagcaacugagggaaaaugcugaggauaugggcaaugguuguuucaaaauauaccacaaaugugacaaugccugcauaggaucaaucagaaauggaacuuaugaccacgauguauacagagaugaagcauuaaacaaccgguuucagaucaagggaguugagcugaagucaggguacaaagauuggauccuauggauuuccuuugccauaucauguuuuuugcuuugugcugcuuuguugggguucaucaugugggccugccaaaaaggcaacauuaggugcaacauuugcauuuga

SEQ ID NO: 38595 - RNA, 1701 nt, Artificial Sequence
  derived and/or modified CDS sequence (wt) from hemagglutinin__InfluenzaA__ADY17698
augaagacuaucauugcuuugagcuacauucuaugucugguuuucgcucaaaaacuuccuggaaaugacaacagcacggcaacgcugugccuugggcaccaugcaguaccaaacggaacgauagugaaaacaaucacgaaugaccaaauugaaguuacuaaugcuacugagcugguucagaguuccucaacaggugaaauaugcgacaguccucaucagauccuugauggaaaaaacugcacacuaauagaugcucuauugggagacccucagugugauggcuuccaaaauaagaaaugggaccuuuuuguugaacgcagcaaagccuacagcaacuguuacccuuaugaugugccggauuaugccucccuuaggucacuaguugccucauccggcacacuggaguuuaacaaugaaagcuucaauuggacuggagucacucaagacggaacaagcucugcuugcauaaggagaucuaaaaacaguuucuuuaguagauugaauugguugacccacuuaaacuucaaauacccagcauugaacgugacuaugccaaacaaugaacaauuugacaaauuguacauuugggggguucaccacccagguacggacaaagaccaaaucuuccuguaugcucaagcaucaggaagaaucacagucucuaccaaaagaagccaacaaacugcaaucccgaauaucggaucuagacccagaguaaggaauaucccuagcagaauaagcaucuauuggacaauaguaaaaccgggagacauacuuuugauuaacagcacagggaaucuaauugcuccuagggguuacuucaaaauacgaagugggaaaagcucaauaaugagaucagaugcacccauuggcaaaugcaauucugaaugcaucacuccaaauggaagcauucccaaugacaaaccauuccaaaauguaaacaggaucacauacggggccugucccagauauguuaagcaaaacacucugaaauuggcaacagggaugcgaaauguaccagagaaacaaacuagaggcauauuuggcgcaaucgcggguuucauagaaaaugguugggagggaaugguggaugguugguacgguuucaggcaucaaaauucugagggaagaggacaagcagcagaucucaaaagcacucaagcagcaaucgaucaaaucaaugggaagcugaauagauugaucgggaaaaccaacgagaaauuccaucagauugaaaaagaauucucagaagucgaagggagaauucaggaccuugagaaauauguugaggacacuaaaauagaucucuggucauacaacgcggagcuucuuguugcccuggagaaccaacacacaauugaucuaacugacucagaaaugaacaaacuguuugaaaaaacaaagaagcaacugagggaaaaugcugaggauaugggcaaugguuguuucaaaauauaccacaaaugugacaaugccugcauaggaucaaucagaaauggaacuuaugaccacgauguauacagagaugaagcauuaaacaaccgguuucagaucaagggaguugagcugaagucaggguacaaagauuggauccuauggauuuccuuugccauaucauguuuuuugcuuuguguugcuuuguugggguucaucaugugggccugccaaaaaggcaacauuaggugcaacauuugcauuuga

SEQ ID NO: 38596 - RNA, 1701 nt, Artificial Sequence
  derived and/or modified CDS sequence (wt) from hemagglutinin__InfluenzaA__ADY38719
augaagacuaucauugcuuugagcuacauucuaugucugguuuucacucaaaaacuuccuggaaaugacaacagcacggcaacgcugugccuugggcaccaugcaguaccaaacggaacgauagugaaaacaaucacgaaugaccaaauugaaguuacgaaugcuacugagcugguucagaguuccucaacaggugaaauaugcgacaguccucaucagauccuugauggaaaaaacugcacacuaauagaugcucuauugggagacccucagugugauggcuuccaaaauaagaaaugggaccuuuuuguugaacgcagcaaagccuacagcaacuguuacccuuaugaugugccggauuaugccucccuuaggucacuaguugccucauccggcacacuggaguuuaacaaugaaagcuucaauuggacuggagucacucaaaacggaacaagcucugcuugcauaaggagaucuaaaaacaguuucuuuaguagauugaauugguugacccacuuaaacuucaaauacccagcauugaacgugacuaugccaaacaaugaacaauuugacaaauuguacauuugggggguucaccacccggguacggacaaagaccaaaucuuccuguaugcucaagcaucaggaagaaucacagucucuaccaaaagaagccaacaaacugcaaucccgaauaucggaucuagacccagaguaaggaauaucccuagcagaauaagcaucuauuggacaauaguaaaaccgggagacauacuuuugauuaacagcacagggaaucuaauugcuccuagggguuacuucaaaauacgaagugggaaaagcucaauaaugagaucagaugcacccauuggcaaaugcaauucugaaugcaucacuccaaauggaagcauucccaaugacaaaccauuccaaaauguaaacaggaucacauacggggccugucccagauauguuaagcaaaacacucugaaauuggcaacagggaugcgaaauguaccagagaaacaaacuagaggcauauuuggcgcaaucgcggguuucauagaaaaugguugggagggaaugguggaugguugguacgguuucaggcaucaaaauucugagggaagaggacaagcagcagaucucaaaagcacucaagcagcaaucgaucaaaucaaugggaagcugaauagauugaucgggaaaaccaacgagaaauuccaucagauugaaaaagaauucucagaagucgaagggagaauucaggaccuugagaaauauguugaggacacuaaaauagaucucuggucauacaacgcggagcuucuuguugcccuggagaaccaacauacaauugaucuaacugacucagaaaugaacaaacuguuugaaaaaacaaagaagcaacugagggaaaaugcugaggauaugggcaaugguuguuucaaaauauaccacaaaugugacaaugccugcauaggaucaaucagaaauggaacuuaugaccacgauguauacagagaugaagcauuaaacaaccgguuucagaucaagggaguugagcugaagucaggguacaaagauuggauccuauggauuuccuuugccauaucauguuuuuugcuuuguguugcuuuguugggguucaucaugugggccugccaaaaaggcaacauuaggugcaacauuugcauuuga

SEQ ID NO: 38597 - RNA, 1701 nt, Artificial Sequence
  derived and/or modified CDS sequence (wt) from hemagglutinin__InfluenzaA__ADY38750
augaaggcaauacuaguaguucugcuauauacauuugcaaccgcaaaugcagacacauuauguauagguuaucaugcgaacaauucaacagacacuguagacacaguacuagaaaagaauguaacaguaacacacucuguuaaccuucuagaagacaagcauaacgggaaacuaugcaaacuaagagggguagccccauugcauuuggguaaauguaacauugcuggcuggauccugggaaauccagagugugaaucacucuccacagcaagcucaugguccuacauuguggaaacaucuaguucagacaauggaacguguuacccaggagauuucaucgauuaugaggagcuaagagagcaauugagcucagugucaucauuugaaagguuugagauauuccccaagacaaguucauggcccaaucaugacucgaacaaagguguaacggcagcauguccucaugcuggagcaaaaagcuucuacaaaaauuuaauauggcuaguuaaaaaaggaaauucauacccaaagcucagcaaauccuacauuaaugauaaagggaaagaaguccucgugcuauggggcauucaccauccaucuacuagugcugaccaacaaagucucuaucagaaugcagaugcauauguuuuuguggggacaucaagauacagcaagaaguucaagccggaaauagcaauaagacccaaagugagggaucaagaagggagaaugaacuauuacuggacacuaguagagccgggagacaaaauaacauucgaagcaacuggaaaucuagugguaccgagauaugcauucgcaauggaaagaaaugcuggaucugguauuaucauuucagauacaccaguccacgauugcaauacaacuugucagacacccaagggugcuauaaacaccagccucccauuucagaauauacauccgaucacaauuggaaaauguccaaaauauguaaaaagcacaaaauugagacuggccacaggauugaggaaugucccgucuauucaaucuagaggccuauuuggggccauugccgguuucauugaagggggguggacagggaugguagauggaugguacgguuaucaccaucaaaaugagcaggggucaggauaugcagccgaccugaagagcacacagaaugccauugacgagauuacuaacaaaguaaauucuguuauugaaaagaugaauacacaguucacagcaguagguaaagaguucaaccaccuggaaaaaagaauagagaauuuaaauaaaaaaguugaugaugguuuccuggacauuuggacuuacaaugccgaacuguugguucuauuggaaaaugaaagaacuuuggacuaccacgauucaaaugugaagaacuuauaugaaaagguaagaagccaguuaaaaaacaaugccaaggaaauuggaaacggcugcuuugaauuuuaccacaaaugcgauaacacgugcauggaaagugucaaaaaugggacuuaugacuacccaaaauacucagaggaagcaaaauuaaacagagaagaaauagauggaguaaagcuggaaucaacaaggauuuaccagauuuuggcgaucuauucaacugucgccaguucauugguacugguagucucccugggggcaaucaguuucuggaugugcucuaaugggucucuacaauguagaauauguauuuaa

SEQ ID NO: 38598 - RNA, 1701 nt, Artificial Sequence; identical to SEQ ID NO: 36303
  derived and/or modified CDS sequence (wt) from hemagglutinin__InfluenzaA__ADY38760

SEQ ID NO: 38599 - RNA, 1701 nt, Artificial Sequence
  derived and/or modified CDS sequence (wt) from hemagglutinin__InfluenzaA__ADZ04607
augaaggcaauacuaguaguucugcuauauacauuugcaaccgcaaaugcagacacauuauguauagguuaucaugcgaacaauucaacagacacuguagacacaguacuagaaaagaauguaacaguaacacacucuguuaaccuucuagaagacaagcauaacgggaaacuaugcaaacuaagagggguagccccauugcauuuggguaaauguaacauugcuggcuggauccugggaaauccagagugugaaucacucuccacagcaagcucaugguccuacauuguggaaacaucuaguucagacaauggaacguguuacccaggagauuucaucgauuaugaggagcuaagagagcaauugagcucagugucaucauuugaaagguuugagauauuccccaagacaaguucauggcccaaucaugacucgaacaaagguguaacggcagcauguccucaugcuggagcaaaaagcuucuacaaaaauuuaauauggcuaguuaaaaaaggaaauucauacccaaagcucagcaaauccuacauuaaugauaaagggaaagaaguccucgugcuauggggcauucaccauccaucuacuagugcugaccaacaaagucucuaucagaaugcagaugcauauguuuuuguggggacaucaagauacagcaagaaguucaagccggaaauagcaauaagacccaaagugagggaucaagaagggagaaugaacuauuacuggacacuaguagagccgggagacaaaauaacauucgaagcaacuggaaaucuagugguaccgagauaugcauucgcaauggaaagaaaugcuggaucugguauuaucauuucagauacaccaguccacgauugcaauacaacuugucagacacccaagggugcuauaaacaccagccucccauuucagaauauacauccgaucacaauuggaaaauguccaaaauauguaaaaagcacaaaauugagacuggccacaggauugaggaaugucccgucuauucaaucuagaggccuauuuggggccauugccgguuucauugaagggggguggacagggaugguagauggaugguacgguuaucaccaucaaaaugagcaggggucaggauaugcagccgaccugaagagcacacagaaugccauugacgagauuacuaacaaaguaaauucuguuauugaaaagaugaauacacaguucacagcaguagguaaagaguucaaccaccuggaaaaaagaauagagaauuuaaauaaaaaaguugaugaugguuuccuggacauuuggacuuacaaugccgaacuguugguucuauuggaaaaugaaagaacuuuggacuaccacgauucaaaugugaagaacuuauaugaaaagguaagaagccaguuaaaaaacaaugccaaggaaauuggaaacggcugcuuugaauuuuaccacaaaugcgauaacacgugcauggaaagugucaaaaaugggacuuaugacuacccaaaauacucagaggaagcaaaauuaaacagagaagaaauagaugggguaaagcuggaaucaacaaggguuuaccagauuuuggcgaucuauucaacugucgccaguucauugguacugguagucucccugggggcaaucaguuucuggaugugcucuaaugggucucuacaguguagaauauguauuuaa

SEQ ID NO: 38600 - RNA, 1698 nt, Artificial Sequence; identical to SEQ ID NO: 37975
  derived and/or modified CDS sequence (wt) from hemagglutinin__InfluenzaA__ADZ05834

SEQ ID NO: 38601 - RNA, 1698 nt, Artificial Sequence
  derived and/or modified CDS sequence (wt) from hemagglutinin__InfluenzaA__ADZ05845
augaaaguaaaacuacugguccuguuaugcacauuuacagcuacauaugcagacacaauauguauaggcuaccaugcuaacaacucgaccgacacuguugacacaguacuugaaaagaaugugacagugacacacucugucaaccugcuugaggacagucacaauggaaaacuaugucuauuaaaaggaauagccccacuacaauuggguaacugcagcguugccggguggaucuuaggaaacccagaaugcgaauuacugauuuccaaggagucaugguccuacauuguagaaaaaccaaauccugagaauggaacauguuacccaggacauuucgcugacuaugaggaacugagggagcaauugaguucaguaucuucauuugagagguucgaaauauuccccaaagaaagcucauggcccaaccacaccguaaccggagugucagcaucaugcucccauaauggggaaaacaguuuuuacagaaauuugcuauggcugacggggaagaaugguuuguacccaaaccugagcaaguccuaugcaaacaacaaagaaaaagaaguccuuguacuaugggguguucaucacccgccaaacauggcugaccaaaagacccucuaucauacagaaaaugcuuauguuucuguagugucuucacauuauagcagaaaauucaccccagaaauagccaaaagacccaaaguaagagaucaagaaggaagaaucaacuacuacuggacucugcuugaacccggggauacaauaauauuugaggcaaauggaaaucuaauagcgccaagauaugcuuucgcacugaguagaggcuuuggaucaggaaucaucaacucaaaugcaccaauggauaaaugugaugcgaagugccaaacaccucaaggagcuauaaacagcagucuuccuuuccagaacguacacccagucacaauaggagaguguccaaaguaugucaggagugcaaaauuaaggaugguuacaggacuaaggaacaucccauccauucaauccagagguuuguuuggagccauugccgguuucauugaagggggguggacuggaaugguagaugguugguaugguuaucaucaucagaaugagcaaggaucuggcuaugcugcagaucaaaaaagcacacaaaaugccauuaaugggauuacaaacaaggugaauucuguaauugagaaaaugaacacucaauucacagcagugggcaaagaauucaacaaauuggaaagaaggauggaaaacuugaauaaaaaaguugaugauggguuuauagacauuuggacauauaaugcagaacuguugguucuacuggaaaaugaaaggacuuuggauuuccaugacuccaaugugaagaaucuguaugagaaaguaaaaagccaguuaaagaauaaugcuaaagaaauaggaaauggguguuuugaauucuaucacaaguguaacgaugaaugcauggagaguguaaagaauggaacuuaugacuauccaaaauauuccgaagaaucaaaguuaaacagggagaaaauugauggagugaaauuggaaucaaugggagucuaucagauucuggcgaucuacucaacagucgccaguucucugguucuuuuggucucccugggggcaaucagcuucuggauguguuccaaugggucuuugcaguguagaauaugcaucuaa

SEQ ID NO: 38602 - RNA, 1701 nt, Artificial Sequence; identical to SEQ ID NO: 37133
  derived and/or modified CDS sequence (wt) from hemagglutinin__InfluenzaA__ADZ05855

SEQ ID NO: 38603 - RNA, 1701 nt, Artificial Sequence
  derived and/or modified CDS sequence (wt) from hemagglutinin__InfluenzaA__ADZ47838
augaaggcaauacuaguaguucugcuauauacacuugcaaccgcaaaugcagacacauuauguauagguuaucaugcgaacaauucaacagacacuguagacacaguacuagaaaagaauguaacaguaacacacucuguuaaccuucuagaagacaagcauaacgggaaacuaugcaaacuaagagggguagccccauugcauuuggguaaauguaacauugcuggcuggauccugggaaauccagagugugaaucacucuccacagcaagcucaugguccuacauuguggaaacaucuaguucagacaauggaacguguuacccaggagauuucaucgauuaugaggagcuaagagagcaauugagcucagugucaucauuugaaagguuugagauauuccccaagacaaguucauggcccaaucaugacucgaacaaagguguaacggcagcauguccucaugcuggagcaaaaagcuucuacaaaaauuuaauauggcuaguuaaaaaaggaaauucauacccaaagcucagcaaauccuacauuaaugauaaagggaaagaaguccucgugcuauggggcauucaccauccaucuacuagugcugaccaacaaagucucuaucagaaugcagaugcauauguuuuuguggggacaucaagauacagcaagaaguucaagccggaaauagcaauaagacccaaagugagggaacaagaagggagaaugaacuauuacuggacacuaguagagccgggagacaaaauaacauucgaagcaacuggaaaucuagugguaccgagauaugcauucgcaauggaaagaaaugcuggaucugguauuaucauuucagauacaccaguccacgauugcaauacaacuugucagacacccaagggugcuauaaacaccagccucccauuucagaauauacauucgaucacaauuggaaaauguccaaaauauguaaaaagcacaaaauugagacuggccacaggauugaggaaugucccgucuauucaaucuagaggccuauuuggggccauugccgguuucauugaagggggguggacagggaugguagauggaugguacgguuaucaccaucaaaaugagcaggggucaggauaugcagccgaccugaagagcacacagaaugccauugacgagauuacuaacaaaguaaauucuguuauugaaaagaugaauacacaguucacagcaguagguaaagaguucaaccaccuggaaaaaagaauagagaauuuaaauaaaaaaguugaugaugguuuccuggacauuuggacuuacaaugccgaacuguugguucuauuggaaaaugaaagaacuuuggacuaccacgauucaaaugugaagaacuuauaugaaaagguaagaagccaguuaaaaaacaaugccaaggaaauuggaaacggcugcuuugaauuuuaccacaaaugcgauaacacgugcauggaaagugucaaaaaugggacuuaugacuacccaaaauacucagaggaagcaaaauuaaacagagaagaaauagaugggguaaagcuggaaucaacaaggauuuaccagauuuuggcgaucuauucaacugucgccaguucauuuguacugauagucucccugggggcaaucaguuucuggaugugcucuaaugggucucuacaauguagaauauguauuuaa

SEQ ID NO: 38604 - RNA, 1701 nt, Artificial Sequence; identical to SEQ ID NO: 35853
  derived and/or modified CDS sequence (wt) from hemagglutinin__InfluenzaA__ADZ47858

SEQ ID NO: 38605 - RNA, 1698 nt, Artificial Sequence
  derived and/or modified CDS sequence (wt) from hemagglutinin__InfluenzaA__ADZ53100
augaaaguaaaacuacugguccuguuaugcacauuuacagcuacauaugcagacacaauauguauaggcuaccaugcuaacaacucgaccgacacuguugacacaguacuugaaaagaaugugacagugacacacucugucaaccugcuugagaacagucacaauggaaaacuaugucuauuaaaaggaauagccccacuacaauuggguaacugcagcguugccggguggaucuuaggaaacccagaaugcgaauuacugauuuccaaggagacaugguccuacauuguagaaaaaccaaauccugagaauggaacauguuacccagggcauuucgcugacuaugaggaacugagggagcaauugaguucaguaucuucauuugagagguucgaaauauuccccaaagaaagcucauggcccaaccacaccguaaccggagugucagcaucaugcucccauaauggggaaagcaguuuuuacagaaauuugcuauggcugacggggaagaaugguuuguacccaaaccugagcaaguccuaugcaaacaacaaagaaaaagaaguccuuguacuaugggguguucaucacccgccaagcauaaaugaucaaaagacccucuaccauacagaaaaugcuuauguuucuguagugucuucacauuauagcagaaaauucaccccagaaauagccaaaagacccaaaguaagagaucaagaaggaagaaucaacuacuacuggacucugcuugaacccagggauacgauaauauuugaggcaaauggaaaucuaauagcgccaagauaugcuuucgcacugaguagaggcuuuggaucaggaaucaucaacucaaaugcaccaauggauaaaugugaugcgaagugccaaacaccucagggagcuauaaacagcagucuuccuuuccagaacguacacccagucacaauaggagaguguccaaaguaugucaggagugcaaaauuaaggaugguuacaggacuaaggaacaucccauccauucaauccagagguuuguuuggagccauugccgguuucauugaagggggguggacuggaaugguagaugguugguaugguuaucaucaucagaaugagcaaggaucuggcuaugcugcagaucaaaaaagcacacaaaaugccauuaaugggauuacaaacaaggugaauucuguaauugagaaaaugaacacucaauucacagcagugggcaaagaauucaacaaauuggaaagaaggauggaaaacuugaauaaaaaaguugaugauggguuuauagacauuuggacauauaaugcagaacuguugguucuacuggaaaaugaaaggacuuuggauuuccaugacuccaaugugaagaaucuguaugagaaaguaaaaagccaguuaaagaauaaugcuaaagaaauaggaaauggguguuuugaauucuaucacaaguguaacgaugaaugcauggagaguguaaagaauggaacuuaugacuauccaaaauauuccgaagaaucaaaguuaaacagggagaaaauugauggagugaaauuggaaucaaugggagucuaucagauucuggcgaucuacucaacagucgccaguucucugguucuuuuggucucccugggggcaaucagcuucuggauguguuccaaugggucuuugcaguguagaauaugcaucuaa

SEQ ID NO: 38606 - RNA, 1701 nt, Artificial Sequence
  derived and/or modified CDS sequence (wt) from hemagglutinin__InfluenzaA__ADZ53123
augaaggcaauacuagugguucugcuauauacauuugcaaccgcaaaugcagacacauuauguauagguuaucaugcgaacaauucaacagacacuguagacacaguacuagaaaagaauguaacaguaacacacucuguuaaccuucuagaagacaagcauaacgggaaacuaugcaaacuaagagggguagccccauugcauuuggguaaauguaacauugcuggcuggauccugggaaauccagagugugaaucacucuccacagcaagcucaugguccuacauuguggaaacaucuaguucagacaauggaacguguuacccaggagauuucaucgauuaugaggagcuaagagagcaauugagcucagugucaucauuugaaagguuugagauauuccccaagacaaguucauggcccaaucaugacucgaacaaagguguaacggcagcauguccucaugcuggagcaaaaagcuucuacaaaaauuuaauauggcuaguuaaaaaaggaaauucauacccaaagcucagcaaauccuacauuaaugauaaagggaaagaaguccucgugcuauggggcauucaccauccaucuacuagugcugaccaacaaagucucuaucagaaugcagaugcauauguuuuuguggggacaucaagauacagcaagaaguucaagccggaaauagcaauaagacccaaagugagggaacaagaagggagaaugaacuauuacuggacacuaguagagccgggagacaaaauaacauucgaagcaacuggaaaucuagugguaccgagauaugcauucgcaauggaaagaaaugcuggaucugguauuaucauuucagauacaccaguccacgauugcaauacaacuugucagacacccaagggugcuauaaacaccagccucccauuucagaauauacauucgaucacaauuggaaaauguccaaaauauguaaaaagcacaaaauugagacuggccacaggauugaggaaugucccgucuauucaaucuagaggccuauuuggggccauugccgguuucauugaagggggguggacagggaugguagauggaugguacgguuaucaccaucaaaaugagcaggggucaggauaugcagccgaccugaagagcacacagaaugccauugacgagauuacuaacaaaguaaauucuguuauugaaaagaugaauacacaguucacagcaguagguaaagaguucaaccaccuggaaaaaagaauagagaauuuaaauaaaaaaguugaugaugguuuccuggacauuuggacuuacaaugccgaacuguugguucuauuggaaaaugaaagaacuuuggacuaccacgauucaaaugugaagaacuuauaugaaaagguaagaagccaguuaaaaaacaaugccaaggaaauuggaaacggcugcuuugaauuuuaccacaaaugcgauaacacgugcauggaaagugucaaaaaugggacuuaugacuacccaaaauacucagaggaagcaaaauuaaacagagaagaaauagaugggguaaagcuggaaucaacaaggauuuaccagauuuuggcgaucuauucaacugucgccaguucauugguacugguagucucccugggggcaaucaguuucuggaugugcucuaaugggucucuacaguguagaauauguauuuaa

SEQ ID NO: 38607 - RNA, 1701 nt, Artificial Sequence
  derived and/or modified CDS sequence (wt) from hemagglutinin__InfluenzaA__ADZ53125
auggaggcaauacuaguaguucugcuauauacauuugcaaccgcaaaugcagacacauuauguauagguuaucaugcgaacaauucaacagacacuguagacacaguacuagaaaagaauguaacaguaacacacucuguuaaccuucuagaagacaagcauaacgggaaacuaugcaaacuaagagggguagccccauugcauuuggguaaauguaacauugcuggcuggauccugggaaauccagagugugaaucacucuccacagcaagcucaugguccuacauuguggaaacaucuaguucagacaauggaacguguuacccaggagauuucaucgauuaugaggagcuaagagagcaauugagcucagugucaucauuugaaagguuugagauauuccccaagacaaguucauggcccaaucaugacucgaacaaagguguaacggcagcauguccucaugcuggagcaaaaagcuucuacaaaaauuuaauauggcuaguuaaaaaaggaaauucauacccaaagcucagcaaauccuacauuaaugauaaagggaaagaaguccucgugcuauggggcauucaccauccaucuacuagugcugaccaacaaagucucuaucagaaugcagaugcauauguuuuuguggggucaucaagauacagcaagaaguucaagccggaaauagcaauaagacccaaagugagggaucaagaagggagaaugaacuauuacuggacacuaguagagccgggagacaaaauaacauucgaagcaacuggaaaucuagugguaccgagauaugcauucgcaauggaaagaaaugcuggaucugguauuaucauuucagauacaccaguccacgauugcaauacaacuugucagacacccaagggugcuauaaacaccagccucccauuucauaauauacauccgaucacaauuggaaaauguccaaaauauguaaaaagcacaaaauugagacuggccacaggauugaggaaugucccgucuauucaaucuagaggccuauuuggggccauugccgguuucauugaagggggguggacagggaugguagauggaugguacgguuaucaccaucaaaaugagcaggggucaggauaugcagccgaccuaaagagcacacagaaugccauugacgagauuacuaacaaaguaaauucuguuauugaaaagaugaauacacaguucacagcaguagguaaagaguucaaccaccuggaaaaaagaauagagaauuuaaauaaaaaaguugaugaugguuuccuggacauuuggacuuacaaugccgaacuguugguucuauuggaaaaugaaagaacuuuggacuaccacgauucaaaugugaagaacuuauaugaaaagguaagaagccaguuaaaaaacaaugccaaggaaauuggaaacggcugcuuugaauuuuaccacaaaugcgauaacacgugcauggaaagugucaaaaaugggacuuaugacuacccaaaauacucagaggaagcaaaauuaaacagagaagaaauagaugggguaaagcuggaaucaacaaggauuuaccagauuuuggcgaucuauucaacugucgccaguucauugguacugguagucucccugggggcaaucaguuucuggaugugcucuaaugggucucuacaguguagaauauguauuuaa

SEQ ID NO: 38608 - RNA, 1701 nt, Artificial Sequence
  derived and/or modified CDS sequence (wt) from hemagglutinin__InfluenzaA__ADZ53127
augaaggcaauacuaguaguucugcuauauacauuugcaaccgcaaaugcagacacauuauguauagguuaucaugcgaacaauucaacagacacuguagacacaguacuagaaaagaauguaacaguaacacacucuguuaaccuucuagaagacaagcauaacgggaaacuaugcaaacuaagagggguagccccauugcauuuggguaaauguaacauugcuggcuggauccugggaaauccagagugugaaucacucuccacagcaagcucaugguccuacauuguggaaacaucuaguucagacaauggaacguguuacccaggagauuucaucgauuaugaggagcuaagagagcaauugagcucagugucaucauuugaaagguuugagauauuccccaagacaaguucauggcccaaucaugacucgaacaaagguguaacgacagcauguccucaugcuggagcaaaaagcuucuacaaaaauuuaauauggcuaguuaaaaaaggaaauucauacccaaagcucagcaaauccuacauuaaugauaaagggaaagaaguccucgugcuauggggcauucaccauccaucuacuagugcugaccaacaaagucucuaucagaaugcagaugcauauguuuuuguggggacaucaagauacagcaagaaguucaagccggaaauagcaauaagacccaaagugagggaucaagaagggagaaugaacuauuacuggacacuaguagagccgggagacaaaauaacauucgaagcaacuggaaaucuagugguaccgagauaugcauucgcaauggaaagaaaugcuggaucugguauuaucauuucagauacaccaguccacgauugcaauacaacuugucagacacccaagggugcuauaaacaccagccucccauuucagaauauacauccgaucacaauuggaaaauguccaaaauauguaaaaagcacaaaauugagacuggccacaggauugaggaaugucccgucuauucaaucuagaggccuauuuggggccauugccggguucauugaagggggguggacagggaugguagauggaugguacgguuaucaccaucaaaaugagcaggggucaggauaugcagccgaccugaagagcacacagaaugccauugacgagauuacuaacaaaguaaauucuguuauugaaaagaugaauacacaguucacagcaguagguaaagaguucaaccaccuggaaaaaagaauagagaauuuaaauaaaaaaguugaugaugguuuccuggacauuuggacuuacaaugccgaacuguugguucuauuggaaaaugaaagaacuuuggacuaccacgauucaaaugugaagaacuuauaugaaaagguaagaagccaguuaaaaaacaaugccaaggaaauuggaaacggcugcuuugaauuuuaccacaaaugugauaacacgugcauggaaagugucaaaaaugggacuuaugacuacccaaaauacucagaggaagcaaaauuaaacagagaagaaauagaugggguaaagcuggaaucaacaaggauuuaccagauuuuggcgaucuauucaacugucgccaguucauugguacugguagucucccugggggcaaucaguuucuggaugugcucuaaugggucucuacaguguagaauauguauuuaa

SEQ ID NO: 38609 - RNA, 1701 nt, Artificial Sequence; identical to SEQ ID NO: 35413
  derived and/or modified CDS sequence (wt) from hemagglutinin__InfluenzaA__ADZ53131

SEQ ID NO: 38610 - RNA, 1701 nt, Artificial Sequence; identical to SEQ ID NO: 34980
  derived and/or modified CDS sequence (wt) from hemagglutinin__InfluenzaA__ADZ53133

SEQ ID NO: 38611 - RNA, 1701 nt, Artificial Sequence; identical to SEQ ID NO: 38607
  derived and/or modified CDS sequence (wt) from hemagglutinin__InfluenzaA__ADZ53135

SEQ ID NO: 38612 - RNA, 1701 nt, Artificial Sequence; identical to SEQ ID NO: 35845
  derived and/or modified CDS sequence (wt) from hemagglutinin__InfluenzaA__ADZ53138

SEQ ID NO: 38613 - RNA, 1701 nt, Artificial Sequence; identical to SEQ ID NO: 36261
  derived and/or modified CDS sequence (wt) from hemagglutinin__InfluenzaA__ADZ53140

SEQ ID NO: 38614 - RNA, 1701 nt, Artificial Sequence; identical to SEQ ID NO: 38606
  derived and/or modified CDS sequence (wt) from hemagglutinin__InfluenzaA__ADZ93496

SEQ ID NO: 38615 - RNA, 1689 nt, Artificial Sequence; identical to SEQ ID NO: 34362
  derived and/or modified CDS sequence (wt) from hemagglutinin__InfluenzaA__AEA04365

SEQ ID NO: 38616 - RNA, 1689 nt, Artificial Sequence
  derived and/or modified CDS sequence (wt) from hemagglutinin__InfluenzaA__AEA04376
auggccaucauuuaucucauucuccuguucacagcagugagaggggaccagauaugcauuggauaccaugccaauaauuccacagagaaggucgacacaauucuagagcggaacgucacugugacucaugccaaggacauucuugagaagacccauaacggaaaguuaugcaaacuaaacggaaucccuccacuugaacuaggggacuguagcauugccggauggcuccuuggaaauccagaaugugauaggcuucuaagugugccagaaugguccuauauaauggagaaagaaaacccgagagacgguuuguguuauccaggcagcuucaaugauuaugaagaauugaaacaucuccucagcagcgugaaacauuucgagaaaguaaagauucugcccaaagauagauggacacagcauacaacaacuggagguucacgggccugcgcggugucugguaauccaucauucuucaggaacauggucuggcugacagagaaaggaucaaauuauccgguugccaaaggaucguacaacaauacaagcggagaacaaaugcuaauaauuuggggggugcaccaucccaaugaugagacagaacaaagaacauuguaccagaaugugggaaccuauguuuccguaggcacaucaacauugaacaaaaggucaaccccagaaauagcaacaaggccuaaagugaauggacaaggagguagaauggaauucucuuggacccucuuggauaugugggacaccauaaauuuugagaguacugguaaucuaauugcaccagaguauggauucaaaauaucgaaaagagguaguucagggaucaugaaaacagaaggaacacuugagaacugugagaccaaaugccaaacuccuuugggagcaauaaauacaacauugccuuuucacaauguccacccacugacaauaggugagugccccaaauauguaaaaucggagaaguuggucuuagcaacaggacuaaggaauguuccccagauugaaucaagaggauuguuuggggcaauagcugguuuuauagaaggaggauggcaaggaaugguugaugguugguauggauaccaucacagcaaugaccagggaucaggguaugcagcagacaaagaauccacucaaaaggcauuugauggaaucaccaacaagguaaauucugugauugaaaagaugaacacccaauuugaagcuguugggaaagaauucaguaacuuagagagaagacuggagaacuugaacaaaaagguggaagacggguuucuagauguguggacauacaaugcugagcuucuaguucugauggaaaaugagaggacacuugacuuucaugauucuaaugucaagaaucuguaugauaaagucagaaugcagcugagagacaacgucaaagaacuaggaaauggauguuuugaauuuuaucacaaaugugaugaugaaugcaugaauagugugaaaaacgggacguaugauuaucccaaguaugaagaagagucuaaacuaaauagaaaugaaaucaaagggguaaaauugagcagcauggggguuuaucaaauccuugccauuuaugcuacaguagcagguucucugucacuggcaaucaugauggcugggaucucuuucuggaugugcuccaacgggucucugcagugcaggaucugcauauga

SEQ ID NO: 38617 - RNA, 1698 nt, Artificial Sequence
  derived and/or modified CDS sequence (wt) from hemagglutinin__InfluenzaA__AEA10292
augaaaguaaaacuacugguccuguuaugcacauuuacagcuacauaugcagacacaauauguauaggcuaccaugcuaacaacucgaccgacacuguugacacaguacuugaaaagaaugugacagugacacacucugucaaccugcuugagaacagucacaaugggaaacuauguucauuaaaaggaauagccccacuacaauuggguaacugcagcguugccggguggaucuuaggaaacccagaaugcgaauuacugauuuccaaggagucaugguccuacauuguagaaaaaccaaauccugagaauggaacauguuacccagggcauuucgcugacuaugaggaacugagggagcaauugaguucaguaucuucauuugagagguucgaaauauuccccaaagaaagcucauggcccaaccacaccguaaccggagugucagcaucaugcucccauaauggggaaagcaguuuuuacagaaauuugcuauggcugacggugaagaaugguuuguacccaaacuugagcaaguccuaugcaaacaacaaagaaaaagaaguccuuguacuaugggguguucaucacccgccaaacauaguugaccaaaagacccucuaucguacagaaaaugcuuauguuucuguagugucuucacauuauagcagaaaauucaccccagaaauagccaaaagacccaaaguaagagaucaagaaggaagaaucaacuacuacuggacucugcuugaacccggggauacaauaauauuugaggcaaauggaaaucuaauagcgccaagauaugcuuucgcacugaguagaggcuuuggaucaggaaucaucaacucaaaugcaccaauggauaaaugugaugcgaagugccaaacaccucggggagcuauaaacagcagucuuccuuuccagaacguacacccagucacaauaggagaguguccaaaguaugucaggagugcaaaauuaaggaugguuacaggacuaaggaacaucccauccauucaauccagagguuuguuuggagccauugccgguuucauugaagggggguggacuggaaugguagaugguugguaugguuaucaucaucagaaugagcaaggaucuggcuaugcugcagaucaaaaaagcacacaaaaugccauuaaugggauuacaaacaaggugaauucuguaauugagaaaaugaacacucaauucacagcagugggcaaagaauucaacaaauuggaaagaaggauggaaaacuugaauaaaaaaguugaugauggguuuauagacauuuggacauauaaugcagaacuguugguucuacuggaaaaugaaaggacuuuggauuuccaugacuccaaugugaagaaucuguaugagaaaguaaaaagccaguuaaagaauaaugcuaaagaaauaggaaauggguguuuugaauucuaucacaaguguaacgaugaaugcauggagaguguaaagaauggaaccuaugacuauccaaaauauuccgaagaaucaaaguuaaacagggagaaaauugauggagugaaauuggaaucaaugggagucuaucagauucuggcgaucuacucaacagucgccaguucucugguucuuuuggucucccugggggcaaucagcuucuggauguguuccaaugggucuuugcaguguagaauaugcaucuaa

SEQ ID NO: 38618 - RNA, 1701 nt, Artificial Sequence
  derived and/or modified CDS sequence (wt) from hemagglutinin__InfluenzaA__AEA10303
augaaggcaauacuaguaguucugcuauauacauuugcaaccgcaaaugcagacacauuauguauagguuaucaugcgaacaauucaacagacacuguagacacaguacuagaaaagaauguaacaguaacacacucuguuaaccuucuagaagacaagcauaacgggaaacuaugcaaacuaagagggguagccccauugcauuuggguaaauguaacauugcuggcuggauccugggaaauccagagugugaaucacucuccacagcaagcucaugguccuacauuguggaaacaucuaguucagacaauggaacguguuacccaggagauuucaucgauuaugaggagcuaagagagcaauugagcucagugucaucauuugaaagguuugagauauuccccaagacaaguucauggcccaaucaugacucgaacaaagguguaacggcagcauguccucaugcuggagcaaaaagcuucuacaaaaauuuaauauggcuaguuaaaaaaggaaauucauacccaaagcucagcaaauccuacauuaaugauaaagggaaagaaguccucgugcuauggggcauucaccauccaucuacuagugcugaccaacaaagucucuaucagaaugcagaugcauauguuuuuguggggacaucaagauacagcaagaaguucaagccggaaauagcaauaagacccaaagugagggaucaagaagggagaaugaacuauuacuggacacuaguagagccgggagacaaaauaacauucgaagcaacuggaaaucuagugguaccgagauaugcauucgcaauggaaagaaaugcuggaucugguauuaucauuucagauacaccaguccacgauugcaauacaacuugucagacacccaagggugcuauaaacaccagccucccauuucagaauauacauccgaucacaauuggaaaauguccaaaauauguaaaaagcacaaaauugagacuggccacaggauugaggaaugucccgucuauucaaucuagaggccuauuuggggccauugccgguuucauugaagggggguggacagggaugguagauggaugguacgguuaucaccaucaaaaugagcaggggucaggauaugcagccgaccugaagagcacacagaaugccauugacaagauuacuaacaaaguaaauucuguuauugaaaagaugaauacacaguucacagcaguagguaaagaguucaaccaccuggaaaaaagaauagagaauuuaaauaaaaaaguugaugaugguuuccuggacauuuggacuuacaaugccgaacuguugguucuauuggaaaaugaaagaacuuuggacuaccacgauucaaaugugaagaacuuauaugaaaagguaagaagccaguuaaaaaacaaugccaaggaaauuggaaacggcugcuuugaauuuuaccacaaaugcgauaacacgugcauggaaagugucaaaaaugggacuuaugacuacccaaaauacucagaggaagcaaaauuaaacagagaagaaauagaugggguaaagcuggaaucaacaaggguuuaccagauuuuggcgaucuauucaacugucgccaguucauugguacugguagucucccugggggcaaucaguuucuggaugugcucuaaugggucucuacaguguagaauauguauuuaa

SEQ ID NO: 38619 - RNA, 1701 nt, Artificial Sequence
  derived and/or modified CDS sequence (wt) from hemagglutinin__InfluenzaA__AEA10313
augaaggcaauacuaguaguucugcuauauacauuugcaaccgcaaaugcagacacauuauguauagguuaucaugcgaacaauucaacagacacuguagacacaguacuagaaaagaauguaacaguaacacacucuguuaaccuucuagaagacaagcauaacgggaaacuaugcaaacuaagagggguagccccauugcauuuggguaaauguaacauugcuggcuggauccuggggaauccagagugugaaucacucuccacagcaagcucaugguccuacauuguggaaacaucuaguucagacaauggaacguguuacccaggagauuucaucgauuaugaggagcuaagagagcaauugagcucagugucaucauuugaaagguuugagauauuccccaagacaaguucauggcccaaucaugacucgaacaaagguguaacggcagcauguccucaugcuggagcaaaaagcuucuacaaaaauuuaauauggcuaguuaaaaaaggaaauucauacccaaagcucagcaacuccuacauuaaugauaaagggaaagaaguccucgugcuauggggcauucaccauccaucuacuagugcugaccaacaaagucucuaucagaaugcagaugcauauguuuuuguggggacaucaagauacagcaagaaguucaagccggaaauagcaauaagacccaaagugagggaucaagaagggagaaugaacuauuacuggacacuaguagagccgggagacaaaauaacauucgaagcaacuggaaaucuagugguaccgagauaugcauucgcaauggaaagaaaugcuggaucugguauuaucauuucagauacaccagcccacgauugcaacacaacuugucagacacccaagggugcuauaaacaccagccucccauuucagaauauacauccgaucacaauuggaaaauguccaaaauauguaaaaagcacaaaauugagacuggccacaggauugaggaaugucccgucuauucaaucuagaggccuauuuggggccauugccgguuucauugaagggggguggacagggaugguagauggaugguacgguuaucaccaucaaaaugagcaggggucaggauaugcagccgaccugaagagcacacagaaugccauugacgagauuacuaacaaaguaaauucuguuauugaaaagaugaauacacaguucacagcaguagguaaagaguucaaccaccuggaaaaaagaauagagaauuuaaauaaaaaaguugaugaugguuuccuggacauuuggacuuacaaugccgaacuguugguucuauuggaaaaugaaagaacuuuggacuaccacgauucaaaugugaagaacuuauaugaaaagguaagaagccaguuaaaaaacaaugccaaggaaauuggaaacggcugcuuugaauuuuaccacaaaugcgauaacacgugcauggaaagugucaaaaaugggacuuaugacuacccaaaauacucagaggaagcaaaauuaaacagagaagaaauagaugggguaaagcuggaaucaacaaggauuuaccagauuuuggcgaucuauucaacugucgccaguucauugguacugguagucucccugggggcaaucaguuucuggaugugcucuaaugggucucuacaguguagaauauguauuuaa

SEQ ID NO: 38620 - RNA, 1701 nt, Artificial Sequence; identical to SEQ ID NO: 36303
  derived and/or modified CDS sequence (wt) from hemagglutinin__InfluenzaA__AEA10323

SEQ ID NO: 38621 - RNA, 1701 nt, Artificial Sequence; identical to SEQ ID NO: 37024
  derived and/or modified CDS sequence (wt) from hemagglutinin__InfluenzaA__AEA10339

SEQ ID NO: 38622 - RNA, 1701 nt, Artificial Sequence
  derived and/or modified CDS sequence (wt) from hemagglutinin__InfluenzaA__AEA10349
augaaggcaauacuaauaguucugcuauauacauuugcaaccgcaaaugcagacacauuauguauagguuaucaugcgaacaauucaacagacacuguagacacaguacuagaaaagaauguaacaguaacacacucuguuaaccuucuagaagacaagcauaacggaaaacuaugcaaacuaagagggguagccccauugcauuuggguaaauguaacauugcuggcuggauccugggaaauccagagugugaaucacucuccacagcaagcucaugguccuacauuguggaaacaucuaguucagacaauggaacguguuacccaggagauuucaucgauuaugaggagcuaagagagcaauugagcucagugucaucauuugaaagguuugagauauuccccaagacaaguucauggcccaaucaugacucgaacaaagguguaacggcagcauguccucaugcuggagcaaaaagcuucuacaaaaauuuaauauggcuaguuaaaaaaggaaauucauacccaaagcucagcaaauccuacauuaaugauaaagggaaagaaguccucgugcuauggggcauucaccauccaucuacuagugcugaccaacaaagucucuaucagaaugcagaugcauauguuuuuguggggacaucaagauacagcaagaaguucaagccggaaauagcaauaagacccaaagugagggaucaagaagggagaaugaacuauuacuggacacuaguagagccgggagacaaaauaacauucgaagcaacuggaaaucuagugguaccgagauaugcauucgcaauggaaagaaaugcuggaucugguauuaucauuucagauacaccaguccacgauugcaauacaacuugucagacacccaagggugcuauaaacaccagccucccauuucagaauauacauccgaucacaauuggaaaauguccaaaauauguaaaaagcacaaaauugagacuggccacaggauugaggaaugucccgucuauucaaucuagaggccuauuuggggccauugccgguuucauugaagggggguggacagggaugguagauggaugguacgguuaucaccaucaaaaugagcaggggucaggauaugcagccgaccugaagagcacacagaaugccauugacaagauuacuaacaaaguaaauucuguuauugaaaagaugaauacacaguucacagcaguagguaaagaguucaaccaccuggaaaaaagaauagagaauuuaaauaaaaaaguugaugaugguuuccuggacauuuggacuuacaaugccgaacuguugguucuauuggaaaaugaaagaacuuuggacuaccacgauucaaaugugaagaacuuauaugaaaagguaagaagccaguuaaaaaacaaugccaaggaaauuggaaacggcugcuuugaauuuuaccacaaaugcgauaacacgugcauggaaagugucaaaaaugggacuuaugacuacccaaaauacucagaggaagcaaaauuaaacagagaagaaauagaugggguaaagcuggaaucaacaaggauuuaccagauuuuggcgaucuauucaacugucgccaguucauugguacugguagucucccugggggcaaucaguuucuggaugugcucuaaugggucucuacaguguagaauauguauuuaa

SEQ ID NO: 38623 - RNA, 1701 nt, Artificial Sequence
  derived and/or modified CDS sequence (wt) from hemagglutinin__InfluenzaA__AEA30293
augaaggcaauacuaguaguucugcuauauacauuugcaaccgcaaaugcagacacauuauguauagguuaucaugcgaacaauucaacagacacuguagacacaguacuagaaaagaauguaacaguaacacacucuguuaacauucuagaagacaagcauaacgggaaacuaugcaaacuaagagggguagccccauugcauuuggguaaauguaacauugcuggcuggauccugggaaauccagagugugaaucacucuccacagcaagcucaugguccuacauuguggaaacaucuaguucagacaauggaacguguuacccaggagauuucaucgauuaugaggagcuaagagagcaauugagcucagugucaucauuugaaagguuugagauauuccccaagacaaguucauggcccaaucaugacucgaacaaagguguaacggcagcauguccucaugcuggagcaaaaagcuucuacaaaaauuuaauauggcuaguuaaaaaaggaaauucauacccaaagcucagcaaauccuacauuaaugauaaagggaaagaaguccucgugcuauggggcauucaccauccaucuacuagugcugaccaacaaagucucuaucagaaugcagaugcauauguuuuuguggggacaucaagauacagcaagaaguucaagccggaaauagcaauaagacccaaagugagggaucaagaagggagaaugaacuauuacuggacacuaguagagccgggagacaaaauaacauucgaagcaacuggaaaucuagugguaccgagauaugcauucgcaauggaaagaaaugcuggaucugguauuaucauuucagauacaccaguccacgauugcaauacaacuugucagacacccaagggugcuauaaacaccagccucccauuucagaauauacauccgaucacaauuggaaaauguccaaaauauguaaaaagcacaaaauugagacuggccacaggauugaggaaugucccgucuauucaaucuagaggccuauuuggggccauugccgguuucauugaagggggguggacagggaugguagauggaugguacgguuaucaccaucaaaaugagcaggggucaggauaugcagccgaccugaagagcacacagaaugccauugacgagauuacuaacaaaguaaauucuguuauugaaaagaugaauacacaguucacagcaguagguaaagaguucaaccaccuggaaaaaagaauagagaauuuaaauaaaaaaguugaugaugguuuccuggacauuuggacuuacaaugcagaacuguugguucuauuggaaaaugaaagaacuuuggacuaccacgauucaaaugugaagaacuuauaugaaaagguaagaagccaguuaaaaaacaaugccaaggaaauuggaaacggcugcuuugaauuuuaccacaaaugcgauaacacgugcauggaaagugucaaaaaugggacuuaugacuaccccaaauacucagaggaagcaaaauuaaacagagaagaaauagaugggguaaagcuggaaucaacaaggauuuaccagauuuuggcgaucuauucaacugucgccaguucauugguacugguagucucccugggggcaaucaguuucuggaugugcucuaaugggucucuacaguguagaauauguauuuaa

SEQ ID NO: 38624 - RNA, 1701 nt, Artificial Sequence
  derived and/or modified CDS sequence (wt) from hemagglutinin__InfluenzaA__AEA48989
augaaggcaauacuaguaguucugcuauauacauuugcaaccgcaaaugcagacacauuauguauagguuaucaugcgaacaauucaacagacacuguagacacaguacuagaaaagaauguaacaguaacacacucuguuaaccuucuagaagacaagcauaacgggaaacuaugcaaacuaagagggguagccccauugcauuuggguaaauguaacauugcuggcuggauccugggaaauccagagugugaaucacucuccacagcaagcucaugguccuacauuguggaaacaucuaguucagacaauggaacguguuacccaggagauuucaucgauuaugaggagcuaagagagcaauugagcucugugucaucauuugaaagguuugagauauuccccaagacaaguucauggcccaaucaugaaucgaacaaagguguaacggcagcauguccucaugcuggagcaagaagcuucuacaaaaauuuaauauggcuaguuaaaaaaggaaauucauacccaaagcucagcaaauccuacauuaaugauaaagggaaagaaguccucgugcuauggggcauucaccauccaucuacuagugcugaccaacaaagucucuaucagaaugcagaugcauauguuuuuguggggacaucaagauacagcaagaaguucaagccggaaauagcaauaagacccaaagugagggaucaagaagggagaaugaacuauuacuggacacuaguagagccgggagacaaaauaacauucgaagcaacuggaaaucuagugguaccgagauaugcauucgcaauggaaagaaaugcuggaucugguauuaucauuucagauacaccaguccacgauugcaauacaacuugucagacacccaagggugcuauaaacaccagccucccauuucagaauauacauccgaucacaauuggaaaauguccaaaauauguaaaaagcacaaaauugagacuggccacaggauugaggaaugucccgucuauucaaucuagaggccuauuuggggccauugccgguuucauugaagggggguggacagggaugguagauggaugguacgguuaucaccaucaaaaugagcaggggucaggauaugcagccgaccugaagagcacacagaaugccauugacgagauuacuaacaaaguaaauucuguuauugaaaagaugaauacacaguucacagcaguagguaaagaguucaaccaccuggaaaaaagaauagagaauuuaaauaaaaaaguugaugaugguuuccuggacauuuggacuuacaaugccgaacuguugguucuauuggaaaaugaaagaacuuuggacuaccacgauucaaaugugaagaacuuauaugaaaagguaagaagccaguuaaaaaacaaugccaaggaaauuggaaacggcugcuuugaguuuuaccacaaaugcgauaacacgugcauggaaagugucaaaaaugggacuuaugacuacccaaaauacucagaggaagcaaaauuaaacagagaagaaauagaugggguaaagcuggaaucaacaaggauuuaccagauuuuggcgaucuauucaacugucgccaguucauugguacugguagucucccugggggcaaucaguuucuggaugugcucuaaugggucucuacaguguagaauauguauuuaa

SEQ ID NO: 38625 - RNA, 1707 nt, Artificial Sequence
  derived and/or modified CDS sequence (wt) from hemagglutinin__InfluenzaA__AEA50985
auggagaaaauagugcuucuucuugcaauuaucaaucuuguuaaaagugaucagauuugcauugguuaccaugcaaacaacucgacagagcagguugacacaauaauggaaaagaacgucacuguuacacacgcccaagacauacuggaaaagacacacaacgggaagcucugugaucuagacggagugaagccucuaauuuugagagauuguaguguagcuggauggcuccucgggaauccaaugugugacgaauuccucaaugugccggaauggucuuacauaguggaaaagaucaauccagccaaugaccucuguuacccagggaauuucaacgacuaugaagaacugaaacaccuacugagcagaaucaaccauuuugagaaaauucagaucauccccaaaaguucuuggucagaucaugaagccucaucaggggugagcucagcauguccguaccagggaagguccuccuuuuuuagaaaugugguauggcuuaucaaaaagaacgaugcauacccaacaauaaagauaaguuacaauaauaccaaccaagaagaucuuuugguauugugggggauucaccauccaaaugaugcggcagagcagacaaaacuuuaucaaaauccaaccaccuauauuuccguugggacaucaacacuuaaucugagauugguaccaaaaauagcuacuagauccaaaguaaacgggcaaaguggaaggauggaguucuuuuggacaauuuuaaaaccaaaugaugcaauaaauuuugagaguaauggaaauuucauugcuccagaaaaugcauacaaaauugucaagaaaggggacucaacgaucaugaaaagugaauuggaauauggcaacugcaacaccaagugucaaacuccaguaggggcgauaaacucuaguaugccauuccacaacauccacccucucaccauaggggaaugccccaaauaugugaaaucaaacagauuaguucuugcgacugggcucagaaauagcccucaaggagaaagaagaagaaaaaagagaggacuauuuggagcuauagcaggcuuuauagagggaggauggcagggaaugguagaugguugguauggguaccaccauaguaacgagcaggggaguggguacgcugcagacaaagaauccacucaaaaggcaauaaauggagucaccaauaaggucaacucgaucauugacaaaaugaacacucaguuugaggccguuggaagggaauuuaauaacuuagaaaggagaauagaaaauuuaaacaagaagauggaagacggauuucuagaugucuggacuuauaaugcugaacuucugguucucauggaaaaugagagaacucuagacuuucaugacucaaaugucaagaaucuuuacgauaaaguccgacuacagcuuagagauaaugcaaaggagcuugguaacgguuguuucgaguucuaccacagaugugauaaugaauguauggaaaguguuagaaacggaacguaugacuacccucaguauucagaagaaucaagauuaaaaagagaggaaauaaguggaguaaaauuggagucaauaggaauuuaucaaauacugucaauuuauucaacagcggcgagcucccuagcacuggcaaucaugguggcuggucuaucuuuauggaugugcuccaauggaucauuacaaugcagaauuugcauuuaa

SEQ ID NO: 38626 - RNA, 1701 nt, Artificial Sequence; identical to SEQ ID NO: 37545
  derived and/or modified CDS sequence (wt) from hemagglutinin__InfluenzaA__AEA72704

SEQ ID NO: 38627 - RNA, 1701 nt, Artificial Sequence
  derived and/or modified CDS sequence (wt) from hemagglutinin__InfluenzaA__AEA72715
augaagacuaucauugcuuugagcuacauucuaugucugguuuucgcucaaaaacuuccuggaaaugacaacagcacggcaacgcugugccuugggcaccaugcaguaccaaacggaacgauagugaaaacaaucacgaaugaccaaauugaaguuacuaaugcuacugagcugguucagaguuccucaacaggugaaauaugcgacaguccucaucagauccuugauggagaaaacugcacacuaauagaugcucuauugggagacccucagugugauggcuuccaaaauaagaaaugggaccuuuuuguugaacgaagcaaagccuacagcaacuguuacccuuaugaugugccggauuaugccucccuuaggucacuaguugccucauccggcacacuggaguuuaacaaugaaagcuucaauuggacuggagucacucaaaacggaacaagcucugcuugcauaaggagaucuaauaauaguuucuuuaguagauugaauugguugacccacuuaaacuucaaauacccagcauugaacgugacuaugccaaacaaugaacaauuugacaaauuguacauuugggggguucaccacccggguacggacaaggaccaaaucuuccuguaugcucaagcaucaggaagaaucacaguaucuaccaaaagaagccaacaagcuguaaucccgaauaucggaucuagacccagaguaaggaauaucccuagcagaauaagcaucuauuggacaauaguaaaaccgggagacauacuuuugauuaacagcacagggaaucuaauugcuccuagggguuacuucaaaauacgaaguggaaaaagcucaauaaugagaucagaugcacccauuggcaaaugcaauucugaaugcaucacuccaaauggaagcauucccaaugacaaaccauuccaaaauguaaacaggaucacauacggggccugccccagauauguuaagcaaagcacucugaaauuggcaacaggaaugcgaaauguaccagagaaacaaacuagaggcauauuuggcgcaauagcggguuucauagaaaaugguugggagggaaugguggaugguugguacgguuucaggcaucaaaauucugagggaagaggacaagcagcagaucucaaaagcacucaagcagcaaucgaucaaaucaaugggaagcugaauagauugaucgggaaaaccaacgagaaauuccaucagauugaaaaagaauucucagaagucgaagggagaauucaggaccuugagaaauauguugaggacacuaaaauagaucucuggucauacaacgcggagcuucuuguugcccuggagaaccaacauacaauugaucuaacugacucagaaaugaacaaacuguuugaaaaaacaaagaagcaacugagggaaaaugcugaggauaugggcaaugguuguuucacaauauaccacaaaugugacaaugccugcauaggaucaaucagaaauggaacuuaugaccacaauguauacagagaugaagcauuaaacaaccgguuccagaucaagggaguugagcugaagucaggguacaaagauuggauccuauggauuuccuuugccauaucauguuuuuugcuuuguguugcuuuguugggguucaucaugugggccugccaaaaaggcaacauuaggugcaacauuugcauuuga

SEQ ID NO: 38628 - RNA, 1701 nt, Artificial Sequence; identical to SEQ ID NO: 37545
  derived and/or modified CDS sequence (wt) from hemagglutinin__InfluenzaA__AEA72726

SEQ ID NO: 38629 - RNA, 1701 nt, Artificial Sequence
  derived and/or modified CDS sequence (wt) from hemagglutinin__InfluenzaA__AEA72740
augaaggcaauacuaguaguucugcuauauacauuugcaaccgcaaaugcagacacauuauguauagguuaucaugcgaacaauucaacagacacuguagacacaguacuagaaaagaauguaacaguaacacacucuguuaaccuucuagaagacaagcauaacgggaaacuaugcaaacuaagagggguagccccauugcauuuggguaaauguaacauugcuggcuggauccugggaaauccagagugugaaucacucuccacagcaagcucaugguccuacauuguggaaacaucuaguucagacaauggaacguguuacccaggagauuucaucgauuaugaggagcuaagagagcaauugagcucagugucaucauuugaaagguuugagauauuccccaagacaaguucauggcccaaucaugacucgaacaaagguguaacggcagcauguccucaugcuggagcaaaaagcuucuacaaaaauuuaauauggcuaguuaaaaaaggaaauucauacccaaagcucagcaaauccuacauuaaugauaaagggaaagaaguccucgugcuauggggcauucaccauccaucuacuagugcugaccaacaaagucucuaucagaaugcagaugcauauguuuuuguggggacaucaagauacagcaagaaguucaagccggaaauagcaacaagacccaaagugagggaucaagaagggagaaugaacuauuacuggacacuaguagagccgggagacaaaauaacauuugaagcaacuggaaaucuagugguaccgagauaugcauucgcaauggaaagaaaugcuggaucugguauuaucauuucagauacaccaguccacgauugcaauacaacuugucagacacccaagggugcuauaaacaccagccucccauuucagaauauacauccgaucacaauuggaaaauguccaaaauauguaaaaagcacaaaauugagacuggccacaggauugaggaaugucccgucuauucaaucuagaggccuauuuggggccauugccggcuucauugaagggggguggacagggaugguagauggaugguacgguuaucaccaucaaaaugagcaggggucaggauaugcagccgaccugaagagcacacagaaugccauugacgagauuacuaacaaaguaaauucuguuauugaaaagaugaauacacaguucacagcaguagguaaagaguucaaccaccuggaaaaaagaauagagaauuuaaauaaaaaaguugaugaugguuuccuggacauuuggacuuacaaugccgaacuguugguucuauuggaaaaugaaagaacuuuggacuaccacgauucaaaugugaagaacuuauaugaaaagguaagaaaccaguuaaaaaacaaugccaaggaaauuggaaauggcugcuuugaauuuuaccacaaaugcgauaacacgugcauggaaagugucaaaaaugggacuuaugacuacccaaaauacucagaggaagcaaaauuaaacagagaagaaauagaugggguaaagcuggaaucaacaaggauuuaccagauuuuggcgaucuauucaacugucgccaguucauugguacugguagucucccugggggcaaucaguuuuuggaugugcucuaaugggucucuacaguguagaauauguauuuaa

SEQ ID NO: 38630 - RNA, 1701 nt, Artificial Sequence
  derived and/or modified CDS sequence (wt) from hemagglutinin__InfluenzaA__AEA72750
augaaggcaauacuaguaguucugcuauauacauuugcaaccgcaaaugcagacacauuauguauagguuaucaugcgaacaauucaacagacacuguagacacaguacuagaaaagaauguaacaguaacacacucuguuaaccuucuagaagacaaacauaacgggaaacuaugcaaacuaagagggguagccccauugcauuuggguaaauguaacauugcuggcuggauccugggaaauccagagugugaaucacucuccacagcaagcucaugguccuacauuguggaaacaucuaguucagacaauggaacguguuacccaggaguuuucaucgauuaugaggagcuaagagagcaauugagcucagugucaucauuugaaagguuugagauauuccccaagacaaguucauggcccaaucaugacucgaacaaagguguaacggcagcauguccucaugcuggagcaaaaagcuucuacaaaaauuuaauauggcuaguuaaaaaaggaaauucauacccaaagcucagcaaauccuacauuaaugauaaagggaaagaaguccucgugcuauggggcauucaccauccaucuacuacugcugaccaacaaagucucuaucagaaugcagauacauauguuuuuguggggacaucaagauacagcaagaaguucaagccggaaauagcaauaagacccaaagugagggaucaagaagggagaaugaacuauuacuggacacuaguagagccgggagacaaaauaacauucgaagcaacuggaaaucuagugguaccgagauaugcauucgcaauggaaagaaaugcuggaucugguauuaucauuucagauacaccaguccacgauugcaauacaacuugucagacacccaagggugcuauaaacaccagccucccauuucagaauauacauccgaucacaauuggaaaauguccaaaauauguaaaaagcacaaaauugagacuggccacaggauugaggaaugucccgucuauucaaucuagaggccuauuuggggccauugccggcuucauugaagggggguggacagggaugguagauggaugguacgguuaucaccaucaaaaugagcaggggucaggauaugcagccgaccugaagagcacacagaaugccauugacaagauuacuaacaaaguaaauucuguuauugaaaagaugaauacacaguucacagcaguagguaaagaguucaaccaccuggaaaaaagaauagagaauuuaaauaaaaaaguugaugaugguuuccuggacauuuggacuuacaaugccgaacuguugguucuauuggaaaaugaaagaacuuuggacuaccacgauucaaaugugaagaacuuauaugaaaagguaagaaaccaguuaaaaaacaaugccaaggaaauuggaaacggcugcuuugaauuuuaccacaaaugcgauaacacgugcauggaaagugucaaaaaugggacuuaugacuacccaaaauacucagaggaagcaaaauuaaacagagaagaaauagaugggguaaagcuggaaucaacaaggauuuaccagauuuuggcgaucuauucaacugucgccaguucauugguacugguagucucccugggggcaaucaguuucuggaugugcucuaaugggucucuacaguguagaauauguauuuaa

SEQ ID NO: 38631 - RNA, 1701 nt, Artificial Sequence; identical to SEQ ID NO: 38450
  derived and/or modified CDS sequence (wt) from hemagglutinin__InfluenzaA__AEA72759

SEQ ID NO: 38632 - RNA, 1701 nt, Artificial Sequence
  derived and/or modified CDS sequence (wt) from hemagglutinin__InfluenzaA__AEA72777
augaaggcaauacuaguaguucugcuauauacauuagcaaccgcaaaugcagacacauuauguauagguuaucaugcgaacaauucaacagacacuguagacacaguacuagaaaagaauguaacaguaacacacucuguuaaccuucuagaagacaagcaugacgggaaacuaugcaaacuaagagggguagccccauugcauuuggguaaauguaacauugcuggcuggauccugggaaauccagagugugaaucacucuccacagcaagcucaugguccuacauuguggaaacaucuaguucagacaauggaacguguuacccaggagauuucaucgauuaugaagagcuaagagagcaauugagcucagugucaucauuugaaagguuugagauauuccccaagacaaguucauggcccaaucaugacucgaacaaagguguaacggcagcauguccucaugcuggagcaaaaagcuucuacaaaaauuuaauauggcuaguuaaaaaaggaaauucauacccaaagcucagcaaauccuacauuaaugauaaagggaaagaaauccucgugcuauggggcauucaccauccaucuacuagugcugaccaacaaagucucuaucagaaugcagaugcauauguuuuuguggggacaucaagauacagcaagaaguucaagccggaaauagcaauaagacccaaagugagggaucaagaagggagaaugaacuauuacuggacacuaguagagccgggagacaaaauaacauucgaagcaacuggaaaucuagugguaccgagauaugcauucgcaauggaaagaaaugcuggaucugguauuaucauuucagauacaccaguccacgauugcaaugcaacuugucagacacccaagggugcuauaaacaccagccucccauuucagaauauacauccgaucacaauuggaaaauguccaaaauauguaaaaagcacaaaauugagacuggccacaggauugaggaaugucccgucuauucaaucuagaggccuauuuggggccauugccgguuucauugaagggggguggacagggaugguagauggaugguacgguuaucaccaucaaaaugagcaggggucaggauaugcagccgaccugaagagcacacagaaugccauugacaagauuacuaacaaaguaaauucuguuauugaaaagaugaauacacaguucacagcaguagguaaagaguucaaccaccuggaaaaaagaauagagaauuuaaauaaaaaaguugaugaugguuuccuggacauuuggacuuacaaugccgaacuguugguucuauuggaaaaugaaagaacuuuggacuaccacgauucaaaugugaagaacuuauaugaaaagguaagaagccaguuaaaaaacaaugccaaggaaauuggaaacggcugcuuugaauuuuaccacaaaugcgauaacacgugcauggaaagugucaaaaaugggacuuaugacuacccaaaauacucagaggaagcaaaauuaaacagagaagaaauagaugggguaaagcuggaaucaacaaggauuuaccagauuuuggcgaucuauucaacugucgccaguucauugguacugguagucucccugggggcaaucaguuucuggaugugcucuaaugggucucuacaguguagaauauguauuuaa

SEQ ID NO: 38633 - RNA, 1701 nt, Artificial Sequence; identical to SEQ ID NO: 38450
  derived and/or modified CDS sequence (wt) from hemagglutinin__InfluenzaA__AEA72787

SEQ ID NO: 38634 - RNA, 1701 nt, Artificial Sequence; identical to SEQ ID NO: 37545
  derived and/or modified CDS sequence (wt) from hemagglutinin__InfluenzaA__AEA73288

SEQ ID NO: 38635 - RNA, 1701 nt, Artificial Sequence; identical to SEQ ID NO: 37545
  derived and/or modified CDS sequence (wt) from hemagglutinin__InfluenzaA__AEA73299

SEQ ID NO: 38636 - RNA, 1701 nt, Artificial Sequence
  derived and/or modified CDS sequence (wt) from hemagglutinin__InfluenzaA__AEA73310
augaagacuaucauugcuuugagcuacauucuaugucugguuuucgcucaaaaacuuccuggaaaugacaacagcacggcaacgcugugccuugggcaccaugcaguaccaaacggaacgauagugaaaacaaucacgaaugaccaaauugaaguuacuaaugcuacugagcugguucagaguuccucaacaggugaaauaugcgacaguccucaucagauccuugauggagaaaacugcacacuaauagaugcucuauugggagacccucagugugauggcuuccaaaauaagaaaugggaccuuuuuguugaacgaagcaaagccuacagcaacuguuacccuuaugaugugccggauuaugccucccuuaggucacuaguugccucauccggcacacuggaguuuaacaaugaaagcuucaauuggacuggagucacucaaaacgggacaagcucugcuugcauaaggagaucuaauaauaguuucuuuaguagauugaauugguugacccacuuaaacuucaaauacccagcauugaacgugacuaugccaaacaaugaacaauuugacaaauuguacauuugggggguucaccacccggguacggacaaggaccaaaucuuccuguaugcucaagcaucaggaagaaucacaguaucuaccaaaagaagccaacaagcuguaaucccgaauaucggaucuagacccagaguaaggaauaucccuagcagaauaagcaucuauuggacaauaguaaaaccgggagacauacuuuugauuaacagcacagggaaucuaauugcuccuagggguuacuucaaaauacgaaguggaaaaagcucaauaaugagaucagaugcacccauuggcaaaugcaauucugaaugcaucacuccaaauggaagcauucccaaugacaaaccauuccaaaauguaaacaggaucacauacggggccugucccagauauguuaagcaaagcacucugaaauuggcaacaggaaugcgaaauguaccagagaaacaaacuagaggcauauuuggcgcaauagcggguuucauagaaaaugguugggagggaaugguggaugguugguacgguuucaggcaucaaaauucugagggaagaggacaagcagcagaucucaaaagcacucaagcagcaaucgaucaaaucaaugggaagcugaauagauugaucgggaaaaccaacgagaaauuccaucagauugaaaaagaauucucagaagucgaagggagaauucaggaccuugagaaauauguugaggacacuaaaauagaucucuggucauacaacgcggagcuucuuguugcccuggagaaccaacauacaauugaucuaacugacucagaaaugaacaaacuguuugaaaaaacaaagaagcaacugagggaaaaugcugaggauaugggcaaugguuguuucacaauauaccacaaaugugacaaugccugcauaggaucaaucagaaauggaacuuaugaccacaauguauacagagaugaagcauuaaacaaccgguuccagaucaagggaguugagcugaagucaggguacaaagauuggauccuauggauuuccuuugccauaucauguuuuuugcuuuguguugcuuuguugggguucaucaugugggccugccaaaaaggcaacauuaggugcaacauuugcauuuga

SEQ ID NO: 38637 - RNA, 1701 nt, Artificial Sequence
  derived and/or modified CDS sequence (wt) from hemagglutinin__InfluenzaA__AEA73321
augaagacuaucauugcuuugagcuacauucuaugucugguuuucgcucaaaaacuuccuggaaaugacaacagcacggcaacgcugugccuugggcaccaugcaguaccaaacggaacgauagugaaaacaaucacgaaugaccaaauugaaguuacuaaugcuacugagcugguucagaguuccucaacaggugaaauaugcgacaguccucaucagauccuugauggagaaaacugcacacuaauagaugcucuauugggagacccucagugugauggcuuccaaaauaagaaaugggaccuuuuuguugaacgaagcaaagccuacagcaacuguuacccuuaugaugugccggauuaugccucccuuaggucacuaguugccucauccggcacacuggaguuuaacaaugaaagcuucaauuggacuggagucacucaaaacggaacaagcucugcuugcauaaggagaucuaauaauaguuucuuuaguagauugaauugguugacccacuuaaacuucaaauacccagcauugaacgugacuaugccaaacaaugaacaauuugacaaauuguacauuugggggguucaccacccggguacggacaaggaccaaaucuuccuguaugcucaagcaucaggaagaaucacaguaucuaccaaaagaagccaacaagcuguaaucccgaauaucggaucuagacccagaguaaggaauaucccuagcagaauaagcaucuauuggacaauaguaaaaccgggagacauacuuuugauuaacagcacagggaaucuaauugcuccuagggguuacuucaaaauacgaaguggaaaaagcucaauaaugagaucagaugcacccauuggcaaaugcaauucugaaugcaucacuccaaauggaagcauucccaaugacaaaccauuccaaaauguaaacaggaucacauacggggccugucccagauauguuaagcaaagcacucugaaauuggcaacaggaaugcgaaauguaccagagaaacaaacuagaggcauauuuggcgcaauagcggguuucauagaaaaugguugggagggaaugguggaugguugguacgguuucaggcaucaaaauucugagggaagaggacaagcagcagaucucaaaagcacucaagcagcaaucgaucaaaucaaugggaagcugaauagauugaucgggaaaaccaacgagaaauuccaucagauugaaaaagaauucucagaagucgaagggagaauucaggaccuugagaaauauguugaggacacuaaaauagaucucuggucauacaacgcggagcuucuuguuacccuggagaaccaacauacaauugaucuaacugacucagaaaugaacaaacuguuugaaaaaacaaagaagcaacugagggaaaaugcugaggauaugggcaaugguuguuucacaauauaccacaaaugugacaaugccugcauaggaucaaucagaaauggaacuuaugaccacaauguauacagagaugaagcauuaaacaaccgguuccagaucaagggaguugagcugaagucaggguacaaagauuggauccuauggauuuccuuugccauaucauguuuuuugcuuuguguugcuuuguugggguucaucaugugggccugccaaaaaggcaacauuaggugcaacauuugcauuuga

SEQ ID NO: 38638 - RNA, 1701 nt, Artificial Sequence; identical to SEQ ID NO: 37545
  derived and/or modified CDS sequence (wt) from hemagglutinin__InfluenzaA__AEA73332

SEQ ID NO: 38639 - RNA, 1701 nt, Artificial Sequence; identical to SEQ ID NO: 37545
  derived and/or modified CDS sequence (wt) from hemagglutinin__InfluenzaA__AEA73343

SEQ ID NO: 38640 - RNA, 1701 nt, Artificial Sequence; identical to SEQ ID NO: 37545
  derived and/or modified CDS sequence (wt) from hemagglutinin__InfluenzaA__AEA73354

SEQ ID NO: 38641 - RNA, 1701 nt, Artificial Sequence
  derived and/or modified CDS sequence (wt) from hemagglutinin__InfluenzaA__AEA73365
augaagacuaucauugcuuugagcuacacucuaugucugguuuucgcucaaaaacuuccuggaaaugacaacagcacggcaacgcugugccuugggcaccaugcaguaccaaacggaacgauagugaaaacaaucacgaaugaccaaauugaaguuacuaaugcuacugagcugguucagaguuccucaacaggugaaauaugcgacaguccucaucagauccuugauggagaaaacugcacacuaauagaugcucuauugggagacccucagugugauggcuuccaaaauaagaaaugggaccuuuuuguugaacgaagcaaagccuacagcaacuguuacccuuaugaugugccggauuaugccucccuuaggucacuaguugccucauccggcacauuggaguuuaacaaugaaagcuucaauuggacuggagucacucaaaacggaacaagcucugcuugcauaaggagaucuaauaauaguuucuuuaguagauugaauugguugacccacuuaaacuucaaauacccagcauugaacgugacuaugccaaacaaugaacaauuugacaaauuguacauuugggggguucaccacccggguacggacaaggaccaaaucuuccuguaugcucaagcaucaggaagaaucacaguaucuaccaaaagaagccaacaagcuguaaucccgaauaucggaucuagacccagaguaaggaauaucccuagcagaauaagcaucuauuggacaauaguaaaaccgggagacauacuuuugauuaacagcacagggaaucuaauugcuccuagggguuacuucaaaauacgaaguggaaaaagcucaauaaugagaucagaugcacccauuggcaaaugcaauucugaaugcaucacuccaaauggaagcauucccaaugacaaaccauuccaaaauguaaacaggaucacauacggggccugucccagauauguuaagcaaagcacucugaaauuggcaacaggaaugcgaaauguaccagagaaacaaacuagaggcauauuuggcgcaauagcggguuucauagaaaaugguugggagggaaugguggaugguugguacgguuucaggcaucaaaauucugagggaagaggacaagcagcagaucucaaaagcacucaagcagcaaucgaucaaaucaaugggaagcugaauagauugaucgggaaaaccaacgagaaauuccaucagauugaaaaagaauucucagaagucgaagggagaauucaggaccuugagaaauauguugaggacacuaaaauagaucucuggucauacaacgcggagcuucuuguugcccuggagaaccaacauacaauugaucuaacugacucagaaaugaacaaacuguuugaaaaaacaaagaagcaacugagggaaaaugcugaggauaugggcaaugguuguuucacaauauaccacaaaugugacaaugccugcauaggaucaaucagaaauggaacuuaugaccacaauguauacagagaugaagcauuaaacaaccgguuccagaucaagggaguugagcugaagucaggguacaaagauuggauccuauggauuuccuuugccauaucauguuuuuugcuuuguguugcuuuguugggguucaucaugugggccugccaaaaaggcaacauuaggugcaacauuugcauuuga

SEQ ID NO: 38642 - RNA, 1701 nt, Artificial Sequence; identical to SEQ ID NO: 37545
  derived and/or modified CDS sequence (wt) from hemagglutinin__InfluenzaA__AEA73376

SEQ ID NO: 38643 - RNA, 1701 nt, Artificial Sequence; identical to SEQ ID NO: 38060
  derived and/or modified CDS sequence (wt) from hemagglutinin__InfluenzaA__AEA73387

SEQ ID NO: 38644 - RNA, 1701 nt, Artificial Sequence; identical to SEQ ID NO: 37545
  derived and/or modified CDS sequence (wt) from hemagglutinin__InfluenzaA__AEA73398

SEQ ID NO: 38645 - RNA, 1701 nt, Artificial Sequence; identical to SEQ ID NO: 37545
  derived and/or modified CDS sequence (wt) from hemagglutinin__InfluenzaA__AEA73409

SEQ ID NO: 38646 - RNA, 1701 nt, Artificial Sequence; identical to SEQ ID NO: 37545
  derived and/or modified CDS sequence (wt) from hemagglutinin__InfluenzaA__AEA73420

SEQ ID NO: 38647 - RNA, 1701 nt, Artificial Sequence; identical to SEQ ID NO: 37545
  derived and/or modified CDS sequence (wt) from hemagglutinin__InfluenzaA__AEA73452

SEQ ID NO: 38648 - RNA, 1701 nt, Artificial Sequence; identical to SEQ ID NO: 37545
  derived and/or modified CDS sequence (wt) from hemagglutinin__InfluenzaA__AEA73463

SEQ ID NO: 38649 - RNA, 1701 nt, Artificial Sequence; identical to SEQ ID NO: 37545
  derived and/or modified CDS sequence (wt) from hemagglutinin__InfluenzaA__AEA73474

SEQ ID NO: 38650 - RNA, 1701 nt, Artificial Sequence
  derived and/or modified CDS sequence (wt) from hemagglutinin__InfluenzaA__AEA73485
augaagacuaucauugcuuugagcuacauucuaugucugguuuucgcucaaaaacuuccuggaaaugacaacagcacggcaacgcugugccuugggcaccaugcaguaccaaacggaacgauagugaaaacaaucacgaaugaccaaauugaaguuacuaaugcuacugaacugguucagaguuccucaacaggugaaauaugcgacaguccucaucagauccuugauggagaaaacugcacacuaauagaugcucuauugggagacccucagugugauggcuuccaaaauaagaaaugggaccuuuuuguugaacgaagcaaagcccacagcaacuguuacccuuaugaugugccggauuaugccucccuuaggucacuaguugccucauccggcacacuggaguuuaacaaugaaagcuucaauuggacuggagucacucaaaacggaacaagcucugcuugcauaaggagaucuaauaauaguuucuuuaguagauugaauugguugacccacuuaaacuucaaauacccagcauugaacgugacuaugccaaacaaugaacaauuugacaaauuguacauuugggggguucaccacccggguacggacaaggaccaaaucuuccuguaugcucaagcaucaggaagaaucacaguaucuaccaaaagaagccaacaagcuguaaucccgaauaucggaucuagacccagaguaaggaauaucccuagcagaauaagcaucuauuggacaauaguaaaaccgggagacauacuuuugauuaacagcacagggaaucuaauugcuccuagggguuacuucaaaauacgaaguggaaaaagcucaauaaugagaucagaugcacccauuggcaaaugcaauucugaaugcaucacuccaaauggaagcauucccaaugacaaaccauuccaaaauguaaacaggaucacauacggggccugucccagauauguuaagcaaagcacucugaaauuggcaacaggaaugcgaaauguaccagagaaacaaacuagaggcauauuuggcgcaauagcggguuucauagaaaaugguugggagggaaugguggaugguugguacgguuucaggcaucaaaauucugagggaagaggacaagcagcagaucucaaaagcacucaagcagcaaucgaucaaaucaaugggaagcugaauagauugaucgggaaaaccaacgagaaauuccaucagauugaaaaagaauucucagaagucgaagggagaauucaggaccuugagaaauauguugaggacacuaaaauagaucucuggucauacaacgcggagcuucuuguugcccuggagaaccaacauacaauugaucuaacugacucagaaaugaacaaacuguuugaaaaaacaaagaagcaacugagggaaaaugcugaggauaugggcaaugguuguuucacaauauaccacaaaugugacaaugccugcauaggaucaaucagaaauggaacuuaugaccacaauguauacagagaugaagcauuaaacaaccgguuccagaucaagggaguugagcugaagucaggguacaaagauuggauccuauggauuuccuuugccauaucauguuuuuugcuuuguguugcuuuguugggguucaucaugugggccugccaaaaaggcaacauuaggugcaacauuugcauuuga

SEQ ID NO: 38651 - RNA, 1701 nt, Artificial Sequence; identical to SEQ ID NO: 37545
  derived and/or modified CDS sequence (wt) from hemagglutinin__InfluenzaA__AEA73496

SEQ ID NO: 38652 - RNA, 1701 nt, Artificial Sequence; identical to SEQ ID NO: 37545
  derived and/or modified CDS sequence (wt) from hemagglutinin__InfluenzaA__AEA73507

SEQ ID NO: 38653 - RNA, 1701 nt, Artificial Sequence; identical to SEQ ID NO: 37545
  derived and/or modified CDS sequence (wt) from hemagglutinin__InfluenzaA__AEA73518

SEQ ID NO: 38654 - RNA, 1701 nt, Artificial Sequence; identical to SEQ ID NO: 37545
  derived and/or modified CDS sequence (wt) from hemagglutinin__InfluenzaA__AEA73529

SEQ ID NO: 38655 - RNA, 1701 nt, Artificial Sequence; identical to SEQ ID NO: 37545
  derived and/or modified CDS sequence (wt) from hemagglutinin__InfluenzaA__AEA73540

SEQ ID NO: 38656 - RNA, 1701 nt, Artificial Sequence; identical to SEQ ID NO: 37545
  derived and/or modified CDS sequence (wt) from hemagglutinin__InfluenzaA__AEA73551

SEQ ID NO: 38657 - RNA, 1701 nt, Artificial Sequence; identical to SEQ ID NO: 37545
  derived and/or modified CDS sequence (wt) from hemagglutinin__InfluenzaA__AEA73562

SEQ ID NO: 38658 - RNA, 1698 nt, Artificial Sequence
  derived and/or modified CDS sequence (wt) from hemagglutinin__InfluenzaA__AEA73573
augaaaguaaaacuacugguccuguuaugcacauuuacagcuacauaugcagacacaauauguauaggcuaccaugcuaacaacucgaccgacacuguugacacaguacuugaaaagaaugugacagugacacacucugucaaccugcuugagaacagucacaauggaaaacuaugucuauuaaaaggaauagccccacuacaauuggguaacugcagcguugccggguggaucuuaggaaacccagaaugcgaauuacugauuuccaaggagucaugguccuacauuguagaaaaaccaaauccugagaauggaacauguuacccagggcauuucgcugacuaugaggaacugagggagcaauugaguucaguaucuucauuugagagguucgaaauauuccccaaagaaagcucauggcccaaccacaccguaaccggagugucagcaucaugcucccauaauggggaaagcaguuuuuacagaaauuuacuauggcugacggagaagaaugguuuguacccaaaccugagcaaguccuaugcaaacaacaaagaaaaagaaguccuuguacuaugggguguucaucacccgccaaacauaggugaccaaaagacccucuaucauacagaaaaugcuuauguuucuguagugucuucacauuauagcagaaaauucaccccagaaauagccaaaagacccaaaguaagagaccaagaaggaagaaucaacuacuacuggacucugcuugaacccggggauacaauaauauuugaggcaaauggaaaucuaauagcgccaagauaugcuuucgcacuaaguagaggcuuuggaucaggaaucaucaacucaaaugcaccaauggauaaaugugaugcgaagugccaaacaccucagggagcuauaaacagcagucuuccuuuccagaacguacacccagucacaauaggagaguguccaaaguaugucaggagugcaaaauuaaggaugguuacaggacuaaggaacaucccauccauucaauccagagguuuguuuggagccauugccgguuucauugaagggggguggacuggaaugguagaugguugguaugguuaucaucaucagaaugagcaaggaucuggcuaugcugcagaucaaaaaagcacacaaaaugccauuaaugggauuacaaacaaggugaauucuguaauugagaaaaugaacacucaauucacagcagugggcaaagaauucaacaaauuggaaagaaggauggaaaacuugaauaaaaaaguugaugauggguuuauagacauuuggacauauaaugcagaacuguugguucuacuggaaaaugaaaggacuuuggauuuccaugacuccaaugugaagaaucuguaugagaaaguaaaaagccaguuaaagaauaaugcuaaagaaauaggaaauggguguuuugaauucuaucacaaguguaacgaugaaugcauggagaguguaaagaauggaacuuaugacuauccaaaauauuccgaagaaucaaaguuaaacagggagaaaauugauggagugaaauuggaaucaaugggagucuaucagauucuggcgaucuacucaacagucgccaguucucugguucuuuuggucucccugggggcaaucagcuucuggauguguuccaaugggucuuugcaguguagaauaugcaucuaa

SEQ ID NO: 38659 - RNA, 1698 nt, Artificial Sequence
  derived and/or modified CDS sequence (wt) from hemagglutinin__InfluenzaA__AEA73584
augaaaguaaaacuacugguccuguuaugcacauuuacagcuacauaugcagacacaauauguauaggcuaccaugcuaacaacucgaccgacacuguugacacaguacuugaaaagaaugugacagugacacacucugucaaccugcuugagaacagucacaauggaaaacuaugucuauuaaaaggaauagccccacuacaauuggguaacugcagcguugccggguggaucuuaggaaacccagaaugcgaauuacugauuuccaaggagucaugguccuacauuguagaaaaaccaaauccugagaauggaacauguuacccagggcauuucgcugacuaugaggaacugagggagcaauugaguucaguaucuucauuugagagguucgaaauauuccccaaagaaagcucauggcccaaccacaccguaaccggagugucagcaucaugcucccauaauggggaaagcaguuuuuacagaaauuugcuauggcugacggggaagaaugguuuguacccaaacuugagcaaguccuaugcaaacaacaaagaaaaagaaguccuuguacuaugggguguucaucacccgccaaacauaguugaccaaaagacccucuaucguacagaaaaugcuuauguuucuguagugucuucacauuauagcagaaaauucaccccagaaauagccaaaagacccaaaguaagaaaucaagaaggaagaaucaacuacuacuggacucugcuugaacccggggauacaauaauauuugaggcaaauggaaaucuaauagcgccaagauaugcuuucgcacugaguagaggcuuuggaucaggaaucaucaacucaaaugcaccaauggauaaaugugaugcgaagugccaaacaccucagggagcuauaaacagcagucuuccuuuccagaacguacacccagucacaauaggagaguguccaaaguaugucaggagugcaaaauuaaggaugguuacaggacuaaggaacaucccauccauucaauccagagguuuguuuggagccauugccgguuucauugaagggggguggacuggaaugguagaugguugguaugguuaucaucaucagaaugagcaaggaucuggcuaugcugcagaucaaaaaagcacacaaaaugccauuaaugggauuacaaacaaggugaauucuguaauugagaaaaugaacacucaauucacagcagugggcaaagaauucaacaaauuggaaagaaggauggaaaacuugaauaaaaaaguugaugauggguuuauagacauuuggacauauaaugcagaacuguuaguucuacuggaaaaugaaaggacuuuggauuuccaugacuccaaugugaagaaucuguaugagaaaguaaaaagccaguuaaagaauaaugcuaaagaaauaggaaauggguguuuugaauucuaucacaaguguaacgaugaaugcauggagaguguaaagaauggaacuuaugacuauccaaaauauuccgaagaaucaaaguuaaacagggagaaaauugauggagugaaauuggaaucaaugggagucuaucagauucuggcgaucuacucaacagucgccaguucucugguucuuuuggucucccugggggcaaucagcuucuggauguguuccaaugggucuuugcaguguagaauaugcaucuaa

SEQ ID NO: 38660 - RNA, 1698 nt, Artificial Sequence
  derived and/or modified CDS sequence (wt) from hemagglutinin__InfluenzaA__AEA73595
augaaaguaaaacuacugguccuguuaugcacauuuacagcuacauaugcagacacaauauguauaggcuaccaugcuaacaacucgaccgacacuguugacacaguacuugaaaagaaugugacagugacacacucugucaaccugcuugagaacagucacaauggaaaacuauguuuauuaaaaggaauagccccacuacaauuggguaacugcagcguugccggguggaucuuaggaaacccagaaugcgaauuacugauuuccaaggagucaugguccuacauuguagaaaaaccaaauccugagaauggaacauguuacccagggcauuucgcugacuaugaggaacugagggagcaauugaguucaguaucuucauuugagagguucgaaauauuccccaaagaaagcucauggcccaaccacaccguaaccggagugucagcaucaugcucccauaauggggaaagcaguuuuuacagaaauuugcuauggcugacggugaagaaugguuuguacccaaacuugagcaaguccuaugcaaacaacaaagaaaaagaaguccuuguacuaugggguguucaucacccgccaaacauaguugaccaaaagacccucuaucauacagaaaaugcuuauguuucuguagugucuucacauuauagcagaaaauucaccccagaaauagccaaaagacccaaaguaagagaucaagaaggaagaaucaacuacuacuggacucugcuugaacccggggauacaauaauauuugaggcaaauggaaaucuaauagcgccaagauaugcuuucgcacugaguagaggcuuuggaucaggaaucaucaacucaaaugcaccaauggauaaaugugaugcgaagugccaaacaccucggggagcuauaaacagcagucuuccuuuccagaacguacacccagucacaauaggagaguguccaaaguaugucaggagugcaaaauuaaggaugguuacaggacuaaggaacaucccauccauucaauccagagguuuguuuggagccauugccgguuucauugaagggggguggacuggaaugguagaugguugguaugguuaucaucaucagaaugagcaaggaucuggcuaugcugcagaucaaaaaagcacacaaaaugccauuaaugggauuacaaacaaggugaauucuguaauugagaaaaugaacacucaauucacagcagugggcaaagaauucaacaaauuggaaagaaggauggaaaacuugaauaaaaaaguugaugauggguuuauagacauuuggacauauaaugcagaacuguugguucuacuggaaaaugaaaggacuuuggauuuccaugacuccaaugugaagaaucuguaugagaaaguaaaaagccaguuaaagaauaaugcuaaagaaauaggaaauggguguuuugaauucuaccacaaguguaacgaugaaugcauggagaguguaaagaauggaaccuaugacuauccaaaauauuccgaagaaucaaaguuaaacagggagaaaauugauggagugaaauuggaaucaaugggagucuaucagauucuggcgaucuacucaacagucgccaguucucugguucuuuuggucucccugggggcaaucagcuucuggauguguuccaaugggucuuugcaguguagaauaugcaucuaa

SEQ ID NO: 38661 - RNA, 1698 nt, Artificial Sequence; identical to SEQ ID NO: 38000
  derived and/or modified CDS sequence (wt) from hemagglutinin__InfluenzaA__AEA73606

SEQ ID NO: 38662 - RNA, 1698 nt, Artificial Sequence; identical to SEQ ID NO: 38398
  derived and/or modified CDS sequence (wt) from hemagglutinin__InfluenzaA__AEA73617

SEQ ID NO: 38663 - RNA, 1698 nt, Artificial Sequence
  derived and/or modified CDS sequence (wt) from hemagglutinin__InfluenzaA__AEA73628
augaaaguaaaacuacugguccuguuaugcacauuuacagcuacauaugcagacacaauauguauaggcuaccaugcuaacaacucgaccgacacuguugacacaguacuugaaaagaaugugacagugacacacucugucaaccugcuugagaacagucacaauggaaaacuauguuuauuaaaaggaauagccccacuacaauuggguaacugcagcguugccggguggaucuuaggaaacccagaaugcgaauuacugauuuccaaggagucaugguccuacauuguagaaaaaccaaauccugagaauggaacauguuacccagggcauuucgcugacuaugaggaacugagggagcaauugaguucaguaucuucauuugagagguucgaaauauuccccaaagaaagcucauggcccaaccacaccguaaccggagugucagcaucaugcucccauaauggggaaagcaguuuuuacagaaauuugcuauggcugacggugaagaaugguuuguacccaaacuugagcaaguccuaugcaaacaacaaagaaaaagaaguccuuguacuaugggguguucaucacccgccaaacauaguugaccaaaagacccucuaucguacagaaaaugcuuauguuucuguagugucuucacauuauagcagaaaauucaccccagaaauagccaaaagacccaaaguaagagaucaagaaggaagaaucaacuacuacuggacucugcuugaacccggggauacaauaauauuugaggcaaauggaaaucuaauagcgccaagauaugcuuucgcacugaguagaggcuuuggaucaggaaucaucaacucaaaugcaccaauggauaaaugugaugcgaagugccaaacaccucggggagcuauaaacagcagucuuccuuuccagaacguacacccagucacaauaggagaguguccaaaguaugucaggagugcaaaauuaaggaugguuacaggacuaaggaacaucccauccauucaauccagagguuuguuuggagccauugccgguuucauugaagggggguggacuggaaugguagaugguugguaugguuaucaucaucagaaugagcaaggaucuggcuaugcugcagaucaaaaaagcacacaaaaugccauuaaugggauuacaaacaaggugaauucuguaauugagaaaaugaacacucaauucacagcagugggcaaagaauucaacaaauuggaaagaaggauggaaaacuugaauaaaaaaguugaugauggguuuauagacauuuggacauauaaugcagaacuguugguucuacuggaaaaugaaaggacuuuggauuuccaugacuccaaugugaagaaucuguaugagaaaguaaaaagccaguuaaagaauaaugcuaaagaaauaggaaauggguguuuugaauucuaucacaaguguaacgaugaaugcauggagaguguaaagaauggaaccuaugacuauccaaaauauuccgaagaaucaaaguuaaacagggagaaaauugauggagugaaauuggaaucaaugggagucuaucagauccuggcgaucuacucaacagucgccaguucucugguucuuuuggucucccugggggcaaucagcuucuggauguguuccaaugggucuuugcaguguagaauaugcauauaa

SEQ ID NO: 38664 - RNA, 1698 nt, Artificial Sequence
  derived and/or modified CDS sequence (wt) from hemagglutinin__InfluenzaA__AEA73639
augaaaguaaaacuacugguccuguuaugcacauuuacagcuacauaugcagacacaauauguauaggcuaccaugcuaacaacucgaccgacacuguugacacaguacuugaaaagaaugugacagugacacacucugucaaccugcuugagaacagucacaauggaaaacugugucuauuaaaaggaauagccccacuacaauuggguaacugcagcguugccggguggaucuuaggaaauccagaaugcgaauuacugauuuccaaggagucaugguccuacauuguagaaaaaccaaauccugagaauggaacauguuacccagggcauuucgcugacuaugaggaacugagggagcaauugaguucaguaucuucauuugagagguucgaaauauuccccaaagaaagcucauggcccaaccacaccguaaccggagugucagcaucaugcucccauaauggggaaagaaguuuuuacagaaauuugcuauggcugacggggaagaaugguuuguacccaaaccugagcaaguccuaugcaaacaacaaagaaaaagaaguccuuguacuaugggguguucaucacccgccagacauaggugaccaaaagacccucuaucauacagaaaaugcuuauguuucuguagugucuucacauuauagcagaaaauucaccccagaaauagccaaaagacccaaaguaagagaucaagaaggaagaaucaacuacuacuggacucugcuugaacccggggauacaauaauauuugaggcaaauggaaaucuaauagcgccaagauaugcuuucgcacugaguagaggcuuuggaucaggaaucaucaacucaaaugcaccaauggauaaaugugaugcgaagugccaaacaccucagggagcuauaaacagcagucuuccuuuccagaacguacacccagucacaauaggagaguguccaaaguaugucaggagugcaaaauuaaggaugguuacuggacuaaggaacaucccauccauucaauccagagguuuguuuggagccauugccgguuucauugaagggggguggacuggaaugguagaugguugguaugguuaucaucaucagaaugagcaagggucuggcuaugcugcagaucaaaaaagcacacaaaaugccauuaaugggauuacaaacaaggugaauucuguaauugagaaaaugaacacucaauucacagcagugggcaaagaauucaacaaauuggaaagaaggauggaaaacuugaauaaaaaaguugaugauggguuuauagacauuuggacauauaaugcagaacuguugguucuacuggaaaaugaaaggacuuuggauuuccaugauuccaaugugaagaaucuguaugagaaaguaaaaagccaguuaaagaauaaugcuaaagaaauaggaaauggguguuuugaauucuaucacaaguguaacgaugagugcauggagaguguaaagaauggaacuuaugacuauccaaaauauuccgaagaaucaaaguuaaacagggagaaaauugauggagugaaauuggaaucaaugggagucuaucagauucuggcgaucuacucaacagucgccaguucucugguucuuuuggucucccugggggcaaucaguuucuggauguguuccaaugggucuuugcaguguagaauaugcaucuaa

SEQ ID NO: 38665 - RNA, 1698 nt, Artificial Sequence; identical to SEQ ID NO: 38398
  derived and/or modified CDS sequence (wt) from hemagglutinin__InfluenzaA__AEA73650

SEQ ID NO: 38666 - RNA, 1698 nt, Artificial Sequence; identical to SEQ ID NO: 38401
  derived and/or modified CDS sequence (wt) from hemagglutinin__InfluenzaA__AEA73661

SEQ ID NO: 38667 - RNA, 1698 nt, Artificial Sequence
  derived and/or modified CDS sequence (wt) from hemagglutinin__InfluenzaA__AEA73672
augaaaguaaaacuacugguccuguuaugcacauuuacagcuacauuugcagacacaauauguauaggcuaccaugcuaacaacucgaccgacacuguugacacaguacuugaaaagaaugugacagugacacacucugucaaccugcuugagaacagucacaaugggaaacuauguuuauuaaaaggaauagccccacuacaauuggguaacugcagcguugccggguggaucuuaggaaacccagaaugcgaauuacugauuuccaaggagucaugguccuacauuguagaaaaaccaaauccugagaauggaacauguuacccagggcauuucgcugacuaugaggaacugagggagcaauugaguucaguaucuucauuugagagguucgaaauauuccccaaagaaagcucauggcccaaccacaccguaaccggagugucagcaucaugcucccauaauggggaaagcaguuuuuacagaaauuugcuauggcugacggugaagaaugguuuguacccaaacuugagcaaguccuaugcaaacaacaaagaaaaagaaguccuuguacuaugggguguucaucacccgccaaacauaguugaccaaaagacccucuaucguacagaaaaugcuuauguuucuguagugucuucacauuauagcagaaaauucaccccagaaauagccaaaagacccaaaguaagagaucaagaaggaagaaucaacuacuacuggacucugcuugaacccggggauacaauaauauuugaggcaaauggaaaucuaauagcgccaagauaugcuuucgcacugaguagaggcuuuggaucaggaaucaucaacucaaaugcaccaauggauaaaugugaugcgaagugccaaacaccucggggagcuauaaacagcagucuuccuuuccagaacguacacccagucacaauaggagaguguccaaaguaugucaggagugcaaaauuaaggaugguuacaggacuaaggaacaucccauccauucaauccagagguuuguuuggagccauugccgguuucauugaagggggguggacuggaaugguagaugguugguaugguuaucaucaucagaaugagcaaggaucuggcuaugcugcagaucaaaaaagcacacaaaaugccauuaaugggauuacaaacaaggugaauucuguaauugagaaaaugaacacucaauucacagcagugggcaaagaauucaacaaauuggaaagaaggauggaaaacuugaauaaaaaaguugaugauggguuuauagacauuuggacauauaaugcagaacuguugguucuacuggaaaaugaaaggacuuuggauuuccaugacuccaaugugaagaaucuguaugagaaaguaaaaagccaguuaaagaauaaugcuaaagaaauaggaaauggguguuuugaauucuaucacaaguguaacgaugaaugcauggagaguguaaagaauggaaccuaugacuauccaaaauauuccgaagaaucaaaguuaaacagggagaaaauugauggagugaaauuggaaucaaugggagucuaucagauucuggcgaucuacucaacagucgccaguucucugguucuuuuggucucccugggggcaaucagcuucuggauguguuccaaugggucuuugcaguguagaauaugcaucuaa

SEQ ID NO: 38668 - RNA, 1698 nt, Artificial Sequence; identical to SEQ ID NO: 38427
  derived and/or modified CDS sequence (wt) from hemagglutinin__InfluenzaA__AEA73683

SEQ ID NO: 38669 - RNA, 1698 nt, Artificial Sequence
  derived and/or modified CDS sequence (wt) from hemagglutinin__InfluenzaA__AEA73694
augaaaguaaaacuacugguccuguuaugcacauuuacagcuacauaugcagacacaauauguauaggcuaccaugcuaacaacucgaccgacacuguugacacaguacuugaaaagaaugugacagugacacacucugucaaccugcuugagaacagucacaaugggaaacuauguuuauuaaaaggaauagccccacuacaauugggaaacugcagcguugccggguggaucuuaggaaacccagaaugcgaauuacugauuuccaaggagucaugguccuacauuguagaaaaaccaaauccugagaauggaacauguuacccagggcauuucgcugacuaugaggaacugagggagcaauugaguucaguaucuucauuugagagguucgaaauauuccccaaagaaagcucauggcccaaccacaccguaaccggagugucagcaucaugcucccauaauggggaaagcaguuuuuacagaaauuugcuauggcugacggugaagaaugguuuguacccaaacuugagcaaguccuaugcaaacaacaaagaaaaagaaguccuuguacuaugggguguucaucacccgccaaacauaguugaccaaaagacccucuaucguacagaaaaugcuuauguuucuguagugucuucacauuauagcagaaaauucaccccagaaauagccaaaagacccaaaguaagagaucaagaaggaagaaucaacuacuacuggacucugcuugaacccggggauacaauaauauuugaggcaaauggaaaucuaauagcgccaagauaugcuuucgcacugaguagaggcuuuggaucaggaaucaucaacucaaaugcaccaauggauaaaugugaugcgaagugccaaacaccucggggagcuauaaacagcagucuuccuuuccagaacguacacccagucacaauaggagaguguccaaaguaugucaggagugcaaaauuaaggaugguuacaggacuaaggaacaucccauccauucaauccagagguuuguuuggagccauugccgguuucauugaagggggguggacuggaaugguagaugguugguaugguuaucaucaucagaaugagcaaggaucuggcuaugcugcagaucaaaaaagcacacaaaaugccauuaaugggauuacaaacaaggugaauucuguaauugagaaaaugaacacucaauucacagcagugggcaaagaauucaacaaauuggaaagaaggauggaaaacuugaauaaaaaaguugaugauggguuuauagacauuuggacauauaaugcagaacuguugguucuacuggaaaaugaaaggacuuuggauuuccaugacuccaaugugaagaaucuguaugagaaaguaaaaagccaguuaaagaauaaugcuaaagaaauaggaaauggguguuuugaauucuaucacaaguguaacgaugaaugcauggagaguguaaagaauggaaccuaugacuauccaaaauauuccgaagaaucaaaguuaaacagggagaaaauugauggaguggaauuggaaucaaugggagucuaucagauucuggcgaucuacucaacagucgccaguucucugguucuuuuggucucccugggggcaaucagcuucuggauguguuccaaugggucuuugcaguguagaauaugcaucuaa

SEQ ID NO: 38670 - RNA, 1698 nt, Artificial Sequence; identical to SEQ ID NO: 38401
  derived and/or modified CDS sequence (wt) from hemagglutinin__InfluenzaA__AEA73705

SEQ ID NO: 38671 - RNA, 1698 nt, Artificial Sequence; identical to SEQ ID NO: 38398
  derived and/or modified CDS sequence (wt) from hemagglutinin__InfluenzaA__AEA73716

SEQ ID NO: 38672 - RNA, 1698 nt, Artificial Sequence; identical to SEQ ID NO: 38398
  derived and/or modified CDS sequence (wt) from hemagglutinin__InfluenzaA__AEA73727

SEQ ID NO: 38673 - RNA, 1698 nt, Artificial Sequence; identical to SEQ ID NO: 38398
  derived and/or modified CDS sequence (wt) from hemagglutinin__InfluenzaA__AEA73738

SEQ ID NO: 38674 - RNA, 1698 nt, Artificial Sequence; identical to SEQ ID NO: 38398
  derived and/or modified CDS sequence (wt) from hemagglutinin__InfluenzaA__AEA73749

SEQ ID NO: 38675 - RNA, 1698 nt, Artificial Sequence
  derived and/or modified CDS sequence (wt) from hemagglutinin__InfluenzaA__AEA73760
augaaaguaaaacuacugguccuguuaugcacauuuacagcuacauaugcagacacaauauguauaggcuaccaugcuaacaacucgaccgacacuguugacacaguacuugaaaagaaugugacagugacacacucugucaaccugcuugagaacagucacaaugggaaacuauguuuauuaaaaggaauagccccacuacaauuggguaacugcagcguugccggguggaucuuaggaaacccagaaugcgaauuacugauuuccaaggagucaugguccuacauuguagaaaaaccaaauccugagaauggaacauguuacccagggcauuucgcugacuaugaggaacugagggagcaauugaguucaguaucuucauuugagagguucgaaauauuccccaaagaaagcucauggcccaaccacaccguaaccggagugucagcaucaugcucccauaauggggaaagcaguuuuuacagaaauuugcuauggcugacggugaagaaugguuuguacccaaacuugagcaaguccuaugcaaacaacaaagaaaaagaaguccuuguacuaugggguguucaucacccgccaaacauaguugaccaaaagacccucuaucguacagaaaaugcuuauguuucuguagugucuucacauuauagcagaaaauucaccccagaaauagccaaaagacccaaaauaagagaucaagaaggaagaaucaacuacuacuggacucugcuugaacccggggauacaauaauauuugaggcaaauggaaaucuaauagcgccaagauaugcuuucgcacugaguagaggcuuuggaucaggaaucaucaacucaaaugcaccaauggauaaaugugaugcgaagugccaaacaccucggggagcuauaaacagcagucuuccuuuccagaacguacacccagucacaauaggagaguguccaaaguaugucaggagugcaaaauuaaggaugguuacaggacuaaggaacaucccauccauucaauccagagguuuguuuggagccauugccgguuucauugaagggggguggacuggaaugguagaugguugguaugguuaucaucaucagaaugagcaaggaucuggcuaugcugcagaucaaaaaagcacacaaaaugccauuaaugggauuacaaacaaggugaauucuguaauugagaaaaugaacacucaauucacagcagugggcaaagaauucaacaaauuggaaagaaggauggaaaacuugaauaaaaaaguugaugauggguuuauagacauuuggacauauaaugcagaacuguugguucuacuggaaaaugaaaggacuuuggauuuccaugacuccaaugugaagaaucuguaugagaaaguaaaaagccaguuaaagaauaaugcuaaagaaauaggaaauggguguuuugaauucuaucacaaguguaacgaugaaugcauggagaguguaaagaauggaaccuaugacuauccaaaauauuccgaagaaucaaaguuaaacagggagaaaauugauggagugaaauuggaaucaaugggagucuaucagauucuggcgaucuacucaacagucgccaguucucugguucuuuuggucucccugggggcaaucagcuucuggauguguuccaaugggucuuugcaguguagaauaugcaucuaa

SEQ ID NO: 38676 - RNA, 1701 nt, Artificial Sequence; identical to SEQ ID NO: 34681
  derived and/or modified CDS sequence (wt) from hemagglutinin__InfluenzaA__AEA73771

SEQ ID NO: 38677 - RNA, 1701 nt, Artificial Sequence; identical to SEQ ID NO: 36318
  derived and/or modified CDS sequence (wt) from hemagglutinin__InfluenzaA__AEA73781

SEQ ID NO: 38678 - RNA, 1701 nt, Artificial Sequence; identical to SEQ ID NO: 36239
  derived and/or modified CDS sequence (wt) from hemagglutinin__InfluenzaA__AEA73791

SEQ ID NO: 38679 - RNA, 1701 nt, Artificial Sequence
  derived and/or modified CDS sequence (wt) from hemagglutinin__InfluenzaA__AEA73801
augaaggcaauacuaguaguucugcuauauacauuugcaaccgcaaaugcagacacauuauguauagguuaucaugcgaacaauucaacagacacuguagacacaguacuagaaaagaauguaacaguaacacacucuguuaacauucuagaagacaagcauaacgggaaacuaugcaaacuaagagggguagccccauugcauuuggguaaauguaacauugcuggcuggauccugggaaauccagagugugaaucacucuccacagcaagcucaugguccuacauuguggaaacaucuaguucagacaauggaacguguuacccaggagauuucaucgauuaugaggagcuaagagagcaauugagcucagugucaucauuugaaagguuugagauauuccccaagacaaguucauggcccaaucaugauucgaacaaagguguaacggcagcauguccucaugcuggagcaaaaagcuucuacaaaaauuuaauauggcuaguuaagaaaggaaauucauacccaaagcucagcaaauccuacauuaaugauaaagggaaagaaguccucgugcuauggggcauucaccauccaucuacuagugcugaccaacaaagucucuaucagaaugcagaugcauauguuuuuguggggucaucaagauacagcaagaaguucaagccggaaauagcaauaagacccaaagugagggaucaagaagggagaaugaacuauuacuggacacuaguagagccgggagacaaaauaacauucgaagcaacuggaaaucuagugguaccgagauaugcauucgcaauggaaagaaaugcuggaucugguauuaucauuucagauacaccaguccacgauugcaauacaacuugucagacacccaagggugcuauaaacaccagccucccauuucagaauauacauccgaucacaauuggaaaauguccaaaauauguaaaaagcacaaaauugagacuggccacaggauugaggaaugucccgucuauucaaucuagaggccuauuuggggccauugccgguuucauugaagggggguggacagggaugguagauggaugguacgguuaucaucaucaaaaugagcaggggucaggauaugcagccgaccugaagagcacacagaaugccauugacgagauuacuaacaaaguaaauucuguuauugaaaagaugaauacacaguucacagcaguagguaaagaguucaaccaccuggaaaaaagaauagagaauuuaaauaaaaaaguugaugaugguuuccuggacauuuggacuuacaaugccgaacuguugguucuauuggaaaaugaaagaacuuuggacuaccacgauucaaaugugaagaacuuauaugaaaagguaagaagccagcuaaaaaacaaugccaaggaaauuggaaacggcugcuuugaauuuuaccacaaaugcgauaacacgugcauggaaagugucaaaaaugggacuuaugacuacccaaaauacucagaggaagcaaaauuaaacagagaagaaauagaugggguaaagcuggaaucaacaaggauuuaccagauuuuggcgaucuauucaacugucgccaguucauugguacugguagucucccugggggcaaucaguuucuggaugugcucuaaugggucucuacaguguagaauauguauuuaa

SEQ ID NO: 38680 - RNA, 1701 nt, Artificial Sequence
  derived and/or modified CDS sequence (wt) from hemagglutinin__InfluenzaA__AEA73811
augaaagcaauacuaguaguucugcuauauacauuugcaaccgcaaaugcagacacauuauguauagguuaccaugcgaacaauucaacagacacuguagacacaguacuagaaaagaauguaacaguaacacacucuguuaaccuucuagaagacaagcauaacgggaaacuaugcaaacuaagagggguagccccauugcauuuggguaaauguaacauugcuggcuggauccugggaaauccagagugugaaucacucuccacagcaagcucaugguccuacauuguggaaacaucuaguucagacaauggaacguguuacccaggagauuucaucgauuaugaggagcuaagagagcaauugagcucagugucaucauuugaaagguuugagauauuccccaagacaaguucauggcccaaucaugacucgaacaaagguguaacggcagcauguccucaugcuggagcaaaaagcuucuacaaaaauuuaauauggcuaguuaaaaaaggaaauucauacccaaagcucagcaaauccuacauuaaugauaaagggaaagaaguccucgugcuauggggcauucaccauccaucuacuagugcugaccaacaaagucucuaucagaaugcagaugcauauguuuuuguggggacaucaagauacagcaagaaguucaagccggaaauagcaauaagacccaaagugagggaucaagaagggagaaugaacuauuacuggacacuaguagagccgggagacaaaauaacauucgaagcaacuggaaaucuagugguaccgagauaugcauucgcaauggaaagaaaugcuggaucugguauuaucauuucagauacaccaguccacgauugcaauacaacuugucagacacccaagggugcuauaaacaccagccucccauuucagaauauacauccgaucacaauuggaaaauguccaaaauauguaaaaagcacaaaauugagacuggccacaggauugaggaaugucccgucuauucaaucuagaggccuauuuggggccauugccgguuucauugaagggggguggacagggaugguagauggaugguacgguuaucaccaucaaaaugagcagggaucaggauaugcagccgaccugaagagcacacagaaugccauugacaagauuacuaacaaaguaaauucuguuauugaaaagaugaauacacaguucacagcaguagguaaagaguucaaccaccuggaaaaaagaauagagaauuuaaauaaaaaaguugaugaugguuuccuggacauuuggacuuacaaugccgaacuguugguucuauuggaaaaugaaagaacuuuggacuaccacgauucaaaugugaagaacuuauaugaaaagguaagaagccaguuaaaaaacaaugccaaggaaauuggaaacggcugcuuugaauuuuaccacaaaugcgauaacacgugcauggaaagugucaaaaaugggacuuaugacuacccaaaauacucagaggaagcaaaauuaaacagagaagaaauagauggggugaagcuggaaucaacaaggauuuaccagauuuuggcgaucuauucaacugucgccaguucauugguacugguagucucccugggggcaaucaguuucuggauguguucuaaugggucucuacaguguagaauauguauuuaa

SEQ ID NO: 38681 - RNA, 1701 nt, Artificial Sequence
  derived and/or modified CDS sequence (wt) from hemagglutinin__InfluenzaA__AEA73821
augaaggcaauacuaguaguucugcuauauacauuugcaaccgcaaaugcagacacauuauguauagguuaucaugcgaacaauucaacagacacuguagacacaguacuagaaaagaauguaacaguaacacacucuguuaaccuucuagaagacaagcauaacgggaaacuaugcaaacuaagagggguagccccauugcauuuggguaaauguaacauugcuggcuggauccugggaaauccagagugugaaucacucuccacagcaagcucaugguccuacauuguggaaacaucuaguucagacaauggaacguguuacccaggagauuucaucaauuaugaggagcuaagagagcaauugagcucagugucauuauuugaaagguuugagauauuccccaagacaaguucauggcccaaucaugacucgaacaaagguguaacggcagcauguccucaugcuggagcaaaaagcuucuacaaaaauuuaauauggcuaguuaaaaaaggaaauucauacccaaagcucagcaaauccuacauuaaugauaaagggaaagaaguccucgugcuauggggcauucaccauccaucuacuagugcugaccaacaaagucucuaucagaaugcagaugcauauguuuuuguggggacaucaagauacagcaagaaguucaagccggaaauagcaauaagacccaaagugagggaucaagaagggagaaugaacuauuacuggacacuaguagagccgggagacaaaauaacauucgaagcaacuggaaaucuagugguaccgagauaugcauucgcaauggaaagaaaugcuggaucugguauuaucaucucagauacaccaguccacgauugcaauacaacuugucagacacccaagggugcuauaaacaccagccucccauuucagaauauacauccgaucacaauuggaaaauguccaaaauauguaaaaagcacaaaauugagacuggccacaggauugaggaaugucccgucuauucaaucuagaggccuauuuggggccauugccgguuucauugaagggggguggacagggaugguagauggaugguacgguuaucaccaucaaaaugagcaggggucaggauaugcagccgaccugaagagcacacagaaugccauugacaagauuacuaacaaaguaaauucuguuauugaaaagaugaauacacaguucacagcaguagguaaagaguucaaccaccuggaaaaaagaauagagaauuuaaauaaaaaaguugaugaugguuuccuggacauuuggacuuacaaugccgaacuguugguucuauuggaaaaugaaagaacuuuggacuaccacgauucaaaugugaagaacuuauaugaaaagguaagaagccaguuaaaaaacaaugccaaggaaauuggaaacggcugcuuugaauuuuaccacaaaugcgauaacacgugcauggaaagugucaaaaaugggacuuaugacuacccaaaauacucagaggaagcaaaauuaaacagagaagaaauagaugggguaaagcuggaaucaacaaggauuuaccagauuuuggcgaucuauucaacugucgccaguucauugguacugguagucucccugggggcaaucaguuucuggaugugcucuaaugggucucuacaguguagaauauguauuuaa

SEQ ID NO: 38682 - RNA, 1701 nt, Artificial Sequence
  derived and/or modified CDS sequence (wt) from hemagglutinin__InfluenzaA__AEA73831
augaaggcaauacuaguaguucugcuauauacauuugcaaccgcaaaugcagacacauuauguauagguuaucaugcgaacaauucaacagacacuguagacacaguacuagaaaagaauguaacaguaacacacucuguuaaccuucuagaagacaagcauaacgggaaacuaugcaaacuaagagggguaaccccauugcauuuggguaaauguaacauugcuggcuggauccugggaaauccagagugugaaucacucuccacagcaagcucaugguccuacauuguggaaacaucuaguucagacaauggaacguguuacccaggagauuucaucgauuaugaggagcuaagagagcaauugagcucagugucaucauuugaaagguuugagauauuccccaagacaaguucauggcccaaucaugacucgaacaaagguguaacggcagcauguccucaugcuggagcaaaaagcuucuacaaaaauuuaauauggcuaguuaaaaaaggaaauucauacccaaagcucagcaaauccuacauuaaugauaaagggaaagaaguccucgugcuauggggcauucaccauccaucuacuaguacugaccaacaaagucucuaucagaaugcagaugcauauguuuuuguggggacaucaagauacagcaagaaguucaagccggaaauagcaauaagacccaaagugagggaucaagaagggagaaugaacuauuacuggacacuaguagagccgggagacaaaauaacauucgaagcaacuggaaaucuagugguaccgagauaugcauucgcaauggaaagaaaugcuggaucugguauuaucauuucagauacaccaguccacgauugcaauacaacuugucagacacccaagggugcuauaaacaccagccucccauuucagaauauacauccgaucacaauuggaaaauguccaaaauauguaaaaagcacaaaauugagacuggccacaggauugaggaaugucccgucuauucaauccagaggccuauuuggggccauugccgguuucauugaagggggguggacagggaugguagauggaugguacgguuaucaccaucaaaaugagcaggggucaggauaugcagccgaccugaagagcacacagaaugccauugacaagauuacuaacaaaguaaauucuguuauugaaaagaugaauacacaguucacagcaguagguaaagaguucaaccaccuggaaaaaagaauagagaauuuaaauaaaaaaguugaugaugguuuccuggacauuuggacuuacaaugccgaacuguugguucuauuggaaaaugaaagaacuuuggacuaccacgauucaaaugugaagaacuuauaugaaaagguaagaagccaguuaaaaaacaaugccaaggaaauuggaaacggcugcuuugaauuuuaccacaaaugcgauaacacgugcauggaaagugucaaaaaugggacuuaugacuacccaaaauacucagaggaagcaaaauuaaacagagaagaaauagaugggguaaagcuggaaucaacaaggauuuaccagauuuuggcgaucuauucaacugucgccaguucauugguacugguagucucccugggggcaaucaguuucuggaugugcucuaaugggucucuacaguguagaauauguauuuaa

SEQ ID NO: 38683 - RNA, 1701 nt, Artificial Sequence
  derived and/or modified CDS sequence (wt) from hemagglutinin__InfluenzaA__AEA73841
augaaggcaauacuaguaguucugcuauauacauuugcaaccgcaaaugcagacacauuauguauagguuaucaugcgaacaauucaacagacacuguagacacaguacuagaaaagaauguaacaguaacacacucuguuaaccuucuagaagacaagcauaacgggaaacuaugcaaacuaagagggguagccccauugcauuuggguaaauguaacauugcuggcuggauccugggaaauccagagugugaaucacucuccacagcaagcucaugguccuacauuguggaaacaucuaguucagacaauggaacguguuacccaggagauuucaucaauuaugaggagcuaagagagcaauugagcucagugucaucauuugaaagguuugagauauuccccaagacaaguucauggcccaaucaugacucgaacaaagguguaacggcugcauguccucaugcuggagcaaaaagcuucuacaaaaauuuaauauggcuaguuaaaaaaggaaauucauacccaaagcucagcaaauccuacauuaaugauaaagggaaagaaguccucgugcuauggggcauucaccauccaucuacuagugcugaccaacaaagucucuaucagaaugcagaugcauauguuuuuguggggacaucaagauacagcaagaaguucaagccggaaauagcaauaagacccaaagugagggaucaagaagggagaaugaacuauuacuggacacuaguagagccgggagacaaaauaacauucgaagcaacuggaaaucuagugguaccgagauaugcauucgcaauggaaagaaaugcugaaucugguauuaucaucucagauacaccaguccacgauugcaauacaacuugucagacacccaagggugcuauaaacaccagccucccauuucagaauauacauccgaucacaauuggaaaauguccaaaauauguaaaaagcacaaaauugagacuggccacaggauugaggaaugucccgucuauucaaucuagaggccuauuuggggccauugccgguuucauugaagggggguggacagggaugguagauggaugguacgguuaucaccaucaaaaugagcaggggucaggauaugcagccgaccugaagagcacacagaaugccauugacaagauuacuaacaaaguaaauucuguuguugaaaagaugaauacacaguucacagcaguagguaaagaguucaaccaccuggaaaaaagaauagagaauuuaaauaaaaaaguugaugaugguuuccuggacauuuggacuuacaaugccgaacuguugguucuauuggaaaaugaaagaacuuuggacuaccacgauucaaaugugaagaacuuauaugaaaagguaagaagccaguuaaaaaacaaugccaaggaaauuggaaacggcugcuuugaauuuuaccacaaaugcgauaacacgugcauggaaagugucaaaaaugggacuuaugacuacccaaaauacucagaggaagcaaaauuaaacagagaagaaauagaugggguaaagcuggaaucaacaaggauuuaccagauuuuggcgaucuauucaacugucgccaguucauugguacugguagucucccugggggcaaucaguuucuggaugugcucuaaugggucucuacaguguagaauauguauuuaa

SEQ ID NO: 38684 - RNA, 1701 nt, Artificial Sequence; identical to SEQ ID NO: 36318
  derived and/or modified CDS sequence (wt) from hemagglutinin__InfluenzaA__AEA73851

SEQ ID NO: 38685 - RNA, 1701 nt, Artificial Sequence
  derived and/or modified CDS sequence (wt) from hemagglutinin__InfluenzaA__AEA73861
augaaggcaauacuaguaguucugcuauauacauuugcaaccgcaaaugcagacacauuauguauagguuaucaugcgaacaauucaacagacacuguagacacaguacuagaaaagaauguaacaguaacacacucuguuaaccuucuagaagacaagcauaacgggaaacuaugcaaacuaagagggguagccccauugcauuugggugaauguaacauugcuggcuggauccugggaaauccagagugugaaucacucuccacagcaagcucaugguccuacauuguggaaacaucuaguucagacaauggaacguguuacccaggagauuucaucgauuaugaggagcuaagagagcaauugagcucagugucaucauuugaaagguuugagauauuccccaagacaaguucauggcccaaucaugacucgaacaaagguguaacggcagcauguccucaugcuggagcaaaaagcuucuacaaaaauuuaauauggcuaguuaaaaaaggaaauucauacccaaagcucagcaaauccuacauuaaugauaaagggaaagaaguccucgugcuauggggcauucaccauccaucuacuagugcugaccaacaaagucucuaucagaaugcagaugcauauguuuuuguggggacaucaagauacagcaagaaguucaagccggaaauagcaauaagacccaaagugagggaucaagaagggagaaugaacuauuacuggacacuaguagagccgggagacaaaauaacauucgaagcaacuggaaaucuagugguaccgagauaugcauucgcaauggaaagaaaugcuggaucugguauuaucauuucagauacaccaguccacgauugcaauacaacuugucagacacccaagggugcuauaaacaccagccucccauuucagaauguacauccgaucacaauuggaaaauguccaaaauauguaaaaagcacaaaauugagacuggccacaggauugaggaaugucccaucuauucaaucuagaggccuauuuggggccauugccgguuucauugaagggggguggacagggaugguagauggaugguacgguuaucaccaucaaaaugagcaggggucaggauaugcagccgaccugaagagcacacagaaugccauugaugagauuacuaacaaaguaaauucuguuauugaaaagaugaauacacaguucacagcaguagguaaagaguucaaccaccuggaaaaaagaauagagaauuuaaauaaaaagauugaugaugguuuccuagacauuuggacuuacaaugccgaacuguugguucuauuggaaaaugaaagaacuuuggacuaccacgauucaaaugugaagaacuuauaugaaaagguaagaagccaguuaaaaaacaaugccaaggaaauuggaaacggcugcuuugaauuuuaccacaaaugcgauaacacgugcauggaaagugucaaaaaugggacuuaugacuacccaaaauacucagaggaagcaaaauuaaacagagaagaaauagaugggguaaagcuggaaucaacaaggauuuaccagauuuuggcgaucuauucaacugucgccaguucauugguacugguagucucccugggggcaaucaguuucuggaugugcucuaaugggucucuacaguguagaauauguauuuaa

SEQ ID NO: 38686 - RNA, 1701 nt, Artificial Sequence; identical to SEQ ID NO: 38150
  derived and/or modified CDS sequence (wt) from hemagglutinin__InfluenzaA__AEA73871

SEQ ID NO: 38687 - RNA, 1701 nt, Artificial Sequence
  derived and/or modified CDS sequence (wt) from hemagglutinin__InfluenzaA__AEA73881
augaaggcaauacuaguaguucugcuauauacauuugcaaccgcaaaugcagacacauuauguauagguuaucaugcgaacaauucaacagacacuguagacacaguacuagaaaagaauguaacaguaacacacucuguuaaccuucuagaagacaagcauaacgggaaacuaugcaaacuaagagggguagccccauugcauuuggguaaauguaacauugcuggcuggauccugggaaauccagagugugaaucacucuccacagcaagcucaugguccuacauuguagaaacaucuaguucagacaauggaacguguuacccaggagauuucaucgauuaugaggagcuaagagagcaauugagcucagugucaucauuugaaagguuugagauauuccccaagacaaguucauggcccaaucaugacucgaacaaagguguaacggcagcauguccucaugcuggagcaaaaagcuucuacaaaaauuuaauauggcuaguuaaaaaaggaaauucauacccaaagcucagcaaguccuacauuaaugauaaagggaaagaaguccucgugcuauggggcauucaccauccaucuacuaguacugaccaacaaagucucuaucagaaugcagaugcauauguuuuuguggggacaucaagauacagcaagaaguucaagccggaaauagcaauaagacccaaaguuagggaucaagaagggagaaugaacuauuacuggacacuaguagagccgggagacaaaauaacauucgaagcaacuggaaaucuagugguaccgagauaugcauucgcaauggaaagaaaugcuggaucugguauuaucauuucagauacaccaguccacgauugcaauacaacuugucagacacccaagggugcuauaaacaccagccucccauuucagaauauacauccgaucacaauuggaaaauguccaaaauauguaaaaagcacaaaauugagacuggccacaggauugaggaaugucccgucuauucaaucuagaggccuauuuggggccauugccgguuucauugaagggggguggacagggaugguagauggaugguacgguuaucaccaucaaaaugagcaggggucaggauaugcagccgaccugaagagcacacagaaugccauugacaagauuacuaacaaaguaaauucuguuauugaaaagaugaauacacaguucacagcaguagguaaagaguucaaccaccuggaaaaaagaauagagaauuuaaauaaaaaaguugaugaugguuuccuggacauuuggacuuacaaugccgaacuguugguucuauuggaaaaugaaagaacuuuggacuaccacgauucaaaugugaaaaacuuauaugaaaagguaagaagccaguuaaaaaacaaugccaaggaaauuggaaacggcugcuuugaauuuuaccacaaaugcgauaacacgugcauggaaagugucaaaaaugggacuuaugacuacccaaaauacucagaggaagcaaaauuaaacagagaagaaauagaugggguaaagcuggaaucaacaaggauuuaccagauuuuggcgaucuauucaacugucgccaguucauugguacugguagucucccugggggcaaucaguuucuggaugugcucuaaugggucucuacaguguagaauauguauuuaa

SEQ ID NO: 38688 - RNA, 1701 nt, Artificial Sequence; identical to SEQ ID NO: 36239
  derived and/or modified CDS sequence (wt) from hemagglutinin__InfluenzaA__AEA73891

SEQ ID NO: 38689 - RNA, 1701 nt, Artificial Sequence
  derived and/or modified CDS sequence (wt) from hemagglutinin__InfluenzaA__AEA73901
augaaugcaauacuaguaguucugcuauauacauuugcaaccgcaaaugcagacacauuauguauagguuaucaugcgaacaauucaacagacacuguagacacauuacuagaaaagaauguaacaguaacacacucuguuaaccuucuagaagacaagcauaacgggaaacuaugcaaacuaagagggguagccccauugcauuuggguaaauguaacauugcuggcuggauccugggaaauccagagugugaaucacucuccacagcaagcucaugguccuacauuguggaaacaucuaguucagacaauggaacguguuacccaggagauuucaucgauuaugaggagcuaagagagcaauugagcucagugucaucauuugaaagguuugagauauuccccaagacaaguucauggcccaaucaugacucgaacaaagguguaacggcagcauguccucaugcuggagcaaaaagcuucuacaaaaauuuaauauggcuaguuaaaaaaggaaauucauacccaaagcucagcaaauccuacauuaaugauaaagggaaagaaguccucgugcuauggggcauucaccauccaucuacuagugcugaccaacaaagucucuaucagaaugcagaugcauauguuuuuguggggacaucaagauacagcaagaaguucaagccggaaauagcaauaagacccaaagugagggaucaagaagggagaaugaacuauuacuggacacuaguagagccgggagacaaaauaacauucgaagcaacuggaaaucuagugguaccgagauaugcauucgcaauggaaagaaaugcuggaucugguauuaucauuucagauacaccaguccacgauugcaauacaacuugucagacacccaagggugcuauaaacaccagccucccauuucagaauauacauccgaucacaauuggaaaauguccaaaauauguaaaaagcacaaaauugagacuggccacaggauugaggaaugucccgucuauucaaucuagaggccuauuuggggccauugccgguuucauugaagggggguggacagggaugguagauggaugguacgguuaucaccaucaaaaugagcaggggucaggauaugcagccgaccugaagagcacacagaaugccauugacgagauuacuaacaaaauaaauucuguuauugaaaagaugaauacacaguucacagcaguagguaaagaguucaaccaccuggaaaaaagaauagagaauuuaaauaaaaaaguugaugaugguuuccuggacauuuggacuuacaaugccgaacuguugguucuauuggaaaaugaaagaacuuuggacuaccacgauucaaaugugaagaacuuauaugaaaagguaagaagccaguuaaaaaacaaugccaaggaaauuggaaacggcugcuuugaauuuuaccacaaaugcgauaacacgugcauggaaagugucaaaaaugggacuuaugacuacccaaaauacucagaggaagcaaaauuaaacagagaagaaauagaugggguaaagcuggaaucaacaaggauuuaccagauuuuggcgaucuauucaacugucgccaguucauugguacugguagucucccugggggcaaucaguuucuggaugugcucuaaugggucucuacaguguagaauauguauuuaa

SEQ ID NO: 38690 - RNA, 1701 nt, Artificial Sequence
  derived and/or modified CDS sequence (wt) from hemagglutinin__InfluenzaA__AEA73911
augaaggcaauacuaguaguucugcuauauacauuugcaaccgcaaaugcagacacauuauguauagguuaucaugcgaacaauucaacagacacuguagacacaguacuagaaaagaauguaacaguaacacacucuguuaaccuucuagaagacaagcauaacgggaaacuaugcaaacuaagagggguagccccauugcauuuggguaaauguaacauugcuggcuggauucugggaaauccagagugugaaucacucuccacagcaagcucaugguccuacauuguggaaacaucuaguucagacaauggaacguguuacccaggagauuucaucgauuaugaggagcuaagagagcaauugagcucagugucaucauuugaaagguuugagauauuccccaagacaaguucauggcccaaucaugacucgaacaaagguguaacggcagcauguccucaugcuggagcaaaaagcuucuacaaaaauuuaauauggcuaguuaaaaaaggaaauucauacccaaagcucagcaaauccuacauuaaugauaaagggaaagaaguccucgugcuauggggcauucaccauccaucuacuagugcugaccaacaaagucucuaucagaaugcagaugcauauguuuuuguggggacaucaagauacagcaagaaguucaagccggaaauagcuauaagacccaaagugagggaucaagaagggagaaugaacuauuacuggacacuaguagagccgggagacaaaauaacauucgaagcaacuggaaaucuagugguaccgagauaugcauucgcaauggaaagaaaugcuggaucugguauuaucauuucagauacaccaguccacgauugcaauacaacuugucagacacccaagggugcuauaaacaccagccucccauuucagaauauacauccgaucacaauuggaaaauguccaaaauauguaaaaagcacaaaauugagacuggccacaggauugaggaaugucccgucuauucaaucuagaggccuauuuggggccauugccgguuucauugaagggggguggacagggaugguagauggaugguacgguuaucaccaucaaaaugagcaggggucaggauaugcagccgaccugaagagcacacagaaugccauugacaagauuacuaacaaaguaaauucuguuauugaaaagaugaauacacaguucacagcaguagguaaagaguucaaccaccuggaaaaaagaauagagaauuuaaauaaaaaaguugaugaugguuuccuggacauuuggacuuacaaugccgaacuguugguucuauuggaaaaugaaagaacuuuggacuaccacgauucaaaugugaagaacuuauaugaaaagguaagaagccaguuaaaaaacaaugccaaggaaauuggaaacggcugcuuugaauuuuaccacaaaugcgauaacacgugcauggaaagugucaaaaaugggacuuaugacuacccaaaauacucagaggaagcaaaauuaaacagagaagaaauagaugggguaaagcuggaaucaacaaggauuuaccagauuuuggcgaucuauucaacugucgccaguucauugguacugguagucucccugggggcaaucaguuucuggaugugcucuaaugggucucuacaguguagaauauguauuuaa

SEQ ID NO: 38691 - RNA, 1701 nt, Artificial Sequence; identical to SEQ ID NO: 38687
  derived and/or modified CDS sequence (wt) from hemagglutinin__InfluenzaA__AEA73921

SEQ ID NO: 38692 - RNA, 1701 nt, Artificial Sequence
  derived and/or modified CDS sequence (wt) from hemagglutinin__InfluenzaA__AEA73931
augaaggcaauacuaguaguucugcuauauacauuugcaaccgcaaaugcagacacauuauguauagguuaucaugcgaacaauucaacagacacuguagacacaguacuagaaaagaauguaacaguaacacacucuguuaaccuucuagaagacaagcauaacgggaaacuaugcaaacuaagagggguagccccauugcauuuggguaaauguaacauugcuggcuggauccugggaaauccagagugugaaucacucuccacagcaagcucaugguccuacauuguggaaacaucuaguucagacaauggaacguguuacccaggagauuucaucgauuaugaggagcuaagagagcaauugagcucagugucaucauuugaaagguuugagauauuccccaagacaaguucauggcccaaucaugacucgaacaaagguguaacggcagcauguccucaugcuggagcaaaaagcuucuacaaaaauuuaauauggcuaguuaaaaaaggaaauucauacccaaagcucagcaaauccuacauuaaugauaaagggaaagaaguccucgugcuauggggcauucaccauccaucuacuagugcugaccaacaaagucucuaucagaaugcagaugcauauguuuuuguggggacaucaagauacagcaagaaguucaagccggaaauagcaauaagacccaaagugagggaucaagaagggagaaugaacuauuacuggacacuaguagagccgggagacaaaauaacauucgaagcaacuggaaaucuagugguaccgagauaugcauucgcaauggaaagaaaugcuggaucugguauuaucauuucggauacaccaguccacgauugcaauacaacuugucagacacccaagggugcuauaaacaccagccucccauuucagaauauacauccgaucacaauuggaaaauguccaaaauauguaaaaagcacaaaauugagacuggccacaggauugaggaaugucccgucuauucaaucuagaggccuauuuggggccauugccgguuucauugaagggggguggacagggaugguagauggaugguacgguuaucaccaucaaaaugagcaggggucaggauaugcagccgaccugaagagcacacagaaugccauugacaagauuacuaacaaaguaaauucuguuauugaaaagaugaauacacaguucacagcaguagguaaagaguucaaccaccuggaaaaaagaauagagaauuuaaauaaaaaaguugaugaugguuuccuggacauuuggacuuacaaugccgaacuguugguucuauuggaaaaugaaagaacuuuggacuaccacgauucaaaugugaagaacuuauaugaaaagguaagaagccaguuaaaaaacaaugccaaggaaauuggaaacgguugcuuugaauuuuaccacaaaugcgauaacacgugcauggaaagugucaaaaaugggacuuaugacuacccaaaauacucagaggaagcaaaauuaaacagagaagaaauagaugggguaaagcuggaaucaacaaggauuuaccagauuuuggcgaucuauucaacugucgccaguucauugguacugauagucucccugggggcaaucaguuucuggaugugcucuaaugggucucuacaguguagaauauguauuuaa

SEQ ID NO: 38693 - RNA, 1701 nt, Artificial Sequence; identical to SEQ ID NO: 36318
  derived and/or modified CDS sequence (wt) from hemagglutinin__InfluenzaA__AEA73961

SEQ ID NO: 38694 - RNA, 1701 nt, Artificial Sequence
  derived and/or modified CDS sequence (wt) from hemagglutinin__InfluenzaA__AEA73971
augaaggcaauacuaguaguucugcuauauacauuugcaaccgcaaaugcagacacauuauguauagguuaucaugcgaacaauucaacagacacuguagacacaguacuagaaaagaauguaacaguaacacacucuguuaaccuucuagaagacaagcauaacgggaaacuaugcaaacuaagagggguagccccauugcauuuggguaaauguaacauugcuggcuggauccugggaaauccagagugugaaucacucuccacagcaagcucaugguccuacauuguggaaacaucuaguucagacaauggaacguguuacccaggagauuucaucgauuaugaggagcuaagagagcaauugagcucagugucaucauuugaaagauuugagauauuccccaagacaaguucauggcccaaucaugacucgaacaaagguguaacggcagcauguccucaugcuggagcaaaaagcuucuacaaaaauuuaauauggcuaguuaaaaaaggaaauucauacccaaagcucagcaaauccuacauuaaugauaaagggaaagaaguccucgugcuauggggcauucaccauccaucuacuagugcugaccaacaaagucucuaucagaaugcagaugcauauguuuuuguggggacuucaagauacagcaagaaguucaagccggaaauagcaauaagacccaaagugagggaacaagaagggagaaugaacuauuacuggacacuaguagagccgggagacaaaauaacauucgaagcaacuggaaaucuagugguaccgagauaugcauucgcaauggaaagaaaugcuggaucugguauuaucauuucagauacaccaguccacgauugcaauacaacuugucagacacccaagggugcuauaaacaccagccucccauuucagaauauacauucgaucacaauuggaaaauguccaaaauauguaaaaagcacaaaacugagacuggccacaggauugaggaaugucccgucuauucaaucuagaggccuauuuggggccauugccgguuucauugaagggggguggacagggaugguagauggaugguacgguuaucaccaucaaaaugagcaggggucaggauaugcagccgaccagaagagcacacagaaugccauugacgagauuacuaacaaaguaaauucuguuauugaaaagaugaauacacaguucacagcaguagguaaagaguucaaccaccuggaaaaaagaauagaaaauuuaaauaaaaaaguugaugaugguuuccuggacauuuggacuuacaaugccgaacuguugguucuauuggaaaaugaaagaacuuuagacuaccacgauucaaaugugaagaacuuauaugaaaagguaagaagccaguuaaaaaacaaugccaaggaaauuggaaacggcuguuuugaauuuuaccacaaaugcaauaacacgugcauggaaagugucaaaaaugggacuuaugacuacccaaaauacucagaggaagcaaaauuaaacagagaagaaauagaugggguaaagcuggaaucaacaaggauuuaccagauuuuggcgaucuauucaacugucgccaguucauugguacugguagucucccugggggcaaucaguuucuggaugugcucuaaugggucucuacaguguagaauauguauuuaa

SEQ ID NO: 38695 - RNA, 1701 nt, Artificial Sequence; identical to SEQ ID NO: 36318
  derived and/or modified CDS sequence (wt) from hemagglutinin__InfluenzaA__AEA73981

SEQ ID NO: 38696 - RNA, 1701 nt, Artificial Sequence
  derived and/or modified CDS sequence (wt) from hemagglutinin__InfluenzaA__AEA73991
augaaggcaauacuaguaguucugcuauauacauuugcaaccgcaaaugcagacacauuauguauagguuaucaugcgaacaauucaacagacacuguagacacaguacuagaaaagaauguaacaguaacacacucuguuaaccuucuagaagacaagcauaacgggaaacuaugcaaacuaagagggguagccccauugcauuuggguaaauguaacauugcuggcuggauccugggaaauccagagugugaaucacucuccacagcaagcucaugguccuacauuguggaaacaucuaguucagacaauggaacguguuacccaggagauuucaucgauuaugaggagcuaagagagcaauugagcucagugucaucauuugaaaaauuugagauauuccccaagacaaguucauggcccaaucaugacucgaacaaagguguaacggcagcauguccucaugcuggagcaaaaagcuucuacaaaaauuuaauauggcuaguuaaaaaaggaaauucauacccaaagcucagcaaauccuacaucaaugauaaagggaaagaaguccucgugcuauggggcauucaccauccaucuacuagugcugaccaacaaagucucuaucagaaugcagauucauauguuuuuguggggacaucaagauacagcaagaaguucaagccggaaauagcaauaagacccaaagugagggaucaagaagggagaaugaacuauuacuggacacuaguagagccgggagacaaaauaacauucgaagcaacuggaaaucuagugguaccgagauaugcauucgcaauggaaagaaaugcuggaucugguauuaucauuucagauacaccaguccacgauugcaauacaacuugucagacacccgagggugcuauaaacaccagccucccauuucagaauauacauccgaucacaauuggaaaauguccaaaauauguaaaaagcacaaaauugagacuggccacaggauugaggaaugucccgucuauucaaucuagaggccuauuuggggccauugccgguuucauugaagggggguggacagggaugguagauggaugguacgguuaucaccaucaaaaugagcaggggucaggauaugcagccgaccugaagagcacacagaaugccauugacgagauuacuaacaaaguaaauucuguuauugaaaagaugaauacacaguucacagcaguagguaaagaguucaaccaccuggaaaaaagaauagagaauuuaaauaaaaaaguugaugaugguuuccuggacauuuggacuuacaaugccgaacuguugguucuauuggaaaaugaaagaacuuuggacuaccacgauucaaaugugaagaacuuauaugaaaagguaagaagccaguuaaaaaacaaugccaaggaaauuggaaacggcugcuuugaauuuuaccacaaaugcgauaacacgugcauggaaagugucaaaaaugggacuuaugacuacccaaaauacucagaggaagcaaaauuaaacagagaagaaauagaugggguaaagcuggaaucaacaaggauuuaccagauuuuggcgaucuauucaacugucgccaguucauugguacugguagucucccugggggcaaucaguuucuggaugugcucuaaugggucucuacaguguagaauauguauuuaa

SEQ ID NO: 38697 - RNA, 1701 nt, Artificial Sequence
  derived and/or modified CDS sequence (wt) from hemagglutinin__InfluenzaA__AEA74001
augaaggcaauacuaguaguucugcuauauacauuugcaaccgcaaaugcagacacauuauguauagguuaucaugcgaacaauucaacagacacuguagacacaguacuagaaaagaauguaacaguaacacacucuguuaaccuucuagaagacaagcauaacgggaaacuaugcaaacuaagagggguagccccauugcauuuggguaaauguaacauugcuggcuggauccugggaaauccagagugugaaucacucuccacagcaagcucaugguccuacauuguggaaacaucuaguucagacaauggaacguguuacccaggagauuucaucgauuaugaggagcuaagagagcaauugagcucagugucaucauuugaaagauuugagauauuccccaagacaaguucauggcccaaucaugacucgaacaaagguguaacggcagcauguccucaugcuggagcaaaaagcuucuacaaaaauuuaauauggcuaguuaaaaaaggaaauucauacccaaaacucagcaaauccuacaucaaugauaaagggaaagaaguccucgugcuauggggcauucaccauccaucuacuagugcugaccaacaaagucucuaucagaaugcagauucauauguuuuuguggggacaucaagauacagcaagaaguucaagccggaaauagcaauaagacccaaagugagggaucaagaagggagaaugaacuauuacuggacacuaguagagccgggagacaaaauaacauucgaagcaacuggaaaucuagugguaccgagauaugcauucgcaauggaaagaaaugcuggaucugguauuaucauuucagauacaccaguccacgauugcaauacaacuugucagacacccgagggugcuauaaacaccagccucccauuucagaauauacauccgaucacaauuggaaaauguccaaaauauguaaaaagcacaaaauugagacuggccacaggauugaggaaugucccgucuauucaaucuagaggccuauuuggggccauugccgguuucauugaagggggguggacagggaugguagauggaugguacgguuaucaccaucaaaaugagcaggggucaggauaugcagccgaccugaagagcacacagaaugccauugacgagauuacuaacaaaguaaauucuguuauugaaaagaugaauacacaguucacagcaguagguaaagaguucaaccaccuggaaaaaagaauagagaauuuaaauaaaaaaguugaugaugguuuccuggacauuuggacuuacaaugccgaacuguugguucuauuggaaaaugaaagaacuuuggacuaccacgauucaaaugugaagaacuuauaugaaaagguaagaagccaguuaaaaaacaaugccaaggaaauuggaaacggcugcuuugaauuuuaccacaaaugcgauaacacgugcauggaaagugucaaaaaugggacuuaugacuacccaaaauacucagaggaagcaaaauuaaacagagaagaaauagaugggguaaagcuggaaucaacaaggauuuaccagauuuuggcgaucuauucaacugucgccaguucauugguacugguagucucccugggggcaaucaguuucuggaugugcucuaaugggucucuacaguguagaauauguauuuaa

SEQ ID NO: 38698 - RNA, 1701 nt, Artificial Sequence
  derived and/or modified CDS sequence (wt) from hemagglutinin__InfluenzaA__AEA74011
augaaggcaauacuaguaguucugcuauauacauuugcaaccgcaaaugcagacacauuauguauagguuaucaugcgaacaauucaacagacacuguagacacaguacuagaaaagaauguaacaguaacacacucuguuaaccuucuagaagacaagcauaacgggaaacuaugcaaacuaagagggguagccccauugcauuuggguaaauguaacauugcuggcuggauccugggaaauccagagugugaaucacucuccacagcaagcucaugguccuacauuguggaaacaucuaguucagacaauggaacguguuacccaggagauuucaucgauuaugaggagcuaagagagcaauugagcucagugucaucauuugaaagguuugagauauuccccaagacaaguucauggcccaaucaugacucgaacaaagguguaacggcagcauguccucaugcuggagcaaaaagcuucuacaaaaauuuaauauggcuaguuaaaaaaagaaauucauacccaaagcucagccaauccuacauuaaugauaaagggaaagaaguccucgugcuauggggcauucaccauccaucuacuagugcugaccaacaaagucucuaucagaaugcagaugcauauguuuuuguggggacaucaagauacagcaagaaguucaagccggaaauagcaauaagacccaaagugagggaucaagaagggagaaugaacuauuacuggacacuaguagagccgggagacaaaauaacauucgaagcaacuggaaaucuagugguaccgagauaugcauucgcaauggaaagaaaugcuggaucugguauuaucauuucagauacaccaguccacgauugcaauacaacuugucagacacccaagggugcuauaaacaccagccucccauuucagaauauacauccgaucacaauuggaaaauguccaaaauauguaaaaagcacaaaauugagacuggccacaggauugaggaaugucccgucuauucaaucuagaggccuauuuggggccauugccgguuucauugaagggggguggacagggaugguagauggaugguacgguuaucaccaucaaaaugagcaggggucaggauaugcagccgaccugaagagcacacagaaugccauugacaagauuacuaacaaaguaaauucuguuauugaaaagaugaauacacaguucacagcaguagguaaagaguucaaccaccuggaaaaaagaauagagaauuuaaauaaaaaaguugaugaugguuuccuggacauuuggacuuacaaugccgaacuguugguucuauuggaaaaugaaagaacuuuggacuaccacgauucaaaugugaagaacuuauaugaaaaaguaagaagccaguuaaaaaacaaugccaaggaaauuggaaacggcugcuuugaauuuuaccacaaaugcgauaacacgugcauggaaaguaucaaaaaugggacuuaugacuacccaaaauacucagaggaagcaaaauuaaacagagaagaaauagaugggguaaagcuggaaucaacaaggauuuaccagauuuuggcgaucuauucaacugucgccaguucauugguacugguagucucccugggggcaaucaguuucuggaugugcucuaaugggucucuacaguguagaauauguauuuaa

SEQ ID NO: 38699 - RNA, 1701 nt, Artificial Sequence
  derived and/or modified CDS sequence (wt) from hemagglutinin__InfluenzaA__AEA74021
augaaggcaauacuaguaguucugcuauauacauuugcaaccgcaaaugcagacacauuauguauagguuaucaugcgaacaauucaacagacacuguagacacaguacuagaaaagaauguaacaguaacacacucuguuaaccuucuagaagacaagcauaacgggaaacuaugcaaacuaagagggguagccccauugcauuuggguaaauguaacauugcuggcuggauccugggaaauccagagugugaaucacucuccacagcaagcucaugguccuacauuguggaaacaucuaguucagacaauggaacguguuacccaggagauuucaucgauuaugaggagcuaagagagcaauugagcucagugucaucauuugaaagguuugagauauuccccaagacaaguucauggcccaaucaugacucgaacaaagguguaacggcagcauguccucaugcuggagcaaaaagcuucuacaaaaauuuaauauggcuaguuaaaaaaggaaauucauacccaaagcucagccaauccuacauuaaugauaaagggaaagaaguccucgugcuauggggcauucaccauccaucuacuagugcugaccaacaaagucucuaucagaaugcagaugcauauguuuuuguggggacaucaagauacagcaagaaguucaagccggaaauagcaauaagacccaaagugagggaucaagaagggagaaugaacuauuacuggacacuaguagagccgggagacaaaauaacauucgaagcaacuggaaaucuagugguaccgagauaugcauucgcaauggaaagaaaugcuggaucugguauuaucauuucagauacaccaguccacgauugcaauacaacuugucagacacccaagggugcuauaaacaccagccucccauuucagaauauacauccgaucacaauuggaaaauguccaaaauauguaaaaagcacaaaauugagacuggccacaggauugaggaaugucccgucuauucaaucuagaggccuauuuggggccauugccgguuucauugaagggggguggacagggaugguagauggaugguacgguuaucaccaucaaaaugagcaggggucaggauaugcagccgaccugaagagcacacagaaugccauugacaagauuacuaacaaaguaaauucuguuauugaaaagaugaauacacaguucacagcaguagguaaagaguucaaccaccuggaaaaaagaauagagaauuuaaauaaaaaaguugaugaugguuuccuggacauuuggacuuacaaugccgaacuguugguucuauuggaaaaugaaagaacuuuggacuaccacgauucaaaugugaagaacuuauaugaaaaaguaagaagccaguuaaaaaacaaugccaaggaaauuggaaacggcugcuuugaauuuuaccacaaaugcgauaacacgugcauggaaaguaucaaaaaugggacuuaugacuacccaaaauacucagaggaagcaaaauuaaacagagaagaaauagaugggguaaagcuggaaucaacaaggauuuaccagauuuuggcgaucuauucaacugucgccaguucauugguacugguagucucccugggggcaaucaguuucuggaugugcucuaaugggucucuacaguguagaauauguauuuaa

SEQ ID NO: 38700 - RNA, 1701 nt, Artificial Sequence
  derived and/or modified CDS sequence (wt) from hemagglutinin__InfluenzaA__AEA74031
augaaggcaauacuaguaguucugcuauauacauuugcaaccgcaaaugcagacacauuauguauagguuaucaugcgaacaauucaacagacacuguagacacaguacuagaaaagaauguaacaguaacacauucuguugaccuucuagaagacaagcauaacgggaaacuaugcaaacuaagagggguagccccauugcauuuagguaaauguaacauugcuggcuggauccugggaaauccagagugugaaucacucuccacagcaagcucauggucuuacauuguggaaacaucuaguucagacaauggaacguguuacccaggagauuucaucgauuaugaggagcuaagagagcaauugagcucagugucaucauuugaaagguuugaaauauuccccaagacaaguucauggcccaaucaugacucgaacaaagguguaacggcagcauguccacaugcuggagcaaaaagcuucuacaacaauuuaauauggcuaguuaaaaaaggaaauucauacccaaagcucaacaaauccuacauuaaugauaaagggaaagaaguccucgugcuauggggcauucaccauccaucuacuaguacugaccaacaaagucucuaucagaaugcagaugcauauguuuuuguggggacaucaagauacagcaagaaguuuaagccggaaauagcaauaagacccaaagugaggaaucaagaagggagaaugaacuauuacuggacacuaguagagccgggagacaaaauaacauucgaagcaacuggaaaucuagugguaccgagauaugcauucgcaauggaaagaaaugcuggaucugguauuaucauuucagauacaccaauccacgauugcaauacaacuugucagacacccaagggggcuauaaacaccagccucccauuucagaauauacauccgaucacaauuggaaaguguccaaaauauguaaaaagcacaaaauugagacuggccacaggauugaggaaugucccgucuauucaaucuagaggccuauuuggggccauugccgguuucauugaagggggguggacaggaaugguagauggaugguacgguuaucaccaucaaaaugagcaggggucaggauaugcagccgaccugaagagcacacagaaugccauugacgagauuacuaacaaaguaaauucuguuauugaaaagaugaauacgcaguucacagcaguaggcaaagaguucaaccaccuggaaaaaagaauagagaauuuaaauaaaaaaguugaugaugguuuccuggacauuuggacuuacaaugccgaacuguugguucuauuggaaaaugaaagaacuuuggacuaccacgauucaaaugugaagaacuuauaugaaaagguaagaagccaguuaaaaaacaaugccaaggaaauuggaaacggcugcuuugaauuuuaccacaaaugcgauaacacgugcauggaaagugucaaaaaugggacuuaugacuacccaaaauacucagaggaagcaaaauuaaacagagaagaaauagaugggguaaagcuggaaucaacaaggauuuaccagauuuuggcgaucuauucaacugucgccaguucauugguacugguagucucccugggggcaaucaguuucuggaugugcucuaaugggucucuacaguguagaauauguauuuaa

SEQ ID NO: 38701 - RNA, 1701 nt, Artificial Sequence
  derived and/or modified CDS sequence (wt) from hemagglutinin__InfluenzaA__AEA74035
augaaggcaauacuaguaguucugcuauauacauuugcaaccgcaaaugcagacacauuauguauagguuaucaugcgaacaauucaacagacacuguagacacaguacuagaaaagaauguaacaguaacacauucuguugaccuucuagaagacaagcauaacgggaaacuaugcaaacuaagagggguagccccauugcauuuagguaaauguaacauugcuggcuggauccugggaaauccagagugugaaucacucuccacagcaagcucaugguccuacauuguggaaacaucuaguucagacaauggaacguguuacccaggagauuucaucgauuaugaggagcuaagagagcaauugagcucagugucaucauuugaaagguuugaaauauuccccaagacaaguucauggcccaaucaugacucgaacaaagguguaacggcagcauguccacaugcuggagcaaaaagcuucuacaacaauuuaauauggcuaguuaaaaaaggaaauucauacccaaagcucaacaaauccuacauuaaugauaaagggaaagaaguccucgugcuauggggcauucaccauccaucuacuaguacugaccaacaaagucucuaucagaaugcagaugcauauguuuuuguggggacaucaagauacagcaagaaguuuaagccggaaauagcaauaagacccaaagugagggaucaagaagggagaaugaacuauuacuggacacuaguagagccgggagacaaaauaacauucgaagcaacuggaaaucuaguggugccgagauaugcauucgcaauggaaagaaaugcuggaucugguauuaucauuucagauacaccaauccacgauugcaauacaacuugucagacacccaagggggcuauaaacaccagccucccauuucagaauauacauccgaucacaauuggaaaguguccaaaauauguaaaaagcacaaaauugagacuggccacaggauugaggaaugucccgucuauucaaucuagaggccuauuuggggccauugccgguuucauugaagggggguggacaggaaugguagauggaugguacgguuaucaccaucaaaaugagcaggggucaggauaugcagccgaccugaagagcacacagaaugccauugacgagauuacuaacaaaguaaauucuguuauugaaaagaugaauacgcaguucacagcaguaggcaaagaguucaaccaccuggaaaaaagaauagagaauuuaaauaaaaaaguugaugaugguuuccuggacauuuggacuuacaaugccgaacuguugguucuauuggaaaaugaaagaacuuuggacuaccacgauucaaaugugaagaacuuauaugaaaagguaagaagccaguuaaaaaacaaugccaaggaaauuggaaacggcugcuuugaauuuuaccacaaaugcgauaacacgugcauggaaagugucaaaaaugggacuuaugacuacccaaaauacucagaggaagcaaaauuaaacagagaagaaauagaugggguaaagcuggaaucaacaaggauuuaccagauuuuggcgaucuauucaacugucgccaguucauugguacugguagucucccugggggcaaucaguuucuggaugugcucuaaugggucucuacaguguagaauauguauuuaa

SEQ ID NO: 38702 - RNA, 1701 nt, Artificial Sequence
  derived and/or modified CDS sequence (wt) from hemagglutinin__InfluenzaA__AEA77299
augaagacuaucauugcuuugagcuacauucuaugucugguuuucgcucaaaaacuuccuggaaaugacaacagcacggcaacgcugugccuugggcaccaugcaguaccaaacggaacgauagugaaaacaaucacgaaugaccaaauugaaguuacuaaugcuacugagcugguucagaguuccucaacaggugaaauaugcgacaguccucaucagauccuugauggagaaaacugcacacuaauagaugcucuauugggagacccucagugugauggcuuccaaaauaagaaaugggaccuuuuuguugaacgcagcaaagccuacagcaacuguuacccuuaugaugugccggauuaugccucccuuaggucacuaguugccucauccggcacacuggaguuuaacaaugaaagcuucaauuggacuggagucacucaaaacggaacaagcucugcuugcauaaggagaucuaauaacaguuucuuuaguagauugaauugguugacccacuuaaaauucaaauacccagcauugaacgugacuaugccaaacaaugaacaauuugacaaauuguacauuugggggguucaccacccggguacggacaaugaccaaaucuuccuguaugcucaagcaucaggaagaaucacagucucuaccaaaagaagccaacaaacuguaaucccgaauaucggaucuagacccagaguaaggaauaucccuagcagaauaagcaucuauuggacaauaguaaaaccgggagacauacuuuugauuaacagcacagggaaucuaauugcuccuagggguuacuucaaaauacgaagugggaaaagcucaauaaugagaucagaugcacccauuggcaaaugcaauucugaaugcaucacuccaaauggaagcauucccaaugacaaaccauuccaaaauguaaacaggaucacauacggggccugucccagauauguuaagcaaaacacucugaaauuggcaacagggaugcgaaauguaccagagaaacaaacuagaggcauauuuggcgcaaucgcggguuucauagaaaaugguugggagggaaugguggaugguugguacgguuucaggcaucaaaauucugagggaagaggacaagcagcagaucucaaaagcacucaagcagcaaucgaucaaaucaaugggaagcugaauagauugaucgggaaaaccaacgagaaauuccaucagauugaaaaagaauucucagaagucgaagggagaauucaggaccuugagaaauauguugaggacacuaaaauagaucucuggucauacaacgcggagcuucuuguugcccuggagaaccaacauacaauugaucuaacugacucagaaaugaacaaacuguuugaaaaaacaaagaagcaacugagggaaaaugcugaggauaugggcaaugguuguuucaaaauauaccacaaaugugacaaugcuugcauaggaucaaucagaaauggaacuuaugaccacgauguauacagagaugaagcauuaaacaaccgguuccagaucaaaggaguugagcugaagucaggguacaaagauuggauccuauggauuuccuuugccauaucauguuuuuugcuuuguguugcuuuguugggguucaucaugugggccugccaaaaaggcaacauuaggugcaacauuugcauuuga

SEQ ID NO: 38703 - RNA, 1701 nt, Artificial Sequence
  derived and/or modified CDS sequence (wt) from hemagglutinin__InfluenzaA__AEB21316
augaaggcaauacuaguaguucugcuauauacauuugcaaccgcaaaugcagacacauuauguauagguuaucaugcgaacaauucaacagacacuguagacacaguacuagaaaagaauguaacaguaacacacucuguuaaccuucuagaagacaagcauaacgggaaacuaugcaaacuaagagggguagccccauugcauuuggguaaauguaacauugcuggcuggauccugggaaauccagagugugaaucacucuccacagcaagcucaugguccuacauuguggaaacaucuaguucagacaauggaacguguuacccaggagauuucaucgauuaugaggagcuaagagagcaauugagcucagugucaucauuugaaagguuugagauauuccccaagacaaguucauggcccaaucaugacucgaacaaagguguaacggcagcauguccucaugcuggagcaaaaagcuucuacaaaaauuuaauauggcuaguuaaaaaagggaauucauacccaaagcucagcaaauccuacauuaaugauaaagggaaagaaguccucgugcuauggggcauucaccauccaucuacuacugcugaccaacaaagucucuaucagaaugcagauacauauguuuuuguggggacaucaagauacagcaagaaguucaagccggaaauagcaauaagacccaaagugagggaucaagaagggagaaugaacuauuacuggacacuaguagagccgggagacaaaauaacauucgaagcaacuggaaaucuagugguaccgagauaugcauucgcaauggaaagaaaugcuggaucugguauuaucauuucagauacaccaguccacgauugcaauacaacuugucagacacccaagggugcuauaaacaccagccucccauuucagaauauacauccgaucacaauuggaaaauguccaaaauauguaaaaagcacaaaauugagacuggccacaggauugaggaaugucccgucuauucaaucuagaggccuauuuggggccauugccggcuucauugaagggggguggacagggaugguagauggaugguacgguuaucaccaucaaaaugagcaggggucaggauaugcagccgaccugaagagcacacagaaugccauugacaagauuacuaacaaaguaaauucuguuauugaaaagaugaauacacaguucacagcaguagguaaagaguucaaccaccuggaaaaaagaauagagaauuuaaauaaaaaaguugaugaugguuuccuggacauuuggacuuacaaugccgaacuguugguucuauuggaaaaugaaagaacuuuggacuaccacgauucaaaugugaagaacuuauaugaaaagguaagaaaccaguuaaaaaacaaugccaaggaaauuggaaauggcugcuuugaauuuuaccacaaaugcgauaacacgugcauggaaagugucaaaaaugggacuuaugacuacccaaaauacucagaggaagcaaaauuaaacagagaagaaauagaugggguaaagcuggaaucaacaaggauuuaccagauuuuggcgaucuauucaacugucgccaguucauugguacugguagucucccugggggcaaucaguuuuuggaugugcucuaaugggucucuacaguguagaauauguauuuaa

SEQ ID NO: 38704 - RNA, 1701 nt, Artificial Sequence
  derived and/or modified CDS sequence (wt) from hemagglutinin__InfluenzaA__AEB21326
augaaggcaauacuaguaguucugcuauauacauuugcaaccgcaaaugcagacacauuauguauagguuaucaugcgaacaauucaacagacacuguagacacaguacuagaaaagaauguaacaguaacacacucuguuaaucuucuagaagacaagcauaacgggaaacuaugcaaacuaagagggguagccccauugcauuuggguaaauguaacauugcuggcuggauccugggaaauccagagugugaaucacucuccacagcaagcucaugguccuacauuguggaaacaucuaguucagacaauggaacguguuacccaggagauuucaucgauuaugaggagcuaagagagcaauugagcucagugucaucauuugaaagguuugagauauuccccaagacaaguucauggcccaaucaugacucgaacaaagguguaacggcagcauguccucaugcuggagcaaaaggcuucuacaaaaauuuaauauggcuaguuaaaaaaggaaauucauacccaaagcucagcaaauccuacauuaaugauaaagggaaagaaguccucgugcuauggggcauucaccauccaucuacuacugcugaccaacaaagucucuaucagaaugcagauacauauguuuuuguggggacaucaagauacagcaagaaguucaagccggaaauagcaauaagacccaaagugagggaucaagaagggagaaugaacuauuacuggacacuaguagagccgggagacaaaauaacauucgaagcaacuggaaaucuagugguaccgagauaugcauucgcaauggaaagaaaugcuggaucugguauuaucauuucagauacaccaguccacgauugcaauacaacuugucagacacccaagggugcuauaaacaccagccucccauuucagaauauacauccgaucacaauuggaaaauguccaaaauauguaaaaagcacaaaauugagacuggccacaggauugaggaaugucccgucuauucaaucuagaggccuauuuggggccauugccggcuucauugaagggggguggacagggaugguagauggaugguacgguuaucaccaucaaaaugagcaggggucaggauaugcagccgaccugaagagcacacagaaugccauugacaagauuacuaacaaaguaaauucuguuauugaaaagaugaauacacaguucacagcaguagguaaagaguucaaccaccuggaaaaaagaauagagaauuuaaauaaaaaaguugaugaugguuuccuggacauuuggacuuacaaugccgaacuguugguucuauuggaaaaugaaagaacuuuggacuaccacgauucaaaugugaagaaccuauaugaaaagguaagaaaccaguuaaaaaacaaugccaaggaaauuggaaauggcugcuuugaauuuuaccacaaaugcgauaacacgugcauggaaagugucaaaaaugggacuuaugacuacccaaaauacucagaggaagcaaaauuaaacagagaagaaauagaugggguaaagcuggaaucaacaaggauuuaccagauuuuggcgaucuauucaacugucgccaguucauugguacugguagucucccugggggcaaucaguuuuuggaugugcucuaaugggucucuacaguguagaauauguauuuaa

SEQ ID NO: 38705 - RNA, 1701 nt, Artificial Sequence
  derived and/or modified CDS sequence (wt) from hemagglutinin__InfluenzaA__AEB21338
augaaggcaauacuaguaguucugcuauauacauuugcaaccgcaaaugcagacacauuauguauagguuaucaugcgaacaauucaacagacacuguagacacaguacuagaaaagaauguaacaguaacacacucuguuaaccuucuagaagacaagcauaacgggaaacuaugcaaacuaagagggguagccccauugcauuuggguaaauguaacauugcuggcuggauccugggaaauccagagugugaaucacucuccacagcaagcucaugguccuacauuguggaaacaucuaguucagacaauggaacguguuacccaggagauuucaucgauuaugaggagcuaagagagcaauugagcucagugucaucauuugaaagguuugagauauuccccaagacaaguucauggcccaaucaugacucgaacaaagguguaacggcagcauguccucaugcuggagcaaaaagcuucuacaaaaauuuaauauggcuaguuaaaaaaggaaauucauacccaaagcucagcaaauccuacauuaaugauaaagggaaagaaguccucgugcuauggggcauucaccauccaucuacuacugcugaccaacaaagucucuaucagaaugcagauacauauguuuuuguggggacaucaagauacagcaagaaguucaagccggaaauagcaauaagacccaaagugagggaucaagaagggagaaugaacuauuacuggacacuaguagagccgggagacaaaauaacauucgaagcaacuggaaaucuagugguaccgagauaugcauucgcaauggaaagaaaugcuggaucugguauuaucauuucagauacaccaguccaugauugcaauacaacuugucagacacccaagggugcuauaaacaccagccucccauuucagaauauacauccgaucacaauuggaaaauguccaaaauauguaaaaagcacaaaauugagacuggccacaggauugaggaaugucccgucuauucaaucuagaggccuauuuggggccauugccggcuucauugaagggggguggacaggaaugguagauggaugguacgguuaucaccaucaaaaugagcaggggucaggauaugcagccgaccugaagagcacacagaaugccauugacaagauuacuaacaaaguaaauucuguuauugaaaagaugaauacacaguucacagcaguagguaaagaguucaaccaccuggaaaaaagaauagagaauuuaaauaaaaaaguugaugaugguuuccuggacauuuggacuuacaaugccgaacuguugguucuauuggaaaaugaaagaacuuuggacuaccacgauucaaaugugaagaacuuauaugaaaagguaagaaaccaguuaaaaaacaaugccaaggaaauuggaaauggcugcuuugaauuuuaccacaaaugcgauaacacgugcauggaaagugucaaaaaugggacuuaugacuacccaaaauacucagaggaagcaaaauuaaacagagaagaaauagaugggguaaagcuggaaucaacaaggauuuaccagauuuuggcgaucuauucaacugucgccaguucauugguacugguagucucccugggggcaaucaguuuuuggaugugcucuaaugggucucuacaguguagaauauguauuuaa

SEQ ID NO: 38706 - RNA, 1701 nt, Artificial Sequence
  derived and/or modified CDS sequence (wt) from hemagglutinin__InfluenzaA__AEB21348
augaaggcaauacuaguaguucugcuauauacauuugcaaccgcaaaugcagacacauuauguauagguuaccaugcgaacaauucaacagacacuguagacacaguacuagaaaagaauguaacaguaacacacucuguuaaucuucuagaagacaagcauaacgggaaacuaugcaaacuaagagggguagccccauugcauuuggguaaauguaacauugcuggcuggauccugggaaauccagagugugaaucacucuccacagcaagcucaugguccuacauuguggaaacaucuaguucagacaauggaacguguuacccaggagauuucaucgauuaugaggagcuaagagagcaauugagcucagugucaucauuugaaagguuugagauauuccccaagacaaguucauggcccaaucaugacucgaacaaagguguaacggcagcauguccucaugcuggagcaaaaggcuucuacaaaaauuuaauauggcuaguuaaaaaaggaaauucauacccaaagcucagcaaauccuacauuaaugauaaagggaaagaaguccucgugcuauggggcauucaccauccaucuacuacugcugaccaacaaagucucuaucagaaugcagauacauauguuuuuguggggacaucaagauacagcaagaaguucaagccggaaauagcaauaagacccaaagugagggaucaagaagggagaaugaacuauuacuggacacuaguagagccgggagacaaaauaacauucgaagcaacuggaaaucuagugguaccgagauaugcauucgcaauggaaagaaaugcuggaucugguauuaucauuucagauacaccaguccacgauugcaauacaacuugucagacacccaagggugcuauaaacaccagccucccauuucagaauauacauccgaucacaauuggaaaauguccaaaauauguaaaaagcacaaaauugagacuggccacaggauugaggaaugucccgucuauucaaucuagaggccuauuuggggccauugccggcuucauugaagggggguggacagggaugguagauggaugguacgguuaucaccaucaaaaugagcaggggucaggauaugcagccgaccugaagagcacacagaaugccauugacaagauuacuaacaaaguaaauucuguuauugaaaagaugaauacacaguucacagcaguagguaaagaguucaaccaccuggaaaaaagaauagagaauuuaaauaaaaaaguugaugaugguuuccuggacauuuggacuuacaaugccgaacuguugguucuauuggaaaaugaaagaacuuuggacuaccacgauucaaaugugaagaacuuauaugaaaagguaagaaaccaguuaaaaaacaaugccaaggaaauuggaaauggcugcuuugaauuuuaccacaaaugcgauaacacgugcauggaaagugucaaaaaugggacuuaugacuacccaaaauacucagaggaagcaaaauuaaacagagaagaaauagaugggguaaagcuggaaucaacaaggauuuaccagauuuuggcgaucuauucaacugucgccaguucauugguacugguagucucccugggggcaaucaguuuuuggaugugcucuaaugggucucuacaguguagaauauguauuuaa

SEQ ID NO: 38707 - RNA, 1701 nt, Artificial Sequence; identical to SEQ ID NO: 35602
  derived and/or modified CDS sequence (wt) from hemagglutinin__InfluenzaA__AEB40206

SEQ ID NO: 38708 - RNA, 1701 nt, Artificial Sequence
  derived and/or modified CDS sequence (wt) from hemagglutinin__InfluenzaA__AEB66895
augaagacuaucauugcuuugagcuacauucuaugucugguuuucgcucaaaaacuuccuggaaaugacaacagcacggcaacgcugugccuugggcaccaugcaguaccaaacggaacgauagugaaaacaaucacgaaugaccaaauugaaguuacuaaugcuacugagcugguucagaguuccucaacaggugaaauaugcgacaguccucaucagauccuugauggaaaaaacugcacacuaauagaugcucuauugggagacccucagugugauggcuuccaaaauaagaaaugggaccuuuuuguugaacgcagcaaagccuacagcaacuguuacccuuaugaugugccggauuaugccucccuuaggucacuaguugccucauccggcacacuggaguuuaacaaugaaagcuucaauuggacuggagucacucaagacggaacaagcucugcuugcauaaggagaucuaaaaacaguuucuuuaguagauugaauugguugacccacuuaaacuucaaauacccagcauugaacgugacuaugccaaacaaugaacaauuugacaaauuguacauuugggggguucaccacccggguacggacaaagaccaaaucuuccuguaugcucaagcaucaggaagaaucacagucucuaccaaaagaagccaacaaacugcaaucccgaauaucggaucuagacccagaguaaggaauaucccuagcagaauaagcaucuauuggacaauaguaaaaccgggagacauacuuuugauuaacagcacagggaaucuaauugcuccuagggguuacuucaaaauacgaagugggaaaagcucaauaaugagaucagaugcacccauuggcaaaugcaauucugaaugcaucacuccaaauggaagcauucccaaugacaaaccauuccaaaauguaaacaggaucacauacggggccugucccagauauguuaagcaaaacacucugaaauuggcaacagggaugcgaaauguaccagagaaacaaacuagaggcauauuuggagcaaucgcggguuucauagaaaaugguugggagggaaugguggaugguugguacgguuucaggcaucaaaauucugagggaagaggacaagcagcagaucucaaaagcacucaagcagcaaucgaucaaaucaaugggaagcugaauagauugaucgggaaaaccaacgagaaauuccaucagauugaaaaagaauucucagaagucgaagggagaauucaggaccuugagaaauauguugaggacacuaaaauagaucucuggucauacaacgcggagcuucuuguugcccuggagaaccaacauacaauugaucuaacugacucagaaaugaacaaacuguuugaaaaaacaaagaagcaacugagggaaaaugcugaggauaugggcaaugguuguuucaaaauauaccacaaaugugacaaugccugcauaggaucaaucagaaauggaacuuaugaccacgauguauacagagaugaagcauuaaacaaccgguuucagaucaagggaguugagcugaagucaggguacaaagauuggauccuauggauuuccuuugccauaucauguuuuuugcuuuguguugcuuuguugggguucaucaugugggccugccaaaaaggcaacauuaggugcaacauuugcauuuga

SEQ ID NO: 38709 - RNA, 1698 nt, Artificial Sequence
  derived and/or modified CDS sequence (wt) from hemagglutinin__InfluenzaA__AEB71102
auggaugucccaguauuuguacucuuaauguuaaccagcauauguguacaggcugauaggauuuguguuggguacuuaagcacaaacucaucagaaaggguugacacauugcuagagaacaaugucccgguuacaagcucuguugauuugguugagaccaaccacacaggaacauauuguucuuuggguggaauuagcccagugcacuugggggacuguagcuucgagggcuggauuguagggaacccugccugugccagcaaccuggggauuagagaauggucauauuugauugaagauccuucugcuccucauggauuguguuacccaggagaguuagacaacaauggagaauugaggcacuuguucagugggaucagaucuuucaguagaacagaguugaucgcaccuaccucuuggggggaagugaaugaugggguaacggcugccugucaagacaaaggagcuagcagcuuuuaccggaacuugguaugguuuguggagagaggaaauaaauauccugugauccgcaggaccuacaacaacaccacuggcagagauguuuugguuauaugggguauacaucacccugucuccacagaugaagcgaggaaacuguaugccaaagacaauccauacacauugguaucuaccaguucauggagcaggaaauacaaccuagaaacuggaaccagaccuggauacaauggccaaaagaguuggacgaagauuuacugguaucugaugcaccccggggauucaaucaguuucgaaagcaaugggggauuacuggcucccaaauaugguuacauuauugaggaauauggaaaagggcgaauuuuccaaagccgcauucgcauugcuaaaugcaauacuaagugccaaacaucgguugguggaauaaauacuaacaaaacauuucaaaacauagagagaaaugcacuuggggauugcccgaaauacauaaagucuggacagcucaaguuggccacuggacuuaggaauguaccugccauaucaaacagaggauuguuuggggcuauugcaggcuucauagaaggugguuggccaggauuaauaaaugguugguauggauuccaacaucagaaugaacaaggaaugggcauggcugcagacaaagagucaacacaaaaggcuauugaucaaauaacaacuaagauaaacaauauaauagaaaaaaugaaugggaauuaugacucaauacgaggugaauucagucagguggaacaaagaauaaauaugcuugcagacagaauagaugaugcuguaacugauguauggucauacaaugcaaagcuucuuguuuuauuagagaacgacaagacucuagacaugcaugacgccaacgucaggaaccugcaugaucaaguccguagaguguugaggaccaaugcaauugaugagggaaauggauguuuugaacuccuccauaaaugcaaugacucuugcauggagacaauaagaaauggaacguacaaccauauagaguaugaagaggaaucaaaguuaaaaagacaggaaauagaagguauaaagcugaagucagacgacaaugucuacaaagcauuaucgauuuacagcugcaucgcaagcaguauuguauugguaggacucauacuugcauucaucaugugggcaugcaguaguggcaauugccgauucaauauuuguauauaa

SEQ ID NO: 38710 - RNA, 1698 nt, Artificial Sequence
  derived and/or modified CDS sequence (wt) from hemagglutinin__InfluenzaA__AEB71896
augaaaguaaaacuacugguccuguuaugcacauuuacagcuacauaugcagacacaauauguauaggcuaccaugcuaacaacucgaccgacacuguugacacaguacuugaaaagaaugugacagugacacacucugucaaccugcuugagaacagucacaauggaaaacuaugucuauuaaaaggaauagccccacuacaauuggguaacugcagcguugccggguggaucuuaggaaacccagaaugcgaauuacugauuuccaaagagucaugguccuacauuguagaaaaaccaaauccugagaauggaacauguuacccagggcauuucgcugacuaugaggaacugagggagcaauugaguucaguaucuucauuugagagguucgaaauauuccccaaagaaagcucauggcccaaccacaccguaaccggagugucagcaucaugcucccauaauggggaaagcaguuuuuacagaaauuugcuauggcugacggggaagaaugguuuguacccaaaccugagcaaguccuaugcaaacaacaaagaaaaagaaguccuuguacuaugggguguucaucacccgccaaacauaguugaccaaaagacccucuaccguacagaaaaugcuuauguuucuguagugucuucacauuauagcagaaaauucaccccagaaauagccaaaagacccaaaguaagagaucaagaaggaagaaucaacuacuacuggacucugcuugaacccggggauacaauaauauuugaggcaaauggaaaucuaauagcgccaagauaugcuuucgcacugaguagaggcuuuggaucaggaaucaucaacucaaaugcaccaauggguaaaugugaugcgaagugccaaacaccucagggagcuauaaacagcagucuuccuuuccagaacguacacccagucacaauaggagaguguccaaaguaugucaggagugcaaaauuaaggaugguuacaggacuaaggaacaucccauccauucaauccagagguuuguuuggagccauugccgguuucauugaagggggguggacuggaaugguagaugguugguaugguuaucaucaucagaaugagcaaggaucuggcuaugcugcagaucaaaaaagcacacaaaaugccauuaaugggauuacaaacaaggugaauucuguaauugagaaaaugaacacucaauucacagcagugggcaaagaauucaacaaauuggaaagaaggauggaaaacuugaauaaaaaaguugaugauggguuuauagacauuuggacauauaaugcagaacuguugguucuacuggaaaaugaaaggacuuuggauuuccaugacuccaaugugaagaaucuguaugagaaaguaaaaagccaguuaaagaauaaugcuaaagaaauaggaaauggguguuuugaauucuaucacaaguguaacgaugaaugcauggagaguguaaagaauggaacuuaugacuauccaaaauauuccgaagaaucaaaguuaaacaaggagaaaauugauggagugaaauuggaaucaaugggagucuaucagauucuggcgaucuacucaacagucgccaguucucugguucuuuuggucucccugggggcaaucagcuucuggauguguuccaaugggucuuugcaguguagaauaugcaucuaa

SEQ ID NO: 38711 - RNA, 1701 nt, Artificial Sequence; identical to SEQ ID NO: 34965
  derived and/or modified CDS sequence (wt) from hemagglutinin__InfluenzaA__AEB71916

SEQ ID NO: 38712 - RNA, 1701 nt, Artificial Sequence
  derived and/or modified CDS sequence (wt) from hemagglutinin__InfluenzaA__AEB71925
augaagacuaucauugcuuugagcuacauucuaugucugguuuucgcucaaaaacuuccuggaaaugacaacagcacggcaacgcugugccuugggcaccaugcaguaccaaacggaacgauagugaaaacaaucacgaaugaccaaauugaaguuacuaaugcuacugagcugguucagaguuccucaacaggugaaauaugcgacaguccucaucagauccuugauggagaaaacugcacacuaauagaugcucuauugggagacccucagugugauggcuuccaaaauaagaaaugggaccuuuuuguugaacgaagcaaagccuacagcaacuguuacccuuaugauguaccggauuaugccucccuuaggucacuaguugccucauccggcacacuggaguuuaacaaugaaagcuucaauuggacuggagucacucaaaacggaacaagcucugcuugcauaaggagaucuaauaacaguuucuuuaguagauugaauugguugacccacuuaaaauucaaauacccagcauugaacgugacuaugccaaacaaugaacaauuugacaaauuguacauuugggggguucaccacccggguacggacaaugaccaaaucuuccuguaugcucaagcaucaggaagaaucacaguaucuaccaaaagaagccaacaaacuguaaucccgaauaucggaucuagacccagaguaaggaauaucccuagcagaauaagcaucuauuggacaauaguaaaaccgggagacauacuuuugauuaacagcacagggaaucuaauugcuccuagggguuacuucaaaauacgaagugggaaaagcucaauaaugagaucagaugcacccauuggcaaaugcaauucugaaugcaucacuccaaauggaagcauucccaaugacaaaccauuccaaaauguaaacaggaucacauacggggccugucccagauauguuaagcaaaacacucugaaauuggcaacaggaaugcgaaauguaccagagaaacaaacuagaggcauauuuggcgcaaucgcggguuucauagaaaaugguugggagggaaugguggaugguugguacgguuucaggcaucaaaauucugagggaagaggacaagcagcagaucucaaaagcacucaagcagcaaucgaucaaaucaaugggaagcugaauagauugaucgggaaaaccaacgagaaauuccaucagauugaaaaagaauucucagaagucgaagggagaauccaggaccuugagaaauauguugaggacacuaaaauagaucucuggucauacaacgcggagcuucuuguugcccuggagaaccaacauacaauugaucuaacugacucagaaaugaacaaacuguuugaaaaaacaaagaagcaacugagggaaaaugcugaggauaugggcaaugguuguuucaaaauauaccacaaaugugacaaugccugcauaggaucaaucagaaauggaacuuaugaccacgauguauacagagaugaagcauugaacaaccgguuccagaucaagggaguugagcugaagucaggguacaaagauuggauccuauggauuuccuuugccauaucauguuuuuugcuuuguguugcuuuguugggguucaucaugugggccugccaaaaaggcaacauuaggugcaacauuugcauuuga

SEQ ID NO: 38713 - RNA, 1701 nt, Artificial Sequence
  derived and/or modified CDS sequence (wt) from hemagglutinin__InfluenzaA__AEB71936
augaagacuaucauugcuuugagcuacauucuaugucugguuuucgcucaaaaacuuccuggaaaugacaacagcacggcaacgcugugccuugggcaccaugcaguaccaaacggaacgauagugaaaacaaucacgaaugaccaaauugaaguuacuaaugcuacugagcugguucagaguuccucaacaggugaaauaugcgacaguccucaucagauccuugauggagaaaacugcacacuaauagaugcucuauugggagacccucagugugauggcuuccaaaauaagaaaugggaccuuuuuguugaacgcagcaaagccuacagcaacuguuacccuuaugaugugccggauuaugccucccuuaggucacuaguugccucauccggcacacuggaguuuaacaaugaaagcuucaauuggacuggagucacucaaaacggaacaagcucugcuugcauaaggagaucuaauaacaguuucuuuaguagauugaauugguugacccacuuaaaauucaaauacccagcauuaaacgugacuaugccaaacaaugaacaauuugacaaauuguacauuugggggguucaccacccggguacggacaaugaccaaaucuuccuguaugcucaagcaucaggaagaaucacagucucuaccaaaagaagccaacaaacuguaaucccgaauaucggaucuagacccagaguaaggaauaucccuagcagaauaagcaucuauuggacaauaguaaaaccgggagacauacuucugauuaacagcacagggaaucuaauugcuccuagggguuacuucaaaauacgaagugggaaaagcucaauaaugagaucagaugcacccauuggcaaaugcaauucugaaugcaucacuccaaauggaagcauucccaaugacaaaccauuccaaaauguaaacaggaucacauacggggccugucccagauauguuaagcaaaacacucugaaauuggcaacagggaugcgaaauguaccagagaaacaaacuagaggcauauuuggcgcaaucgcggguuucauagaaaaugguugggagggaaugguggaugguugguacgguuucaggcaucaaaauucugagggaagaggacaagcagcagaucucaaaagcacucaagcagcaaucgaucaaaucaaugggaagcugaauagauugaucgggaaaaccaacgagaaauuccaucagauugaaaaagaauucucagaagucgaagggagaauucaggaccuugagaaauauguugaggacaccaaaauagaucucuggucauacaacgcggagcuucuuguugcccuggagaaccaacauacaauugaccuaacugacucagaaaugaacaaacuguuugaaaaaacaaagaagcaacugagggaaaaugcugaggauaugggcaaugguuguuucaaaauauaccacaaaugugacaaugccugcauaggaucaaucagaaauggaacuuaugaccacgauguauacagagaugaagcauuaaacaaccgguuccagaucaagggaguugagcugaagucaggguacaaagauuggauccuauggauuuccuuugccauaucauguuuuuugcuuuguguugcuuuguugggguucaucaugugggccugccaaaaaggcaacauuaggugcaacauuugcauuuga

SEQ ID NO: 38714 - RNA, 1701 nt, Artificial Sequence
  derived and/or modified CDS sequence (wt) from hemagglutinin__InfluenzaA__AEB71947
augaagacuaucauugcuuugagcuacauucuaugucugguuuucgcucaaaaacuuccuggaaaugacaacagcacggcaacgcugugccuugggcaccaugcaguaccaaacggaacgauagugaaaacaaucacgaaugaccaaauugaaguuacuaaugcuacugagcugguucagaguuccucaacaggugaaauaugcgacaguccucaucagauccuugauggagaaaacugcacacuaauagaugcucuauugggagacccucagugugauggcuuccaaaauaagaaaugggaccuuuuuguugaacgcagcaaagccuacagcaacuguuacccuuaugaugugccggauuaugccucccuuaggucacuaguugccucauccggcacacuggaguuuaacaaugaaagcuucaauuggacuggagucacucaaaacggaacaagcucugcuugcauaaggagaucuaauaacaguuucuuuaguagauugaauugguugacccacuuaaaauucaaauacccagcauuaaacgugacuaugccaaacaaugaacaauuugacaaauuguacauuugggggguucaccacccggguacggacaaugaccaaaucuuccuguaugcucaagcaucaggaagaaucacagucucuaccaaaagaagccaacaaacuguaaucccgaauaucggaucuagacccagaguaaggaauaucccuagcagaauaagcaucuauuggacaauaguaaaaccgggagacauacuuuugauuaacagcacagggaaucuaauugcuccuagggguuacuucaaaauacgaagugggaaaagcucaauaaugagaucagaugcacccauuggcaaaugcaauucugaaugcaucacuccaaauggaagcauucccaaugacaaaccauuccaaaauguaaacaggaucacauacggggccugucccagauauguuaagcaaaacacucugaaauuggcaacagggaugcgaaauguaccagagaaacaaacuagaggcauauuuggcgcaaucgcggguuucauagaaaaugguugggagggaaugguggaugguugguacgguuucaggcaucaaaauucugagggaagaggacaagcagcagaucucaaaagcacccaagcagcaaucgaucaaaucaaugggaagcugaauagauugaucgggaaaaccaacgagaaauuccaucagauugaaaaagaauucucagaagucgaagggagaauucaggaccuugagaaauauguugaggacaccaaaauagaucucuggucauacaacgcggagcuucuuguugcccuggagaaccaacauacaauugaucuaacugacucagaaaugaacaaacuguuugaaaaaacaaagaagcaacugagggaaaaugcugaggauaugggcaaugguuguuucaaaauauaccacaaaugugacaaugccugcauaggaucaaucagaaauggaacuuaugaccacgauguauacagagaugaagcauuaaacaaccgguuccagaucaagggaguugagcugaagucaggguacaaagauuggauccuauggauuuccuuugccauaucauguuuuuugcuuuguguugcuuuguugggguucaucaugugggccugccaaaaaggcaacauuaggugcaacauuugcauuuga

SEQ ID NO: 38715 - RNA, 1698 nt, Artificial Sequence; identical to SEQ ID NO: 38664
  derived and/or modified CDS sequence (wt) from hemagglutinin__InfluenzaA__AEB71958

SEQ ID NO: 38716 - RNA, 1701 nt, Artificial Sequence
  derived and/or modified CDS sequence (wt) from hemagglutinin__InfluenzaA__AEB71969
augaagacuaucauugcuuugagcuacauucuaugucugguuuucgcucaaaaacuuccuggaaaugacaacagcacggcaacgcugugccuugggcaccaugcaguaccaaacggaacgauagugaaaacaaucacgaaugaccaaauugaaguuacuaaugcuacugagcugguucagaguuccucaacaggugaaauaugcgacaguccucaucagauccuugauggaaaaaacugcacacuaauagaugcucuauugggagacccucagugugauggcuuccaaaauaagaaaugggaccuuuuuguugaacgcagcaaagccuacagcaacuguuacccuuaugaugugccggauuaugccucccuuaggucacuaguugccucauccggcacacuggaguuuaacaaugaaagcuucaauuggacuggagucacucaaaacggaacaagcucugcuugcauaaggagaucuaaaaacaguuucuuuaguagauugaauugguugacccacuuaaacuucaaauacccagcauugaacgugacuaugccaaacaaugaacaauuugacaaauuguacauuugggggguucaccacccggguacggacaaagaccaaaucuuccuguaugcucaagcaucaggaagaaucacagucucuaccaaaagaagccaacaaacuguaaucccgaauaucggaucuagacccagaguaaggaauaucccuagcagaauaagcaucuauuggacaauaguaaaaccgggagacauacuuuugauuaacagcacagggaaucuaauugcuccuagggguuacuucaaaauacgaagugggaaaagcucaauaaugagaucagaugcacccauuggcaaaugcaauucugaaugcaucacuccaaauggaagcauucccaaugacaaaccauuccaaaauguaaacaggaucacauacggggccugucccagauauguuaagcaaaacacucugaaauuggcaacagggaugcgaaauguaccagagaaacaaacuagaggcauauuuggcgcaaucgcggguuucauagaaaaugguugggagggaaugguggaugguugguacgguuucaggcaucaaaauucugagggaagaggacaagcagcagaucucaaaagcacucaagcagcaaucgaucaaaucaaugggaagcugaauagauugaucgggaaaaccaacgagaaauuccaucagauugaaaaagaauucucagaagucgaagggagaauucaggaccuugagaaauauguugaggacacuaaaauagaucucuggucauacaacgcggagcuucuuguugcccuggagaaccaacauacaauugaucuaacugacucagaaaugaacaaacuguuugaaaaaacaaagaagcaacugagggaaaaugcugaggauaugggcaaugguuguuucaaaauauaccacaaaugugacaaugccugcauaggaucaaucagaaauggaacuuaugaccacgauguauacagagaugaagcauuaaacaaccgguuucagaucaagggaguugagcugaagucaggguacaaagauuggauccuauggauuuccuuugccauaucauguuuuuugcuuuguguugcuuuguugggguucaucaugugggccugccaaaaaggcaacauuaggugcaacauuugcauuuga

SEQ ID NO: 38717 - RNA, 1701 nt, Artificial Sequence
  derived and/or modified CDS sequence (wt) from hemagglutinin__InfluenzaA__AEB71980
augaagacuaucauugcuuugagcugcauucuaugucugguuuucgcucaaaaacuuccuggaaaugacaacagcacggcaacgcugugccuugggcaccaugcaguaccaaacggaacgauagugaaaacaaucacgaaugaccaaauugaaguuacuaaugcuaccgagcugguucagaguuccucaacaggugaaauaugcgacaguccucaucagauccuugauggagaaaacugcacacuaauagaugcucuauugggagacccucagugugauggcuuccaaaauaagaaaugggaccuuuuuguugaacgcagcaaagccuacagcaacuguuacccuuaugaugugccggauuaugccucccuuaggucacuaguugccucauccggcacacuggaguuuaacaaugaaagcuuuaauuggacuggagucacucaaaacggaacaagcucugcuugcauaaggagaucuaauaacaguuucuuuaguagauugaauugguugacccacuuaaaauucaaauacccagcauugaacgugacuaugccaaacaaugaacaauuugacaaauuguacauuugggggguucaccacccggguacggacaaugaccaaaucuuccuguaugcucaagcaucaggaagaaucacagucucuaccaaaagaagccaacaaacuguaaucccgaauaucggaucuagacccagaguaaggaauaucccuagcagaauaagcaucuauuggacaauaguaaaaccgggagacauacuuuugauuaacagcacagggaaucuaauugcuccuagggguuacuucaaaauacgaagugggaaaagcucaauaaugagaucagaugcacccauuggcaaaugcaauucugaaugcaucacuccaaauggaagcauucccaaugacaaaccauuccaaaauguaaacaggaucacauacggggccugucccagauauguuaagcaaaacacucugaaauuggcaacagggaugcgaaauguaccagagaaacaaacuagaggcauauuuggugcaaucgcgggcuucauagaaaaugguugggagggaaugguggaugguugguacgguuucaggcaucaaaauucugagggaagaggacaagcagcagaucucaaaagcacucaagcagcaaucgaucaaaucaaugggaagcugaauagauugaucgggaaaaccaacgagaaauuccaucagauugaaaaagaauucucagaagucgaagggagaauucaggaccuugagaaauauguagaggacacuaaaauagaucucuggucauacaacgcggagcuucuuguugcccuggagaaccaacauacaauugaucuaacugacucagaaaugaacaaacuguuugaaaaaacaaagaagcaacugagggaaaaugcugaggauaugggcaaugguuguuucaaaauauaccacaaaugugacaaugccugcauaggaucaaucagaaauggaacuuaugaccacgauguauacagagaugaagcauuaaacaaccgguuccagaucaagggaguugagcugaagucaggguacaaagauuggauccuauggauuuccuuugccauaucauguuuuuugcuuuguguugcuuuguugggguucaucaugugggccugccaaaaaggcaacauuaggugcaacauuugcauuuga

SEQ ID NO: 38718 - RNA, 1698 nt, Artificial Sequence; identical to SEQ ID NO: 38401
  derived and/or modified CDS sequence (wt) from hemagglutinin__InfluenzaA__AEB71992

SEQ ID NO: 38719 - RNA, 1698 nt, Artificial Sequence; identical to SEQ ID NO: 38401
  derived and/or modified CDS sequence (wt) from hemagglutinin__InfluenzaA__AEC13313

SEQ ID NO: 38720 - RNA, 1701 nt, Artificial Sequence
  derived and/or modified CDS sequence (wt) from hemagglutinin__InfluenzaA__AEC46553
augaaggcaauacuaguaguucugcuauauacauuugcaaccgcaaaugcagacacauuauguauagguuaucaugcgaacaauucaacagacacuguagacacaguacuagaaaagaauguaacaguaacacacucuguuaaccuucuagaagacaagcauaacgggaaacuaugcaaacuaagagggguagccccauugcauuuggguaaauguaacauagcuggcuggauccugggaaauccagagugugaaucacucuccacagcaagcucaugguccuacauuguggaaacaucuaguucagacaauggaacguguuacccaggagauuucaucgauuaugaggagcuaagggagcaauugagcucagugucaucauuugaaagauuugagauauuccccaagacaaguucauggcccaaucaugacccgaacaaagguguaacggcagcauguccucaugcuggagcaaaaagcuucuacaaaaauuuaauauggcuaguuaaaaaaggaaauucauacccaaagcucagcacauccuauauuaaugauaaagggaaagaaguccucgugcuauggggcauucaccauccaucuacuagugcugaccaacaaagucucuaucagaaugcagaugcauaugcuuuuguggggacaucaagauacagcaagaaguucaagccggaaauagcaauaagacccaaagugagggaucaagaagggagaaugaacuauuacuggacacuaguagagccgggagacaaaauaacauucgaagcaacuggaaaucuaguggugccgagauaugcauucgcaauggaaagaaaugcgggaucugguauuaucauuucagauacaucaguccacgauugcaauacaacuugucaaacacccaagggugcuauaaacaccagccucccauuucagaauguacauccgaucacaauuggaaaauguccaaaauauguaaaaagcacaaaauugagacuggccacaggauugaggaaugucccgucuauucaaucucgaggccuauuuggggccauugccgguuucauugaagggggguggacagggaugguagauggaugguacgguuaucaucaucaaaaugagcaggggucaggauaugcagccgaccugaagagcacacagaaugccuuugacaagauuacuaacaaaguaaauucuguuauugaaaagaugaauacacaguucacagcaguagguaaagaguucaaccaccuggaaaaaagaauagagaauuuaaauaaaaaaguugaugaugguuuccuggacauuuggacuuacaaugccgaacuguugguucuauuggaaaaugaaagaacuuuggacuaccacgauucaaaugugaagaacuuauaugaaaagguaagaagccaguuaaaaaacaaugccaaggaaauuggaaacggcugcuuugaauuuuaccacaaaugcgauaacacgugcauggaaagugucaaaaaugggacuuaugacuacccaaaauacucagaggaagcaaaauuaaacagagaagaaauagaugggguaaagcuggaaucaacaaggauuuaccagauuuuggcgaucuauucaacugucgccaguucauugguacugguagucucccugggggcaaucaguuucuggaugugcucuaaugggucucuacaguguagaauauguauuuaa

SEQ ID NO: 38721 - RNA, 1701 nt, Artificial Sequence
  derived and/or modified CDS sequence (wt) from hemagglutinin__InfluenzaA__AEC46555
augaaggcaauacuaguaguucugcuauauacauuugcaaccgcaaaugcagacacauuauguauagguuaucaugcgaacaauucaacagacacuguagacacaguacuagaaaagaauguaacaguaacacacucuguuaaccuucuagaagacaagcauaacgggaaacuaugcaaacuaagagggguagccccauugcauuuggguaaauguaacauagcuggcuggauccugggaaauccagagugugaaucacucuccacagcaagcucaugguccuacauuguggaaacaucuaguucagacaauggaacguguuacccaggagauuucaucgauuaugaggagcuaagggagcaauugagcucagugucaucauuugaaagauuugagauauuccccaagacaaguucauggcccaaucaugacccgaacaaagguguaacggcagcauguccucaugcuggagcaaaaagcuucuacaaaaauuuaauauggcuaguuaaaaaaggaaauucauacccaaagcucagcacauccuauauuaaugauaaagggaaaaaaguacucgugcuauggggcauucaccauccaucuacuagugcugaccaacaaagucucuaucagaaugcagaugcauaugcuuuuguggggacaucaagauacagcaagaaguucaagccggaaauagcaauaagacccaaagugagggaucaagaagggagaaugaacuauuacuggacacuaguagagccgggagacaaaauaacauucgaagcaacuggaaaucuaguggugccgagauaugcauucgcaauggaaagaaaugagggaucugguauuaucauuucagauacaucaguccacgauugcaauacaacuugucaaacacccaagggugcuauaaacaccagccucccauuucagaauguacauccgaucacaauuggaaaauguccaaaauauguaaaaagcacaaaauugagacuggccacaggauugaggaaugucccgucuauucaaucucgaggccuauuuggggccauugccgguuucauugaagggggguggacagggaugguagauggaugguacgguuaccaucaucaaaaugagcaggggucaggauaugcagccgaccugaagagcacacagaaugccuuugacaagauuacuaacaaaguaaauucuguuauugaaaagaugaauacacaguucacagcaguagguaaagaguucaaccaccuggaaaaaagaauagagaauuuaaauaaaaaaguugaugaugguuuccuggacauuuggacuuacaaugccgaacuguugguucuauuggaaaaugaaagaacuuuggacuaccacgauucaaaugugaagaacuuauaugaaaagguaagaagccaguuaaaaaacaaugccaaggaaauuggaaacggcugcuuugaauuuuaccacaaaugcgauaacacgugcauggaaagugucaaaaaugggacuuaugacuacccaaaauacucagaggaagcaaaauuaaacagagaagaaauagaugggguaaagcuggaaucaacaaggauuuaccagauuuuggcgaucuauucaacugucgccaguucauugguacugguagucucccugggggcaaucaguuucuggaugugcucuaaugggucucuacaguguagaauauguauuuaa

SEQ ID NO: 38722 - RNA, 1701 nt, Artificial Sequence; identical to SEQ ID NO: 38720
  derived and/or modified CDS sequence (wt) from hemagglutinin__InfluenzaA__AEC46557

SEQ ID NO: 38723 - RNA, 1701 nt, Artificial Sequence; identical to SEQ ID NO: 34705
  derived and/or modified CDS sequence (wt) from hemagglutinin__InfluenzaA__AEC53259

SEQ ID NO: 38724 - RNA, 1701 nt, Artificial Sequence
  derived and/or modified CDS sequence (wt) from hemagglutinin__InfluenzaA__AEC53269
augaaggcaauacuaguaguucugcuauauacauuugcaaccgcaaaugcagacacauuauguauagguuaucaugcgaacaauucaacagacacuguagacacaguacuagaaaagaauguaacaguaacacacucuguuaaccuucuagaagacaagcauaacgggaaacuaugcaaacuaagagggguagccccauugcauuuggguaaauguaacauugcuggcuggauccugggaaauccagagugugaaucacucuccacagcaagcucaugguccuacauuguggaaacaucuaguucagacaauggaacguguuacccaggagauuucaucgauuaugaggagcuaagagagcuauugagcucagugucaucauuugaaagguuugagauauuccccaagacaaguucauggcccaaucaugacucgaacaaagguguaacggcagcauguccucaugcuggagcaaaaagcuucuacaaaaauuuaauauggcuaguuaaaaaaggaaauucauacccaaagcucagcaaauccuacauuaaugauaaagggaaagaaguccucgugcuauggggcauucaccauccaucuacuagugcugaccaacaaagucucuaucagaaugcagaugcauauguuuuuguggggucaucaagauacagcaagaaguucaagccggaaauagcaauaagacccaaagugagggaucaagaagggagaaugaacuauuacuggacacuaguagagccgggagacaaaauaacauucgaagcaacuggaaaucuagugguaccgagauaugcauucgcaauggaaagaaaugcuggaucugguauuaucauuucagauacaccaguccacgauugcaauacaacuugucagacacccaagggugcuauaaacaccagccucccauuucagaauauacauccgaucacaauuggaaaauguccaaaauauguaaaaagcacaaaauugagacuggccacaggauugaggaauaucccgucuauucaaucuagaggccuauuuggggccauugccgguuucauugaagggggguggacagggaugguagauggaugguacgguuaucaccaucaaaaugagcaggggucaggauaugcagccgaccugaagagcacacagaaugccauugacgagauuacuaacaaaguaaauucuguuauugaaaagaugaauacacaguucacagcaguagguaaagaguucaaccaccuggaaaaaagaauagagaauuuaaauaaaaaaguugaugaugguuuccuggacauuuggacuuacaaugccgaacuguugguucuauuggaaaaugaaagaacuuuggacuaccacgauucaaaugugaagaacuuauacgaaaagguaagaagccaguuaaaaaacaaugccaaggaaauuggaaacggcugcuuugaauuuuaccacaaaugcgauaacacgugcauggaaagugucaaaaaugggacuuaugacuacccaaaauacucagaggaagcaaaauuaaacagagaagaaauagaugggguaaagcuggaaucaacaaggauuuaccagauuuuggcgaucuauucaacugucgccaguucauugguacugguagucucccugggggcaaucaguuucuggaugugcucuaaugggucucuacaguguagaauauguauuuaa

SEQ ID NO: 38725 - RNA, 1701 nt, Artificial Sequence; identical to SEQ ID NO: 35411
  derived and/or modified CDS sequence (wt) from hemagglutinin__InfluenzaA__AEC53279

SEQ ID NO: 38726 - RNA, 1701 nt, Artificial Sequence; identical to SEQ ID NO: 34705
  derived and/or modified CDS sequence (wt) from hemagglutinin__InfluenzaA__AEC53289

SEQ ID NO: 38727 - RNA, 1701 nt, Artificial Sequence; identical to SEQ ID NO: 34705
  derived and/or modified CDS sequence (wt) from hemagglutinin__InfluenzaA__AEC53299

SEQ ID NO: 38728 - RNA, 1701 nt, Artificial Sequence; identical to SEQ ID NO: 34898
  derived and/or modified CDS sequence (wt) from hemagglutinin__InfluenzaA__AEC53327

SEQ ID NO: 38729 - RNA, 1701 nt, Artificial Sequence
  derived and/or modified CDS sequence (wt) from hemagglutinin__InfluenzaA__AEC53347
augaaggcaauacuaguaguucugcuauauacauuugcaaccgcaaaugcagacacauuauguauagguuaucaugcgaacaauucaacagacacuguagacacaguacuagaaaagaauguaacaguaacacacucuguuaaccuucuagaagacaagcauaacgggaaacuaugcaaacuaagagggguagccccauugcauuuggguaaauguaacauugcuggcuggauccugggaaauccagagugugaaucacucuccacagcaagcucaugguccuacauuguggaaacaucuaguucagacaauggaacguguuacccaggagauuucaucgauuaugaggagcuaagagagcaauugagcucagugucaucauuugaaagguuugagauauuccccaagacaaguucauggcccaaucaugacucgaacaaagguguaacggcagcauguccucaugcuggagcaaaaagcuucuacaaaaauuuaauauggcuaguuaaaaaaggaaauucauacccaaagcucagcaaauccuacauuaaugauaaagggaaagaaguccucgugcuauggggcauucaccauccaucuacuagugcugaccaacaaagucucuaucagaaugcagaugcauauguuuuuguggggucaucaagauacagcaagaaguucaagccggaaauagcaauaagacccaaagugagggaucaagaagggagaaugaacuauuacuggacacuaauagagccgggagacaaaauaacauucgaagcaacuggaaaucuagugguaccgagauaugcauucgcaauggaaagaaaugcuggaucugguauuaucauuucagauacaccaguccacgauugcaauacaacuugucagacacccaagggugcuauaaacaccagccucccauuucagaauauacauccgaucacaauuggaaaauguccaaaauauguaaaaagcacaaaauugagacuggccacaggauugaggaaugucccgucuauucaaucuagaggccuauuuggggccauugccgguuucauugaagggggguggacagggaugguagauggaugguacgguuaucaccaucaaaaugagcaggggucaggauaugcagccgaccugaagagcacacagaaugccauugacgagauuacuaacaaaguaaauucuguuauugaaaagaugaauacacaguucacagcaguagguaaagaguucaaccaccuggaaaaaagaauagagaauuuaaauaaaaaaguugaugaugguuuccuggacauuuggacuuacaaugccgaacuguugguucuauuggaaaaugaaagaacuuuggacuaccacgauucaaaugugaagaacuuauaugaaaagguaagaagccaguuaaaaaacaaugccaaggaaauuggaaacggcugcuuugaauuuuaccacaaaugcgauaacacgugcauggaaagugucaaaaaugggacuuaugacuacccaaaauacucagaggaagcaaaauuaaacagagaagaaauagaugggguaaagcuggaaucaacaaggauuuaccagauuuuggcgaucuauucaacugucgccaguucauugguacugguagucucccugggggcaaucaguuucuggaugugcucuaaugggucucuacaguguagaauauguauuuaa

SEQ ID NO: 38730 - RNA, 1701 nt, Artificial Sequence
  derived and/or modified CDS sequence (wt) from hemagglutinin__InfluenzaA__AEC53404
augaaggcaauacuaguaguucugcuauauacauuugcaaccgcaaaugcagacacauuauguauagguuaucaugcgaacaauucaacagacacuguagacacaguacuagaaaagaauguaacaguaacacacucuguuaacauucuagaagacaagcauaacgggaaacuaugcaaacuaagagggguagccccauugcauuuggguaaauguaacauugcuggcuggauccugggaaauccagagugugaaucacucuccacagcaagcucaugguccuacauuguggaaacaucuaguucagacaauggaacguguuacccaggagauuucaucgauuaugaggagcuaagagagcaauugagcucagugucaucauuugaaagguuugagauauuccccaagacaaguucauggcccaaucaugacucgaacaaagguauaacggcagcauguccucaugcuggagcaaaaagcuucuacaaaaauuuaauauggcuaguuaaaaaaggaaauucauacccaaagcucagcaaauccuacauuaaugauaaagggaaagaaguccucgugcuauggggcauucaccauccaucuacuagugcugaccaacaaagucucuaucagaaugcagaugcauauguuuuuguggggucaucaagauacagcaagaaguucaagccggaaauagcaauaagacccaaagugagggaucaagaagggagaaugaacuauuacuggacacuaguagagccgggagacaaaauaacauucgaagcaacuggaaaucuagugguaccgagauaugcauucgcaauggaaagaaaugcuggaucugguauuaucauuucagauacaccaguccacgauugcaauacaacuugucagacacccaagggugcuauaaacaccagccucccauuucagaauauacauccgaucacaauuggaaaauguccaaaauauguaaaaagcacaaaauugagacuggccacaggauugaggaaugucccgucuauucaaucuagaggccuauuuggggccauugccgguuucauugaagggggguggacagggaugguagauggaugguacgguuaucaccaucaaaaugagcaggggucaggauaugcagccgaccugaagagcacacagaaugccauugacgagauuacuaacaaaguaaauucuguuauugaaaagaugaauacacaguucacagcaguagguaaagaguucaaccaccuggaaaaaagaauagagaauuuaaauaaaaaaguugaugaugguuuccuggacauuuggacuuacaaugccgaacuguugguucuauuggaaaaugaaagaacuuuggacuaccacgauucaaaugugaagaacuuauaugaaaagguaagaagccagcuaaaaaacaaugccaaggaaauuggaaacggcugcuuugaauuuuaccacaaaugcgauaacacgugcauggaaagugucaaaaaugggacuuaugacuacccaaaauacucagaggaagcaaaauuaaacagagaagaaauagaugggguaaagcuggaaucaacaaggauuuaccagauuuuggcgaucuauucaacugucgccaguucauugguacugguagucucccugggggcaaucaguuucuggaugugcucuaaugggucucuacaguguagaauauguauuuaa

SEQ ID NO: 38731 - RNA, 1701 nt, Artificial Sequence; identical to SEQ ID NO: 34705
  derived and/or modified CDS sequence (wt) from hemagglutinin__InfluenzaA__AEC53414

SEQ ID NO: 38732 - RNA, 1701 nt, Artificial Sequence
  derived and/or modified CDS sequence (wt) from hemagglutinin__InfluenzaA__AEE27177
augaagacaauacuaguaguucugcuauauacauuugcaaccgcaaaugcagacacauuauguauagguuaucaugcgaacaauucaacagacacuguagacacaguacuagaaaagaauguaacaguaacacacucuguuaacauucuagaagacaagcauaacgggaaacuaugcaaacuaagagggguagccccauugcauuuggguaaauguaacauugcuggcuggauccugggaaauccagagugugaaucacucuccacagcaagcucaugguccuacauuguggaaacaucuaguucagacaauggaacguguuacccaggagauuucaucgauuaugaggagcuaagagagcaauugagcucagugucaucauuugaaagguuugagauauuccccaagacaaguucauggcccaaucaugacucgaacaaagguguaacggcagcauguccucaugcuggagcaaaaagcuucuacaaaaauuuaauauggcuaguuaaaaaaggaaauucauacccaaagcucagcaaauccuacauuaaugauaaaaggaaagaaguccucgugcuauggggcauucaccauccaucuacuagugcugaccaacaaagucucuaucagaaugcagaugcauauguuuuuguggggucaucaagauacagcaagaaguucaagccggaaauagcaauaagacccaaagugagggaucaagaagggagaaugaacuauuacuggacacuaguagagccgggagacaaaauaacauucgaagcaacuggaaaucuagugguaccgagauaugcauucgcaauggaaagaaaugcuggaucugguauuaucauuucagauacaccaguccacgauugcaauacaacuugucagacacccaagggugcuauaaacaccagccucccauuucagaauauucauccgaucacaauuggaaaauguccaaaauauguaaaaagcacaaaauugagacuggccacaggauugaggaaugucccgucuauucaaucuagaggccuauuuggggccauugccgguuucauugaagggggguggacagggaugguagaugggugguacgguuaucaccaucaaaaugagcaggggucaggauaugcagccgaccugaagagcacacagaaugccauugacgagauuacuaacaaaguaaauucuguuauugaaaagaugaauacacaguucacagcaguagguaaagaguucaaccaccuggaaaaaagaauagagaauuuaaauaaaaaaguugaugaugguuuccuggauauuuggacuuacaaugccgaacuguugguucuauuggaaaaugaaagaacuuuggacuaccacgauucaaaugugaagaacuuauaugaaaagguaagaagccagcuaaaaaacaaugccaaggaaauuggaaacggcugcuuugaauuuuaccacaaaugcgauaacacgugcauggaaagugucaaaaaugggacuuaugacuacccaaaauacucagaggaagcaaaauuaaacagagaagaaauagaugggguaaagcuggaaucaacaaggauuuaccagauuuuggcgaucuauucaacugucgccaguucauugguacugguagucucccugggggcaaucaguuucuggaugugcucuaaugggucucuacaguguagaauauguauuuaa

SEQ ID NO: 38733 - RNA, 1701 nt, Artificial Sequence; identical to SEQ ID NO: 37846
  derived and/or modified CDS sequence (wt) from hemagglutinin__InfluenzaA__AEE27187

SEQ ID NO: 38734 - RNA, 1701 nt, Artificial Sequence
  derived and/or modified CDS sequence (wt) from hemagglutinin__InfluenzaA__AEE27207
augaaggcaauacuaguaguucugcuauauacauuugcaaccgcaaaugcagacacauuauguauagguuaucaugcgaacaauucaacagacacuguagacacaguacuagaaaagaaugugacaguaacacacucuguuaaccuucuagaagacaagcauaacgggaaacuaugcaaacuaagagggguagccccauugcauuuggguaaauguaacauugcuggcuggauccugggaaauccagagugugaaucacucuccacagcaagcucaugguccuacauuguggaaacaucuaguucagacaauggaacguguuacccaggagauuuuaucgauuaugaggagcuaagagagcaauugagcucagugucaucauuugaaagguuugagauauuccccaagacaaguucauggcccaaucaugacucgaacaaagguguaacggcagcauguccucaugcuggagcaaaaagcuucuacaaaaauuuaauauggcuaguuaaaaaaggaaauucauacccaaagcucagcaaauccuacauuaaugauaaagggaaagaaguccucgugcuauggggcauucaccauccaucuacuagugcugaccaacaaagucucuaucagaaugcagaugcauauguuuuuguggggacaucaagauacagcaagaaguucaagccggaaauagcaauaagacccaaagugagggaucaagaagggagaaugaacuauuacuggacacuaguagagccgggagacaaaauaacauucgaagcaacuggaaaucuagugguaccgagauaugcauucgcaauggaaagaaaugcuggaucugguauuaucauuucagauacaccaguccacgauugcaauacaacuugucagacacccaagggugcuauaaacaccagccucccauuucagaauauacauccgaucacaauuggaaaauguccaaaauauguaaaaagcacaaaauugagacuggccacaggauugaggaaugucccgucuauucaaucuagaggccuauuuggggccauugccgguuucauugaagggggguggacagggaugguagauggaugguacgguuaucaccaucaaaaugagcaggggucaggauaugcagccgaccugaagagcacacagaaugccauugacgagauuacuaacaaaguaaauucuguuauugaaaagaugaauacacaguucacagcaguagguaaagaguucaaccaccuggaaaaaagaauagagaauuuaaauaaaaagguugaugaugguuuccuggacauuuggacuuacaaugccgaacuguugguucuauuggaaaaugaaagaacuuuggacuaccacgauucaaaagugaagaacuuauaugaaaagguaagaagccaguuaaaaaacaaugccaaggaaauuggaaacggaugcuuugaauuuuaccacaaaugcgauaacacgugcauggaaagugucaaaaaugggacuuaugacuacccaaaauacucagaggaagcaaaauuaaacagagaagaaauagaugggguaaagcuggaaucaacaaggauuuaccagauuuuggcgaucuauucaacugucgccaguucauugguacugguagucucccugggggcaaucaguuucuggaugugcucuaaugggucucuacaguguagaauauguauuuaa

SEQ ID NO: 38735 - RNA, 1701 nt, Artificial Sequence
  derived and/or modified CDS sequence (wt) from hemagglutinin__InfluenzaA__AEG64752
augaaggcaauacuaguaguucugcuauauacauuugcaaccgcuaaugcagacacauuauguauagguuaucaugcgaacaauucaacagacacuguagacacaguacuagaaaagaacguaacaguaacacacucuguuaaccuucuagaagacaagcauaacgggaaacuaugcaaacuaagagggguagccccauugcauuuggguaaauguaacauugcuggcuggauccugggaaauccagagugugaaucacucuccacagcaagcucaugguccuacauuguggaaacaucuaguucagacaauggaacguguuacccaggagauuucaucgauuaugaggagcuaagagagcaauugagcucagugucaucauuugaaagguuugagauauuccccaagacaaguucauggcccaaucaugacucgaacaaagguguaacggcagcaugcccucaugcuggagcaaaaagcuucuacaaaaauuuaauauggcuaguuaaaaaaggaaauucauacccaaagcucagcaaauccuacauuaaugauaaagggaaagaaguccucgugcuauggggcauucaccauccaucuacuagugcugaccaacaaagucucuaucagaaugcagaugcauauguuuuuguggggucaucaagauacagcaagaaguucaagccggaaauagcaauaagacccaaagugagggaucaagaagggagaaugaacuauuacuggacacuaguagagccgggagacaaaauaacauucgaagcaacuggaaaucuagugguaccgagauaugcauucgcaauggaaagaaaugcuggaucugguauuaucauuucagauacaccaguccacgauugcaauacaacuugucagacacccaagggugcuauaaacaccagccucccauuucagaauauacauccgaucacaauuggaaaauguccaaaauauguaagaagcacaaaauugagacuggccacaggauugaggaaugucccgucuauucaaucuagaggccuauuuggggccauugccgguuucauugaagggggguggacagggaugguagauggaugguacgguuaucaccaucaaaaugagcaggggucaggauaugcagccgaccugaagagcacacagaaugccauugacgagauuacuaacaaaguaaauucuguuauugaaaagaugaauacacaguucacagcaguagguaaagaguucaaccaccuggaaaaaagaauagagaauuuaaauaaaaaaguugaugaugguuucuuggacauuuggacuuacaaugccgaacuguugguucuauuggaaaaugaaagaacuuuagacuaccacgauucaaaugugaagaacuuauaugaaaagguaagaagacagcuaaaaaacaaugccaaggaaauuggaaacggcugcuuugaauuuuaccacaaaugcgauaacacgugcauggaaagugucaaaaaugggacuuaugacuacccaaaauacucagaggaagcaaaauuaaacagagaagaaauagaugggguaaagcuggaaucaacaaggauuuaccagauuuuggcgaucuauucaacugucgccaguucauugguauugguagucucccugggggcaaucaguuucuggaugugcuccaaugggucucuacaguguagaauaugcauuuaa

SEQ ID NO: 38736 - RNA, 1701 nt, Artificial Sequence
  derived and/or modified CDS sequence (wt) from hemagglutinin__InfluenzaA__AEG64762
augaaggcaagacuacugguccuguuaugugcacuugcagcuacagaugcagacacaauauguauaggcuaccaugcgaacaacucaaccgacacuguugacacacuacucgagaagaaugugacagugacacauucuguuaaccugcucgaagacagccacaacgggaaacuauguaaauuaaaaggaauagccccacuacaauuggggaaauguaacaucgccggauggcucuugggaaacccagaaugcgacucacugcuuccagcgagaucaugguccuacauuguagaaacaccaaacucugagaauggagcauguuauccaggagauuucaucgacuaugaggaacugagggagcaauugagcacaguaucaucauuagaaagauucgaaauauuucccaaggaaaguucauggcccaaccacaacacacucaaaggaguaacaguaucaugcucccaugggggaaaaagcaguuuuuacagaaauuugcuauggcugacgaaaacgggggacucauacccaaagcugaacaauuccuaugugaacaauaaagggaaagaaguccuuguacuaugggguguucaucacccgucuagcaguaaugagcaacagagucucuaucauaauguaaaugcuuaugucucuguagugucuucaaauuauaacaggagauucaccccggaaauagcugcaagacccaaaguaagagaucaaccugggaggaugaacuauuacuggaccuugcuagaacccggagacacaauauuauuugaggcaacugguaaucuaauagcaccaugguaugcuuucgcacugaguagaggguuuggguccggcaucaucaccucaaacgcgucaaugcaugaguguaacacgaagugucaaacaccccagggagcuauaaacagcagucucccuuuccagaauauacacccagucacaauaggagagugcccaaaauaugucaggaguaccaaauugaggaugguuacaggacuaagaaacaucccauccauucaauccagaggucuauuuggagccauugcugguuuuauugaggggggauggacuggaaugauagauggaugguaugguuaucaucaucagaaugaacagggaucaggcuaugcagcggaucaaaaaagcacacaaaaugccauuaacgggauuacaaacaaggugaacucuguuaucgagaaaaugaacacucaauucacagcuguggguaaagaauucaacaacuuagaaaaaaggauggaaaauuuaaauaaaaaaguugaugauggauuucuggacauuuggacauauaaugcagaauuguuaguucuacuggaaaaugaaaggacuuuggauuuccaugacuuaaaugugaaaaaucuguacgagaaaguaaaaagccaauuaaagaauaaugccaaagaaaucggaaauggguguuuugaguucuaccacaagugugacaaugaaugcauggaaaguguaagagaugggacuuaugauuauccaaaauauucagaagaaucaaaguugaacagggaaaagauagauggagugaaauuggaaucaauggggguguaucagauucuggcgaucuacucaacugucgccaguucacuggugcuuuuggucucccugggggcaaucaguuucuggauguguucuaaugggucuuugcagugcagaauaugcaucuaa

SEQ ID NO: 38737 - RNA, 1701 nt, Artificial Sequence
  derived and/or modified CDS sequence (wt) from hemagglutinin__InfluenzaA__AEG64784
augaaggcaauacuaguaguucugcuguauacauuugcaaccgcaaaugcagacacauuauguauagguuaucaugcgaacaauucaacagacacuguagacacaguacuagaaaagaauguaacaguaacacacucuguuaaccuucuagaagacaagcauaacgggaaacuaugcaaacuaagagggguagccccauugcauuuggguaaauguaacauugcuggcuggauccugggaaauccagagugugaaucacucuccacagcaagcucaugguccuacauuguggaaacaucuaguucagacaauggaacguguuacccaggagauuucaucgauuaugaggagcuaagagagcaauugagcucagugucaucauuugaaagguuugagauauuccccaagacaaguucauggcccaaucaugacucgaacaaagguguaacggcagcauguccucaugcuggagcaaaaagcuucuacaaaaauuuaauauggcuaguuaaaaaaggaaauucauacccaaagcucagcaaauccuacauuaaugauaaagggaaagaaguccucgugcuauggggcauucaccauccaucuacuagugcugaccaacaaagucucuaucagaaugcagaugcauauguuuuuguggggacaucaagauacagcaagaaguucaagccggaaauagcaauaagacccaaagugagggaucaagaagggagaaugaacuauuacuggacacuaguagagccgggagacaaaauaacauucgaagcaacuggaaaucuagugguaccgagauaugcauucgcaauggaaagaaaugcuggaucugguauuaucauuucagauacaccaguccacgauugcaauacaacuugucagacacccaagggugcuauaaacaccagccucccauuucagaauauacauccgaucacaauuggaaaauguccaaaauauguaaaaagcacaaaauugagacuggccacaggauugaggaaugucccuucuauucaaucuagaggccuauuuggggccauugccgguuucauugaagggggguggacagggaugguagauggaugguacgguuaucaccaucaaaaugagcaggggucaggauaugcagccgaccugaagagcacacagaaugccauugacgagauuacuaacaaaguaaauucuguuauugaaaagaugaauacacaguucacagcaguagguaaagaguucaaccaccuggaaaaaagaauagagaauuuaaauaaaaaaguugaugaugguuuccuggacauuuggacuuacaaugccgaacuguugguucuauuggaaaaugaaagaacuuuggacuaccacgauucaaaugugaagaacuuauaugaaaagguaagaagccaguuaaaaaacaaugccaaggaaauuggaaacggcugcuuugaauuuuaccacaaaugcgauaacacgugcauggaaagugucaaaaaugggacuuaugacuacccaaaauacucagaggaagcaaaauuaaacagagaagaaauagaugggguaaagcuggaaucaacaaggauuuaccagaucuuggcgaucuauucaacugucgccaguucauugguacugguagucucccugggggcaaucaguuucuggaugugcucuaaugggucucuacaguguagaauauguauuuaa

SEQ ID NO: 38738 - RNA, 1701 nt, Artificial Sequence
  derived and/or modified CDS sequence (wt) from hemagglutinin__InfluenzaA__AEG64834
augaagacuaucauugcuuugagcuacauucuaugucugguuuucgcccaaaaacuuccuggaaaugacaacagcacggcaacgcugugccuugggcaccaugcaguaccaaacggaacgauagugaaaacaaucacaaaugaccaaauugaaguuacuaaugcuacugagcugguucagaauuccucagcaggugaaauaugcgacaguccucaucagauccuugauggagaaaacugcacacuaauagaugcucuauugggagacccucagugugauggcuuccaaaauaagaaaugggaccuuuuuguugaacgaagcagagccuacagcaacuguuacccuuaugaugugccggauuaugccucccuuaggucacuaguugccucauccggcacacuggaguuuaacaaugaaagcuucaauuggacuggagucacucaaaacggaacaagcucugcuugcauaaggagaucuaauaauaguuucuuuaguagauugaauugguugacccacuuaaacuucaaauacccagcauugaacgugacuaugccaaacaaugaacaauuugacaaauuguacauuugggggguucaccacccggguacggacaaggaccaaaucuuccuguaugcucaagcaucaggaagaaucacaguaucuaccaaaagaagccaacaagcuguaaucccgaauaucggaucuagacccagaguaaggaauaucccuagcagaauaagcaucuauuggacaauaguaaaaccgggagacauacuuuugauuaacagcacagggaaucuaauugcuccuagggguuacuucaaaauacgaagugggaaaagcucaauaaugagaucagaugcacccauuggcaaaugcaauucugaaugcaucacuccaaauggaagcauucccaaugacaaaccauuccaaaauguaaacaggaucacauacggggccugucccagauauguuaagcaaagcacucugaaauuggcaacaggaaugcgaaauguaccagagaaacaaacuagaggcauauuuggcgcaauagcggguuucauagaaaaugguugggagggaaugguggaugguugguacgguuucaggcaucaaaauucugagggaagaggacaagcagcagaucucaaaagcacucaagcagcaaucgaucaaaucaauggaaagcugaauagauuaaucgggaaaaccaacgagaaauuccaucagauugaaaaagaauucucagaagucgaagggagaauucaggaccuugagaaauauguugaggacacuaaaauagaucucuggucauacaacgcggagcuucuuguugcccuggagaaccaacauacaauugaucuaacugacucagaaaugaacaaacuguuugaaaaaacaaagaagcaacugagggaaaaugcugaggauaugggcaaugguuguuucaaaauauaccacaaaugugacaaugccugcauaggaucaaucagaaauggaacuuaugaccacgauguauacagagaugaagcauuaaacaaccgguuccagaucaagggaguugagcugaagucaggguacaaagauuggauccuauggauuuccuuugccauaucauguuuuuugcuuuguguugcuuuguugggguucaucaugugggccugccaaaaaggcaacauuaggugcaacauuugcauuuga

SEQ ID NO: 38739 - RNA, 1701 nt, Artificial Sequence
  derived and/or modified CDS sequence (wt) from hemagglutinin__InfluenzaA__AEG64845
augaagacuaucauugcuuugagcuacauucuaugucugguuuucgcucaaaaacuuccuggaaaugacaacagcacggcaacgcugugccuugggcaccaugcaguaccaaacggaacgauagugaaaacaaucacgaaugaccaaauugaaguuacuaaugcuacugagcugguucagaauuccucaacaggugaaauaugcgacaguccucaucagauccuugauggagaaaacugcacacuaauagaugcucuauugggagacccucagugugauggcuuccaaaauaagaaaugggaccuuuuuguugaacgaagcaaagccuacagcaacuguuacccuuaugaugugccggauuaugccucccuuaggucacuaguugccucaucuggcacacuggaguuuaacaaugaaagcuucaauuggacuggagucacucaaaacggaacaagcucugcuugcauaaggagaucuaauaauaguuucuuuaguagauugaauugguugacccacuuaaacuucaaauacccagcauugaacgugacuaugccaaacaaugaacaauuugacaaauuguacauuugggggguucaccacccggguacggacaaggaccaaaucuuccuguaugcucaagcaucaggaagaaucacaguaucuaccaaaagaagccaacaaacuguaaucccgaauaucggaucuagacccagaguaaggaauaucccuagcagaauaagcaucuauuggacaauaguaaaaccgggagacauacuuuugauuaacagcacagggaaucuaauugcuccuagggguuacuucaaaauacgaagugggaaaagcucaauaaugagaucagaugcacccauuggcaaaugcaauucugaaugcaucacuccaaauggaagcauucccaaugacaaaccauuccaaaauguaaacaggaucacauacggggccugucccagauauguuaagcaaaacacucugaaauuggcaacaggaaugcgaaauguaccagagaaacaaacuagaggcauauuuggcgcaauagcggguuucauagaaaaugguugggagggaaugguggaugguugguacgguuucaggcaucaaaauucugagggaagaggacaagcagcagaucucaaaagcacucaagcagcaaucgaucaaaucaaugggaagcugaauagauugaucgggaaaaccaacgagaaauuccaucagauugaaaaagaauucucagaagucgaagggagaauucaggaccuugagaaauauguugaggacacuaaaauagaucucuggucauacaacgcggagcuucuuguugcccuggagaaccaacauacaauugaucuaacugacucagaaaugaacaaacuguuugaaaaaacaaagaagcaacugagggaaaaugcugaggauaugggcaaugguuguuucaaaauauaccacaaaugugacaaugccugcauaggaucaaucagaaauggaacuuaugaccacgauguauacagagaugaagcauuaaacaaccgguuccagaucaagggaguugagcugaagucaggguacaaagauuggauccuauggauuuccuuugccauaucauguuuuuugcuuuguguugcuuuguugggguucaucaugugggccugccaaaaaggcaacauuaggugcaacauuugcauuuga

SEQ ID NO: 38740 - RNA, 1701 nt, Artificial Sequence
  derived and/or modified CDS sequence (wt) from hemagglutinin__InfluenzaA__AEG64856
augaagacuaucauugcuuugagcuacauuuuaugucugguuuucgcucaaaaacuucccggaaaugacaacagcacggcaacgcugugccuggggcaccaugcagugccaaacggaacgcuagugaaaacaaucacgaaugaccaaauugaagugacuaaugcuacugagcugguucagaguuccucaacagguagaauaugcgacaguccucaccaaauccuugauggagaaaacugcacacuaauagaugcucuauugggagacccucauugugauggcuuccaaaauaaggaaugggaccuuuucguugaacgcagcaaagccuacagcaacuguuacccuuaugaugugccggauuaugccucccuuaggucacuaguugccucauccggcacacuggaguuuaacaaugaaagcuucaauuggacuggagucgcucagaauggaacaagcucugcuugcaaaaggaggucuaauaaaaguuucuuuaguagauugaauugguugcaccaauugaaauacaaauacccagcacugaacgugacuaugccaaacaaugaaaaauuugacaaauuguacauuugggggguucaccacccgaguacggacagugaccaaaucagccuauaugcucaagcaucagggagagucacagucucuaccaaaagaagccaacagacuguaaucccgaauaucggaucuagacccuggguaaggggugucuccagcagaauaagcaucuauuggacaauaguaaaaccgggagacauacuuuugauuaacagcacagggaaucuaauugcuccucgggguuacuucaaaauacgaagugggaaaagcucaguaaugaggucagaugcauccauuggcaaaugcaauucugaaugcaucacuccaaauggaagcauucccaaugacaaaccauuucaaaauguaaacaggaucacauauggggccugucccagauauguuaagcaaaacacucugaaauuggcaacagggaugcggaauguaccagagaaacaaacuagaggcauauucggugcaaucgcggguuucauagaaaaugguugggagggaaugguggacgguugguacgguuucaggcaucaaaauucugagggcacaggacaagcagcagaucuuaaaagcacucaagcagcaaucaaccaaaucaacgggaaacugaauagguuaaucgagaaaacgaacgagaaauuccaucaaauugaaaaagaauucucagaaguagaagggagaauucaggaccucgagaaauauguugaggacacuaaaauagaucucuggucguacaacgcggagcuucuuguugcccuggagaaccaacauacaauugaucuaacugacucagaaaugaacaaacuguuugaaagaacaaagaagcaacugagggaaaaugcugaggauaugggcaauggcuguuucaaaauauaccacaaaugugacaaugccugcauagagucaaucagaaauggaacuuaugaccaugauguauacagagacgaagcauuaaacaaccgguuccagaucaaagguguugagcugaagucaggauacaaagauuggauccuauggauuuccuuugccauaucauguuuuuugcuuuguguuguuuugcugggguucaucaugugggccugccaaaaaggcaacauuaggugcaacauuugcauuuga

SEQ ID NO: 38741 - RNA, 1701 nt, Artificial Sequence; identical to SEQ ID NO: 32084
  derived and/or modified CDS sequence (wt) from hemagglutinin__InfluenzaA__AEG64867

SEQ ID NO: 38742 - RNA, 1701 nt, Artificial Sequence
  derived and/or modified CDS sequence (wt) from hemagglutinin__InfluenzaA__AEG64878
augaagacuaucauugcuuugagcuacauuuuaugucugguuuucgcucaaaaacuucccguaaaugacaacagcacggcaacgcugugccugggacaccaugcagugccaaacggaacgcuagugaaaacaaucacgaaugaccacauugaagugacuaaugcuacugagcugguucagaguuccucaacagguagaauaugcgacaguccucaccaaauccuugauggagaaaacugcacacuaauagaugcucuauugggagacccucauugugauggcuuccaaaauaaggaaugggaccuuuuuguugaacgcagcacagccuacagcaacuguuacccuuaugaugugccggauuaugccucccuuaggucacuaguugccucauccggcacacuggaguuuaacaaugaaagcuucaauuggacuggagucgcucagaauggaacaagcucugcuugcaaaaggagaucuauuaaaaguuucuuuaguagauugaauugguugcaccaauuaaaauacaaauauccagcacugaaugugacuaugccaaacaaugaaaaauuugacaaauuguacauuugggggguucaccacccgaguacggacagugaccaaaucagccuauaugcucaagcaucagggagagucacagucucuaccaaaagaagccaacaaacuguaaucccgaauaucggaucuagacccuggguaaggggugucuccagcagaauaagcaucuauuggacaauaguaaaaccgggagacauacuuuugauuaacagcacagggaaucuaauugcuccucgggguuacuucaaaauacgaagugggaaaagcucaauaaugaggucaaaugcacccauuggcaaaugcaauucugaaugcaucacuccaaauggaagcauucccaaugacaaaccauuucaaaauguaaacaggaucacauauggggccugucccagauauguuaagcaaaacacucugaaauuggcaacagggaugcggaauguaccagagaaacaaacuagaggcauauucggcgcaaucgcggguuucauagaaaaugguugggaaggaaugguggacgguugguacgguuucaggcaucaaaauucugagggcauaggacaagcagcagaucuuaaaagcacucaagcagcaaucaaccaaaucaacgggaaacugaauagguuaaucgagaaaacaaacgagaaauuccaucaaauugaaaaagaauucucagaaguagaagggagaauucaggaccucgagaaauauguugaggacacuaaaauagaucucuggucguacaacgcggagcuucuuguugcccuggagaaccaacauacaauugaucuaacugacucagaaaugaacaaacuguuugaaagaacaaggaagcaacugagggaaaaugcugaggauaugggcaaugguuguuucaaaauauaccacaaaugugacaaugccugcauagggucaaucagaaauggaacuuaugaccaugauguauacagagacgaagcauuaaacaaccgguuucagaucaaagguguugagcugaagucaggauacaaagauuggauccuauggauuuccuuugccauaucauguuuuuugcuuuguguuguuuugcugggguucaucaugugggccugccaaaaaggcaacauuaggugcaacauuugcauuuga

SEQ ID NO: 38743 - RNA, 1701 nt, Artificial Sequence
  derived and/or modified CDS sequence (wt) from hemagglutinin__InfluenzaA__AEG64889
augaagacuaucauugcuuugagcuacauuuuaugucugguuuucgcucaaaaacuucccguaaaugacaacagcacggcaacgcugugccugggacaccaugcagugccaaacggaacgcuagugaaaacaaucacgaaugaccacauugaagugacuaaugcuacugagcugguucagaguuccucaacagguagaauaugcgacaguccucaccaaauccuugauggagaaaacugcacacuaauagaugcucuauugggagacccucauugugauggcuuccaaaauaaggaaugggaccuuuuuguugaacgcagcacagccuacagcaacuguuacccuuaugaugugccggauuaugccucccuuaggucacuauuugccucauccggcacacuggaguuuaacaaugaaagcuucaauuggacuggagucgcucagaauggaacaagcucugcuugcaaaaggagaucuauuaaaaguuucuuuaguagauugaauugguugcaccaauuaaaauacaaauauccagcacugaacgugacuaugccaaacaaugaaaaauuugacaaauuguacauuugggggguucaccacccgaguacggacagugaccaaaucagccuauaugcucaagcaucagggagagucacagucucuaccaaaagaagccaacaaacuguaaucccgaauaucggaucuagacccuggguaaggggugucuccagcagaauaagcaucuauuggacaauaguaaaaccgggagacauacuuuugauuaacagcacagggaaucuaauugcuccucgggguuacuuuaaaauacgaagugggaaaagcucaauaaugaggucaaaugcacccauuggcaaaugcaauucugaaugcaucacuccaaauggaagcauucccaaugacaaaccauuucaaaauguaaacaggaucacauauggggccugucccagauauguuaagcaaaacacucugaaauuggcaacagggaugcggaauguaccagagaaacaaacuagaggcauauucggcgcaaucgcggguuucauagaaaaugguugggagggaaugguggacgguugguacgguuucaggcaucaaaauucugagggcacaggacaagcagcagaucuuaaaagcacucaagcagcaaucaaccaaaucaacgggaaacugaauagguuaaucgagaaaacaaacgagaaauuccaucaaauugaaaaagaauucucagaaguagaagggagaauucaggaccucgagaaauauguugaagacacuaaaauagaucucuggucguacaacgcggagcuucuuguugcccuggagaaccaacauacaauugaucuaacugacucagaaaugaacaaacuguuugaaaaaacaaggaagcaacugagggaaaaugcugaggauauggguaaugguuguuucaaaauauaccacaaaugugacaaugccugcauagggucaaucagaaauggaacuuaugaccaugauguauacagagacgaagcauuaaacaaccgguuccagaucaaagguguugagcugaagucaggauacaaagauuggauccuauggauuuccuuugccauaucauguuuuuugcuuuguguuguuuugcugggguucaucaugugggccugccaaaaaggcaacauuaggugcaacauuugcauuuga

SEQ ID NO: 38744 - RNA, 1701 nt, Artificial Sequence
  derived and/or modified CDS sequence (wt) from hemagglutinin__InfluenzaA__AEG64911
augaagacuaucauugcuuugagcuacauucuaugucugguuuucgcucaaaaacuucccggaaaugacaacagcacggcaacgcugugccuugggcaccaugcagugccaaacggaacgauagugaaaacaaucacgaaugaccaaauugaaguuacuaaugcuacugagcugguacagaguuccucaacagguggaauaugcgacaguccucaucagauccuugauggagaaaacugcacacuaauagaugcucuauugggagacccucagugugauggcuuccaaaauaagaaaugggaccuuuuuguugaacgcagcaaagccuacagcaacuguuacccuuaugaugugccggauuaugccucccuuaggucacuaguugccucauccggcacacuggaguuuaacaaugaaagcuucgauuggacuggagucacucagaauggaacaagcucugcuugcaaaaggagaucuaauaaaaguuucuuuaguagauugaauugguugacccacuuaaaauacaaauacccagcauugaacgugacuaugccaaacaaugaaaaauuugacaaauuguacauuugggggguucaccacccggguacggacagugaccaaaucagccuauaugcucaagcaucaggaagaaucacagucucuaccaaaagaagccaacaaacuguaaucccgaauaucggaucuagacccaggguaagggaugucuccagccgaauaagcaucuauuggacaauaguaaaaccgggagacauacuuuugauuaacagcacagggaaucuaauugcuccucgggguuacuucaaaauacgaagugggaaaagcucaauaaugagaucagaugcacccauuggcaaaugcaauuccgaaugcaucacuccaaauggaagcauucccaaugacaaaccauuucaaaauguaaacaggaucacauauggggccugucccagauauguuaagcaaaacacuuugaaauuggcaacagggaugcgaaauguaccagagaaacaaacuagaggcauauuuggcgcaaucgcgggcuucauagaaaaugguugggaaggaaugguggacgguugguacgguuucaggcaucaaaauucugagggcacaggacaagcagcagaucucaaaagcacucaagcagcaaucaaccaaaucaaugggaaacugaauagguuaaucgggaaaacaaacgagaaauuccaucagauugaaaaagaauucucagaaguagaagggagaauucaggaccucgagaaauauguugaggacacuaaaauagaucucuggucauacaacgcggagcuucuuguugcccuggagaaccaacauacaauugaucuaacugacucagaaaugaacaaacuguuugaaagaacaaagaagcaacugagggaaaaugcugaggauaugggcaaugguuguuucaaaauauaccacaaaugugacaaugccugcauagggucaaucagaaauggaacuuaugaccaugauguguacagagaugaagcauuaaacaaccgguuccagaucaaagguguugagcugaagucaggauacaaagauuggauccuauggauuuccuuugccauaucauguuuuuugcuuuguguugcuuuguugggguucaucaugugggccugccaaaaaggcaacauuaggugcaacauuugcauuuga

SEQ ID NO: 38745 - RNA, 1701 nt, Artificial Sequence
  derived and/or modified CDS sequence (wt) from hemagglutinin__InfluenzaA__AEG64922
augaagacuaucauugcuuugagcuacauucuaugucugguuuucgcucaaaaacuucccggaaaugacaacagcacggcaacgcugugccuugggcaccaugcaguaccaaacggaacgauagugaaaacaaucacgaaugaccaaauugaaguuacuaaugcuacugagcugguacagaguuccucaacagguggaauaugcgacaguccucaucagauccuugauggagaaaacugcacacuaauagaugcucuauugggagacccucagugugauggcuuccaaaauaagaaaugggaccuuuuuguugaacgcagcaaagccuacagcaacuguuacccuuaugaugugccggauuaugccucccuuaggucacuaguugccucauccggcacacuggaguuuaacaaugaaagcuucgauuggacuggagucacucagaauggaacaagcucugcuugcaaaaggagaucuaauaaaaguuucuuuaguagauugaauugguugacccacuuaaaauacaaauacccagcauugaacgugacuaugccaaacaaugaaaaauuugacaaauuguacauuugggggguucaccacccggguacggacagugaccaaaucagccuauaugcucaagcaucaggaagaaucacagucucuaccaaaagaagccaacaaacuguaaucccgaauaucggaucuagacccaggguaagggaugucucuagccgaauaagcaucuauuggacaauaguaaaaccgggagacauacuuuugauuaacagcacagggaaucuaauugcuccucgggguuacuucaaaauacgaagugggaaaagcucaauaaugagaucagaugcacccauuggcaaaugcaauuccgaaugcaucacuccaaauggaagcauucccaaugacaaaccauuucaaaauguaaacaggaucacauauggggccugucccagauauguuaagcaaaacacuuugaaauuggcaacagggaugcgaaauguaccagagaaacaaacuagaggcauauuuggcgcaaucgcgggcuucauagaaaaugguugggagggaaugguggacgguugguacgguuucaggcaucaaaauucugagggcacaggacaagcagcagaucucaaaagcacucaagcagcaaucaaccaaaucaaugggaaacugaauagguuaaucgggaaaacaaacgagaaauuccaucagauugaaaaagaauucucagaaguagaagggagaauucaggaccucgagaaauauguugaggacacuaaaauagaucucuggucauacaacgcggagcuucuuguugcccuggagaaccaacauacaauugaucuaacugauucagaaaugaacaaacuguuugaaagaacaaagaagcaacugagggaaaaugcugaggauaugggcaaugguuguuucaaaauauaccacaaaugugacaaugccugcauagggucaaucagaaauggaacuuaugaccaugauguguacagagaugaagcauuaaacaaccgguuccagaucaaagguguugagcugaagucaggauacaaagauuggauccuauggauuuccuuugccauaucauguuuuuugcuuuguguugcuuuguugggguucaucaugugggccugccaaaaaggcaacauuaggugcaacauuugcauuuga

SEQ ID NO: 38746 - RNA, 1701 nt, Artificial Sequence
  derived and/or modified CDS sequence (wt) from hemagglutinin__InfluenzaA__AEG64933
augaagacuaucauugcuuugagcuacauucuaugucugguuuucgcucaaaaacuucccggaaaugacaacagcacggcaacgcugugccuugggcaccaugcaguaccaaacggaacgauagugaaaacaaucacgaaugaccaaauugaaguuacuaaugcuacugagcugguacagaguuccucaacagguggaauaugcgauaguccucaucagauccuugauggagaaaacugcacacuaauagaugcucuauugggagacccucagugugauggcuuccaaaauaagaaaugggaccuuuuuguugaacgcagcaaagccuacagcaacuguuacccuuaugaugugccggauuaugccucccuuaggucacuaguugccucauccggcacacuggaguuuaacaaugaaagcuucgauuggacuggagucacucagaauggaacaagcucugcuugcaaaaggagaucuaauaaaaguuucuuuaguagauugaauugguugacccacuuaaaauacaaauacccagcauugaacgugacuaugccaaacaaugaaaaauuugacaaauuguacauuugggggguucaccacccggguacggacagugaccaaaucagccuauaugcucaagcaucaggaagaaucacagucucuaccaaaagaagccaacaaacuguaaucccgaauaucggaucuagacccaggguaagggaugucuccagccgaauaagcaucuauuggacaauaguaaaaccgggagacauacuuuugauuaacagcacagggaaucuaauugcuccucgggguuacuucaaaauacgaagugggaaaagcucaauaaugagaucagaugcacccauuggcaaaugcaauuccgaaugcaucacuccaaauggaagcauucccaaugacaaaccauuucaaaauguaaacaggaucacauauggggccugucccagauauguuaagcaaaacacucugaaauuggcaacagggaugcgaaauguaccagagaaacaaacuagaggcauauuuggcgcaaucgcggguuucauagaaaaugguugggagggaaugguggacgguugguacgguuucaggcaucaaaauucugagggcacaggacaagcagcagaucucaaaagcacucaagcagcaaucaaccaaaucaaugggaaacugaauagguuaaucgggaaaacaaacgagaaauuccaucagauugaaaaagaauucucagaaguagaagggagaauucaggaccucgagaaauauguugaggacacuaaaauagaucucuggucauacaacgcggagcuucuuguugcccuggagaaccaacauacaauugaucuaacugacucagaaaugaacaaacuguuugaaagaacaaagaagcaacugagggaaaaugcugaggauaugggcaaugguuguuucaaaauauaccacaaaugugacaaugccugcauagggucaaucagaaauggaacuuaugaccaugauguguacagagaugaagcauuaaacaaccgguuccagaucaaagguguugagcugaagucaggauacaaagauuggauccuauggauuuccuuugccauaucauguuuuuugcuuuguguugcuuuguugggguucaucaugugggccugccaaaaaggcaacauuaggugcaacauuugcauuuga

SEQ ID NO: 38747 - RNA, 1701 nt, Artificial Sequence
  derived and/or modified CDS sequence (wt) from hemagglutinin__InfluenzaA__AEG64944
augaagacuaucauugcuuugagcuacauucuaugucugguuuucgcucaaaaacuucccggaaaugacaacagcacggcaacgcugugccuugggcaccaugcaguaccaaacggaacgauagugaaaacaaucacgaaugaccaaauugaaguuacuaaugcuacugagcugguacagaguuccucaacagguggaauaugcgacaguccucaucagauccuugauggagaaaacugcacacuaauagaugcucuauugggagacccucagugugauggcuuccaaaauaagaaaugggaccuuuuuguugaacgcagcaaagccuacagcaacuguuacccuuaugaugugccggauuaugccucccuuaggucacuaguugccucauccggcacacuagaguuuaacaaugaaagcuucgauuggacuggagucacucagaauggaacaagcucugcuugcaaaaggagaucuaauaaaaguuucuuuaguagauugaauugguugacccacuuaaaauacaaauacccagcauugaacgugacuaugccaaacaaugaaaaauuugacaaauuguacauuugggggguucaccacccggguacggacagugaccaaaucagccuauaugcucaagcaucaggaagaaucacagucucuaccaaaagaagccaacaaacuguaaucccgaauaucggaucuagacccaggguaagggaugucuccagccgaauaagcaucuauuggacaauaguaaaaccgggagacauacuuuugauuaacagcacagggaaucuaauugcuccucgggguuacuucaaaauacgaagugggaaaagcucaauaaugagaucagaugcacccauuggcaaaugcaauucugaaugcaucacuccaaauggaagcauucccaaugacaaaccauuucaaaauguaaacaggaucacauauggggccugucccagauauauuaagcaaaacacucugaaauuggcaacagggaugcgaaauguaccagagaaacaaacuagaggcauauuuggcgcaaucgcggguuucauagaaaaugguugggagggaaugguggacgguugguacgguuucaggcaucaaaauucugagggcacaggacaagcagcagaucucaaaagcacucaagcagcaaucaaccaaaucaaugggaaacugaauagguuaaucgggaaaacaaacgagaaauuccaucagauugaaaaagaauucucagaaguagaagggagaauucaggaccucgagaaauauguugaggacacuaaaauagaucucuggucauacaacgcggagcuucuuguugcccuggagaaccaacauacaauugaucuaacugacucagaaaugaacaaacuguuugaaagaacaaagaagcaacugagggaaaaugcugaggauaugggcaaugguuguuucaaaauauaccacaaaugugacaaugccugcauagggucaaucagaaauggaacuuaugaccaugauguguacagagaugaagcauuaaacaaccguuuccagaucaaagguguugagcugaagucaggauacaaagauuggauccuauggauuuccuuugccauaucauguuuuuugcuuuguguugcuuuguugggguucaucaugugggccugccaaaaaggcaacauuaggugcaacauuugcauuuga

SEQ ID NO: 38748 - RNA, 1701 nt, Artificial Sequence
  derived and/or modified CDS sequence (wt) from hemagglutinin__InfluenzaA__AEG64955
augaagacuaucauugcuuugagcuacauucuaugucugguuuucgcucaaaaacuucccggaaaugacaacagcacggcaacguugugccuugggcaccaugcaguaccaaacggaacgauagugaaaacaaucacgaaugaccaaauugaaguuacuaaugcuacugaguugguacagaguuccucaacagguggaauaugcgacaguccucaucagauccuugauggagaaaacugcacacuaauagaugcucuauugggagacccucagugugauggcuuccaaaauaagaaaugggaccuuuuuguugaacgcagcaaagccuacagcaacuguuacccuuaugaugugccggauuaugccucccuuaggucacuaguugccucauccggcacacuggaguuuaacaaugaaagcuucgauuggacuggagucacucagaauggaacaagcucugcuugcaaaaggagaucuaauaaaaguuucuuuaguagauugaauugguugacccacuuaaaauacaaauacccagcauugaacgugacuaugccaaacaaugaaaaauuugacaaauuguacauuugggggguucaccacccggguacggacagugaccaaaucagccuauaugcucaagcaucaggaagaaucacagucucuaccaaaagaagccaacaaacuguaaucccgaauaucggaucuagacccagaguaagggaugucuccagccgaauaagcaucuauuggacaauaguaaaaccgggagacauacuuuugauuaacagcacagggaaucuaauugcuccucgggguuacuucaaaauacgaagugggaaaagcucaauaaugagaucagaugcacccauuggcaaaugcaauuccgaaugcaucacuccaaauggaagcauucccaaugacaaaccauuucaaaauguaaacaggaucacauauggggccugucccagauauguuaagcaaaacacucugaaauuggcaacagggaugcgaaauguaccagagaaacaaacuagaggcauauuuggcgcaaucgcggguuucauagaaaaugguugggagggaaugguggacgguugguacgguuucaggcaucaaaauucugagggcacaggacaagcagcagaucucaaaagcacucaagcagcaaucaaccaaaucaaugggaaacugaauagguuaaucgggaaaacaaacgagaaauuccaucagauugaaaaagaauucucagaaguagaagggagaauucaggaccucgagaaauauguugaggacacuaaaauagaucucuggucauacaacgcggagcuucuuguugcccuggagaaccaacauacaauugaucuaacugacucagaaaugaacaaacuguuugaaagaacaaagaagcaacugagggaaaaugcugaagauaugggcaaugguuguuucaaaauauaccacaaaugugacaaugccugcauagggucaaucagaaauggaacuuaugaccaugauguguacagagaugaagcauuaaacaaccgguuccagaucaaagguguugagcugaagucaggauacaaagauuggauccuauggauuuccuuugccauaucauguuuuuugcuuuguguugcuuuguugggguucaucaugugggccugccaaaaaggcaacauuaggugcaacauuugcauuuga

SEQ ID NO: 38749 - RNA, 1701 nt, Artificial Sequence
  derived and/or modified CDS sequence (wt) from hemagglutinin__InfluenzaA__AEG64966
augaagacuaucauugcuuugagcuacauucuaugucugguuuucgcucaaaaacuucccggaaaugacaacagcacggcaacgcugugccuugggcaccaugcaguaccaaacggaacgauagugaaaacaaucacgaaugaccaaauugaaguuacuaaugcuacugaguugguacagaguuccucaacagguggaauaugcgacaguccucaucagauccuugauggagaaaacugcacacuaauagaugcucuauugggagacccucagugugauggcuuccaaaauaagaaaugggaccuuuuuguugaacgcagcaaagccuacagcaacuguuacccuuaugaugugccggauuaugccucccuuaggucacuaguugccucauccggcacacuggaguuuaacaaugaaagcuucgauuggacuggagucacucagaauggaacaagcucugcuugcaaaaggagaucuaauaaaaguuucuuuaguagauugaauugguugacccacuuaaaauacaaauacccagcauugaacgugacuaugccaaacaaugaaaaauuugacaaauuguacauuugggggguucaccacccggguacggacagugaccaaaucagccuauaugcucaagcaucaggaagaaucacagucucuaccaaaagaagccaacaaacuguaaucccgaauaucggaucuagacccagaguaagggaugucuccagcagaauaagcaucuauuggacaauaguaaaaccgggagacauacuuuugauuaacagcacagggaaucuaauugcuccucgggguuacuucaaaauacgaagugggaaaagcucaauaaugagaucagaugcacccauuggcaaaugcaauuccgaaugcaucacuccaaauggaagcauucccaaugacaaaccauuucaaaauguaaacaggaucacauauggggccugucccagauauguuaagcaaaacacucugaaauuggcaacagggaugcgaaauguaccagagaaacaaacuagaggcauauuuggcgcaaucgcggguuucauagaaaaugguugggagggaaugguggacgguugguacgguuucagacaucaaaauucugagggcacaggacaagcagcagaucucaaaagcacucaagcagcaaucaaccaaaucaaugggaaacugaauagguuaaucgggaaaacaaacgagaaauuccaucagauugaaaaagaauucucagaaguagaagggagaauucaggaccucgagaaauauguugaggacacuaaaauagaucucuggucauacaacgcggagcuucuuguugcccuggagaaccaacauacaauugaucuaacugacucagaaaugaacaaacuguuugaaagaacaaagaagcaacugagggaaaaugcugaggauaugggcaaugguuguuucaaaauauaccacaaaugugacaaugccugcauagggucaaucagaaauggaacuuaugaccaugauguguacagagaugaagcauuaaacaaccgguuccagaucaaagguguugagcugaagucaggauacaaagauuggauccuauggauuuccuuugccauaucauguuuuuugcuuuguguugcuuuguugggguucaucaugugggccugccaaaaaggcaacauuaggugcaacauuugcauuuga

SEQ ID NO: 38750 - RNA, 1701 nt, Artificial Sequence
  derived and/or modified CDS sequence (wt) from hemagglutinin__InfluenzaA__AEG64977
augaagacuaucauugcuuugagcuacauucuaugucugguuuucgcucaaaaacuucccgaaaaugacaacagcacggcaacgcugugccuugggcaccaugcaguaccaaacggaacgauagugaaaacaaucacgaaugaccaaauugaaguuacuaaugcuacugagcugguacagaguuccucaacagguggaauaugcgacaguccucaucagauccuugauggagaaaacugcacacuaauagaugcucuauugggagacccucagugugauggcuuccaaaauaagaaaugggaccuuuuuguugaacgcagcaaagccuacagcaacuguuacccuuaugaugugccggauuaugccucccuuaggucacuaguugccucauccggcacacuggaguuuaacaaugaaagcuucgauuggacuggagucacucagaauggaacaagcucugcuugcaaaaggagaucuaauaaaaguuucuuuaguagauugaauugguugacccacuuaaaauacaaauacccagcauugaacgugacuaugccaaacaaugaaaaauuugacaaauuguacauuugggggguucaccacccggguacggacagugaccaaaucagccuauaugcucaagcaucaggaagaaucacagucucuaccaaaagaagccaacaaacuguaaucccuaauaucggaucuagacccaggguaagggaugucucuagccgaauaagcaucuauuggacaauaguaaaaccgggagacauacuuuugauuaacagcacagggaaucuaauugcuccucgggguuacuucaaaauacgaagugggaaaagcucaauaaugagaucagaugcacccauugacaaaugcaauuccgaaugcaucacuccaaauggaagcauucccaaugacaaaccauuucaaaauguaaacaggaucacauauggggccugucccagauauguuaagcaaaacacuuugaaauuggcaacagggaugcgaaauguaccagagaaacaaacuagaggcauauuuggcgcaaucgcgggcuucauagaaaaugguugggagggaaugguggacgguugguacgguuucaggcaucaaaauucugagggcacaggacaagcagcagaucucaaaagcacucaagcagcaaucaaccaaaucaaugggaaacugaauagguuaaucgggaaaacaaacgagaaauuccaucagauugaaaaagaauucucagaaguagaagggagaauucaggaccucgagaaauauguugaggacacuaaaauagaucucuggucauacaacgcggagcuucuuguugcccuggagaaccaacauacaauugaucuaacugacucagaaaugaacaaacuguuugaaagaacaaagaagcaacugagggaaaaugcugaggauaugggcaaugguuguuucaaaauauaccacaaaugugacaaugccugcauagggucaaucagaaauggaacuuaugaccaugauguguacagagaugaagcauuaaacaaccgguuccagaucaaagguguugagcugaagucaggauacaaagauuggauccuauggauuuccuuugccauaucauguuuuuugcuuuguguugcuuuguugggguucaucaugugggccugccaaaaaggcaacauuaggugcaacauuugcauuuga

SEQ ID NO: 38751 - RNA, 1701 nt, Artificial Sequence
  derived and/or modified CDS sequence (wt) from hemagglutinin__InfluenzaA__AEG64988
augaagacuaucauugcuuugagcuacauucuaugucugguuuucgcccaaaaacuucccggaaaugacaacagcacggcaacgcugugccuugggcaccaugcaguaccaaacggaacgauagugaaaacaaucacgaaugaccaaauugaaguuacuaaugcuacugagcugguucagaguuccucaacaggugaaauaugcgacaugccucaucagauccuugauggagaaaacugcacacuaauagaugcucuauugggagacccccagugugauggcuuccaaaauaagaaaugggaccuuuuuguugaacgcagcaaagccuacagcaacuguuacccuuaugaugugccggauuaugccucccuuaggucacuaguugccucauccggcacacuggaguuuaacaaugaaagcuucaauuggacuggagucacucaaaauggaacaagcucugcuugcaaaaggagaucuaauaacaguuuuuuuaguagauugaauugguugacccacuuaaaauucaaauacccagcauugaacgugacuaugccaaacaaugaaaaauuugacaaauuguacauuugggggguucaccacccggguacggacaaugaccaaaucuuccuguaugcucaagcaucaggaagaaucacagucucuaccaaaagaagccaacaaacuguaaucccgaauaucggaucuagacccagaguaaggaauauccccagcagaauaagcaucuauuggacaauaguaaaaccgggagacauacuuuugauuaacagcacagggaaucuaauugcuccuagggguuacuucaaaauacgaagugggaaaagcucaauaaugaggucagaugcacccauuggcaaaugcaauucugaaugcaucacuccaaauggaagcauucccaaugacaaaccauuucaaaauguaaacaggaucacauauggggccugucccagauauguuaagcaaaacacucugaaauuggcaacagggaugcgaaauguaccagagaaacaaacuagaggcauauuuggcgcaaucgcggguuucauagaaaaugguugggagggaaugguggaugguugguacgguuucaggcaucaaaauucugagggaauaggacaagcagcagaucucaaaagcacucaagcagcaaucaaucaaaucaaugggaagcugaauagguugaucgggaaaaccaacgagaaauuccaucagauugaaaaagaauucucagaaguagaagggagaauucaggaccucgagaaauauguugaggacacuaaaauagaucucuggucauacaacgcggagcuucuuguugcccuggagaaccaacauacaauugaucuaacugacucagaaaugaacaaacuguuugaaagaacaaagaagcaacugagggaaaaugcugaggauaugggcaaugguuguuucaaaauauaccacaaaugugacaaugccugcauaggaucaaucagaaauggaacuuaugaccaugauguauacagagaugaagcauuaaacaaccgguuccagaucaaaggcguugagcugaagucaggauacaaagauuggauccuauggauuuccuuugccauaucauguuuuuugcuuuguguuguuuuguugggguucaucaugugggccugccaaaaaggcaacauuaggugcaacauuugcauuuga

SEQ ID NO: 38752 - RNA, 1701 nt, Artificial Sequence
  derived and/or modified CDS sequence (wt) from hemagglutinin__InfluenzaA__AEG64999
augaagacuaucauugcuuugagcuacauucuaugucugguuuucgcucaaaaacuucccggaaaugacaacagcacggcaacgcugugccuugggcaccaugcaguaccaaacggaacgauagugaaaacaaucacgaaugaccaaauugaaguuacuaaugcuacugagcugguucagaauuccucaacagguggaauaugcgacaguccucaucagauccuugauggagaaaacugcacacuaauagaugcucuauugggagacccucagugugauggcuuccaaaauaagaaaugggaccuuuuuguugaacgcagcaaagccuacagcaacuguuacccuuaugaugugccggauuaugucucccuuaggucacuaguugccucauccggcacacuggaguuuaacaaugaaagcuucaauuggacuggagucacucaaaauggaacaagcucugcuugcaaaaggagaucuaauaacaguuucuuuaguagauugaauugguugacccauuuaaaauucaaauacccagcauugaacgugacuaugccaaacaaugaaaaauuugacaaauuguacauuugggggguucaccacccggguacggacaaugaccaaaucagccuauaugcucaagcaucaggaagaaucacagucucuaccaaaagaagccaacaaacuguaaucccgaauaucggaucuagacccaggguaagggauauccccagcagaauaagcaucuauuggacaauaguaaaaccgggagacauacuuuugauuaacagcacagggaaucuaauugcuccucgggguuacuucaaaauacgaagugggaaaagcucaauaaugagaucagaugcacccauuggcaaaugcaauucugaaugcaucacuccaaauggaagcauucccaaugacaaaccauuucaaaauguaaacaggaucacauauggggccugucccagauauguuaagcaaaacacucugaaauuggcaacagggaugcgaaauguaccagagaaacaaacuagaggcauauuuggcgcaaucgcggguuucauagaaaaugguugggagggaaugguggaugguugguacgguuucaggcaucaaaauucugagggaauaggacaagcagcagaucucaaaagcacucaagcagcaaucaaccaaaucaaugggaagcugaauagguugaucgggaaaaccaacgagaaauuccaucagauugaaaaagaauucucagaaguagaagggagaauucaagaccucgagaaauauguugaggacacuaaaauagaucucuggucauacaacgcagagcuucuuguugcccuggagaaccaacauacaauugaucuaacugacucagaaaugaacaaacuguuugaaagaacaaagaagcaacugagggaaaaugcugaggauaugggcaaugguuguuucaaaauauaccacaaaugugacaaugccugcauagggucaaucagaaauggaacuuaugaccaugauguauacagagaugaagcauuaaacaaccgguuccagaucaaagguguugagcugaagucaggauacaaagauuggauccuauggauuuccuuugccauaucauguuuuuugcuuuguguugcuuuguugggguucaucaugugggccugccaaaaaggcaacauuaggugcaacauuugcauuuga

SEQ ID NO: 38753 - RNA, 1701 nt, Artificial Sequence
  derived and/or modified CDS sequence (wt) from hemagglutinin__InfluenzaA__AEG65010
augaagacuaucauugcuuugagcuacauucuaugucugguuuucgcucaaaaacuucccggaaaugacaacagcacggcaacgcugugccuugggcaccaugcaguaccaaacggaacgauagugaaaacaaucacgaaugaccaaauugaaguuacuaaugcuacugagcugguucagaguuccucaacagguggaauaugcgacaguccucaucagauccuugauggagaaaacugcacacuaauagaugcucuauugggagacccucagugugauggcuuccaaaauaagaaaugggaccuuuuuauugaacgcagcaaagccuacagcaacuguuacccuuaugaugugccggauuaugccucccuuaggucacuaguugccucauccggcacacuggaauuuaacaaugaaagcuucaauuggacuggagucacucaaaauggaacaagcucugcuugcaaaaggagaucuaauaacaguuucuuuaguagauugaauugguugacccacuuaaaauucaaauacccagcauugaacgugacuaugccaaacaaugaaaaauuugacaaauuguacauuugggggguucaccacccggguacggacaaugaccaaaucagccuauaugcucaagcuucaggaagaaucacagucucuaccaaaagaagccaacaaacuguaaucccgaauaucggaucuagacccaggguaagggauauccccagcagaauaagcaucuauuggacaauaguaaaaccgggagacauacuuuugauuaacagcacagggaaucuaauugcuccucgggguuacuucaaaauacgaagugggaaaagcucaauaaugagaucagaugcacccauuggcaaaugcaauucugaaugcaucacuccaaauggaagcauucccaaugacaaaccauuucaaaauguaaacaggaucacauauggggccugucccagauauguuaagcaaaacacucugaaauuggcaacagggaugcgaaauguaccagagaaacaaacuagaggcauauuuggcgcaaucgcggguuucauagaaaaugguugggagggaaugguggaugguugguacgguuucaggcaucaaaauucugagggaauaggacaagcagcagaucucaaaagcacucaagcagcaaucaaccaaaucaaugggaagcugaauagguugaucgggaaaaccaacgagaaauuccaucagauugaaaaagaauucucagaaguagaagggagaauucaggaccucgagaaauauguugaggacacuaagauagaucucuggucauacaacgcggagcuucuuguugcccuggagaaccaacauacaauugaucuaacugacucagaaaugaacaaacuguuugaaagaacaaagaagcaacugagggaaaaugcugaggauaugggcaaugguuguuucaaaauauaccacaaaugugacaaugccugcauagggucaaucagaaauggaacuuaugaccaugauguauacagagaugaagcauugaacaaccgguuccagaucaaagguguugagcugaagucaggauacaaagauuggauccuauggauuuccuuugccauaucauguuuuuugcuuuguguugcuuuguugggguucaucaugugggccugccaaaaaggcaacauuaggugcaacaucugcauuuga

SEQ ID NO: 38754 - RNA, 1701 nt, Artificial Sequence
  derived and/or modified CDS sequence (wt) from hemagglutinin__InfluenzaA__AEG65021
augaagacuaucauugcuuuaagcuacauucuaugucugguuuucgcucaaaaacuucccggaaaugacaacagcacggcaacgcugugccuugggcaccaugcaguaccaaacggaacgauagugaaaacaaucacgaaugaccaaauugaaguuacuaaugcuacugagcugguucagaguuccucaacagguggaauaugcgacaguccucaucagauccuugauggagaaaacugcacacuaauagaugcucuauugggagacccucagugugauggcuuccaaaauaagaaaugggaccuuuuuguugaacgcagcaaagccuacagcaacuguuacccuuaugaugugccggauuaugucucccuuaggucacuaguugccucauccggcacacuggaguuuaacaaugaaagcuucaauuggacuggagucacucaaaauggaacaagcucugcuugcaaaaggagaucuaauaacaguuucuuuaguagauugaauugguugacccauuuaaaauucaaauacccagcauugaacgugacuaugccaaacacugaaaaauuugacaaauuguacauuugggggguucaccacccggguacggacaaugaccaaaucagccuauaugcucaagcaucaggaagaaucacagucucuaccaaaagaagccaacaaacuguaaucccgaauaucggaucuagacccaggguaagggauauccccagcagaauaagcaucuauuggacaauaguaaaaccgggagacauacuuuugauuaacagcacagggaaucuaauugcuccucgggguuacuucaaaauacgaagugggaaaagcucaauaaugagaucagaugcacccauuggcaaaugcaauucugaaugcaucacuccaaauggaagcauucccaaugacaaaccauuucaaaauguaaacaggaucacauauggggccugucccagauauguuaagcaaaacacucugaaauuggcaacagggaugcgaaauguaccagagaaacaaacuagaggcauauuuggcgcaaucgcggguuucauagaaaaugguugggagggaaugguggaugguugguacgguuucaggcaucaaaauucugagggaauaggacaagcagcagaucucaaaagcacucaagcagcaaucaaccaaaucaaugggaagcugaauagguugaucgggaaaaccaacgagaaauuccaucagauugaaaaagaauucucagaaguagaagggagaauucaggaccucgagaaauauguugaggacacuaaaauagaucucuggucauacaacgcggagcuucuuguugcccuggagaaccaacauacaauugaucuaacugacucagaaaugaacaaacuguuugaaagaacaaagaagcaacugagggaaaaugcugaggauaugggcaaugguuguuucaaaauauaccacaaaugugacaaugccugcauagggucaaucagaaauggaacuuaugaucaugauguauacagagaugaagcauuaaacaaccgguuccagaucaaagguguugagcugaagucaggauacaaagauuggauccuauggauuuccuuugccauaucauguuuuuugcuuuguguugcuuuguugggguucaucaugugggccugccaaaaaggcaacauuaggugcaacauuugcauuuga

SEQ ID NO: 38755 - RNA, 1701 nt, Artificial Sequence
  derived and/or modified CDS sequence (wt) from hemagglutinin__InfluenzaA__AEG65032
augaagacuaucauugcuuugagcuacauucuaugucugguuuucgcucaaaaacuucccggaaaugacaacagcacggcaacgcugugccuugggcaccaugcaguaccaaacggaacgauagugaaaacaaucacgaaugaccaaauugaaguuacuaaugcuacugagcugguucagaguuccucaacagguggaauaugcgacaguccucaucagauccuugauggagaaaacugcacucuaauagaugcucuauugggagacccucagugugauggcuuccaaaauaagaaaugggaccuuuuuguugaacgcagcaaagccuacagcaacuguuacccuuaugaugugccggauuaugccucccuuaggucacuaguugccucauccggcacacuggaguuuaacaaugaaagcuucaauuggacuggagucacucaaaauggaacaagcucugcuugcaaaaggagaucuaauaacaguuucuuuaguagauugaauugguugacccacuuaaaauucaaauacccagcauugaacgugacuaugccaaacaaugaaaaauuugacaaauuguacauuugggggguucaccacccggguacggacaaugaccaaaucuuccuguaugcucaagcaucaggaagaaucacagucucuaccaaaagaagccaacaaacuguaaucccgaauaucggaucuagacccagaguaaggaauauccccagcagaauaagcaucuauuggacaauaguaaaaccgggagacauacuuuugauuaacagcacagggaaucuaauugcuccuagggguuacuucaaaauacgaagugggaaaagcucaauaaugagaucagaugcacccauuggcaaaugcaauucugaaugcaucacuccaaauggaagcauucccaaugacaaaccauuucaaaauguaaacaggaucacauauggggccugucccagauauguuaagcaaaacacucugaaauuggcaacagggaugcgaaauguaccagagaaacaaacuagaggcauauuuggcgcaaucgcggguuucauagaaaaugguugggagggaaugguggaugguugguacgguuucaggcaucaaaauucugagggaauaggacaagcagcagaucucaaaagcacucaagcagcaaucaaucaaaucaaugggaagcugaauaaguugaucgggaaaaccaacgagaaauuccaucagauugaaaaggaauucucagaaguagaagggagaauucaggaccucgagaaauauguugaggacacuaaaauagaucucuggucauacaacgcggagcuucuuguugcccuggagaaccaacauacaauugaucuaacugacucggaaaugaacaaacuguuugaaagaacaaagaagcaacugagggaaaaugcugaggauaugggcaaugguuguuucaaaauauaccacaaaugugacaaugccugcauaggaucaauaagaaauggaacuuaugaccaugauguauacagagaugaagcauuaaacaaccgguuccagaucaaaggcguugagcugaagucaggauacaaagauuggauccuauggauuuccuuugccauaucauguuuuuugcuuuguguugcuuuguugggguucaucaugugggccugccaaaaaggcaacauuaggugcaacauuugcauuuga

SEQ ID NO: 38756 - RNA, 1701 nt, Artificial Sequence
  derived and/or modified CDS sequence (wt) from hemagglutinin__InfluenzaA__AEG65043
augaagacuaucauugcuuugagcuacauucuaugucugguuuucgcucaaaaacuucccggaaaugacaacagcacggcaacgcugugccuugggcaccaugcaguaccaaacggaacgauagugaaaacaaucacgaaugaccaaauugaaguuacuaaugcuacugaacugguucagaguuccucaacagguggaauaugcgacaguccucaucagauccuugauggagaaaacugcacacuaauagaugcucuauugggagacccucagugugauggcuuccaaaauaagaagugggaccuuuuuguugaacgcagcaaagccuacagcaacuguuacccuuaugaugugccggauuaugccucccuuaggucacuaguugccucauccggcacacuggaguuuaacaaugaaagcuucaauuggacuggagucacucaaaauggaacaagcucugcuugcaaaaggagaucuaauaacaguuucuuuaguagauugaauugguugacccacuuaaaauucaaauacccagcauugaacgugacuaugccaaacaaugaaaaauuugacaaauuguacauuugggggguucaccacccggguacggacaaugaccaaaucuuccuguaugcucaagcaucaggaagaaucacagucucuaccaaaagaagccaacaaacuguaaucccgaauaucggaucuagacccagaguaaggaauauccccagcagaauaagcaucuauuggacaauaguaaaaccgggagacauacuuuugauuaacagcacagggaaucuaauugcuccuagggguuacuucaaaauacgaagugggaaaagcucaauaaugagaucagaugcacccauuggcaaaugcaauucugaaugcaucacuccaaauggaagcauucccaaugacaaaccauuucaaaauguaaacaggaucacauauggggccugucccagauauguuaagcaaaacacucugaaauuggcaacagggaugcgaaauguaccagagaaacaaacuagaggcauauuuggcgcaaucgcggguuucauagaaaaugguugggagggaaugguggaugguugguacgguuucaggcaucaaaauucugagggaauaggacaagcagcagaucucaaaagcacucaagcagcaaucaaucaaaucaaugggaagcugaauagguugaucgggaaaaccaacgagaaauuccaucagauugaaaaagaauucucagaaguagaagggagaauucaggaccucgagaaauauguugaggacacuaaaauagaucucuggucauacaacgcggagcuucuuguugcccuggagaaccaacauacaauugaucuaacugacucagaaaugaacaagcuguuugaaagaacaaagaagcaacugagggaaaaugcugaggauaugggcaaugguuguuucaaaauauaccacaaaugugacaaugccugcauaggaucaaucagaaauggaacuuaugaccaugauguauacagagaugaagcauuaaacaaccgguuccagaucaaaggcguugaacugaagucaggauacaaagauuggauccuauggauuuccuuugccauaucauguuuuuugcuuuguguugcuuuguugggguucaucaugugggccugccaaaaaggcaacauuaggugcaacauuugcauuuga

SEQ ID NO: 38757 - RNA, 1701 nt, Artificial Sequence
  derived and/or modified CDS sequence (wt) from hemagglutinin__InfluenzaA__AEG65054
augaagacuaucauugcuuugagcuacauucuaugucugguuuucgcucaaaaacuucccggaaaugacaacagcacggcaacgcugugccuugggcaccaugcaguaccaaacggaacgauagugaaaacaaucacgaaugaccaaauugaaguuacuaaugcuacugagcugguucagaguuccucaacagguggaauaugcgacaguccucaucagauccuugauggagaaaacugcacauuaauagaugcucuauugggagacccucagugugauggcuuccaaaauaagaaaugggaccuuuuuguugaacgcagcaaagccuacagcaacuguuacccuuaugaugugccggauuaugccucccuuaggucacuaguugccucauccggcacacuggaguuuaacaaugaaagcuucaauuggacuggagucacucaaaauggaacaagcucugcuugcaaaaggagaucuaauaacaguuucuuuaguagauugaauugguugacccacuuaaaauucaaauacccagcauugaacgugacuaugccaaacaaugaaaaauuugacaaauuguacauuugggggguucaccacccggguacggacaaugaccaaaucuuccuguaugcucaagcaucaggaagaaucacagucucuaccaaaagaagccaacaaacuguaaucccgaauaucggaucuagacccagaguaaggaauauccccagcagaauaagcaucuauuggacaauaguaaaaccgggagacauacuuuugauuaacagcacagggaaucuaauugcuccuagggguuacuucaaaauacgaagugggaaaagcucaauaaugagaucagaugcacccauuggcaaaugcaauucugaaugcaucacuccaaauggaagcauucccaaugacaaaccauuucaaaauguaaacaggaucacauauggggccugucccagauauguuaagcaaaacacucugaaauuggcaacagggaugcgaaauguaccagagaaacaaacuagaggcauauuuggcgcaaucgcggguuucauagaaaaugguugggagggaaugguggaugguugguacgguuucaggcaucaaaauucugagggaauaggacaagcagcagaucucaaaagcacucaagcagcaaucaaucaaaucaaugggaagcugaauagguugaucgggaaaaccaacgagaaauuccaucagauugaaaaagaauucucagaaguagaagggagaauucaggaccucgagaaauauguugaggacacuaaaauagaucucuggucauacaacgcggagcuucuuguugcccuggagaaccaacauacaauugaucuaacugacucagaaaugaacaaacuguuugaaagaacaaagaagcaacugagggaaaaugcugaggauaugggcaaugguuguuucaaaauauaccacaaaugugacaaugccugcauaggaucaaucagaaauggaacuuaugaccaugauguauacagagaugaagcauuaaacaaccgguuccagaucaaaggcguugagcugaagucaggauacaaagauuggauccuauggauuuccuuugccauaucauguuuuuugcuuuguguugcuuuguugggguucaucaugugggccugccaaaaaggcaacauuaggugcaacauuugcauuuga

SEQ ID NO: 38758 - RNA, 1701 nt, Artificial Sequence
  derived and/or modified CDS sequence (wt) from hemagglutinin__InfluenzaA__AEG65065
augaagacuaucauugcuuugagcuacauucuaugucugguuuucgcucaaaaacuucccggaaaugacaacagcacggcaacgcugugccuugggcaccaugcaguaccaaacggaacgauagugaaaacaaucacgaaugaccaaauugaaguuacuaaugcuacugagcugguucagaguuccucaacaggugaaauaugcgacaguccucaucagauccuugauggagaaaacugcacacuaauagaugcucuauugggagacccucagugugauggcuuccaaaauaagaaaugggaccuuuuuguugaacgcagcaaagccuacagcaacuguuacccuuaugaugugccggauuaugccucccuuaggucacuaguugccucauccggcacacuggaguuuaacaaugaaagcuucaauuggacuggagucacucaaaauggaacaagcucugcuugcaaaaggagaucuaauaacaguuucuuuaguagacugaauugguugacccacuuaaaauucaaauacccagcauugaacgugacuaugccaaacaaugaaaaauuugacaaauuguacauuugggggguucaccacccggguacggacaaugaccaaaucuuccuguaugcucaagcaucaggaagaaucacagucucuaccaaaagaagccaacaaacuguaaucccgaauaucggaucuagaccuagaguaaggaauauccccagcagaauaagcaucuauuggacaauaguaaaaccgggagacauacuuuugauuaacagcacagggaaucuaauugcuccuagggguuacuucaaaauacgaagugggaaaagcucaauaaugagaucagaugcacccauuggcaaaugcaauucugaaugcaucacuccaaaugguagcauucccaaugacaaaccauuucaaaauguaaacagaaucacauauggggccugucccagauauguuaagcaaaacacucugaaauuggcaacagggaugagaaauguaccagagaaacaaacuagaggcauauuuggcgcaaucgcggguuucauagaaaaugguugggagggaaugguggaugguugguacgguuucaggcaucaaaauucugagggaauaggacaagcagcagaucucaaaagcacucaagcagcaaucaaucaaaucaaugggaagcugaauagguugaucgggaaaaccaacgagaaauuccaucagauugaaaaagaauucucagaaguagaagggagaauucaggaccucgagaaauauguugaggacacuaaaauagaucucuggucauacaacgcggagcuucuuguugcccuggagaaccaacauacaauugaucuaacugacucagaaaugaacaaacuguuugaaagaacaaagaagcaacugagggaaaaugcugaggauaugggcaaugguuguuucaaaauauaccacaaaugugacaaugccugcauaggaucaaucagaaauggaacuuaugaccaugauguauacagagaugaagcauuaaacaaccgguuccagaucaagggcguugagcugaagucaggauacaaagauuggguccuauggauuuccuuugccauaucauguuuuuugcuuuguguuguuuuguugggguucaucaugugggccugccaaaaaggcaacauuaggugcaacauuugcauuuga

SEQ ID NO: 38759 - RNA, 1701 nt, Artificial Sequence
  derived and/or modified CDS sequence (wt) from hemagglutinin__InfluenzaA__AEG65076
augaagacuaucauugcuuugagcuacauucuaugucugguuuucgcucaaaaacuucccggaaaugacaacagcacggcaacgcugugccuugggcaccaugcaguaccaaacggaacgauagugaaaacaaucacgaaugaccaaauugaaguuacuaaugcuacugagcugguucagaguuccucaacagguggaauaugcgacaguccucaucagauccuugauggagaaaacugcacacuaauagaugcucuauugggagacccucagugugauggcuuccaaaauaagaaaugggaccuuuuuguugaacgcagcaaagccuacagcaacuguuacccuuaugaugugccggauuaugccucccuuaggucacuaguugccucauccggcacacuggaguuuaacaaugaaagcuucaauuggacuggagucacucaaaauggaacaagcucugcuugcaaaaggagaucuaauaacaguuucuuuaguagauugaauugguugacccacuuaagauucaaauacccagcauugaacgugacuaugccaaacaaugaaaaauuugacaaauuguacauuugggggguucaccacccggguacggacaaugaccaaaucuuccuguaugcucaagcaucaggaagaaucacagucucuaccaaaagaagccaacaaacuguaaucccgaaugucggaucuagacccagaguaaggaauauccccagcagaauaagcaucuauuggacaauaguaaaaccgggagacauacuuuugauuaacagcacagggaaucuaauugcuccuagggguuacuucaaaauacgaagugggaaaagcucaauaaugagaucagaugcacccauuggcaaauguaauucugaaugcaucacuccaaauggaagcauucccaaugacaaaccauuucaaaauguaaacaggaucacauauggggccugucccagauauguuaagcaaaacacucugaaauuggcaacagggaugcgaaauguaccagagaaacaaacuagaggcauauuuggcgcaaucgcggguuucauagaaaaugguugggagggaaugguggaugguugguacgguuucaggcaucaaaauucugagggaacaggacaagcagcagaucucaaaagcacucaagcagcaaucaaucaaaucaaugggaagcugaauagguugaucgggaaaaccaacgagaaauuccaucagauugaaaaagaauucucagaaguagaagggagaauucaggaccucgagaaauauguugaggacaccaaaauagaucucuggucauacaacgcggagcuucuuguugcccuggagaaccaacauacaauugaucuaacugacucagaaaugaacaaacuguuugaaagaacaaagaagcaacugagggaaaaugcugaggauaugggcaaugguuguuucaaaauauaccacaaaugugacaaugccugcauaggaucaaucagaaauggaacuuaugaccaugauguauacagagaugaagcauuaaacaaccgguuccagaucaaaggcguugagcugaagucaggauacaaagauuggauccuauggauuuccuuugccauaucauguuuuuugcuuuguguugcuuuguugggguucaucaugugggccugccaaaaaggcaacauuaggugcaacauuugcauuuga

SEQ ID NO: 38760 - RNA, 1701 nt, Artificial Sequence
  derived and/or modified CDS sequence (wt) from hemagglutinin__InfluenzaA__AEG65087
augaagacuaucauugcuuugagcuacauucuaugucugguuuucgcucaaaaacuucccggaaaugacaacagcacggcaacgcugugccuugggcaccaugcaguaccaaacggaacgauagugaaaacaaucacgaaugaccaaauugaaguuacuaaugcuacugagcugguucagaguuccucaacagguggaauaugcgacaguccucaucagauccuugauggagaaaacugcacacuaauagaugcucuauugggagacccucagugugauggcuuccaaaauaagaaaugggaccuuuuuguugaacgcagcaaagccuacagcaacuguuacccuuaugaugugccggauuaugccucccuuaggucacuaguugccucauccggcacacuggaguuuaacaaugaaagcuucaauuggacuggagucacucaaaauggaacaagcucugcuugcaaaaggagaucuaauaacaguuucuuuaguagauugaauugguugacccacuuaaaauucaaauacccagcauugaacgugacuaugccaaacaaugaaaaauuugacaaauuguacauuugggggguucaccacccggguacgaacaaugaccaaaucuuccuguaugcucaagcaucaggaagaaucacaguaucuaccaaaagaagccaacaaacuguaaucccgaauaucggaucuagacccagaguaaggaauauccccagcagaauaagcaucuauuggacaauaguaaaaccgggagacauacuuuugauuaacagcacagggaaucuaauugcuccuagggguuacuucaaaauacgaagugggaaaagcucaauaaugagaucagaugcacccauuggcaaaugcaauucugaaugcaucacuccaaauggaagcauucccaaugacaaaccauuucaaaauguaaacaggaucacauauggggccugucccagauauguuaagcaaaacacucugaaauuggcaacagggaugcgaaauguaccagagaaacaaacuagaggcauauuuggcgcaaucgcggguuucauagaaaaugguugggagggaaugguggaugguugguacgguuucaggcaucagaauucugagggaauaggacaagcagcagaucucaaaagcacucaagcagcaaucaaucaaaucaaugggaagcugaauagguugaucgggaaaaccaacgagaaauuccaucagauugaaaaagaauucucagaaguagaagggagaauucaggaccucgagaaauauguugaggacacuaaaauagaucucuggucauacaacgcagagcuucuuguugcccuggagaaccaacauacaauugaucuaacugacucagaaaugaacaaacuguuugaaagaacaaagaagcaacugagggaaaaugcugaggauaugggcaaugguuguuucaaaauauaccacaaaugugacaaugccugcauaggaucaaucagaaauggaacuuaugaccaugauguauacagagaugaagcauuaaacaaccgguuccagaucaaaggcguugagcugaagucaggauacaaagauuggauccuauggauuuccuuugccauaucauguuuuuugcuuuguguugcuuuguugggguucaucaugugggccugccaaaaaggcaacauuaggugcaacauuugcauuuga

SEQ ID NO: 38761 - RNA, 1701 nt, Artificial Sequence
  derived and/or modified CDS sequence (wt) from hemagglutinin__InfluenzaA__AEG65098
augaagacuaucauugcuuugagcuacauucuaugucugguuuucgcucaaaaacuucccggaaaugacaacagcacggcaacgcugugccuugggcaccaugcaguaccaaacggaacgauagugaaaacaaucacgaaugaccaaauugaaguuacuaaugcuacugagcugguucagaguuccucaacaggugaaauaugcgacaguccucaucagauccuugauggagaaaacugcacacuaauagaugcucuauugggagacccucagugugaugacuuccaaaauaagaaaugggaccuuuuuguugaacgcagcaaagccuacagcaacuguuacccuuaugauguaccggauuaugccucccuuaggucacuaguugccucauccggcacacuggaguuuaacaaugaaagcuucaauuggacuggagucacucaaaauggaacaagcucugcuugcaaaaggagauccaauaacaguuucuuuaguagacugaauugguugacccacucaaaauucaaauacccagcauugaacgugacuaugccaaacaaugaaaaauuugacaaauuguacauuugggggguucaccacccggguacggacaaugaccaaaucuuccuguaugcucaagcaucaggaagaaucacagucucuaccaaaagaagccaacaaacuguaaucccgaauaucggaucuagaccuagaguaaggaauauccccagcagaauaagcaucuauuggacaauaguaaaaccgggagacauacuuuugauuaacagcacagggaaucuaauugcuccuagggguuacuucaaaauacgaagugggaaaagcucaauaaugagaucagaugcacccauuggcaaaugcaauucugaaugcaucacuccaaauggaagcauucccaaugacaaaccauuucaaaauguaaacagaaucacauauggggccugucccagauauguuaagcaaaacacucugaaauuggcaacagggaugagaaauguaccagagaaacaaacuagaggcauauuuggcgcaaucgcggguuucauagaaaaugguugggagggaaugguggaugguugguacgguuucaggcaucaaaauucugagggaauaggacaagcagcagaucucaaaagcacucaagcagcaaucaaucaaaucaaugggaaucugaauagguugaucgggaaaaccaacgagaaauuccaucagauugaaaaagaauucucagaaguagaagggagaauucaggaccucgagaaauauguugaggacacuaaaauagaucucuggucauacaacgcggagcuucuuguugcccuggagaaccaacauacaauugaucugacugacucagaaaugaacaaacuguuugaaagaacaaagaagcaacugagggaaaaugcugaggauaugggcaaugguuguuucaaaauauaccacaaaugugacaaugccugcauaggaucaaucagaaauggaacuuaugaccaugauguguacagagaugaagcauuaaacaaccgguuccagaucaaaggcguugagcugaagucaggauacaaagauuggauccuauggauuuccuuugccauaucauguuuuuugcuuuguguuguuuuguugggguucaucaugugggccugccaaaaaggcaacauuaggugcaacauuugcauuuga

SEQ ID NO: 38762 - RNA, 1701 nt, Artificial Sequence
  derived and/or modified CDS sequence (wt) from hemagglutinin__InfluenzaA__AEG65109
augaagacuaucauugcuuugagcuacauucuaugucugguuuucgcucaaaaacuucccggaaaugacaacagcacggcaacgcugugccuugggcaccaugcaguaccaaacggaacgauagugaaaacaaucacgaaugaccaaauugaaguuacuaaugcuacugagcugguucagaguuccucaacaggugaaauaugcgacagcccucaucagauccuugauggagaaaacugcaaacuaauagaugcucuauugggagacccucagugugauggcuuccaaaauaagaaaugggaccuuuuuguugaacgcagcaaagccuacagcaacuguuacccuuaugaugugccggauuaugccucccuuaggucacuaguugccucauccggcacacuggaguuuaacaaugaaagcuucaauuggacuggagucacucaaaauggaacaagcucugcuugcaaaaggagaucuaauaacaguuucuuuaguagauugaauugguugacccacuuaaaauucaaauacccagcauugaacgugacuaugccaaacaaugaaaaauuugacaaauuguacauuugggggguucaccacccggguacggacaaugaccaaaucuuccuguaugcucaaucaucaggaagaaucacagucucuaccaaaagaagccaacaaacuguaaucccgaauaucggaucuagacccagaguaaggaauauccccagcagaauaagcaucuauuggacaauaguaaaaccgggagacauacuuuugauuaacagcacagggaaucuaauugcuccuagggguuacuucaaaauacgaagugggaaaagcucaauaaugagaucagaugcacccauuggcaaaugcaauucugaaugcaucacuccaaauggaagcauucccaaugacaaaccauuucaaaauguaaacaggaucacauauggggccugucccagauauguuaagcaaaacacucugaaauuggcaacagggaugcgaaauguaccagagaaacaaacuagaggcauauuuggcgcaaucgcggguuucauagaaaaugguugggagggaaugguggaugguugguacgguuucaggcaucaaaauucugagggaauaggacaagcagcagaucucaaaagcacucaagcagcaaucaaucaaaucaaugggaagcugaauagguugaucgggaaaaccaacgagaaauuccaucagauugaaaaagaauucucagaaguagaggggagaauucaggaccucgagaaauauguugaggacacuaaaauagaucucuggucauacaacgcggagcuucuuguugcccuggagaaccaacauacaauugaucuaacugacucagaaaugaacaaacuguuugaaagaacaaagaagcaacugagggaaaaugcugaggauaugggcaaugguuguuucaaaauauaccacaaaugugacaaugccugcauaggaucaaucagaaauggaacuuaugaccaugauguauacagagaugaagcauuaaacaaccgguuccagaucaaaggcguugagcugaagucaggauacaaagauuggauccuauggauuuccuuugccauaucauguuuuuugcuuuguguugcuuuguugggguucaucaugugggccugccaaaaaggcaacauuaggugcaacauuugcauuuga

SEQ ID NO: 38763 - RNA, 1701 nt, Artificial Sequence
  derived and/or modified CDS sequence (wt) from hemagglutinin__InfluenzaA__AEG65120
augaagacuaucauugcuuugagcuacauucuaugucugguuuucgcucaaaaacuucccggaaaugacaacagcacggcaacgcugugccuugggcaccaugcaguaccaaacggaacgauagugaaaacaaucacgaaugaccaaauugaaguuacuaaugcuacugagcugguucagaguuccucaacaggugaaauaugcgacaguccucaucagauccuugauggagaaaacugcacacuaauagaugcucuauugggagacccucagugugauggcuuccaaaauaagaaaugggaccuuuuuguugaacgcagcaaagccuacagcaacuguuacccuuaugaugugccggauuaugccucccuuaggucacuaguugccucauccggcacacuggaguuuaacaaugaaagcuucaauuggacuggagucacucaaaauggaacaagcucugcuugcaaaaggagaucuaauaacaguuucuuuaguagacugaauugguugacccacuuaaaauucaaauacccagcauugaacgugacuaugccaaacaaugaaaaauuugacaaauuguacauuugggggguucaccacccggguacggacaaugaccaaaucuuccuguaugcucaagcaucaggaagaaucacagucucuaccaaaagaagccaacaaacuguaaucccgaauaucggaucuagaccuagaguaaggaauauccccagcagaauaagcaucuauuggacaauaguaaaaccgggagacauacuuuugauuaacagcacagggaaucuaauugcuccuagggguuacuucaaaauacgaagugggaaaagcucaauaaugagaucagaugcacccauuggcaaaugcaauucugaaugcaucacuccaaauggaagcauucccaaugacaaaccauuucaaaauguaaacagaaucgcauauggggccugucccagauauguuaagcaaaacacucugaaauuggcaacagggaugagaaauguaccagagaaacaaacuagaggcauauuuggcgcaaucgcagguuucauagaaaaugguugggagggaaugguggaugguugguacgguuucaggcaucaaaauucugagggaauaggacaagcagcagaucucaaaagcacucaagcagcaaucaaucaaaucaaugggaagcugaauagguugaucgggaaaaccaacgagaaauuccaucagauugaaaaagaauucucagaaguagaagggagaauucaggaccucgagaaauauguugaggacacuaaaauagaucucuggucauacaacgcggagcuucuuguugcccuggagaaccaacauacaauugaucuaacugacucagaaaugaacaaacuguuugaaagaacaaagaagcaacugagggaaaaugcugaggauaugggcaaugguuguuucaaaauauaccacaaaugugacaaugccugcauaggaucaaucagaaauggaacuuaugaccaugauguauacagagaugaagcauuaaacaaccgguuccagaucaaaggcguugagcugaagucaggauacaaagauuggauccuauggauuuccuuugccauaucauguuuuuugcuuuguguuguuuuguugggguucaucaugugggccugccaaaaaggcaacauuaggugcaacauuugcauuuga

SEQ ID NO: 38764 - RNA, 1701 nt, Artificial Sequence
  derived and/or modified CDS sequence (wt) from hemagglutinin__InfluenzaA__AEG65131
augaagacuaucauugcuuugagcuacauucuaugucugguuuucgcucaaaaacuucccggaaaugacaacagcacggcaacgcugugccuugggcaccaugcaguaccaaacggaacgauagugaaaacaaucacgaaugaccaaauugaaguuacuaaugcuacugagcugguucagaguuccucaacaggugaaauaugcgacaguccucaucagauccuugauggagaaaacugcacacuaauagaugcucuauugggagacccucagugugauggcuuccaaaauaagaaaugggaccuuuuuguugaacgcagcaaagccuacagcaacuguuacccuuaugauguaccggauuaugccucccuuaggucacuaguugccucauccggcacacuggaguuuaacaaugaaagcuucaauuggacuggagucacucaaaauggaacaagcucugcuugcaaaaggagauccaauaacaguuucuuuaguagacugaauugguugacccacucaaaauucaaauacccagcauugaacgugacuaugccaaacaaugaaaaauuugacaaauuguacauuugggggguucaccacccggguacggacaaugaccaaaucuuccuguaugcucaagcaucaggaagaaucacagucucuaccaaaagaagccaacaaacuguaaucccgaauaucggaucuagaccuagaguaaggaauauccccagcagaauaagcaucuauuggacaauaguaaaaccgggagacauacuuuugauuaacagcacagggaaucuaauugcuccuagggguuacuucaaaauacgaagugggaaaagcucaauaaugagaucagaugcacccauuggcaaaugcaauucugaaugcaucacuccaaauggaagcauucccaaugacaaaccauuucaaaauguaaacagaaucacauauggggccugucccagauauguuaagcaaaacacucugaaauuggcaacagggaugagaaauguaccagagaaacaaacuagaggcauauuuggcgcaaucgcggguuucauagaaaaugguugggagggaaugguggaugguugguacgguuucaggcaucaaaauucugagggaauaggacaagcagcagaucucaaaagcacucaagcagcaaucaaucaaaucaaugggaagcugaauagguugaucgggaaaaccaacgagaaauuccaucagauugaaaaagaauucucagaaguagaagggagaauucaggaccucgagaaauauguugaggacacuaaaauagaucucuggucauacaacgcggagcuucuuguugcccuggagaaccaacauacaauugaucuaacugacucagaaaugaacaaacuguuugaaagaacaaagaagcaacugagggaaaaugcugaggauaugggcaaugguuguuucaaaauauaccacaaaugugacaaugccugcauaggaucaaucagaaauggaacuuaugaccaugauguguacagagaugaagcauuaaacaaccgguuccagaucaagggcguugagcugaagucaggauacaaagauuggauccuauggauuuccuuugccauaucauguuuuuugcuuuguguuguuuuguugggguucaucaugugggccugccaaaaaggcaacauuaggugcaacauuugcauuuga

SEQ ID NO: 38765 - RNA, 1701 nt, Artificial Sequence
  derived and/or modified CDS sequence (wt) from hemagglutinin__InfluenzaA__AEG65142
augaagacuaucauugcuuugagcuacauuuuaugucugguuuucgcucaaaaacuucccggaaaugacaacagcacggcaacgcugugccuggggcaccaugcagugccaaacggaacgcuagugaaaacaaucacgaaugaccaaauugaagugacuaaugcuacugagcugguucagaguuccucaacagguagaauaugcgacaguccucaccaaauccuugauggagaaaacugcacacuaauagaugcucuacugggagacccucauugugauggcuuccaaaauaaggaaugggaccuuuuuguugaacgcagcaaagccuacagcaacuguuacccuuaugaugugccggauuaugucucccuuaggucacuaguugccucaucaggcacgcuggaguuuaacaaugaaagcuucaauuggacuggagucgcucagaauggaacaagcucugcuugcaaaaggagaucugauaaaaguuucuuuaguagauugaauugguugcaccaauuaaaauacaaauauccagcucugaacgugacuaugccaaacaaugaaaaauuugacaaauuguacauuugggggguucaccacccggguacagacagugaccaaaucagccuauaugcucaagcaucagggagagucacagucucuaccaaaagaagccaacaaacuguaaucccgaauaucggaucuagacccuggguaaggggugucuccagcagaauaagcaucuauuggacaauaguaaaaccgggagacauacuuuugauuaacagcacagggaaucuaauugcuccucgggguuacuucaaaauacgaagugggaaaagcucaauaaugaggucagaugcacccauuggcaaaugcaauucugaaugcaucacuccaaauggaagcauucccaaugacaaaccauuucaaaauguaaacaggaucacauaugggcccugucccagauauguuaagcaaaacacucugaaauuggcaacagggaugcggaaugugccagagaaacaaacuagaggcauauucggugcaaucgcgggcuucauagaaaaugguugggagggaaugauggacgguugguacgguuucaggcaucaaaauucugagggcacagggcaagcagcagaucuuaaaagcacucaagcagcaaucaaccaaaucaacgggaaacugaauagguuaaucgagaaaacgaacgagaaauuccaucaaauugaaaaagaauucucagaaguagaagggagaauucaggaccucgagaaauauguugaggacacuaaaauagaucucuggucguacaaugcggagcuucuuguugcccuggagaaccaacauacaauugaucuaacugacucagaaaugaacaaacuguuugaaagaacaaagaagcaacugagggaaaaugcugaggauaugggcaaugguuguuucaaaauauaccacaaaugugacaaugccugcauagggucaaucagaaauggaacuuaugaccaugauguauacagagacgaagcauugaacaaccgguuccagaucaaagguguugagcugaagucaggauacaaagauuggauccuauggauuuccuuugccauaucauguuuuuugcuuuguauuguuuugcugggguucaucaugugggccugccaaaaaggcaacauuaggugcaacauuugcauuuga

SEQ ID NO: 38766 - RNA, 1701 nt, Artificial Sequence; identical to SEQ ID NO: 33455
  derived and/or modified CDS sequence (wt) from hemagglutinin__InfluenzaA__AEG65153

SEQ ID NO: 38767 - RNA, 1701 nt, Artificial Sequence
  derived and/or modified CDS sequence (wt) from hemagglutinin__InfluenzaA__AEG65164
augaagacuaucauugcuuugagcuacauuuuaugucugguuuucgcucaaaaacuucccggaaaugacaacagcacggcaacgcugugccuggggcaccaugcagugccaaacggaacgcuagugaaaacaaucacgaaugaccaaauugaagugacuaaugcuacugagcugguucagaguuccucaacagguagaauaugcgacaguccucaccaaauccuugauggagaaaacugcacacuaauagaugcucuauugggagacccucauugugauggcuuccaaaauaaggaaugggaccuuuuuguugaacgcagcaaagccuacagcaacuguuacccuuaugaugugccggauuaugucucccuuaggucacuaguugccucaucaggcacgcuggaguuuaacaaugaaagcuucaauuggacuggagucgcucagaauggaacaagcucugcuugcaaaaggagaucugauaaaaguuucuuuaguagauugaauugguugcaccaauuaaaauacaaauauccagcacugaacgugacuaugccaaacaaugaaaaauuugacaaauuguacauuugggggguucaccacccggguacagacagugaccaaaucagccuauaugcucaagcaucagggagagucacagucucuaccaaaagaagccaacaaacuguaaucccgaauaucggaucuagacccuggguaaggggugucuccagcagaauaagcaucuauuggacaauaguaaaaccgggagacauacuuuugauuaacagcacagggaaucugauugcuccucgggguuacuucaaaauacgaagugggaaaagcucaauaaugaggucagaugcacccauuggcaaaugcaauucugaaugcaucacuccaaauggaagcauucccaaugacaaaccauuucaaaauguaaacaggaucacauaugggcccugucccagauauguuaagcaaaacacucugaaauuggcaacagggaugcggaaugugccagagaaacaaacuagaggcauauucggugcaaucgcgggcuucauagaaaaugguugggagggaaugauggacgguugguacgguuucaggcaucaaaauucugagggcacagggcaagcagcagaucuuaaaagcacucaagcagcaaucaaccaaaucaacgggaaacugaauagguuaaucgagaaaacgaacgagaaauuccaucaaauugaaaaagaauucucagaaguagaaggaagaauucaggaccucgagaaauauguugaggacacuaaaauagaucucuggucguacaaugcggaguuucuuguugcccuggagaaccaacauacaauugaucuaacugacucagaaaugaacaaacuguuugaaagaacaaagaagcaacugagggaaaaugcugaggauaugggcaaugguuguuucaaaauauaccacaaaugugacaaugccugcauagggucaaucagaaauggaacuuaugaccaugauguauacagagacgaagcauugaacaaccgguuccagaucaaagguguugagcugaagucaggauacaaagauuggauccuauggauuuccuuugccauaucauguuuuuugcuuuguauuguuuugcugggguucaucaugugggccugccaaaaaggcaacauuaggugcaacauuugcauuuga

SEQ ID NO: 38768 - RNA, 1701 nt, Artificial Sequence
  derived and/or modified CDS sequence (wt) from hemagglutinin__InfluenzaA__AEG65175
augaagacuaucauugcuuugagcuacauucuaugucugguuuucgcucaaaaacuucccggaaaugacaacagcacggcaacgcugugccuugggcaccaugcaguaccaaacggaacgauagugaaaacaaucacgaaugaccaaauugaaguuacuaaugcuacugagcugguucagaguuccucaacagguggaauaugcgacaguccucaucagauccuugauggagaaaacugcacacuaauagaugcucuauugggagacccucagugugauggcuuccaaaauaagaaaugggaccuuuuuguugaacgcagcaaagccuacagcaacuguuacccuuaugaugugccggauuaugccucccuuaggucacuaguugccucauccggcacacuggaguuuaacaaugaaagcuucaauuggacuggagucacucagaauggaacaagcucugcuugcgaaaggagaucuaauaaaaguuucuuuaguagauugaauugguugacccacuuaaaauacaaauacccagcauugaacgugacuaugccaaacaaugaaaaauuugacaaauuguacauuugggggguucaccacccggguacggacagugaccaaaucagccuauaugcucaagcaucaggaagaaucacagucucuaccaaaagaagccaacaaacuguaaucccgaauaucggaucuagacccaggguaagggaugucuccagccgaauaagcaucuauuggacaauaguaaaaccgggagacauacuuuugauuaacagcacagggaaucuaauugcuccucgggguuacuucaaaauacgaaaugggaaaagcucaauaaugagaucagaugcacccauuggcaaaugcaauucugaaugcaucacuccaaauggaagcauucccaaugacaaaccauuucaaaauguaaacaggaucacauauggggccugucccagauauguuaagcaaaacacucugaaauuggcaacagggaugcgaaauguaccagagaaacaaacuagaggcauauuuggcgcaaucgcggguuucauagaaaaugguugggagggaaugguggacgguugguacgguuucaggcaucaaaauucugagggcacaggacaagcagcagaucucaaaagcacucaagcagcaaucaaccaaaucaaugggaaacugaauagguuaaucgggaaaacaaacgagaaauuccaucagauugaaaaagaauucucagaaguagaagggagaauucaggaccucgagaaauauguugaggacacuaaaauagaucucuggucauacaacgcggagcuucuuguugcccuggagaaccaacauacaauugaucuaacugacucagaaaugaacaaacuguuugaaagaacaaagaagcaacugagggaaaaugcugaggauaugggcaaugguuguuucaaaauauaccacaaaugugacaaugccugcauagggucaaucagaaauggaacuuaugaccaugauguguacagagaugaagcauuaaacaaccgguuccagaucaaagguguugagcugaagucaggauacaaagauuggauccuauggauuuccuuugccauaucauguuuuuugcuuuguguugcuuuguugggguucaucaugugggccugccaaaaaggcaacauuaggugcgacauuugcauuuga

SEQ ID NO: 38769 - RNA, 1701 nt, Artificial Sequence
  derived and/or modified CDS sequence (wt) from hemagglutinin__InfluenzaA__AEG65186
augaagacuaucauugcuuugagcuacauucuaugucugguuuucgcucaaaaacuucccggaaaugacaacagcacggcaacgcugugccuugggcaccaugcaguaccaaacggaacgauagugaaaacaaucacgaaugaccaaauugaaguuacuaaugcuacugagcugguucagaguuccucaacagguggaauaugcgacaguccucaucagauccuugauggagaaaacugcacacuaauagaugcucuauugggagacccucagugugauggcuuccaaaauaagaaaugggaccuuuuuguugaacgcagcaaagccuacagcaacuguuacccuuaugaugugccggauuaugccucccuuaggucacuaguugccucauccggcacacuggaguuuaacaaugaaagcuucaauuggacuggagucacucaaaauggaacaagcucugcuugcaaaaggagaucuaauaacaguuucuuuaguagauugaauugguugacccacuuaaaauucaaauacccagcauugaacgugacuaugccaaacaacgaaaaauaugacaaauuguacauuugggggguucaccacccggguacggacaaugaccaaaucagccuauaugcucaagcaucaggaagaaucacagucucuaccaaaagaagccaacaaacuguaaucccgaauaucggaucuagacccaggguaagggauaucccaagcagaauaagcaucuauuggacaauaguaaaaccgggagacauacuuuugauuaacagcacagggaaucuaauugcuccucgggguuacuucaaaauacgaagugggaaaagcucaauaaugagaucagaugcacccauuggcaaaugcaauucugaaugcaucacuccaaauggaagcauucccaaugacaaaccauuucaaaauguaaacaggaucacauauggagccugucccagauauguuaagcaaaacacucugaaauuggcaacagggaugcgaaauguaccagagaaacaaacuagaggcauauuuggcgcaaucgcggguuucauagaaaaugguugggagggaaugguggaugguugguacgguuucaggcaucaaaauucugagggaauaggacaagcagcagaucucaaaagcacucaagcagcaaucaaccaaaucaaugggaagcugaauagguugaucgggaaaaccaacgagaaauuccaucagauugaaaaagaauucucagaaguagaagggagaauucaggaccucgagaaauauguugaggacacuaaaauagaucucuggucauacaacgcggagcuucuuguugcccuggagaaccaacauacaauugaucuaacugacucagaaaugaacaaacuguuugaaagaacaaagaagcaacugagggaaaaugcugaggauaugggcaaugguuguuucaaaauauaccacaaaugugacaaugccugcauagggucaaucagaaauggaacuuaugaccaugauguauacagagaugaagcauuaaacaaccgguuccagaucaaagguguugagcugaagucaggauacaaagauuggauccuauggauuuccuuugccauaucauguuuuuugcuuuguguugcuuuguugggguucaucaugugggccugccaaaaaggcaacauuaggugcaacauuugcauuuga

SEQ ID NO: 38770 - RNA, 1701 nt, Artificial Sequence
  derived and/or modified CDS sequence (wt) from hemagglutinin__InfluenzaA__AEG65197
augaagacuaucauugcuuugagcuacauucuaugucugguuuucgcucaaaaacuucccggaaaugacaacagcacggcaacgcugugccuugggcaccaugcaguaccaaacggaacgauagugaaaacaaucacgaaugaccaaauugaaguuacuaaugcuacugagcugguucagaguuccccaacagguggaauaugcgacaguccucaucagauccuugauggagaaaacugcacacuaauagaugcucuauugggagacccucagugugauggcuuccaaaauaagaaaugggaccuuuuuguugaacgcagcaaagccuacagcaacuguuacccuuaugaugugccggauuaugccucccuuaggucacuaguugccucauccggcacacuggaguuuaacaaugaaagcuucaauuggacuggagucacucaaaauggaacaagcuccgcuugcaaaaggagaucuaauaacaguuucuuuaguagauugaauugguugacccacuuaaaauucaaauacccagcauugaacgugacuaugccaaacaaugaaaaauuugacaaauuguacauuugggggguucaccacccggguacggacaaugaccaaaucagccuauaugcucaagcuucaggaagaaucacagucucuaccaaaagaagccaacaaacuguaaucccgaauaucggaucuagacccaggguaagggauauccccagcagaauaagcaucuauuggacaauaguaaaaccgggagacauaauuuugauuaacagcacagggaaucuaauugcuccucgggguuacuucaaaauacgaagugggaaaagcucaauaaugagaucagauacacccauuggcaaaugcaauucugaaugcaucacuccaaauggaagcauucccaaugacaaaccauuucaaaauguaaacaggaucacauauggggccugucccagauauguuaagcaaaacacucugaaauuggcaacagggaugcgaaauguaccagagaaacaaacuagaggcauauuuggcgcaaucgcggguuucauagaaaaugguugggagggaaugguggaugguugguacgguuucaggcaucaaaauucugagggaauaggacaagcagcagaucucaaaagcacucaagcagcaaucaaccaaaucaaugggaagcugaacagguugaucgggaaaaccaacgagaaauuccaucagauugaaaaagaauucucagaaguagaagggagaauucaggaccuagagaaauauguugaggacacuaaaauagaucucuggucauacaacgcggagcuucuuguugcccuggagaaccaacauacaauugaucuaacugacucagaaaugaacaaacuguuugaaagaacaaagaagcaacugagggaaaaugcugaggauaugggcaaugguuguuucaaaauauaccacaaaugugacaaugccugcauagggucaaucagaaauggaacuuaugaccaugauguauacagagaugaagcauuaaacaaccgguuccagaucaaagguguugagcugaagucaggauacaaagauuggauccuauggauuuccuuugccauaucauguuuuuugcuuuguguugcuuuguugggguucaucaugugggccugccaaaaaggcaacauuaggugcaacauuugcauuuga

SEQ ID NO: 38771 - RNA, 1701 nt, Artificial Sequence; identical to SEQ ID NO: 32647
  derived and/or modified CDS sequence (wt) from hemagglutinin__InfluenzaA__AEG65208

SEQ ID NO: 38772 - RNA, 1701 nt, Artificial Sequence
  derived and/or modified CDS sequence (wt) from hemagglutinin__InfluenzaA__AEG65219
augaagacuaucauugcuuugagcuacauucuaugucugguuuucgcucaaaaacuucccggaaaugacaacagcacggcaacgcugugccuugggcaccaugcaguaccaaacggaacgauagugaaaacaaucacgaaugaccaaauugaaguuacuaaugcuacugagcugguucagaguuccucaacagguggaauaugcgacaguccucaucagauccuugauggagaaaacugcacacuaauagaugcucuauugggagacccucagugugauggcuuccaaaauaagaaaugggaccuuuuuguugaacgcagcaaagccuacagcaacuguuacccuuaugaugugccggauuaugccucccuuaggucacuaguugccucauccggcacacuggaguuuaacaaugaaagcuucaauuggacuggagucacucaaaauggaacaagcucugcuugcaaaaggagaucuaauaaaaguuucuuuaguagauugaauugguugacccacuuaaaauucaaauacccagcauugaacgugacuaugccaaacaaugaaaaauuugacaaauuguacauuugggggguucaccacccggguacggacaaugaccaaaucagccuauaugcucaagcaucaggaagaaucacagucucuaccaaaagaagccaacaaacuguaaucccgaauaucggaucuagacccaggguaagggauguccccagcagaauaagcaucuauuggacaauaguaaaaccgggagacauacuuuugauuaacagcacagggaaucuaauugcuccucgggguuacuucaaaauacgaagugggaaaagcucaauaaugagaucagaugcacccauuggcaaaugcaauucugaaugcaucacuccaaauggaagcauucccaaugacaaaccauuucaaaauguaaacaggaucacauauggggccugucccagauauguuaagcaaaacacccugaaauuggcaacagggaugcgaaauguaccagagaaacaaacuagaggcauauuuggcgcaaucgcggguuucauagaaaaugguugggagggaaugguggacgguugguacgguuucaggcaucaaaauucugagggaacaggacaagcagcagaucucaaaagcacucaagcagcaaucaaccaaaucaaugggaagcugaauagguugaucgggaaaacaaacgagaaauuccaucagauugaaaaagaauucucagaaguagaagggagaauucaggaccucgagaaauauguugaggacacuaaaauagaucucuggucauacaacgcggagcuucuuguugcccuggagaaccaacauacaauugaucuaacugacucagaaaugaacaaacuguuugaaagaacaaagaagcaacugagggaaaaugcugaggauaugggcaaugguuguuucaaaauauaccacaaaugugacaaugccugcauagggucaaucagaaauggaacuuaugaccaugauguauacagagaugaagcauuaaacaaccgguuccagaucaaagguguugagcugaagucaggauacaaagauuggauccuauggauuuccuuugccauaucauguuuuuugcuuuguguugcuuuguugggguucaucaugugggccugccaaaaaggcaacauuaagugcaacauuugcauuuga

SEQ ID NO: 38773 - RNA, 1701 nt, Artificial Sequence
  derived and/or modified CDS sequence (wt) from hemagglutinin__InfluenzaA__AEG65230
augaagacuaucauugcuuugagcuacauucuaugucugguuuucgcucaaaaacuucccggaaaugacaacagcacggcaacgcugugccuugggcaccaugcaguaccaaacggaacgauagugaaaacaaucacgaaugaccaaauugaaguuacuaaugcuacugagcugguucagaguuccucaacagguggaauaugcgacaguccucaucagauccuugauggagaaaacugcacacuaauagaugcucuauugggagacccucagugugauggcuuccaaaauaagaaaugggaccuuuuuguugaacgcagcaaagccuacagcaacuguuacccuuaugaugugccggauuaugccucccuuaggucacuaguugccucauccggcacacuggaguuuaacaaugaaagcuucaauuggacuggagucacucaaaauggaacaagcucugcuugcaaaaggagaucuaauaaaaguuucuuuaguagauugaauugguugacccacuuaaaauucaaauacccagcauugaacgugacuaugccaaacaaugaaaaauuugacaaauuguacauuugggggguucaccacccggguacggacaaugaccaaaucagccuauaugcucaagcaucaggaagaaucacagucucuaccaaaagaagccaacaaacuguaaucccgaauaucggaucuagacccaggguaagggauguccccagcagaauaagcaucuauuggacaauaguaaaaccgggagacauacuuuugauuaacagcacagggaaucuaauugcuccucgggguuacuucaaaauacgaagugggaaaagcucaauaaugagaucagaugcacccauuggcaaaugcaauucugaaugcaucacuccaaauggaagcauucccaaugacaaaccauuucaaaauguaaacaggaucacauauggggccugucccagauauguuaagcaaaacacccugaaauuggcaacagggaugcgaaauguaccagagaaacaaacuagaggcauauuuggcgcaaucgcggguuucauagaaaaugguugggagggaaugguggacgguugguaugguuucaggcaucaaaauucugagggaacaggacaagcagcagaucucaaaagcacucaagcagcaaucaaccaaaucaaugggaagcugaauagguugaucgggaaaacaaacgagaaauuccaucagauugaaaaagaauucucagaaguagaagggagaauucaggaccucgagaaauauguugaggacacuaaaauagaucucuggucauacaacgcggagcuucuuguugcccuggagaaccaacauacaauugaucuaacugacucagaaaugaacaaacuguuugaaagaacaaagaagcaacugagggaaaaugcugaggauaugggcaaugguuguuucaaaauauaccacaaaugugacaaugccugcauagggucaaucagaaauggaacuuaugaccaugauguauacagagaugaagcauuaaacaaccgguuccagaucaaagguguugagcugaagucaggauacaaagauuggauccuauggauuuccuuugccauaucauguuuuuugcuuuguguugcuuuguugggguucaucaugugggccugccaaaaaggcaacauuaggugcaacauuugcauuuga

SEQ ID NO: 38774 - RNA, 1701 nt, Artificial Sequence; identical to SEQ ID NO: 33807
  derived and/or modified CDS sequence (wt) from hemagglutinin__InfluenzaA__AEG65252

SEQ ID NO: 38775 - RNA, 1701 nt, Artificial Sequence; identical to SEQ ID NO: 32532
  derived and/or modified CDS sequence (wt) from hemagglutinin__InfluenzaA__AEG65263

SEQ ID NO: 38776 - RNA, 1701 nt, Artificial Sequence; identical to SEQ ID NO: 32532
  derived and/or modified CDS sequence (wt) from hemagglutinin__InfluenzaA__AEG65274

SEQ ID NO: 38777 - RNA, 1701 nt, Artificial Sequence; identical to SEQ ID NO: 32532
  derived and/or modified CDS sequence (wt) from hemagglutinin__InfluenzaA__AEG65285

SEQ ID NO: 38778 - RNA, 1701 nt, Artificial Sequence
  derived and/or modified CDS sequence (wt) from hemagglutinin__InfluenzaA__AEG65296
augaagacugucauugcuuugagcuacauucuaugucugguuuucgcucaaaaacuucccggaaaugacaacagcacggcaacgcugugccuugggcaccaugcaguaccaaacggaacgauagugaaaacaaucacaaaugaccaaauugaaguuacuaaugcuacugagcugguucagaguuccucaacagguggaauaugcgacaguccucaucagauccuugauggagaaaacugcacacuaauagaugcucuauugggagacccucagugugauggcuuccaaaauaagaaaugggaccuuuuuguugaacgcagcaaagccuacagcaacuguuacccuuaugaugugccggaucaugccucccuuaggucacuaguugccucauccggcacacuggaguuuaacaaugaaagcuucgauuggacuggagucacucagaauggaacaagcucugcuugcaaaaggagaucuaauaaaaguuucuuuaguagauugaauugguugacccacuuaaaauacaaauacccagcauugaacgugacuaugccaaacaaugaaaaauuugacaaauuguacauuugggggguucaccacccggguacggacagugaccaaaucagccuauaugcucaagcaucaggaagaaucacagucucuaccaaaagaagccaacaaacuguaaucccgaauaucggaucuagacccaggguaagggaugucuccagccgaauaagcaucuauuggacaauaguaaaaccgggagacauacuuuugauuaacagcacagggaaucuaauugcuccucgggguuacuucaaaauacgaagugggaaaagcucaauaaugagaucagaugcacccauuggcaaaugcaauucugaaugcaucacuccaaauggaagcauucccaaugacaaaccauuucaaaauguaaacaggaucacauauggggccugucccagauauguuaagcaaaacacucugaaauuggcaacagggaugcgaaauguaccagagaaacaaacuagaggcauauuuggcgcaaucgcggguuucauagaaaaugguugggagggaaugguggacgguugguacgguuucaggcaucaaaauucugagggcacaggacaagcagcagaucucaaaagcacucaagcagcaaucaaccaaaucaaugggaaacugaauagguuaaucgggaaaacaaacgagaaauuccaucagauugaaaaagaauucucagaaguagaagggagaauucaggaccucgagaaauauguugaggacacuaaaauagaucucuggucauacaacgcggagcuucuuguugcccuggagaaccaacauacaauugaucuaacugacucagaaaugaacaaacuguuugaaagaacaaagaagcaacugagggaaaaugcugaggauaugggcaaugguuguuucaaaauauaccacaaaugugacaaugccugcauagggucaaucagaaauggaacuuaugaccaugauguguacagagaugaagcauuaaacaaccgguuccagaucaaagguguugagcugaagucaggauauaaagauuggauccuauggauuuccuuugccauaucauguuuuuugcuuuguguugcuuuguugggguucaucaugugggccugccaaaaaggcaacauuaggugcaacauuugcauuuga

SEQ ID NO: 38779 - RNA, 1701 nt, Artificial Sequence; identical to SEQ ID NO: 33807
  derived and/or modified CDS sequence (wt) from hemagglutinin__InfluenzaA__AEG65307

SEQ ID NO: 38780 - RNA, 1701 nt, Artificial Sequence
  derived and/or modified CDS sequence (wt) from hemagglutinin__InfluenzaA__AEG65318
augaagacuaucauugcuuugagcuacauucuaugucugguuuucgcucaaaaacuucccggaaaugacaacagcacggcaacgcugugccuugggcaccaugcaguaccaaacggaacgauagugaaaacaaucacgaaugaccaaauugaaguuacuaaugcuacugagcugguucagaguuccucaacagguggaauaugcgacaguccucaucagauccuugauggagaaaacugcacacuaauagaugcucuauugggagacccucagugugauggcuuccaaaauaagaaaugggaccuuuuuguugaacgcagcaaagccuacagcaacuguuacccuuaugaugugccggauuaugccucccuuaggucacuaguugccucauccggcacacuggaguuuaacaaugaaagcuucaauuggacuggagucacucaaaauggaacaagcucugcuugcaaaaggagaucuaauaaaaguuucuuuaguagauugaauugguugacccacuuaaaauucaaauacccagcauugaacgugacuaugccaaacaaugaaaaauuugacaaauuguacauuugggggguucaccacccggguacggacaaugaccaaaucagccuauaugcucaagcaucaggaagaaucacagucucuaccaaaagaagccaacaaacuguaaucccgaauaucggaucuagacccaggguaagggauguccccagcagaauaagcaucuauuggacaauaguaaaaccgggagacauacuuuugauuaacagcacagggaaucuaauugcuccucgggguuacuucaaaauacgaagugggaaaagcucaauaaugagaucagaugcacccauuggcaaaugcaauucugaaugcaucacuccaaauggaagcauucccaaugacaaaccauuucaaaauguaaacaggaucacauauggggccugucccagauauguuaggcaaaacacucugaaauuggcaacagggaugcgaaauguaccagagaaacaaacuagaggcauauuuggcgcaaucgcggguuucauagaaaaugguugggagggaaugguggacgguugguacgguuucaggcaucaaaauucugagggaacaggacaagcagcagaucucaaaagcacucaagcagcaaucaaccaaaucaaugggaagcugaauagguugaucgggaaaacaaacgagaaauuccaucagauugaaaaagaauucucagaaguagaagggagaauucaggaccucgagaaauauguugaggacacuaaaauagaucucuggucauacaacgcggagcuucuuguugcccuggagaaccaacauacaauugaucuaacugacucagaaaugaacaaacuguuugaaagaacaaagaagcaacugagggaaaaugcugaggauaugggcaaugguuguuucaaaauauaccacaaaugugacaaugccugcauagggucaaucagaaauggaacuuaugaccaugauguauacagagaugaagcauuaaacaaccgguuccagaucaaagguguugagcugaagucaggauacaaagauuggauccuauggauuuccuuugccauaucauguuuuuugcuuuguguugcuuugcugggguucaucaugugggccugccaaaaaggcaacauuaggugcaacauuugcauuuga

SEQ ID NO: 38781 - RNA, 1701 nt, Artificial Sequence; identical to SEQ ID NO: 38773
  derived and/or modified CDS sequence (wt) from hemagglutinin__InfluenzaA__AEG65329

SEQ ID NO: 38782 - RNA, 1701 nt, Artificial Sequence
  derived and/or modified CDS sequence (wt) from hemagglutinin__InfluenzaA__AEG65340
augaagacuaucauugcuuugagcuacauucuaugucugguuuucgcucaaaagcuucccggaaaugacaacagcacggcaacgcugugccuugggcaccaugcaguaccaaacggaacgauagugaaaacaaucacgaaugaccaaauugaaguuacuaaugcuacugagcugguucagaguuccucaacagguggaauaugcgacaguccucaucagauccuugauggagaaaacugcacacuaauagaugcucuauugggagacccucagugugauggcuuccaaaauaagaaaugggaccuuuuuguugaacgcagcaaagccuacagcaacuguuacccuuaugaugugccggauuaugccucccuuaggucacuaguugccucauccggcacacuggaguuuaacaaugaaagcuucaauuggacuggagucacucagaauggaacaagcucugcuugcgaaaggagaucuaacaaaaguuucuuuaguagauugaauugguugacccacuuaaaauacaaauacccagcauugaacgugacuaugccaaacaaugaaaaauuugacaaauuguacauuugggggguucaccacccggguacggacagugaccaaaucagccuauaugcucaagcaucaggaagaaucacagucucuaccaaaagaagccaacaaacuguaaucccgaauaucggaucuagacccaggguaagggaugucuccagcaggauaagcaucuauuggacaauaguaaaaccgggagacauacuuuugauuaacagcacagggaaucuaauugcuccucgggguuacuucaaaauacgaagugggaaaagcucaauaaugagaucagaugcacccauuggcaaaugcaauucugaaugcaucacuccaaaugggagcauucccaaugacaaaccauuucaaaauguaaacaggaucacauauggggccugucccagauauguuaagcaaaacacucugaaauuggcaacagggaugcgaaauguaccagagaaacaaacuagaggcauauuuggcgcaaucgcggguuucauagaaaaugguugggagggaaugguggacgguugguacgguuucaggcaucaaaauucugagggcacaggacaagcagcagaucucaaaagcacucaagcagcaaucaaccaaaucaaugggaaacugaauagguuaaucgggaaaacaaacgagaaauuccaucagauugaaaaagaauucucagaaguagaagggagaauucaggaccucgagaaauauguugaggacacuaaaauagaucucuggucauacaacgcggagcuucuuguugcccuggagaaccaacauacaauugaucuaacugacucagaaaugaacaaacuguuugaaagaacaaagaagcaacugagggaaaaugcugaggauaugggcaaugguuguuucaaaauauaccacaaaugugacaaugccugcauagagucaaucagaaauggaacuuaugaccaugauguauacagagaugaagcauugaacaaccgguuccagaucaaagguguugagcugaaaucaggauacaaagauuggauccuauggauuuccuuugccauaucauguuuuuugcuuuguguugcuuuguugggguucaucaugugggccugccaaaaaggcaacauuaggugcaacauuugcauuuga

SEQ ID NO: 38783 - RNA, 1701 nt, Artificial Sequence
  derived and/or modified CDS sequence (wt) from hemagglutinin__InfluenzaA__AEG65351
augaagacuaucauugcuuugagcuacauucuaugucugguuuucgcucaaaaacuucccggaaaugacaacagcacggcaacgcugugccuugggcaccaugcaguaccaaacggaacgauagugaaaacaaucacgaaugaccaaauugaaguuacuaaugcuacugagcugguucagaguuccucaacagguggaauaugcgacaguccucaucagauccuugauggagaaaacugcacacuaauagaugcucuauugggagacccucagugugauggcuuccaaaauaagaaaugggaccuuuuuguugaacgcagcaaagccuacagcaacuguuacccuuaugaugugccggauuaugccucccuuaggucacuaguugccucauccggcacacuggaguuuaacaaugaaagcuucaauuggacuggagucacucaaaauggaacaagcucugcuugcaaaaggagaucuaauaaaaguuucuuuaguagauugaauugguugacccacuuaaaauucaaauacccagcauugaacgugacuaugccaaacaaugaaaaauuugacaaauuguacauuugggggguucaccacccggguacggacaaugaccaaaucagccuauaugcucaagcaucaggaagaaucacagucucuaccaaaagaagccaacaaacuguaaucccgaauaucggaucuagacccaggguaagggauguccccagcagaauaagcaucuauuggacaauaguaaaaccgggagacauacuuuugauuaacagcacagggaaucuaauugcuccucgggguuacuucaaaauacgaagugggaaaagcucaauaaugagaucagaugcacccauuggcaaaugcaauucugaaugcaucacuccaaauggaagcauucccaaugacaaaccauuucaaaauguaaacaggaucacauauggggccugucccagauauguuaagcaaaacacccugaaauuggcaacagggaugcgaaauguaccagagaaacaaacuagaggcauauuuggcgcaaucgcggguuucauagaaaaugguugggagggaaugguggacgguugguacgguuucaggcaucaaaauucugagggaacaggacaagcagcagaucucaaaagcacucaagcagcaaucaaccaaaucaaugggaagcugaauagguugaucgggaaaacaaacgagaaauuccaucagauugaaaaagaauucucagaaguagaagggagaauucaggaccucgagaaauauguugaggacacuaaaauagaucucuggucauacaacgcggagcuucuuguugcccuggagaaccaacauacaauugaucuaacugacucagaaaugaacaaacuguuugaaagaacaaagaagcaacugagggaaaaugcugaggauaugggcaaugguuguuucaaaauauaccacaaaugugacaaugccugcauagggucaaucagaaauggaacuuaugaccaugauguauacagagaugaagcauuaaacaaccgguuccagaucaaagguguugagcugaagucaggauacaaagauuggauccuauggauuuccuuugccauaucauguuuuuugcuuuguguugcuuuguugggguucaucaugugggccugccaaaaaggcaacauuaggugcaacauuugcauuuga

SEQ ID NO: 38784 - RNA, 1701 nt, Artificial Sequence; identical to SEQ ID NO: 38773
  derived and/or modified CDS sequence (wt) from hemagglutinin__InfluenzaA__AEG65362

SEQ ID NO: 38785 - RNA, 1701 nt, Artificial Sequence; identical to SEQ ID NO: 38782
  derived and/or modified CDS sequence (wt) from hemagglutinin__InfluenzaA__AEG65373

SEQ ID NO: 38786 - RNA, 1701 nt, Artificial Sequence; identical to SEQ ID NO: 32532
  derived and/or modified CDS sequence (wt) from hemagglutinin__InfluenzaA__AEG65384

SEQ ID NO: 38787 - RNA, 1701 nt, Artificial Sequence; identical to SEQ ID NO: 32532
  derived and/or modified CDS sequence (wt) from hemagglutinin__InfluenzaA__AEG65406

SEQ ID NO: 38788 - RNA, 1701 nt, Artificial Sequence; identical to SEQ ID NO: 32532
  derived and/or modified CDS sequence (wt) from hemagglutinin__InfluenzaA__AEG65417

SEQ ID NO: 38789 - RNA, 1701 nt, Artificial Sequence; identical to SEQ ID NO: 32532
  derived and/or modified CDS sequence (wt) from hemagglutinin__InfluenzaA__AEG65428

SEQ ID NO: 38790 - RNA, 1701 nt, Artificial Sequence
  derived and/or modified CDS sequence (wt) from hemagglutinin__InfluenzaA__AEG65439
augaagacuaucauugcuuugagcuacauucuaugucugguuuucgcucaaaaacuucccggaaaugacaacagcacggcaacgcugugccuugggcaccaugcaguaccaaacggaacgauagugaaaacaaucacgaaugaccaaauugaaguuacuaaugcuacugagcugguucagaguuccucaacagguggaauaugcgacagcccucaucagauccuugauggagaaaacugcacacuaauagaugcucuauugggagacccucagugugauggcuuccaaaauaagaaaugggaccuuuuuguugaacgcagcaaagccuacagcaacuguuacccuuaugaugugccggauuaugccucccuuaggucacuaguugccucauccggcacacuggaguuuaacaaugaaagcuucaauuggacuggagucacucaaaauggaacaagcucugcuugcaaaaggagaucuaauaacaguuucuuuaguagauugaauugguugacccacuuaaaauucaaauacccagcauugaacgugacuaugccaaacaaugaaaaauuugacaaauuguacauuugggggguucaccacccggguacggacaaugaccaaaucuuccuguaugcucaagcaucaggaagaaucacagucucuaccaaaagaagccaacaaacuguaaucccgaauaucggaucuagacccagaguaaggaauauccccagcagaauaagcaucuauuggacaauaguaaaaccgggagacauacuuuugauuaacagcacagggaaucuaauugcuccuagggguuacuucaaaauacgaagugggaaaagcucaauaaugagaucagaugcacccauuggcaaaugcaauucugaaugcaucacuccaaauggaagcauucccaaugacaaaccauuucaaaauguaaacaggauaacauauggggccugucccagauauguuaagcaaaacacucugaaauuggcaacagggaugcgaaauguaccagagaaacaaacuagaggcauauuuggcgcaaucgcggguuucauagaaaaugguugggagggaaugguggaugguugguacgguuucaggcaucaaaauucugagggaguaggacaagcagcagaucucaaaagcacgcaagcagcaaucaaucaaaucaaugggaagcugaauagguugaucgggaagaccaacgagaaauuccaucagauugaaaaagaauucucagaaguagaagggagaauucaagaccucgagaaauauguugaggacacuaaaauagaucucuggucauacaacgcggagcuucuuguugcccuggagaaccaacauacaauugaucuaacugacucagaaaugaacaaacuguuugaaagaacaaagaagcaacugagggaaaaugcugaggauaugggcaaugguuguuucaaaauauaccacaaaugugacaaugccugcauaggaucaaucagaaauggaacuuaugaccaugauguauacagagaugaagcauuaaacaaccgguuccagaucaaaggcguugagcugaagucaggauacaaagauuggauccuauggauuuccuuugccauaucauguuuuuugcuuuguguugcuuuguugggguucaucaugugggccugccaaaaaggcaacauuaggugcaacauuugcauuuga

SEQ ID NO: 38791 - RNA, 1701 nt, Artificial Sequence
  derived and/or modified CDS sequence (wt) from hemagglutinin__InfluenzaA__AEG65450
augaagacuaucauugcuuggagcuacauucuaugucugguuuucgcucaaaaacuucccggaaaugacaacagcacggcaacgcugugccuugggcaccaugcaguaccaaacggaacgauagugaaaacaaucacgaaugaccaaauugaaguuacuaaugcuacugagcugguucagaguuccucaacagguggaauaugcgacaguccucaucagauccuugauggagaaaacugcacacuaauagaugcucuauugggagacccucagugugauggcuuccaaaauaagaaaugggaccuuuuuguugaacgcagcaaagccuacagcaacuguuacccuuaugaugugccggauuaugccucccuuaggucacuaauugccucauccggcacacuggaguuuaacaaugaaagcuucaauuggacuggagucacucaaaauggaacaagcucugcuugcaaaaggagaucuaauagcaguuucuuuaguagauugaauugguugacccacuuaaaauucaaauacccagcauugaacgugacuaugccaaacaaugaagaauuugacaaauuguacauuugggggguucaccacccggguacauacaaugaccaaaucagccuauaugcucaagcaucaggaagaaucacagucucuaccaaaagaagccaacaaacuguaaucccgaauaucgggucuagacccaggguaagggauauccccagcagaauaagcaucuauuggacaauaguaaaaccgggagacauacuuuugauuaacagcacagggaaucuaauugcuccucgggguuacuucaaaauacgaagugggaaaagcucaauaaugagaucagaugcacccauuggcaaaugcaauucugaaugcaucacuccaaauggaagcauucccaaugacaaaccauuucaaaauguaaacaggaucacauauggggccugucccagauauguuaagcaaaacacucugaaauuggcaacagggaugcgaaauguaccagagaaacaaacuagaggcauauuuggcgcaaucgcggguuucauagaaaaugguugggagggaaugguggaugguugguacgguuucaggcaucaaaauucugagggaauaggacaagcagcagaucucaaaagcacucaagcagcaaucgaccaaaucaaugggaagcugaauagguugaucgggaaaaccaacgagaaauuccaucagauugaaaaagaauucucagaaguagaagggagaauucaggaccucgagaaauauguugaggacacuaaaauagaucucuggucauacaacgcggagcuucuuguugcccuggagaaccaacauacaauugaucuaacugacucagaaaugaacaaacuguuugaaagaacaaagaagcaacugagggaaaaugcugaggauaugggcaaugguuguuucaaaauauaccacaaaugugacaaugccugcauagggucaaucagaaauggaacuuaugaccaugauguauacagagaugaagcauuaaacaaccgguuccagaucaaagguguugagcugaagucaggauacaaagauuggauccuauggauuuccuuugccauaucauguuuuuugcuuuguguugcuuuguugggguucaucaugugggccugccaaaaaggcaacauuaggugcaacauuugcauuuga

SEQ ID NO: 38792 - RNA, 1701 nt, Artificial Sequence; identical to SEQ ID NO: 38791
  derived and/or modified CDS sequence (wt) from hemagglutinin__InfluenzaA__AEG65461

SEQ ID NO: 38793 - RNA, 1701 nt, Artificial Sequence
  derived and/or modified CDS sequence (wt) from hemagglutinin__InfluenzaA__AEG65472
augaagacuaucauugcuuggagcuacauucuaugucugguuuucgcucaaaaacuucccggaaaugacaacagcacggcaacgcugugccuugggcaccaugcaguaccaaacggaacgauagugaaaacaaucacgaaugaccaaauugaaguuacuaaugcuacugagcugguucagaguuccucaacagguggaauaugcgacaguccucaucagauccuugauggagaaaacugcacacuaauagaugcucuauugggagacccucagugugauggcuuccaaaauaagaaaugggaccuuuuuguugaacgcagcaaagccuacagcaacuguuacccuuaugaugugccggauuaugccucccuuaggucacuaauugccucauccggcacacuggaguuuaacaaugaaagcuucaauuggacuggagucacucaaaauggaacaagcucugcuugcaaaaggagaucuaauagcaguuucuuuaguagauugaauugguugacccacuuaaaauucaaauacccagcauugaacgugacuaugccaaacaaugaagaauuugacaaauuguacauuugggggguucaccacccggguacauacaaugaccaaaucagccuauaugcucaagcaucaggaagaaucacagucucuaccaaaagaagccaacaaacuguaaucccgaauaucgggucuagacccaggguaagggauauccccagcagaauaagcaucuauuggacaauaguaaaaccgggagacauacuuuugauuaacagcacagggaaucuaauugcuccucgggguuacuucaaaauacgaagugggaaaagcucaauaaugagaucagaugcacccauuggcaaaugcaauucugaaugcaucacuccaaauggaagcauucccaaugacaaaccauuucaaaauguaaacaggaucacauauggggccugucccagauauguuaagcaaaacacucugaaauuggcaacagggaugcgaaauguaccagagaaacaaacuagaggcauauuuggcgcaaucgcggguuucauagaaaaugguugggagggaaugguggaugguugguacgguuucaggcaucaaaauucugagggaauaggacaagcagcagaucucaaaagcacucaagcagcaaucgaccaaaucaaugggaagcugaauagguugaucgggaaaaccaacgagaaauuccaucagauugaaaaagaauucucagaaguagaagggagaauucaggaccucgagaaauauguugaggacacuaaaauagaucucuggucauacaacgcggagcuucuuguugcccuggagaaccaacauacaauugaucuaacugacucagaaaugaacaaacuguuugaaauaacaaagaagcaacugagggaaaaugcugaggauaugggcaaugguuguuucaaaauauaccacaaaugugacaaugccugcauagggucaaucagaaauggaacuuaugaccaugauguauacagagaugaagcauuaaacaaccgguuccagaucaaagguguugagcugaagucaggauacaaagauuggauccuauggauuuccuuugccauaucauguuuuuugcuuuguguugcuuuguugggguucaucaugugggcuugccaaaaaggcaacauuaggugcaacauuugcauuuga

SEQ ID NO: 38794 - RNA, 1701 nt, Artificial Sequence; identical to SEQ ID NO: 38791
  derived and/or modified CDS sequence (wt) from hemagglutinin__InfluenzaA__AEG65483

SEQ ID NO: 38795 - RNA, 1701 nt, Artificial Sequence; identical to SEQ ID NO: 38791
  derived and/or modified CDS sequence (wt) from hemagglutinin__InfluenzaA__AEG65494

SEQ ID NO: 38796 - RNA, 1701 nt, Artificial Sequence; identical to SEQ ID NO: 38791
  derived and/or modified CDS sequence (wt) from hemagglutinin__InfluenzaA__AEG65505

SEQ ID NO: 38797 - RNA, 1701 nt, Artificial Sequence
  derived and/or modified CDS sequence (wt) from hemagglutinin__InfluenzaA__AEG65516
augaagacuaucauugcuuggagcuacauucuaugucugguuuucgcucaaaaacuucccggaaaugacaacagcacggcaacgcugugccuugggcaccaugcaguaccaaacggaacgauagugaaaacaaucacgaaugaccaaauugaaguuacuaaugcuacugagcugguucagaguuccucaacagguggaauaugcgacaguccucaucagauccuugauggagaaaacugcacacuaauagaugcucuauugggagacccucagugugauggcuuccaaaauaagaaaugggaccuuuuuguugaacgcagcaaagccuacagcaacuguuacccuuaugaugugccggauuaugccucccuuaggucacuaauugccucauccggcacacuggaguuuaacaaugaaagcuucaauuggacuggagucacucaaaauggaacaagcucugcuugcaaaaggagaucuaauagcaguuucuuuaguagauugaauugguugacccacuuaaaauucaaauacccagcauugaacgugacuaugccaaacaaugaagaauuugacaaauuguacauuugggggguucaccacccggguacauacaaugaccaaaucagccuauaugcucaagcaucaggaagaaucacagucucuaccaaaagaagccaacaaacuguaaucccgaauaucgggucuagacccaggguaagggauauccccagcagaauaagcaucuauuggacaauaguaaaaccgggagacauacuuuugauuaacagcacagggaaucuaauugcuccucgggguuacuucaaaauacgaagugggaaaagcucaauaaugagaucagaugcacccauuggcaaaugcaauucugaaugcaucacuccaaauggaagcauucccaaugacaaaccauuucaaaauguaaacaggaucacauauggggccugucccagauauguuaagcaaaacacucugaaauuggcaacagggaugcgaaauguaccagagaaacaaacuagaggcauauuuggugcaaucgcggguuucauagaaaaugguugggagggaaugguggaugguugguacgguuucaggcaucaaaauucugagggaauaggacaagcagcagaucucaaaagcacucaagcagcaaucgaccaaaucaaugggaagcugaauagguugaucgggaaaaccaacgagaaauuccaucagauugaaaaagaauucucagaaguagaagggagaauucaggaccucgagaaauauguugaggacacuaaaauagaucucuggucauacaacgcggagcuucuuguugcccuggagaaccaacauacaauugaucuaacugacucagaaaugaacaaacuguuugaaagaacaaagaagcaacugagggaaaaugcugaggauaugggcaaugguuguuucaaaauauaccacaaaugugacaaugccugcauagggucaaucagaaauggaacuuaugaccaugauguauacagagaugaagcauuaaacaaccgguuccagaucaaagguguugagcugaagucaggauacaaagauuggauccuauggauuuccuuugccauaucauguuuuuugcuuuguguugcuuuguugggguucaucaugugggccugccaaaaaggcaacauuaggugcaacauuugcauuuga

SEQ ID NO: 38798 - RNA, 1701 nt, Artificial Sequence; identical to SEQ ID NO: 38791
  derived and/or modified CDS sequence (wt) from hemagglutinin__InfluenzaA__AEG65527

SEQ ID NO: 38799 - RNA, 1701 nt, Artificial Sequence; identical to SEQ ID NO: 38791
  derived and/or modified CDS sequence (wt) from hemagglutinin__InfluenzaA__AEG65538

SEQ ID NO: 38800 - RNA, 1701 nt, Artificial Sequence
  derived and/or modified CDS sequence (wt) from hemagglutinin__InfluenzaA__AEG65560
augaagacuaucauugcuuugagcuacauucuaugucugguuuucgcucaaaaacuucccggaaaugacaacagcacagcaacgcugugccuugggcaccaugcaguaccaaacggaacgauagugaaaacaaucacgaaugaccaaauugaaguuacuaaugcuacugagcugguucagaguuccucaacagguggaauaugcgacaguccucaucagauccuugauggagaaaacugcacacuaauagaugcucuauugggagacccucagugugauggcuuccaaaauaagaaaugggaccuuuuuguugaacgcagcaaagccuacagcaacuguuacccuuaugaugugccggauuaugccucccuuaggucacuaauugccucauccggcacacuggaguuuaacaaugaaagcuucaauuggacuggagucacucaaaauggaacaagcucugcuugcaaaaggagaucuaauagcaguuucuuuaguagauugaauugguugacccacuuaaaauucaaauacccagcauugaacgugacuaugccaaacaaugaagaauuugacaaauuguacauuugggggguucaccacccggguacauacaaugaccaaaucagccuauaugcucaagcaucaggaagaaucacagucucuaccaaaagaagccaacaaacuguaaucccgaauaucgggucuagacccaggguaagggauauccccagcagaauaagcaucuauuggacaauaguaaaaccgggagacauacuuuugauuaacagcacagggaaucuaauugcuccucgggguuacuucaaaauacgaagugggaaaagcucaauaaugaaaucagaugcacccauuggcaaaugcaauucugaaugcaucacuccaaauggaagcauucccaaugacaaaccauuucaaaauguaaacaggaucacauauggggccugucccagauauguuaagcaaaacacucugaaauuggcaacagggaugcgaaauguaccagagaaacaaacuagaggcauauuuggcgcaaucgcggguuucauagaaaaugguugggagggaaugguggaugguugguacgguuucaggcaucaaaauucugagggaauaggacaagcagcagaucucaaaagcacucaagcagcaaucgaccaaaucaaugggaagcugaauagguugaucgggaaaaccaacgagaaauuccaucagauugaaaaagaauucucagaaguagaagggagaauucaggaccucgagaaauauguugaggacacuaaaauagaucucuggucauacaacgcggagcuucuuguugcccuggagaaccaacauacaauugaucuaacugacucagaaaugaacaaacuguuugaaagaacaaagaagcaacugagggaaaaugcugaggauaugggcaaugguuguuucaaaauauaccacaaaugugacaaugccugcauagggucaaucagaaauggaacuuaugaccaugauguauacagagaugaagcauuaaacaaccgguuccagaucaaagguguugagcugaagucaggauacaaagauuggauccuauggauuuccuuugccauaucaugcuuuuugcuuuguguugcuuuguugggguucaucaugugggccugccaaaaaggcaacauuaggugcaacauuugcauuuga

SEQ ID NO: 38801 - RNA, 1701 nt, Artificial Sequence
  derived and/or modified CDS sequence (wt) from hemagglutinin__InfluenzaA__AEG65571
augaagacuaucauugcuuugagcuacauucuaugucugguuuucgcucaaaaacuucccggaaaugacaacagcacagcaacgcugugccuugggcaccaugcaguaccaaacggaacgauagugaaaacaaucacgaaugaccaaauugaaguuacuaaugcuacugagcugguucagaguuccucaacagguggaauaugcgacaguccucaucagauccuugauggagaaaacugcacacuaauagaugcucuauugggagacccucagugugauggcuuccaaaauaagaaaugggaccuuuuuguugaacgcagcaaagccuacagcaacuguuacccuuaugaugugccggauuaugccucccuuaggucacuaauugccucauccggcacacuggaguuuaacaaugaaagcuucaauuggacuggagucacucaaaauggaacaagcucugcuugcaaaaggagaucuaauagcaguuucuuuaguagauugaauugguugacccacuuaaaauucaaauacccagcauugaacgugacuaugccaaacaaugaagaauuugacaaauuguacauuugggggguucaccacccggguacauacaaugaccaaaucagccuauaugcucaagcaucaggaagaaucacagucucuaccaaaagaagccaacaaacuguaaucccgaauaucgggucuagacccaggguaagggauauccccagcagaauaagcaucuauuggacaauaguaaaaccgggagacauacuuuugauuaacagcacagggaaucuaauugcuccucgggguuacuucaaaauacgaagugggaaaagcucaauaaugaaaucagaugcacccauuggcaaaugcaauucugaaugcaucacuccaaauggaagcauucccaaugacaaaccauuucaaaauguaaacaggaucacauauggggccugucccagauauguuaagcaaaacacucugaaauuggcaacagggaugcgaaauguaccagagaaacaaacuagaggcauauuuggcgcaaucgcggguuucauagaaaaugguugggagggaaugguggaugguugguacgguuucaggcaucaaaauucugagggaauaggacaagcagcagaucucaaaagcacucaagcagcaaucgaccaaaucaaugggaagcugaauagguugaucgggaaaaccaacgagaaauuccaucagauugaaaaagaauucucagaaguagaagggagaauucaggaccucgagaaauauguugaggacacuaaaauagaucucuggucauacaacgcggagcuucuuguugcccuggagaaccaacauacaauugaucuaacugacucagaaaugaacaaacuguuugaaagaacaaagaagcaacugagggaaaaugcugaggauaugggcaaugguuguuucaaaauauaccacaaaugugacaaugccugcauagggucaaucagaaauggaacuuaugaccaugauguauacagagaugaagcauuaaacaaccgguuccagaucaaagguguugagcugaagucaggauacaaagauuggauccuauggauuuccuuugccauaucauguuuuuugcuuuguguugcuuuguugggguucaucaugugggccugccaaaaaggcaacauuaggugcaacauuugcauuuga

SEQ ID NO: 38802 - RNA, 1701 nt, Artificial Sequence; identical to SEQ ID NO: 38801
  derived and/or modified CDS sequence (wt) from hemagglutinin__InfluenzaA__AEG65582

SEQ ID NO: 38803 - RNA, 1701 nt, Artificial Sequence; identical to SEQ ID NO: 38801
  derived and/or modified CDS sequence (wt) from hemagglutinin__InfluenzaA__AEG65593

SEQ ID NO: 38804 - RNA, 1701 nt, Artificial Sequence
  derived and/or modified CDS sequence (wt) from hemagglutinin__InfluenzaA__AEG65604
augaagacuaucauugcuuugagcuacauucuaugucugguuuucgcucaaaaacuucccggaaaugacaacagcacggcaacgcugugccuugggcaccaugcaguaccaaacggaacgauagugaaaacaaucacgaaugaccaaauugaaguuacuaaugccacugagcugguucagaguuccucaacagguggaauaugcgacaguccucaucagauccuugauggagaaaacugcacacuaauagaugcucuauugggagacccucagugugauggcuuccaaaauaagaaaugggaccuuuuuguugaacgcagcaaagccuacagcaacuguuacccuuaugaugugccggauuaugccucccuuaggucacuaauugccucauccggcacacuggaguuuaacaaugaaagcuucaauuggacuggagucacucaaaauggaacaagcucugcuugcaaaaggagaucuaauaacaguuucuuuaguagauugaauugguugacccacuuaaaauucaaauacccagcauugaacgugacuaugccaaacaaugaagaauuugacaaauuguacauuugggggguucaccacccggguacggacaaugaccaaaucagccuauaugcucaagcaucaggaaaaaucacagucucuaccaaaagaagccaacaaacuguaaucccgaauaucggaucuagacccaggguaagggauauccccagcagaauaagcaucuauuggacaauaguaaaaccgggagacauacuuuugauuaacagcacagggaaucuaauugcuccucgggguuacuucaaaauacgaagugggaaaagcucaauaaugagaucagaugcacccauuggcaaaugcaauucugaaugcaucacuccaaauggaagcauucccaaugacaaaccauuucaaaauguaaacaggaucacauauggggccugucccagauauguuaagcaaaacacucugaaauuggcaacagggaugcgaaauguaccagagaaacaaacuagaggcauauuuggcgcaaucgcggguuucauagaaaaugguugggagggaaugguggaugguugguacgguuucaggcaucaaaauucugagggaauaggacaagcagcagaucucaaaagcacucaagcagcaaucgaccaaaucaaugggaagcugaauagguugaucgggaaaaccaacgagaaauuccaucagauugaaaaagaauucucagaaguagaagggagaauccaggaccucgagaaauauguugaggacacuaaaauagaucucuggucauacaacgcggagcuucuuguugcccuggagaaccaacauacaauugaucuaacugacucagaaaugaacaaacuguuugaaagaacaaagaagcaacugagggaaaaugcugaggauaugggcaaugguuguuucaaaauauaccacaaaugugacaaugccugcauagggucaaucagaaauggaacuuaugaccaugauguauacagagaugaagcauuaaacaaccgguuccagaucaaagguguugagcugaagucaggauacaaagauuggauccuauggauuuccuuugccauaucauguuuuuugcuuuguguugcuuuguugggguucaucaugugggccugccaaaaaggcaacauuaggugcaacauuugcauuuga

SEQ ID NO: 38805 - RNA, 1701 nt, Artificial Sequence
  derived and/or modified CDS sequence (wt) from hemagglutinin__InfluenzaA__AEG65626
augaagacuaucauugcuuugagcuacauucuaugucugguuuucgcucaaaaacuucccggaaaugacaacagcacggcaacgcugugccuugggcaccaugcaguaccaaacggaacgauagugaaaacaaucacgaaugaccaaauugaaguuacuaaugcuacugagcugguucagaguuccucaacagguggaauaugcgacaguccucaucagauccuugauggagaaaacugcacacuaauagaugcucuauugggagacccucagugugauggcuuccaaaauaagaaaugggaccuuuuuguugaacgcagcaaagccuacagcaacuguuacccuuaugaugugccggauuaugccucccuuaggucacuaguugccucauccggcacacuggaguuuaacaaugaaagcuucaauuggacuggagucacucaaaauggaacaagcucugcuugcaaaaggaaaucuaauaacaguuucuuuaguagauugaauugguugacccacuuaaaauucaaauacccagcauugaacgugacuaugccaaacaauaaaaaauuugacaaauuguacauuugggggguucaccacccggguacggacaaugaccaaaucagccuauaugcucaagcaucaggaagaaucacagucucuaccaaaagaagccaacaaacuguaaucccgaauaucggaucuagacccaggguaagggauauccccagcagaauaagcaucuauuggacaauaguaaaaccgggagacaugcuuuugauuaacagcacagggaaucuaauugcuccucgggguuacuucaaaauacgaagugggaaaaguucaauaaugagaucagaugcacccauuggcaaaugcaauucugaaugcaucacuccaaauggaagcauucccaaugacaaaccauuucaaaauguaaacaggaucacauauggggccugucccagauauguuaagcaaaacacucugaaauuggcaacagggaugcgaaauguaccagagaaacaaacuagaggcauauuuggcgcaaucgcggguuucauagaaaaugguugggagggaaugguggaugguugguacgguuucaggcaucaaaauucugagggaacaggacaagcagcagaucucaaaagcacucaagcagcaaucaaccaaaucaaugggaagcugaauagguugaucgggaaaaccaacgagaaauuccaucagauugaaaaagaauucucagaaguagaagggagaauucaggaccucgagaaauauguugaggacacuaaaauagaucucuggucauacaacgcggagcuucuuguugcccuggagaaccaacauacaauugaucuaacugacucagaaaugaacaaacuguuugaaagaacaaagaagcaacugagggaaaaugcugaggauaugggcaaugguuguuucaaaauauaccacaaaugugacaaugccugcauagggucaaucagaaauggaacuuaugaccaugauguauacagagaugaagcauuaaacaaccgguuccagaucaaagguguugagcugaagucaggauacaaagauuggauccuauggauuuccuuugccauaucauguuuuuugcuuuguguugcuuuguugggguucaucaugugggccugccaaaaaggcaacauuaggugcaacauuugcauuuga

SEQ ID NO: 38806 - RNA, 1701 nt, Artificial Sequence
  derived and/or modified CDS sequence (wt) from hemagglutinin__InfluenzaA__AEG65637
augaagacuaucauugcuuugagcuacauucuaugucugguuuucgcucaaaaacuucccggaaaugacaacagcacggcaacgcugugccuugggcaccaugcaguaccaaacggaacgauagugaaaacaaucacgaaugaccaaauugaaguuacuaaugcuacugagcugguucagaguuccucaacagguggaauaugcgacaguccucaucagauccuugauggagaaaacugcacacuaauagaugcucuauugggagacccucagugugauggcuuccaaaauaagaaaugggaucuuuuuguugaacgcagcaaagccuacagcaacuguuacccuuaugaugugccggauuaugccucccuuaggucacuaguugccucauccggcacacuggaguuuaacaaugaaagcuucaauuggacuggagucacucaaaauggaacaagcucugcuugcaaaaggaaaucuaauaacaguuucuuuaguagauugaauugguugacccacuuaaaauucaaauacccagcauugaacgugacuaugccaaacaauaaaaaauuugacaaauuguacauuugggggguucaccacccggguacggacaaugaccaaaucagccuauaugcucaagcaucaggaagaaucacagucucuaccaaaagaagccaacaaacuguaaucccgaauaucggaucuagacccaggguaagggauauccccagcagaauaagcaucuauuggacaauaguaaaaccgggagacaugcuuuugauuaacagcacagggaaucuaauugcuccucgggguuacuucaaaauacgaagugggagaaguucaauaaugagaucagaugcacccauuggcaaaugcaauucugaaugcaucacuccaaauggaagcauucccaaugacaaaccauuucaaaauguaaacaggaucacauauggggccugucccagauauguuaagcaaaacacucugaaauuggcaacagggaugcgaaauguaccagagaaacaaacuagaggcauauuuggcgcaaucgcggguuucauagaaaaugguugggagggaaugguggaugguugguacgguuucaggcaucaaaauucugagggaacaggacaagcagcagaucucaaaagcacucaagcagcaaucaaccaaaucaaugggaagcugaauagguugaucgggaaaaccaacgagaaauuccaucagauugaaaaagaauucucagaaguagaagggagaauucaggaccucgagaaauauguugaggacacuaaaauagaucucuggucauacaacgcggagcuucuuguugcccuggagaaccaacauacaauugaucuaacugacucagaaaugaacaaacuguuugaaagaacaaagaagcaacugagggaaaaugcugaggauaugggcaaugguuguuucaaaauauaccacaaaugugacaaugccugcauagggucaaucagaaauggaacuuaugaccaugauguauacagagaugaagcauuaaacaaccgguuccagaucaaagguguugagcugaagucaggauacaaagauuggauccuauggauuuccuuugccauaucauguuuuuugcuuuguguugcuuuguugggguucaucaugugggccugccaaaaaggcaacauuaggugcaacauuugcauuuga

SEQ ID NO: 38807 - RNA, 1701 nt, Artificial Sequence
  derived and/or modified CDS sequence (wt) from hemagglutinin__InfluenzaA__AEG65648
augaagacuaucauugcuuugagcuacauucuaugucugguuuucgcucaaaaacuucccggaaaugacaacagcacggcaacgcugugccuugggcaccaugcaguaccaaacggaacgauagugaaaacaaucacgaaugaccaaauugaaguuacuaaugcuacugagcugguucagaguuccucaacagguggaauaugcgacaguccucaucagauccuugauggagaaaacugcacacuaauagaugcucuauugggagacccucagugugauggcuuccaaaauaagaaaugggaccuuuuuguugaacgcagcaaagccuacagcaacuguuacccuuaugaugugccggauuaugccucccuuaggucacuaguugccucauccggcacacuggaguuuaacaaugaaagcuucaauuggacuggagucacucagaauggaacaagcucugcuugcgaaaggagaucuaauaaaaguuucuuuaguagauugaauugguugacccacuuaaaauacaaauacccagcauugaacgugacuaugccaaacaaugaaaaauuugacaaauuguacauuugggggguucaccacccggguacggacagugaccaaaucagccuauaugcucaagcaucaggaagaaucacagucucuaccaaaagaagccaacaaacuguaaucccgaauaucggaucuagacccaggguaagggauguauccagccgaauaagcaucuauuggacaauaguaaaaccgggagacauacuuuugauuaacagcacagggaaucuaauugcuccucgggguuacuucaaaauacgaagugggaaaagcucaauaaugagaucagaugcacccauuggcaaaugcaauucugaaugcaucacuccaaauggaagcauucccaaugacaaaccauuucaaaauguaaacaggaucacauauggggccugucccagauauguuaagcaaaacacucugaaauuggcaacagggaugcgaaauguaccagagaaacaaacuagaggcauauuuggcgcaaucgcggguuucauagaaaaugguugggagggaaugguggacgguugguacgguuucaggcaucaaaauucugagggcacaggacaagcagcagaucucaaaagcacucaagcagcaaucaaccaaaucaaugggaaacugaauagguuaaucgggaaaacaaacgagaaauuccaucagauugaaaaagaauucucagaaguagaagggagaauucaggaccucgagaaauauguugaggacacuaaaauagaucucuggucauacaacgcggagcuucuuguugcccuggagaaccaacauacaauugaucuaacugacucagaaaugaacaaacuguuugaaagaacaaagaagcaacugagggaaaaugcugaggauaugggcaaugguuguuucaaaauauaccacaaaugugacaaugccugcauagggucaaucagaaauggaacuuaugaccaugauguguacagagaugaagccuuaaauaaccgguuccagaucaaagguguugagcugaagucaggauacaaagauuggauccuauggauuuccuuugccauaucauguuuuuugcuuuguguugcuuuguugggguucaucaugugggccugccaaaaaggcaacauuaggugcgacauuugcauuuga

SEQ ID NO: 38808 - RNA, 1701 nt, Artificial Sequence
  derived and/or modified CDS sequence (wt) from hemagglutinin__InfluenzaA__AEG65659
augaagacuaucauugcuuugagcuacauucuaugucugguuuucgcucaaaaacuucccggaaaugacaacagcacggcaacgcugugccuugggcaccaugcaguaccaaacggaacgauagugaaaacaaucacgaaugaccaaauugaaguuacuaaugcuacugagcugguucagaguuccucaacagguggaauaugcgacaguccucaucagauccuugauggagaaaacugcacacuaauagaugcucuauugggagacccucagugugauggcuuccaaaauaagaaaugggaccuuuuuguugaacgcagcaaagccuacagcaacuguuacccuuaugaugugccggauuaugccucccuuaggucacuaguugccucauccggcacacuggaguuuaacaaugaaagcuucaauuggacuggagucacucaaaauggaacaagcucugcuugcaaaaggagaucuaauaaaaguuucuuuaguagauugaauugguugacccacuuaaaauucaaauacccagcauugaacgugacuaugccaaacaaugaaaaauuugacaaauuguacauuugggggguucaccacccggguacggacaaugaccaaaucagccuauaugcucaagcaucaggaagaaucacagucucuaccaaaagaagccaacaaacuguaaucccgaauaucggaucuagacccaggguaagggauguccccagcagaauaagcaucuauuggacaauaguaaaaccgggagacauacuuuugauuaacagcacagggaaucuaauugcuccucgggguuacuucaaaauacgaagugggaaaagcucaauaaugagaucagaugcacccauuggcaaaugcaauucugaaugcauaacuccaaauggaagcauucccaaugacaaaccauuucaaaauguaaacaggaucacauauggggccugucccagauauguuaagcaaaacacccugaaauuggcaacagggaugcgaaauguaccagagaaacaaacuagaggcauauuuggcgcaaucgcggguuucauagaaaaugguugggagggaaugguggacgguugguacgguuucaggcaucaaaauucugagggaacaggacaagcagcagaucucaaaagcacucaagcagcaaucaaccaaaucaaugggaagcugaauagguugaucgggaaaacaaacgagaaauuccaucagauugaaaaagaauucucagaaguagaagggagaauucaggaccucgagaaauauguugaggacacuaaaauagaucucuggucauacaacgcggagcuucuuguugcccuggagaaccaacauacaauugaucuaacugacucagaaaugaacaaacuguuugaaagaacaaagaagcaacugagggaaaaugcugaggauaugggcaaugguuguuucaaaauauaccacaaaugugacaaugccugcauagggucaaucagaaauggaacuuaugaccaugauguauacagagaugaagcauuaaacaaccgguuccagaucaaagguguugagcugaagucaggauacaaagauuggauccuauggauuuccuuugccauaucauguuuuuugcuuuguguugcuuuguugggguucaucaugugggccugccaaaaaggcaacauuaggugcaacauuugcauuuga

SEQ ID NO: 38809 - RNA, 1701 nt, Artificial Sequence; identical to SEQ ID NO: 38773
  derived and/or modified CDS sequence (wt) from hemagglutinin__InfluenzaA__AEG65670

SEQ ID NO: 38810 - RNA, 1701 nt, Artificial Sequence; identical to SEQ ID NO: 38783
  derived and/or modified CDS sequence (wt) from hemagglutinin__InfluenzaA__AEG65681

SEQ ID NO: 38811 - RNA, 1701 nt, Artificial Sequence; identical to SEQ ID NO: 38782
  derived and/or modified CDS sequence (wt) from hemagglutinin__InfluenzaA__AEG65692

SEQ ID NO: 38812 - RNA, 1701 nt, Artificial Sequence
  derived and/or modified CDS sequence (wt) from hemagglutinin__InfluenzaA__AEG65703
augaagacuaucauugcuuugagcuacauucuaugucugguuuucgcucaaaaacuucccggaaaugacaacagcacggcaacgcugugccuugggcaccaugcaguaccaaacggaacgauagugaaaacaaucacgaaugaccaaauugaaguuacuaaugcuacugagcugguucagaguuccucaacagguggaauaugcgacaguccucaucagauccuugauggagaaaacugcacucuaauagaugcucuauugggagacccucagugugauggcuuccaaaauaagaaaugggaccuuuuuguugaacgcagcaaagccuacagcaacuguuacccuuaugaugugccggauuaugccucccuuaggucacuaguugccucauccggcacacuggaguuuaacaaugaaagcuucaauuggacuggagucacucaaaauggaacaagcucugcuugcaaaaggagaucuaauaacaguuucuuuaguagauugaauugguugacccacuuaaaauucaaauacccagcauugaacgugacuaugccaaacaaugaaaaauuugacaaauuguacauuugggggguucaccacccggguacggacaaugaccaaaucuuccuguaugcucaagcaucaggaagaaucacagucucuaccaaaagaagccaacaaacuguaaucccgaauaucggaucuagacccagaguaaggaauauccccagcagaauaagcaucuauuggacaauaguaaaaccgggagacauacuuuugauuaacagcacagggaaucuaauugcuccuagggguuacuucaaaauacgaagugggaaaagcucaauaaugagaucagaugcacccauuggcaaaugcaauucugaaugcaucacuccaaauggaagcauucccaaugacaaaccauuucaaaauguaaacaggaucacauauggggccugucccagauauguuaagcaaaacacucugaaauuggcaacagggaugcgaaauguaccagagaaacaaacuagaggcauauuuggcgcaaucgcggguuucauagaaaaugguugggagggaaugguggaugguugguacgguuucaggcaucaaaauucugagggaauaggacaagcagcagaucucaaaagcacucaagcagcaaucaaucaaaucaaugggaagcugaauagguugaucgggaaaaccaacgagaaauuccaucagauugaaaaggaauucucagaaguagaagggagaauucaggaccucgagaaauauguugaggacacuaaaauagaucucuggucauacaacgcggagcuucuuguugcccuggagaaccaacauacaauugaucuaacugacucagaaaugaacaaacuguuugaaagaacaaagaagcaacugagggaaaaugcugaggauaugggcaaugguuguuucaaaauauaccacaaaugugacaaugccugcauaggaucaaucagaaauggaacuuaugaccaugauguauacagagaugaagcauuaaacaaccgguuccagaucaaaggcguugagcugaagucaggauacaaagauuggauccuauggauuuccuuugccauaucauguuuuuugcuuuguguugcuuuguugggguucaucaugugggccugccaaaaaggcaacauuaggugcaacauuugcauuuga

SEQ ID NO: 38813 - RNA, 1701 nt, Artificial Sequence
  derived and/or modified CDS sequence (wt) from hemagglutinin__InfluenzaA__AEG65747
augaagacuaucauugcuuugagcuacauucuaugucugguuuucgcucaaaaacuucccggaaaugacaacagcacggcaacgcugugccuugggcaccauacaguaccaaacggaacgauagugaaaacaaucacgaaugaccaaauugaaguuacuaaugcuacugagcugguucagaguuccucaacaggugaaauaugcgacaguccucaucagauccuugauggagaaaacugcacacuaauagaugcucuauugggagauccucagugugauggcuuccaaaauaagaaaugggaccuuuuuguugaacgcagcaaagccuacagcaacuguuacccuuaugaugugccggauuaugccucccuuaggucacuaguugccucauccggcacacuggaguuuaacaaugaaagcuucaauuggacuggagucacucaaaauggaacaagcucugcuugcaaaaggagaucuaauaacaguuucuuuaguagauugaauugguugacccacuuaaaauucaaauacccagcauugaacgugacuaugccaaacaaugaaaaauuugacaaauuguacauuugggggguucaccacccggguacggacaaugaccaaaucuuccuguaugcucaagcaucaggaagaaucacagucucuaccaaaagaagccaacaaacuguaaucccgaauaucggaucuagacccagaguaaggaauauccccagcagaauaagcaucuauuggacaauaguaaaaccgggagacauacuuuugauuaacagcacagggaaucuaauugcuccuagggguuacuucaaaauacgaagugggaaaagcucaauaaugagaucagaugcacccauuggcaaaugcaauucugaaugcaucacuccaaauggaagcauucccaaugacaaaccauuucaaaauguaaacaggaucacauauggggccugucccagauauguuaagcaaaacacucugaaauuggcaacagggaugcgaaauguaccagagaaacaaacuagaggcauauuuggcgcaaucgcggguuucauagaaaaugguugggagggaaugguggaugguugguacgguuucaggcaucaaaauucugagggaacaggacaagcagcagaucucaaaagcacucaagcagcaaucaaucaaaucaaugggaagcugaauagguugaucgggaaaaccaacgagaaauuccaucagauugaaaaagaauucucagaaguagaagggagaauucaggaccucgagaaauauguugaggacacuaaaauagaucucuggucauacaacgcggagcuucuuguugcccuggagaaccaacauacaauugaucuaacugacucagaaaugaacaaacuguuugaaagaacaaagaagcaacugagggaaaaugcugaggauaugggcaaugguuguuucaaaauauaccacaaaugugacaaugccugcauaggaucaaucagaaauggaacuuaugaccaugauguguacagagaugaagcauuaaacaaccgguuccagaucaaaggcguugagcugaagucaggauacaaagauuggauccuauggauuuccuuugccauaucauguuuuuugcuuuguguugcuuuguugggguucaucaugugggccugccaaaaaggcaacauuaggugcaacauuugcauuuga

SEQ ID NO: 38814 - RNA, 1701 nt, Artificial Sequence
  derived and/or modified CDS sequence (wt) from hemagglutinin__InfluenzaA__AEG65758
augaagacuaucauugcuuugagcuacauucuaugucugguuuccgcucaaaaacuucccggaaaugacaacagcacggcaacgcugugccuugggcaccaugcaguaccaaacggaacgauagugaaaacaaucacgaaugaccaaauugaaguuacuaaugcuacugagcugguucagaguuccucaacagguggaauaugcgacaguccucaucagauccuugauggagaaaacugcacacuaauagaugcucuauugggagacccucagugugauggcuuccaaaauaagaaaugggaccuuuuuguugaacgcagcaaagccuacagcaacuguuacccuuaugaugugccggauuaugccucccuuaggucacuaguugccucauccggcacacuggaguuuaacaaugaaagcuucaauuggacuggagucacucaaaauggaacaagcucugcuugcaaaaggagaucuaauaacaguuucuuuaguagauugaauugguugacccacuuaaaauucaaauacccagcauugaacgugacuaugccaaacaaugaaaaauuugacaaauuguacauuugggggguucaccacccggguacggacaaugaccaaaucuuccuguaugcucaagcaucaggaagaaucacagucucuaccaaaagaagccaacaaacuguaaucccgaauaucggaucuagacccagaguaaggaauauccccagcagaauaagcaucuauuggacaauaguaaaaccgggagacauacuuuugauuaacagcacagggaaucuaauugcuccuagggguuacuucaaaauacgaagugggaaaagcucaauaaugagaucagaugcacccauuggcaaaugcaauucugaaugcaucacuccaaauggaagcauucccaaugacaaaccauuucaaaauguaaacaggaucacauauggggccugucccagauauguuaagcaaaacacucugaaauuggcaacagggaugcgaaauguaccagagaaacaaacuagaggcauauuuggcgcaaucgcggguuucauagaaaaugguugggagggaaugguggaugguugguacgguuucaggcaucaaaauucugagggaauaggacaagcagcagaucucaaaagcacucaagcagcaaucaaucaaaucaaugggaagcugaauagguugaucgggaaaaccaacgagaaauuccaucagauugaaaaagaauucucagaaguagaagggagaauucaggaccucgagaaauauguugaggacacuaaaauagaucucuggucauacaacgcggagcuucuuguugcccuggagaaccaacauacaauugaucuaacugacucagaaaugaacaaacuguuugaaagaacaaagaagcaacugagggaaaaugcugaggauaugggcaaugguuguuucaaaauauaccacaaaugugacaaugccugcauaggaucaaucagaaauggaacuuaugaccaugauguauacagagaugaagcauuaaacaaccgguuccagaucaaaggcguugagcugaagucaggauacaaagauuggauccuauggauuuccuuugccauaucauguuuuuugcuuuguguugcuuuguugggguucaucaugugggccugccaaaaaggcaacauuaggugcaacauuugcauuuga

SEQ ID NO: 38815 - RNA, 1701 nt, Artificial Sequence
  derived and/or modified CDS sequence (wt) from hemagglutinin__InfluenzaA__AEG65769
augaagacuaucauugcuuugagcuacauucuaugucugguuuuugcucaaaaacuucccggaaaugacaacagcacggcaacgcugugccuugggcaccaugcaguaccaaacggaacgauagugaaaacaaucacgaaugaccaaauugaagucacuaaugcuacugagcugguucagaguuccucaacagguggaauaugcgacaguccucaucagauccuugauggagaaaacugcacacuaauagaugcucuauugggagacccucagugugauggcuuccaaaauaagaaaugggaccuuuuuguugaacgcagcaaagccuacagcaacuguuacccuuaugacgugccggauuaugccucccuuagaucacuaguugccucauccggcacacuggaguuuaacaaugaaagcuucaauuggacuggagucacucaaaauggaacaagcucugcuugcaaaaggagaucuaauaacaguuucuuuaguagauugaauugguugacccacuuaaaauucaaauacccagcauugaacgugacuaugccaaacaaugaaaaauuugacaaacuguacauuugggggguucaccacccggguacggacaaugaccaaaucagccuauaugcucaagcaucaggaagaaucacagucucuaccaaaagaagccaacaaacuguaaucccgaguaucggaucuagacccaggauaagggauguccccagcagaauaagcaucuauuggacaauaguaaaaccgggagacauacuuuugauuaacagcacagggaaucuaauugcuccucgggguuacuucaaaauacgaagugggaaaagcucaauaaugagaucagaugcacccauuggcaaaugcaauucugaaugcaucacuccaaauggaagcauucccaaugacaaaccauuucaaaauguaaacaggaucacauauggggccugucccagauauguuaagcaaaacacucugaaauuggcaacagggaugcgaaauguaccagagaaacaaacuagaggcauauuuggcgcaaucgcggguuucauagaaaaugguugggagggaaugguggacgguugguacgguuucaggcaucaaaauucugagggaacaggacaagcagcagaucucaaaagcacucaagcagcaaucaaccaaaucaaugggaagcugaauagguugaucgggaaaacaaacgagaaauuccaucagauugaaaaagaauucucagaaguagaagggagaauucaggaccucgagaaauauguugaggacacuaaaauagaucucuggucauacaacgcggagcuucuuguggcccuggagaaccaacauacaauugaucuaacugacucagaaaugaacaaacuguuugaaagaacaaagaagcaacugagggaaaaugcugaggauaugggcaaugguuguuucaaaauauaccacaaaugugacaaugccugcauagggucaaucagaaauggaacuuaugaccaugauguauacagagaugaagcauuaaacaaccgguuccagaucaaagguguugaguugaagucaggauacaaagauuggauccuauggauuuccuuugccauaucauguuuuuugcuuuguguugcuuuguugggguucaucaugugggccugccaaaaaggcaacauuagaugcaacauuugcauuuga

SEQ ID NO: 38816 - RNA, 1701 nt, Artificial Sequence
  derived and/or modified CDS sequence (wt) from hemagglutinin__InfluenzaA__AEG65780
augaagacuaucauugcuuugagcuacauucuaugucugguuuucgcccaaaaacuuccuggaaaugacaacagcacggcaacgcugugccuugggcaccaugcagugccaaacggaacgauagugaaaacaaucacgaaugacaaaauugaaguuacuaaugcuacugagcugguucagaguuccucaacaggugaaauaugcaacaguccucaucagauccuugauggagaaaacugcacacuaauagaugcucuauugggagacccucagugugauggcuuccaaaacaagaaaugggaccuuuuuguugaacgaagcaaagcccacagcaacuguuacccuuaugaugugccggauuaugccucccuuaggucacuaguugccgcauccggcacacuggaguuuaacaaugaaagcuucaauuggacuggagucacucaaaacggaacaagcucugcuugcauaaggagaucuaauaauaguuucuuuaguagauugaauugguugacccacuuaaacuucaaauacccagcauugaacgugacuaugccaaacaaugaacaauuugacaaauuguacauuugggggguucaccacccggguacggacaaggaccaaaucuuccuguaugcucaagcagcaggaagaaucacaguaucuaccaaaagaagccaacaagcuguaauuccgaauaucggaucuagacccagaguaaggaauaucccuagcagaguaagcaucuauuggacaauaguaaaaccgggagacauacuuuugauuaacagcacagggaaucuaauugcuccuagggguuacuucaaaauacgaagugggaaaagcucaauaaugagaucagaugcacccauuggcaaaugcaauucugcaugcaucacuccaaauggaagcauucccaaugacaaaccauuccaaaauguaaacaggaucacauacggggccugucccagauauguuaagcaaaacacucugaaauuggcaacaggaaugagaaauguaccagagaaacaaacuagaggcauauuuggcgcaauagcugguuucauagaaaaugguugggagggaaugguggaugguugguacgguuucaggcaucaaaauucugagggaaggggacaagcagcagaucucaaaagcacucaagcagcaaucgaucaaaucaaugggaagcugaauagauugaucgggaaaaccaacgagaaauuccaucagauugaaaaagaauucucagaagucgaagggagaauucaggaccuugagaaauauguugaggacacuaaaauagaucucuggucauacaacgcggagcuucuuguugcccuggagaaccaacacacaauugaucuaacugacucagaaaugaacaaauuguuugaaaaaacaaagaagcaacugagggaaaaugcugaggauaugggcaaugguuguuucaaaauauaccacaaaugugacaaugccugcauaggaucaaucagaaauggaacuuaugaccacgauguguacagagaugaagcauuaaacaaccgauuccagaucaagggaguugagcugaagucaggguacaaagauuggauccuauggauuuccuuugccauaucauguuuuuugcuuuguguugcuuuguugggguucaucaugugggccugccaaaaaggcaacauuaggugcaacauuugcauuuga

SEQ ID NO: 38817 - RNA, 1701 nt, Artificial Sequence
  derived and/or modified CDS sequence (wt) from hemagglutinin__InfluenzaA__AEG65813
augaagacuaucauugcuuugagcuacauucuaugucugguuuucgcucaaaaacuuccuggaaaugacaacagcacggcaacgcugugccuugggcaccaugcagugccaaacggaacgauagugaaaacaaucacgaaugaccaaauugaaguuacuaaugcuacugagcugguucagaguuccucaacaggugaaauaugcaacaguccucaucagauccuugauggagaaaacugcacacuaauagaugcucuauugggagacccucagugugauggcuuccaaaacaagaaaugggaccuuuuuguugaacgaagcaaagcccacagcaacuguuacccuuaugaugugccggauuaugccucccuuaggucacuaguugccucauccggcacacuggaguuuaacaaugaaagcuucaauuggacuggagucacucaaaacggaacaagcucugcuugcauaaggagaucuaauaauaguuucuuuaguagauugaauugguugacccacuuaaacuucaaauacccagcauugaacgugacuaugccaaacaaugaacaauuugacaaauuguacauuugggggguucaccacccggguacggacaaggaccaaaucuuccuguaugcucaagcagcaggaagaaucacaguaucuaccaaaagaagccaacaagcuguaauuccgaauaucggaucuagacccagaguaaggaauaucccuagcagaguaagcaucuauuggacaauaguaaaaccgggagacauacuuuugauuaacagcacagggaaucuaauugcuccuagggguuacuucaaaauacgaagugggaaaagcucaauaaugagaucagaugcacccauuggcaaaugcaauucugcaugcaucacuccaaauggaagcauucccaaugacaaaccauuccaaaauguaaacaggaucacauacggggccugucccagauauguuaagcaaaacacucugaaauuggcaacaggaaugagaaauguaccagagaaacaaacuagaggcauauuuggcgcaauagcugguuucauagaaaaugguugggagggaaugguggaugguugguacgguuucaggcaucaaaauucugagggaaggggacaagcagcagaucucaaaagcacucaagcagcaaucgaucaaaucaaugggaaacugaauagauugaucgggaaaaccaacgagaaauuccaucagauugaaaaagaauucucagaagucgaagggagaauucaggaccuugagaaauauguugaggacacuaaaacagaucucuggucauacaacgcggagcuucuuguugcccuggagaaccaacacacaauugaucuaacugacucagaaaugaacaaauuguuugaaaaaacaaagaagcaacugagggaaaaugcugaggauaugggcaaugguuguuucaaaauauaccacaaaugugacaaugccugcauaggaucaaucagaaauggaacuuaugaccacgauguauacagagaugaagcauuaaacaaccgauuccagaucaagggaguugagcugaagucaggguacaaagauuggauccuauggauuuccuuugccauaucauguuuuuugcuuuguguugcuuuguugggguucaucaugugggccugccaaaaaggcaacauuaggugcaacauuugcauuuga

SEQ ID NO: 38818 - RNA, 1701 nt, Artificial Sequence
  derived and/or modified CDS sequence (wt) from hemagglutinin__InfluenzaA__AEG79801
augaaggcaauacuaguaguuuugcuauauacauuugcaaccgcaaaugcagacacauuauguauagguuaucaugcgaacaauucaacagacacuguagacacaguacuagaaaagaauguaacaguaacacacucuguuaaccuucuagaagacaagcauaacgggaaacuaugcaaacuaagagggguagccccauugcauuuggguaaauguaacauugcuggcuggauccugggaaauccagagugugaaucacucuccacagcaagcucaugguccuacauuguggaaacaucuaguucagacaauggaacguguuacccaggagauuucaucaauuaugaggagcuaagagagcaauugagcucagugucaucauuugaaagguuugagauauuccccaagacaaguucauggcccaaucaugacucgaacaaagguguaacggcagcauguccucaugcuggagcaaaaagcuucuacaaaaauuuaauauggcuaguuaaaaaaggaaauucauacccaaagcucagcaaauccuacauuaaugauaaagggaaagaaguccucgugcuauggggcauucaccauccaucuacuacugcugaccaacaaagucucuaucagaaugcagaugcauauguuuuuguggggacaucaagauacagcaagaaguucaagccggaaauagcaauaagacccaaagugagggaucgagaagggagaaugaacuauuacuggacacuaguagagccgggagacaaaauaacauucgaagcaacuggaaaucuagugguaccgagauaugcauucgcaauggaaagaaaugcuggaucugguauuaucauuucagauacaccaguccaugauugcaauacaacuugucagacacccaagggugcuauaaacaccagccucccauuucagaauauacauccgaucacaauuggaaaauguccaaaauauguaaaaagcacaaaauugagacuggccacaggauugaggaaugucccgucuauucaaucuagaggccuauuuggggccauugccggcuucauugaagggggguggacagggaugguagauggaugguacgguuaucaccaucaaaaugagcaggggucaggauaugcagccgaccugaagagcacacagaaugccauugacaagauuacuaacaaaguaaauucuguuauugaaaagaugaauacacaguucacagcaguagguaaagaguucaaccaccuggaaaaaagaauagagaauuuaaauaaaaaaguugaugaugguuuccuggacauuuggacuuacaaugccgaacuguugguucuauuggaaaaugaaagaacuuuggacuaccacgauucaaaugugaagaacuuauaugaaaagguaagaaaccaguuaaaaaacaaugccaaggaaauuggaaacggcugcuuugaauuuuaccacaaaugcgauaacacgugcauggaaagugucaaaaaugggacuuaugacuacccaaaauacucagaggaagcaaaauuaaacagagaagaaauagaugggguaaagcuggaaucaacaaggauuuaccagauuuuggcgaucuauucaacugucgccaguucauugguacugguagucucccugggggcaaucagcuucuggaugugcucuaaugggucucuacaguguagaauauguaucuaa

SEQ ID NO: 38819 - RNA, 1701 nt, Artificial Sequence
  derived and/or modified CDS sequence (wt) from hemagglutinin__InfluenzaA__AEG79807
augaaggcaauacuaguaguucuacuauauacauuugcaaccgcaaaugcagacacauuauguauagguuaucaugcgaacaauucaacagacacuguagacacaguacuagaaaagaauguaacaguaacacacucuguuaaccuucuagaagacaagcauaacgggaaacuaugcaaacuaagagggguagccccauugcauuuggguaaauguaacauugcuggcuggauccugggaaauccagagugugaaucacucuccacagcaagcucaugguccuacauuguggaaacaucuaguucagacaauggaacguguuacccaggagauuucaucaauuaugaggagcuaagagagcaauugagcucagugucaucauuugaaagguuugagauauuccccaagacaaguucauggcccaaucaugacucgaacaaagguguaacggcagcauguccucaugcuggagcaaaaagcuucuacaaaaauuuaauauggcuaguuaaaaaagaaaauucauacccaaagcucagcaaauccuacauuaaugauaaagggaaagaaguccucgugcuauggggcauucaccauccaucuacuacugcugaccaacaaaguaucuaucagaaugcagaugcauauguuuuuguggggacaucaagauacagcaagaaguucaagccggaaauagcaauaagacccaaagugagggaucaagaagggagaaugaacuauuacuggacacuaguagagccgggagacaaaauaacauuugaagcaacuggaaaucuagugguaccgagauaugcauucgcaauggaaagaaaugcuggaucugguauuaucauuucagauacaccaguccacgauugcaauacaacuugucagacacccaagggugcuauaaacaccagccucccauuucagaauauacauccgaucacaauuggaaaauguccaaaauauguaaaaagcacaaaauugagacuggccacaggacugaggaaugucccgucuauucaaucuagaggccuauuuggggccauugccggcuucauugaagggggguggacagggaugguagauggaugguacgguuaucaccaucaaaaugagcaggggucaggauaugcagccgaccugaagagcacacagaaugccauugacaagauuacuaacaaaguaaauucuguuauugaaaagaugaauacacaguucacagcaguagguaaagaguucaaccaccuggaaaaaagaauagagaauuuaaauaaaaaaguugaugaugguuuccuggacauuuggacuuacaaugccgaacuguugguucuacuggaaaaugaaagaacuuuggacuaccacgauucaaaugugaagaacuuauaugaaaagguaagaaaccaguuaaaaaacaaugccaaggaaauuggaaacggcugcuuugaauuuuaccacaaaugcgauaacacgugcauggaaagugucaaaaaugggacuuaugacuacccaaaauacucagaggaagcaaaauuaaacagagaagaaauagaugggguaaagcuggaaucaacaaggauuuaccagauuuuggcgaucuauucaacugucgccaguucauugguacugguagucucccugggggcaaucagcuucuggaugugcucuaaugggucucuacaguguagaauauguauuuaa

SEQ ID NO: 38820 - RNA, 1701 nt, Artificial Sequence
  derived and/or modified CDS sequence (wt) from hemagglutinin__InfluenzaA__AEG79835
augaaggcaauacuaguaguucugcuauauacauuugcaaccgcaaaugcagacacauuauguauagguuaccaugcgaacaauucaacagacacuguagacacaguacuagaaaagaauguaacaguaacacacucuguuaaucuucuagaagacaagcauaacgggaaacuaugcaaacuaagagggguagccccauugcauuuggguaaauguaacauugcuggcuggauccugggaaauccagagugugaaucacucuccacagcaagcucaugguccuacauuguggaaacaucuaguucagacaauggaacguguuacccaggagauuucaucgauuaugaggagcuaagagagcaauugagcucagugucaucauuugaaagguuugaaauauuccccaagacaaguucauggcccaaucaugacucgaacaaagguguaacggcagcauguccucaugcuggagcaaaaggcuucuacaaaaauuuaauauggcuaguuaaaaaaggaaauucauacccaaagcucagcaaauccuacauuaaugauaaagggaaagaaguccucgugcuauggggcauucaccauccaucuacuacugcugaccaacaaaguaucuaucagaaugcagauacauauguuuuuguggggacaucaagauacagcaagaaguucaagccggaaauagcaauaagacccaaagugagggaucaagaagggagaaugaacuauuacuggacacuaguagagccgggagacaaaauaacauucgaagcaacuggaaaucuagugguaccgagauaugcauucgcaauggaaagaaaugcuggaucugguauuaucauuucagauacaccaguccacgauugcaauacaacuugucagacacccaagggugcuauaaacaccagccucccauuucagaauauacauccgaucacaauuggaaaauguccaaaauauguaaaaagcacaaaauugagacuggccacaggauugaggaaugucccgucuauucaaucuagaggccuauuuggggccauugccggcuucauugaagggggguggacagggaugguagauggaugguacgguuaucaccaucaaaacgagcaggggucaggauaugcagccgaccugaagagcacacagaaugccauugacaagauuacuaacaaaguaaauucuguuauugaaaagaugaauacacaguucacagcaguagguaaagaguucaaccaccuggaaaaaagaauagagaauuuaaauaaaaaaguugaugaugguuuucuggacauuuggacuuacaaugccgaacuguugguucuauuggaaaaugaaagaacuuuggacuaccacgauucaaaugugaagaacuuauaugaaaagguaagaaaccaguuaaaaaacaaugccaaggaaauuggaaauggcugcuuugaauuuuaccacaaaugcgauaacacgugcauggaaagugucaaaaaugggacuuaugacuacccaaaauacucagaggaagcaaaauuaaacagagaagaaauagaugggguaaagcuggaaucaacaaggauuuaccagauuuuggcgaucuauucaacugucgccaguucauugguacugguagucucccugggggcaaucaguuuuuggaugugcucuaaugggucucuacaguguagaauauguauuuaa

SEQ ID NO: 38821 - RNA, 1701 nt, Artificial Sequence
  derived and/or modified CDS sequence (wt) from hemagglutinin__InfluenzaA__AEH59363
augaaggcaauacuaguaguucugcuauauacauuugcaaccgcaaaugcagacacauuauguauagguuaucaugcgaacaauucaacagacacuguagacacaguacuagaaaagaauguaacaguaacacacucuguuaaccuucuagaagacaagcauaacgggaaacuaugcaaacugagagggguagccccauugcauuuggguaaauguaacauugcuggcuggauccugggaaauccagagugugaaucacucuccacagcaagcucaugguccuacaucguggaaacaucuaguucagacaauggaacgugcuacccaggagauuucaucaauuaugaggagcuaagagagcaauugagcucagugucaucauuugaaagguuugagauauuccccaagacaaguucauggcccaaucaugacucgaacaaagguguaacggcagcauguccucaagcuggagcaaaaagcuucuacaaaaauuuaauauggcuaguuaaaaaaggaaauucauacccaaagcucagcaaauccuacauuaacgauaaagggaaagaaguccucgugcuauggggcauucaccauccaucuacuagugcugaccaacaaagucucuaucagaaugcagaugcauauguuuuuguggggacaucaaaauacagcaagaaguucaagccggaaauagcaguaagacccaaagugagggaucaagaagggagaaugaacuauuacuggacacuaguagagccgggagacaaaauaacauucgaagcaacuggaaaucuauugguaccgagauaugcauucgcaauggaaagaaaugcuggaucugguauuaucauuucagauacaccaguccacgauugcaauacaacuugucagacacccaagggugcuauaaacaccagccucccauuucagaauauacauccgaucacaauuggaaaaugucccaaauauguaaaaagcacaaaauugagacuggccacaggauugaggaaugucccgucuauucaaucuagaggccuauuuggggccauugccgguuucauugaagggggguggacagggaugguagauggaugguacgguuaucaccaucaaaaugcgcaggggucaggauaugcagccgaccugaagagcacacagaaugccauugacaagauuacuaacaaaguaaauucuguuauugaaaagaugaauacacaguucacagcaguagguaaagaguucaaccaccuggaaaaaagaauagagaauuuaaauaaaaaaguugaugaugguuuccuggacauuuggacuuacaaugccgaacuguugguucuauuggaaaaugaaagaacuuuggacuaccacgauucaaaugugaaaaacuuauaugaaaagguaagaagccaguuaaaaaacaaugccaaggaaauuggaaacggcugcuuugaauuuuaccacaaaugcgacaacacgugcauggaaagugucaaaaaugggacuuaugacuacccaaaauacucagaggaagcaaaauuaaacagagaagaaauagaugggguaaagcuggaaucaacaaggauuuaccagauuuuggcgaucuauucaacugucgccaguucauugguacugguagucucccugggggcaaucaguuucuggaugugcucuaaugggucucuacaguguagaauauguauuuaa

SEQ ID NO: 38822 - RNA, 1701 nt, Artificial Sequence
  derived and/or modified CDS sequence (wt) from hemagglutinin__InfluenzaA__AEH59367
augaaggcaauacuaguaguucugcuauauacauuugcaaccgcaaaugcagacacauuauguauagguuaucaugcgaacaauucaacagacacuguagacacaguacuagaaaagaauguaacaguaacacacucuguuaaccuucuagaagacaagcauaacgggaaacuaugcaaacuaagagggguagccccauugcauuuggguaaauguaacauugcuggcuggauccugggaaauccagagugugaaucacucuccacagcaagcucaugguccuacauuguggaaacaucuaguucagacaauggaacguguuacccaggagauuucaucaauuaugaggagcuaagagagcaauugagcucagugucaucauuugaaagguuugagauauuccccaagacaaguucauggcccaaucaugacucgaacaaagguguaacggcagcauguccucaugcuggagcaaaaagcuucuacaaaaauuuaauauggcuaguuaaaaaaggaaauucauaccccaagcucagcaaauccuacauuaaugauaaagggaaagaaguccucgugcuguggggcauucaccauccaucuacuacugcugaccaacaaagucucuaucagaaugcagaugcauauguuuuuguggggacaucaagauacagcaagaaguucaagccggaaauagcaauaagacccaaagugagggaucaagaagggagaaugaacuauuacugggcacuaguagagccgggagacaaaauaacauucgaagcaacuggaaaucuagugguaccgagauaugcauucgcaauggaaagaaaugcuggaucugguauuaucauuucagauacaccaguccacgauugcaauacaacuugucagacacccaagggugcuauaaacaccagccucccauuucagaauauacauccgaucacaauuggaaaauguccaaaauauguaaaaagcacaaaauugagacuggccacaggauugaggaaugucccgucuauucaaucuagaggccuauuuggggccauugccggcuucauugaagggggguggacagggaugguagauggaugguacgguuaucaccaucaaaaugagcaggggucaggauaugcagccgaccugaagagcacacaaaaugccauugacaagauuacuaacaaaguaaauucuguuauugaaaagaugaauacacaguucacagcaguagguaaagaguucaaccaccuggaaaaaagaauagagaauuuaaauaaaaaaguugaugaugguuuccuggacauuuggacuuacaaugccgaacuguugguucuauuggaaaaugaaagaacuuuggacuaccacgauucaaaugugaagaacuuguaugaaaagguaagaaaccaguuaaaaaacaaugccaaggaaauuggaaacggcugcuuugaauuuuaccacaaaugcgauaacacgugcauggaaagugucaaaaaugggacuuaugacuacccaaaauacucagaggaagcaaaauuaaacagagaagaaauagaugggguaaagcuggaaucaacaaggauuuaccagauuuuggcgaucuauucaacugucgccaguucauugguacugguagucucccugggggcaaucaguuucuggaugugcucuaaugggucucuacaguguagaauauguauuuaa

SEQ ID NO: 38823 - RNA, 1701 nt, Artificial Sequence
  derived and/or modified CDS sequence (wt) from hemagglutinin__InfluenzaA__AEH59369
augaaggcaauacuaguaguucugcuauauacauuugcaaccgcaaaugcagacacauuauguauagguuaccaugcgaacaauucaacagacacuguagacacaguacuagaaaagaauguaacaguaacacacucugucaaucuucuagaagacaagcauaacgggaaacuaugcaaacuaagagggguagccccauugcauuuggguaaauguaacauugcuggcuggauccugggaaauccagagugugaaucacucuccacagcaagcucaugguccuacauuguggaaacaucuaguucagacaauggaacguguuacccaggagauuucauugauuaugaggagcuaagagagcaauugagcucagugucaucauuugaaagauuugagauauuccccaaggcaaguucauggcccaaucaugacucgaacaaagguguaacggcagcauguccucaugcuggagcaaaaggcuucuacaaaaauuuaauauggcuaguuaaaaaaggaaauucauacccaaagcucagcaaauccuacauuaaugauaaagggaaagaaguccucgugcuauggggcauucaccauccaucuacuacugcugaccaacaaagucucuaucagaaugcagauacauauguuuuuguggggacaucaagauacagcaagaaguucaagccggaaauagcaauaagacccaaagugagggaucaagaagggagaaugaacuauuacuggacacuaguagagccgggagacaaaauaacauucgaagcaacuggaaaucuagugguaccgagauaugcauucgcaauggaaagaaaugcuggaucugguauuaucauuucagauacaccaguccacgauugcaauacaacuugucagacacccaagggugcuauaaacaccagccucccauuucagaauauacauccgaucacaauuggaaaauguccaaaauauguaaaaagcacaaaauugagacuggccacaggauugaggaaugucccgucuauucaaucuagaggccuauuuggggccauugccggcuucauugaagggggguggacagggaugguagauggaugguacgguuaucaccaucaaaaugagcaggggucaggauaugcagccgaccugaagagcacacagaaugccauugacaagauuacuaacaaaguaaauucuguuauugaaaagaugaauacacaguucacagcaguagguaaagaguucaaccaccuggaaaaaagaauagagaauuuaaauaaaaaaguugaugaugguuuccuggacauuuggacuuacaaugccgaacuguugguucuauuggaaaaugaaagaacuuuggacuaccacgauucaaaugugaagaacuuauaugaaaagguaagaaaccaguuaaaaaacaaugccaaggaaauuggaaauggcugcuuugaauuuuaccacaaaugcgauaacacgugcauggaaagugucaaaaaugggacuuaugacuacccaaaauacucagaggaagcaaaauuaaacagagaagaaauagaugggguaaagcuggaaucaacaaggauuuaccagauuuuggcgaucuauucaacugucgccaguucauugguacugguagucucccugggggcaaucaguuuuuggaugugcucuaaugggucucuacaguguagaauauguauuuaa

SEQ ID NO: 38824 - RNA, 1701 nt, Artificial Sequence; identical to SEQ ID NO: 38821
  derived and/or modified CDS sequence (wt) from hemagglutinin__InfluenzaA__AEH59371

SEQ ID NO: 38825 - RNA, 1701 nt, Artificial Sequence
  derived and/or modified CDS sequence (wt) from hemagglutinin__InfluenzaA__AEH59373
augaaggcaauacuaguaguucugcuauauacauuugcaaccgcaaaugcagacacauuauguauagguuaucaugcgaacaauucaacagacacuguagacacaguacuagaaaagaauguaacaguaacacacucuguuaaucuucuagaagacaagcauaacgggaaacuaugcaaacuaagagagguagccccauugcauuuggguaaauguaacauugcuggcuggauccugggaaauccagagugugaaucacucuccacagcaagcucaugguccuacauuguggaaacaucuaguucagacaauggaacguguuacccaggagauuucaucgauuaugaggagcuaagagagcaauugagcucagugucaucauuugaaagguuugagauauuccccaagacaaguucauggcccaaucaugacucgaacaaagguguaacggcagcauguccucaugcuggagcaaaaggcuucuacaaaaauuuaauauggcuaguuaaaaaaggaaauucauacccaaagcucagcaaauccuacauuaaugauaaagggaaagaaguccucgugcuauggggcauucaccauccaucuacuacugcugaccaacaaagucucuaucagaaugcagauacauauguuuuuguggggacaucaagauacagcaagaaguucaagccggaaauagcaauaagacccaaagugagggaucaagaagggagaaugaacuauuacuggacacuaguagagccgggagacaaaauaacauucgaagcaacuggaaaucuagugguaccgagauaugcauucgcaauggaaagaaaugcuggaucugguauuaucauuucagauacaccaguccaugauugcaauacaacuugucagacacccaagggugcuauaaacaccagccucccauuucagaauauacauccgaucacaauuggaaaauguccaaaauauguaaaaagcacaaaauugagacuggccacaggauugaggaaugucccgucuauucaaucuagaggccuauuuggggccauugccggcuucauugaagggggguggacagggaugguagauggaugguacgguuaucgccaucaaaaugagcaggggucaggauaugcagccgaccugaagagcacacagaaugccauugacaagauuacuaacaaaguaaauucuguuauugaaaagaugaauacacaguucacagcaguagguaaagaguucaaccaccuggaaagaagaauagagaauuuaaauaaaaaaguugaugaugguuuccuggacauuuggacuuacaaugccgaacuguugguucuauuggaaaaugaaagaacuuuggacuaccacgauucaaaugugaagaacuuauaugaaaagguaagaaaccaguuaaaaaacaaugccaaggaaauuggaaauggcugcuuugaauuuuaccacaaaugcgauaacacgugcauggaaagugucaaaaaugggacuuaugacuacccaaaauacucagaggaagcaaaauuaaacagagaagaaauagaugggguaaagcuggaaucaacaaggauuuaccagauuuuggcgaucuauucaacugucgccaguucauugguacugguagucucccugggggcaaucaguuuuuggaugugcucuaaugggucucuacaguguagaauauguauuuaa

SEQ ID NO: 38826 - RNA, 1701 nt, Artificial Sequence
  derived and/or modified CDS sequence (wt) from hemagglutinin__InfluenzaA__AEH59375
augaaggcaauacuaguaguucugcuauauacauuugcaaccgcaaaugcagacacauuauguauagguuaucaugcgaacaauucaacagacacuguagacacaguacuagaaaagaauguaacaguaacacacucuguuaaccuucuagaagacaagcauaacgggaaacuaugcaaacugagagggguagccccauugcauuuggguaaauguaacauugcuggcuggauccugggaaauccagagugugaaucacucuccacagcaagcucaugguccuacaucguggaaacaucuaguucagacaauggaacgugcuacccaggagauuucaucaauuaugaggagcuaagagagcaauugagcucagugucaucauuugaaagguuugagauauuccccaagacaaguucauggcccaaucaugacucgaacaaagguguaacggcagcauguccucaagcuggagcaaaaagcuucuacaaaaauuuaauauggcuaguuaaaaaaggaaauucauacccaaagcucagcaaauccuacauuaacgauaaagggaaagaaguccucgugcuauggggcauucaccauccaucuacuagugcugaccaacaaagucucuaucagaaugcagaugcauauguuuuuguggggacaucaaaauacagcaagaaguucaagccggaaauagcaguaagacccaaagugagggaucaagaagggagaaugaacuauuacuggacacuaguagagccgggagacaaaauaacauucgaagcaacuggaaaucuauugguaccgagauaugcauucgcaauggaaagaaaugcuggaucugguauuaucauuucagauacaccaguccacgauugcaauacaacuugucagacacccaagggugcuauaaacaccagccucccauuucagaauauacauccgaucacaauuggaaaaugucccaaauauguaaaaagcacaaaauugagacuggccacaggauugaggaaugucccgucuauucaaucuagaggccuauuuggggccauugccgguuucauugaagggggguggacagggaugguagauggaugguacgguuaucaccaucaaaaugcgcaggggucaggauaugcagccgaccugaagagcacacagaaugccauugacaagauuacuaacaaaguaaauucuguuauugaaaagaugaauacacaguucacagcaguagguaaagaguucaaccaccuggaaaaaagaauagaaaauuuaaauaaaaaaguugaugaugguuuccuggacauuuggacuuacaaugccgaacuguugguucuauuggaaaaugaaagaacuuuggacuaccacgauucaaaugugaaaaacuuauaugaaaagguaagaagccaguuaaaaaacaaugccaaggaaauuggaaacggcugcuuugaauuuuaccacaaaugcgacaacacgugcauggaaagugucaaaaaugggacuuaugacuacccaaaauacucagaggaagcaaaauuaaacagagaagaaauagaugggguaaagcuggaaucaacaaggauuuaccagauuuuggcgaucuauucaacugucgccaguucauugguacugguagucucccugggggcaaucaguuucuggaugugcucuaaugggucucuacaguguagaauauguauuuaa

SEQ ID NO: 38827 - RNA, 1701 nt, Artificial Sequence
  derived and/or modified CDS sequence (wt) from hemagglutinin__InfluenzaA__AEH59379
augaaggcaauacuaguaguucugcuauauacauuugcaaccgcaaaugcagacacauuauguauagguuaucaugcgaacaauucaacagacacuguagacacaguacuagaaaagaauguaacaguaacacacucuguuaaucuucuagaagacaagcauaacgggaaacuaugcaaacuaagagggguagccccauugcauuuggguaaauguaacauugcuggcuggauccugggaaauccagagugugaaucacucuccacagcaagcucaugguccuacauuguggaaacaucuaguucagacaauggaacguguuacccaggagauuucaucgauuaugaggagcuaagggagcaauugagcucagugucaucauuugaaagguuugagauauuccccaagacaaguucauggcccaaucaugacucgaacaaagguguaacggcagcauguccucaugcuggagcaaaaagcuucuacaaaaauuuaauauggcuaguuaaaaaaggaaauucauacccaaagcucagcaaauccuacauuaaugauaaagggaaagaaguccucgugcuauggggcauucaccauccaucuacuacugcugaccaacaaagucucuaucagaaugcagauacauauguuuuuguggggacaucaagauacagcaagaaguucaagccggaaauagcaauaagacccaaagugagggaucaagaagggagaaugaacuauuacuggacacuaguagagccgggagacaaaauaacauucgaagcaacuggaaaucuagugguaccgagauaugcauucgcaauggaaagaaaugcuggaucugguauuaucauuucagauacaccaguccacgauugcaauacaacuugucagacacccaagggugcuauaaacaccagccucccauuucagaauauacauccgaucacaauuggaaaauguccaaaauauguaaaaagcacaaaauugagacuggccacaggauugaggaaugucccgucuauucaaucuagaggccuauuuggggccauugccggcuucauugaagggggguggacagggaugguagauggaugguacgguuaucaccaucaaaaugagcaggggucaggauaugcagccgaccugaagagcacacagaaugccauugacaagauuacuaacaaaguaaauucuguuauugaaaagaugaauacacaguucacagcaguagguaaagaguucaaccaccuggaaaaaagaauagagaauuuaaauaaaaaaguugaugaugguuuccuggacauuuggacuuacaaugccgaacuguugguucuauuggaaaaugaaagaacuuuggacuaccacgauucaaaugugaagaacuuauaugaaaagguaagaaaccaguuaaaaaacaaugccaaggaaacuggaaauggcugcuuugaauuuuaccacaaaugcgauaacacgugcauggaaagugucaaaaaugggacuuaugacuacccaaaauacucagaggaagcaaaauuaaacagagaagaaauagaugggguaaagcuggaaucaacaaggauuuaccagauuuuggcgaucuauucaacugucgccaguucauugguacugguagucucccugggggcaaucaguuuuuggaugugcucuaaugggucucuacaguguagaauauguauuuaa

SEQ ID NO: 38828 - RNA, 1701 nt, Artificial Sequence; identical to SEQ ID NO: 38826
  derived and/or modified CDS sequence (wt) from hemagglutinin__InfluenzaA__AEH59381

SEQ ID NO: 38829 - RNA, 1701 nt, Artificial Sequence
  derived and/or modified CDS sequence (wt) from hemagglutinin__InfluenzaA__AEH59383
augaaggcaauacuaguaguucugcuauauacauuugcaaccgcaaaugcagacacauuauguauagguuaccaugcgaacaauucaacagacacuguagacacaguacuagaaaagaauguaacaguaacacacucugucaaucuucuagaagacaagcauaacgggaaacuaugcaaacuaagagggguagccccauugcauuuggguaaauguaacauugcuggcuggauccugggaaauccagagugugaaucacucuccacagcaagcucaugguccuacauuguggaaacaucuaguucagacaauggaacguguuacccaggagauuucauugauuaugaggagcuaagagagcaauugagcucagugucaucauuugaaagguuugagauauuccccaagacaaguucauggcccaaucaugacucgaacaaagguguaacggcagcauguccucaugcuggagcaaaaggcuucuacaaaaauuuaauauggcuaguuaaaaaaggaaauucauacccaaagcucagcauauccuacauuaaugauaaagggaaagaaguccucgugcuauggggcauucaccauccaucuacuacugcugaccaacaaagucucuaucagaaugcagauacauauguuuuuguggggacaucaagauacagcaagaaguucaagccggaaauagcaauaagacccaaaguaagggaucaagaagggagaaugaacuauuacuggacacuaguagagccgggagacaaaauaacauucgaagcaacuggaaaucuagugguaccgagauaugcauucgcaauggaaagaaaugcuggaucugguauuaucauuucagauacaccaguccacgauugcaauacaacuugucagacacccaagggugcuauaaacaccagccucccauuucagaauauacauccgaucacaauuggaaaauguccaaaauauguaaaaagcacaaaauugagacuggccacaggauugaggaaugucccgucuauucaaucuagaggccuauuuggggccauugccggcuucauugaagggggguggacagggaugguagauggaugguacgguuaucaccaucaaaaugagcaggggucaggauaugcagccgaccugaagagcacacagaaugccauugacaagauuacuaacaaaguaaauucuguuauugaaaagaugaauacacaguucacagcaguagguaaagaguucaaccaccuggaaaaaagaauagagaauuuaaauaaaaaaguugaugaugguuuccuggacauuuggacuuacaaugccgaacuguugguucuauuggaaaaugaaagaacuuuggacuaccacgauucaaaugugaagaacuuauaugaaaagguaagaaaccaguuaaaaaacaaugccaaggaaauuggaaauggcugcuuugaauuuuaccacaaaugcgauaacacgugcauggaaagugucaaaaaugggacuuaugacuacccaaaauacucagaggaagcaaaauuaaacagagaagaaauagaugggguaaagcuggaaucaacaaggauuuaccagauuuuggcgaucuauucaacugucgccaguucauugguacugguagucucccugggggcaaucaguuuuuggaugugcucuaaugggucucuacaguguagaauauguauuuaa

SEQ ID NO: 38830 - RNA, 1701 nt, Artificial Sequence
  derived and/or modified CDS sequence (wt) from hemagglutinin__InfluenzaA__AEH59385
augaaggcaauacuaguaguucugcuauauacauuugcaaccgcaaaugcagacacauuauguauagguuaucaugcgaacaauucaacagacacuguagacacaguacuagaaaagaauguaacaguaacacacucuguuaaccuucuagaagacaagcauaacgggaaacuaugcaagcuaagagggguagccccauugcauuuggguaaauguaacauugcuggcuggauccugggaaauccagagugugaaucacucuccacagcaagcucaugguccuacauuguggaaacaucuaguucagacaauggaacguguuacccaggagauuucaucgauuaugaggagcuaagagagcaauugagcucagugucaucauuugaaagguuugagauauuccccaagacaaguucauggcccaaucaugacucgaacaaagguguaacggcagcauguccucaugcuggagcaaaaagcuucuacaaaaauuuaauauggcuaguuaaaaaagggaauucauacccaaagcucagcaaauccuacauuaaugauaaagggaaagaaguccucgugcuauggggcauucaccauccaucuacuacugcugaccaacaaagucucuaucagaaugcagaugcauauauuuuuguggggacaucaagauacagcaagaaguucaagccggaaauagcaauaagacccaaagugagagaucaagaagggagaaugaacuauuacuggacacuaguagagccgggagacaaaauaacauucgaagcaacuggaaaucuagugguaccgagauaugcauucgcaauggaaagaaaugcuggaucugguauuaucauuucagauacaccaguccacgauugcaauacaacuugucagacacccaagggugcuauaaacaccagccucccauuucagaauauacauccgaucacaauuggaaaauguccaaaauauguaaaaagcacaaaauugagacuggccacaggauugaggaaugucccgucuauucaaucuagaggccuauuuggggccauugccggcuucauugaagggggguggacagggaugguagauggaugguacgguuaucaccaucaaaaugagcaggggucaggauaugcagccgaccugaagagcacacagaaugccauugacaagauuacuaacaaaguaaauucuguuauugaaaaaaugaauacacaguucacagcaguagguaaagaguucaaccaccuggaaaaaagaauagagaauuuaaauaaaaaaguugaugaugguuuccuggacauuuggacuuacaaugccgaacuguugguucuauuggaaaaugaaagaacuuuggacuaccacgauucaaaugugaagaacuuauaugaaaagguaagaaaccaguuaaaaaacaaugccaaggaaauuggaaacggcugcuuugaauuuuaccacaaaugcgauaacacgugcauggaaagugucaaaaaugggacuuaugacuacccaaaauacucagaggaagcaaaauuaaacagagaagaaauagaugggguaaagcuggaaucaacaaggauuuaccagauuuuggcgaucuauucaacugucgccaguucauuaguacugguagucucccugggggcaaucaguuucuggaugugcucuaaugggucucuacaguguagaauauguauuuaa

SEQ ID NO: 38831 - RNA, 1701 nt, Artificial Sequence; identical to SEQ ID NO: 38826
  derived and/or modified CDS sequence (wt) from hemagglutinin__InfluenzaA__AEH59387

SEQ ID NO: 38832 - RNA, 1701 nt, Artificial Sequence
  derived and/or modified CDS sequence (wt) from hemagglutinin__InfluenzaA__AEH59393
augaaggcaauacuaguaguuauacuauauacauuugcaaccgcaaaugcagacacauuauguauagguuaucaugcgaacaauucaacagacacuguagacacaguacuagaaaagaauguaacaguaacacacucuguuaaucuucuagaagacaagcauaacgggaaacuaugcaaacuaagagggguagccccauugcauuuggguaaauguaacauugcuggcuggauccugggaaauccagagugugaaucacucuccacagcaagcucaugguccuacauuguggaaacaucuaguucagacaauggaacguguuacccaggagauuucaucgauuaugaggagcuaagagagcaauugagcucagugucaucauuugaaagguuugagauauuccccaaaacaaguucauggcccaaucaugacucgaacaaagguguaacggcagcauguccucaugcuggagcaaaaggcuucuacaaaaauuuaauauggcuaguuaaaaaaggaaauucauacccaaagcucagcaaauccuacauuaaugauaaagggaaagaaguccuugugcuauggggcauucaccauccgucuacuacugcugaccaacaaagucucuaucagaaugcagauacauauguuuuuguggggacaucaagauacagcaagaaguucaagccggaaauagcaauaagacccaaagugagggaucaagaagggagaaugaacuauuacuggacacuaguagagccgggagacaaaauaacauucgaagcaacuggaaaucuagugguaccgagauaugcauucgcaauggaaagaaaugcuggaucugguauuaucauuucagauacaccaguccacgauugcaauacaacuugucagacacccaagggugcuauaaacaccagccucccauuucagaauauacauccgauuacaauuggaaaauguccaaaauauguaaaaagcacaaaauugagacuggccacaggauugaggaaugucccgucuauucaaucuagaggccuauuuggggccauugccggcuucauugaagggggguggacagggaugguagauggaugguacgguuaucaccaucaaaaugagcaggggucaggauaugcagccgaccugaagagcacacagaaugccauugacaagauuacuaacaaaguaaauucuguuauugaaaagaugaauacacaguucacagcaguagguaaagaguucaaccaccuggaaaaaagaauagagaauuuaaauaaaaaaguugaugaugguuuccuggacauuuggacuuacaaugccgaacuguugguucuauuggaaaaugaaagaacuuuggacuaccacgauucaaaugugaagaacuuauaugaaaagguaagaaaccaguuaaaaaacaaugccaaggaaauuggaaauggcugcuuugaauuuuaccacaaaugcgauaacacgugcauggaaagugucaaaaaugggacuuaugacuacccaaaauacucagaggaagcaaaauuaaacagagaagaaauagaugggguaaagcuggaaucaacaaggauuuaccagauuuuggcgaucuauucaacugucgccaguucauugguacugguagucucccugggggcaaucaguuuuuggaugugcucuaaugggucucuacaguguagaauauguauuuaa

SEQ ID NO: 38833 - RNA, 1701 nt, Artificial Sequence
  derived and/or modified CDS sequence (wt) from hemagglutinin__InfluenzaA__AEH59397
augaaggcaauacuaguaguucugcuauauacauuugcaaccgcaaaugcagacacauuauguauagguuaucaugcgaacaauucaacagacacuguagacacaguacuagaaaagaauguaacaguaacacacucuguuaaccuucuagaagacaagcauaacgggaaacuaugcaaacugagagggguagccccauugcauuuggguaaauguaacauugcuggcuggauccugggaaauccagagugugaaucacucuccacagcaagcucaugguccuacauuguggaaacaucuaguucagacaauggaacguguuacccaggagauuucaucaauuaugaagagcuaagagagcaauugagcucagugucaucauuugaaagguuugagauauuccccaagacaaguucauggcccagucaugacucgaacaaagguguaacggcagcauguccucaugcuggagcaaaaagcuucuacaaaaauuuaauauggcuaguuaaaaaaggaaauucauacccaaagcucagcaaauccuacauuaacgauaaagggaaagaaguccucgugcuauggggcauucaccauccaucuacuagugcugaccaacaaagucucuaucagaaugcagaugcauauguuuuuguggggacaucaaaauacagcaagaaguucaagccggaaauagcaguaagacccaaagugagagaucaagaagggagaaugaacuauuacuggacacuaguagagccgggagacaaaauaacauucgaagcaacuggaaaucuauugguaccgagauaugcauucgcaauggaaagaaaugcuggaucugguauuaucauuucagauacaccaguccacgauugcaauacaacuugucagacacccaagggugcuauaaacaccagccucccauuucagaauauacauccgaucacaauuggaaaauguccaaaauauguaaaaagcacaaaauugagacuggccacaggauugaggaaugucccgucuauucaaucuagaggccuauuuggggccauugccgguuucauugaagggggguggacagggaugguagauggaugguacgguuaucaccaucaaaaugagcaggggucaggauaugcagccgaccugaaaagcacacagaaugccauugacaagauuacuaacaaaguaaauucuguuauugaaaagaugaauacacaguucacagcaguagguaaagaguucaaccaccuggaaaaaagaauagagaauuuaaauaaaaaaguugaugaugguuuccuggacauuuggacuuacaaugccgaacuguugguucuauuggaaaaugaaagaacuuuggacuaccacgauucaaaugugaaaaacuuauaugaaaagguaagaagccaguuaaaaaacaaugccaaggaaauugaaaacggcugcuuugaauuuuaccacaaaugcgauaacacgugcauggaaagugucaaaaaugggacuuaugacuacccaaaauacucagaggaagcaaaauuaaacagagaagaaauagaugggguaaagcuggaaucaacaaggauuuaccagauuuuggcgaucuauucaacugucgccaguucauugguacugguagucucccugggggcaaucaguuucuggaugugcucuaaugggucucuacaguguagaauauguauuuaa

SEQ ID NO: 38834 - RNA, 1701 nt, Artificial Sequence
  derived and/or modified CDS sequence (wt) from hemagglutinin__InfluenzaA__AEH59399
augaaggcaauacuaguaguucugcuauauacauuugcaaccgcaaaugcagacacauuauguauagguuaccaugcgaacaauucaacagacacuguagacacaguacuagaaaagaauguaacaguaacacacucugucaaucuucuagaagacaagcauaacgggaaacuaugcaaacuaagagggguagccccauugcauuuggguaaauguaacauugcuggcuggauccugggaaauccagagugugaaucacucuccacagcaagcucaugguccuacauuguggaaacaucuaguucagacaauggaacguguuacccaggagauuucauugauuaugaggagcuaagagagcaauugagcucagugucaucauuugaaagauuugagauauuccccaagacaaguucauggcccaaucaugacucgaacaaagguguaacggcagcauguccucaugcuggagcaaaaggcuucuacaaaaauuuaauauggcuaguuaaaaaaggaaauucauacccaaagcucagcaaauccuacauuaaugauaaagggaaagaaguccucgugcuauggggcauucaccauccaucuacuacugcugaccaacaaagucucuaucagaaugcagauacauauguuuuuguggggacaucaagauacagcaagaaguucaagccggaaauagcaauaagacccaaagugagggaucaagaagggagaaugaacuauuacuggacaauaguagagccgggagacaaaauaacauucgaagcaacuggaaaucuagugguaccgagauaugcauucgcaauggaaagaaaugcuggaucugguauuaucauuucagauacaccaguccacgauugcaauacaacuugucagacacccaagggugcuauaaacaccagccucccauuucagaauauacauccgaucacaauugggaaauguccaaaauauguaaaaagcaccaaauugagacuggccacaggauugaggaaugucccgucuauucaaucuagaggccuauuuggggccauugccggcuucauugaagggggguggacagggaugguagauggaugguacgguuaucaccaucaaaaugagcaagggucaggauaugcagccgaccugaagagcacacagaaugccauugacaagauuacuaacaaaguaaauucuguuauugaaaagaugaauacacaguucacagcaguagguaaagaguucaaccaccuggaaaaaagaauagagaauuuaaauaaaaaaguugaugaugguuuccuggacauuuggacuuacaaugccgaacuguugguucuauuggaaaaugaaagaacuuuggacuaccacgauucaaaugugaagaacuuauaugaaaagguaagaaaccaguuaaaaaacaaugccaaggaaauuggaaauggcugcuuugaauuuuaccacaaaugcgauaacacgugcauggaaagugucaaaaaugggacuuaugacuacccaaaauacucagaggaagcaaaauuaaacagagaagaaauagaugggguaaagcuggaaucaacaaggauuuaccagauuuuggcgaucuauucaacugucgccaguucauugguacugguagucucccugggggcaaucaguuuuuggaugugcucuaaugggucucuacaguguagaauauguauuuaa

SEQ ID NO: 38835 - RNA, 1701 nt, Artificial Sequence
  derived and/or modified CDS sequence (wt) from hemagglutinin__InfluenzaA__AEH59403
augaaggcaauacuaguaguucugcuauauacauuugcaaccgcaaaugcagacacauuauguauagguuaucaugcgaacaauucaacagacacuguagacacaguacuagaaaagaauguaacaguaacacacucuguuaaucuucuagaagacaagcauaacgggaaacuaugcaaacuaagagggguagccccauugcauuuggguaaauguaacauugcuggcuggauccugggaaauccagagugugaaucacucuccacagcaagcucaugguccuacauuguggaaacaucuaguucagacaauggaacguguuacccaggagauuucaucgauuaugaggagcuaagagagcaauugagcucagugucaucauuugaaagguuugagauauuccccaagacaaguucauggcccaaucaugacucgaacaaagguguaacggcagcauguccucaugcuggagcaaaaggcuucuacaaaaauuuaauauggcuaguuaaaaaaggaaauucauacccaaagcucagcaaauccuacauuaaugauaaagggaaagaaguccucgugcuauggggcauucaccauccaucuacuacugcugaccaacaaagucucuaucagaaugcagauacauauguuuuuguggggacaucaagauacagcaagaaguucaagccggaaauagcaauaagacccaaagugagggaucaagaagggagaaugaacuauuacuggacacuaguagcgccgggagacaaaauaacauucgaagcaacuggaaaucuagugguaccgagauaugcauucgcgauggaaagaaaugcuggaucugguauuaucauuucagauacaccaguccacgauugcaauacaacuugucagacacccaagggugcuauaaacaccagccucccauuucagaauauacauccgaucacaauuggaaaauguccaaaauauguaaaaagcacaaaauugagacuggccacaggauugaggaaugucccgucuauucaaucuagaggccuauuuggggccauugccggcuucauugaagggggguggacagggaugguagauggaugguacgguuaucaccaucaaaaugagcaggggucaggauaugcagccgaccugaagagcacacagaaugccauugacaagauuacuaacaaaguaaauucaguuauugaaaagaugaauacacaguucacagcaguagguaaagaguucaaccaccuggaaaaaagaauagagaauuuaaauaaaaaaguugaugaugguuuccuggacauuuggacuuacaaugccgaacuguugguucuauuggaaaaugaaagaacuuuggacuaccaugauucaaaugugaagaacuuauaugaaaagguaagaaaccaguuaaaaaacaaugccaaggaaauuggaaauggcugcuuugaauuuuaccacaaaugcgauaacacgugcauggaaagugucaaaaaugggacuuaugacuacccaaaauacucagaggaagcaaaauuaaacagagaagaaauagaugggguaaagcuggaaucaacaaggauuuaccagauuuuggcgaucuauucaacugucgccaguucauugguacugguagucucccugggggcaaucaguuuuuggaugugcucuaaugggucucuacaguguagaauauguauuuaa

SEQ ID NO: 38836 - RNA, 1701 nt, Artificial Sequence
  derived and/or modified CDS sequence (wt) from hemagglutinin__InfluenzaA__AEH59407
augaaagcaauacuaguaguuaugcuauauacauuugcaaccgcaaaugcagacacauuauguauagguuaucaugcgaacaauucaacagacacuguagacacaguacuagaaaagaauguaacaguaacacacucuguuaaucuucuagaagacaagcauaacgggaaacuaugcaaacuaagagggguagccccauugcauuuggguaaauguaacauugcuggcuggauccugggaaauccagagugugaaucacucuccacagcaagcucaugguccuacauuguggaaacaucuaguucagacaauggaacguguuacccaggagauuucaucgauuaugaggagcuaagagagcaauugagcucagugucaucauuugaaagguuugagauauuccccaaaacaaguucauggcccaaucaugacucgaacaaagguguaacggcagcauguccucaugcuggagcaaaaggcuucuacaaaaauuuaauauggcuaguuaaaaaaggaaauucauacccaaagcucagcaaauccuacauuaaugauaaagggaaagaaguccucgugcuauggggcauucaccauccaucuacuacugcugaccaacaaagucucuaucagaaugcagauacauauguuuuuguggggacaucaagauacagcaagaaguucaagccggaaauagcaauaagacccaaagugagggaucaagaagggagaaugaacuauuacuggacacuaguagagccgggagacaaaauaacauucgaagcaacuggaaaucuagugguaccgagauaugcauucgcaauggaaagaaaugcuggaucugguauuaucauuucagauacaccaguccacgauugcaauacaacuugucagacacccaagggugcuauaaacaccagccucccauuucagaauauacauccgaucacaauuggaaaauguccaaaauauguaaaaagcacaaaauugagacuggccacaggauugaggaaugucccgucuauucaaucuagaggccuauuuggggccauugccggcuucauugaagggggguggacagggaugguagauggaugguacgguuaucaccaucaaaaugagcaggggucaggauaugcagccgaccugaagagcacacagaaugccauugacaagauuacuaacaaaguaaauucuguuauugaaaagaugaauacacaguucacagcaguagguaaagaguucaaccaccuggaaaaaagaauagagaauuuaaauaaaaaaguugaugaugguuuccuggacauuuggacuuacaaugccgaacuguugguucuauuggaaaaugaaagaacuuuggacuaccacgauucaaaugugaagaacuuauaugaaaagguaagaaaccaguuaaaaaacaaugccaaggaaauuggaaauggcugcuuugaauuuuaccacaaaugugauaacacgugcauggaaagugucaaaaaugggacuuaugacuacccaaaauacucagaggaagcaaaauuaaacagagaagaaauagaugggguaaagcuggaaucaacaaggauuuaccagauuuuggcgaucuauucaacugucgccaguucauugguacugguagucucccugggggcaaucaguuuuuggaugugcucuaaugggucucuacaguguagaauauguauuuaa

SEQ ID NO: 38837 - RNA, 1701 nt, Artificial Sequence
  derived and/or modified CDS sequence (wt) from hemagglutinin__InfluenzaA__AEH59409
augaaggcaauacuaguaguuaugcuauauacauuugcaaccgcaaaugcagacacauuauguauagguuaucaugcgaacaauucaacagacacuguagacacaguacuagaaaagaauguaacaguaacacacucuguuaaucuucuagaagacaagcauaacgggaaacuaugcaaacuaagagggguagccccauugcauuuggguaaauguaacauugcuggcuggauccugggaaauccagagugugaaucacucuccacagcaagcucaugguccuacauuguggaaacaucuaguucagacaauggaacguguuacccaggagauuucaucgauuaugaggagcuaagagagcaauugagcucagugucaucauuugaaagguuugagauauuccccaaaacaaguucauggcccaaucaugacucgaacaaagguguaacggcagcauguccucaugcuggagcaaaaggcuucuacaaaaauuuaauauggcuaguuaaaaaaggaaauucauacccaaagcucagcaaauccuacauuaaugauaaagggaaagaaguccucgugcuauggggcauucaccauccaucuacuacugcugaccaacaaagucucuaucagaaugcagauacauauguuuuuguggggacaucaagauacagcaagaaguucaagccggaaauagcaauaagacccaaagugagggaucaagaagggagaaugaacuauuacuggacacuaguagagccgggagacaaaauaacauucgaagcaacuggaaaucuagugguaccgagauaugcauucgcaauggaaagaaaugcuggaucugguauuaucauuucagauacaccaguccacgauugcaauacaacuugucagacacccaagggugcuauaaacaccagccucccauuucagaauauacauccgaucacaauuggaaaauguccaaaauauguaaaaagcacaaaauugagacuggccacaggauugaggaaugucccgucuauucaaucuagaggccuauuuggggccauugccggcuucauugaagggggguggacagggaugguagauggaugguacgguuaucaccaucaaaaugagcaggggucaggauaugcagccgaccugaagagcacacagaaugccauugacaagauuacuaacaaaguaaauucuguuauugaaaagaugaauacacaguucacagcaguagguaaagaguucaaccaccuggaaaaaagaauagagaauuuaaauaaaaaaguugaugaugguuuccuggacauuuggacuuacaaugccgaacuguugguucuauuggaaaaugaaagaacuuuggacuaccacgauucaaaugugaaaaacuuauaugaaaagguaagaaaccaguuaaaaaacaaugccaaggaaauuggaaauggcugcuuugaauuuuaccacaaaugugauaacacgugcauggaaagugucaaaaaugggacuuaugacuacccaaaauacucagaggaagcaaaauuaaacagagaagaaauagaugggguaaagcuggaaucaacaaggauuuaccagauuuuggcgaucuauucaacuguugccaguucauugguacugguagucucccugggggcaaucaguuuuuggaugugcucuaaugggucucuacaguguagaauauguauuuaa

SEQ ID NO: 38838 - RNA, 1701 nt, Artificial Sequence
  derived and/or modified CDS sequence (wt) from hemagglutinin__InfluenzaA__AEH59411
augaaggcaauacuaguaguucugcuauauacauuugcaaccgcaaaugcagacacauuauguauagguuaccaugcgaacaauucaacagacacuguagacacaguacuagaaaagaauguaacaguaacacacucugucaaucuucuagaagacaagcauaacgggaaacuaugcaaacuaagagggguagccccauugcauuuggguaaauguaacauugcuggcuggauccugggaaauccagagugugaaucacucuccacagcaagcucaugguccuacauuguggaaacaucuaguucagacaauggaacguguuacccaggagauuucauugauuaugaggagcuaagagagcaauugagcucagugucaucauuugaaagguuugagauauuccccaagacaaguucauggcccaaucaugacucgaacaaagguguaacggcagcauguccucaugcuggagcaaaaggcuucuacaaaaauuuaauauggcuaguuaaaaaaggaaauucauacccaaagcucagcaaauccuacauuaaugauaaagggaaagaaguccucgugcuauggggcauucaccauccaucuacuacugcugaccaacaaagucucuaucagaaugcagauacauauguuuuuguggggacaucaagauacagcaagaaguucaagccggaaauagcaauaagacccaaagugagggaucaagaagggagaaugaacuauuacuggacacuaguagagccgggagacaaaauaacauucgaagcaacuggaaaucuagugguaccgagauaugcauucgcaauggacagaaaugcuggaucugguauuaucauuucagauacaccaguccacgauugcaauacaacuugucagacacccaagggugcuauaaacaccagccucccauuucagaauauacauccgaucacaauuggaaaauguccaaaauauguaaaaagcacaaaauugagacuggccacaggauugaggaaugucccgucuauucaaucuagaggccuauuuggggccauugccggcuucauugaagggggguggacagggaugguagauggaugguacgguuaucaccaucaaaaugagcaggggucaggauaugcagccgaccugaagagcacacagaaugccauugacaagauuacuaacaaaguaaauucuguuauugaaaagaugaauacacaguucacagcaguagguaaagaguucaaccaccuggaaaaaagaauagagaauuuaaauaaaaaaguugaugaugguuuccuggacauuuggacuuacaaugccgaacuguugguucuauuggaaaaugaaagaacuuuggacuaccacgauucaaaugugaagaacuuauaugaaaagguaagaaaccaguugaaaaacaaugccaaggaaauuggaaauggcugcuuugaauuuuaccacaaaugcgauaacacgugcauggaaagugucaaaaaugggacuuaugacuacccaaaauacucagaggaagcaaaauuaaacagagaagaaauagaugggguaaagcuggaaucaacaaggauuuaccagauuuuggcgaucuauucaacugucgccaguucauugguacugguagucucccugggggcaaucaguuuuuggaugugcucuaaugggucucuacaguguagaauauguauuuaa

SEQ ID NO: 38839 - RNA, 1701 nt, Artificial Sequence
  derived and/or modified CDS sequence (wt) from hemagglutinin__InfluenzaA__AEH59413
augaaggcaauacuaguaguucugcuauauacauuugcaaucgcaaaugcagacacauuauguauagguuaucaugcgaacaauucaacagacacuguagacacaguacuagaaaagaauguaacaguaacacacucuguuaaccuucuagaagacaagcauaacgggaaacuaugcaaacugagagggguagccccauugcauuuggguaaauguaacauugcuggcuggauccugggaaauccagagugugaaucacucuccacagcaagcucaugguccuacauuguggaaacaucuaguucagacaauggaacguguuacccaggagauuucaucaauuaugaggaacuaagagagcaauugagcucagugucaucauuugaaagguuugagauauuccccaagacaaguucauggcccaaucaugacucgaacaaagguguaacggcagcauguccucaugcuggagcaaaaagcuucuacaaaaauuuaauauggcuaguuaaaaaaggaaauucauacccaaagcucagcaaauccuacauuaacgauaaagggaaagaaguccucgugcuguggggaauucaccauccaucuacuagugcugaccaacaaagucucuaucagaaugcagaugcauauguuuuuguggggacaucaaaauacagcaagaaauucaagccggaaauagcaguaagacccaaagugagggaucaagaagggagaaugaacuauuacuggacacuaguagagccgggagacaaaauaacauucgaagcaacuggaaaucuauugguaccgagauaugcauucgcaauggaaagaaaugcuggaucugguauuaucauuucagauacaccaguccacgauugcaauacaacuugucagacacccgagggugcuauaaacaccagccucccauuucagaauauacauccgaucacaauuggaaaauguccaaaauauguaaaaagcacaaaauugagacuggccacaggauugaggaaugucccgucuauucaaucuagaggccuauuuggggccauugccgguuucauugaagggggguggacagggaugguagauggaugguacgguuaucaccaucaaaaugagcaggggucaggauaugcagccgaccugaagagcacacagaaugccauugacaagauuacuaacaaaguaaauucuguuauugaaaagaugaauacacaguucacagcaguagguaaagaguucaaccaccuggaaaaaagaauagagaauuuaaauaaaaaaguugaugaugguuuccuggacauuuggacuuacaaugccgaacuguugguucuauuggaaaaugaaagaacuuuggacuaccacgauucaaaugugaaaaacuuauaugaaaagguaagaagccaguuaaaaaacaaugccaaggaaauuggaaacggcugcuuugaauuuuaccacaaaugcgauaacacgugcauggaaagugucaaaaaugggacuuaugacuacccaaaauacucagaggaagcaaaauuaaacagagaagaaauagaugggguaaagcuggaaucaacaaggauuuaccagauuuuggcgaucuauucaacugucgccaguucauugguacugguagucucccugggggcaaucaguuucuggaugugcucuaaugggucucuacaguguagaauauguauuuaa

SEQ ID NO: 38840 - RNA, 1701 nt, Artificial Sequence
  derived and/or modified CDS sequence (wt) from hemagglutinin__InfluenzaA__AEH59585
augaaggcaauacuaguaguucugcuauauacauuugcaaccgcaaaugcagacacauuauguauagguuaucaugcgaacaauucaacagacacuguagacacaguacuagaaaagaauguaacaguaacacacucuguuaaccuucuagaagacaagcauaacgggaaacuaugcaaacuaagagggguagccccauugcauuuggguaaauguaacauugcuggcuggauccugggaaauccagagugugaaucacucuccacagcaagcucaugguccuacauuguggaaacaucuaguucagacaauggaacguguuacccaggagauuucaucgauuaugaggagcuaagagagcaauugagcucagugucaucauuugaaagguuugagauauuccccaagacaaguucauggcccaaucaugacccgaacaaagguguaacggcagcauguccucaugcuggagcaaaaagcuucuacaaaaauuuaauauggcuaguuaaaaaaggaaauucauacccaaagcucagcaaauccuacauuaaugauaaagggaaagaaguccucgugcuauggggcauucaccauccaucuacuagugcugaccaacaaagucucuaucagaaugcagaugcauauguuuuuguggggacaucaagauacagcaagaaguucaagccggaaauagcaauaagacccaaagugagggaucaagaagggagaaugaacuauuacuggacacuaguagagccgggagacaaaauaacauucgaagcaacuggaaaucuagugguaccgagauaugcauucgcaauggaaagaaaugcuggaucugguauuaucauuucagauacaccaguccacgauugcaauacaacuugucagacacccaagggugcuauaaacaccagccucccauuucagaauauacauccgaucacaauuggaaaauguccaaaauauguaaaaagcacaaaauugagacuggccacaggauugaggaaugucccgucuauucaaucuagaggccuauuuggggccauugccgguuucauugaagggggguggacagggaugguagauggaugguacgguuaucaccaucaaaaugagcaggggucaggauaugcagccgacuugaagagcacacagaaugccauugacgagauuacuaacaaaguaaauucuguuauugaaaagaugaauacacaguucacaguaguagguaaagaguucaaccaccuggaaaaaagaauagagaauuuaaauaaaaaaguugaugaugguuuccuggacauuuggacuuacaaugccgaacuguugguucuauuggaaaaugaaagaacuuuggacuaccacgauucaaaugugaagaacuuauaugaaaagguaagaagccaguuaaaaaacaaugccaaggaaauuggaaacggcugcuuugaauuuuaccacaaaugcgauaacacgugcauggaaagugucaaaaaugggacuuaugacuacccaaaauacucagaggaagcaaaauuaaacagagaagaaauagaugggguaaagcuggaaucaacaaggauuuaccagauuuuggcgaucuauucaacugucgccaguucauugguacugguagucucccugggggcaaucaguuucuggaugugcucuaaugggucucuacaguguagaauauguauuuaa

SEQ ID NO: 38841 - RNA, 1701 nt, Artificial Sequence
  derived and/or modified CDS sequence (wt) from hemagglutinin__InfluenzaA__AEH59587
augaaggcaauacuaguaguucugcuauauacauuugcaaccgcaaaugcagacacauuauguauagguuaucaugcgaacaauucaacagacacuguagacacaguacuagaaaagaauguaacaguaacacacucuguuaaccuucuagaagacaagcauaacgggaaacuaugcaaacuaagagggguagccccauugcauuuggguaaauguaacauugcuggcuggauccugggaaauccagagugugaaucacucuccacagcaagcucaugguccuacauuguggaaacaucuaguucagacaauggaacguguuacccaggagauuucaucgauuaugaggagcuaagagagcaauugagcucagugucaucauuugaaagguuugagauauuccccaagacaaguucauggcccaaucaugaaucgaacaaagguguaacggcagcauguccucaugcuggagcaaaaagcuucuacaaaaauuuaauauggcuaguuaaaaaaggaaauucauacccaaagcucagcaaauccuacauuaaugauaaagggaaagaaguccucgugcuauggggcauucaccauccaucuacuagugcugaccaacaaagucucuaucagaaugcagaugcauauguuuuuguggggacaucaagauacagcaagaaguucaagccggaaauagcaauaagacccaaagugagggaucaagaagggagaaugaacuauuacuggacacuaguagagccgggagacaaaauaacauucgaagcaacuggaaaucuagugguaccgagauaugcauucgcaauggaaagaaaugcuggaucugguauuaucauuucagauacaccaguccacgauugcaauacaacuugucagacacccaagggugcuauaaacaccagccucccauuucagaauauacauccgaucacaauuggaaaauguccaaaauauguaaaaagcacaaaauugagacuggccacaggauugaggaaugucccguuuauucaaucuagaggccuauuuggggccauugccgguuucauugaagggggguggacagggaugguagauggaugguacgguuaucaccaucaaaaugagcaggggucaggauaugcagccgaccugaagagcacacagaaugccauugacaagauuacuaacaaaguaaauucuguuauugaaaagaugaauacacaguucacaguaguagguaaagaguucaacccccuggaaaaaagaauagagaauuuaaauaaaaaaguugaugaugguuuccuggacauuuggacuuacaaugccgaacuguugguucuauuggaaaaugaaagaacuuuggacuaccacgauucaaaugugaagaacuuauaugaaaagguaagaagccaguuaaaaaacaaugccaaggaaauuggaaacggcugcuuugaauuuuaccacaaaugcgacaacacgugcauggaaagugucaaaaaugggacuuaugacuacccaaaauacucagaggaagcaaaauuaaacagagaagaaauagaugggguaaagcuggaaucaacaaggauuuaccagauuuuggcgaucuauucaacugucgccaguucauugguacugguagucucccugggggcaaucaguuucuggaugugcucuaaugggucucuacaguguagaauauguauuuaa

SEQ ID NO: 38842 - RNA, 1701 nt, Artificial Sequence
  derived and/or modified CDS sequence (wt) from hemagglutinin__InfluenzaA__AEH59589
augaaggcaauacuaguaguucugcuauauacauuugcaaccgcaaaugcagacacauuauguauagguuaucaugcgaacaauucaacagacacuguagacacaguacuagaaaagaauguaacaguaacacacucuguuaaccuucuagaagacaagcauaacgggaaacuaugcaaacuaagagggguagccccauugcauuuggguaaauguaacauugcuggcuggauccugggaaauccagagugugaaucacucuccacagcaagcucaugguccuacauuguggaaacaucuaguucagacaauggaacguguuacccaggagauuucaucgauuaugaggagcuaagagagcaauugagcucagugucaucauuugaaagguuugagauauuccccaagacaaguucauggcccaaucaugacucgaacaaagguguaacggcagcauguccucaugcuggagcaaaaagcuucuacaaaaauuuaauauggcuaguuaaaaaaggaaauucauacccaaagcucagcaaauccuacauuaaugauaaagggaaagaaguccucgugcuauggggcauucaccauccaucuacuagugcugaccaacaaagucucuaucagaaugcagaugcauauguuuuuguggggacaucaagauacagcaagaaguucaagccggaaauagcaauaagacccaaagugagggaucaagaagggagaaugaacuauuacuggacacuaguagagccgggagacaaaauaacauucgaagcaacuggaaaucuagugguaccgagauaugcauucgcaauggaaagaaaugcuggaucugguauuaucauuucagauacaccaguccacgauugcaauacaacuugucagacacccaagggugcuauaaacaccagccucccauuucagaauauacauccgaucacaauuggaaaauguccaaaauauguaaaaagcacaaaauugagacuggccacaggauugaggaaugucccgucuauucaaucuagaggccuauuuggggccauugccgguuucauugaagggggguggacagggaugguagauggaugguacgguuaucaccaucaaaaugagcaggggucaggauaugcagccgaccugaagagcacacagaaugccauugacaagauuacuaacaaaguaaauucuguuauugaaaagaugaauacacaguucacagcaguagguaaagaguucaaccaccuggaaaaaagaauagagaauuuaaauaaaaaaguugaugaugguuuccuggacauuuggacuuacaaugccgaacuguugguucuauuggaaaaugaaagaacuuuggacuaccacgauucaaaugugaagaacuuauaugaaaagguaagaagccaguuaaaaaacaaugccaaggaaauuggaaacggcugcuuugaauuuuaccacaaaugcgacaacacgugcauggaaagugucaaaaaugggacuuaugacuacccaaaauacucagaggaagcaaaauuaaacagagaagaaauagaugggguaaagcuggaaucaacaaggauuuaccagauuuuggcgaucuauucaacugucgccaguucauugguacugguagucucccugggggcaaucaguuucuggaugugcucuaaugggucucuacaguguagaauauguauuuaa

SEQ ID NO: 38843 - RNA, 1701 nt, Artificial Sequence
  derived and/or modified CDS sequence (wt) from hemagglutinin__InfluenzaA__AEH59591
augaaggcaauacuaguaguucugcuauauacauuugcaaccgcaaaugcagacacauuauguauagguuaucaugcgaacaauucaacagacacuguagacacaguacuagaaaagaauguaacaguaacacacucuguuaaccuucuagaagacaagcauaacgggaaacuaugcaaacuaagagggguagccccauugcauuuggguaaauguaacauugcuggcuggauccugggaaauccagagugugaaucacucuccacagcaagcucaugguccuacauuguggaaacaucuaguucagacaauggaacguguuacccaggagauuucaucgauuaugaggagcuaagagagcaauugagcucagugucaucauuugaaagguuugagauauuccccaagacaaguucauggcccaaucaugacucgaacaaagguguaacggcagcauguccucaugcuggagcaaaaagcuucuacaaaaauuuaauauggcuaguuaaaaaaggaaauucauacccaaagcucagcaaauccuacauuaaugauaaagggaaagaaguccucgugcuauggggcauucaccauccaucuacuagugcugaccaacaaagucucuaucagaaugcagaugcauauguuuuuguggggacaucaagauacagcaagaaguucaagccggaaauagcaauaagacccaaagugagggaucaagaagggagaaugaacuauuacuggacacuaguagagccgggagacaaaauaacauucgaagcaacuggaaaucuagugguaccgagauaugcauucgcaauggaaagaaaugcuggaucugguauuaucauuucagauacaccaguccacgauugcaauacaacuugucagacacccaagggugcuauaaacaccagccucccauuucagaauauacauccgaucacaauuggaaaauguccaaaauauguaaaaagcacaaaauugagacuggccacaggauugaggaaugucccgucuauucaaucuagaggccuauuuggggccauugccgguuucauugaagggggguggacagggaugguagauggaugguacgguuaucaccaucaaaaugagcaggggucaggauaugcagccgaccugaagagcacacagaaugccauugacaagauuacuaacaaaguaaauucuguuauugaaaagaugaauacacaguucacaguaguagguaaagaguucaaccaccuggaaaaaagaauagagaauuuaaauaaaaaaguugaugaugguuuccuggacauuuggacuuacaaugccgaacuguugguucuauuggaaaaugaaagaacuuuggacuaccacgauucaaaugugaagaacuuauaugaaaagguaagaagccaguuaaaaaacaaugccaaggaaauuggaaacggcugcuuugaauuuuaccacaaaugcgacaacacgugcauggaaagugucaaaaaugggacuuaugacuacccaaaauacucagaggaagcaaaauuaaacagagaagaaauagaugggguaaagcuggaaucaacaaggauuuaccagauuuuggcgaucuauucaacugucgccaguucauugguacugguagucucccugggggcaaucaguuucuggaugugcucuaaugggucucuacaguguagaauauguauuuaa

SEQ ID NO: 38844 - RNA, 1701 nt, Artificial Sequence
  derived and/or modified CDS sequence (wt) from hemagglutinin__InfluenzaA__AEH59593
augaaggcaauacuaguaguucugcuauauacauuugcaacugcaaaugcagacacauuauguauagguuaucaugcgaacaauucaacagacacuguagacacaguacuagaaaagaauguaacaguaacacacucuguuaaccuucuagaagacaagcauaacgggaaacuaugcaaacuaagagggguagccccauugcauuuggguaaauguaacauugcuggcuggauccugggaaauccagagugugaaucacucuccacagcaagcucaugguccuacauuguggaaacaucuaguucagacaauggaacguguuacccaggagauuucaucgauuaugaggagcuaagagagcaauugagcucagugucaucauuugaaagguuugagauauuccccaagacaaguucauggcccaaucaugaaucgaacaaagguguaacggcagcauguccucaugcuggagcaaaaagcuucuacaaaaauuuaauauggcuaguuaaaaaaggaaauucauacccaaagcucagcaaauccuacauuaaugauaaagggaaagaaguccucgugcuauggggcauucaccauccaucuacuagugcugaccaacaaaguaucuaucagaaugcagaugcauauguuuuuguggggacaucaagauacagcaagaaguucaagccggaaauagcaauaagacccaaagugagggaucaagaagggagaaugaacuauuacuggacacuaguagagccgggagacaaaauaacauucgaagcaacuggaaaucuagugguaccgagauaugcauucgcaauggaaagaaaugcuggaucugguauuaucauuucagauacaccaguccacgauugcaauacaacuugucagacacccaagggugcuauaaacaccagccucccauuucagaauauacauccgaucacaauuggaaaauguccaaaauauguaaaaagcacaaaauugagacuggccacaggauugaggaaugucccgucuauucaaucuagaggccuauuuggggccauugccgguuucauugaagggggguggacagggaugguagauggaugguacgguuaucaccaucaaaaugagcaggggucaggauaugcagccgaccugaagagcacacagaaugccauugacaagauuacuaacaaaguaaauucuguuauugaaaagaugaauacacaguucacagcaguagguaaagaguucaaccaccuggaaaaaagaauagagaauuuaaauaaaaaaguugaugaugguuuccuggacauuuggacuuacaaugccgaacuguugguucuauuggaaaaugaaagaacuuuggacuaccacgauucaaaugugaagaacuuauaugaaaagguaagaagccaguuaaaaaacaaugccaaggaaauuggaaacggcugcuuugaauuuuaccacaaaugcgacaacacgugcauggaaagugucaaaaaugggacuuaugacuacccaaaauacucagaggaagcaaaauuaaacagagaagaaauagaugggguaaagcuggaaucaacaaggauuuaccagauuuuggcgaucuauucaacugucgccaguucauugguacugguagucucccugggggcaaucaguuucuggaugugcucuaaugggucucuacaguguagaauauguauuuaa

SEQ ID NO: 38845 - RNA, 1701 nt, Artificial Sequence; identical to SEQ ID NO: 35479
  derived and/or modified CDS sequence (wt) from hemagglutinin__InfluenzaA__AEH59595

SEQ ID NO: 38846 - RNA, 1701 nt, Artificial Sequence
  derived and/or modified CDS sequence (wt) from hemagglutinin__InfluenzaA__AEH59597
augaaggcaauacuaguaguucugcuauauacauuugcaaccgcaaaugcagacacauuauguauagguuaucaugcgaacaauucaacagacacuguagacacaguacuagaaaagaauguaacaguaacacacucuguuaaccuucuagaagacaagcauaacgggaaacuaugcaaacuaagagggguagccccauugcauuuggguaaauguaacauugcuggcuggauccugggaaauccagagugugaaucacuuuccacagcaagcucaugguccuacauuguggaaacaucuaguucagacaauggaacguguuacccaggagauuucaucgauuaugaggagcuaagagagcaauugagcucagugucaucauuugaaagguuugagauauuccccaagacaaguucauggcccaaucaugacucgaacaaagguguaacggcagcauguccucaugcuggagcaaaaagcuucuacaaaaauuuaauauggcuaguuaaaaaaggaaauucauacccaaagcucagcaaauccuacauuaaugauaaagggaaagaaguccucgugcuauggggcauucaccauccaucuacuagugcugaccaacaaagucucuaucagaaugcagaugcauauguuuuuguggggacaucaagauacagcaagaaguucaagccggaaauagcaauaagacccaaagugagggaucaagaagggagaaugaacuauuacuggacacuaguagagccgggagacaaaauaacauucgaagcaacuggaaaucuagugguaccgagauaugcauucgcaauggaaagaaaugcuggaucugguauuaucauuucagauacaccaguccacgauugcaauacaacuugucagacacccaagggugcuauaaacaccagccucccauuucagaauauacauccgaucacuauuggaaaauguccaaaauauguaaaaagcacaaaauugagacuggccacaggauugaggaaugucccgucuauucaaucuagaggccuauuuggggccauugccgguuucauugaagggggguggacagggaugguagauggaugguacgguuaucaccaucaaaaugagcaggggucaggcuaugcagccgaccugaagagcacacagaaugccauugacaagauuacuaacaaaguaaauucuguuauugaaaagaugaauacacaguucacagcaguagguaaagaguucaaccaccuggaaaaaagaauagagaauuuaaauaaaaaaguugaugaugguuuccuggacauuuggacuuacaaugccgaacuguugguucuauuggaaaaugaaagaacuuuggacuaccacgauucaaaugugaagaacuuauaugaaaagguaagaagccaguuaaaaaacaaugccaaggaaauuggaaacggcugcuuugaauuuuaccacaaaugcgauaacacgugcauggaaagugucaaaaaugggacuuaugacuacccaaaauacucagaggaagcaaaauuaaacagagaagaaauagaugggguaaagcuggaaucaacaaggauuuaccagauuuuggcgaucuauucaacugucgccaguucauugguacugguagucucccugggggcaaucaguuucuggaugugcucuaaugggucucuacaguguagaauauguauuuaa

SEQ ID NO: 38847 - RNA, 1701 nt, Artificial Sequence
  derived and/or modified CDS sequence (wt) from hemagglutinin__InfluenzaA__AEH59599
augaaggcaauacuaguaguucugcuauauacauuugcaaccgcaaaugcagacacauuauguauagguuaucaugcgaacaauucaacagacacuguagacacaguacuagaaaagaauguaacaguaacacacucuguuaaccuucuagaagacaagcauaacgggaaacuaugcaaacuaagagggguagccccauugcauuuggguaaauguaacauugcuggcuggauccugggaaauccagagugugaaucacucuccacagcaagcucaugguccuacauuguggaaacaucuaguucagacaauggaacguguuacccaggagauuucaucgauuaugaggagcuaagagagcaauugagcucagugucaucauuugaaagguuugagauauuccccaagacaaguucauggcccaaucaugacccgaacaaagguguaacggcagcauguccucaugcuggagcaaaaagcuucuacaaaaauuuaauauggcuaguuaaaaaaggaaauucauacccaaagcucagcaaauccuacauuaaugauaaagggaaagaaguccucgugcuauggggcauucaccauccaucuacuagugcugaccaacaaagucucuaucagaaugcagaugcauauguuuuuguggggacaucaagauacagcaagaaguucaagccggaaauagcaauaagacccaaagugagggaucaagaagggagaaugaacuauuacuggacacuaguagagccgggagacaaaauaacauucgaagcaacuggaaaucuagugguaccgagauaugcauucgcaauggaaagaaaugcuggaucugguauuaucauuucagauacaccaguccacgauugcaauacaacuugucagacacccaagggugcuauaaacaccagccucccauuucagaauauacauccgaucacaauuggaaaauguccaaaauauguaaaaagcacaaaauugagacuggccacaggauugaggaaugucccgucuauucaaucuagaggccuauuuggggccauugccgguuucauugaagggggguggacagggaugguagauggaugguacgguuaucaccaucaaaaugagcaggggucaggauaugcagccgaccugaagagcacacagaaugccauugacgagauuacuaacaaaguaaauucugucauugaaaagaugaauacacaguucacaguaguagguaaagaguucaaccaccuggaaaaaagaauagagaauuuaaauaaaaaaguugaugaugguuuccuggacauuuggacuuacaaugccgaacuguugguucuauuggaaaaugaaagaacauuggacuaccacgauucaaaugugaagaacuuauaugaaaagguaagaagccaguuaaaaaacaaugccaaggaaauuggaaacggcugcuuugaauuuuaccacaaaugcgauaacacgugcauggaaagugucaaaaaugggacuuaugacuacccaaaauacucagaggaagcaaaauuaaacagagaagaaauagaugggguaaagcuggaaucaacaaggauuuaccagauuuuggcgaucuauucaacugucgccaguucauugguacugguagucucccugggggcaaucaguuucuggaugugcucuaaugggucucuacaguguagaauauguauuuaa

SEQ ID NO: 38848 - RNA, 1701 nt, Artificial Sequence
  derived and/or modified CDS sequence (wt) from hemagglutinin__InfluenzaA__AEH59601
augaaggcaauacuaguaguucugcuauauacauuugcaaccgcaaaugcagacacauuauguauagguuaucaugcgaacaauucaacagacacuguagacacaguacuagaaaagaauguaacaguaacacacucuguuaaccuucuagaagacaagcauaacgggaaacuaugcaaacuaagagggguagccccauugcauuuggguaacuguaacauugcuggcuggauccugggaaauccagagugugaaucacucuccacagcaagcucaugguccuacauuguggaaacaucuaguucagacaauggaacguguuacccaggagauuucaucgauuaugaggagcuaagagagcaauugagcucagugucaucauuugaaagguuugagauauuccccaagacgaguucauggcccaaucaugacucgaacaaagguguaacggcagcauguccucaugcuggagcaaaaagcuucuacaaaaauuuaauauggcuaguuaaaaaaggaaauucauacccaaagcucagcaaauccuacauuaaugauaaagggaaagaaguccucgugcuauggggcauucaccauccaucuacuagugcugaccaacaaagucucuaucagaaugcagaugcauauguuuuuguggggacaucaagauacagcaagaaguucaagccggaaauagcaauaagacccaaagugagggaucaagaagggagaaugaacuauuacuggacacuaguagagccgggagacaaaauaacauucgaagcaacuggaaaucuagugguaccgagauaugcauucgcaauggaaagaaaugcuggaucugguauuaucauuucagauacaccaguccacgauugcaauacaacuugucagacacccaagggugcuauaaacaccagccucccauuucagaauauacauccgaucacaauuggaaaauguccaaaauauguaaaaagcacaaaauugagacuggccacaggacugaggaaugucccgucuauucaaucuagaggccuauuuggggccauugccgguuucauugaagggggguggacagggaugguagauggaugguacgguuaucaccaucaaaaugagcaggggucaggauaugcagccgaccugaagagcacacagaaugccauugacaagauuacuaacaaaguaaauucuguuauugaaaagaugaauacacaguucacaguaguagguaaagaguucaaccaccuggaaaaaagaauagagaauuuaaauaaaaaaguugaugaugguuuccuggacauuuggacuuacaaugccgaacuguugguucuauuggaaaaugaaagaacuuuggacuaccacgauucaaaugugaagaacuuauaugaaaagguaagaagccaguuaaaaaacaaugccaaggaaauuggaaacggcugcuuugaauuuuaccacaaaugcgacaacacgugcauggaaagugucaaaaaugggacuuaugacuacccaaaauacucagaggaagcaaaauuaaacagagaagaaauagaugggguaaagcuggaaucaacaaggaucuaccagauuuuggcgaucuacucaacugucgccaguucauugguacugguagucucccugggggcaaucaguuucuggaugugcucuaaugggucuuuacaguguagaauauguauuuaa

SEQ ID NO: 38849 - RNA, 1701 nt, Artificial Sequence; identical to SEQ ID NO: 35588
  derived and/or modified CDS sequence (wt) from hemagglutinin__InfluenzaA__AEH59604

SEQ ID NO: 38850 - RNA, 1701 nt, Artificial Sequence
  derived and/or modified CDS sequence (wt) from hemagglutinin__InfluenzaA__AEH59614
augaaggcaauacuaguaguucugcuauauacauuugcaacugcaaaugcagacacauuauguauagguuaucaugcgaacaauucaacagacacuguagacacaguacuagaaaagaauguaacaguaacacacucuguuaaccuucuagaagacaagcauaacgggaaacuaugcaaacuaagagggguagccccauugcauuuggguaaauguaacauugcuggcuggauccugggaaauccagagugugaaucacucuccacagcaagcucaugguccuacauuguggaaacaucuaguucagacaauggaacguguuacccaggagauuucaucgauuaugaggagcuaagagagcaauugagcucagugucaucauuugaaagguuugagauauuccccaagacaaguucauggcccaaucaugacccgaacaaagguguaacggcagcauguccucaugcuggagcaaaaagcuucuacaaaaauuuaauauggcuaguuaaaaaaggaaauucauacccaaagcucagcaaauccuacauuaaugauaaagggaaagaaguccucgugcuauggggcauucaccauccaucuacuagugcugaccaacaaagucucuaucagaaugcagaugcauauguuuuuguggggacaucaagauacagcaagaaguucaagccggaaauagcaauaagacccaaagugagggaucaagaagggagaaugaacuauuacuggacacuaguagagccgggagacaaaauaacauucgaagcaacuggaaaucuagugguaccgagauaugcauucgcaauggaaagaaaugcuggaucugguauuaucauuucagauacaccaguccacgauugcaauacaacuugucagacacccaagggugcuauaaacaccagccucccauuucagaauauacauccgaucacaauuggaaaauguccaaaauauguaaaaagcacaaaauugagacuggccacaggauugaggaaugucccgucuauucaaucuagaggccuauuuggggccauugccgguuucauugaagggggguggacagggaugguagauggaugguacgguuaucaccaucaaaaugagcaggggucaggauaugcagccgaccugaagagcacacagaaugccauugacgagauuacuaacaaaguaaauucuguuauugaaaagaugaauacacaguucacagcaguagguaaagaguucaaccaccuggaaaaaagaauagagaauuuaaauaaaaaaguugaugaugguuuccuggacauuuggacuuacaaugccgaacuguugguucuauuggaaaaugaaagaacuuuggacuaccacgauucaaaugugaagaacuuauaugaaaagguaagaagccaguuaaaaaacaaugccaaggaaauuggaaacggcugcuuugaauuuuaccacaaaugcgauaacacgugcauggaaagugucaaaaaugggacuuaugacuacccaaaauacucagaggaagcaaaauuaaacagagaagaaauagaugggguaaagcuggaaucaacaaggauuuaccagauuuuggcgaucuauucaacugucgccaguucauugguacugguagucucccugggggcaaucaguuucuggaugugcucuaaugggucucuacaguguagaauauguauuuaa

SEQ ID NO: 38851 - RNA, 1701 nt, Artificial Sequence
  derived and/or modified CDS sequence (wt) from hemagglutinin__InfluenzaA__AEH59624
augaaggcaauacuaguaguucugcuauauacauuugcaaccgcaaaugcagacacauuauguauagguuaucaugcgaacaauucaacagacacuguagacacaguacuagaaaagaauguaacaguaacacacucuguuaaccuucuagaagacaagcauaacgggaaacuaugcaaacuaagagggguagccccauugcauuuggguaaauguaacauugcuggcuggauccugggaaauccagagugugaaucacucuccacagcaagcucaugguccuacauuguggaaacaucuaguucagacaauggaacguguuacccaggagauuucaucgauuaugaggagcuaagagagcaauugagcucagugucaucauuugaaagguuugagauauuccccaagacaaguucauggcccaaucaugacccgaacaaagguguaacggcagcauguccucaugcuggagcaaaaagcuucuacaaaaauuuaauauggcuaguuaaaaaaggaaauucauacccaaagcucagcaaauccuacauuaaugauaaagggaaagaaguccucgugcuauggggcauucaccauccaucuacuagugcugaccaacaaaguuucuaucagaaugcagaugcauauguuuuuguggggacaucaagauacagcaagaaguucaagccggaaauagcaauaagacccaaagugagggaucaagaagggagaaugaacuauuacuggacacuaguagagccgggagacaaaauaacauucgaagcaacuggaaaucuagugguaccgagauaugcauucgcaauggaaagaaaugcuggaucugguauuaucauuucagauacaccaguccacgauugcaauacaacuugucagacacccaagggugcuauaaacaccagccucccauuucagaauauacauccgaucacaauuggaaaauguccaaaauauguaaaaagcacaaaauugagacuggccacaggauugaggaaugucccgucuauucaaucuagaggccuauuuggggccauugccgguuucauugaagggggguggacagggaugguagauggaugguacgguuaucaccaucaaaaugagcaggggucaggauaugcagccgaccugaagagcacacagaaugccauugacgagauuacuaacaaaguaaauucuguuauugaaaagaugaauacacaguucacagcaguagguaaagaguucaaccaccuggaaaaaagaauagagaauuuaaauaaaaaaguugaugaugguuuccuggacauuuggacuuacaaugccgaacuguugguucuauuggaaaaugaaagaacuuuggacuaccacgauucaaaugugaagaacuuauaugaaaagguaagaagccaguuaaaaaacaaugccaaggaaauuggaaacggcugcuuugaauuuuaccacaaaugcgauaauacgugcauggaaagugucaaaaaugggacuuaugacuacccaaaauacucagaggaagcaaaauuaaacagagaagaaauagaugggguaaagcuggaaucaacaaggauuuaccagauuuuggcgaucuauucaacugucgccaguucauugguacugguagucucccugggggcaaucaguuucuggaugugcucuaaugggucucuacaguguagaauauguauuuaa

SEQ ID NO: 38852 - RNA, 1698 nt, Artificial Sequence
  derived and/or modified CDS sequence (wt) from hemagglutinin__InfluenzaA__AEH77259
augaaaguaaaacuacugguccuguuaugcacauucacagcuacauaugcagacacaauauguauaggcuaccaugcuaacaacucgaccgacacuguugacacaguacuugaaaagaaugugacagugacacacucugucaaccugcuugagaacagucacaauggaaaacuaugucuauuaaaaggaauagccccacuacaauuggguaacugcagcgucgccggguggaucuuaggaaacccagaaugcgaauuauugauuuccaaggagucaugguccuacauuguagaaaaaccaaauccugagaauggaacauguuacccagggcauuucgcugacuaugaggaacugagggagcaauugaguucaguaucuucauuugagagguucgaaauguuccccaaagaaagcucauggcccaaccacaccguaaccggagugucagcaucaugcucccauaauggggaaagcaguuuuuacagaaauuugcuauggcugacggagaagaaugguuuguacccgaaccugagcaaguccuaugcaaacaacaaagaaaaagaaguccuuguacuaugggguguucaucacccgccaagcauaagugaccaaaagacccucuaucauacagaaaaugcuuauguuucuguagugucuucacauuauagcagaaaauucaccccagaaauagccaaaagacccaaaguaagagaucaagaaggaagaaucaacuacuacuggacucugcuugaacccggggauacaauaauauuugaggcaaauggaaaucuaauagcgccaagauaugcuuucgcacugaguagaggcuuuggaucaggaaucaucaacucaaaugcaccaauggauaaaugugaugcgaagugccaaacaccucagggagcuauaaacagcagucuuccuuuccagaacguacacccagucacaauaggagaguguccaaaguaugucaggagugcaaaauuaaggaugguuacaggacuaaggaacaucccauccauucaauccagagguuuguuuggagccauugccgguuucauugaagggggguggacuggaaugguagaugguugguaugguuaucaucaucagaaugagcaaggaucuggcuaugcugcagaucaaaaaagcacacaaaaugccauuaaugggauuacaaacaaggugaauucuguaauugagaaaaugaacacucaauucacagcagugggcaaagaauucaacaaauuggaaagaaggauggaaaacuugaacaaaaaaguugaugauggguuuauagacauuuggacauauaaugcagaacuguugguucuacuggaaaaugaaaggacuuuggauuuccaugacuccaaugugaagaaucuguaugagaaaguaaaaaaccaguuaaagaauaaugcuaaagaaauaggaaauggguguuuugaauucuaucacaaguguaacgaugaaugcauggagaguguaaagaauggaacuuaugacuauccaaaauauuccgaagaaucaaaguuaaacagggagaaaauugauggagugaaauuggaaucaaugggagucuaucagauucuggcgaucuacucaacagucgccaguucucugguuuuuuuggucucccugggggcaaucagcuucuggauguguuccaaugggucuuugcaguguagaauaugcaucuaa

SEQ ID NO: 38853 - RNA, 1701 nt, Artificial Sequence; identical to SEQ ID NO: 34705
  derived and/or modified CDS sequence (wt) from hemagglutinin__InfluenzaA__AEH77270

SEQ ID NO: 38854 - RNA, 1701 nt, Artificial Sequence
  derived and/or modified CDS sequence (wt) from hemagglutinin__InfluenzaA__AEH77279
augaagacuaucauugcuuugagcuacauucuaugucugguuuucgcucaaaaacuucccggaaaugacaacagcacggcaacgcugugccuugggcaccaugcaguaccaaacggaacgauagugaaaacaaucacgaaugaccaaauugaaguuacuaaugcuacugagcugguacagaguuccucaacagguggaauaugcgacagcccucaucagauccuugauggagaaaacugcacacuaauagaugcucuauugggagacccucagugugauggcuuccaaaauaagaaaugggaccuuuuuguugaacgcagcaaagccuacagcaacuguuacccuuaugaugugccggauuaugccucccuuaggucacuaguugccucauccggcacacuggaguuuaacaaugaaagcuucgauuggacuggagucacucagaauggaacaagcucugcuugcaaaaggagauccaauaaaaguuucuuuaguagauugaauugguugacccacuuaaaauacaaauacccagcauugaacgugacuaugccaaacaaugaaaaauuugacaaauuguacauuugggggguucaccacccggguacggacagugaccaaaucagccuauaugcucaagcaucaggaagaaucacagucucuaccaaaagaagccaacaaacuguaaucccgaauaucggaucuagaccuaggguaagggaugucucuagccgaauaagcaucuauuggacaauaguaaaaccgggagacauacuuuugauuaacagcacagggaaucuaauugcuccucgggguuacuucaaaauacgaagugggaaaagcucaauaaugagaucagaugcacccauuggcaaaugcaauuccgaaugcaucacuccaaauggaagcauucccaaugacaaaccauuucaaaauguaaacaggaucacauauggggccugucccagauauguuaagcaaaacacuuugaaauuggcaacagggaugcgaaauguaccagagaaacaaacuagaggcauauuuggcgcaaucgcgggcuucauagaaaaugguugggagggaaugguggacgguugguacgguuucaggcaucaaaauuccgagggcacaggacaagcagcagaucucaaaagcacucaagcagcaaucaaccaaaucaaugggaaacugaauagguuaaucgggaaaacaaacgagaaauuccaucagauugaaaaagaauucucagaaguagaagggagaauucaggaccucgagaaauauguugaggacacuaaaauagaucucuggucauacaacgcggagcuucuuguugcccuggagaaccaacauacaauugaucuaacugacucagaaaugaacaaacuguuugaaagaacaaagaagcaacugagggaaaaugcugaggauaugggcaaugguuguuucaaaauauaccacaaaugugacaaugccugcauagggucaaucagaaauggaacuuaugaccaugauguguacagagaugaagcauuaaacaaccgguuccagaucaaagguguugagcugaagucaggauacaaagauuggauccuauggauuuccuuugccauaucauguuuuuugcuuuguguugcuuuguugggguucaucaugugggccugccaaaaaggcaacauuaggugcaacauuugcauuuga

SEQ ID NO: 38855 - RNA, 1701 nt, Artificial Sequence; identical to SEQ ID NO: 36187
  derived and/or modified CDS sequence (wt) from hemagglutinin__InfluenzaA__AEI29215

SEQ ID NO: 38856 - RNA, 1701 nt, Artificial Sequence; identical to SEQ ID NO: 34681
  derived and/or modified CDS sequence (wt) from hemagglutinin__InfluenzaA__AEI29225

SEQ ID NO: 38857 - RNA, 1701 nt, Artificial Sequence
  derived and/or modified CDS sequence (wt) from hemagglutinin__InfluenzaA__AEI29591
augaagacuaucauugcuuugagcuacauuuucugucugguuuucgcccaagaccuuccaggaaaugacaacagcacagcaacucuuugccugggacaucaugcggugccaaacggaacgcuagugaaaacaaucacgaaugaucagauugaagugacuaaugcuacugaacugguucagaguuccucaacggguaaaauaugcgacaauccucaucgaauccuugauggaauaaacugcacacugauagaugcucuauugggggacccucauugugauggcuuucaaaaugagaaaugggaccuuuucguugaacgcagcaaagcuuucagcaacuguuacccuuaugaugugccagauuaugccucccuuaggucacuaguugccucgucaggcacucuggaguuuaucaaugaaggcuucaauuggacuggggucacucagaaugggggaagcagugcuugcaaaaggggaccugauaacgguuuuuucaguagacugaacugguuguacaaaucaggaagcacauauccagugcagaacgugaccaugccaaacaaugacaacucugacaaacuauacauuugggggguucaccacccgagcacggacaaagaacaaaccaaccuauauguucaagcaucagggaaagucacagucuccaccaagagaagccagcaaacuguaaucccgaaugucgggucuagacccuggguaaggggucuaucuaguagaguaagcaucuauuggacaauaguuaaaccgggagacauacugguaauuaauaguaauggaaaccuaauugcuccucgggguuacuacaaaaugcgcacugggaaaagcucaauaaugaggucagaugcaccuauuggcacuugcagcucugaaugcaucacuccaaauggaagcauucccaaugacaagcccuuucaaaacguaaacaagaucacauauggggcaugucccaaguauguuaagcaaaacacucugaaguuggcaacagggaugcggaauguaccagagaaacaaacuagaggcauauucggcgcaauagcagguuucauagaaaaugguugggagggaaugauagacgguugguacgguuucaggcaucaaaauucugagggcacaggacaagcagcagaucuuaaaagcacucaagcagccaucgaccaaaucaaugggaaacugaauaggguaaucgagaagacgaacgagaaauuccaucaaaucgaaaaggaauucucagaaguagaagggagaauucaggaccucgagaaauacguugaagacacuaaaauagaucucuggucuuacaaugcggagcuucuugucgcucuggagaaccaacauacaauugaucugacugacucggaaaugaacaaacuguuugaaaaaacaaggaggcaacugagggaaaaugcugaggacaugggcaaugguugcuucaaaauauaccacaaaugugacaaugcuugcauagggucaaucagaaaugggacuuaugaccaugauguauacagagacgaagcauuaaacaaccgguuucagaucaaagguguugaacugaagucaggauacaaagacuggauccuguggauuuccuuugccauaucaugcuuuuugcuuuguguuguuuugcugggguucaucaugugggccugccagaaaggcaacauuaggugcaacauuugcauuuag

SEQ ID NO: 38858 - RNA, 1701 nt, Artificial Sequence; identical to SEQ ID NO: 32055
  derived and/or modified CDS sequence (wt) from hemagglutinin__InfluenzaA__AEI54347

SEQ ID NO: 38859 - RNA, 1701 nt, Artificial Sequence
  derived and/or modified CDS sequence (wt) from hemagglutinin__InfluenzaA__AEI54358
augaagacuaucauugcuuugagcuacauucuaugucugguuuucgcucaaaaacuucccggaaaugacaacagcacggcaacgcugugccuugggcaccaugcaguaccaaacggaacgauagugaaaacaaucacgaaugaccaaauugaaguuacuaaugcuacugagcugguacagaguuccucaacagguggaauaugcgacaguccucaucagauccuugauggagaaaacugcacacuaauagaugcucuauugggagacccucagugugauggcuuccaaaauaagaaaugggaccuuuuuguugaacgcagcaaagccuacagcaacuguuacccuuaugaugugccggauuaugccucccuuaggucacuaguugccucauccggcacacuagaguuuaacaaugaaagcuucgauuggacuggagucacucagaauggaacaagcucugcuugcaaaaggagaucuaauaaaaguuucuuuaguagauugaauugguugacccacuuaaaauacaaauacccagcauugaacgugacuaugccaaacaaugaaaaauuugacaaauuguacauuugggggguucaccacccggguacggacagugaccaaaucagccuauaugcucaagcaucaggaagaaucacagucucuaccaaaagaagccaacaaacuguaaucccgaauaucggaucuagacccaggguaagggaugucuccagccgaauaagcaucuauuggacaauaguaaaaccgggagacauacuuuugauuaacagcacagggaaucuaauugcuccucgggguuacuucaaaauacgaagugggaaaagcucaauaaugagaucagaugcacccauuggcaaaugcaauucugaaugcaucacuccaaauggaagcauucccaaugacaaaccauuucaaaauguaaacaggaucacauauggggccugucccagauauauuaagcaaaacacucugaaauuggcaacagggaugcgaaauguaccagagaaacaaacuagaggcauauuuggcgcaaucgcggguuucauagaaaaugguugggagggaaugguggacgguugguacgguuucaggcaucaaaauucugagggcacaggacaagcagcagaucucaaaagcacucaagcagcaaucaaccaaaucaaugggaaacugaauagguuaaucgggaaaacaaacgagaaauuccaucagauugaaaaagaauucucagaaguagaagggagaauucaggaccucgagaaauauguugaggacacuaaaauagaucucuggucauacaacgcggagcuucuuguugcccuggagaaccaacauacaauugaucuaacugacucagaaaugaacaaacuguuugaaagaacaaagaagcaacugagggaaaaugcugaggauaugggcaaugguuguuucaaaauauaccacaaaugugacaaugccugcauagggucaaucagaaauggaacuuaugaccaugauguguacagagaugaagcauuaaacaaccgguuccagaucaaagguguugagcugaagucaggauacaaagauuggauccuauggauuuccuuugccauaucauguuuuuugcuuuguguugcuuuguugggguucaucaugugggccugccaaaaaggcaacauuaggugcaacauuugcauuuga

SEQ ID NO: 38860 - RNA, 1701 nt, Artificial Sequence
  derived and/or modified CDS sequence (wt) from hemagglutinin__InfluenzaA__AEI54369
augaagacuaucauugcuuugagcuacauucuaugucugguuuucgcucaaaaacuucccggaaaugacaacagcacggcaacgcugugccuugggcaccaugcaguaccaaacggaacgauagugaaaacaaucacgaaugaccaaauugaaguuacuaaugcuacugagcugguucagaguuccucaacagguggaauaugcgacaguccucaucagauccuugauggagaaaauugcacacuaauagaugcucuauugggagacccucagugugauggcuuccaaaauaagaaaugggaccuuuuuguugaacgcagcaaagccuacagcaacuguuacccuuaugaugugccggauuaugccucccuuaggucacuaauugccucauccggcacacuggaguuuaacaaugaaagcuucaauuggacuggagucacucaaaauggaacaagcucugcuugcaaaaggagaucuaauagcaguuucuuuaguagauugaauugguugacccacuuaaaauucaaauacccagcauugaacgugacuaugccaaacaaugaagaauuugacaaauuguacauuugggggguucaccacccggguacauacaaugaccaaaucagccuauaugcucaagcaucaggaagaaucacagucucuaccaaaagaagccaacaaacuguaaucccgaauaucgggucuagacccaggguaagggauauccccagcagaauaagcaucuauuggacaauaguaaaaccgggagacauacuuuugauuaacagcacagggaaucuaauugcuccucgggguuacuucaaaauacgaagugggaaaagcucaauaaugagaucagaugcacccauuggcaaaugcaauucugaaugcaucacuccaaauggaagcauucccaaugacaaaccauuucaaaauguaaacaggaucacauauggggccugucccagauauguuaagcaaaacacucugaaauuggcaacagggaugcgaaauguaccagagaaacaaacuagaggcauauuuggcgcaaucgcggguuucauagaaaaugguugggagggaaugguggaugguugguacgguuucaggcaucaaaauucugagggaauaggacaagcagcagaucucaaaagcacucaagcagcaaucgaccaaaucaaugggaagcugaauagguugaucgggaaaaccaacgagaaauuccaucagauugaaaaagaauucucagaaguagaagggagaauucaggaccucgagaaauauguugaggacacuaaaauagaucucuggucauacaacgcggagcuucuuguugcccuggagaaccaacauacaauugaucuaacugacucagaaaugaacaaacuguuugaaagaacaaagaagcaacugagggaaaaugcugaggauaugggcaaugguuguuucaaaauauaccacaaaugugacaaugccugcauagggucaaucagaaauggaacuuaugaccaugauguauacagagaugaagcauuaaacaaccgguuccagaucaaagguguugagcugaagucaggauacaaagauuggauccuauggauuuccuuugccauaucauguuuuuugcuuuguguugcuuuguugggguucaucaugugggccugccaaaaaggcaacauuaggugcaacauuugcauuuga

SEQ ID NO: 38861 - RNA, 1701 nt, Artificial Sequence; identical to SEQ ID NO: 32532
  derived and/or modified CDS sequence (wt) from hemagglutinin__InfluenzaA__AEI54380

SEQ ID NO: 38862 - RNA, 1701 nt, Artificial Sequence; identical to SEQ ID NO: 38791
  derived and/or modified CDS sequence (wt) from hemagglutinin__InfluenzaA__AEI54391

SEQ ID NO: 38863 - RNA, 1701 nt, Artificial Sequence
  derived and/or modified CDS sequence (wt) from hemagglutinin__InfluenzaA__AEI54402
augaagacuaucauugcuuugagcuacauucuaugucugguuuucgcucaaaaacuucccggaaaugacaacagcacggcaacgcugugccuugggcaccaugcaguaccaaacggaacgauagugaaaacaaucacgaaugaccaaauugaaguuacuaaugcuacugagcugguucagaguuccucaacaggugaaauaugcuacaguccucaucagauccuugauggagaaaacugcacacuaauagaugcucuauugggagacccucagugugauggcuuccaaaauaagaaaugggaccuuuuuguugaacgcagcaaagccuacagcaacuguuacccuuaugaugugccggauuaugccucccuuaggucacuaguugccucauccggcacacuggaguuuaacaaugaaagcuucaauuggacuggagucacucaaaacggaacaagcucugcuugcauaaggagaucuaauaacaguuucuuuaguagauugaauugguugacccacuuaaaauucaaauacccagcauugaacgugacuaugccaaacaaugaaaaauuugacaaauuguacauuugggggguucaccacccggguacggacaaugaccaaaucuuccuguaugcucaagcaucaggaagaaucacagucucuaccaaaagaagccaacaaacuguaaucccgaauaucggaucuagacccagaguaaggaauauccccagcagaauaagcaucuauuggacaauaguaaaaccgggagacauacuuuugauuaacagcacagggaaucuaauugcuccuagggguuacuucaaaauacgaagugggaaaagcucaauaaugagaucagaugcacccauuggcaaaugcaauucugagugcaucacuccaaauggaagcauucccaaugacaaaccauuccaaaauguaaacaggaucacauacggggccugucccagauauguuaagcaaaacacucugaaauuggcaacagggaugcgaaauguaccagagaaacaaacuagaggcauauuuggcgcaaucgcggguuucauagaaaaugguugggagggaaugguggaugguugguacgguuucaggcaucaaaauucugagggaauaggacaagcagcagaucucaaaagcacucaagcagcaaucgaucaaaucaaugggaagcugaauagguugaucgggaaaaccaacgagaaauuccaucagauugaaaaagaauucucagaagucgaagggagaauucaagaccuugagaaauauguugaggacaccaaaauagaucucuggucauacaacgcggagcuucuuguugcccuggagaaccaacauacaauugaucuaacugacucagaaaugaacaaacuguuugaaaaaacaaagaagcaacugagggaaaaugcugaggauaugggcaaugguuguuucaaaauauaccacaaaugugacaaugccugcauaggaucaaucagaaauggaacuuaugaccacgauguauacagagaugaagcauuaaacaaccgguuccagaucaagggcguugagcugaagucaggauacaaagauuggauccuauggauuuccuuugccauaucauguuuuuugcuuuguguugcuuuguugggguucaucaugugggccugccaaaaaggcaacauuaggugcaacauuugcauuuga

SEQ ID NO: 38864 - RNA, 1701 nt, Artificial Sequence
  derived and/or modified CDS sequence (wt) from hemagglutinin__InfluenzaA__AEI54413
augaagacuaucauugcuuugagcuacauucuaugucugguuuucgcucaaaaacuucccggaaaugacaacagcacggcaacgcugugccuugggcaccaugcaguaccaaacggaacgauagugaaaacaaucacgaaugaccaaauugaaguuacuaaugcuacugagcugguucagaguuccucaacaggugaaauaugcgacaguccucaucagauccuugauggagaaaacugcacacuaauagaugcucuauugggagacccucagugugauggcuuccaaaauaagaaaugggaccuuuuuguugaacgcagcaaagccuacagcaacuguuacccuuaugaugugccggauuaugccucccuuaggucacuaguugccucaucuggcacacuggaguuuaacaaugaaagcuucaauuggacuggagucacucaaaacggaacaagcucugcuugcauaaggagaucuaacaacaguuucuuuaguagauugaauugguugacccacuuaaaauucaaauacccagcauugaacgugacuaugccaaacaaugaaaaauuugacaaauuguacauuugggggguucaccacccggguacggacaaugaccaaaucuuccuguaugcucaagcaucaggaagaaucacagucucuaccaaaagaagccaacaaacuguaaucccgaauaucggaucuagacccagaguaaggaauauccccagcagaauaagcauuuauuggacaauaguaaaaccgggagacauacuuuugauuaacagcacagggaaucuaauugcuccuagggguuacuucaaaauacgaagugggaaaagcucaauaaugagaucagaugcacccauuggcaaaugcaauucugaaugcaucacuccaaauggaagcauucccaaugacaaaccauuccaaaauguaaacaggaucacauacggggccugucccagauauguuaagcaaaacacucugaaauuggcaacagggaugcgaaauguaccagagaaacaaacuagaggcauauuuggcgcaaucgcggguuucauagaaaaugguugggagggaaugguggaugguugguacgguuucaggcaucaaaauucugagggaauaggacaagcagcagaucucaaaaguacucaagcagcaaucgaucaaaucaaugggaagcugaauagguugaucgggaaaaccaacgagaaauuccaucagauugaaaaagaauucucagaagucgaagggagaauucaggaccuugagaaauauguugaggacaccaaaauagaucucuggucauacaacgcggagcuucuuguugcccuggagaaccaacauacaauugaucuaacugacucagaaaugaacaaacuguuugaaaaaacaaagaagcaacugagggaaaaugcugaggauaugggcaaugguuguuucaaaauauaccacaaaugugacaaugccugcauaggaucaaucagaaauggaacuuaugaccacgauguauacagagaugaagcauuaaacaaccgguuccagaucaagggcguugagcugaagucaggauacaaagauuggauccuauggauuuccuuugccauaucauguuuuuugcuuuguguugcuuuguugggguucaucaugugggccugccaaaaaggcaacauuaggugcaacauuugcauuuga

SEQ ID NO: 38865 - RNA, 1701 nt, Artificial Sequence; identical to SEQ ID NO: 38815
  derived and/or modified CDS sequence (wt) from hemagglutinin__InfluenzaA__AEI54424

SEQ ID NO: 38866 - RNA, 1701 nt, Artificial Sequence
  derived and/or modified CDS sequence (wt) from hemagglutinin__InfluenzaA__AEI54446
augaagacuaucauugcuuugagcuacauucuaugucugguuuucgcucaaaaacuuccugaaaaugacaacagcacggcaacgcugugccuugggcaccaugcagugccaaacggaacgauagugaaaacaaucacgaaugaccaaauugaaguuacuaaugcuacugagcugguucagaguuccucaacaggugaaauaugcaacaguccucaucagauccuugauggagaaaacugcacacuaauagaugcucuauugggagacccucagugugauggcuuccaaaacaagaaaugggaccuuuuuguugaacgaagcaaagcccacagcaacuguuacccuuaugaugugccggauuaugccucccuuaggucacuaguugccucauccggcacacuggaguuuaacaaugaaagcuucaauuggacuggagucacucaaaacggaacaagcucugcuugcauaaggagaucuaauaauaguuucuuuaguagauugaauugguugacccacuuaaacuucaaauacccagcauugaacgugacuaugccaaacaaugaacaauuugacaaauuguacauuugggggguucaccacccggguacggacaaggaccaaaucuuccuguaugcucaagcagcaggaagaaucacaguaucuaccaaaagaagccaacaagcuguaauuccgaauaucggaucuagacccagaguaaggaauaucccuagcagaguaagcaucuauuggacaauaguaaaaccgggagacauacuuuugauuaacagcacagggaaucuaauugcuccuagggguuacuucaaaauacgaagugggaaaagcucaauaaugagaucagaugcacccauuggcaaaugcaauucugcaugcaucacuccaaauggaagcauucccaaugacaaaccauuccaaaauguaaacaggaucacauacggggccugucccagauauguuaagcaaaacacucugaaauuggcaacaggaaugagaaauguaccagagaaacaaacuagaggcauauuuggcgcaauagcugguuucauagaaaaugguugggagggaaugguggaugguugguacgguuucaggcaucaaaauucugagggaaggggacaagcagcagaucucaaaagcacucaagcagcaaucgaucaaaucaaugggaagcugaauagauugaucgggaaaaccaacgagaaauuccaucagauugaaaaagaauucucagaagucgaagggagaauucaggaccuugagaaauauguugaggacacuaaaauagaucucuggucauacaacgcggagcuucuuguugcccuggagaaccaacacacaauugaucuaacugacucagaaaugaacaaauuguuugaaaaaacaaagaagcaacugagggaaaaugcugaggauaugggcaaugguuguuucaaaauauaccacaaaugugacaaugccugcauaggaucaaucagaaauggaacuuaugaccacgauguguacagagaugaagcauuaaacaaccgauuccagaucaagggaguugagcugaagucaggguacaaagauuggauccuauggauuuccuuugccauaucauguuuuuugcuuuguguugcuuuguugggguucaucaugugggccugccaaaaaggcaacauuaggugcaacauuugcauuuga

SEQ ID NO: 38867 - RNA, 1701 nt, Artificial Sequence
  derived and/or modified CDS sequence (wt) from hemagglutinin__InfluenzaA__AEI54457
augaagacuaucauugcuuugagcuacauucuaugucugguuuucgcucaaaaacuuccuggaaaugacaacagcacggcaacgcugugccuugggcaccaugcagugccaaacggaacgauagugaaaacaaucacgaaugaccaaauugaaguuacuaaugcuacugagcugguucagaguuccucaacaggugaaauaugcaacaguccucaucagauccuugauggagaaaacugcacacuaauagaugcucuauugggagacccucagugugauggcuuccaaaacaagaaaugggaccuuuuuguugaacgaagcaaagcccacagcaacuguuacccuuaugaugugccggauuaugccucccuuaggucacuaguugccucauccggcacacuggaguuuaacaaugaaagcuucaauuggacuggagucacucaaaacggaacaagcucugcuugcauaaggagaucuaauaauaguuucuuuaguagauugaauugguugacccacuuaaacuucaaauacccagcauugaacgugacuaugccaaacaaugaacaauuugacaaauuguacauuugggggguucaccacccggguacggacaaggaccaaaucuuccuguaugcucaagcagcaggaagaaucacaguaucuaccaaaagaagccaacaagcuguaauuccgaauaucggaucuagacccagaguaaggaauaucccuagcagaguaagcaucuauuggacaauaguaaaaccgggagacauacuuuugauuaacagcacagggaaucuaauugcuccuagggguuacuucaaaauacgaagugggaaaagcucaauaaugagaucagaugcacccauuggcaaaugcaauucugcaugcaucacuccaaauggaagcauucccaaugacaaaccauuccaaaauguaaacaggaucacauacggggccugucccagauauguuaagcaaaacacucugaaauuggcaacaggaaugagaaauguaccagagaaacaaacuagaggcauauuuggcgcaauagcugguuucauagaaaaugguugggagggaaugguggaugguugguacgguuucaggcaucaaaauucugagggaaggggacaagcagcagaucucaaaagcacucaagcagcaaucgaucaaaucaaugggaagcugaauagauugaucgggaaaaccaacgagaaauuccaucagauugaaaaagaauucucagaagucgaagggagaauucaggaccuugagaaauauguugaggacacuaaaauagaucucuggucauacaacgcggagcuucuuguugcccuggagaaccaacacacaauugaucuaacugacucagaaaugaacaaauuguuugaaaaaacaaagaagcaacugagggaaaaugcugaggauaugggcaaugguuguuucaaaauauaccacaaaugugacaaugccugcauaggaucaaucagaaauggaacuuaugaccacgauguauacagagaugaagcauuaaacaaccgauuccagaucaagggaguugagcugaagucaggguacaaagauuggauccuauggauuuccuuugccauaucauguuuuuugcuuuguguugcuuuguugggguucaucaugugggccugccaaaaaggcaacauuaggugcaacauuugcauuuga

SEQ ID NO: 38868 - RNA, 1701 nt, Artificial Sequence
  derived and/or modified CDS sequence (wt) from hemagglutinin__InfluenzaA__AEI54468
augaagacuaucauugcuuugagcuacauucuaugucugguuuucgcucaaaaacuuccuggaaaugacaacagcacggcaacgcugugccuugggcaccaugcaguaccaaacggaacgauagugaaaacaaucacgaaugaccaaauugaaguuacuaaugcuacugagcugguucagaguuccucaacaggugaaauaugcgacaguccucaucagauccuugauggagaaaacugcacacuaauagaugcucuauugggagacccucagugugauggcuuccaaaauaagaaaugggaccuuuuuguugaacgaagcaaagccuacagcaacuguuacccuuaugaugugccggauuaugccucccuuaggucacuaguugccucauccggcacacuggaguuuaacaaugaaagcuucaauuggacuggagucacucaaaacggaacaagcucugccugcauaaggagaucuaauaauaguuucuuuaguagauugaauugguugacccacuuaaacuucaaauacccagcauugaacgugacuaugccaaacaaugaacaauuugacaaauuguacauuugggggguucaccacccggguacggacaaggaccaaaucuuccuguaugcucaagcaucaggaagaaucacaguaucuaccaaaagaagccaacaagcuguaaucccgaauaucggaucuagacccagaguaaggaauaucccuagcagaauaagcaucuauuggacaauaguaaaaccaggagacauacuuuugauuaacagcacagggaaucuaauugcuccuagggguuacuucaaaauacgaaguggaaaaagcucaauaaugagaucagaugcacccauuggcaaaugcaauucugaaugcaucacuccaaauggaagcauucccaaugacaaaccauuccaaaauguaaacaggaucacauacggggccugucccagauauguuaagcaaagcacucugaaauuggcaacaggaaugcgaaauguaccagagaaacaaacuagaggcauauuuggcgcaauagcggguuucauagaaaaugguugggagggaaugguggaugguugguacgguuucaggcaucaaaauucugagggaagaggacaagcagcagaucucaaaagcacucaagcagcaaucgaucaaaucaaugggaagcugaauagauugaucgggaaaaccaacgagaaauuccaucagauugaaaaagaauucucagaagucgaagggagaauucaggaccuugagaaauauguugaggacacuaaaauagaucucuggucauacaacgcggagcuucuuguugcccuggagaaccaacauacaauugaucuaacugacucagaaaugaacaaacuguuugaaaaaacaaagaagcaacugagggaaaaugcugaggauaugggcaaugguuguuucacaauauaccacaaaugugacaaugccugcauaggaucaaucagaaauggaacuuaugaccacaauguauacagagaugaagcauuaaacaaccgguuccagaucaagggaguugagcugaagucaggguacaaagauuggauccuauggauuuccuuugccauaucauguuuuuugcuuuguguugcuuuguugggguucaucaugugggccugccaaaaaggcaacauuaggugcaacauuugcauuuga

SEQ ID NO: 38869 - RNA, 1701 nt, Artificial Sequence; identical to SEQ ID NO: 37545
  derived and/or modified CDS sequence (wt) from hemagglutinin__InfluenzaA__AEI54479

SEQ ID NO: 38870 - RNA, 1701 nt, Artificial Sequence
  derived and/or modified CDS sequence (wt) from hemagglutinin__InfluenzaA__AEI54490
augaagacuaucauugcuuugagcuacauucuaugucugguuuucgcucaaaaacuuccuggaaaugacaacagcacggcaacgcugugccuugggcaccaugcagugccaaacggaacgauagugaaaacaaucacgaaugaccaaauugaaguuacuaaugcuacugagcugguucagaguuccucaacaggugaaauaugcaacaguccucaucagauccuugauggagaaaacugcacacuaauagaugcucuauugggagacccucagugugauggcuuccaaaacaagaaaugggaccuuuuuguugaacgaagcaaagcccacagcaacuguuacccuuaugaugugccggauuaugccucccuuaggucacuaguugccucauccggcacacuggaguuuaacaaugaaagcuucaauuggacuggagucacucaaaacggaacaagcucugcuugcauaaggagaucuaauaauaguuucuuuaguagauugaauugguugacccacuuaaacuucaaauauccagcauugaacgugacuaugccaaacaaugaacaauuugacaaauuguacauuuggggaguucaccacccggguacggacaaggaccaaaucuuccuguaugcucaagcagcaggaagaaucacaguaucuaccaaaagaagccaacaagcuguaauuccgaauauuggaucuagacccagaguaaggaauaucccuagcagaguaagcaucuauuggacaauaguaaaaccgggagacauacuuuugauuaacagcacagggaaucuaauugcuccuagggguuacuucaaaauacgaagugggaaaagcucaauaaugagaucagaugcacccauuggcaaaugcaauucugcaugcaucacuccaaauggaagcauucccaaugacaaaccauuccaaaauguaaacaggaucacauacggggccugucccagauauguuaagcaaaacacucugaaauuggcaacaggaaugagaaauguaccagagaaacaaacuagaggcauauuuggcgcaauagcugguuucauagaaaaugguugggagggaaugguggaugguugguacgguuucaggcaucaaaauucugagggaaggggacaagcagcagaucucaaaagcacucaagcagcaaucgaccaaaucaaugggaagcugaauagauugaucgggaaaaccaacgagaaauuccaucagauugaaaaagaauucucagaagucgaagggagaauucaggaccuugagaaauauguugaggacacuaaaauagaucucuggucauacaacgcggagcuucuuguugcccuggagaaccaacacacaauugaucuaacugacucagaaaugaacaaacuguuugaaaaaacaaagaagcaacugagggaaaaugcugaggauaugggcaaugguuguuucaaaauauaccacaaaugugacaaugccugcauaggaucaaucagaaauggaacuuaugaccacgauguguacagagaugaagcauuaaacaaccgauuccagaucaagggaguugagcugaagucaggguacaaagauuggauccuauggauuuccuuugccauaucauguuuuuugcuuuguguugcuuuguugggguucaucaugugggccugccaaaaaggcaacauuaggugcaacauuugcauuuga

SEQ ID NO: 38871 - RNA, 1701 nt, Artificial Sequence
  derived and/or modified CDS sequence (wt) from hemagglutinin__InfluenzaA__AEI54501
augaagacuaucauugcuuugagcuacauucuaugucugguuuucgcucaaaaacuuccugaaaaugacaacagcacggcaacgcugugccuugggcaccaugcagugccaaacggaacgauagugaaaacaaucacgaaugaccaaauugaaguuacuaaugcuacugagcugguucagaguuccucaacaggugaaauaugcaacaguccucaucagauccuugauggagaaaacugcacacuaauagaugcucuauugggagacccucagugugauggcuuccaaaacaagaaaugggaccuuuuuguugaacgaagcaaagcccacagcaacuguuacccuuaugaugugccggauuaugccucccuuaggucacuaguugccucauccggcacacuggaguuuaacaaugaaagcuucaauuggacuggagucacucaaaacggaacaagcucugcuugcauaaggagaucuaauaauaguuucuuuaguagauugaauugguugacccacuuaaacuucaaauacccagcauugaacgugacuaugccaaacaaugaacaauuugacaaauuguacauuugggggguucaccacccggguacggacaaggaccaaaucuuccuguaugcucaagcagcaggaagaaucacaguaucuaccaaaagaagccaacaagcuguaauuccgaauaucggaucuagacccagaguaaggaauaucccuagcagaguaagcaucuauuggacaauaguaaaaccgggagacauacuuuugauuaacagcacagggaaucuaauugcuccuagggguuacuucaaaauacgaagugggaaaagcucaauaaugagaucagaugcacccauuggcaaaugcaauucugcaugcaucacuccaaauggaagcauucccaaugacaaaccauuccaaaauguaaacaggaucacauacggggccugucccagauauguuaagcaaaacacucugaaauuggcaacaggaaugagaaauguaccagagaaacaaacuagaggcauauuuggcgcaauagcugguuucauagaaaaugguugggagggaaugguggaugguugguacgguuucaggcaucaaaauucugagggaaggggacaagcagcagaucucaaaagcacucaagcagcaaucgaucaaaucaaugggaagcugaauagauugaucgggaaaaccaacgagaaauuccaucagauugaaaaagaauucucagaagucgaagggagaauucaggaccuugaaaaauauguugaggacacuaaaauagaucucuggucauacaacgcggagcuucuuguugcccuggagaaccaacacacaauugaucuaacugacucagaaaugaacaaauuguuugaaaaaacaaagaagcaacugagggaaaaugcugaggauaugggcaaugguuguuucaaaauauaccacaaaugugacaaugccugcauaggaucaaucagaaauggaacuuaugaccacgauguguacagagaugaagcauuaaacaaccgauuccagaucaagggaguugagcugaagucaggguacaaagauuggauccuauggauuuccuuugccauaucauguuuuuugcuuuguguugcuuuguugggguucaucaugugggccugccaaaaaggcaacauuaggugcaacauuugcauuuga

SEQ ID NO: 38872 - RNA, 1701 nt, Artificial Sequence
  derived and/or modified CDS sequence (wt) from hemagglutinin__InfluenzaA__AEI59979
augaagacuaucauugcuuugagcuacauucuaugucugguuuucgcucaaaaacuuccuggaaaugacaacagcacggcaacgcugugccuugggcaucaugcaguaccaaacggaacgauagugaaaacaaucacgaaugaccaaauugaaguuacuaaugcuacugagcugguucagauuuccucaacaggugaaauaugcgacaguccucaucagauccuugauggagaaaacugcacacuaauagaugcucuauugggagacccucagugugauggcuuccaaaauaagaaaugggaccuuuuuguugaacgcagcaaagccuacagcaacuguuacccuuaugaugugccggauuaugccucccuuaggucacuaguugccucauccggcacacuggaguuuaacaaugaaagcuucaauuggacuggagucacucaaaacggaacaagcucugcuugcauaaggagaucuaauaacaguuucuuuaguagauugaauugguugacccacuuaaaauucaaauacccagcauuaaacgugacuaugccaaacaaugaacaauuugacaaauuguacauuugggggguucaccacccggguacggacaaugaccaaaucuuccuguaugcucaagcaucaggaagaaucacagucucuaccaaaagaagccaacaaacuguaaucccgaauaucggaucuagacccagaguaaggaauaucccuagcagaauaagcaucuauuggacaauaguaaaaccgggagacauacuuuugauuaacagcacagggaaucuaauugcuccuagggguuacuucaaaauacgaagugggaaaagcucaauaaugagaucagaugcacccauuggcaaaugcaauucugaaugcaucacuccaaauggaagcauucccaaugacaaaccauuccaaaauguaaacaggaucacauacggggccugucccagauauguuaagcaaaacacucugaaauuggcaacagggaugcgaaauguaccagagaaacaaacuagaggcauauuuggcgcaaucgcggguuucauagaaaaugguugggagggaaugguggaugguugguacgguuucaggcaucaaaauucugagggaagaggacaagcagcagaucucaaaagcacucaagcagcaaucgaucaaaucaaugggaaacugaauagauugaucgagaaaaccaacgagaaauuccaucagauugaaaaagaauucucagaagucgaagggagaauucaggaccuugagaaauauguugaggacaccaaaauagaucucuggucauacaacgcggagcuucuuguugcccuggagaaccaacacacaauugaucuaacugacucagaaaugaacaaacuguuugaaaaaacaaagaagcaacugagggaaaaugcugaggauaugggcaaugguuguuucaaaauauaccacaaaugugacaaugccuguauaggaucaaucagaaauggaacuuaugaccacgauguauacagagaugaagcauuaaacaaccgguuccagaucaagggaguugagcugaagucaggguacaaagauuggauccuauggauuuccuuugccauaucauguuuuuugcuuuguguugcuuuguugggguucaucaugugggccugccaaaaaggcaacauuaggugcaacauuugcauuuga

SEQ ID NO: 38873 - RNA, 1698 nt, Artificial Sequence; identical to SEQ ID NO: 37969
  derived and/or modified CDS sequence (wt) from hemagglutinin__InfluenzaA__AEI59990

SEQ ID NO: 38874 - RNA, 1698 nt, Artificial Sequence; identical to SEQ ID NO: 37971
  derived and/or modified CDS sequence (wt) from hemagglutinin__InfluenzaA__AEI60001

SEQ ID NO: 38875 - RNA, 1701 nt, Artificial Sequence
  derived and/or modified CDS sequence (wt) from hemagglutinin__InfluenzaA__AEI60012
augaagacuaucauugcuuugagcuacauucuaugucugguuuucgcucaaaaacuuccuggaaaugacaacagcacggcaacgcugugccuugggcaccaugcaguaccaaacggaacgauagugaaaacaaucacgaaugaccaaauugaaguuacuaaugcuacugagcugguucagaguuccucaacaggugaaauaugcgacaguccucaucagauccuugauggagaaaacugcacacuaauagaugcucuauugggagacccucagugugauggcuuccaaaauaagaaaugggaccuuuuuguugaacgcagcaaagccuacagcaacuguuacccuuaugaugugccggauuaugccucccuuaggucacuaguugccucauccggcacacuggaguuuaacaaugaaagcuucaauuggacuggagucacucaaaacggaacaagcucugcuugcauaaggaguucuaauaacaguuucuuuaguagauugaauugguugacccacuuaaaauucaaauacccagcauuaaacgugacuaugccaaacaaugaacaauuugacaaauuguacauuugggggguucaccacccggguacggacaaugaccaaaucuuccuguaugcucaagcaucaggaagaaucacagucucuaccaaaagaagccaacaaacuguaaucccgaauaucggaucuagacccagaguaaggaacaucccuagcagaauaagcaucuauuggacaauaguaaaaccgggagacauacuuuugauuaacagcacagggaaucuaauugcuccuagggguuacuucaaaauacgaagugggaaaagcucaauaaugagaucagaugcacccauuggcaaaugcaauucugaaugcaucacuccaaauggaagcauucccaaugacaaaccauuccaaaauguaaacaggaucacauacggggccugucccagauauguuaagcaaaacacucugaaauuggcaacagggaugcgaaauguaccagagaaacaaacuagaggcauauuuggcgcaaucgcggguuucauagaaaaugguugggagggaaugguggaugguugguacgguuucaggcaucaaaauucugagggaagaggacaagcagcagaucucaaaagcacucaagcagcaaucgaucaaaucaaugggaagcugaauagauugaucgggaaaaccaacgagaaauuccaucagauugaaaaagaauucucagaagucgaagggaaaauucaggaccuugagaaauauguugaggacaccaaaauagaucucuggucauacaacgcggagcuucuuguugcccuggagaaccaacauacaauugaucuaacugacucagaaaugaacaaacuguuugaaaaaacaaagaagcaacugagggaaaaugcugaggauaugggcaaugguuguuucaaaauauaccacaaaugugacaaugccugcauaggaucaaucagaaauggaacuuauaaccacgauguauacagagaugaagcauuaaacaaccgguuccagaucaagggaguugagcugaagucaggguacaaagauuggauccuauggauuuccuuugccauaucauguuuuuugcuuuguguugcuuuguugggguucaucaugugggccugccaaaaaggcaacauuaggugcaacauuugcauuuga

SEQ ID NO: 38876 - RNA, 1701 nt, Artificial Sequence; identical to SEQ ID NO: 37393
  derived and/or modified CDS sequence (wt) from hemagglutinin__InfluenzaA__AEI60023

SEQ ID NO: 38877 - RNA, 1701 nt, Artificial Sequence
  derived and/or modified CDS sequence (wt) from hemagglutinin__InfluenzaA__AEI60034
augaagacuaucauugcuuugagcuacauucuaugucugguuuucgcucaaaaacuuccuggaaaugacaacagcacggcaacgcugugccuugggcaccaugcaguaccaaacggaacgauagugaaaacaaucacgaaugaccaaauugaaguuacuaaugcuacugagcugguucagaguuccucaacaggugaaauaugcgacaguccucaucagauccuugauggaaaaaacugcacacuaauagaugcucuauugggagacccucagugugauggcuuccaaaauaagaaaugggaccuuuuuguugaacgcagcaaagccuacagcaacuguuacccuuaugaugugccggauuaugccucccuuaggucacuaguugccucauccggcacacuggaguuuaacaaugaaagcuucaauuggacuggagucacucaaaacggaacaagcucugcuugcauaaggagaucuaauaacaguuucuuuaguagauugaauugguugacccacuuaaaauucaaauacccagcauugaacgugacuaugccaaacaaugaacaauuugacaaauuguacauuugggggguucaccacccggguacggacaaagaccaaaucuuccuguaugcucaagcaucaggaagaaucacagucucuaccaaaagaagccaacaaacuguaaucccgaauaucggaucuagacccagaguaaggaauaucccuagcagaauaagcaucuauuggacaauaguaaaaccgggagacauacuuuugauuaacagcacagggaaucuaauugcuccuagggguuacuucaaaauacgaagugggaaaagcucaauaaugagaucagaugcacccauuggcaaaugcaauucugaaugcaucacuccaaauggaagcauucccaaugacaaaccauuccaaaauguaaacaggaucacauacggggccugucccagauauguuaagcaaaacacucugaaauuggcaacagggaugcgaaauguaccagagaaacaaacuagaggcauauuuggcgcaaucgcggguuucauagaaaaugguugggagggaaugguggaugguugguacgguuucaggcaucaaaauucugagggaagaggacaagcagcagaucucaaaagcacucaagcagcaaucgaucaaaucaaugggaagcugaauagauugaucgggaaaaccaacgagaaauuccaucagauugaaaaagaauucucagaagucgaagggagaauucaggaccuugagaaauauguugaggacacuaaaauagaucucuggucauacaacgcggagcuucuuguugcccuggagaaccaacauacaauugaucuaacugacucagaaaugaacaaacuguuugaaaaaacaaagaagcaacugagggaaaaugcugaggauaugggcaaugguuguuucaaaauauaccacaaaugugacaaugccugcauaggaucaaucagaaauggaacuuaugaccacgauguauacagagaugaagcauuaaacaaccgguuucagaucaagggaguugagcugaagucaggguacaaagauuggauccuauggauuuccuuugccauaucauguuuuuugcuuuguguugcuuuguugggguucaucaugugggccugccaaaaaggcaacauuaggugcaacauuugcauuuga

SEQ ID NO: 38878 - RNA, 1701 nt, Artificial Sequence
  derived and/or modified CDS sequence (wt) from hemagglutinin__InfluenzaA__AEI60045
augaagacuaucauugcuuugagcuacauucuaugucugguuuucgcucaaaaacuuccuggaaaugacaacagcacggcaacgcugugccuugggcaucaugcaguaccaaacggaacgauagugaaaacaaucaugaaugaccaaauugaaguuacuaaugcuacugagcugguucagaguuccucaacaggugaaauaugcgacaguccucaucagauccuugauggaaaaaacugcacacuaauagaugcucuauugggagacccucagugugauggcuuccaaaauaagaaaugggaccuuuuuguugaacgcagcaaagccuacagcaacuguuacccuuaugaugugccggauuaugccucccuuaggucacuaguugccucauccggcacacuggaguuuaacaaugaaagcuucaauuggacuggagucacucaaaacggaacaagcucugcuugcauaaggagaucuaaaaacaguuucuuuaguagauugaauugguugacccacuuaaacuucaaauacccagcauugaacgugacuaugccaaacaaugaacaauuugacaaauuguacauuugggggguucaccacccggguacggacaaagaccaaaucuuccuguaugcucaagcaucaggaagaaucacagucucuaccaaaagaagccaacaaacugcaaucccgaauaucggauauagacccagaguaaggaauaucccuagcagaauaagcaucuauuggacaauaguaaaaccgggagacauacuuuugauuaacagcacagggaaucuaauugcuccuagggguuacuucaaaauacgaagugggaaaagcucaauaaugagaucagaugcacccauuggcaaaugcaauucugaaugcaucacuccaaauggaagcauucccaaugacaaaccauuccaaaauguaaacaggaucacauacggggccugucccagauauguuaagcaaaacacucugaaauuggcaacagggaugcgaaauguaccagagaaacaaacuagaggcauauuuggcgcaaucgcggguuucauagaaaaugguugggagggaaugguggaugguugguacgguuucaggcaucaaaauucugagggaagaggacaagcagcagaucucaaaagcacucaagcagcaaucgaucaaaucaaugggaagcugaauagauugaucgggaaaaccaacgagaaauuccaucagauugaaaaagaauucucagaagucgaagggagaauucaggaccuugagaaauauguugaggacacuaaaauagaucucuggucauacaacgcggagcuucuuguugcccuggagaaccaacauacaauugaucuaacugacucagaaaugaacaaacuguuugaaaaaacaaagaagcaacugagggaaaaugcugaggauaugggcaaugguuguuucaaaauauaccacaaaugugacaaugccugcauaggaucaaucagaaauggaacuuaugaccacgauguauacagagaugaagcauuaaacaaccgguuucagaucaagggaguugagcugaagucaggguacaaagauuggauccuauggauuuccuuugccauaucauguuuuuugcuuuguguugcuuuguugggguucaucaugugggccugccaaaaaggcaacauuaggugcaacauuugcauuuga

SEQ ID NO: 38879 - RNA, 1701 nt, Artificial Sequence
  derived and/or modified CDS sequence (wt) from hemagglutinin__InfluenzaA__AEI60086
augaaggcaauacuaguaguucugcuauauacauuugcaaccgcaaaugcagacacauuauguauagguuaucaugcgaacaauucaacagacacuguagacacaguacuagaaaagaauguaacaguaacacacucuguuaaccuucuagaagacaagcauaacgggaaacuaugcaaacuaagagggguagccccauugcauuuggguaaauguaacauugcuggcuggauccugggaaauccagagugugaaucacucuccacagcaagcucaugguccuacauuguggaaacaucuaguucagacaauggaacguguuacccaggagauuucaucaauuaugaggagcuaagagagcaauugagcucagugucaucauuugaaagguuugagauauuccccaagacaaguucauggcccaaucaugacucgaacaaagguguaacggcagcauguccucaugcuggagcaaaaagcuucuacaaaaauuuaauauggcuaguuaaaaaaggaaauucauacccaaagcucagcaaauccuacauuaaugauaaagggaaagaaguccucgugcuguggggcauucaccauccaucuacuacugcugaccaacaaagucucuaucagaaugcagaugcauauguuuuuguggggacaucaagauacagcaagaaguucaagccggaaauagcaauaagacccaaagugagggaucaagaagggagaaugaacuauuacuggacacuaguagagccgggagacaaaauaacauucgaagcaacuggaaaucuagugguaccgagauaugcauucgcaauggaaagaaaugcuggaucugguauuaucauuucagauacaccaguccacgauugcaauacaacuugucagacacccaagggugcuauaaacaccagccucccauuucagaauauacauccgaucacaauuggaaaauguccaaaauauguaaaaagcacaaaauugagacuggccacaggauugaggaaugucccgucuauucaaucuagaggccuauuuggggccauugccggcuucauugaagggggguggacagggaugguagauggaugguacgguuaucaccaucaaaaugagcaggggucaggauaugcagccgaccugaagagcacacagaaugccauugacaagauuacuaacaaaguaaauucuguuauugaaaagaugaacacacaguucacagcaguagguaaagaguucaaccaccuggaaaaaagaauagagaauuuaaauaaaaaaguugaugaugguuuccuggacauuuggacuuacaaugccgaacuguugguucuauuggaaaaugaaagaacuuuggacuaccacgauucaaaugugaagaacuuguaugaaaagguaagaaaccaguuaaaaaacaaugccaaggaaauuggaaacggcugcuuugaauuuuaccacaaaugcgauaacacgugcauggaaagugucaaaaaugggacuuaugacuacccaaaauacucagaggaagcaaaauuaaacagagaagaaauagaugggguaaagcuggaaucaacaaggauuuaccagauuuuggcgaucuauucaacugucgccaguucauugguacugguagucucccugggggcaaucaguuucuggaugugcucuaaugggucucuacaguguagaauauguauuuaa

SEQ ID NO: 38880 - RNA, 1701 nt, Artificial Sequence
  derived and/or modified CDS sequence (wt) from hemagglutinin__InfluenzaA__AEI60109
augaagacuaccauugcuuugagcuacauuuuaugucugguuuuugcucaaaaacuucccggaaaugacaacagcacggcaacgcugugccuggggcaccaugcagugccaaacggaacgcuagugaaaacaaucacgaaugaccaaauugaagugacuaaugcuacugagcugguucagaauuccucaacagguagaauaugcgacaguccucaccaaauccuugauggagaaaacugcacacuaauagaugcucuauugggugacccucauugugauggcuuccaaaauaaggaaugggaccuuuuuguugaacgcagcaaagccuacagcaacuguuacccuuauaaugugccagauuaugucucccuuaggucacuaguugccucaucaggcacgcuggaguuuaacaaugaaagcuucaauuggacuggagucgcucaggauggaucaagcuaugcuugcaaaaggagaucuaauaaaaguuuuuuuaguagauugaauugguugcaucaauuaaauuacaaauauccagcacugaacgugacuaugccaaacaaugaaaacuuugacaaauuguacauuugggggguucaccacccagguacagacagugaccaaaucagucuauaugcucaagcaucagggagggucacagucucuaccaaaaggagccaacaaacuguaaucccgaauaucggauauagacccuggguaaggggugucucuagcauaauaagcaucuauuggacaauaguaaaaccgggagacauacucuugauuaacagcacaggaaaucuaauugcuccucgggguuacuucaaaauacgaagugggaaaagcucaauaaugagaucagaugcacccauuggcaaaugcaauucugaaugcaucacuccaaauggaagcauucccaaugacaaaccauuucaaaauguaaacaggaucacauaugggcccugucccagauauguuaaacaaaacacuuugaaauuagcaacagggaugcggaaugugccagagaagcaaacuagaggcauauucggugcaaucgcgggcuucauagaaaauggcugggaaggaaugaaggacgguugguacgguuucaggcaucaaaauucugagggcacagggcaagcagcagauauuaaaagcacucaagcagcaaucaaccaaaucaacggaaaacugaauagguuaaucgagaaaacaaacgagaaauuccaucaaauugaaaaagaauucucagaaguagaagggagaauucaggaccucgagaaauaugucgaggacacuaaaauagaucucuggucguacaaugcggagcuucuuguugcccuggagaaccaacauacaauugaucuaacugacucagagaugaacaaacuguuugaaagaacaaagaaacaacugagagaaaaugcugaggauaugggcaaugguuguuucaaaauauaccacaaaugugacaauaccugcauuggaucaaucagaaauggaacuuaugaccacgauguauacagagacgaagcauugaacaaccgguuccauaucaaagguguugagcugaagucaggauacaaagauuggauccuauggauuuccuuugccacaucaugcuuucugcuuuguauuguuuugcugggguucaucaugugggccugccaaaaaggcaacauuagaugcaacauuugcauuuga

SEQ ID NO: 38881 - RNA, 1701 nt, Artificial Sequence
  derived and/or modified CDS sequence (wt) from hemagglutinin__InfluenzaA__AEI86734
augaaggcaauacuaguaguucugcuauauacauuugcaaccgcaaaugcagacacauuauguguagguuaucaugcgaacaauucaacagacacuguagacacaguacuagaaaagaauguaacaguaacacacucuguuaaccuucuagaagacaagcauaacgggaaacuaugcaaacuaagagggguagccccauugcauuuggguaaauguaacauugcuggcuggauccugggaaauccagagugugaaucacucuccacagcaagcucaugguccuacauaguggaaacaucuaauucagacaauggaacguguuacccaggagauuucaucgauuaugaggagcuaagagagcaguugagcucagugucaucauuugaaagguuugagauauuccccaagacaaguucauggcccaaucaugacucgaacaaagguguaacggcagcauguccucaugcuggggcaaaaagcuucuacagaaauuuaauauggcuaguuaaaaaaggaaauucauacccaaagcucagcaaauccuacauuaaugauaaagggaaagaaguccucgugcuauggggcauucaccauccaucuacuagugcugaccaacaaagucucuaucagaaugcagauacauauguuuuuguggggacaucaagauacagcaagaaguucaagccggaaauagcaauaagacccaaagugagggaucaagaagggagaaugaacuauuacuggacacuaguagagccgggagacaaaauaacauucgaagcaacuggaaaucuagugguaccgagauaugcauucgcaauggaaagaaaugcuggaucugguauuaucauuucagauacaccaguccacgauugcaauacaacuugucagacacccaagggugcuauaaacaccagccucccauuucagaauauacauccgaucacaauuggaaaauguccaaaauauguaaaaagcacaaaauugagacuggccacaggauugaggaaugucccuucuauucaaucuagaggccuauuuggggccauugccgguuucauugaagggggguggacagggaugguagauggaugguacgguuaucaccaucaaaaugagcaggggucaggauaugcagccgaccugaagagcacacagaaugccauugacgagauuacuaacaaaguaaauucuguuauugaaaagaugaauacacaguucacagcaguagguaaagaguucaaccaccuggaaaaaagaauagagaauuugaauaaaaaaguugaugaugguuuccuggacauuuggacuuacaaugccgaacuguugguucuauuggaaaaugaaagaacuuuggacuaccaugauucaaaugugaagaacuuauaugaaaagguaagaagccaguugaaaaacaaugccaaggaaauuggaaacggcugcuuugaauuuuaccacaaaugcgauaacacgugcauggaaagugucaaaaaugggacuuaugacuacccaaaauacucagaggaagcaaaauuaaacagagaagaaauagaugggguaaagcuggaaucaacaaggauuuaccagauuuuggcgaucuauucaacugucgccaguucauugguacugguagucucccugggggcaaucaguuucuggaugugcucuaaugggucucuacaguguagaauauguauuuaa

SEQ ID NO: 38882 - RNA, 1701 nt, Artificial Sequence
  derived and/or modified CDS sequence (wt) from hemagglutinin__InfluenzaA__AEI86764
augaaggcaauacuaguaguucugcuauauacauuugcaaccgcaaaugcagacacauuauguauagguuaucaugcgaacaauucaacagacacuguagacacaguacuagaaaagaauguaacaguaacacacucuguuaaccuucuagaagacaagcauaacgggaaauuaugcaaacuaagagggguagccccauugcauuuggguaaauguaacauugcuggcuggauccugggaaauccagagugugaaucacucuccacagcaagcucaugguccuacauuguggaaacaucuaguucagacaauggaacguguuacccaggagauuucaucgauuaugaggagcuaagagaacaauugagcucagugucaucauuugaaagguuugagauauuccccaagacaaguucauggcccgaucaugacucgaacaaagguguaacggcagcauguccucaugcuggagcaaaaagcuucuacaaaaauuuaauauggcuaguuaaaaaaggaaauucauacccaaagcucagcaaauccuacauuaaugauaaagggaaagaaguccucgugcuauggggcauucaccauccaucuacuagugcugaccaacaaagucucuaucagaaugcagaugcauauguuuuuguggggacaucaagauacagcaagaaguucaagccggaaauagcaauaagacccaaagugagggaucaagaagggagaaugaacuauuacuggacacuaguagagccgggagacaaaauaacauucgaagcaacuggaaaucuagugguaccgagauaugcauucgcaauggaaagaaaugcuggaucugguauuaucauuucagauacaccaguccacgauugcaauacaacuugucagacacccaagggugcuauaaacaccagccucccauuucagaauauacauccgaucacaauuggaaaauguccaaaauauguaaaaagcacaaaauugagacuggccacaggauugaggaaugucccgucuauucaaucuagaggccuauuuggggccauugccgguuucauugaagggggguggacagggaugguagauggaugguacgguuaucaccaucaaaaugagcaggggucaggauaugcagccgaccugaagagcacacagaaugccauugacaagauuacuaacaaaguaaauucuguuauugaaaagaugaauacacaguucacagcaguagguaaagaguucaaccaccuggaaaaaagaauagagaauuuaaauaaaaaaguugaugaugguuuccuggacauuuggacuuacaaugccgaacuguugguucuauuggaaaaugaaagaacuuuggacuaccacgauucaaaugugaagaacuuauaugaaaagguaagaagccaguuaaaaaacaaugccaaggaaauuggaaacggcugcuuugaauuuuaccacaaaugcgauaacacgugcauggaaagugucaaaaaugggacuuaugacuacccaaaauacucagaggaagcaaaauuaaacagagaaaaaauagaugggguaaagcuggaaucaacaaggauuuaccagauuuuggcgaucuauucaacugucgccaguucauugguacuaguagucucccugggggcaaucaguuucuggaugugcucuaaugggucucuacaauguagaauauguauuuaa

SEQ ID NO: 38883 - RNA, 1701 nt, Artificial Sequence; identical to SEQ ID NO: 38882
  derived and/or modified CDS sequence (wt) from hemagglutinin__InfluenzaA__AEI86774

SEQ ID NO: 38884 - RNA, 1701 nt, Artificial Sequence
  derived and/or modified CDS sequence (wt) from hemagglutinin__InfluenzaA__AEI86784
augaagguaauacuaguaguucugcuauauacauuugcaaccgcaaaugcagacacauuauguauagguuaucaugcgaacaauucaacagacacuguagacacaguacuagaaaagaauguaacaguaacacacucuguuaaccuucuagaagacaagcauaacgggaaacuaugcaaacuaagagggguagccccauugcauuuggguaaauguaacauugcuggcuggauccugggaaauccagagugugaaucacucuccacagcaagcucaugguccuacauuguggaaacaucuaguucagacaauggaacguguuacccaggagauuucaucgauuaugaggagcuaagagagcaauugagcucagugucaucauuuaaaagguuugagauauuccccaagacaaguucauggcccaaucaugacucgaacaaagguguaacggcagcauguccucaugcuggagcaaaaagcuucuacaaaaauuuaauauggcuaguuaaaaaaggaaauucauacccaaagcucagcaaauccuacauuaaugauaaagggaaagaaguccucgugcuauggggcauucaccauccaucuacuagugcugaccaacaaagucucuaucagaaugcagaugcauauguuuuuguggggacaucaagauacagcaagaaguucaagccggaaauagcaauaagacccaaagugagggaucaagaagggagaaugaacuauuacuggacacuaguagagccgggagacaaaauaacauucgaagcaacuggaaaucuagugguaccgagauaugcauucgcaauggaaagaaaugcuggaucugguauuaucauuucagauacaccaguccacgauugcaauacaacuugucagacacccaagggugcuauaaacaccagccucccauuucagaauauacauccgaucacaauuggaaaauguccaaaauauguaaaaagcacaaaauugagacuggccacaggauugaggaaugucccgucuauucaaucuagaggccuauuuggggccauugccgguuucauugaagggggguggacagggaugguagauggaugguacgguuaucaccaucaaaaugagcaggggucaggauaugcagccgaccugaagagcacacagaaugccauugacaagauuacuaacaaaguaaauucuguuauugaaaagaugaauacacaguucacagcaguagguaaagaguucaaccaccuggaaaaaagaauagagaauuuaaauaaaaaaguugaugaugguuuccuggacauuuggacuuacaaugccgaacuguugguucuauuggaaaaugaaagaacuuuggacuaccacgauucaaaugugaagaacuuauaugaaaagguaagaagccaguuaaaaaacaaugccaaggaaauuggaaacggcugcuuugaauuuuaccacaaaugcgauaacacgugcauggaaagugucaaaaaugggacuuaugacuacccaaaauacucagaggaagcaaaauuaaacagagaagaaauagaugggguaaagcuggaaucaacaaggauuuaccagauuuuggcgaucuauucaacugucgccaguucauugguacugguagucucccugggggcaaucaguuucuggaugugcucuaaugggucucuacaguguagaauauguauuuaa

SEQ ID NO: 38885 - RNA, 1701 nt, Artificial Sequence
  derived and/or modified CDS sequence (wt) from hemagglutinin__InfluenzaA__AEI86794
augaagacaauacuaguaguucugcuauauacauuugcaaccgcaaaugcagacacauuauguauagguuaucaugcgaacaauucaacagacacuguagacacaguacuagaaaagaauguaacaguaacacacucuguuaaccuucuagaagacaagcauaacgggaaauuaugcaaacuaagagggguagccccauugcauuuggguaaauguaacauugcuggcuggauccugggaaauccagagugugaaucacucuccacagcaagcucaugguccuacauuguggaaacaucuaguucagacaauggaacguguuacccaggaaauuucaucgauuaugaggagcuaagagaacaauugagcucagugucaucauuugaaagguuugagauauuccccaagacaaguucauggcccgaucaugacucgaacaaagguguaacggcagcauguccucaugcuggagcaaaaagcuucuacaaaaauuuaauauggcuaguuaaaaaaggaaauucauacccaaagcucagcaaauccuacauuaaugauaaagggaaagaaguccucgugcuauggggcauucaccauccaucuacuagugcugaccaacaaagucucuaucagaaugcagaugcauauguuuuuguggggacaucaaaauacagcaagaaguucaagccggaaauagcaauaagacccaaagugagggaucaagaagggagaaugaacuauuacuggacacuaguagagccgggagacaaaauaacauucgaagcaacuggaaaucuaguggcaccgagauaugcauucgcaauggaaagaaaugcuggaucugguauuaucauuucagauacaccaguccacgauugcaauacaacuugucagacacccaagggugcuauaaacaccagccucccauuucagaauauacauccgaucacaauuggaaaauguccaaaauauguaaaaagcacaaaauugagacuggccacaggauugaggaaugucccgucuauucaaucuagaggccuauuuggggccauugccgguuucauugaagggggguggacagggaugguagauggaugguacgguuaucaccaucaaaaugagcaggggucuggauaugcagccgaccugaagagcacacagaaugccauugacaagauuacuaacaaaguaaauucuguuauugaaaagaugaauacacaguucacagcaguagguaaagaguucaaccaccuggaaaaaagaauagagaauuuaaauaaaaaaguugaugaugguuuccuggacauuuggacuuacaaugccgaacuguugguucuauuggaaaaugaaagaacuuuggacuaccacgauucaaaugugaagaacuuauaugaaaagguaagaagccaguuaaaaaacaaugccaaggaaauuggaaacggcugcuuugaauuuuaccacaaaugcgauaacacgugcauggaaagugucaaaaaugggacuuaugacuacccaaaauacucagaggaagcaaaauuaaacagagaagaaauagaugggguaaagcuggaaucaacaaggauuuaccagauuuuggcgaucuauucaacugucgccaguucauugguacugguagucucccugggggcaaucaguuucuggaugugcucuaaugggucucuacaguguagaauauguauuuaa

SEQ ID NO: 38886 - RNA, 1701 nt, Artificial Sequence
  derived and/or modified CDS sequence (wt) from hemagglutinin__InfluenzaA__AEI86804
augaaggcaauacuaguaguucugcuauauacauuugcaaccgcaaaugcagacacauuauguauagguuaucaugcgaacaauucaacagacacuguagacacaguacuagaaaagaauguaacaguaacacacucuguuaaccuucuagaagacaagcauaacgggaaacuaugcaaacuaagagggguagccccauugcauuuggguaaauguaacauugcuggcuggauccugggaaauccagagugugaaucacucuccacagcaagcucaugguccuacauuguggaaacaucuaguucagacaauggaacguguuacccaggagauuucaucaauuaugaggagcuaagagagcaauugagcucagugucaucauuugaaagguuugagauauuccccaagacaaguucauggcccgaucaugacucuaacaaagguguaacggcagcauguccucaugcuggagcaaaaagcuucuacaaaaauuuaauguggcuaguuaaaaaaggaaauucauacccaaagcucagcaaauccuacauuaaugauaaagggaaagaaguccucgugcuauggggcauucaccauccaucuacuagugcugaccaacaaagucucuaucagaaugcagaugcauauguuuuuguggggacaucaagauacagcaagaaguucaagccggaaauagcaauaagacccaaagugagggaucaagaagggagaaugaacuauuacuggacacuaguagagccgggagacaaaauaacauucgaagcaacuggaaaucuagugguaccgagauaugcauucgcaauggaaagaaaugcuggaucugguauuaucauuucagauacaccaguccacgauugcaauacaacuugucagacacccaagggugcuauaaacaccagucucccauuucagaauauacauccgaucacaauuggaaaauguccaaaauauguaaaaagcacaaaauugagacuggccacaggauugaggaaugucccgucuauucaaucuagaggccuauuuggggccauugccgguuucauugaagggggguggacagggaugguagauggaugguacgguuaucaccaucaaaaugagcaggggucaggauaugcagccgaccugaagagcacacagaaugccauugacaagauuacuaacaaaguaaauucuguuauugaaaagaugaauacacaguucacagcaguagguaaagaguucaaccaccuggaaaaaagaauagagaauuuaaauaaaaaaguugaugaugguuuccuggacauuuggacuuacaaugccgaacuguugguucuauuggaaaaugaaagaacuuuggacuaccacgauucaaaugugaagaacuuauaugaaaagguaagaagccaguuaaaaaacaaugccaaggaaauuggaaacggcugcuuugaauuuuaccacaaaugcgauaacacgugcauggaaagugucaaaaaugggacuuaugacuaccccaaauacucagaggaagcaaaauuaaacagagaagaaauagaugggguaaagcuggaaucaacaaggauuuaccagauuuuggcgaucuauucagcugucgccaguucauugguacugguagucucccugggggcaaucaguuucuggaugugcucuaaugggucucuacaguguagaauauguauuuaa

SEQ ID NO: 38887 - RNA, 1701 nt, Artificial Sequence
  derived and/or modified CDS sequence (wt) from hemagglutinin__InfluenzaA__AEI86814
augaaggcaauacuaguaguucugcuauauacauuugcaaccgcaaaugcagacacauuauguauagguuaucaugcgaacaauucaacagacacuguagacacaguacuagaaaagaauguaacaguaacacacucuguuaaccuucuagaagacaagcauaacgggaaauuaugcaaacuaagagggguagccccauugcauuuggguaaauguaacauugcuggcuggauccugggaaauccagagugugaaucacucuccacagcaagcucaugguccuacauuguggaaacaucuaguucagacaauggaacguguuacccaggagauuucaucgauuaugaggagcuaagagaacaauugagcucagugucaucauuugaaagguuugagauauuccccaagacaaguucauggcccgaucaugacucgaacaaagguguaacggcagcauguccucaugcuggagcaaaaagcuucuacaaaaauuuaauauggcuaguuaaaaaaggaaauucauacccaaagcucagcaaauccuacauuaaugauaaagggaaagaaguccucgugcuauggggcauucaccauccaucuacuagugcugaccaacaaagucucuaucagaaugcagaugcauauguuuuuguggggacaucaagauacagcaagaaguucaagccggaaauagcaauaagacccaaagugagggaucaagaagggagaaugaacuauuacuggacacuaguagagccgggagacaaaauaacauucgaagcaacuggaaaucuagugguaccgagauaugcauucgcaauggaaagaaaugcuggaucugguauuaucauuucagauacaccaguccacgauugcaauacaacuugucagacacccaaaggugcuauaaacaccagccucccauuucagaauauacauccgaucacaauuggaaaauguccaaaauauguaaaaagcacaaaauugagacuggccacaggauugaggaaugucccgucuauucaaucuagaggccuauuuggggccauugccgguuucauugaagggggguggacagggaugguagauggaugguacgguuaucaccaucaaaaugagcaggggucaggauaugcagccgaccugaagagcacacagaaugccauugacaagauuacuaacaaaguaaauucuguuauugaaaagaugaauacacaguucacagcaguagguaaagaguucaaccaccuggaaaaaagaauagagaauuuaaauaaaaaaguugaugaugguuuccuggacauuuggacuuacaaugccgaacuguugguucuauuggaaaaugaaagaacuuuggacuaccacgauucaaaugugaagaacuuauaugaaaagguaagaagccaguuaaaaaacaaugccaaggaaauuggaaacggcugcuuugaauuuuaccacaaaugcgauaacacgugcauggaaagugucaaaaaugggacuuaugacuacccaaaauacucagaggaagcaaaauuaaacagagaaaaaauagaugggguaaagcuggaaucaacaaggauuuaccagauuuuggcgaucuauucaacugucgccaguucauugguacuaguagucucccugggggcaaucaguuucuggaugugcucuaaugggucucuacaauguagaauauguauuuaa

SEQ ID NO: 38888 - RNA, 1701 nt, Artificial Sequence
  derived and/or modified CDS sequence (wt) from hemagglutinin__InfluenzaA__AEI86824
augaaggcaauacuaguaguucugcuauauacauuugcaaccgcaaaugcagacacauuauguauagguuaucaugcgaacaauucaacagacacuguagacacaguacuagaaaagaauguaacaguaacacacucuguuaaccuucuagaagacaagcauaacgggaaauuaugcaaacuaagagggguagccccauugcauuugggcaaauguaacauugcuggcuggauccugggaaauccagagugugaaucacucuccacagcaagcucaugguccuacauuguggaaacaucuaguucagacaauggaacguguuacccaggagauuucaucgauuaugaggagcuaagagaacaauugagcucagugucaucauuugaaagguuugagauauuccccaagacaaguucauggcccgaucaugacucgaacaaagguguaacggcagcauguccucaugcuggagcaaaaagcuucuacaaaaacuuaauauggcuaguuaaaaaaggaaauucauacccaaagcucagcaaauccuacauuaaugauaaagggaaagaaguccucgugcuauggggcauucaccauccaucuacuagugcugaccaacaaagucucuaucagaaugcagaugcauauguuuuuguggggacaucaagauacagcaagaaguucaagccggaaauagcaauaagacccaaagugagggaucaagaagggagaaugaacuauuacuggacacuaguagagccgggagacaaaauaacauucgaagcaacuggaaaucuagugguaccgagauaugcauucgcaauggaaagaaaugcuggaucugguauuaucauuucagauacaccaguccacgauugcaauacaacuugucagacacccaagggugcuauaaacaccagccucccauuucagaauauacauccgaucacaauuggaaaauguccaaaauauguaaaaagcacaaaauugagacuggccacaggauugaggaaugucccgucuauucaaucuagaggccuauuuggggccauugccgguuucauugaagggggguggacagggaugguagauggaugguacgguuaucaccaucaaaaugagcaggggucaggauaugcagccgaccugaagagcacacaggaugccauugacaagauuacuaacaaaguaaauucuguuauugaaaagaugaauacacaguucacagcaguagguaaagaguucaaccaccuggaaaaaagaauagagaauuuaaauaaaaaaguugaugaugguuuccuggacauuuggacuuacaaugccgaacuguugguucuauuggaaaaugaaagaacuuuggacuaccacgauucaaaugugaagaacuuauaugaaaagguaagaagccaguuaaaaaacaaugccaaggaaauuggaaacggcugcuuugaauuuuaccacaaaugcgauaacacgugcauggaaagugucaaaaaugggacuuaugacuacccaaaauacucagaggaagcaaaauuaaacagagagaaaauagaugggguaaagcuggaaucaacaaggauuuaccagauuuuggcgaucuauucaacugucgccaguucauugguacuaguagucucccugggggcaaucaguuucuggaugugcucuaaugggucucuacaauguagaauauguauuuaa

SEQ ID NO: 38889 - RNA, 1701 nt, Artificial Sequence
  derived and/or modified CDS sequence (wt) from hemagglutinin__InfluenzaA__AEI86834
augaaggcaauacuaguaguucugcuauauacauuugcaaccgcaaaugcagacacauuauguauagguuaucaugcgaacaauucaacagacacuguagacacaguacuagaaaagaauguaacaguaacacacucuguuaaccuucuagaagacaagcauaacgggaaauuaugcaaacuaagagggguagccccauugcauuuggguaaauguaacauugcuggcuggauccugggaaauccagagugugaaucacucuccacagcaagcucaugguccuacauuguggaaacaucuaguucagacaauggaacguguuacccaggaaauuucaucgauuaugaggagcuaagagaacaauugagcucagugucaucauuugaaagguuugagauauuccccaagacaaguucauggcccgaucaugacucgaacaaagguguaacggcagcauguccucaugcuggagcaaaaagcuucuacaaaaauuuaauauggcuaguuaaaaaaggaaauucauacccaaagcucagcaaauccuacauuaaugauaaagggaaagaaguccucgugcuauggggcauucaccauccaucuacuagugcugaccaacaaagucucuaucagaaugcagaugcauauguuuuuguggggacaucaagauacagcaggaaguucaagccggaaauagcaauaagacccaaagugagggaucaagaagggagaaugaacuauuacuggacacuaguagagccgggagacaaaauaacauucgaagcaacuggaaaucuaguggcaccgagauaugcauucgcaauggaaagaaaugcuggaucugguauuaucauuucagauacaccaguccacgauugcaauacaacuugucagacacccaagggugcuauaaacaccagccucccauuucagaauauacauccgaucacaauuggaaaauguccaaaauauguaaaaagcacaaaauugagacuggccacaggauugaggaaugucccgucuauucaaucuagaggccuauuuggggccauugccgguuucauugaagggggguggacagggaugguagauggaugguacgguuaucaccaucaaaaugagcaggggucuggauaugcagccgaccugaagagcacacagaaugccauugacaagauuacuaacaaaguaaauucuguuauugaaaagaugaauacacaguucacagcaguagguaaagaguucaaccaccuggaaaaaagaauagagaauuuaaauaaaaaaguugaugaugguuuccuggacauuuggacuuacaaugccgaacuguugguucuauuggaaaaugaaagaacuuuggacuaccacgauucaaaugugaagaacuuauaugaaaagguaagaagccaguuaaaaaacaaugccaaggaaauuggaaacggcugcuuugaauuuuaccacaaaugcgauaacacgugcauggaaagugucaaaaaugggacuuaugacuacccaaaauacucagaggaagcaaaauuaaacagagaagaaauagaugggguaaagcuggaaucaacaaggauuuaccagauuuuggcgaucuauucaacugucgccaguucauugguacugguagucucccugggggcaaucaguuucuggaugugcucuaaugggucucuacaguguagaauauguauuuaa

SEQ ID NO: 38890 - RNA, 1701 nt, Artificial Sequence
  derived and/or modified CDS sequence (wt) from hemagglutinin__InfluenzaA__AEI86854
augaaggcaauacuaguaguucugcuauauacauuugcaaccgcaaaugcagacacauuauguauagguuaucaugcgaacaauucaacagacacuguagacacaguacuagaaaagaauguaacaguaacacacucuguuaaccuucuagaagacaagcauaacgggaaacuaugcaaacuaagagggguagccccauugcauuuggguaaauguaacaucgcuggcuggauccugggaaauccagagugugaaucacucuccacagcaagcucaugguccuacauuguggaaacaucuaguucagacaauggaacguguuacccaggagauuucaucgauuaugaggagcuaagagagcaauugagcucagugucaucauuugaaagguuugagauauuccccaagacaaguucauggcccgaucaugacucgaacaaagguguaacggcagcauguccucaugcuggagcaaaaagcuucuacaaaaauuuaauauggcuaguuaaaaaaggaaauucauacccaaagcucagcaaauccuacauuaaugauaaagggaaagaaguccucgugcuauggggcauucaccauccaucuacuagugcugaccaacaaagucucuaucagaaugcagaugcauauguuuuuguggggacaucaagauacagcaagaaguucaagccggaaauagcaauaagacccaaagugagggaucaagaagggagaaugaacuauuacuggacacuaguagagccgggagacaaaauaacauucgaagcaacuggaaaucuagugguaccgagauaugcauucgcaauggaaagaaaugcuggaucugguauuaucauuucagauacaccaguccacgauugcaauacaacuugucagacacccaagggugcuauaaacaccagccucccauuucagaauauacauccgaucacaauuggaaaauguccaaaauauguaaaaagcacaaaauugagacuggccacaggauugaggaaugucccgucuauucaaucuagaggccuauuuggggccauugccgguuucauugaagggggguggacagggaugguagauggaugguacgguuaucaccaucaaaaugagcaggggucaggauaugcagccgaccugaagagcacacagaaugccauugacaagauuacuaacaaaguaaauucuguuauugaaaagaugaauacacaguucacagcaguagguaaagaguucaaccaccuggaaaaaagaauagagaauuuaaauaaaaaaguugaugaugguuuccuggacauuuggacuuacaaugccgaacuguugguucuauuggaaaaugaaagaacuuuggacuaccacgauucaaaugugaagaacuuauaugaaaagguaagaagccaguuaaaaaacaaugccaaggaaauuggaaacggcugcuuugaguuuuaccacaaaugcgauaacacgugcauggaaagugucaaaaaugggacuuaugacuacccaaaauacucagaggaagcaaaauuaaacagagaagaaauagaugggguaaagcuggaaucaacaaggauuuaccagauuuuggcgaucuauucaacugucgccaguucauugguacugguagucucccugggggcaaucaguuucuggaugugcucuaaugggucucuacaguguagaauauguauuuaa

SEQ ID NO: 38891 - RNA, 1701 nt, Artificial Sequence
  derived and/or modified CDS sequence (wt) from hemagglutinin__InfluenzaA__AEI86864
augaaggcaauauuaguagcucugcuauauacauuugcaaccgcaaaugcagacacauuauguauagguuaucaugcgaacaauucaacagacacuguagacacaguacuagaaaagaauguaacaguaacacacucuguuaaccuucuagaagacaagcauaacgggaaacuaugcaaacuaagagggguagccccauugcauuuggguaaauguaacauagcuggcuggauccugggaaauccagagugugaaucacucuccacagcaagcucaugguccuacauuguggaaacaucuaguucagacaauggaacguguuacccaggagauuucaucaauuaugaggagcuaagagagcaauugagcucagugucaucauuugaaagguuugagauauuccccaagacaaguucauggcccaaucaugacucgaacaaagguguaacggcagcauguccucaugcuggagcaaaaagcuucuacaaaaauuuaauauggcuaguuaaaaaaggaaauucauacccaaagcucagcaaauccuacauuaaugauaaagggaaagaaguccucgugcuauggggcauucaccauccaucuacuacugcugaccaacaaagucucuaucagaaugcagaugcauauguuuuuguggggacaucaagauacagcaagaaguucaagccggaaauagcaauaagacccaaagugagggaucaagaagggagaaugaacuauuacuggacacuaguagagccgggagacaaaauaacauucgaagcaacuggaaaucuagugguaccgagauaugcauucgcaauggaaagaaaugcuggaucugguauuaucauuucagauacaccaguccacgauugcaauacaacuugucagacaccuaagggugcuauaaacaccagccucccauuucagaauauacauccgaucacaauuggaaaauguccaaaauauguaaaaagcacaaaauugagacuggccacaggauugaggaaugucccgucuauucaaucuagaggccuauuuggggccauugccggcuucauugaagggggguggacagggaugguagauggaugguacgguuaucaccaucaaaaugagcaggggucaggauaugcagccgaccugaagagcacacagaaugccauugacaagauuacuaacaaaguaaauucuguuauugaaaagaugaauacacaguucacagcaguagguaaagaguucaaccaccuggaaaaaagaauagagaauuuaaauaaaaaaguugaugaugguuuccuggacauuuggacuuacaaugccgaacuguugguucuauuggaaaaugaaagaacuuuggacuaccacgauucaaaugugaagaacuuauaugaaaagguaagaaaccaguuaaaaaacaaugccaaggaaauuggaaacggcugcuuugaauuuuaccacaaaugcgauaacacgugcauggaaagugucaaaaaugggacuuaugacuacccaaaauacucagaggaagcaaaauuaaacagagaagaaauagaugggguaaagcuggaaucaacaaggauuuaccagauuuuggcgaucuauucaacugucgccaguucauugguacugguagucucccugggggcaaucaguuucuggaugugcucuaaugggucucuacaguguagaauauguauuuaa

SEQ ID NO: 38892 - RNA, 1701 nt, Artificial Sequence; identical to SEQ ID NO: 38882
  derived and/or modified CDS sequence (wt) from hemagglutinin__InfluenzaA__AEI86874

SEQ ID NO: 38893 - RNA, 1701 nt, Artificial Sequence
  derived and/or modified CDS sequence (wt) from hemagglutinin__InfluenzaA__AEI86894
augaaggcaauacuaguaguucugcuauauacauuugcaaccgcaaaugcagacacauuauguauagguuaucaugcgaacaauucaacagacacuguagacacaguacuagaaaagaauguaacaguaacacacucuguuaaccuucuagaagacaagcauaacgggaaauuaugcaaacuaagagggguagccccauugcauuuggguaaauguaacauugcuggcuggauccugggaaauccagagugugaaucacucuccacagcaagcucaugguccuacauuguggaaacaucuaguucagacaauggaacguguuacccaggaaauuucaucgauuaugaggagcuaagagaacaauugagcucagugucaucauuugaaagguuugagauauuccccaagacaaguucauggcccgaucaugacucgaacaaagguguaacggcagcauguccucaugcuggagcaaaaagcuucuacaaaaauuuaauauggcuaguuaaaaaaggaaauucauacccaaagcucagcaaauccuacauuaaugauaaagggaaagaaguccucgugcuauggggcauucaccauccaucuacuagugcugaccaacaaagucucuaucagaaugcagaugcauauguuuuuguggggacaucaagauacagcaagaaguucaagccggaaauagcaauaagacccaaagugagggaucaagaagggagaaugaacuauuacuggacacuaguagagccgggagacaaaauaacauucgaagcaacuggaaaucuaguggcaccgagauaugcauucgcaauggaaagaaaugcuggaucugguauuaucauuucagauacaccaguccacgauugcaauacaacuugucagacacccaagggugcuauaaacaccagccucccauuucagaauauacauccgaucacaauuggaaaauguccaaaauauguaaaaagcacaaaauugagacuggccacaggauugaggaaugucccgucuauucaaucuagaggccuauuuggggccauugccgguuucauugaagggggguggacagggaugguagauggaugguacgguuaucaccaucaaaaugagcaggggucuggauaugcagccgaccugaagagcacacagaaugccauugacaagauuacuaacaaaguaaauucuguuauugaaaagaugaauacacaguucacagcaguagguaaagaguucaaccaccuggaaaaaagaauagagaauuuaaauaaaaaaguugaugaugguuuccuggacauuuggacuuacaaugccgaacuguugguucuauuggaaaaugaaagaacuuuggacuaccacgauucaaaugugaagaacuuauaugaaaagguaagaagccaguuaaaaaacaaugccaaggaaauuggaaacggcugcuuugaauuuuaccacaaaugcgauaacacgugcauggaaagugucaaaaaugggacuuaugacuacccaaaauacucagaggaagcaaaauuaaacagagaagaaauagaugggguaaagcuggaaucaacaaggauuuaccagauuuuggcgaucuauucaacugucgccaguucauugguacugguagucucccugggggcaaucaguuucuggaugugcucuaaugggucucuacaguguagaauauguauuuaa

SEQ ID NO: 38894 - RNA, 1701 nt, Artificial Sequence
  derived and/or modified CDS sequence (wt) from hemagglutinin__InfluenzaA__AEI86904
augaaggcaauacuaguaguucugcuauauacauuuacaaccgcaaaugcagacacauuauguauagguuaucaugcgaacaauucaacagacacuguagacacaguacuagaaaagaauguaacaguaacacacucuguuaaccuucuagaagacaagcauaacgggaaacuaugcaaacuaagagggguagccccauugcauuuagguaaauguaacauugcuggcuggauccugggaaauccagagugugaaucacucuccacagcaagcucaugguccuacauuguggaaacaucuaguucagacaauggaacguguuacccaggagauuucaucgauuaugaggagcuaagagagcaauugagcucagugucaucauuugaaagguuugagauauuccccaagacaaguucauggcccaaucaugacucgaacaaagguguaacggcagcauguccucaugcuggagcaaaaagcuucuacaaaaauuuaauauggcuaguuaaaaaaggaaauucauacccaaagcucagcaaauccuacauuaaugauaaagggaaagaaguccucgugcuauggggcauucaccauccaucuacuacugcugaccaacaaagucucuaucagaaugcagaugcauauguuuuuguggggacaucaagauacagcaagaaguucaagccggaaauagcaauaagacccaaagugagggaucaagaagggagaaugaacuauuacuggacacuaguagagccgggagacaaaauaacauucgaagcaacuggaaaucuagugguaccgagauaugcauucgcaauggaaagaaaugcuggaucugguauuaucauuucagauacaccaguccacgauugcaauacaacuugucagacacccaagggugcuauaaacaccagccucccauuucagaauauacauccgaucacaauuggaaaauguccaaaauauguaaaaagcacaaaauugagacuggccacaggauugaggaaugucccgucuauccaaucuagaggccuauuuggggccauugccggcuucauugaagggggguggacagggaugguagauggaugguacgguuaucaccaucaaaaugagcaggggucaggauaugcagccgaccugaagagcacacagaaugccauugacaagauuacuaacaaaguaaauucuguuauugaaaagaugaauacacaguucacagcaguagguaaagaguucaaccaccuggaaaaaagaauagagaauuuaaauaaaaaaguugaugaugguuuccuggacauuuggacuuacaaugccgaacuguugguucuauuggaaaaugaaagaacuuuggauuaccacgauucaaaugugaagaacuuauaugaaaagguaagaaaccaguuaaaaaacaaugccaaggaaauuggaaacggcugcuuugaauuuuaccacaaaugcgauaacacgugcauggaaagugucaaaaaugggacuuaugacuacccaaaauacucagaggaagcaaaauuaaacagagaagaaauagaugggguaaagcuggaaucaacaaggauuuaccagauuuuggcgaucuauucaacugucgccaguucauugguacugguagucucccugggggcaaucaguuucuggaugugcucuaaugggucucuacaguguagaauauguauuuaa

SEQ ID NO: 38895 - RNA, 1701 nt, Artificial Sequence
  derived and/or modified CDS sequence (wt) from hemagglutinin__InfluenzaA__AEI86914
augaaggcaauacuaguaguucugcuauauacauuugcaaccgcaaaugcagacacauuauguauagguuaucaugcgaacaauucaacagacacuguagacacaguacuagaaaagaauguaacaguaacacacucuguuaaccuucuagaagacaagcauaacgggaaacuaugcaaacuaagagggguagccccauugcauuuggguaaauguaacauugcuggcuggauccugggaaauccagagugugaaucacucuccacagcaagcucaugguccuacauuguggaaacaucuaguucagacaauggaacguguuacccaggagauuucaucaauuaugaggagcuaagagagcaauugagcucagugucaucauuugaaagguuugagauauuccccaagacaaguucauggcccaaucaugacucgaacaaagguguaacggcagcauguccucaugcuggagcaaaaagcuucuacaaaaauuuaauauggcuaguuaaaaaaggaaauucauacccaaggcucagcaaauccuacauuaaugauaaagggaaagaaguccucgugcuauggggcauucaccauccaucuacuacugcugaccaacaaagucucuaucagaaugcagaugcauauguuuuuguggggacaucaagauacagcaagaaguucaagccggaaauagcaauaagacccaaagugagggaucaagaagggagaaugaacuauuacuggacacuaguagagccgggagacaaaauaacauucgaagcaacuggaaaucuagugguaccgagauaugcauucgcaauggaaagaaaugcuggaucugguauuaucauuucagauacaccaguccacgauugcaauacaacuugucagacacccaagggugcuauaaacaccagccucccauuucagaauauacauccgaucacaauuggaaaauguccaaaauauguaaaaagcacaaaauugagacuggccacaggauugaggaaugucccgucuauucaaucuagaggccuauuuggggccauugccggcuucauugaagggggguggacagggaugguagauggaugguacgguuaucaccaucaaaaugagcaggggucaggauaugcagccgaccugaagagcacacagaaugccauugacaagauuacuaacaaaguaaauucuguuauugaaaagaugaauacacaguucacagcaguagguaaagaguucaaccaccuggaaaaaagaauagagaauuuaaauaaaaaaguugaugaugguuuccuggacauuuggacuuacaaugccgaacuguugguucuauuggaaaaugaaagaacuuuggacuaccacgauucaaaugugaagaacuuauaugaaaagguaagaaaccaguuaaaaaacaaugccaaggaaauuggaaacggcugcuuugaauuuuaccacaaaugcgauaacacgugcauggaaagugucaaaaaugggacuuaugacuacccaaaauacucagaggaagcaaaauuaaacagagaagaaauagaugggguaaagcuggaaucaacaaggauuuaccagauuuuggcgaucuauucaacugucgccaguucauugguacugguagucucccugggggcaaucaguuucuggaugugcucuaaugggucucuacaguguagaauauguauuuaa

SEQ ID NO: 38896 - RNA, 1701 nt, Artificial Sequence
  derived and/or modified CDS sequence (wt) from hemagglutinin__InfluenzaA__AEI86924
augaaggcaauacuaguaguucugcuauauacauuugcaaccgcaaaugcagacacauuauguauagguuaucaugcgaacaauucaacagacacuguagacacaguacuagaaaagaauguaacaguaacacacucuguuaaccuucuagaagacaagcauaacgggaaacuaugcaaacuaagagggguagccccauugcauuuggguaaauguaacauugcuggcuggauccugggaaauccagagugugaaucacucuccacagcaagcucaugguccuacauuguggaaacaucuaguucagacaauggaacguguuacccaggaguuuucaucgauuaugaggagcuaagagagcaauugagcucagugucaucauuugaaagguuugagauauuccccaagacaaguucauggcccaaucaugacucgaacaaagguguaacggcagcauguccucaugcuggagcaaaaagcuucuacaaaaauuuaauauggcuaauuaaaaaaggaaauucauacccaaagcucagcaaauccuacauuaaugauaaagggaaagaaguccucgugcuauggggcauucaccauccaucuacuacugcugaccaacaaagucucuaucagaaugcagaugcauauguuuuuguagggacaucaagauacagcaagaaguucaagccggaaauagcaguaagacccaaagugagggaucaagaagggagaaugaacuauuacuggacacuaguagagccgggagacaaaauaacauucgaagcaacuggaaaucuagugguaccgagauaugcauucgcaauggaaagaaaugcuggaucugguauuaucauuucagauacaccaguccacgauugcaauacaacuugucagacacccaagggugcuauaaacaccagccucccauuucagaauauacauccgaucacaauuggaaaauguccaaaauauguaaaaagcacaaaauugagacuggccacaggauugaggaaugucccgucuauucaaucuagaggccuauuuggggccauugccggcuucauugaagggggguggacagggaugguagauggaugguacgguuaucaccaucaaaaugagcaggggucaggauaugcagccgaccugaagagcacacagaaugccaucgacaagauuacuaacaaaguaaauucuguuauugaaaagaugaauacacaguucacagcaguagguaaagaguucaaccaccuggaaaaaagaauagagaauuuaaauaaaaagguugaugaugguuuccuggacauuuggacuuacaaugccgaacuguugguucuauuggaaaaugaaagaacuuuggacuaccacgauucaaaugugaagaacuuauaugaaaagguaagaaaccaguuaaaaaacaaugccaaggaaauuggaaacggcugcuuugaauuuuaccacaaaugcgauaacacgugcauggaaagugucaaaaaugggacuuaugacuauccaaaauacucagaggaagcaaaauuaaacagagaagaaauagaugggguaaagcuggaaucaacaaggauuuaccagauuuuggcgaucuauucaacugucgccaguucauugguacugguagucucccugggggcaaucaguuucuggaugugcucuaaugggucucuacaguguagaauauguauuuaa

SEQ ID NO: 38897 - RNA, 1701 nt, Artificial Sequence
  derived and/or modified CDS sequence (wt) from hemagglutinin__InfluenzaA__AEI86934
augaaggcaauacuaguaguucugcuauauacauuugcaaccgcaaaugcagacacauuauguauagguuaucaugcgaacaauucaacagacacuguagacacaguacuagaaaagaauguaacaguaacacacucuguuaaccuucuagaagacaagcauaacgggaaauuaugcaaacuaagagggguagccccauugcauuuggguaaauguaacauugcuggcuggauccugggaaauccagagugugaaucacucuccacagcaagcucaugguccuacauuguggaaacaucuaguucagacaauggaacguguuacccaggagauuucaucgauuaugaggagcuaagagaacaauugagcucagugucaucauuugaaagguuugagauauuccccaagacaaguucauggcccgaucaugacucgaacaaagguguaacggcagcauguccucaugcuggagcaaaaagcuucuacaaaaauuuaauauggcuaguuaaaaaaggaaauucauacccaaagcucagcaaauccuacauuaaugauaaagggaaagaaguccucgugcuauggggcauucaccauccaucuacuagugcugaccaacaaagucucuaucagaaugcagaugcauauguuuuuguggggacaucaagauacagcaagaaguucaagccggagauagcaauaagacccaaagugagggaucaagaagggagaaugaacuauuacuggacacuaguagagccgggagacaaaauaacauucgaagcaacuggaaaucuagugguaccgagauaugcauucgcaauggaaagaaaugcuggaucugguauuaucauuucagauacaccaguccacgauugcaauacaacuugucagacacccaagggugcuauaaacaccagccucccauuucagaauauacauccgaucacaauuggaaaauguccaaaauauguaaaaagcacaaaauugagacuggccacaggauugaggaaugucccgucuauucaaucuagaggccuauuuggggccauugccgguuucauugaagggggguggacagggaugguagauggaugguacgguuaucaccaucaaaaugagcaggggucaggauaugcagccgaccugaagagcacacagaaugccauugacaagauuacuaacaaaguaaauucuguuauugaaaagaugaauacacaguucacagcaguagguaaagaguucaaccaccuggaaaaaagaauagagaauuuaaauaaaaaaguugaugaugguuuccuggacauuuggacuuacaaugccgaacuguugguucuauuggaaaaugaaagaacuuuggacuaccacgauucaaaugugaagaacuuauaugaaaagguaagaagccaguuaaaaaacaaugccaaggaaauuggaaacggcugcuuugaauuuuaccacaaaugcgauaacacgugcauggaaagugucaaaaaugggacuuaugacuacccaaaauacucagaggaagcaaaauuaaacagagaaaaaauagaugggguaaagcuggaaucaacaaggauuuaccagauuuuggcgaucuauucaacugucgccaguucauugguacuaguagucucccugggggcaaucaguuucuggaugugcucuaaugggucucuacaauguagaauauguauuuaa

SEQ ID NO: 38898 - RNA, 1701 nt, Artificial Sequence
  derived and/or modified CDS sequence (wt) from hemagglutinin__InfluenzaA__AEI86944
augaaggcaauacuaguaguucugcuauauacauuugcaaccgcaaaugcagacacauuauguauagguuaucaugcgaacaauucaacagacacuguagacacaguacuagaaaagaauguaacaguaacacacucuguuaaccuucuagaagacaagcauaacgggaaacuauguaaacuaagagggguagccccauugcauuuggguaaauguaacaucgcuggcuggauccugggaaauccagagugugaaucacucuccacagcaagcucaugguccuacauuguggaaacaucuaguucagacaauggaacguguuacccaggagauuucaucgauuaugaggagcuaagagagcaauugagcucagugucaucauuugaaagguuugagauauuccccaagacaaguucauggcccgaucaugacucgaacaaagguguaacggcagcauguccucaugcuggagcaaaaagcuucuacaaaaauuuaauauggcuaguuaaaaaaggaaauucauacccaaagcucagcaaauccuacauuaaugauaaagggaaagaaguccucgugcuauggggcauucaccauccaucuacuagugcugaccaacaaagucucuaucagaaugcagaugcauauguuuuuguggggacaucaagauacagcaagaaguucaagccggaaauagcaauaagacccaaagugagggaucaagaagggagaaugaacuauuacuggacacuaguagagccgggagacaaaauaacauucgaagcaacuggaaaucuagugguaccgagauaugcauucgcaauggaaagaaaugcuggaucugguauuaucauuucagauacaccaguccacgauugcaauacaacuugucagacacccaagggugcuauaaacaccagccucccauuucagaauauacauccgaucacaauuggaaaauguccaaaauauguaaaaagcacaaaauugagacuggcuacaggauugagaaaugucccgucuauucaaucuagaggccuauuuggggccauugccgguuucauugaagggggguggacagggaugguagauggaugguacgguuaucaccaucaaaaugagcaggggucaggauaugcagccgaccugaagagcacacagaaugccauugacaagauuacuaacaaaguaaauucuguuauugaaaagaugaauacacaguucacagcaguagguaaagaguucaaccaccuggaaaaaagaauagagaauuuaaauaaaaaaguugaugaugguuuccuggacauuuggacuuacaaugccgaacuguugguucuauuggaaaaugaaagaacuuuggacuaccacgauucaaaugugaagaacuuauaugaaaagguaagaagccaguuaaaaaacaaugccaaggaaauuggaaacggcugcuuugaguuuuaccacaaaugcgauaacacgugcauggaaagugucaaaaaugggacuuaugacuacccaaaauacucagaggaagcaaaauuaaacagagaagaaauagaugggguaaagcuggaaucaacaaggauuuaccagauuuuggcgaucuauucaacugucgccaguucauugguacugguagucucccugggggcaaucaguuucuggaugugcucuaaugggucucuacaguguagaauauguauuuaa

SEQ ID NO: 38899 - RNA, 1701 nt, Artificial Sequence
  derived and/or modified CDS sequence (wt) from hemagglutinin__InfluenzaA__AEI86964
augaaggcaauacuaguaguucuacuauauacauuugcaaccgcaaaugcagacacauuauguauagguuaucaugcgaacaauucaacagacacuguagacacaguacuagaaaagaauguaacaguaacacacucuguuaaccuucuagaagacaagcauaacgggaaacuaugcaaacuaagagggguagccccauugcauuuggguaaauguaacauugcuggcuggauccugggaaauccagagugugaaucacucuccacagcaagcucaugguccuacauuguggaaacaucuaguucagacaauggaacguguuacccaggaguuuucaucgauuaugaggagcuaagagagcaauugagcucagugucaucauuugaaagguuugagauauuccccaagacaaguucauggcccaaucaugacucgaacaaagguguaacggcagcauguccucaugcuggagcaaaaagcuucuacaaaaauuuaauauggcuaguuaaaaaaggaaauucauacccaaagcucagcaaauccuacauuaaugauaaagggaaagaaguccucgugcuauggggcauucaccauccaucuacuacugcugaccaacaaagucucuaucagaaugcagaugcauauguuuuuguggggacaucaagauacagcaagaaguucaagccggaaauagcaguaagacccaaagugagggaucaagaagggagaaugaacuauuacuggacacuaguagagccgggagacaaaauaacauucgaagcaacuggaaaucuagugguaccgagauaugcauucgcaauggaaagaaaugcuggaucugguauuaucauuucagauacaccaguccacgauugcaauacaacuugucagacacccaagggugcuauaaacaccagccucccauuucagaauauacauccgaucacaauuggaaaauguccaaaauauguaaaaagcacaaaauugagacuggccacaggauugaggaaugucccgucuauucaaucuagaggccuauuuggggccauugccggcuucauugaagggggguggacagggaugguagauggaugguacgguuaucaccaucaaaaugagcaggggucaggauaugcagccgaccugaagagcacacagaaugccaucgacaagauuacuaacaaaguaaauucuguuauugaaaagaugaauacacaguucacagcaguagguaaagaguucaaccaccuggaaaaaagaauagagaauuuaaauaaaaaaguugaugaugguuuccuggacauuuggacuuacaaugccgaacuguugguucuauuggaaaaugaaagaacuuuggacuaccacgauucaaaugugaagaacuuauaugaaaagguaagaaaccaguuaaaaaacaaugccaaggaaauuggaaacggcugcuuugaauuuuaccacaaaugcgauaacaugugcauggaaagugucaaaaaugggacuuaugacuauccaaaauacucagaggaagcaaaauuaaacagagaagaaauagaugggguaaagcuggaaucaacaaggauuuaccagauuuuggcgaucuauucaacugucgccaguucauugguacugguagucucccugggggcaaucaguuucuggaugugcucuaaugggucucuacaguguagaauauguauuuaa

SEQ ID NO: 38900 - RNA, 1701 nt, Artificial Sequence
  derived and/or modified CDS sequence (wt) from hemagglutinin__InfluenzaA__AEI86974
augaaggcaauacuaguaguucugcuauauacauuugcaaccgcaaaugcagacacauuauguauagguuaucaugcgaacaauucaacagacacuguagacacaguacuagaaaagaaugugacaguaacacacucuguuaaccuucuagaagacaagcauaacgggaaacuaugcaaacuaagagggguagccccauugcauuuggguaaauguaacauugcuggcuggauccugggaaauccagagugugaaucacucuccacagcaagcucaugguccuacauuguggaaacaucuaguucagacaauggaacguguuacccaggagauuucaucgauuaugaggagcuaagagagcaauugagcucagugucaucauuugaaagguuugagauauuccccaagacaaguucauggcccaaucaugacucgaacaaagguguaacggcagcauguccucaugcuggagcaaaaagcuucuacaaaaauuuaauauggcuaguuaaaaaaggaaauucauacccaaagcucagcaaauccuacauuaaugauaaagggaaagaaguccuugugcuauggggcauucaccauccaucuacuagugcugaccaacaaagucucuaucagaaugcagaugcauauguuuuuguggggacaucaaaauacagcaagaaguucaagccggaaauagcaauaagacccaaagugagggaucaagaagggagaaugaacuauuacuggacacuaguagagccgggagacaaaauaacauucgaagcaacuggaaaucuagugguaccgagauaugcauucgcaauggaaagaaaugcuggaucugguauuaucauuucagauacaccaguccacgauugcaauacaacuugucagacacccaagggugcuauaaacaccagccucccauuucagaauauacauccgaucacaauuggaaaauguccaaaauauguaaaaagcacaaaauugagacuggccacaggauugaggaaugucccgucuauucaaucuagaggccuauuuggggccauugccgguuucauugaagggggguggacagggaugguagauggaugguacgguuaucaccaucaaaaugagcaggggucaggauaugcagccgaccugaagagcacacagaaugccauugacaagauuacuaacaaaguaaauucuguuauugaaaagaugaauacacaguucacagcaguagguaaagaguucaaccaccuggaaaaaagaauagagaauuuaaauaaaaaaguugaugaugguuuccuggacauuuggacuuacaaugccgaacuguugguucuauuggaaaaugaaagaacuuuggacuaccacgauucaaaugugaagaacuuauaugaaaagguaagaagccaguuaaaaaacaaugccaaggaaauuggaaacggcugcuuugaauuuuaccacaaaugcgauaacacgugcauggaaagugucaaaaaugggacuuaugacuacccaaaauacucagaggaagcaaaauuaaacagagaagaaauagaugggguaaagcuggaaucaacaaggauuuaccagauuuuggcgaucuauucaacugucgccaguucauugguacugguagucucccugggggcaaucaguuucuggaugugcucuaaugggucucuacaguguagaauauguauuuaa

SEQ ID NO: 38901 - RNA, 1701 nt, Artificial Sequence
  derived and/or modified CDS sequence (wt) from hemagglutinin__InfluenzaA__AEI86984
augaaggcaauacuaguaguucugcuauauacauuugcaaccgcaaaugcagacacauuauguauagguuaucaugcgaacaauucaacagacacuguagacacaguacuagaaaagaauguaacaguaacacacucuguuaaccuucuagaagacaagcauaacgggaaauuaugcaaacuaagagggguagccccauugcauuuggguaaauguaacauugcuggcuggauccugggaaauccagagugugaaucacucuccacagcaagcucaugguccuacauuguggaaacaucuaguucagacaauggaacguguuacccaggagauuucaucgauuaugaggagcuaagggaacaauugagcucagugucaucauuugaaagguuugagauauuccccaagacaaguucauggcccgaucaugacucgaacaaagguguaacggcagcauguccucaugcuggagcaaaaagcuucuacaaaaauuuaauauggcuaguuaaaaaaggaaauucauacccaaagcucagcaaauccuacauuaaugauaaaggaaaagaaguccucgugcuauggggcauucaccauccaucuacuagugcugaccaacaaagucucuaucagaaugcagaugcauauguuuuuguggggacaucaagauacagcaagaaguucaagccggaaauagcaauaagacccaaagugagggaucaagaagggagaaugaacuauuacuggacacuaguagagccgggagacaaaauaacauucgaagcaacuggaaaucuagugguaccgagauaugcauucgcaauggaaagaaaugcuggaucugguauuaucauuucagauacgccaguccacgauugcaauacaacuugucagacacccaagggugcuauaaacaccagccucccauuucagaauauacauccgaucacaaucggaaaauguccaaaauauguaaaaagcacaaaauugagacuggccacaggauugaggaaugucccgucuauucaaucuagaggccuauuuggggccauugccgguuucauugaagggggguggacagggaugguagauggaugguacgguuaucaccaucaaaaugagcaggggucaggauaugcagccgaccugaagagcacacagaaugccauugacaagauuacuaacaaaguaaauucuguuauugaaaagaugaauacacaguucacagcaguagguaaagaguucaaccaccuggaaaaaagaauagagaauuuaaauaaaaaaguugaugaugguuuccuggacauuuggacuuacaaugccgaacuguugguucuguuggaaaaugaaagaacuuuggacuaccacgauucaaaugugaagaacuuauaugaaaagguaagaagccaguuaaaaaacaaugccaaggaaauuggaaacggcugcuuugaauuuuaccacaaaugcgauaacacgugcauggaaagugucaaaaaugggacuuaugacuacccaaaauacucagaggaagcaaaauuaaacagagaagaaauagaugggguaaagcuggaaucaacaaggauuuaccagauuuuggcgaucuauucaacugucgccaguucauugguacuaguagucucccugggggcaaucaguuucuggaugugcucuaaugggucucuacaguguagaauauguauuuaa

SEQ ID NO: 38902 - RNA, 1701 nt, Artificial Sequence; identical to SEQ ID NO: 38890
  derived and/or modified CDS sequence (wt) from hemagglutinin__InfluenzaA__AEI86994

SEQ ID NO: 38903 - RNA, 1701 nt, Artificial Sequence
  derived and/or modified CDS sequence (wt) from hemagglutinin__InfluenzaA__AEI87004
augaaggcaauacuaguaguucugcuauauacauuugcaaccgcaaaugcagacacauuauguauagguuaucaugcgaacaauucaacagacacuguagacacaguacuagaaaagaauguaacaguaacacacucuguuaaccuucuagaagacaagcauaacgggaaauuaugcaaacuaaaagggguagccccauugcauuuggguaaauguaacauugcuggcuggauccugggaaauccagagugugaaucacucuccacagcaagcucaugguccuacauuguggaaacaucuaguucagacaauggaacguguuacccaggaaauuucaucgauuaugaggagcuaagagaacaauugagcucagugucaucauuugaaagguuugagauauuccccaagacaaguucauggcccgaucaugacucgaacaaagguguaacggcagcauguccucaugcuggagcaaaaagcuucuacaaaaauuuaauauggcuaguuaaaaaaggaaauucauacccaaagcucagcaaauccuacauuaaugauaaagggaaagaaguccucgugcuauggggcauucaccauccaucuacuagugcugaccaacaaggucucuaucagaaugcagaugcauauguuuuuguggggacaucaagauacagcaagaaguucaagccggaaauagcaauaagacccaaagugagggaucaagaagggagaaugaacuauuacuggacacuaguagagccgggagacaaaauaacauucgaagcaacuggaaaucuaguggcaccgagauaugcauucgcaauggaaagaaaugcuggaucugguauuaucauuucagauacaccaguccacgauugcaauacaacuugucagacacccaagggugcuauaaacaccagccucccauuucagaauauacauccgaucacaauuggaaaauguccaaaauauguaaaaagcacaaaauugagacuggccacaggauugaggaaugucccgucuauucaaucuagaggccuauuuggggccauugccgguuucauugaagggggguggacagggaugguagauggaugguacgguuaucaccaucaaaaugagcaggggucuggauaugcagccgaccugaagagcacacagaaugccauugacaagauuacuaacaaaguaaauucuguuauugaaaagaugaauacacaguucacagcaguagguaaagaguucaaccaccuggaaaaaagaauagagaauuuaaauaaaaaaguugaugaugguuuccuggacauuuggacuuacaaugccgaacuguugguucuauuggaaaaugaaagaacuuuggacuaccacgauucaaaugugaagaacuuauaugaaaagguaagaagccaguuaaaaaacaaugccaaggaaauuggaaacggcugcuuugaauuuuaccacaaaugcgauaacacgugcauggaaagugucaaaaaugggacuuaugacuacccaaaauacucagaggaagcaaaauuaaacagagaagaaauagaugggguaaagcuggaaucaacaaggauuuaccagauuuuggcgaucuauucaacugucgccaguucauugguacugguagucucccugggggcaaucaguuucuggaugugcucuaaugggucucuacaguguagaauauguauuuaa

SEQ ID NO: 38904 - RNA, 1701 nt, Artificial Sequence
  derived and/or modified CDS sequence (wt) from hemagglutinin__InfluenzaA__AEI87014
augaaggcaauacuaguaguucugcuauauacauuugcaaccgcaaaugcagacacauuauguauagguuaucaugcgaacaauucaacagacacuguagacacaguacuagaaaagaauguaacaguaacacacucuguuaaccuucuagaagacaagcauaacgggaaacuaugcaaacuaagagggguagccccauugcauuuggguaaauguaacauugcuggcuggauccugggaaauccagagugugaaucacucuccacagcaagcucaugguccuacauuguggaaacaucuaguucagacaauggaacguguuacccaggagauuucaucgauuaugaggagcuaagagagcaauugagcucagugucaucauuugaaagguuugagauauuccccaagacaaguucauggcccaaucaugacucgaacaaagguguaacggcagcauguccucaugcuggagcaaaaagcuucuacaaaaauuuaauauggcuaguuaaaaaaggaaauucauacccaaagcucagcaaauccuacauuaaugauaaagggaaagaaguccucgugcuauggggcauucaccauccaucuacuagugcugaccaacaaagucucuaucagaaugcagaugcauauguuuuuguggggacaucaagauacagcaagaaguucaagccggaaauagcaauaagacccaaagugagggaucaagaagggagaaugaacuauuacuggacacuaguagagccgggagacaaaauaacauucgaagcaacuggaaaucuagugguaccgagauaugcauucgcaauggaaagaaaugcuggaucugguauuaucauuucagauacaccaguccacgauugcaauacaacuugucagacacccaagggugcuauaaacaccagccucccauuucagaauauacauccgaucacaauuggaaaauguccaaaauauguaaaaagcacaaaauugagacuggccacaggauugaggaaugucccgucuauucaaucuagaggccuauuuggggccauugccgguuucauugaagggggguggacagggaugguagauggaugguacgguuaucaccaucaaaaugagcaggggucaggauaugcagccgaccugaagagcacacagaaugccauugacaagauuacuaacaaaguaaauucuguuauugaaaagaugaauacacaguucacagcaguagguaaagaguucaaccaccuggaaaaaagaauagagaauuuaaauaaaaaaguugaugaugguuuccuggacauuuggacuuacaaugccgaacuguugguucuauuggaaaaugaaagaacuuuggacuaccacgauucaaaugugaagaacuuauaugaaaagguaagaagccaguuaaaaaacaaugccaaggaaauuggaaacggcugcuuugaauuuuaccacaaaugcgauaacacgugcauggaaagugucaaaaaugggacuuaugacuacccaaaauacucaggggaagcaaaauuaaacagagaagaaauagaugggguaaagcuggaaucaacaaggauuuaccagauuuuggcgaucuauucaacugucgccaguucauugguacugguagucucccugggggcaaucaguuucuggaugugcucuaaugggucucuacaguguagaauauguauuuaa

SEQ ID NO: 38905 - RNA, 1701 nt, Artificial Sequence
  derived and/or modified CDS sequence (wt) from hemagglutinin__InfluenzaA__AEI87034
augaaggcaauacuaguaguucugcuauauacauuugcaaccgcaaaugcagacacauuauguauagguuaucaugcgaacaauucaacagacacuguagacacaguacuagaaaagaauguaacaguaacacacucuguuaaccuucuagaagacaagcauaacgggaaacuaugcaaacuaagagggguagccccauugcauuuggguaaauguaacaucgcuggcuggauccugggaaauccagagugugaaucacucuccacagcaagcucaugguccuacauuguggaaacaucuaguucagacaauggaacguguuacccaggagauuucaucgauuaugaggagcuaagagagcaauugagcucagugucaucauuugaaagguuugagauauuccccaagacaaguucauggcccgaccaugacucgaacaaagguguaacggcagcauguccucaugcuggagcaaaaagcuucuacaaaaauuuaauauggcuaguuaaaaaaggaaauucauacccaaagcucagcaaauccuacauuaaugauaaagggaaagaaguccucgugcuauggggcauucaccauccaucuacuagugcugaccaacaaagucucuaucagaaugcagaugcauauguuuuuguggggacaucaagauacagcaagaaguucaagccggaaauagcaauaagacccaaagugagggaucaagaagggagaaugaacuauuacuggacacuaguagagccgggagacaaaauaacauucgaagcaacuggaaaucuagugguaccgagauaugcauucgcaauggaaagaaaugcuggaucugguauuaucauuucagauacaccaguccacgauugcaauacaacuugucagacacccaagggugcuauaaacaccagccucccauuucagaauauacauccgaucacaauuggaaaauguccaaaauauguaaaaagcacaaaauugagacuggccacaggauugaggaaugucccgucuauucaaucuagaggccuauuuggggccauugccgguuucauugaagggggguggacagggaugguagauggaugguacgguuaucaccaucaaaaugagcaggggucaggauaugcagccgaccugaagagcacacagaaugccauugacaagauuacuaacaaaguaaauucuguuauugaaaagaugaauacacaguucacagcaauagguaaagaguucaaccaccuggaaaaaagaauagagaauuuaaauaaaaaaguugaugaugguuuccuggacauuuggacuuacaaugcugaacuguugguucuauuggaaaaugaaagaacuuuggacuaccacgauucaaaugugaagaacuuauaugaaaagguaagaagccaguuaaaaaacaaugccaaggaaauuggaaacggcugcuuugaguuuuaccacaaaugcgauaacacgugcauggaaagugucaaaaaugggacuuaugacuacccaaaauacucagaggaagcaaaauuaaacagagaagaaauagaugggguaaagcuggaaucaacaaggauuuaccagauuuuggcgaucuauucaacugucgccaguucauugguacugguagucucccugggggcaaucaguuucuggaugugcucuaaugggucucuacaguguagaauauguauuuaa

SEQ ID NO: 38906 - RNA, 1701 nt, Artificial Sequence
  derived and/or modified CDS sequence (wt) from hemagglutinin__InfluenzaA__AEI87044
augaaggcaauacuaguaguucugcuauauacauuugcaaccgcaaaugcagacacauuauguauagguuaucaugcgaacaauucaacagacacuguagacacaguacuagaaaagaauguaacaguaacacacucuguuaaccuucuagaagacaagcauaacgggaaauuaugcaaacuaagagggguagccccauugcauuuggguaaauguaacauugcuggcuggauccugggaaauccagagugugaaucacucuccacagcaagcucaugguccuacauuguggaaacaucuaguucagacaauggaacguguuauccaggagauuucaucgauuaugaggagcuaagagaacaauugagcucagugucaucauuugaaagguuugagauauuccccaagacaaguucauggcccgaucaugacucgaacaaagguguaacggcagcauguccucaugcuggagcaaaaagcuucuacaaaaauuuaauauggcuaguuaaaaaaggaaauucauacccaaagcucagcaaauccuacauuaaugauaaagggaaagaaguccucgugcuauggggcauucaccauccaucuacuagugcugaccaacaaagucucuaucagaaugcagaugcauauguuuuuguggggacaucaagauacagcaagaaguucaagccggaaauagcaauaagacccaaagugagggaucaagaagggagaaugaacuauuacuggacacuaguagagccgggagacaaaauaacauucgaagcaacuggaaaucuagugguaccgagauaugcauucgcaauggaaagaaaugcuggaucugguauuaucauuucagauacaccaguccacgauugcaauacaacuugucagacacccaagggugcuauaaacaccagccucccauuucagaauauacauccgaucacaauuggaaaauguccaaaauauguaaaaagcacaaaauugagacuggccacaggauugaggaaugucccgucuauucaaucuagaggccuauuuggggccauugccgguuucauugaagggggguggacagggaugguagauggaugguacgguuaucaccaucaaaaugagcaggggucaggauaugcagccgaccugaagagcacacagaaugccauugacaagauuacuaacaaaguaaauucuguuauugaaaagaugaauacacaguucacagcaguagguaaagaguucaaccaccuggaaaaaagaauagagaauuuaaauaaaaaaguugaugaugguuuccuggacauuuggacuuacaaugccgaacuguugguucuauuggaaaaugaaagaacuuuggacuaccacgauucaaaugugaagaacuuauaugaaaagguaagaagccaguuaaaaaacaaugccaaggaaauuggaaacggcugcuuugaauuuuaccacaaaugcgauaacacgugcauggaaagugucaaaaaugggacuuaugacuacccaaaauacucagaggaagcaaaauuaaacagagaagaaauagaugggguaaagcuggaaucaacaaggauuuaccagauuuuggcgaucuauucaacugucgccaguucauugguacugguagucucccugggggcaaucaguuucuggaugugcucuaaugggucucuacaguguagaauauguauuuaa

SEQ ID NO: 38907 - RNA, 1701 nt, Artificial Sequence
  derived and/or modified CDS sequence (wt) from hemagglutinin__InfluenzaA__AEI87054
augaaggcaauacuaguaguucugcuauauacauuugcaaccgcaaaugcagacacauuauguauagguuaucaugcgaacaauucaacagacacuguagacacaguacuagaaaagaauguaacaguaacacacucuguuaaccuucuagaagacaagcauaacgggaaacuaugcaaacuaagagggguagccccauugcauuuggguaaauguaacaucgcuggcuggauccugggaaauccagagugugaaucacucuccacagcaagcucaugguccuacauuguggaaacaucuaguucagacaauggaacguguuacccaggagauuucaucgauuaugaggagcuaagagagcaauugagcucagugucaucauuugaaagguuugagauauuccccaagacaaguucauggcccaaucaugacucgaacaaagguguaacggcagcauguccucaugcuggagcaaaaagcuucuacaaaaauuuaauauggcuaguuaaaaaaggaaauucauacccaaagcucagcaaauccuacauuaaugauaaagggaaagaaguccucgugcuauggggcauucaccauccaucuacuagugcugaccaacaaagucucuaucagaaugcagaugcauauguuuuuguggggacaucaagauacagcaagaaguucaagccggaaauagcaauaagacccaaagugagggaucaagaagggagaaugaacuauuacuggacacuaguagagccgggagacaaaauaacauucgaagcaacuggaaaucuagugguaccgagauaugcauucgcaauggaaagaaaugcuggaucugguauuaucauuucagauacaccaguccacgauugcaauacaacuugucagacacccaagggugcuauaaacaccagccucccauuucagaauauacauccgaucacaauuggaaaauguccaaaauauguaaaaagcacaaaauugagacuggccacaggauugaggaaugucccgucuauucaaucuagaggccuauuuggggccauugccgguuucauugaagggggguggacagguaugguagauggaugguacgguuaucaccaucaaaaugagcaggggucaggauaugcagccgaccugaagagcacacagaaugccauugacaagauuacuaacaaaguaaauucuguuauugaaaagaugaauacacaguucacagcaguagguaaagaguucaaccaccuggaaaaaagaauagagaauuuaaauaaaaaaguugaugaugguuuccuggacauuuggacuuacaaugccgaacuguugguucuauuggaaaaugaaagaacuuuggacuaccacgauucaaaugugaagaacuuauaugaaaagguaagaagccaguuaaaaaacaaugccaaggaaauuggaaacggcugcuuugaguuuuaccacaaaugcgauaacacgugcauggaaagugucaaaaaugggacuuaugacuacccaaaauacucagaggaagcaaaauuaaacagagaagaaauagaugggguaaagcuggaaucaacaaggauuuaccagauuuuggcgaucuauucaacugucgccaguucauugguacugguagucucccugggggcaaucaguuucuggaugugcucuaaugggucucuacaguguagaauauguauuuaa

SEQ ID NO: 38908 - RNA, 1701 nt, Artificial Sequence
  derived and/or modified CDS sequence (wt) from hemagglutinin__InfluenzaA__AEI87064
augaaggcaauacuaguaguucugcuauauacauuugcaaccgcaaaugcagacacauuauguauagguuaucaugcgaacaauucaacagacacuguagacaccguacuagaaaagaauguaacaguaacacacucuguuaaucuucuagaagacaagcauaacgggaaacuaugcaaacuaagagggguagccccauugcauuuggguaaauguaacauugcuggcuggauccugggaaauccagagugugaaucacucuccacagcaagcucaugguccuacauuguggaaacaucuaguucagacaauggaacguguuacccaggagauuucaucgauuaugaggagcuaagagagcaauugagcucagugucaucauuugaaagguuugagauauuccccaagacaaguucauggcccaaucaugacucgaacaaagguguaacggcagcauguccucaugcuggagcaaaaagcuucuacaaaaauuuaauauggcuaguuaaaaaaggaaauucauacccaaagcucagcaaauccuacauuaaugauaaagggaaagaaguccucgugcuauggggcauucaccauccaucuacuacugcugaccaacaaagucucuaucagaaugcagauacauauguuuuuguggggacaucaagauacagcaagaaguucaagccggaaauagcaauaagacccaaagugagggaucaagaagggagaaugaacuauuacuggacacuaguagagccgggagacaaaauaacauucgaagcaacuggaaaucuagugguaccgagauaugcauucgcaauggaaagaaaugcuggaucugguauuaucauuucagauacaccaguccacgauugcaauacaacuugucagacacccaagggugcuauaaacaccagccucccauuucagaauauacauccgaucacaauuggaaaauguccaaaauauguaaaaagcacaaaauugagacuggccacaggauugaggaaugucccgucuauucaaucuagaggccuauuuggggccauugccggcuucauugaagggggguggacagggaugguagauggaugguacgguuaucaccaucaaaaugagcaggggucaggauaugcagccgaccugaagagcacacagaaugccauugacaagauuacuaacaaaguaaauucuguuauugaaaagaugaauacacaguucacagcaguagguaaagaguucaaccaccuggaaaaaagaauagagaauuuaaauaaaaaaguugaugaugguuuccuggacauuuggacuuacaaugccgaacuguugguucuauuggaaaaugaaagaacuuuggacuaccacgauucaaaugugaagaacuuauaugaaaagguaagaaaccaguuaaaaaacaaugccaaggaaauuggaaauggcugcuuugaauuuuaccacaaaugcgauaacacgugcauggaaagugucaaaaaugggacuuaugacuacccaaaauacucagaggaagcaaaauuaaacagagaagaaauagaugggguaaagcuggaaucaacaaggauuuaccagauuuuggcgaucuauucaacugccgccaguucauugguacugguagucucccugggggcaaucaguuuuuggaugugcucuaaugggucucuacaguguagaauauguauuuaa

SEQ ID NO: 38909 - RNA, 1701 nt, Artificial Sequence
  derived and/or modified CDS sequence (wt) from hemagglutinin__InfluenzaA__AEI87074
augaaggcaacacuaguaguucugcuauauacauuugcaaccgcaaaugcagacacauuauguauagguuaucaugcgaacaauucaacagacacuguagacacaguacuagaaaagaauguaacaguaacacacucuguuaaccuucuagaagacaagcauaacgggaaacuaugcaaacuaagagggguagccccauugcauuuggguaaauguaacauugcuggcuggauccugggaaauccagagugugaaucacucuccacagcaagcucaugguccuacauuguggaaacaucuaguucagacaauggaacguguuacccaggagauuucaucaauuaugaggagcuaagagagcaauugagcucagugucaucauuugaaagguuugagauauuccccaagacaaguucauggcccaaucaugacucgaacaaagguguaacggcagcauguccucaugcuggagcaaaaagcuucuacaaaaauuuaauauggcuaguuaaaaaaggaaauucauacccaaagcucagcaaauccuacauuaaugauaaagggaaagaaguccucgugcuauggggcauucaccauccaucuacuacugcugaccaacaaagucucuaucagaaugcagaugcauauguuuuuguggggacaucaagauacagcaagaaguucaagccggaaauagcaauaagacccaaagugagggaucaagaagggagaaugaacuauuacuggacacuaguagagccgggagacaaaauaacauucgaagcaacuggaaaucuagugguaccgagauaugcauucgcaauggaaagaaaugcuggaucugguauuaucauuucagauacaccaguccacgauugcaauacaacuugucagacacccaagggugcuauaaacaccagccucccauuucagaauauacauccgaucacaauuggaaaauguccaaaauauguaaaaagcacaaaauugagacuggccacaggauugaggaaugucccgucuauucaaucuagaggccuauuuggggccauugccggcuucauugaagggggguggacagggaugguagauggaugguacgguuaucaccaucaaaaugagcaggggucaggauaugcagccgaccugaagagcacacagaaugccauugacaagauuacuaacaaaguaaauucuguuauugaaaagaugaauacacaguucacagcaguagguaaagaguucaaccaccuggaaaaaagaauagagaauuuaaauaaaaaaguugaugaugguuuccuggacauuuggacuuacaaugccgaacuguugguucuauuggaaaaugaaagaacuuuggacuaccacgauucaaaugugaagaacuuauaugaaaagguaagaaaccaguuaaaaaacaaugccaaggaaauuggaaacggcugcuuugaauuuuaccacaaaugcgauaacacgugcauggaaagugucaaaaaugggacuuaugacuacccaaaauacucagaggaagcaaaauuaaacagagaagaaauagaugggguaaagcuggaaucaacaaggauuuaccagauuuuggcgaucuauucaacugucgccaguucauugguacugguagucucccugggggcaaucaguuucuggaugugcucuaaugggucucuacaguguagaauauguauuuaa

SEQ ID NO: 38910 - RNA, 1701 nt, Artificial Sequence
  derived and/or modified CDS sequence (wt) from hemagglutinin__InfluenzaA__AEI87094
augaaggcaauacuaguaguucugcuauauacauuugcaaccgcaaaugcagacacauuauguauagguuaucaugcgaacaauucaacagacacuguagacacaguacuagaaaagaauguaacaguaacacacucuguuaaccuucuagaagacaagcauaacgggaaauuaugcaaacuaagagggguagccccauugcauuuggguaaauguaacauugcuggcuggauccugggaaauccagagugugaaucacucuccacagcaagcucaugguccuacauuguggaaacaucuaguucagacaauggaacguguuacccaggagauuucaucgauuaugaggagcuaagagaacaauugagcucagugucaucauuugaaagguuugagauauuccccaagacaaguucauggcccgaucaugacucgaacaaagguguaacggcagcauguccucaugcuggagcaaaaagcuucuacaaaaauuuaauauggcuaguuaaaaaaggaaauucauacccaaagcucagcaaauccuacauuaaugauaaagggaaagaaguccucgugcuauggggcauucaccauccaucuacuagugcugaccaacaaagucucuaucagaaugcagaugcauauguuuuuguggggacaucaagauacagcaagaaguucaagccggaaauagcaauaagacccaaagugagggaucaagaagggagaaugaacuauuacuggacacuaguagagccgggagacaaaauaacauucgaagcaacuggaaaucuagugguaccgagauaugcauucgcaauggaaagaaauacuggaucugguauuaucauuucagauacaccaguccacgauugcaauacaacuugucagacacccaagggugcuauaaacaccagccucccauuucagaauauacauccgaucacaauuggaaaauguccaaaauauguaaaaagcacaaaauugagacuggccacaggauugaggaaugucccgucuauucaaucuagaggccuauuuggggccauugccgguuucauugaagggggguggacagggaugguagauggaugguacgguuaucaccaucaaaaugagcaggggucaggauaugcagccgaccugaagagcacacagaaugccauugacaagauuacuaacaaaguaaauucuguuauugaaaagaugaauacacaguucacagcaguagguaaagaguucaaccaccuggaaaaaagaauagagaauuuaaauaaaaaaguugaugaugguuuccuggacauuuggacuuacaaugccgaacuguugguucuauuggaaaaugaaagaacuuuggacuaccacgauucaaaugugaagaacuuauaugaaaagguaagaagccaguuaaaaaacaaugccaaggaaauuggaaacggcugcuuugaauuuuaccacaaaugcgauaacacgugcauggaaagugucaaaaaugggacuuaugacuacccaaaauacucagaggaagcaaaauuaaacagagaaaaaauagaugggauaaagcuggaaucaacaaggauuuaccagauuuuggcgaucuauucaacugucgccaguucauugguacuaguagucucccugggggcaaucaguuucuggaugugcucuaaugggucucuacaauguagaauauguauuuaa

SEQ ID NO: 38911 - RNA, 1701 nt, Artificial Sequence; identical to SEQ ID NO: 38910
  derived and/or modified CDS sequence (wt) from hemagglutinin__InfluenzaA__AEI87104

SEQ ID NO: 38912 - RNA, 1698 nt, Artificial Sequence; identical to SEQ ID NO: 38004
  derived and/or modified CDS sequence (wt) from hemagglutinin__InfluenzaA__AEI91963

SEQ ID NO: 38913 - RNA, 1701 nt, Artificial Sequence; identical to SEQ ID NO: 36071
  derived and/or modified CDS sequence (wt) from hemagglutinin__InfluenzaA__AEI91977

SEQ ID NO: 38914 - RNA, 1701 nt, Artificial Sequence; identical to SEQ ID NO: 37369
  derived and/or modified CDS sequence (wt) from hemagglutinin__InfluenzaA__AEI91978

SEQ ID NO: 38915 - RNA, 1701 nt, Artificial Sequence
  derived and/or modified CDS sequence (wt) from hemagglutinin__InfluenzaA__AEI91998
augaaggcaauacuaguaguucugcuauauacauuugcaaccgcaaaugcagacacauuauguauagguuaucaugcgaacaauucaacagacacuguagacacaguacuagaaaagaauguaacaguaacacacucuguuaaccuucuagaagacaagcauaacgggaaacuaugcaaacuaagagggguagccccauugcauuuggguaaauguaacauugcuggcuggauccugggaaauccagagugugaaucacucuccacagcaagcucaugguccuacauuguggaaacaucuaguucagacaauggaacguguuacccaggagauuucaucgauuaugaggagcuaagagagcaauugagcucagugucaucauuugaaagguuugagauauuccccaagacaaguucauggcccaaucaugacucgaacaaagguguaacggcagcauguccucaugcuggagcaaaaagcuucuacaaaaauuuaauauggcuaguuaaaaaaggaaauucauacccaaagcucagcaaauccuacauuaaugauaaagggaaagaaguccucgugcuauggggcauucaccauccaucuacuagugcugaccaacaaagucucuaucagaaugcagaugcauauguuuuuguggggacaucaagauacagcaagaaguucaagccggaaauagcaauaagacccaaagugagggaucaagaagggagaaugaacuauuacuggacacuaguagagccgggagacaaaauaacauucgaagcaacuggaaaucuagugguaccgagauaugcauucgcaauggaaagaaaugcuggaucugguauuaucauuucagauacaccaguccacgauugcaauacaacuugucagacacccaagggugcuauaaacaccagccucccauuucagaauauacauccgaucacaauuggaaaguguccaaaauauguaaaaagcacaaaauugagacuggccacaggauugaggaaugucccgucuauucaaucuagaggccuauuuggggccauugccgguuucauugaagggggguggacagggaugguagauggaugguacgguuaucaccaucaaaaugagcaggggucaggauaugcagccgaccugaagagcacacagaaugccauugacaagauuacuaacaaaguaaauucuguuauugaaaagaugaauacacaguucacagcaguagguaaagaguucaaccaccuggaaaaaagaauagagaauuuaaauaaaaaaguugaugaugguuuccuggacauuuggacuuacaaugccgaacuguugguucuauuggaaaaugaaagaacuuuggacuaccacgauucaaaugugaagaacuuauaugaaaagguaagaagccaguuaaaaaacaaugccaaggaaauuggaaacggcugcuuugaauuuuaccacaaaugcgauaacacgugcauggaaagugucaaaaaugggacuuaugacuacccaaaauacucagaggaagcaaaauuaaacagagaagaaauagaugggguaaagcuggaaucaacaaggauuuaccagauuuuggcgaucuauucaacugucgccaguucauugguacugauagucucccugggggcaaucaguuucuggaugugcucuaaugggucucuacaguguagaauauguauuuaa

SEQ ID NO: 38916 - RNA, 1701 nt, Artificial Sequence
  derived and/or modified CDS sequence (wt) from hemagglutinin__InfluenzaA__AEI91999
augaagacuaucauugcuuugagcuacauucuaugucugguuuucgcucaaaaacuuccuggaaaugacaacagcacggcaacgcugugccuugggcaccaugcaguaccaaacggaacgauagugaaaacaaucacgaaugaccaaauugaaguuacuaaugcuacugagcugguucagaguuccucaacaggugaaauaugcaacaguccucaucagauccuugauggagaaaacugcacacuaauagaugcucuauugggagacccucagugugauggcuuccaaaauaagaaaugggaccuuuuuguugaacgaagcaaagccuacagcaacuguuacccuuaugaugugccggauuaugccucccuuaggucacuaguugccucauccggcacacuggaguuuaacaaugaaagcuucaauuggacuggagucacucaaaacggaacaagcucugcuugcauaaggagaucuaauaauaguuucuuuaguagauugaauugguugacccacuuaaacuucaaauacccagcauugaacgugacuaugccaaacaaugaacaauuugacaaacuguacauuugggggguucaccacccggguacggacaaggaccaaaucuuccuguaugcucaagcaucaggaagaaucacaguaucuaccaaaagaagccaacaagcuguaaucccgaauaucggaucuagacccagaguaaggaauaucccuagcagaauaagcaucuauuggacaauaguaaaaccgggagacauacuuuugauuaacagcacagggaaucuaauugcuccuagggguuacuucaaaauacgaagugggaaaagcucaauaaugagaucagaugcacccauuggcaaaugcaauucugaaugcaucacuccaaauggaagcauucucaaugacaaaccauuccaaaauguaaacaggaucacauacggggccugucccagauauguuaagcaaaacacucugaaauuggcaacaggaaugcgaaauguaccagagaaacaaacuagaggcauauuuggcgcaauagcggguuucauagaaaaugguugggagggaaugguggaugguugguacgguuucaggcaucaaaauucugagggaagaggacaagcagcagaucucaaaagcacucaagcagcaaucgaucaaaucaaugggaagcugaauagauugaucgggaaaaccaacgagaaauuccaucagauugaaaaagaauucucagaagucgaagggagaauucaggaccuugagaaauauguugaggacacuaaaauagaucucuggucauacaacgcggagcuucuuguugcccuggagaaccaacauacaauugaucuaacugacucagaaaugaacaaacuguuugaaaaaacaaagaagcaacugagggaaaaugcugaggauaugggcaaugguuguuucaaaauauaccacaaaugugacaaugccugcauaggaucaaucagaaauggaacuuaugaccacgauguauacagagaugaagcauuaaacaaccgguuccagaucaagggaguugagcugaagucaggguacaaagauuggauccuauggauuuccuuugccauaucauguuuuuugcuuuguguugcuuuguugggguucaucaugugggccugccaaaaaggcaacauuaggugcaacauuugcauuuga

SEQ ID NO: 38917 - RNA, 1698 nt, Artificial Sequence
  derived and/or modified CDS sequence (wt) from hemagglutinin__InfluenzaA__AEI92018
augaaaguaaaacuacugguccuguuaugcacauuuacagcuacauaugcagacacaauauguauaggcuaccaugcuaacaacucgaccgacacuguugacacaguacuugaaaagaaugugacagugacacacucugucaaccugcuugagaacagucacaauggaaaacuaugucuauuaaaaggaauagccccacuacaauuggguaacugcagcguugccggguggaucuuaggaaacccagaaugcgaauuacugauuuccaaggagucaugguccuacauuguagaaaaaccaaauccugagaauggaacauguuacccagggcauuucgcugacuaugaggaacugagggagcaauugaguucaguaucuucauuugagagguucgaaauauuccccaaagaaagcucauggcccaaccacaccguaaccggagugucagcaucaugcucccauaauggggaaagcaguuuuuacagaaauuugcuauggcugacggggaagaaugguuuguacccaaaccugagcaaguccuaugcaaacaacaaagaaaaagaaguccuuguacuaugggguguucaucacccgccaaacauagcugaccaaaagacccucuaucauacagaaaaugcuuauguuucuguagugucuucacauuauagcagaaaauucaccccagaaauagccaaaagacccaaaguaagagaucaagaaggaagaaucaacuacuacuggacucugcuugaacccggggauacaauaauauuugaggcaaauggaaaucuaauagcgccaagauaugcuuucgcacugaguagaggcuuuggaucaggaaucaucaacucaaaugcaccaauggauaaaugugaugcgaagugccaaacaccucagggagcuauaaacagcagucuuccuuuccagaacguacacccagucacaauaggagaguguccaaaguaugucaggagugcaaaauuaaggaugguuacaggacuaaggaacaucccauccauucaauccagagguuuguuuggagccauugccgguuucauugaagggggguggacuggaaugguagaugguugguaugguuaucaucaucagaaugagcaaggaucuggcuaugcugcagaucaaaaaagcacacaaaaugccauuaaugggauuacaaacaaggugaauucuguaauugagaaaaugaacacucaauucacagcagugggcaaagaauucaacaaauuggaaagaaggauggaaaacuugaauaaaaaaguugaugauggguuuauagacauuuggacauauaaugcagaacuguugguucuacuggaaaaugaaaggacuuuggauuuccaugacuccaaugugaagaaucuguaugagaaaguaaaaagccaguuaaagaauaaugcuaaagaaauaggaaauggguguuuugaauucuaucacaaguguaacgaugaaugcauggagaguguaaagaauggaacuuaugacuauccaaaauauuccgaagaaucaaaguuaaacagggagaaaauugauggagugaaauuggaaucaaugggagucuaucagauucuggcgaucuacucaacagucgccaguucucugguucuuuuggucucccugggggcaaucagcuucuggauguguuccaaugggucuuugcaguguagaauaugcaucuaa

SEQ ID NO: 38918 - RNA, 1701 nt, Artificial Sequence
  derived and/or modified CDS sequence (wt) from hemagglutinin__InfluenzaA__AEJ10400
augaaggcaauacuaguaguucugcuauauacauuugcaaccgcaaaugcagacacauuauguauagguuaucaugcgaacaauucaacagacacuguagacacaguacuagaaaagaauguaacaguaacacacucuguuaaccuucuagaagacaagcauaacgggaaauuaugcaaacuaagagggguagccccauugcauuuggguaaauguaacauugcuggcuggauccuaggaaauccagagugugaaucacucuccacagcaagcucaugguccuacauuguggaaacauccaguucagacaauggaacguguuacccaggaaauuucaucgauuaugaggagcuaagagaacaauugagcucagugucaucauuugaaagguuugagauauuccccaagacaaguucauggcccgaucaugacucgaacaaagguguaacggcagcauguccucaugcuggagcaaaaagcuucuacaaaaauuuaauauggcuaguuaaaaaaggaaauucauacccaaagcucagcaaauccuacauuaaugauaaagggaaagaaguccucgugcuauggggcauucaccauccaucuacuagugcugaccaacaaagucucuaucagaaugcagaugcauauguuuuuguggggacaucaagauacagcaagaaguucaagccggaaauagcaauaagacccaaagugagggaucaagaagggagaaugaacuauuacuggacacuaguagagccgggagacaaaauaacauucgaagcaacuggaaaucuuguggcaccgagauaugcauucgcaauggaaagaaaugcuggaucugguauuaucauuucagauacaccaguccacgauugcaauacaacuugucagacacccaagggugcuauaaacaccagccucccauuucagaauauacauccgaucacaauuggaaaauguccaaaauauguaaaaagcacaaaauugagacuggccacaggauugaggaaugucccgucuauucaaucuagaggccuauuuggggccauugccgguuucauugaagggggguggacagggaugguagauggaugguacgguuaucaccaucaaaaugagcaggggucuggauaugcagccgaccugaagagcacacagaaugccauugacaagauuacuaacaaaguaaauucuguuauugaaaagaugaauacacaguucacagcaguagguaaagaguucaaccaccuggaaaaaagaauagagaauuuaaauaaaaaaguugaugaugguuuccuggacauuuggacuuacaaugccgaauuguugguucuauuggaaaaugaaagaacuuuggacuaccacgauucaaaugugaagaacuuauaugaaaagguaagaagccaguuaaaaaacaaugccaaggaaauuggaaacggcugcuuugaauuuuaccacaaaugcgauaacacgugcauggaaagugucaaaaaugggacuuaugacuacccaaaauacucagaggaagcaaaauuaaacagagaagaaauagaugggguaaagcuggaaucaacaaggauuuaccagauuuuggcgaucuauucaacugucgccaguucauugguacugguagucucccugggggcaaucaguuucuggaugugcucuaaugggucucuacaguguagaauauguauuuaa

SEQ ID NO: 38919 - RNA, 1701 nt, Artificial Sequence
  derived and/or modified CDS sequence (wt) from hemagglutinin__InfluenzaA__AEJ10410
augaagacaauacuaguaguucugcuauauacauuugcaaccgcaaaugcagacacauuauguauagguuaucaugcgaacaauucaacagacacuauagacacaguacuagaaaagaauguaacaguaacacacucuguuaaccuucuagaagacaagcauaacgggaaauuaugcaaacuaagagggguagccccauugcauuuggguaaauguaacauugcuggcuggauccugggaaauccagagugugaaucacucuccacagcaagcucaugguccuacauuguggaaacaucuaguucagacaauggaacguguuacccaggaaauuucaucgauuaugaggagcuaagagaacaauugagcucagugucaucauuugaaagguuugagauauuccccaagacaaguucaugguccgaucaugacucgaacaaagguguaacggcagcauguccucaugcuggagcaaaaagcuucuacaaaaauuuaauauggcuaguuaaaaaaggaaauucauacccaaagcucagcaaauccuacauuaaugauaaagggaaagaaguccucgugcuauggggcauucaccauccaucuacuagugcugaccaacaaagucucuaucagaaugcagaugcauauguuuuuguggggacaucaagauacagcaagaaguucaagccggaaauagcaauaagacccaaagugagggaucaagaagggagaaugaacuauuacuggacacuaguagagccgggagacaaaauaacauucgaagcaacuggaaaucuaguggcaccgagauaugcauucgcaauggaaagaaaugcuggaucugguauuaucauuucagauacaccaguccacgauugcaauacaacuugucagacacccaagggugcuauaaacaccagccucccauuucagaauauacauccgaucacaauuggaaaauguccaaaauauguaaaaagcacaaaauugagacuggccacaggauugaggaaugucccgucuauucaaucuagaggccuauuuggggccauugccgguuucauugaagggggguggacagggaugguagauggaugguacgguuaucaccaucaaaaugagcaggggucuggauaugcagccgaccugaagagcacacagaaugccauugacaagauuacuaacaaaguaaauucuguuauugaaaagaugaauacacaguucacagcaguagguaaagaguucaaccaccuggaaaaaagaauagagaauuuaaauaaaaaaguugaugaugguuuccuggacauuuggacuuacaaugccgaacuguugguucuauuggaaaaugaaagaacuuuggacuaccacgauucaaaugugaagaacuuauaugaaaagguaagaagccaguuaaaaaacaaugccaaggaaauuggaaacggcugcuuugaauuuuaccacaaaugcgauaacacgugcauggaaagugucaaaaaugggacuuaugacuacccaaaauacucagaggaagcaaaauuaaacagagaagaaauagaugggguaaagcuggaaucaacaaggauuuaccagauuuuggcgaucuauucaacugucgccaguucauugguacugguagucucccugggggcaaucaguuucuggaugugcucuaaugggucucuacaguguagaauauguauuuaa

SEQ ID NO: 38920 - RNA, 1701 nt, Artificial Sequence
  derived and/or modified CDS sequence (wt) from hemagglutinin__InfluenzaA__AEJ10420
augaaggcaauacuaguaguucugcuauauacauuugcaaccgcaaaugcagacacauuauguauagguuaucaugcgaacaauucaacagacacuguagacacaguacuagaaaagaauguaacaguaacacacucuguuaaccuucuagaagacaggcauaacgggaaacuaugcaaacuaagagggguagccccauugcauuuggguaaauguaacaucgcuggcuggauccugggaaauccagagugugaaucacucuccacagcaagcucaugguccuacauuguggaaacaucuaguucagacaauggaacguguuacccaggagauuucaucgauuaugaggagcuaagagagcaauugagcucagugucaucauuugaaagguuugagauauuccccaagacaaguucauggcccgaucaugacucgaacaaagguguaacggcagcauguccucaugcuggagcaaaaagcuucuacaaaaauuuaauauggcuaguuaaaaaaggaaauucauacccaaagcucagcaaauccuacauuaaugauaaagggaaagaaguccucgugcuauggggcauucaccauccaucuacuagugcugaccaacaaagucucuaucagaaugcagaugcauauguuuuuguggggacaucaagauacagcaagaaguucaagccggaaauagcaauaagacccaaagugagggaucaagaagggagaaugaacuauuacuggacacuaguagagccgggagacaaaauaacauucgaagcaacuggaaaucuagugguaccgagauaugcauucgcaauggaaagaaaugcuggaucugguauuaucauuucagauacaccaguccacgauugcaauacaacuugucagacacccaagggugcuauaaacaccagccucccauuucagaauauacauccgaucacaauuggaaaauguccaaaauauguaaaaagcacaaaauugagacuggcuacaggauugagaaaugucccgucuauucaaucuagaggccuauuuggggccauugccgguuucauugaagggggguggacagggaugguagauggaugguacgguuaucaccaucaaaaugagcaggggucaggauaugcagccgaccugaagagcacacagaaugccauugacaagauuacuaacaaaguaaauucuguuauugaaaagaugaauacacaguucacagcaguagguaaagaguucaaccaccuggaaaaaagaauagagaauuuaaauaaaaaaguugaugaugguuuccuggacauuuggacuuacaaugccgaacuguugguucuauuggaaaaugaaagaacuuuggacuaccacgauucaaaugugaagaacuuauaugaaaagguaagaagccaguuaaaaaacaaugccaaggaaauuggaaacggcugcuuugaguuuuaccacaaaugcgauaacacgugcauggaaagugucaaaaaugggacuuaugacuacccaaaauacucagaggaagcaaaauuaaacagagaagaaauagaugggguaaagcuggaaucaacaaggauuuaccagauuuuggcgaucuauucaacugucgccaguucauugguacugguagucucccugggggcaaucaguuucuggaugugcucuaaugggucucuacaguguagaauauguauuuaa

SEQ ID NO: 38921 - RNA, 1701 nt, Artificial Sequence
  derived and/or modified CDS sequence (wt) from hemagglutinin__InfluenzaA__AEJ10430
augaaggcaauacuaguaguucugcuauauacauuugcaaccgcaaaugcagacacauuauguauagguuaucaugcgaacaauucaacagacacuguagacacaguacuagaaaagaauguaacaguaacacacucuguuaaccuucuagaagacaagcauaacgggaaacuaugcaaacuaagagggguagccccauugcauuuggguaaauguaacauugcuggcuggauccugggaaauccagagugugaaucacucuccacagcaagcucaugguccuacauuguggaaacaucuaguucagacaauggaacguguuacccaggagauuucaucgauuaugaggagcuaagagagcaauugagcucagugucaucauuugaaagguuugagauauuccccaagacaaguucauggcccaaucaugacucgaacaaagguguaacgacagcauguccucaugcuggagcaaaaagcuucuacaaaaauuuaauauggcuaguuaaaaaaggaaauucauacccaaaacucagcaaauccuacauuaaugauaaagggaaagaaguccucgugcuauggggcauucaccauccaccuacuagugcugaccaacaaagucucuaucagaaugcagaugcauauguuuuuguggggacaucaagauacagcaagaaguucaagccggaaauagcaauaagacccaaagugagggaucaagaagggagaaugaacuauuacuggacacuaguagagccgggagacaaaauaacauucgaagcaacuggaaaucuagugguaccgagauaugcauucgcaauggaaagaaaugcuggaucugguauuaucauuucagauacaccaguccacgauugcaauacaacuugucagacacccaagggugcuauaaacaccagccucccauuucagaauauacauccgaucacaauuggaaaauguccaaaauauguaaaaagcacaaaauugagacuggccacaggauugaggaaugucccgucuauucaaucuagaggccuauuuggggccauugccgguuucauugaagggggguggacagggaugguagauggaugguacgguuaucaccaucaaaaugagcaggggucaggguaugcagccgaccugaagagcacacagaaugccauugacgagauuacuaacaaaguaaauucuguuauugaaaagaugaauacacaguucacagcaguagguaaagaguucaaccaccuggaaaaaagaauagagaauuuaaauaaaaaaguugaugaugguuuccuggacauuuggacuuacaaugccgaacuguugguucuauuggaaaaugaaagaacuuuggacuaccacgauucaaaugugaagaacuuauaugaaaagguaagaagccaguuaaaaaacaaugccaaggaaauuggaaacggcugcuuugaauuuuaccacaaaugugauaacacgugcauggaaagugucaaaaaugggacuuaugacuacccaaaauacucagaggaagcaaaauuaaacagagaagaaauagaugggguaaagcuggaaucaacaaggauuuaccagauuuuggcgaucuauucaacugucgccaguucauugguacugguagucucccugggggcaaucaguuucuggaugugcucuaaugggucucuacaguguagaauauguauuuaa

SEQ ID NO: 38922 - RNA, 1701 nt, Artificial Sequence
  derived and/or modified CDS sequence (wt) from hemagglutinin__InfluenzaA__AEJ10440
augaaggcaauacuaguaguucugcuauauacauuugcaaccgcaaaugcagacacauuauguauagguuaucaugcgaacaauucaacagacacuguagacacaguacuagaaaagaauguaacaguaacacacucuguuaaccuucuagaagacaagcauaacgggaaacuaugcaaacuaagagggguagccccauugcauuuggguaaauguaacauugcuggcuggauccugggaaauccagagugugaaucacucuccacagcaagcucaugguccuacauuguggaaacaucuaguucagacaauggaacguguuacccaggagauuucaucgauuaugaggagcuaagagagcaauugagcucagugucaucauuugaaagguuugagauauuccccaagacaaguucauggcccaaucaugacucgaacaaagguguaacggcagcauguccucaugcuggagcaaaaagcuucuacaaaaauuuaauauggcuaguuaaaaaaggaaauucauacccaaagcucagcaaauccuacauuaaugauaaagggaaagaaguccucgugcuauggggcauucaccauccaucuacuacugcugaccaacaaauucucuaucagaaugcagauacauauguuuuuguggggacaucaagauacagcaagaaguucaagccggaaauagcaauaagacccaaagugagggaucaagaagggagaaugaacuauuacuggacacuaguagagccgggagacaaaauaacauucgaagcaacuggaaaucuagugguaccgagauaugcauucgcaauggaaagaaaugcuggaucugguauuaucauuucagauacaccaguccacgauugcaauacaacuugucagacacccaagggugcuauaaacaccagccucccauuucagaauauacauccgaucacaauuggaaaauguccaaaauauguaaaaagcacaaaauugagacuggccacaggauugaggaaugucccgucuauucaaucuagaggccuauuuggggccauugccggcuucauugaagggggguggacagggaugguagauggaugguacgguuaucaccaucaaaaugagcaggggucaggauaugcagccgaccugaagagcacacagaaugccauugacaagauuacuaacaaaguaaauucuguuauugaaaagaugaauacacaguucacagcaguagguaaagaguucaaccaccuggaaaaaagaauagagaauuuaaauaaaaaaguugaugaugguuuccuggacauuuggacuuacaaugccgaacuguugguucuauuggaaaaugaaagaacuuuggacuaccacgauucaaaugugaagaacuuauaugaaaagguaagaaaccaguuaaaaaacaaugccaaggaaauuggaaauggcugcuuugaauuuuaccacaaaugcgauaacacgugcauggaaagugucaaaaaugggacuuaugacuacccaaaauacucagaggaagcaaaauuaaacagagaagaaauagaugggguaaagcuggaaucaacaaggauuuaccagauuuuggcgaucuauucaacugucgccaguucauugguacugguagucucccugggggcaaucaguuuuuggaugugcucuaaugggucucuacaguguagaauauguauuuaa

SEQ ID NO: 38923 - RNA, 1701 nt, Artificial Sequence
  derived and/or modified CDS sequence (wt) from hemagglutinin__InfluenzaA__AEJ10450
augaaggcaauacuaguaguuaugcuauauacauuugcaaccgcaaaugcagacacauuauguauagguuaucaugcgaacaauucaacagacacuguagacacaguacuagaaaagaauguaacaguaacacacucuguuaaucuucuagaagacaagcauaacgggaaacuaugcaaacuaagagggguagccccauugcauuuggguaaauguaacauugcuggcuggauccugggaaauccagagugugaaucacucuccacagcaagcucaugguccuacauuguggaaacaucuaguucagacaauggaacguguuacccaggagauuucaucgauuaugaggagcuaagagagcaauugagcucagugucaucauuugaaagguuugagauauuccccaaaacaaguucauggcccaaucaugacucgaacaaagguguaacggcagcauguccucaugcuggagcaaaaggcuucuacaaaaauuuaauauggcuaguuaaaaaaggaaauucauacccaaagcucagcaaauccuacauuaaugauaaagggaaagaaguccucgugcuauggggcauucaccauccaucuacuacugcugaccaacaaagucucuaucagaaugcagauacauauguuuuuguggggacaucaagauacagcaagaaguucaagccggaaauagcaauaagacccaaagugagggaucaagaagggagaaugaacuauuacuggacacuaguagagccgggagacaaaauaacauucgaagcaacuggaaaucuagugguaccgagauaugcauucgcaauggaaagaaaugcuggaucugguauuaucauuucagauacaccaguccacgauugcaauacaacuugucagacacccaagggugcuauaaacaccagccucccauuucagaauauacauccgaucacaauuggaaaauguccaaaauauguaaaaagcacaaaauugagacuggccacaggauugaggaaugucccgucuauucaaucuagaggccuauuuggggccauugccggcuucauugaagggggguggacagggaugguagauggaugguacgguuaucaccaucaaaaugagcaggggucaggauaugcagccgaccugaagagcacacagaaugccauugacaagauuacuaacaaaguaaauucuguuauugaaaagaugaauacacaguucacagcaguagguaaagaguucaaccaccuggaaaaaagaauagagaauuuaaauaaaaaaguugaugaugguuuccuggacauuuggacuuacaaugccgaacuguugguucuauuggaaaaugaaagaacuuuggacuaccacgauucaaaugugaagaacuuauaugaaaagguaagaaaccaguuaaaaaacaaugccaaggaaauuggaaauggcugcuuugaauuuuaccacaaaugcgauaacacgugcauggaaagugucaaaaaugggacuuaugacuacccaaaauacucagaggaagcaaaauuaaacagagaagaaauagaugggguaaagcuggaaucaacaaggauuuaccagauuuuggcgaucuauucaacugucgccaguucauugguacugguagucucccugggggcaaucaguuuuuggaugugcucuaaugggucucuacaguguagaauauguauuuaa

SEQ ID NO: 38924 - RNA, 1701 nt, Artificial Sequence
  derived and/or modified CDS sequence (wt) from hemagglutinin__InfluenzaA__AEJ10480
augaaggcaauacuaguaguucugcuauauacauuugcaaccgcaaaugcagacacauuauguauagguuaucaugcgaacaauucaacagacacuguagacacaguacuagaaaagaauguaacaguaacacacucuguuaaccuucuagaagacaagcauaacgggaaacuaugcaaacugagagggguagccccauugcauuuggguaaauguaacauugcuggcuggauccugggaaauccagagugugaaucacucuccacagcaagcucaugguccuacaucguggaaacaucuaguucagacaauggaacgugcuacccaggagauuucaucaauuaugaggagcuaagagagcaauugagcucagugucaucauuugaaagguuugagauauuccccaagacaaguucauggcccaaucaugacucgaacaaagguguaacggcagcauguccucaagcuggagcaaaaagcuucuacaaaaauuuaauauggcuaguuaaaaaaggaaauucauacccaaagcucagcaaauccuacauuaacgauaaagggaaagaaguccucgugcuauggggcauucaccauccaucuacuagugcugaccaacaaagucucuaucagagugcagaugcauauguuuuuguggggacaucaaaauacagcaagaaguucaagccggaaauagcaguaagacccaaagugagggaucaagaagggagaaugaacuauuacuggacacuaguagagccgggagacaaaauaacauucgaagcaacuggaaaucuauugguaccgagauaugcauucgcaauggaaagaaaugcuggaucugguauuaucauuucagauacaccaguccacgauugcaauacaacuugucagacacccaagggugcuauaaacaccagccucccauuucagaauauacauccgaucacaauuggaaaaugucccaaauauguaaaaagcacaaaauugagacuggccacaggauugaggaaugucccgucuauucaaucuagaggccuauuuggggccauugccgguuucauugaagggggguggacagggaugguagauggaugguacgguuaucaccaucaaaaugcgcaggggucaggauaugcagccgaccugaagagcacacagaaugccauugacaagauuacuaacaaaguaaauucuguuauugaaaagaugaauacacaguucacagcaguagguaaagaguucaaccaccuggaaaaaagaauagagaauuuaaauaaaaaaguugaugaugguuuccuggacauuuggacuuacaaugccgaacuguugguucuauuggaaaaugaaagaacuuuggacuaccacgauucaaaugugaaaaacuuauaugaaaagguaagaagccaguuaaaaaacaaugccaaggaaauuggaaacggcugcuuugaauuuuaccacaaaugcgauaacacgugcauggaaagugucaaaaaugggacuuaugacuacccaaaauacucagaggaagcaaaauuaaacagagaagaaauagaugggguaaagcuggaaucaacaaggauuuaccagauuuuggcgaucuauucaacugucgccaguucauugguacugguagucucccugggggcaaucaguuucuggaugugcucuaaugggucucuacaguguagaauauguauuuaa

SEQ ID NO: 38925 - RNA, 1701 nt, Artificial Sequence
  derived and/or modified CDS sequence (wt) from hemagglutinin__InfluenzaA__AEJ10490
augaaggcaauacuaguaguucugcuauauacauuugcaaccgcaaaugcagacacauuauguauagguuaucaugcgaacaauucaacagacacuguagacacaguacuagaaaagaauguaacaguaacacacucuguuaaccuucuagaagacaagcauaacgggaaacuaugcaaacuaagagggguagccccauugcauuuggguaaauguaacauugcuggcuggauccugggaaauccagagugugaaucacucuccacagcaagcucaugguccuacauuguggaaacaucuaguucagacaauggaacguguuacccaggagauuucaucgauuaugaggagcuaagagagcaauugagcucagugucaucauuugaaagguuugagauauuccccaagacaaguucauggcccaaucaugacucgaacaaagguguaacgacagcauguccucaugcuggagcaaaaagcuucuacaaaaauuuaauauggcuaguuaaaaaaggaaauucauacccaaagcucagcaaauccuacauuaaugauaaagggaaagaaguccucgugcuauggggcauucaccauccaccuacuagugcugaccaacaaagucucuaucagaaugcagaugcauauguuuuuguggggacaucaagauacagcaagaaauucaagccggaaauagcaauaagacccaaagugagggaucaagaagggagaaugaacuauuacuggacacuaguagagccgggagacaaaauaacauucgaagcaacuggaaaucuagugguaccgagauaugcauucgcaauggaaagaaaugcuggaucugguauuaucauuucagauacaccaguccacgauugcaauacaacuugucagacacccaagggugcuauaaacaccagccucccauuucagaauauacauccgaucacaauuggaagauguccaaaauauguaaaaagcacaaaauugagacuggccacaggauugaggaaugucccgucuauucaaucuagaggccuauuuggggccauugccgguuucauugaagggggguggacagggaugguagauggaugguacgguuaucaccaucaaaaugagcaggggucaggauaugcagccgaccugaagagcacacagaaugccauugacgggauuacuaacaaaguaaauucuguuauugaaaagaugaauacacaguucacagcaguagguaaagaguucaaccaccuggaaaaaagaauagaaaauuuaaauaaaaaaguugaugaugguuuccuggacauuuggacuuacaaugccgaacuguugguucuauuggaaaaugaaagaacuuuggacuaccacgauucaaaugugaagaacuuauaugaaaagguaagaagccaguuaaaaaacaaugccaaggaaauuggaaacggcugcuuugaauuuuaccacaaaugugauaacacgugcauggaaagugucaaaaaugggacuuaugacuacccaaaauacucagaggaagcaaaauuaaacagagaagaaauagaugggguaaagcuggaaucaacaaugauuuaccagauuuuggcgaucuauucaaccgucgccaguucauugguacugauagucucccugggggcaaucaguuucuggaugugcucuaaugggucucuacaguguagaauauguauuuaa

SEQ ID NO: 38926 - RNA, 1701 nt, Artificial Sequence
  derived and/or modified CDS sequence (wt) from hemagglutinin__InfluenzaA__AEJ10500
augaaggcaauacuaguaguucugcuauauacauuugcaaccgcaaaugcagacacauuauguauagguuaucaugcgaacaauucaacagacacuguagacacaguacuagaaaagaauguaacaguaacacacucuguuaaucuucuagaaggcaagcauaacgggaaacuaugcaaacuaagagggguagccccauugcauuuggguaaauguaacauugcuggcuggauccugggaaauccagagugugaaucacucuccacagcaagcucaugguccuacauuguggaaacaucuaguucagacaauggaacguguuacccaggagauuucaucgauuaugaggagcuaagagagcaauugagcucagugucaucauuugaaagguuugagauauuccccaaaacaaguucauggcccaaucaugacucgaacaaagguguaacggcagcauguccucaugcuggagcaaaaggcuucuacaaaaauuuaauauggcuaguuaaaaaaggaaauucauacccaaagcucaacaaauccuacauuaaugauaaagggaaagaaguccucgugcuauggggcauucaccauccaucuacuacugcugaccaacaaagucucuaucagaaugcagauacauauguuuuuguggggacaucaagauacagcaagaaguucaagccggaaauagcaauaagacccaaagugagggaucaagaagggagaaugaacuauuacuggacacuaguagagccgggagacaaaauaacauucgaagcaacuggaaaucuagugguaccgagauaugcauucgcaauggaaagaaaugcuggaucugguauuaucauuucagauacaccaguccacgauugcaauacaacuugucagacacccaagggugcuauaaacaccagccucccauuucagaauauacauccgaucacaauuggaaaauguccaaaauauguaaaaagcacaaaauugagacuggccacaggauugaggaaugucccgucuauucaaucuagaggccuauuuggggccauugccggcuucauugaagggggguggacagggaugguagauggaugguacgguuaucaccaucaaaaugagcaggggucaggauaugcagccgaccugaagagcacacagaaugccauugacaagauuaccaacaaaguaaauucuguuauugaaaagaugaauacacaguucacagcaguagguaaagaguucaaccaccuggaaaaaagaauagagaauuuaaauaaaaaaguugaugaugguuuccuggacauuuggacuuacaaugccgaacuguugguucuauuggaaaaugaaagaacuuuggacuaccacgauucaaaugugaagaacuuauaugaaaagguaagaaaccaguuaaaaaacaaugccaaggaaauuggaaauggcugcuuugaauuuuaccacaaaugcgauaacacgugcauggaaagugucaaaaaugggacuuaugacuacccaaaauacucagaggaagcaaaauuaaacagagaagaaauagaugggguaaagcuggaaucaacaaggauuuaccagauuuuggcgaucuauucaacugucgccaguucauugguacugguagucucccugggggcaaucaguuuuuggaugugcucuaaugggucucuacaguguagaauauguauuuaa

SEQ ID NO: 38927 - RNA, 1701 nt, Artificial Sequence
  derived and/or modified CDS sequence (wt) from hemagglutinin__InfluenzaA__AEJ10510
augaaggcaauacuaguaguucugcuauauacauuugcaaccgcaaaugcagacacauuauguauagguuaucaugcgaacaauucaacagacacuguagacacaguacuagaaaagaauguaacaguaacacacucuguuaaccuucuagaagacaagcauaacgggaaauuaugcaaacuaagagggguagccccauugcauuuggguaaauguaacauugcuggcuggauccugggaaauccagagugugaaucacucuccacagcaagcucaugguccuacauuguggaaacaucuaguucagacaauggaacguguuacccaggagauuucaucaauuaugaggagcuaagagagcaauugagcucagugucaucauuugaaagguuugagauauuccccaagacaaguucauggcccaaucaugacucgaacaaagguguaacggcagcauguccucaugcuggagcaaaaagcuucuacaaaaauuuaauauggcuaguuaaaaaaggaaauucauacccaaagcucagcaaauccuacauuaaugauaaagggaaagaaguccucgugcuguggggcauucaccauccaucuacuacugcugaccaacaaagucucuaucagaaugcagaugcauauguuuuuguggggacaucaagauacagcaagaaguucaagccggaaauagcaauaagacccaaagugagggaucaagaagggagaaugaacuauuacuggacacuaguagagccgggagacaaaauaacauucgaagcaacuggaaaucuagugguaccgagauaugcauucgcaauggaaagaaaugcuggaucugguauuaucauuucagauacaccaguccacgauugcaauacaacuugucagacacccaagggugcuauaaacaccagccucccauuucagaauauacauccgaucacaauuggaaaauguccaaaauauguaaaaagcacaaaauugagacuggccacaggauugaggaaugucccgucuauucaaucuagaggccuauuuggggccauugccggcuucauugaagggggguggacagggaugguagauggaugguacgguuaucaccaucaaaaugagcaggggucaggauaugcagccgaccugaagagcacacagaaugccauugacaagauuacuaacaaaguaaauucuguuauugaaaagaugaauacacaguucacagcaguagguaaagaguucaaccaccuggaaaaaagaauagagaauuuaaauaaaaaaguugaugaugguuuccuggacauuuggacuuacaaugccgaacuguugguucuauuggaaaaugaaagaacuuuggacuaccacgauucaaaugugaagaacuuguaugaaaagguaagaaaccaguuaaaaaacaaugccaaggaaauuggaaacggcugcuuugaauuuuaccacaaaugcgauaacacgugcauggaaagugucaaaaaugggacuuaugacuacccaaaauacucagaggaagcaaaauuaaacagagaagaaauagaugggguaaagcuggaaucaacaaggauuuaccagauuuuggcgaucuauucaacugucgccaguucauugguacugguagucucccugggggcaaucaguuucuggaugugcucuaaugggucucuacaguguagaauauguauuuaa

SEQ ID NO: 38928 - RNA, 1701 nt, Artificial Sequence
  derived and/or modified CDS sequence (wt) from hemagglutinin__InfluenzaA__AEJ10520
augaaggcaauacuaguaguucugcuauauacauuugcaaccgcaaaugcagacacauuauguauagguuaucaugcgaacaauucaacagacacuguagacacaguacuagaaaagaauguaacaguaacacacucuguuaaccuucuagaagacaagcauaacgggaaacuaugcaaacuaagagggguagccccauugcauuuggguaaauguaacauugcuggcuggauccugggaaauccagagugugaaucacucuccacagcaagcucaugguccuacauuguggaaacaucuaguucagacaauggaacguguuacccaggagauuucaucgauuaugaggagcuaagagagcaauugagcucagugucaucauuugaaagguuugagauauuccccaagacaaguucauggcccaauuaugacucgaacaaagguguaacggcagcauguccucaugcuggagcaaaaagcuucuacaaaaauuuaauauggcuaguuaaaaaaggaaauucauacccaaagcucagcaaauccuacauuaaugauaaagggaaagaaguccucgugcuauggggcauucaccauccaucuacuagugcugaccaacaaagucucuaucagaaugcagaugcauauguuuuuguggggacaucaagauacagcaagaaguucaagccggaaauagcaauaagacccaaagugagggaucaagaagggagaaugaacuauuacuggacacuaguagagccgggagacaaaauaacauucgaagcaacuggaaaucuagugguaccgagauaugcauucgcaauggaaagaaaugcuggaucugguauuaucauuucagauacaccaguccacgauugcaauacaacuugucagacacccaagggugcuauaaacaccagccucccauuucagaauauacauccgaucacaauuggaaaauguucaaaauauguaaaaagcacaaaauugagacuggccacuggauugaggaaugucccgucuauucaaucuagaggccuauuuggggccauugccgguuucauugaagggggguggacagggaugguagauggaugguacgguuaucaccaucaaaaugagcaggggucaggauaugcagccgaccugaagagcacacagaaugccauugacgagauuacuaacaaaguaaauucuguuauugaaaaaaugaauacacaauucacagcaguagguaaagaguucaaccaccuggaaaaaagaauagagaauuuaaauaaaaagguugaugaugguuuccuggacauuuggacuuacaaugccgaacuguugguucuauuggaaaaugaaagaacuuuggacuaccacgauucaaaugugaagaacuuauaugaaaagguaagaagccaguuaaaaaacaaugccaaggaaauuggaaacggcugcuuugaauuuuaccacaaaugcgauaacacgugcauggaaagugucaaaaaugggacuuaugacuacccaaaauacucagaggaagcaaaauuaaacagagaagaaauagaugggguaaagcuggaaucaacaaggauuuaccagauuuuggcgaucuauucaacugucgccaguucauugguacugguagucucccugggggcaaucaguuucuggaugugcucuaaugggucucuacaguguagaauauguauuuaa

SEQ ID NO: 38929 - RNA, 1701 nt, Artificial Sequence
  derived and/or modified CDS sequence (wt) from hemagglutinin__InfluenzaA__AEJ10530
augaaggcaauacuaguaguucugcuauauacauuugcaaccgcaaaugcagacacauuauguauagguuaucaugcgaacaauucaacagacacuguagacacaguacuagaaaagaauguaacaguaacacacucuguuaaccuucuagaagacaagcauaacgggaaacuaugcaaacuaagagggguagccccauugcauuuggguaaauguaacauugcuggcuggauccugggaaauccagagugugaaucacucuccacagcaagcucaugguccuacauuguggaaacaucuaguucagacaauggaacguguuacccaggagauuucaucgauuaugaggagcuaagagagcaauugagcucagugucaucauuugaaagguuugagauauuccccaagacaaguucauggcccaaucaugacucgaacaaagguguaacggcagcauguccucaugcuggagcaaaaagcuucuacaaaaauuuaauauggcuaguuaaaaaaggaaauucauacccaaagcucagcaaauccuacauuaaugauaaagggaaagaaguccucgugcuauggggcauucaccauccaucuacuagugcugaccaacaaagucucuaucagaaugcagaugcauauguuuuuguggggacaucaagauacagcaagaaguucaagccggaaauagcaauaagacccaaagugagggaucaagaagggagaaugaacuauuacuggacacuaguagagccgggagacaaaauaacauucgaagcaacuggaaaucuagugguaccgagauaugcauucgcaauggaaagaaaugcuggaucugguauuaucauuucagauacaccaguccacgauugcaauacaacuugucagacacccaagggugcuauaaacaccagccucccauuucagaauauacauccgaucacaauuggaaaauguccaaaauauguaaaaagcacaaaauugagacuggccacaggauugaggaaugucccgucuauucaaucuagaggccuauuuggggccauugccgguuucauugaagggggguggacagggaugguagauggaugguacgguuaucaccaucaaaaugagcaggggucaggauaugcagccgaccugaagagcacacagaaugccauugacgagauuacuaacaaaguaaauucuguuauugaaaagaugaauacacaauucacagcaguagguaaagaguucaaccaccuagaaaaaagaauagagaauuuaaauaaaaagguugaugaugguuuccuggacauuuggacuuacaaugccgaacuguugguucuauuggaaaaugaaagaacuuuggacuaccacgauucaaaugugaagaacuuauaugaaaagguaagaagccaguuaaaaaacaaugccaaggaaauuggaaacggcugcuuugaauuuuaccacaaaugcgauaacacgugcauggaaagugucaaaaaugggacuuaugacuacccaaaauacucagaggaagcaaaauuaaacagagaagaaauagaugggguaaagcuggaaucaacaaggauuuaccagauuuuggcgaucuauucaacugucgccaguucauugguacugguagucucccugggggcaaucaguuucuggaugugcucuaaugggucucuacaguguagaauauguauuuaa

SEQ ID NO: 38930 - RNA, 1701 nt, Artificial Sequence; identical to SEQ ID NO: 38503
  derived and/or modified CDS sequence (wt) from hemagglutinin__InfluenzaA__AEJ10540

SEQ ID NO: 38931 - RNA, 1701 nt, Artificial Sequence; identical to SEQ ID NO: 38503
  derived and/or modified CDS sequence (wt) from hemagglutinin__InfluenzaA__AEJ10550

SEQ ID NO: 38932 - RNA, 1701 nt, Artificial Sequence
  derived and/or modified CDS sequence (wt) from hemagglutinin__InfluenzaA__AEJ10570
augaaggcaauacuaguaguucugcuauauacauuagcaaccgcaaaugcagacacauuauguauagguuaucaugcgaacaauucaacagacacuguagacacaguacuagaaaagaauguaacaguaacacacucuguuaaccuucuagaagacaagcaugacgggaaacuaugcaaacuaagagggguagccccauugcauuuggguaaauguaacauugcuggcuggauccugggaaauccagagugugaaucacucuccacagcaagcucaugguccuacauuguggaaacaucuaguucagacaauggaacguguuacccaggagauuucaucgauuaugaagagcuaagagagcaauugagcucagugucaucauuugaaagguuugagauauuccccaagacaaguucauggcccaaucaugacucgaacaaagguguaacggcagcauguccucaugcuggagcaaaaagcuucuacaaaaauuuaauauggcuaguuaaaaaaggaaauucauacccaaagcucagcaaauccuacauuaaugauaaaggaaaagaaguccucgugcuauggggcauucaccauccaucuacuagugcugaccaacaaagucucuaucagaaugcagaugcauauguuuuuguggggacaucaagauacagcaagaaguucaagccggaaauagcaauaagacccaaagugagggaucaagaagggagaaugaacuauuacuggacacuaguagagccgggagacaaaauaacauucgaagcaacuggaaaucuagugguaccgagauaugcauucgcaauggaaagaaaugcuggaucugguauuaucauuucagauacaccaguccacgauugcaaugcaacuugucagacacccaagggugcuauaaacaccagccucccauuucagaauauacauccgaucacaauuggaaaauguccaaaauauguaaaaagcacaaaauugagacuggccacaggauugaggaaugucccgucuauucaaucuagaggccuauuuggggccauugccgguuucauugaagggggguggacagggaugguagauggaugguacgguuaucaccaucaaaaugagcaggggucaggauaugcagccgaccugaagagcacacagaaugccauugacaagauuacuaacaaaguaaauucuguuauugaaaagaugaauacacaguucacagcaguagguaaagaguucaaccaccuggaaaaaagaauagagaauuuaaauaaaaaaguugaugaugguuuccuggacauuuggacuuacaaugccgaacuguugguucuacuggaaaaugaaagaacuuuggacuaccacgauucaaaugugaagaacuuauaugaaaagguaagaagccaguuaaaaaacaaugccaaggaaauuggaaacggcugcuuugaauuuuaccacaaaugcgauaacacgugcauggaaagugucaaaaaugggacuuaugacuacccaaaauacucagaggaagcaaaauuaaacagagaagaaauagaugggguaaagcuggaaucaacaaggauuuaccagauuuuggcgaucuauucaacugucgccaguucauugguacugguagucucccugggggcaaucaguuucuggaugugcucuaaugggucucuacaguguagaauauguauuuaa

SEQ ID NO: 38933 - RNA, 1701 nt, Artificial Sequence
  derived and/or modified CDS sequence (wt) from hemagglutinin__InfluenzaA__AEJ10580
augaaggcaauacuaguaguucugcuauauacauuagcaaccgcaaaugcagacacauuauguauagguuaucaugcgaacaauucaacagacacuguagacacaguacuagaaaagaauguaacaguaacacacucuguuaaccuucuagaagacaagcaugacgggaaacuaugcaaacuaagagggguagccccauugcauuuggguaaauguaacauugcuggcuggauccugggaaauccagagugugaaucacucuccacagcaagcucaugguccuacauuguggaaacaucuaguucagacaauggaacguguuacccaggagauuucaucgauuaugaagagcuaagagagcaauugagcucagugucaucauuugaaagguuugagauauuccccaagacaaguucauggcccaaucaugacucgaacaaagguguaacggcagcauguccucaugcuggagcaaaaagcuucuacaaaaauuuaauauggcuaguuaaaaaaggaaauucauacccaaagcucagcaaauccuacauuaaugauaaagggaaagaaguccucgugcuauggggcauucaccauccaucuacuagugcugaccaacaaagucucuaucagaaugcagaugcauauguuuuuguggggacaucaagauacagcaagaaguucaagccggaaauagcaauaagacccaaagugagggaucaagaagggagaaugaacuauuacuggacacuaguagagccgggagacaaaauaacauucgaagcaacuggaaaucuagugguaccgagauaugcauucgcaauggaaagaaaugcuggaucugguauuaucauuucagauacaccaguccacgauugcaaugcaacuugucagacacccaagggugcuauaaacaccagccucccauuucagaauauacauccgaucacaauuggaaaauguccaaaauauguaaaaagcacaaaauugagacuggccacaggauugaggaaugucccgucuauucaaucuagaggccuauuuggggccauugccgguuucauugaagggggguggacagggaugguagauggaugguacgguuaucaccaucaaaaugagcaggggucaggauaugcagccgaccugaagagcacacagaaugccauugacaagauuacuaacaaaguaaauucuguuauugaaaagaugaauacacaguucacagcaguagguaaagaguucaaccaccuggaaaaaagaauagagaauuuaaauaaaaaaguugaugaugguuuccuggacauuuggacuuacaaugccgaacuguugguucuacuggaaaaugaaagaacuuuggacuaccacgauucaaaugugaagaacuuauaugaaaagguaagaagccaguuaaaaaacaaugccaaggaaauuggaaacggcugcuuugaauuuuaccacaaaugcgauaacacgugcauggaaagugucaaaaaugggacuuaugacuacccaaaauacucagaggaagcaaaauuaaacagagaagaaauagaugggguaaagcuggaaucaacaaggauuuaccagauuuuggcgaucuauucaacugucgccaguucauugguacugguagucucccugggggcaaucaguuucuggaugugcucuaaugggucucuacaguguagaauauguauuuaa

SEQ ID NO: 38934 - RNA, 1701 nt, Artificial Sequence
  derived and/or modified CDS sequence (wt) from hemagglutinin__InfluenzaA__AEJ36302
augaaggcaauacuaguaguucugcuauauacauuugcaaccgcaaaugcagacacauuauguauagguuaucaugcgaacaauucaacagacacuguagacacaguacuagaaaagaauguaacaguaacacacucuguuaaccuucuagaagacaagcauaacgggaaacuaugcaaacuaagagggguagccccauugcauuuggguaaauguaacauugcuggcuggauccugggaaauccagagugugaaucacucuccacagcaagcucaugguccuacauuguggaaacaucuaguucauacaauggaacguguuacccaggagauuucaucgauuaugaggagcuaagagagcaauugagcucagugucaucauuugaaagguuugagauauuccccaagacaaguucauggcccaaucaugacccgaacaaagguguaacggcagcauguccucaugcuggagcaaaaagcuucuacaaaaauuuaauauggcuaguuaaaaaaggaaauucauacccaaagcucagcaaauccuacauuaaugauaaagggaaagaaguccucgugcuauggggcauucaccauccaucuacuagugcugaccaacaaaggcucuaucagaaugcagaugcauaugcuuuuguggggacaucaagauacagcaagaaguucaagccggaaauagcaauaagacccaaagugagggaucaagaagggagaaugaacuauuacuggacacuaguagagccgggagacaaaauaacauucgaagcaacuggaaaucuagugguaccgagauaugcauucgcaauggaaagaaaugcuggaucugguauuaucauuucagauacaccagcccaugauugcaauacaacuugucagacacccaagggugcuauaaacaccagccucccauuucagaauguacauccgaucacaauuggaaaauguccaaaauauguaaaaagcacaaaauugagacuggccacaggauugaggaaugucccgucuauucaaucuagaggccuauuuggggccauugccgguuucauugaagggggguggacagggaugguagauggaugguacgguuaucaucaucaaaaugagcaggggucaggauaugcagccgaccugaagagcacacagaaugccuuugacgagauuacuaacaaaguaaauucuguuauugaaaagaugaauacacaguucacagcaguagguaaagaguucaaccaccuggaaaaaagaauagagaauuuaaauaaaaaaguugaugaugguuuccuggacauuuggacuuacaaugccgaacuguugguucuauuggaaaaugaaagaacuuuggacuaccacgauucaaaugugaagaacuuauaugaaaagguaagaagccaguuaaaaaacaaugccaaggaaacuggaaacggcugcuuugaauuuuaccacaaaugcgauaacacgugcauggaaagugucaaaaaugggacuuaugacuacccaaaauacucagaggaagcaaaauuaaacagagaagaaauagaugggguaaagcuggaaucaacaaggauuuaccagauuuuggcgaucuauucaacugucgccaguucauugguacugguagucucccugggggcaaucaguuucuggaugugcucuaaugggucucuacaguguagaauauguauuuaa

SEQ ID NO: 38935 - RNA, 1701 nt, Artificial Sequence
  derived and/or modified CDS sequence (wt) from hemagglutinin__InfluenzaA__AEJ36312
augaaggcaauacuaguaguucugcuauauacauuugcaaccgcaaaugcagacacauuauguauagguuaucaugcgaacaauucaacagacacuguagacacaguacuagaaaagaauguaacaguaacacacucuguuaaccuucuagaagacaagcauaacgggaaacuaugcaaacuaagagggguagccccauugcauuuggguaaauguaacaucgcuggcuggauccugggaaauccagagugugaaucacucuccacagcaagcucaugguccuacauuguggaaacaucuaguucagacaauggaacguguuacccaggagauuucaucgauuaugaggagcuaagagagcaauugagcucagugucaucauuugaaagguuugagauauuccccaagacaaguucauggcccgaucaugacucgaacaaagguguaacggcagcauguccucaugcuggagcaaaaagcuucuacaaaaauuuaauauggcuaguuaaaaaaggaaauucauacccaaagcucagcaaauccuacauuaaugauaaagggaaagaaguccucgugcuauggggcauucaccauccaucuacuagugcugaccaacaaagucucuaucagaaugcagaugcauauguuuuuguggggacaucaagauacagcaagaaguucaagccggaaauagcaauaagacccaaagugagggaucaagaagggagaaugaacuauuacuggacacuaguagagccgggagacaaaauaacauucgaagcaacuggaaaucuagugguaccgagauaugcauucgcaauggaaagaaaugcuggaucugguauuaucauuucagauacaccaguccacgauugcaauacaacuugucagacacccaagggugcuauaaacaccagccucccauuucagaauauacauccgaucacaauuggaaaauguccaaaauauguaaaaagcacaaaauugagacuggccacaggauugaggaaugucccgucuauucaaucuagaggccuauuuggggccauugccgguuucauugaagggggguggacagggaugguagauggaugguacgguuaucaccaucaaaaugagcaggggucaggauaugcagccgaccugaagagcacacagaaugccauugacaagauuacuaacaaaguaaauucuguuauugaaaagaugaauauacaguucacagcaguagguaaagaguucaaccaccuggaaaaaagaauagagaauuuaaauaaaaaaguugaugaugguuuccuggacauuuggacuuacaaugccgaacuguugguucuauuggaaaaugaaagaacuuuggacuaccacgauucaaaugugaagaacuuauaugaaaagguaagaagccaguuaaaaaacaaugccaaggaaauuggaaacggcugcuuugaguuuuaccacaaaugcgauaacacgugcauggaaagugucaaaaaugggacuuaugacuacccaaaauacucagaggaagcaaaauuaaacagagaagaaauagaugggguaaagcuggaaucaacaaggauuuaccagauuuuggcgaucuauucaacugucgccaguucauugguacugguagucucccugggggcaaucaguuucuggaugugcucuaaugggucucuacaguguagaauauguauuuaa

SEQ ID NO: 38936 - RNA, 1701 nt, Artificial Sequence
  derived and/or modified CDS sequence (wt) from hemagglutinin__InfluenzaA__AEJ37853
augaaggcaauacuaguaguucugcuauauacauuugcaaccgcaaaugcagacacauuauguauagguuaucaugcgaacaauucaacagacacuguagacacaguacuagaaaagaauguaacaguaacacacucuguuaaccuucuagaagacaagcauaacgggaaacuaugcaaacuaagagggguagccccauugcauuuggguaaauguaacauugcuggcuggaucuuggggaauccagagugugaaucacucucuacagcaagcucaugguccuacauuguggaagcaucuaguucagacaauggaacguguuacccaggagauuucaucgauuaugaggagcuaagagagcaauugagcucagugucaucauuugaaagguuugagauauuccccaagacaaguucauggcccaaucaugacucgaacaaagguguaacggcagcauguccucaugcuggagcaaaaagcuucuacaaaaauuuaauauggcuaguuaaaaaaggaaauucauacccaaagcucagcaaauccuacauuaaugauaaagggaaagaaguccucgugcuauggggcauucaccauccaucuacuagugcugaccaacaaagucucuaucagaaugcagaugcauauguuuuuguggggacaucaagauacagcaagaaguucaagccggaaauagcaauaagacccaaagugagggaucaagaagggagaaugaacuauuacuggacacuaguagagccgggagacaaaauaacauucgaagcaacuggaaaucuagugguaccgagauaugcauucgcaauggaaagaaaugcuggaucugguauuaucauuucagauacaccaguccacgauugcaauacaacuugucagacacccaagggugcuauaaacaccagccucccauuucagaauauacauccgaucacaauuggaaaauguccaaaauauguaaaaagcacaaaauugagacuggccacaggauugaggaaugucccgucuauucaaucuagaggccuauuuggggccauugccgguuucauugaagggggguggacagggaugguagauggaugguacgguuaucaccaucaaaaugagcaggggucaggauaugcagccgaccugaagagcacacagaaugccauugacaagauuacuaacaaaguaaauucuguuauugaaaagaugaauacacaguucacagcaguagguaaagaguucaaccaccuggaaaaaagaauagagaauuuaaauaaaaagguugaugaugguuuccuggacauuuggacuuacaaugccgaacuguugguucuauuggaaaaugaaagaacuuuggacuaccacgauucaaaugugaagaacuuauaugaaaagguaagaagccaguuaaaaaacaaugccaaggaaauuggaaacggcugcuuugaauuuuaccacaaaugcgauaacaugugcauggaaagugucaaaaaugggacuuaugacuacccaaaauacucagaggaagcaaaauuaaacagagaagaaauagaugggguaaagcuggaaucaacaaggauuuaccagauuuuggcgaucuauucaacugucgccaguucauugguacugguagucucccugggggcaaucaguuucuggaugugcucuaaugggucucuacaguguagaauauguauuuaa

SEQ ID NO: 38937 - RNA, 1701 nt, Artificial Sequence
  derived and/or modified CDS sequence (wt) from hemagglutinin__InfluenzaA__AEJ37863
augaaggcaauacuaguaguucugcuauacacauuugcaaccgcaaaugcagacacauuauguauagguuaucaugcgaacaauucaacagacacuguagacacaguacuagaaaagaauguaacaguaacacacucuguuaaccuucuagaagacaagcauaacgggaaacuaugcaaacuaagagggguagccccauugcauuuggguaaauguaacauugcuggcuggauccugggaaauccagagugugaaucacucuccacagcaagcucaugguccuacauuguggaaacaucuaguucagacaauggaacguguuacccaggagauuucaucgauuaugaggagcuaagagagcaauugagcucagugucaucauuugaaagguuugagauauuccccaagacaaguucauggccuaaucaugacucgaacaaagguguaacggcagcauguccucaugcuggagcaaaaagcuucuacaaaaauuuaauauggcuaguuaaaaaaggaaauucauacccaaagcucagcaaauccuacauuaaugauaaagggaaagaaguccucgugcuauggggcauucaccauccaucuacuagugcugaccaacaaagucucuaucagaaugcagaugcauauguuuuuguggggacaucaagauacagcaagaaguucaagccggaaauagcaauaagacccaaacugagggaucaagaagggagaaugaacuauuacuggacacuaguagagccgggagacaaaauaacauucgaagcaacuggaaaucuagugguaccgagauaugcauucgcaauggaaagaaaugcuggaucugguauuaucauuucagauacaccaguccacgauugcaauacaacuugucagacacccaagggugcuauaaacaccagccucccauuucagaauauacauccgaucacaauuggaaaauguccaaaauauguaaaaagcacaaaauugagacuggccacaggauugaggaaugucccgucuauucaaucuagaggccuauuuggggccauugccgguuucauugaaggaggguggacagggaugguagaugggugguacgguuaucaccaucaaaaugagcaggggucaggauaugcagccgaccugaagagcacacagaaugccauugacaagauuacuaacaaaguaaauucuguuauugaaaagaugaauacacaguucacagcaguagguaaagaguucaaccaccuggaaaaaagaauagagaauuuaaauaaaaaaguugaugaugguuuccuggacauuuggaccuacaaugccgaacuguugguucuauuggaaaaugaaagaacuuuggacuaccacgauucaaaugugaagaacuuauaugaaaagguaagaagccaguuaaaaaacaaugccaaggaaauuggaaacggcugcuuugaauuuuaccacaaaugcgauaacacgugcauggaaagugucaaaaaugggacuuaugacuacccaaaauacucagaggaagcaaaauuaaacagagaagaaauagaugggguaaagcuggaaucaacaaggauuuaccagauuuuggcgaucuauucaacugucgccaguucauugguacugguagucucccugggggcaaucaguuucuggaugugcucuaaugggucucuacaguguagaauauguauuuaa

SEQ ID NO: 38938 - RNA, 1701 nt, Artificial Sequence
  derived and/or modified CDS sequence (wt) from hemagglutinin__InfluenzaA__AEJ37873
augaaggcaauacuaguaguucugcuauacacauuugcaaccgcaaaugcagacacauuauguauagguuaucaugcgaacaauucaacagacacuguagacacaguacuagaaaagaauguaacaguaacacacucuguuaaccuucuagaagacaagcauaacgggaaacuaugcaaacuaagagggguagccccauugcauuuggguaaauguaacauugcuggcuggauccugggaaauccagagugugaaucacucuccacagcaagcucaugguccuacauuguggaaacaucuaguucagacaauggaacguguuacccaggagauuucaucgauuaugaggagcuaagagagcaauugagcucagugucaucauuugaaagguuugagauauuccccaagacaaguucauggcccaaucaugacucgaacaaagguguaacggcagcauguccucaugcuggagcaaaaagcuucuacaaaaauuuaauauggcuaguuaaaaaaggaaauucauacccaaagcucagcaaauccuacauuaaugauaaagggaaagaaguccucgugcuauggggcauucaccauccaucuacuagugcugaccaacaaagucucuaucagaaugcagaugcauauguuuuuguggggacaucaagauacagcaagaaguucaagccggaaauagcaauaagacccaaagugagggaucaagaagggagaaugaacuauuacuggacacuaguagagccgggagacaaaauaacauucgaagcaacuggaaaucuagugguaccgagauaugcauucgcaauggaaagaaaugcuggaucugguauuaucauuucagauacaccaguccacgauugcaauacaacuugucagacacccaagggugcuauaaacaccagccucccauuucagaauauacauccgaucacaauuggaaaauguccaaaauauguaaaaagcacaaaauugagacuggccacaggauugaggaaugucccgucuauucaaucuagaggccuauuuggggccauugccgguuucauugaaggaggguggacagggaugguagaugggugguacgguuaucaccaucaaaaugagcaggggucaggauaugcagccgaccugaagagcacacagaaugccauugacaagauuacuaacaaaguaaauucuguuauugaaaagaugaauacacaguucacagcaguagguaaagaguucaaccaccuggaaaaaagaauagagaauuuaaauaaaaaaguugaugaugguuuccuggacauuuggacuuacaaugccgaacuguugguucuauuggaaaaugaaagaacuuuggacuaccacgauucaaaugugaagaacuuauaugaaaagguaagaagccaguuaaaaaacaaugccaaggaaauuggaaacggcugcuuugaauuuuaccacaaaugcgauaacacgugcauggaaagugucaaaaaugggacuuaugacuacccaaaauacucagaggaagcaaaauuaaacagagaagaaauagaugggguaaagcuggaaucaacaaggauuuaccagauuuuggcgaucuauucaacugucgccaguucauugguacugguagucucccugggggcaaucaguuucuggaugugcucuaaugggucucuacaguguagaauauguauuuaa

SEQ ID NO: 38939 - RNA, 1701 nt, Artificial Sequence; identical to SEQ ID NO: 38893
  derived and/or modified CDS sequence (wt) from hemagglutinin__InfluenzaA__AEJ37883

SEQ ID NO: 38940 - RNA, 1701 nt, Artificial Sequence
  derived and/or modified CDS sequence (wt) from hemagglutinin__InfluenzaA__AEJ37893
augaaggcaauacuaguaguucugcuauauacauuugcaaccacaaaugcagacacauuauguauagguuaucaugcgaacaauucaacagacacuguagacacaguacuggaaaagaauguaacaguaacacacucuguuaaccuucuagaagacaagcauaacgggaaauuaugcaaacuaagagggguagccccauugcauuuggguaaauguaacauugcuggcuggauccugggaaauccagagugugaaucacucuccacagcaagcucaugguccuacauuguggaaacaucuaguucagacaauggaacguguuacccaggaaauuucaucgauuaugaggagcuaagagaacaauugagcucagugucaucauuugaaagguuugagauauuccccaagacaaguucauggcccgaucaugacucgaacaaagguguaacggcagcauguccucaugcuggagcaaaaagcuucuacaaaaauuuaauauggcuaguuaaaaaaggaaauucauacccaaagcucagcaaauccuacauuaaugauaaagggaaagaaguccucgugcuauggggcauucaccauccaucuacuagugcugaccaacaaagucucuaucagaaugcagaugcauauguuuuuguggggacaucaagauacagcaagaaguucaagccggaaauagcaauaagacccaaagugagggaucaagaagggagaaugaacuauuacuggacacuaguagagccgggagacaaaauaacauucgaagcaacuggaaaucuaguggcaccgagauaugcauucgcaauggaaagaaaugcuggaucugguauuaucauuucagauaaaccaguccacgauugcaauacaacuugucagacacccaagggugcuauaaacaccagccucccauuucagaauauacauccgaucacaauuggaaaauguccaaaauauguaaaaagcacaaaauugagacuggccacaggauugaggaaugucccgucuauucaaucuagaggccuauuuggggccauugccgguuucauugaagggggguggacagggaugguagauggaugguacgguuaucaccaucaaaaugagcaggggucuggauaugcagccgaccugaagagcacacagaaugccauugacaagauuacuaacaaaguaaauucuguuauugaaaagaugaauacacaguucacagcaguagguaaagaguucaaccaccuggaaaaaagaauagagaauuuaaauaaaaaaguugaugaugguuuccuggacauuuggacuuacaaugccgaacuguugguucuauuggaaaaugaaagaacuuuggacuaccacgauucaaaugugaagaacuuauaugaaaagguaagaagccaguuaaaaaacaaugccaaggaaauuggaaacggcugcuuugaauuuuaccacaaaugcgauaacacgugcauggaaagugucaaaaaugggacuuaugacuacccaaaauacucagaggaagcaaaauuaaacagagaagaaauagaugggguaaagcuggaaucaacaaggauuuaccagauuuuggcgaucuauucaacugucgccaguucauugguacugguagucucccugggggcaaucaguuucuggaugugcucuaaugggucucuacaguguagaauauguauuuaa

SEQ ID NO: 38941 - RNA, 1701 nt, Artificial Sequence; identical to SEQ ID NO: 38893
  derived and/or modified CDS sequence (wt) from hemagglutinin__InfluenzaA__AEJ37903

SEQ ID NO: 38942 - RNA, 1701 nt, Artificial Sequence
  derived and/or modified CDS sequence (wt) from hemagglutinin__InfluenzaA__AEJ37923
augaaggcaauacuaguaguucugcuauauacauuugcaaccgcaaaugcagacacauuauguauagguuaucaugcgaacaauucaacagacacuguagacacaguacuagaaaagaauguaacaguaacacacucuguuaaccuucuagaagacaagcauaacgggaaauuaugcaaacuaagagggguagccccauugcauuuggguaaauguaacauugcuggcuggauccugggaaauccagagugugaaucacucuccacagcaagcucaugguccuacauuguggaaacaucuaguucagacaauggaacguguuacccaggaaauuucaucgauuaugaggagcuaagagaacaauugagcucagugucaucauuugaaagguuugagauauuccccaagacaaguucauggcccgaucaugacucgaacaaagguguaacggcagcauguccucaugcuggagcaaaaagcuucuacaaaaauuuaauauggcuaguuaaaaaaggaaauucauacccaaagcucagcaaauccuacauuaaugauaaagggaaagaaguccucgugcuauggggcauucaccauccaucuacuagugcugaccaacaaagucucuaucagaaugcagaugcauauguuuuuguggggacaucaagauacagcaagaaguucaagccggaaauagcaauaagacccaaagugagggaucaagaagggagaaugaacuauuacuggacacuaguagagccgggagacaaaauaacauucgaagcaacuggaaaucuaguggcaccgagauaugcauucgcaauagaaagaauggcuggaucugguauuaucauuucagauacaccaguccacgauugcaauacaacuugucagacacccaagggugcuauaaacaccagccucccauuucagaauauacauccgaucacaauuggaaaauguccaaaauauguaaaaagcacaaaauugagacuggccacaggauugaggaaugucccgucuauucaaucuagaggccuauuuggggccauugccgguuucauugaagggggguggacagggaugguagauggaugguacgguuaucaccaucaaaaugagcaggggucuggauaugcagccgaccugaagagcacacagaaugccauugacaagauuacuaacaaaguaaauucuguuauugaaaagaugaauacacaguucacagcaguagguaaagaguucaaccaccuggaaaaaagaauagagaauuuaaauaaaaaaguugaugaugguuuccuggacauuuggacuuacaaugccgaacuguugguucuauuggaaaaugaaagaacuuuggacuaccacgauucaaaugugaagaacuuauaugaaaagguaagaagccaguuaaaaaacaaugccaaggaaauuggaaacggcugcuuugaauuuuaccacaaaugcgauaacacgugcauggaaagugucaaaaaugggacuuaugacuacccaaaauacucagaggaagcaaaauuaaacagagaagaaauagaugggguaaagcuggaaucaacaaggauuuaccagauuuuggcgaucuauucaacugucgccaguucauugguacugguagucucccugggggcaaucaguuucuggaugugcucuaaugggucucuacaguguagaauauguauuuaa

SEQ ID NO: 38943 - RNA, 1701 nt, Artificial Sequence
  derived and/or modified CDS sequence (wt) from hemagglutinin__InfluenzaA__AEJ37943
augaaggcaauacuaguaguucugcuauacacauuugcaaccgcaaaugcagacacauuauguauagguuaucaugcgaacaauucaacagacacuguagacacaguacuagaaaagaauguaacaguaacacacucuguuaaccuucuagaagacaagcauaacgggaaacuaugcaaacuaagagggguagccccauugcauuuggguaaauguaacauugcuggcuggauccugggaaauccagagugugaaucacucuccacagcaagcucaugguccuacauuguggaaacaucuaguucagacaauggaacguguuacccaggagauuucaucgauuaugaggagcuaagagagcaauugagcucagugucaucauuugaaagguuugagauauuccccaagacaaguucauggcccaaucaugacucgaacaaagguguaacggcagcauguccucaugcuggagcaaaaagcuucuacaaaaauuuaauauggcuaguuaaaaaaggaaauucauacccaaagcucagcaaauccuacauuaaugauaaagggaaagaaguccucgugcuauggggcauucaccauccaucuacuagugcugaccaacaaagucucuaucagaaugcagaugcauauguuuuuguggggacaucaagauacagcaagaaguucaagccggaaauagcaauaagacccaaagugagggaucaagaagggagaaugaacuaucacuggacacuaguagagccgggagacaaaauaacauucgaagcaacuggaaaucuagugguaccgagauaugcauucgcaauggaaagaaaugcuggaucugguauuaucauuucagauacaccaguccacgauugcaauacaacuugucagacacccaagggugcuauaaacaccagccucccauuucagaauauacauccgaucacaauuggaaaauguccaaaauauguaaaaagcacaaaauugagacuggccacaggauugaggaaugucccgucuauucaaucuagaggccuauuuggggccauugccgguuucauugaaggaggguggacagggaugguagaugggugguacgguuaucaccaucaaaaugagcaggggucaggauaugcagccgaccugaagagcacacagaaugccauugacaagauuacuaacaaaguaaauucuguuauugaaaagaugaauacacaguucacagcaguagguaaagaguucaaccaccuggaaaaaagaauagagaauuuaaauaaaaaaguugaugaugguuuccuggacauuuggacuuacaaugccgaacuguugguucuauuggaaaaugaaagaacuuuggacuaccacgauucaaaugugaagaacuuauaugaaaagguaagaagccaguuaaaaaacaaugccaaggaaauuggaaacggcugcuuugaauuuuaccacaaaugcgauaacacgugcauggaaagugucaaaaaugggacuuaugacuacccaaaauacucagaggaagcaaaauuaaacagagaagaaauagaugggguaaagcuggaaucaacaaggauuuaccagauuuuggcgaucuauucaacugucgccaguucauugguacugguagucucccugggggcaaucaguuucuggaugugcucuaaugggucucuacaguguagaauauguauuuaa

SEQ ID NO: 38944 - RNA, 1701 nt, Artificial Sequence
  derived and/or modified CDS sequence (wt) from hemagglutinin__InfluenzaA__AEJ37953
augaaggcaauacuaguaguucugcuauauacauuugcaaccgcaaaugcagacacauuauguauagguuaucaugcgaacaauucaacagacacuguagacacaguacuagaaaagaauguaacaguaacacacucuguuaaccuucuagaagacaagcauaacgggaaauuaugcaaacuaagagggguagccccauugcauuuggguaaauguaacauugcuggcuggauccugggaaauccagagugugaaucacucuccacagcaagcucaugguccuacauuguggaaacaucuaguucugacaauggaacguguuacccaggaaauuucaucgauuaugaggagcuaagagaacaauugagcucagugucaucauuugaaagguuugagauauuccccaagacaaguucauggcccgaucaugacucgaacaaagguguaacggcagcauguccucaugcuggagcaaaaagcuucuacaaaaauuuaauauggcuaguuaaaaaaggaaauucauacccaaagcucagcaaauccuacauuaaugauaaagggaaagaaguccucgugcuauggggcauucaccauccaucuacuagugcugaccaacaaagucucuaucagaaugcagaugcauauguuuuuguggggacaucaagauacagcaagaaguucaagccggaaauagcaauaagacccaaagugagggaucaagaagggagaaugaacuauuacuggacacuaguagagccgggagacaaaauaacauucgaagcaacuggaaaucuaguggcaccgagauaugcauucgcaauggaaagaaaugcuggaucugguauuaucauuucagauacaccaguccacgauugcaauacaacuugucagacacccaagggugcuauaaacaccagccucccauuucagaauauacauccgaucacaauuggaaaauguccaaaauauguaaaaagcacaaaauugagacuggccacaggauugaggaaugucccgucuauucaaucuagaggccuauuuggggccauugccgguuucauugaagggggguggacagggaugguagauggaugguacgguuaucaccaucaaaaugagcaggggucuggauaugcagccgaccugaagagcacacagaaugccauugacaagauuacuaacaaaguaaauucuguuauugaaaagaugaauacacaguucacagcaguagguaaagaguucaaccaccuggaaaaaagaauagagaauuuaaauaaaaaaguugaugaugguuuccuggacauuuggacuuacaaugccgaacuguugguucuauuggaaaaugaaagaacuuuggacuaccacgauucaaaugugaagaacuuauaugaaaagguaagaagccaguuaaaaaacaaugccaaggaaauuggaaacggcugcuuugaauuuuaccacaaaugcgauaacacgugcauggaaagugucaaaaaugggacuuaugacuacccaaaauacucagaggaagcaaaauuaaacagagaagaaauagaugggguaaagcuggaaucaacaaggauuuaccagauuuuggcgaucuauucaacugucgccaguucauugguacugguagucucccugggggcaaucaguuucuggaugugcucuaaugggucucuacaguguagaauauguauuuaa

SEQ ID NO: 38945 - RNA, 1701 nt, Artificial Sequence
  derived and/or modified CDS sequence (wt) from hemagglutinin__InfluenzaA__AEJ37963
augaaggcaauacuaguaguucugcuauauacauuugcaaccgcaaaugcagacacauuauguauagguuaucaugcgaacaauucaacagacacuguagacacaguacuagaaaagaauguaacaguaacacacucuguuaaccuucuagaagacaagcauaacgggaaauuaugcaaacuaagagggguagccccauugcauuuggguaaauguaacauugcuggcuggauccugggaaauccagagugugaaucacucuccacagcaagcucaugguccuacauuguggaaacaucuaguucagacaauggaacguguuacccaggaaauuucaucgauuaugaggagcuaagagaacaauugagcucagugucaucauuugaaagguuugagauauuccccaagacaaguucauggcccgaucaugacucgaacaaagguguaacggcagcauguccucaugcuggagcaaaaagcuucuacaaaaauuuaauauggcuaguuaaaaaaggaaauucauacccaaagcucagcaaauccuacauuaaugauaaagggaaagaaguccucgugcuauggggcauucaccauccaucuacuagugcugaccaacaaagucucuaucagaaugcagaugcauauguuuuuguggggacaucaagauacagcaagaaguucaagccggaaauagcaauaagacccaaagugagggaucaagaagggagaaugaacuauuacuggacacuaguagagccgggagacaaaauaacauucgaagcaacuggaaaucuaguggcaccgagauaugcauucgcaauggaaagaaaugcuggaucugguauuaucauuucagauacaccaguccacgauugcaauacaacuugucagacacccaagggugcuacaaacaccagccucccauuucagaauauacauccgaucacaauuggaaaauguccaaaauauguaaaaagcacaaaauugagacuggccacaggauugaggaaugucccgucuauucaaucuagaggccuauuuggggccauugccgguuucauugaagggggguggacagggaugguagauggaugguacgguuaucaccaucaaaaugagcaggggucuggauaugcagccgaccugaagagcacacagaaugccauugacaagauuacuaacaaaguaaauucuguuauugaaaagaugaauacacaguucacagcaguagguaaagaguucaaccaccuggaaaaaagaauagagaauuuaaauaaaaaaguugaugaugguuuccuggacauuuggacuuacaaugccgaacuguugguucuauuggaaaaugaaagaacuuuggacuaccacgauucaaaugugaagaacuuauaugaaaagguaagaagccaguuaaaaaacaaugccaaggaaauuggaaacggcugcuuugaauuuuaccacaaaugcgauaacacgugcauggaaagugucaaaaaugggacuuaugacuacccaaaauacucagaggaagcaaaauuaaacagagaagaaauagaugggguaaagcuggaaucaacaaggauuuaccagauuuuggcgaucuauucaacugucgccaguucauugguacugguagucucccugggggcaaucaguuucuggaugugcucuaaugggucucuacaguguagaauauguauuuaa

SEQ ID NO: 38946 - RNA, 1701 nt, Artificial Sequence
  derived and/or modified CDS sequence (wt) from hemagglutinin__InfluenzaA__AEJ37973
augaaggcaauacuaguaguucugcuauacacauuugcaaccgcaaaugcagacacauuauguauagguuaucaugcgaacaauucaacagacacuguagacacaguacuagaaaagaauguaacaguaacacacucuguuaaccuucuagaagacaagcauaacgggaaacuaugcaaacuaagagggguagccccauugcauuuggguaaauguaacauugcuggcuggauccugggaaauccagagugugaaucacucuccacagcaagcucaugguccuacauuguggaaacaucuaguucagacaauggaacguguuacccaggagauuucaucgauuaugaggagcuaagagagcaauugagcucagugucaucauuugaaagguuugagauauuccccaagacaaguucauggcccaaucaugacucgaacaaagguguaacggcagcauguccucaugcuggagcaaaaagcuucuacaaaaauuuaauauggcuaguuaaaaaaggaaauucauacccaaagcucagcaaauccuacauuaaugauaaagggaaagaaguccucgugcuauggggcauucaccauccaucuacuagugcugaccaacaaagucucuaucagaaugcagaugcauauguuuuuguggggacaucaagauacagcaagaaguucaagccggaaauagcaauaagacccaaagugagggaucaagaagggagaaugaacuauuacuggacacuaguagagccgggagacaaaauaacauucgaagcaacuggaaaucuagugguaccgagauaugcauucgcaauggaaagaaaugcuggaucugguauuaucauuucagauacaccaguccacgauugcaauacaacuugucagacacccaagggugcuauaaacaccagccucccauuucagaauauacauccgaucacaauuggaaaauguccaaaauauguaaaaagcacaaaauugagacuggccacaggauugaggaaugucccgucuauucaaucuagaggccuauuuggggccauugccgguuucauugaaggaggguggacagggaugguagaugggugguacgguuaucaccaucaaaaugagcaggggucaggauaugcagccgaccugaagagcacacagaaugccauugacaagauuacuaacaaaguaaauucuguuauugaaaagaugaauacacaguucacagcaguagguaaagaguucaaccaccuggaaaaaagaauagagaauuuaaauaaaaaaguugaugaugguuuccuggacauuuggacuuacaaugccgaacuguugguucuauuggaaaaugaaagaacuuuggacuaccacgauucaaaugugaagaauuuauaugaaaagguaagaagccaguuaaaaaacaaugccaaggaaauuggaaacggcugcuuugaauuuuaccacaaaugcgauaacacgugcauggaaagugucaaaaaugggacuuaugacuacccaaaauacucagaggaagcaaaauuaaacagagaagaaauagaugggguaaagcuggaaucaacaaggauuuaccagauuuuggcgaucuauucaacugucgccaguucauugguacugguagucucccugggggcaaucaguuucuggaugugcucuaaugggucucuacaguguagaauauguauuuaa

SEQ ID NO: 38947 - RNA, 1701 nt, Artificial Sequence
  derived and/or modified CDS sequence (wt) from hemagglutinin__InfluenzaA__AEJ37983
augaaggcaauacuaguaguucugcuauauacauuugcaaccgcaaaugcagacacauuauguauagguuaucaugcgaacaauucaacagacacuguagacacaguacuagaaaagaauguaacaguaacacacucuguuaaccuucuagaagacaagcauaacgggaaauuaugcaaacuaagagggguagccccauugcauuuggguaaauguaacauugcuggcuggauccugggaaauccagagugugaaucacucuccacagcaagcucaugguccuacauuguggaaacaucuaguucagacaauggaacguguuacccaggaaauuucaucgauuaugaggagcuaagagaacaauugagcucagugucaucauuugaaagguuugagauauuccccaagacaaguucauggcccgaucaugacucgaacaaagguguaacggcagcauguccucaugcuggagcaaaaagcuuuuacaaaaauuuaauauggcuaguuaaaaaaggaaauucauacccaaagcucagcaaauccuacauuaaugauaaagggaaagaaguccucgugcuauggggcauucaccauccaucuacuagugcugaccaacaaagucucuaucagaaugcagaugcauauguuuuuguggggacaucaagauacagcaagaaguucaagccggaaauagcaauaagacccaaagugagggaucaagaagggagaaugaacuauuacuggacacuaguagagccgggagacaaaauaacauucgaagcaacuggaaaucuaguggcaccgagauaugcauucgcaauggaaagaaaugcuggaucugguauuaucauuucagauacaccaguccacgauugcaauacaacuugucagacacccaagggugcuauaaacaccagccucccauuucagaauauacauccgaucacaauuggaaaauguccaaaauauguaaaaagcacaaaauugagacuggccacaggauugaggaaugucccgucuauucaaucuagaggccuauuuggggccauugccgguuucauugaagggggguggacagggaugguagauggaugguacgguuaucaccaucaaaaugagcaggggucuggauaugcagccgaccugaagagcacacagaaugccauugacaagauuacuaacaaaguaaauucuguuauugaaaagaugaauacacaguucacagcaguagguaaagaguucaaccaccuggaaaaaagaauagagaauuuaaauaaaaaaguugaugaugguuuccuggacauuuggacuuacaaugccgaacuguugguucuauuggaaaaugaaagaacuuuggacuaccacgauucaaaugugaagaacuuauaugaaaagguaagaagccaguuaaaaaacaaugccaaggaaauuggaaacggcugcuuugaauuuuaccacaaaugcgauaacacgugcauggaaagugucaaaaaugggacuuaugacuacccaaaauacucagaggaagcaaaauuaaacagagaagaaauagaugggguaaagcuggaaucaacaaggauuuaccagauuuuggcgaucuauucaacugucgccaguucauugguacugguagucucccugggggcaaucaguuucuggaugugcucuaaugggucucuacaguguagaauauguauuuaa

SEQ ID NO: 38948 - RNA, 1701 nt, Artificial Sequence; identical to SEQ ID NO: 38043
  derived and/or modified CDS sequence (wt) from hemagglutinin__InfluenzaA__AEK21369

SEQ ID NO: 38949 - RNA, 1698 nt, Artificial Sequence; identical to SEQ ID NO: 38401
  derived and/or modified CDS sequence (wt) from hemagglutinin__InfluenzaA__AEK21380

SEQ ID NO: 38950 - RNA, 1701 nt, Artificial Sequence
  derived and/or modified CDS sequence (wt) from hemagglutinin__InfluenzaA__AEK21396
augaaggcaauacuaguaguucugcuauauacauuugcaaccgcaaaugcagacacauuauguauagguuaucaugcgaacaauucaacagacacuguagacacaguacuagaaaagaauguaacaguaacacacucuguugaccuucuagaagacaagcauaacgggaaacuaugcaaacuaagagggguagccccauugcauuuggguaaauguaacauugcuggcuggauccugggaaauccagagugugaaucacucuccacagcaagcucaugguccuacauuguggaaacaucuaguucagacaauggaacguguuacccaggagauuucaucgauuaugaggagcuaagagagcaauugagcucagugucaucauuugaaagguuugagauauuccccaagacaaguucauggcccaaucaugacucgaacaaagguguaacggcagcauguccucaugcuggagcaaaaagcuucuacaaaaauuuaauauggcuaguuaaaaaaggaaauucauacccaaagcucagcaaauccuacauuaaugauaaagggaaagaaguccucgugcuauggggcauucaccauccaucuacuagugcugaccaacaaagucucuaucagaaugcagaugcauauguuuuuguggggacaucaaaauacagcaagaaguucaagccggaaauagcaauaagacccaaagugagggaucaagaagggagaaugaacuauuacuggacacuaguagaaccgggagacaaaauaacauuugaagcaacuggaaaucuauugguaccgagauaugcauucgaaauggaaagaaaaucuggaucugguauuaucauuucagauacaccaguccacgauugcaauacaacuugucagacacccaagggugcuauaaacaccagccucccauuucagaauauacauccgaucacaauuggaaaauguccaaaauauguaaaaagcacaaaauugagacuggccacaggauugaggaaugucccgucuauucaaucuagaggccuauuuggggccauugccgguuucauugaagggggguggacagggaugguagauggaugguacgguuaucaccaucaaaaugagcaggggucaggauaugcagccgaccugaagagcacacagaaugccauugacgagauuacuaacaaaguaaauucuguuauugaaaagaugaauacacaguucacagcaguagguaaagaguucaaccaccuggaaaaaagaauagagaauuuaaauaaaaaaguugaugaugguuuucuggacauuuggacuuacaaugcugaacuguugguucuauuggaaaaugaaagaacuuuggacuaccacgauucaaaugugaagaacuuauaugaaaagguaagaagccaacuaaaaaacaaugccaaggaaauuggaaacggcugcuuugaauuuuaccacaaaugcgauaacacgugcauggaaagugucaaaaaugggacuuaugacuacccaaaauacucagaggaagcaaaauuaaacagagaaaaaauagaugggguaaagcuggaaucaacaaggauuuaccagauuuuggcgaucuauucaacugucgccaguucauugguacugguagucucccugggggcaaucaguuucuggaugugcucuaaugggucucuacaguguagaauauguauuuaa

SEQ ID NO: 38951 - RNA, 1701 nt, Artificial Sequence
  derived and/or modified CDS sequence (wt) from hemagglutinin__InfluenzaA__AEK21406
augaaggcaauacuaguaguucugcuauauacauuugcaaccgcaaaugcagacacauuauguauagguuaucaugcgaacaauucaacagacacuguagacacaguacuagaaaagaauguaacaguaacacacucuguuaaccuucuagaagacaagcauaacgggaaacuaugcaaacuaagagggguagccccauugcauuuggguaaauguaacaucgcuggcuggauccugggaaauccagaaugugaaucacucuccacagcaagcucaugguccuacauuguggaaacaucuaguucagacaauggaacguguuacccaggagauuucaucgauuaugaggagcuaagagagcaauugagcucaaugucaucauuugaaagguuugagauauuccccaagacaaguucauggcccgaucaugacucgaacaaagguguaacggcagcauguccucaugcuggagcaaaaagcuucuacaaaaauuuaauauggcuaguuaaaaaaggaaauucauacccaaagcucagcaaauccuacauuaaugauaaagggaaagaaguccucgugcuauggggcauucaccauccaucuacuagugcugaccaacaaagucucuaucagaaugcagaugcauauguuuuuguggggacaucaagauacagcaagaaguucaagccggaaauagcaauaagacccaaagugagggaucaagaagggagaaugaacuauuacuggacacuaguagagccgggagacaaaauaacauucgaagcaacuggaaaucuagugguaccgagauaugcauucgcaauggaaagaaaugcuggaucugguauuaucauuucagauacaccaguccacgauugcaacacaacuugucagacacccaagggugcuauaaacaccagccucccauuucagaauauacauccgaucacaauuggaaaauguccaaaauauguaaaaagcacaaaauugagacuggccacaggauugaggaaugucccgucuauucaaucuagaggccuauuuggggccauugccgguuucauugaagggggguggacagggaugguagauggaugguacgguuaucaccaucaaaaugagcaggggucaggauaugcagccgaccugaagagcacacagaaugccauugacaagauuacuaacaaaguaaauucuguuauugaaaagaugaauacacaguucacagcaguagguaaagaguucaaccaccuggaaaaaagaauagagaauuuaaauaaaaaaguugaugaugguuuccuggacauuuggacuuacaaugccgaacuguugguucuauuggaaaaugaaagaacuuuggacuaccacgauucaaaugugaagaacuuauaugaaaagguaagaagccaguuaaaaaacaaugccaaggaaauuggaaacggcugcuuugaauuuuaccacaaaugcgauaacacgugcauggaaagugucaaaaaugggacuuaugacuacccaaaauacucagaggaagcaaaauuaaacagagaagaaauagaugggguaaaacuggaaucaacaaggauuuaccagauuuuggcgaucuauucaacugucgccaguucauugguacugguagucucccugggggcaaucaguuucuggaugugcucuaaugggucucuacaguguagaauauguauuuaa

SEQ ID NO: 38952 - RNA, 1701 nt, Artificial Sequence
  derived and/or modified CDS sequence (wt) from hemagglutinin__InfluenzaA__AEK21416
augaaggcaauacuaguaguucugcuauauacauuugcaaccgcaaaugcagacacauuauguauagguuaucaugcgaacaauucaacagacacuguagacacaguacuagaaaagaauguaacaguaacacacucuguuaaccuucuagaagacaagcauaacgggaaacuaugcaaacuaagagggguagccccauugcauuuggguaaauguaacauugcuggcuggauccugggaaauccagagugugaaucacucuccacagcaagcucaugguccuacauuguggaaacaucuaguucagacaauggaacguguuacccaggaguuuucaucgauuaugaggagcuaagagagcaauugagcucagugucaucauuugaaagguuugagauauuccccaagacaaguucauggcccaaucaugacucgaacaaagguguaacggcagcauguccucaugcuggagcaaaaagcuucuacaaaaauuuaauauggcuaguuaaaaaaggaaauucauacccaaagcucagcaaauccuacauuaaugauaaagggaaagaaguccucgugcuauggggcauucaccauccaucuacuacugcugaccaacaaagucucuaucagaaugcagaugcauauguuuuuguggggacaucaagauacagcaagaaguucaagccggaaauagcaguaagacccaaagugagggaucaagaagggagaaugaacuauuacuggacacuaguagagccgggagacaaaauaacauucgaagcaacuggaaaucuagugguaccgagauaugcauucgcaauggaaagaaaugcuggaucugguauuaucauuucagauacaccaguccacgauugcaauacaacuugucagacacccaagggugcuauaaacaccagccucccauuucaaaauauacauccgaucacaauuggaaaauguccaaaauauguaaaaagcacaaaauugagacuggccacaggauugaggaaugucccgucuauucaaucuagaggccuauuuggggccauugccggcuucauugaagggggguggacagggaugguagauggaugguacgguuaucaccaucaaaaugagcaggggucaggauaugcagccgaccugaagagcacacagaaugccaucgacaagauuacuaacaaaguaaauucuguuauugaaaagaugaauacacaguucacagcaguagguaaagaguucaaccaccuggaaaaaagaauagagaauuuaaauaaaaaaguugaugaugguuuccuggacauuuggacuuacaaugccgaacuguugguucuauuggaaaaugaaagaacuuuggacuaccacgauucaaaugugaagaacuuauaugaaaagguaagaaaccaguuaaaaaacaaugccaaggaaauuggaaacggcugcuuugaauuuuaccacaaaugcgauaacacgugcauggaaagugucaaaaaugggacuuaugacuauccaaaauacucagaggaagcaaaauuaaacagagaagaaauagaugggguaaagcuggaaucaacaaggauuuaccagauuuuggcgaucuauucaacugucgccaguucauugguacugguagucucccugggggcaaucaguuucuggaugugcucuaaugggucucuacaguguagaauauguauuuaa

SEQ ID NO: 38953 - RNA, 1701 nt, Artificial Sequence
  derived and/or modified CDS sequence (wt) from hemagglutinin__InfluenzaA__AEK21426
augaaggcaauacuaguaguucugcuauauacauuugcaaccgcaaaugcagacacauuauguauagguuaucaugcgaacaauucaacagacacuguagacacaguacuagaaaagaauguaacaguaacacacucuguuaaccuucuagaagacaagcauaacgggaaauuaugcaaacuaagagggguagccccauugcauuuggguaaauguaacauugcuggcuggauccugggaaauccagagugugaaucacucuccacagcaagcucaugguccuacauuguggaaacaucuaguucagacaauggaacguguuacccaggaaauuucaucgauuaugaggagcuaagagaacaauugagcucagugucaucauuugaaagguuugagauauuccccaagacaaguucauggcccgaucaugacucgaacaaagguguaacggcagcauguccucaugcuggagcaaaaagcuucuacaaaaauuuaauauggcuaguuaaaaaaggaaauucauacccaaagcucagcaaauccuacauuaaugauaaagggaaagaaguccucgugcuauggggcauucaccauccaucuacuagugcugaccaacaaagucucuaucagaaugcagaugcauauguuuuuguggggacaucaagauacagcaagaaguucaagccggaaauagcaauaagacccaaagugagggaucaagaagggagaaugaacuauuacuggacacuaguagagccgggagacaaaauaacauucgaagcaacuggaaaucuaguggcaccgagauaugcauucgcaauggaaagaaaugcuggaucugguauuaucauuucagauacaccaguccacgauugcaauacaacuugucagacacccaagggugcuauaaacaccagccucccauuucagaauauacauccgaucacaauuggaaaauguccaaaauauguaagaagcacaaaauugagacuggccacaggauugaggaaugucccgucuauucaaucuagaggccuauuuggggccauugccgguuucauugaagggggguggacagggaugguagauggaugguacgguuaucaccaucaaaaugagcaggggucuggauaugcagccgaccugaagagcacacagaaugccauugacaagauuacuaacaaaguaaauucuguuauugaaaagaugaauacacaguucacagcaguagguaaagaguucaaccaccuggaaaaaagaauagagaauuuaaauaaaaaaguugaugaugguuuccuggacauuuggacuuacaaugccgaacuguugguucuauuggaaaaugaaagaacuuuggacuaccacgauucaaaugugaagaacuuauaugaaaagguaagaagccaguuaaaaaacaaugccaaggaaauuggaaacggcugcuuugaauuuuaccacaaaugcgauaacacgugcauggaaagugucaaaaaugggacuuaugacuacccaaaauacucagaggaagcaaaauuaaacagagaagaaauagaugggguaaagcuggaaucaacaaggauuuaccagauuuuggcgaucuauucaacugucgccaguucauugguacugguagucucccugggggcaaucaguuucuggaugugcucuaaugggucucuacaguguagaauauguauuuaa

SEQ ID NO: 38954 - RNA, 1701 nt, Artificial Sequence; identical to SEQ ID NO: 38938
  derived and/or modified CDS sequence (wt) from hemagglutinin__InfluenzaA__AEK21436

SEQ ID NO: 38955 - RNA, 1701 nt, Artificial Sequence
  derived and/or modified CDS sequence (wt) from hemagglutinin__InfluenzaA__AEK21456
augaaggcaauacugguaguucugcuauacacauuugcaaccgcaaaugcagacacauuauguauagguuaucaugcgaacaauucaacagacacuguagacacaguacuagaaaagaauguaacaguaacacacucuguuaaccuucuagaagacaagcauaacgggaaacuaugcaaacuaagagggguagccccauugcauuuggguaaauguaacauugcuggcuggauccugggaaauccagagugugaaucacucuccacagcaagcucaugguccuacauuguggaaacaucuaguucagacaauggaacguguuacccaggagauuucaucgauuaugaggagcuaagagagcaauugagcucagugucaucauuugaaagguuugagauauuccccaagacaaguucauggcccaaucaugacucgaacaaagguguaacggcagcauguccucaugcuggagcaaaaagcuucuacaaaaauuuaauauggcuaguuaaaaaaggaaauucauacccaaagcucagcaaauccuacauuaaugauaaagggaaagaaguccucgugcuauggggcauucaccauccaucuacuagugcugaccaacaaagucucuaucagaaugcagaugcauauguuuuuguggggacaucaagauacagcaagaaguucaagccggaaauagcaauaagacccaaagugagggaucaagaagggagaaugaacuauuacuggacacuaguagagccgggagacaaaauaacauucgaagcaacuggaaaucuagugguaccgagauaugcauucgcaauggaaagaaaugcuggaucugguauuaucauuucagauacaccaguccacgauugcaauacaacuugucagacacccaagggugcuauaaacaccagccucccauuucagaauauacauccgaucacaauuggaaaauguccaaaauauguaaaaagcacaaaauugagacuggccacaggauugaggaaugucccgucuauucaaucuagaggccuauuuggggccauugccgguuucauugaaggaggguggacagggaugguagaugggugguacgguuaucaccaucaaaaugagcaggggucaggauaugcagccgaccugaagagcacacagaaugccauugacaagauuacuaacaaaguaaauucuguuauugaaaagaugaauacacaguucacagcaguagguaaagaguucaaccaccuggaaaaaagaauagagaauuuaaauaaaaaaguugaugaugguuuccuggacauuuggacuuacaaugccgaacuguugguucuauuggaaaaugaaagaacuuuggacuaccacgauucaaaugugaagaacuuauaugaaaagguaagaagccaguuaaaaaacaaugccaaggaaauuggaaacggcugcuuugaauuuuaccacaaaugcgauaacacgugcauggaaaaugucaaaaaugggacuuaugacuacccaaaauacucagaggaagcaaaauuaaacagagaagaaauagaugggguaaagcuggaaucaacaaggauuuaccagauuuuggcgaucuauucaacugucgccaguucauugguacugguagucucccugggggcaaucaguuucuggaugugcucuaaugggucucuacaguguagaauauguauuuaa

SEQ ID NO: 38956 - RNA, 1701 nt, Artificial Sequence
  derived and/or modified CDS sequence (wt) from hemagglutinin__InfluenzaA__AEK21466
augaaggcaauacuaguaguucugcuauauacauuugcaaccgcaaaugcagacacauuauguauagguuaucaugcgaacaauucaacagacacuguagacacaguacuagaaaagaauguaacaguaacacacucuguuaaccuucuagaagacaagcauaacgggaaauuaugcaaacuaagagggguagccccauugcauuuggguaaauguaacauugcuggcuggauccugggaaauccagagugugaaucacucuccacagcaagcucaugguccuacauuguggaaacaucuaguucagacaauggaacguguuacccaggaaauuucaucgauuaugaggagcuaagagaacaauugagcucagugucaucauuugaaagguuugagauauuccccaagacaaguucauggcccgaucaugacucgaacaaagguguaacggcagcauguccucaugcuggagcaaaaagcuucuacaaaaauuuaauauggcuaguuaaaaaaggaaauucauacccaaagcucagcaaauccuacauuaaugauaaagggaaagaaguccucgugcuauggggcauucaccauccaucuacuagugcugaccaacaaagucucuaucagaaugcagaugcauauguuuuuguggggacaucaagauacagcaagaaguucaagccggaaauagcaauaagacccaaagugagggaucaagaagggagaaugaacuauuacuggacacuaguagagccgggagacaaaauaacauucgaagcaacuggaaaucuaguggcaccgagauaugcauucgcaauggaaagaaaugcugguucugguauuaucauuucagauacaccaguccacgauugcaauacaacuugucagacacccaagggugcuauaaacaccagccucccauuucagaauauacauccgaucacaauuggaaaauguccaaaauauguaaaaagcacaaaauugagacuggccacaggauugaggaaugucccgucuauucaaucuagaggccuauuuggggccauugccgguuucauugaagggggguggacagggaugguagauggaugguacgguuaucaccaucaaaaugagcaggggucuggauaugcagccgaccugaagagcacacagaaugccauugacaagauuacuaacaaaguaaauucuguuauugaaaagaugaauacacaguucacagcaguagguaaagaguucaaccaccuggaaaaaagaauagagaauuuaaauaaaaaaguugaugaugguuuccuggacauuuggacuuacaaugccgaacuguugguucuauuggaaaaugaaagaacuuuggacuaccacgauucaaaugugaagaacuuauaugaaaagguaagaagccaguuaaaaaacaaugccaaggaaauuggaaacggcugcuuugaauuuuaccacaaaugcgauaacacgugcauggaaagugucaaaaaugggacuuaugacuacccaaaauacucagaggaagcaaaauuaaacagagaagaaauagaugggguaaagcuggaaucaacaaggauuuaccagauuuuggcgaucuauucaacugucgccaguucauugguacugguagucucccugggggcaaucaguuucuggaugugcucuaaugggucucuacaguguagaauauguauuuaa

SEQ ID NO: 38957 - RNA, 1701 nt, Artificial Sequence
  derived and/or modified CDS sequence (wt) from hemagglutinin__InfluenzaA__AEK21476
augaaggcaauacuaguaguucugcuauauacauuugcaaccgcaaaugcagacacauuauguauagguuaucaugcgaacaauucaacagacacuguagacacaguacuagaaaagaauguaacaguaacacacucuguuaaccuucuagaagacaagcauaacgggaaauuaugcaaacuaagagggguagccccauugcauuuggguaaauguaacauugcuggcuggauccugggaaauccagagugugaaucacucuccacagcaagcucaugguccuacauuguggaaacaucuaguucagacaauggaacguguuacccaggaaauuucaucgauuaugaggagcuaagagaacaauugagcucagugucaucauuugaaagguuugagauauuccccaagacaaguucauggcccgaucaugacucgaacaaagguguaacggcagcauguccucaugcuggagcaaaaagcuucuacaaaaauuuaauauggcuaguuaaaaaaggaaauucauacccaaagcucagcaaauccuacauuaaugauaaagggaaagaaguccucgugcuauggggcauucaccauccaucuacuagugcugaccaacaaagucucuaucagaaugcagaugcauauguuuuuguggggacaucaagauacagcaagaaguucaagccggaaauagcaauaagacccaaagugagggaucaagaagggagaaugaacuauuacuggacacuaguagagccgggagacaaaauaacauucgaagcaacuggaaaucuaguggcaccgagauaugcauucgcaauggaaagaaaugcuggaucugguauuaucauuucagauacaccaguccacgauugcaauacaacuugucagacacccaagggugcuauaaacaccagccucccauuucagaauauacauccgaucacaauuggaaaauguccaaaauauguaaaaagcacaaaauugagacuggccacaggauugaggaaugucccgucuauucaaucuagaggccuauuuggggccauugccgguuucauugaagggggguggacagggaugguagauggaugguacgguuaucaccaucaaaaugagcaggggucuggauaugcagccgaccugaagagcacacagaaugccauugacaagauuacuaacaaaguaaauucuguuauugaaaagaugaauacacaguucacagcaguagguaaagaguucaaccaccuggaaaaaagaauagagaauuuaaauaaaaaaguugaugaugguuuccuggacauuuggacuuacaaugccgaacuguugguucuacuggaaaaugaaagaacuuuggacuaccacgauucaaaugugaagaacuuauaugaaaagguaagaagccaguuaaaaaacaaugccaaggaaauuggaaacggcugcuuugaauuuuaccacaaaugcgauaacacgugcauggaaagugucaaaaaugggacuuaugacuacccaaaauacucagaggaagcaaaauuaaacagagaagaaauagaugggguaaagcuggaaucaacaaggauuuaccagauuuuggcgaucuauucaacugucgccaguucauugguacugguagucucccugggggcaaucaguuucuggaugugcucuaaugggucucuacaguguagaauauguauuuaa

SEQ ID NO: 38958 - RNA, 1701 nt, Artificial Sequence; identical to SEQ ID NO: 38938
  derived and/or modified CDS sequence (wt) from hemagglutinin__InfluenzaA__AEK21486

SEQ ID NO: 38959 - RNA, 1701 nt, Artificial Sequence
  derived and/or modified CDS sequence (wt) from hemagglutinin__InfluenzaA__AEK28774
augaagacuaucauugcuuugagcuacauucuaugucugguuuucgcucaaaaacuuccuggaaaugacaacagcacggcaacgcugugccuugggcaccaugcaguaccaaacggaacgauagugaaaacaaucacgaaugaccaaauugaaguuacuaaugcuacugagcugguucagaguuccucaacaggugaaauaugcgacaguccucaucagauccuugauggaaaaaacugcacacuaauagaugcucuauugggagacccucagugugauggcuuccaaaauaagaaaugggaccuuuuuguugaacgcagcaaagccuacagcaacuguuacccuuaugaugugccggauuaugccucccuuaggucccuaguugccucauccggcacacuggaguuuaacaaugaaagcuucaauuggacuggagucacucaaaacggaacaagcucugcuugcauaaggagaucuaaaaacaguuucuuuaguagauugaauugguugacccacuuaaacuucaaauacccagcauugaacgugacuaugccaaacaaugaacaauuugacaaauuguacauuugggggguucaccacccggguacggacaaagaccaaaucuuccuguaugcucaagcaucaggaagaaucacagucucuaccaaaagaagccaacaaacugcaaucccgaauaucggaucuagacccagaguaaggaauaucccuagcagaauaagcaucuauuggacaauaguaaaaccgggagacauacuuuugauuaacagcacagggaaucuaauugcuccuagggguuacuucaaaauacgaagugggaaaagcucaauaaugagaucagaugcacccauuggcaaaugcaauucugaaugcaucacuccaaauggaagcauucccaaugacaaaccauuccaaaauguaaacaggaucacauacggggccugucccagauauguuaagcaaaacacucugaaauuggcaacagggaugcgaaauguaccagagaaacaaacuagaggcauauuuggcgcaaucgcggguuucauagaaaaugguugggagggaaugguggaugguugguacgguuucaggcaucaaaauucugagggaagaggacaagcagcagaucucaaaagcacucaagcagcaaucgaucaaaucaaugggaagcugaauagauugaucgggaaaaccaacgagaaauuccaucagauugaaaaagaauucucagaagucgaagggagaauucaggaccuugagaaauauguugaggacacuaaaauagaucucuggucauacaacgcggagcuucuuguugcccuggagaaccaacauacaauucaucuaacugacucagaaaugaacaaacuguuugaaaaaacaaagaagcaacugagggaaaaugcugaggauaugggcaaugguuguuucaaaauauaccacaaaugugacaaugccugcauaggaucaaucagaaauggaacuuaugaccacgauguauacagagaugaagcauuaaacaaccgguuucagaucaagggaguugagcugaagucaggguacaaagauuggauccuauggauuuccuuugccauaucauguuuuuugcuuuguguugcuuuguugggguucaucaugugggccugccaaaaaggcaacauuaggugcaacauuugcauuuga

SEQ ID NO: 38960 - RNA, 1701 nt, Artificial Sequence
  derived and/or modified CDS sequence (wt) from hemagglutinin__InfluenzaA__AEK28785
augaagacuaucauugcuuugagcuacauucuaugucugguuuucgcucaaaaccuuccuggaaaugacaacagcgcggcaacgcugugccuugggcaccaugcaguaccaaacggaacgauagugaaaacaaucacgaaugaccaaguugagguuacuaaugcuacugagcugguucagaauuccucaacaggugaaauaugcgacaguccucaucagauccuugauggagaaaacugcacacuaauagaugcucuauugggagacccucagugugauggcuuccaaaauaagaaaugggaccuuuuuguugaacgaagcaaagcauacagcaacuguuacccuuaugaugugccggauuaugccucccuuaggucacuaguugccucauccggcacacuggaguuuaacaaugaaagcuucaauuggacuggagucacucaaaacggaacaagcucugcuugcauaaggagaucuaauaauaguuucuuuaguagauugaauugguugacccacuuaaacuucaaauacccagcauugaacgugacuaugccaaacaaugaacaauuugacaaauuguacauuugggggguucaccacccggguacggacaaggaccaaaucuuccuguaugcucaagcaucaggaagaaucacaguaucuaccaaaagaagccaacaagcuguaaucccgaauaucggaucuagacccagaguaaggaauaucccuagcagaauaagcaucuauuggacaauaguaaaaccgggagacauacuuuugauuaacagcacagggaaucuaauugcuccuagggguuacuucaaaauacgaagugggaaaagcucaauaaugagaucagaugcacccauuggcaaaugcaauucugaaugcaucacuccaaauggaagcauucccaaugacaaaccauuccaaaauguaaacaggaucacauacggggccugucccagauauguuaagcaaaacacucugaaauuggcaacaggaaugcgaaauguaccagagaaacaaacuagaggcauauuuggcgcaauagcggguuucauagaaaaugguugggagggaaugguggaugguugguacgguuucaggcaucaaaauucugagggaagaggacaagcagcagaucucaaaagcacucaagcagcaaucgaucaaaucaaugggaagcugaauagauugaucgggaaaaccaacgagaaauuccaucagauugaaaaagaauucucagaagucgaagggagaauucaggaccuugagaaauauguugaggacacuaaaauagaucucuggucauacaacgcggagcuucuuguugcccuggagaaccaacauacaauucaucuaacugacucagaaaugaacaaacuguuugaaaaaacaaagaagcaacugagggaaaaugcugaggauaugggcaaugguuguuucaaaauauaccacaaaugugacaaugccugcauaggaucaaucagaaauggaacuuaugaccacgauguauacagagaugaagcauuaaacaaccgguuccagaucaagggaguugagcugaagucaggguacaaagauuggauccuauggauuuccuuugccauaucauguuuuuugcuuuguguugcuuuguugggguucaucaugugggccugccaaaaaggcaacauuaggugcaacauuugcauuuga

SEQ ID NO: 38961 - RNA, 1701 nt, Artificial Sequence
  derived and/or modified CDS sequence (wt) from hemagglutinin__InfluenzaA__AEK28796
augaagacuaucauugcuuugagcuacauucuaugucugguuuucgcucaaaaacuuccuggaaaugacaacagcacggcaacgcugugccuugggcaccaugcaguaccaaacggaacgauagugaaaacaaucacgaaugacaaaauugaaguuacuaaugcuacugagcugguucagaguuccucaacaggugaaauaugcgacaguccucaucagauccuugauggaaaaaacugcacacuaauagaugcucuauugggagacccucagugugauggcuuccaaaauaagaaaugggaccuuuuuguugaacgcagcaaagccuacagcaacuguuacccuuaugaugugccggauuaugccucccuuaggucacuaguugccucauccggcacauuggaauuuaacaaugaaagcuucaauuggacuggagucacucaagacggaacaagcucugcuugcauaaggggaucuaaaaacaguuucuuuaguagauugaauugguugacccacuuaaacuucaaauacccagcauugaacgugacuaugccaaacaaugaacaauuugacaaauuguacauuugggggguucaccacccggguacggacaaagaccaaaucuuccuguaugcucaagcaucaggaagaaucacagucucuaccaaaagaagccaacaagcugcaaucccgaauaucggaucuagacccagaguaaggaacaucccuagcagaauaagcaucuauuggacaauaguaaaaccgggagacauacuuuugauuaacagcacagggaaucuaauugcuccuagggguuacuucaaaauacgaagugggaaaagcucaauaaugagaucagaugcacccauuggcaaaugcaauucugaaugcaucacuccaaauggaagcauucccaaugacaaaccauuccaaaauguaaacaggaucacauacggggccugucccagauauguuaagcaaaacacucugaaauuggcaacagggaugcgaaauguaccagagaaacaaacuagaggcauauuuggcgcaaucgcggguuucauagaaaaugguugggagggaaugguggaugguugguacgguuucaggcaucaaaauucugagggaagaggacaagcagcagaucucaaaagcacucaagcagcaaucgaucaaaucaaugggaagcugaauagauugaucgggaaaaccaacgagaaauuccaucagauugaaaaagaauucucagaagucgaagggagaauucaggaccuugagaaauauguugaggacacuaaaauagaucucuggucauacaacgcggagcuucuuguugcccuggagaaccaacauacaauucaucuaacugacucagaaaugaacaaacuguuugaaaaaacaaagaagcaacugagggaaaaugcugaggauaugggcaaugguuguuucaaaauauaccacaaaugugacaaugccugcauaggaucaaucagaaauggaacuuaugaccacgauguauacagagaugaagcauuaaacaaccgguuccagaucaagggaguugagcugaagucaggguacaaagauuggauccuauggauuuccuuugccauaucauguuuuuugcuuuguguugcuuuguugggguucaucaugugggccugccaaaaaggcaacauuaggugcaacauuugcauuuga

SEQ ID NO: 38962 - RNA, 1701 nt, Artificial Sequence
  derived and/or modified CDS sequence (wt) from hemagglutinin__InfluenzaA__AEK28807
augaagacuaucauugcuuugagcuacauucuaugucugguuuucgcucaaaaacuuccuggaaaugacaacagcacggcaacgcugugccuugggcaccaugcaguaccaaacggaacgauagugaaaacaaucacgaaugaccaaauugaaguuacuaaugcuacugagcugguucagaguuccucaacaggugaaauaugcgacaguccucaucagauccuugauggagaaaacugcacacuaauagaugcucuauugggagacccucagugugauggcuuccaaaauaagaaaugggaccuuuuuguugaacgcagcaaagccuacggcaacuguuacccuuaugaugugccggauuaugccucccuuaggucacuaguugccucauccggcacacuggaguuuaacaaugaaagcuucaauuggaccggagucacucaaaacggaacaagcucugcuugcauaaggaaaucuaauaacaguuucuuuaguagauugaauugguugacccacuuaaaauucaaauacccagcauugaacguaacuaugccaaacaaugaacaauuugacaaauuguacauuugggggguucaccacccggguacggacaaugaccaaaucuuccuguaugcucaagcaucaggaagaaucacagucucuaccaaaagaagccaacaaacuguaaucccgaauaucggaucuagacccagaguaaggaauaucccuagcagaauaagcaucuauuggacaauaguaaaaccgggagacauacuuuugauuaacagcacagggaaucuaauugcuccuagggguuacuucaaaauacgaagugggaaaagcucaauaaugagaucagaugcacccauuggcaaaugcaacucugaaugcaucacuccaaauggaagcauucccaaugacaaaccauuccaaaauguaaacaggaucacauacggggccugucccagauauguuaagcaaaacacucugaaauuggcaacagggaugcgaaauguaccagagaaacaaacuagaggcauauuuggcgcaaucgcggguuucauagaaaaugguugggagggaaugguggaugguugguacgguuucaggcaucaaaauucugagggaagaggacaagcagcagaucucaaaagcacucaagcagcaaucgaucaaaucaaugggaagcugaauagauugaucgggaaaaccaacgagaaauuccaucagauugaaaaagaauucucagaagucgaagggagaauucaggaccuugagaaauauguugaggacacuaaaauagaucucuggucauacaacgcggagcuucuuguugcccuggagaaccaacauacaauucaucuaacugacucagaaaugaacaaacuguuugaaaaaacaaagaagcaacugagggaaaaugcugaggauaugggcaaugguuguuucaaaauauaucacaaaugugacaaugccugcauaggaucaaucagaaauggaacuuaugaccacgauguauacagagaugaagcauuaaacaaccgguuccagaucaagggaguugagcugaagucaggguacaaagauuggauccuauggauuuccuuugccauaucauguuuuuugcuuuguguugcuuuguugggguucaucaugugggccugccaaaaaggcaacauuaggugcaacauuugcauuuga

SEQ ID NO: 38963 - RNA, 1701 nt, Artificial Sequence
  derived and/or modified CDS sequence (wt) from hemagglutinin__InfluenzaA__AEK28818
augaagacuaucauugcuuugagcuacauucuaugucugguuuucgcucaaaaacuuccuggaaaugacaacagcacggcaacgcugugccuugggcaccaugcaguaccaaacggaacgauagugaaaacaaucacgaaugaccaaauugaaguuacuaaugcuacugagcugguucagaguuccucaacaggugaaauaugcgacaguccucaucagauccuugauggaaaaaacugcacacuaauagaugcucuauugggagacccucagugugauggcuuccaaaauaagaaaugggaccuuuuuguugaacgcagcaaagccuacagcaacuguuacccuuaugaugugccggauuaugccucccuuaggucacuaguugccucauccggcacacuggaguuuaacaaugaaagcuucaauuggacuggagucacucaaaacggaacaagcucugcuugcauaaggagaucuaaaaacaguuucuuuaguagauugaauugguugacccacuuaaacuucaaauacccagcauugaacgugacuaugccaaacaaugaacaauuugacaaauuguacauuugggggguucaccacccggguacggacaaagaccaaaucuuccuguaugcucaagcaucaggaagaaucacagucucuaccaaaagaagccaacaaacuguaaucccgaauaucggaucuagacccaggguaaggaauaucccuagcagaauaagcaucuauuggacaauaguaaaaccgggagacauacuuuugauuaacaacacagggaaucuaauugcuccuagggguuacuucaaaauacgaagugggaaaagcucaauaaugagaucagaugcacccauuggcaaaugcaauucugaaugcaucacuccaaauggaagcauucccaaugacaaaccauuccaaaauguaaacaggaucacauacggggccugucccagauauguuaagcaaaacacucugaaauuggcaacagggaugcgaaauguaccagagaaacaaacuagaggcauauuuggcgcaaucgcggguuucauagaaaaugguugggagggaaugguggaugguugguacgguuucaggcaucaaaauucugagggaagagggcaagcagcagaucucaaaagcacucaagcagcaaucgaucaaaucaaugggaagcugaauagauugaucgggaaaaccaacgagaaauuccaucagauugaaaaagaauucucagaagucgaagggagaauucaggaccuugagaaauauguugaggacacuaaaauagaucucuggucauacaacgcggagcuucuuguugcccuggagaaccaacauacaauucaucuaacugacucagaaaugaacaaacuguuugaaaaaacaaagaagcaacugagggaaaaugcugaggauaugggcaaugguuguuucaaaauauaccacaaaugugacaaugccugcauaggaucaaucagaaauggaacuuaugaccacgauguauacagagaugaagcauuaaacaaccgguuucagaucaagggaguugagcugaagucaggguacaaagauuggauccuauggauuuccuuugccauaucauguuuuuugcuuuguguugcuuuguugggguucaucaugugggccugccaaaaaggcaacauuaggugcaacauuugcauuuga

SEQ ID NO: 38964 - RNA, 1701 nt, Artificial Sequence
  derived and/or modified CDS sequence (wt) from hemagglutinin__InfluenzaA__AEK28828
augaagacuaucauugcuuugagcuacauucuaugucugguuuucgcucaaaaacuuccuggaaaugacaacagcacggcaacgcugugccuugggcaccaugcaguaccaaacggaacgauagugaaaacaaucacgaaugaccaaauugaaguuacuaaugcuacugagcugguucagaguuccucaacaggugaaauaugcgacaguccucaucagauccuugaugggaaaaacugcacacuaauagaugcucuauugggagacccucagugugauggcuuccaaaauaagaaaugggaccuuuuuguugaacgcagcaaagccuacagcaacuguuacccuuaugaugugccggauuaugccucccuuaggucacuaguugccucauccggcacacuggaguuuaacaaugaaagcuucaauuggacuggagucacucaaaacggaacaagcucugcuugcauaaggagaucuaaaaacaguuucuuuaguagauugaauugguugacccacuuaaacuucaaauacccagcauugaacgugacuaugccaaacaaugaacaauuugacaaauuguacauuugggggguucaccacccggguacggacaaagaccaaaucuuccuguaugcucaagcaucaggaagaaucacagucucuaccaaaagaagccaacaaaccguaaucccgaauaucggaucuagacccagaguaagggauaucccuagcagaauaagcaucuauuggacaauaguaaaaccgggagacauacuuuugauuaacagcacagggaaucuaauugcuccuagggguuacuucaaaauacgaagugggaaaagcucaauaaugagaucagaugcacccauuggcaaaugcaauucugaaugcaucacuccaaauggaagcauucccaaugacaaaccauuccaaaauguaaacaggaucacauacggggccugucccagauauguuaagcaaaacacucugaaauuggcaacagggaugcgaaauguaccagagaaacaaacuagaggcauauuuggcgcaaucgcggguuucauagaaaaugguugggagggaaugguggaugguugguacgguuucaggcaucaaaauucugagggaagaggacaagcagcagaucucaaaagcacucaagcagcaaucgaucaaaucaaugggaagcugaauagauugaucgggaaaaccaacgagaaauuccaucagauugaaaaagaauucucagaagucgaagggagaauucaggaccuugagaaauauguugaggacacuaaaauagaucucuggucauacaacgcggagcuucuuguugcccuggagaaccaacauacaauucaucuaacugacucagaaaugaacaaacuguuugaaaaaacaaagaagcaacugagggaaaaugcugaggauaugggcaaugguuguuucaaaauauaccacaaaugugacaaugccugcauaggaucaaucagaaauggaacuuaugaccacgauguauacagagaugaagcauuaaacaaccgguuucagaucaagggaguugagcugaagucaggguacaaagauuggauccuauggauuuccuuugccauaucauguuuuuugcuuuguguugcuuuguugggguucaucaugugggucugccaaaaaggcaacauuaggugcaacauuugcauuuga

SEQ ID NO: 38965 - RNA, 1701 nt, Artificial Sequence; identical to SEQ ID NO: 35961
  derived and/or modified CDS sequence (wt) from hemagglutinin__InfluenzaA__AEK28839

SEQ ID NO: 38966 - RNA, 1701 nt, Artificial Sequence
  derived and/or modified CDS sequence (wt) from hemagglutinin__InfluenzaA__AEK28850
augaagacuaucauugcuuugagcuacauucuaugucugguuuucgcucaaaaacuuccuggaaacgacaacagcacggcaacgcugugccuugggcaccaugcaguaccaaacggaacgauagugaaaacaaucacaaaugaccaaauugaaguuacuaaugcuacugagcugguucagaguuccucaacaggugaaauaugcgacaguccucaucagauccuugauggagaaaacugcacacuaauagaugcucuauugggagacccucagugugauggcuuccaaaauaagaaaugggaccuuuuuguugaacgcagcaaagccuacagcaacuguuacccuuaugaugugccggauuaugccucccuuaggucacuaguugccucauccggcacacuggaguuuaacaaugaaagcuucaauuggacuggagucacucaaaacggaacaagcucugcuugcauaaggagaucuaauaacaguuucuuuaguagauugaauugguugacccacuuaaaauucaaauacccagcauugaacgugacuaugccaaacaaugaacaauuugacaaauuguacauuugggggguucaccacccggguacggacaaugaccaaaucuuccuguaugcucaagcaucaggaagaaucacagucucuaccaaaagaagccaacaaacugugaucccgaauaucggaucuagacucagaguaaggaauaucccuagcagaauaagcaucuauuggacaauaguaaaaccgggagacauacuuuugauuaacagcacagggaaucuaauugcuccuagggguuacuucaaaauacgaagugggaaaagcucaauaaugagaucagaugcacccauuggcaaaugcaauucugaaugcaucacuccaaauggaagcauucccaaugacaaaccauuccaaaauguaaacagaaucacauacggggccugucccagauauguuaagcaaaacacucugaaauuggcaacagggaugcgaaauguaccagagaaacaaacuagaggcauauuuggcgcaaucgcggguuucauagaaaaugguugggagggaaugguggaugguugguacgguuucaggcaucaaaauucugagggaagaggacaagcagcagaucucaaaagcacucaagcagcaaucgaucaaaucaaugggaagcuaaauagauugaucgggaaaaccaacgagaaauuccaucagauugaaaaagaauucucagaagucgaagggagaauucaggaccuugagaaauauguugaggacacuaaaauagaucucuggucauacaacgcggagcuucuuguugcccuggagaaccaacauacaauugaucuaacugacucagaaaugaacaaacuguuugaaaaaacaaagaagcaacugagggaaaaugcugaggauaugggcaaugguuguuucaaaauauaccacaaaugugacaaugccugcauaggaucaaucagaaauggaacuuaugaccacgauguauacagagaugaagcauuaaacaaccgguuccagaucaagggaguugagcugaagucaggguacaaagauuggauccuauggauuuccuuugccauaucauguuuuuugcuuuguguugcuuuguugggguucaucaugugggccugccaaaaaggcaacauuaggugcaacauuugcauuuga

SEQ ID NO: 38967 - RNA, 1701 nt, Artificial Sequence
  derived and/or modified CDS sequence (wt) from hemagglutinin__InfluenzaA__AEK28861
augaagacuaucauugcuuugagcuacauucuaugucugguuuucgcucaaaaacuuccuggaaaugacaacagcacggcaacgcugugccuugggcaccaugcaguaccaaacggaacgauagugaaaacaaucacgaaugaccaaauugaaguuacuaaugcuacugagcugguucagaguuccucaacaggugaaauaugcgacaguccucaucagauccuugauggagaaaacugcacacuaauagaugcucuauugggagacccucagugugauggcuuccaaaauaagaaaugggaccuuuuuguugaacgaagcaaagccuacagcaacuguuacccuuaugaugugccggauuaugccucccuuaggucacuaguugccucauccggcacacuggaguuuaacaaugaaagcuucaauuggacuggagucacucaaaacggaacaagcucugcuugcauaaggagaucuaauaacaguuucuuuaguagauugaauugguugacccacuuaaaauucaaauacccagcauugaacgugacuaugccaaacaaugaacaauuugacaaauuguacauuugggggguucaccacccggguacggacaaugaccaaaucuuccuguaugcucaagcaucaggaagaaucacaguaucuaccaaaagaagccaacaaacuguaaucccgaauaucggaucuagacccagaguaaggaauaucccuagcagaauaagcaucuauuggacaauaguaaaaccgggagacauacuuuugauuaacagcacagggaaucuaauugcuccuagggguuacuucaaaauacgaagugggaaaagcucaauaaugagaucagaugcacccauuggcaaaugcaauucugaaugcaucacuccaaauggaagcauucccaaugacaaaccauuccaaaauguaaacaggaucacauacggggccugucccagauauguuaagcaaaacacucuaaaauuggcaacaggaaugcgaaauguaccagagaaacaaacuagaggcauauuuggcgcaaucgcggguuucauagaaaaugguugggagggaaugguggaugguugguacgguuucaggcaucaaaauucugagggaagaggacaagcagcagaucucaaaagcacucaagcagcaaucgaucaaaucaaugggaagcugaauagauugaucgggaaaaccaacgagaaauuccaucagauugaaaaagaauucucagaagucgaagggagaauccaggaccuugagaaauauguugaggacacuaaaauagaucucuggucauacaacgcggagcuucuuguugcccuggagaaccaacauacaauugaucuaacugacucagaaaugaacaaacuguuugaaaaaacaaagaagcaacugaaggaaaaugcugaggauaugggcaaugguuguuucaaaauauaccacaaaugugacaaugccugcauaggaucaaucagaaauggaacuuaugaccacgauguauacagagaugaagcauugaacaaccgguuccacaucaagggaguugagcugaagucaggguacaaagauuggauccuauggauuuccuuugccacaucauguuuuuugcuuuguguugcuuuguugggguucaucaugugggccugccaaaaaggcaacauuaggugcaacauuugcauuuga

SEQ ID NO: 38968 - RNA, 1701 nt, Artificial Sequence
  derived and/or modified CDS sequence (wt) from hemagglutinin__InfluenzaA__AEK28872
augaagacuaucauugcuuugagcuacauucuaugccuaguuuucgcucaaaaacuuccuggaaaugacaacagcacggcaacgcugugccuugggcaccaugcaguaccaaacggaacgauagugaaaacaaucacgaaugaccaaauugaaguuacuaaugcuacugagcugguucagaguuccucaacaggugaaauaugcgacaguccucaucagauccuugauggagaaaacugcacacuaauagaugcucuauugggagacccucagugugauggcuuccaaaauaagaaaugggaccuuuuuguugaacgcagcaaagccuacagcaacuguuacccuuaugaugugccggauuaugccucccuuaggucacuaguugccucauccggcacacuggaguuuaacaaugaaagcuucaauuggacuggagucacucaaaacggaacaagcucugcuugcauaaggagaucuaauaacaguuucuuuaguagauugaauugguugacccacuuaaaauucaaauacccagcauuaaacgugacuaugccaaacaaugaacaauuugacaaauuguacauuugggggguucaccacccggguacggacaaugaucaaaucuuccuguaugcucaagcaucaggaagaaucacagucucuaccaaaagaagccaacaaacuguaaucccgaauaucggaucuagacccagaguaagggauaucccuagcagaauaagcaucuauuggacaauaguaaaaccgggagacauacuuuugauuaacagcacagggaaucuaauugcuccuagggguuacuucaaaauacgaagugggaaaagcucaauaaugagaucagaugcacccauuggcaaaugcaauucugagugcaucacuccaaauggaagcauucccaaugacaaaccauuccaaaauguaaacaggaucacauacggggccugucccagauauguuaagcaaaacacucugaaauuggcaacagggaugcgaaauguaccagagaaacaaacuagaggcauauuuggcgcaaucgcgggcuucauagaaaaugguugggagggaaugguggaugguugguacgguuucaggcaucaaaauucugagggaagaggacaagcagcagaucucaaaagcacucaagcagcaaucgaucaaaucaaugggaagcugaauagauugaucgggaaaaccaacgagaaauuccaucagauugaaaaagaauucucagaagucgaagggagaauucaggaccuugagaaauauguugaggacaccaaaauagaucucuggucauacaacgcggagcuucuuguugcccuggagaaccaacauacaauucaucuaacugacucagaaaugaacaaacuguuugaaaaaacaaagaagcaacugagggaaaaugcugaggauaugggcaaugguuguuucaaaauauaccacaaaugugacaaugccugcauaggaucaaucagaaauggaacuuaugaccacgauguauacagagaugaagcauuaaacaaccgguuccagaucaagggaguugagcugaagucaggguacaaagauuggauccuauggauuuccuuugccauaucauguuuuuugcuuuguguugcuuuguugggguucaucaugugggccugccaaaaaggcaacauuaggugcaacauuugcauuuga

SEQ ID NO: 38969 - RNA, 1701 nt, Artificial Sequence
  derived and/or modified CDS sequence (wt) from hemagglutinin__InfluenzaA__AEK28883
augaagacuaucauugcuuugagcuacauucuaugucugguuuucgcucaaaaacuuccuggaaaugacaacagcacggcaacgcugugccuugggcaccaugcaguaccaaacggaacgauagugaaaacaaucacgaaugaccaaauugaaguuacuaaugcuacugagcugguucagaguuccucaacaggugaaauaugcgacaguccucaucagauccuugauggagaaaacugcacacuaauagaugcucuauugggagacccucagugugauggcuuccaaaauaagaaaugggaccuuuuuguugaacgcagcaaagccuacagcaacuguuacccuuaugaugugccggauuaugccucccuuaggucacuaauugccucauccggcacacuggaguuuaacaaugaaagcuucaauuggacuggagucacucaaaacggaacaagcucugcuugcauaaggagaucuaguaacaguuucuuuaguagauugaauugguugacccacuuaaaauucaaauacccagcauugaacgugacuaugccaaacaaugaacaauuugacaaauuguacauuugggggguucaccacccggguacggacaaugaccaaaucuuccuguaugcucaagcaucaggaagaaucacagucucuaccaaaagaagccaacaaacuguaaucccgaauaucggaucuagacccagaguaaggaauaucccuagcagaauaagcaucuauuggacaauaguaaaaccgggagacauacuuuugauuaacagcacagggaaucuaauugcuccuagggguuacuucaaaauacgaagugggaaaagcucaauaaugagaucagaugcacccauuggcaaaugcaauucugaaugcaucacuccaaauggaagcauucccaaugacaaaccauuccaaaauguaaacaggaucacauacggggccugucccagauauguuaagcaaaacacucugaaauuggcaacagggaugcgaaauguaccagagaaacaaacuagaggcauauuuggcgcaaucgcggguuucauagaaaaugguugggagggaaugguggaugguugguacgguuucaggcaucaaaauucugagggaagaggacaagcagcagaucucaaaagcacucaagcagcaaucgaucaaaucaaugggaagcugaauagauugaucgggaaaaccaacgagaaauuccaucagauugaaaaagaauucucagaagucgaagggagaauucaggaccuugagaaauauguugaggacacuaaaauagaucucuggucauacaacgcggagcuucuuguugcccuggagaaccaacauacaauucaucugacugacucagaaaugaacaaacuguuugaaaaaacaaagaagcaacugagggaaaaugcugaggauaugggcaaugguuguuucaaaauauaccacaaaugugacaaugccugcauaggaucaaucagaaauggaacuuaugaccacgauguauacagagaugaagcauuaaacaaccgguuccagaucaagggaguugagcugaagucaggguacaaagauuggauccuauggauuuccuuugccauaucauguuuuuugcuuuguguugcuuuguugggguucaucaugugggccugccaaaaaggcaacauuaggugcaacauuugcauuuga

SEQ ID NO: 38970 - RNA, 1701 nt, Artificial Sequence
  derived and/or modified CDS sequence (wt) from hemagglutinin__InfluenzaA__AEK28894
augaagacuaucauugcuuugagcuacauucuaugucugguuuucgcucaaaaacuuccuggaaacgacaacagcacggcaacgcugugccuugggcaccaugcaguaccaaacggaacgauagugaaaacaaucacaaaugaccaaauugaaguuacuaaugcuacugagcugguucagaguuccucaacaggugaaauaugcgacaguccucaucagauccuugauggagaaaacugcacacuaauagaugcucuauugggagacccucagugugauggcuuccaaaauaagaaaugggaccuuuuuguugaacgcagcaaagccuacagcaacuguuacccuuaugaugugccggauuaugccucccuuaggucacuaguugccucauccggcacacuggaguuuaacaaugaaagcuucaauuggacuggagucacucaaaacggaacaagcucugcuugcauaaggagaucuaauaacaguuucuuuaguagauugaauugguugacccacuuaaaauucaaauacccagcauugaacgugacuaugccaaacaaugaacaauuugacaaauuguacauuugggggguucaccacccggguacggacaaugaccaaaucuuccuguaugcucaagcaucaggaagaaucacagucucuaccaaaagaagccaacaaacugugaucccgaauaucggaucuagacccagaguaaggaauaucccuagcagaauaagcaucuauuggacaauaguaaaaccgggagacauacuuuugauuaacagcacagggaaucuaauugcuccuagggguuacuucaaaauacgaagugggaaaagcucaauaaugagaucagaugcacccauuggcaaaugcaauucugaaugcaucacuccaaauggaagcauucccaaugacaaaccauuccaaaauguaaacagaaucacauacggggccugucccagauauguuaagcaaaacacucugaaauuggcaacagggaugcgaaauguaccagagaaacaaacuagaggcauauuuggcgcaaucgcggguuucauagaaaaugguugggagggaaugguggaugguugguacgguuucaggcaucaaaauucugagggaagaggacaagcagcagaucucaaaagcacucaagcagcaaucgaucaaaucaaugggaagcuaaauagauugaucgggaaaaccaacgagaaauuccaucagauugaaaaagaauucucagaagucgaagggagaauucaggaccuugagaaauauguugaggacacuaaaauagaucucuggucauacaacgcggagcuucuuguugcccuggagaaccaacauacaauucaucuaacugacucagaaaugaacaaacuguuugaaaaaacaaagaagcaacugagggaaaaugcugaggauaugggcaaugguuguuucaaaauauaccacaaaugugacaaugccugcauaggaucaaucagaaauggaacuuaugaccacgauguauacagagaugaagcauuaaacaaccgguuccagaucaagggaguugagcugaagucaggguacaaagauuggauccuauggauuuccuuugccauaucauguuuuuugcuuuguguugcuuuguugggguucaucaugugggccugccaaaaaggcaacauuaggugcaacauuugcauuuga

SEQ ID NO: 38971 - RNA, 1701 nt, Artificial Sequence
  derived and/or modified CDS sequence (wt) from hemagglutinin__InfluenzaA__AEK28905
augaagacuaucauugcuuugagcuacauucuaugucugguuuucgcucaaaaacuuccuggaaaugacaacagcacggcaacgcugugccuugggcaccaugcaguaccaaacggaacgauagugaaaacaaucacgaaugaccaaauugaaguuacuaaugcuacugagcugguucagaguuccucaacaggugaaauaugcgacaguccucaucagauccuugauggagaaaacugcacacuaauagaugcucuauugggagacccucagugugauggcuuccaaaauaagaaaugggaccuuuuuguugaacgcagcaaagccuacagcaacuguuacccuuaugaugugccggauuaugccucccuuaggucacuaguugccucaucuggcacacuggaguuuaacaaugaaagcuucaauuggacuggagucacucaaaacggaacaagcucugcuugcauaaggagaucuaauaacaguuucuuuaguagauugaauugguugacccacuuaagauucaaauacccagcauugaacgugacuaugccaaacaaugaacaauuugacaaauuguacauuugggggguucaccacccggguacggacaaugaccaaaucuucccguaugcucaagcaucaggaagaaucacagucucuaccaaaagaagccaacaaacuguaaucccgaauaucggaucuagacccagaguaaggaauaucccuagcagaauaagcaucuauuggacaauaguaaaaccgggagacauacuuuugauuaacagcacagggaaucuaauugcuccuagggguuacuucaaaauacgaagugggaaaagcucaauaaugagaucagaugcacccauuggcaaaugcaauucugaaugcaucacuccaaauggaagcauucccaaugacaaaccauuccaaaauguaaacagaaucacauacggggccugucccagauauguuaagcaaaacacucugaaauuggcaacagggaugcgaaauguaccagagaaacaaacuagaggcauauuuggagcaaucgcggguuucauagaaaaugguugggagggaaugguggaugguugguacgguuucaggcaucaaaauucugagggaagaggacaagcagcagaucucaaaagcacucaagcagcaaucgaucaaaucaaugggaagcugaauagauugaucgggaaaaccaacgagaaauuccaucagauugaaaaagaauucucagaagucgaagggagaauucaggaccuugagaaauauguugaggacacuaaaauagaucucuggucauacaacgcggagcuucuuguugcccuggagaaccaacauacaauugaucuaacugauucagaaaugaacaaacuguuugaaaaaacaaagaagcaacugagggaaaaugcugaagauaugggcaaugguuguuucaaaauauaccacaaaugugacaaugccugcauaggaucaaucagaaauggaacuuaugaccacgauguauacagagaugaagcauuaaacaaccgguuccagaucaagggaguugagcugaagucaggguacaaagauuggauccuauggauuuccuuugccauaucauguuuuuugcuuuguguugcuuuguugggguucaucaugugggccugccaaaaaggcaacauuaggugcaacauuugcauuuga

SEQ ID NO: 38972 - RNA, 1701 nt, Artificial Sequence
  derived and/or modified CDS sequence (wt) from hemagglutinin__InfluenzaA__AEK28916
augaagacuaucauugcuuugagcuacauucuaugucugguuuucgcucaaaaacuuccuggaaaugacaacagcacggcaacgcugugccuugggcaccaugcaguaccaaacggaacgauagugaaaacaaucacgaaugaccaaauugaaguuacuaaugcuacugagcugguucagaguuccucaacaggugaaauaugcgacaguccucaucagauccuugauggagaaaacugcacacuaauagaugcucuauugggagacccucagugugauggcuuccaaaauaagaaaugggaccuuuuuguugaacgcagcaaagccuacagcaacuguuacccuuaugaugugccggauuaugccucccuuaggucacuaguugccucauccggcacacuggaguuuaacaaugaaagcuucaauuggacuggagucacucaaaacggaacaagcucugcuugcauaaggagaucuaauaacaguuucuuuaguagauugaauugguugacccacuuaaaauucaaauacccagcauugaacgugacuaugccaaacaaugaacaauuugacaaauuguacauuugggggguccaccacccggguacggacaaugaccaaaucuuccuguaugcucaagcaucaggaagaaucacagucucuaccaaaagaagccaacaaacuguaaucccgaauaucggaucuagacccagaauaaggaauaucccuagcagaauaagcaucuauuggacaauaguaaaaccgggagacauacuuuugauuaacagcacagggaaucuaauugcuccuagggguuacuucaaaauacgaagugggaaaagcucaguaaugagaucagaugcacccauuggcaaaugcaauucugaaugcaucacuccaaauggaagcauucccaaugacaaaccauuccaaaauguaaacaggaucacauacggggccugucccagauauguuaagcaaaacacucugaaauuggcaacagggaugcgaaauguaccagagaaacaaacuagaggcauauuuggcgcaaucgcggguuucauagaaaaugguugggagggaaugguggaugguugguacgguuucaggcaucaaaauucugagggaagaggacaagcagcagaucucaaaagcacucaagcagcaaucgaucaaaucaaugggaagcugaauagauugaucgggaaaaccaacgagaaauuccaucagauugaaaaagaauucucagaagucgaagggagaauucaggaccuugagaaauauguugaggacacuaaaauagaucucuggucauacaacgcggagcuucuuguugcccuagagaaccaacauacaauugaucuaacugacucagaaaugaacaaacuguuugaaaaaacaaagaagcaacugagggaaaaugcugaggauaugggcaaugguuguuucaaaauauaccacaaaugugacaaugccugcauaggaucaaucagaaauggaacuuaugaccacgauguauacagagaugaagcauuaaacaaccgguuccagaucaagggaguugagcugaagucaggguacaaagauuggauccuauggauuuccuuugccauaucauguuuuuugcuuuguguugcuuuguugggguucaucaugugggccugccaaaaaggcaacauuaggugcaacauuugcauuuga

SEQ ID NO: 38973 - RNA, 1701 nt, Artificial Sequence
  derived and/or modified CDS sequence (wt) from hemagglutinin__InfluenzaA__AEK28927
augaagacuaucauugcuuugagcuacauucuaugucugguuuucgcucaaaaacuuccuggaaaugacaacagcacggcaacgcugugccuugggcaccaugcaguaccaaacggaacgauagugaaaacaaucacgaaugaccaaauugaaguuacuaaugcuacugagcugguucagaguuccucaacaggugaaauaugcgacaguccucaucagauccuugauggagaaaacugcacacuaauagaugcucuauugggagacccucagugugauggcuuccaaaauaagaaaugggaccuuuuuguugaacgcagcaaagccuacagcaacuguuacccuuaugaugugccggauuaugccucccuuaggucacuaauugccucauccggcacacuggaguuuaacaaugaaagcuucaauuggacuggagucacucaaaacggaacaagcucugcuugcauaaggagaucuaauaacaguuucuuuaguagauugaauugguugacccacuuaaaauucaaauacccagcauuaaacgugacuaugccaaacaaugaacaauuugacaaauuguacauuugggggguucaccacccggguacggacaaugaccaaaucuuccuguaugcucaagcaucaggaagaaucacagucucuaccaaaagaagccaacaaacuguaaucccgaauaucggaucuagacccagaguaaggaauaucccuagcagaauaagcaucuauuggacaauaguaaaaccgggagacauacuuuugauuaacagcacagggaaucuaauugcuccuagggguuacuucaaaauacgaagugggaaaagcucaauaaugagaucagaugcacccauuggcaaaugcaauucugaaugcaucacuccaaauggaagcauucccaaugacaaaccauuccaaaauguaaacaggaucacauacggggccugucccagauauguuaagcaaaacacucugaaauuggcaacagggaugcgaaauguaccagagaaacaaacuagaggcauauuuggcgcaaucgcggguuucauagaaaaugguugggagggaaugguggaugguugguacgguuucaggcaucaaaauucugagggaagaggacaagcagcagaucucaaaagcacucaagcagcaauugaucaaaucaaugggaagcugaauagauugaucgggaaaaccaacgagaaauuccaucagauugaaaaagaauucucagaagucgaagggagaauucaggaccuugagaaauauguugaggacaccaaaauagaucucuggucauacaacgcggagcuucuuguugcccuggagaaccaacauacaauucaucuaacugacucagaaaugaacaaacuguuugaaaaaacaaagaagcaacugagggaaaaugcugaggauaugggcaaugguuguuucaaaauauaccacaaaugugacaaugccugcauaggaucaaucagaaauggaacuuaugaccacgauguauacagagaugaagcauuaaacaaccgguuccagaucaagggaguugagcugaagucaggguacaaagauuggauccuauggauuuccuuugccauaucauguuuuuugcuuuguguugcuuuguugggguucaucaugugggccugccaaaaaggcaacauuaggugcaacauuugcauuuga

SEQ ID NO: 38974 - RNA, 1701 nt, Artificial Sequence
  derived and/or modified CDS sequence (wt) from hemagglutinin__InfluenzaA__AEK28949
augaagacuaucauugcuuugagcuacauucuaugucuaguuuucgcucaaaaacuuccuggaaaugacaacagcacggcaacgcugugccuugggcaccaugcaguaccaaacggaacgauagugaaaacaaucacgaaugaccaaauugaaguuacuaaugcuacugagcugguucagaguuccucaacaggugaaauaugcgacaguccucaucagauccuugauggagaaaacugcacacuaauagaugcucuauugggagacccucagugugauggcuuccaaaauaagaaaugggaccuuuuuguugaacgcagcaaagccuacagcaacuguuacccuuaugaugugccggauuaugccucccuuaggucacuaguugccucauccggcacacuggaguuuaacaaugaaagcuucaauuggacuggagucacucaaaacggaacaagcucugcuugcauaaggagaucuaauaacaguuucuuuaguagauugaauugguugacccacuuaaaauucaaauacccagcauuaaacgugacuaugccaaacaaugaacaauuugacaaauuguacauuugggggguucaccacccagguacggacaaugaccaaaucuuccuguaugcucaagcaucaggaagaaucacagucucuaccaaaagaagccaacaaacuguaaucccgaauaucggaucuagacccagaguaaggaauaucccuagcagaauaagcaucuauuggacaauaguaaaaccgggagacauacuuuugauuaacagcacagggaaucuaauugcuccuagggguuacuucaaaauacgaagugggaaaagcucaauaaugagaucagaugcacccauuggcaaaugcaauucugaaugcaucacuccaaauggaagcauucccaaugacaaaccauuccaaaauguaaacaggaucacauacggggccugucccagauauguuaagcaaaacacucugaaauuggcaacagggaugcgaaauguaccagagaaacaaacuagaggcauauuuggcgcaaucgcggguuucauagaaaaugguugggagggaaugguggaugguugguacgguuucaggcaucaaaauucugagggaagaggacaagcagcagaucucaaaagcacucaagcagcaaucgaucaaaucaaugggaagcugaauagauugaucgggaaaaccaacgagaaauuccaucagauugaaaaagaauucucagaagucgaagggagaauucaggaccuugagaaauauguugaggacaccaaaauagaucucuggucauacaacgcggagcuucuuguugcccuggagaaccaacauacaauugaucuaacugacucagaaaugaacaaacuguuugaaaaaacaaagaagcaacugagggaaaaugcugaggauaugggcaaugguugucucaaaauauaccacaaaugugacaaugccugcauaggaucaaucagaaauggaacuuaugaccacgauguauacagagaugaagcauuaaacaaccgguuccagaucaagggaguugagcugaagucaggguacaaagauuggauccuauggauuuccuuugccauaucauguuuuuugcuuuguguugcuuuguugggguucaucaugugggccugccaaaaaggcaacauuaggugcaacauuugcauuuga

SEQ ID NO: 38975 - RNA, 1701 nt, Artificial Sequence
  derived and/or modified CDS sequence (wt) from hemagglutinin__InfluenzaA__AEK28960
augaagacuaucauugcuuugagcuacauucuaugucugguuuucgcucaaaaacuuccuggaaaugacaacagcacggcaacgcugugccuugggcaccaugcaguaccaaacggaacgauagugaaaacaaucacgaaugaccaaauugaaguuacuaaugcuacugagcugguucagaguuccucaacaggugaaauaugcgacaguccucaucagauccuugauggagaaaacugcacacuaauagaugcucuauugggagacccucagugugauggcuuccaaaauaagaaaugggaccuuuuuguugaacgaagcaaagccuacagcaacuguuacccuuaugaugugccggauuaugccucccuuaggucacuaguugccucauccggcacacuggaguuuaacaaugaaagcuucaauuggacuggagucacucaaaacggaacaagcucugcuugcauaaggagaucuaauaacaguuucuuuaguagauugaauugguugacccacuuaaaauucaaauacccagcauugaacgugacuaugccaaacaaugaacaauuugacaaauuguacauuugggggguucaccacccggguacggacaaugaccaaaucuuccuguaugcucaagcaucaggaagaaucacagucucuaccaaaagaagccaacaaacuguaaucccgaauaucggaucuagacccagaguaaggaauaucccuagcagaauaagcaucuauuggacaauaguaaaaccgggagacauacuuuugauuaacagcacagggaaucuaauugcuccuagggguuacuucaaaauacgaagugggaaaagcucaauaaugagaucagaugcacccauuggcaaaugcaauucugaaugcaucacuccaaauggaagcauucccaaugacaaaccauuccaaaauguaaacaggaucacauacggggccugucccagauauguuaagcaaaacacucugaaauuggcaacagggaugcgaaauguaccagagaaacaaacuagaggcauauuuggcgcaaucgcggguuucauagaaaaugguugggagggaaugguggaugguugguacgguuucaggcaucaaaauucugagggaagaggacaagcagcagaucucaaaagcacucaagcagcaaucgaucaaaucaaugggaagcugaauagauugaucgggaaaaccaacgagaaauuccaucagauugaaaaagaguucucagaagucgaagggagaauucaggaccuugagaaauauguugaggacacuaaaauagaucucuggucauacaacgcggagcuucuuguugcccuggagaaccaacauacaauugaucuaacugacucagaaaugaacaaacuguuugaaaaaacaaagaagcaacugagggaaaaugcugaggauaugggcaaugguuguuucaaaauauaccacaaaugugacaaugccugcauaggaucaaucagaaauggaacuuaugaccacgauguauacagagaugaagcauuaaacaaccgguuccagaucaagggaguugagcugaagucaggguacaaagauuggauccuauggauuuccuuugccauaucauguuuuuugcuuuguguugcuuuguugggguucaucaugugggccugccaaaaaggcaacauuaggugcaacauuugcauuuga

SEQ ID NO: 38976 - RNA, 1701 nt, Artificial Sequence
  derived and/or modified CDS sequence (wt) from hemagglutinin__InfluenzaA__AEK28971
augaagacuaucauugcuuugagcuacauucuaugucugguuuucgcucaaaaacuuccuggaaaugacaacagcacggcaacgcugugccuugggcaccaugcaguaccaaacggaacgauagugaaaacaaucacgaaugaccaaauugaaguuacuaaugcuacugagcugguucagaguuccucaacaggugaaauaugcgacaguccucaucagauccuugauggagaaaacugcacacuaauagaugcucuauugggagacccucagugugauggcuuccaaaauaagaaaugggaccuuuuuguugaacgcagcaaagccuacagcaacuguuacccuuaugaugugccggauuaugccucccuuaggucacuaguugccucauccggcacacuggaguuuaacaaugaaagcuucaauuggacuggagucacucaaaacggaacaagcucugcuugcauaaggagaucuaauaacaguuucuuuaguagauugaauugguugacccacuuaaaauucaaauacccagcauuaaacgugacuaugccaaacaaugaacaauuugacaaauuguacauuugggggguucaccacccggguacggacaaugaccaaaucuuccuguaugcucaagcaucaggaagaaucacagucucuaccaaaagaagccaacaaacuguaaucccgaauaucggaucuagacccagaguaaggaauaucccuagcagaauaagcaucuauuggacaauaguaaaaccgggagacauacuuuugauuaacagcacagggaaucuaauugcuccuagggguuacuucaaaauacgaagugggaaaagcucaauaaugagaucagaugcacccauuggcaaaugcaauucugaaugcaucacuccaaauggaagcauucccaaugacaaaccauuccagaauguaaacaggaucacauacggggccugucccagauauguuaagcaaaacacucugaaauuggcaacagggaugcgaaauguaccagagaaacaaacuagaggcauauuuggcgcaaucgcggguuucauagaaaaugguugggagggaaugguggaugguugguacgguuucaggcaucaaaauucugagggaagaggacaagcagcagaucucaaaagcacucaagcagcaaucgaucaaaucaaugggaagcugaauagauugaucgggaaaaccaacgagaaauuccaucagauugaaaaagaauucucagaagucgaagggagaauucaggaccuugagaaauauguugaggacaccaaaauagaucucuggucauacaacgcggagcuucuuguugccuuggagaaccaacauacaauugaucuaacugacucagaaaugaacaaacuguuugaaaaaacaaagaagcaacugagggaaaaugcugaggauaugggcaaugguuguuucaaaauauaccacaaaugugacaaugccugcauaggaucaaucagaaauggaacuuaugaccacgauguauacagagaugaagcauuaaacaaccgguuccagaucaagggaguugagcugaagucaggguacaaagauuggauccuauggauuuccuuugccauaucauguuuuuugcuuuguguugcuuuguugggguucaucaugugggccugccaaaaaggcaacauuaggugcaacauuugcauuuga

SEQ ID NO: 38977 - RNA, 1701 nt, Artificial Sequence
  derived and/or modified CDS sequence (wt) from hemagglutinin__InfluenzaA__AEK28982
augaagacuaucauugcuuugagcuacauucuaugucugguuuucgcucaaaaacuuccuggaaauuacaacagcacggcaacgcugugccuugggcaccaugcaguaccaaacggaacgauagugaaaacaaucacgaaugaccaaauugaaguuacuaaugcuacugagcugguucagaguuccucaacaggugaaauaugcgacaguccucaucagauccuugauggagaaaacugcacacuaauagaugcucuauugggagacccucagugugauggcuuccaaaauaagaaaugggaccuuuuuguugaacgcagcaaagccuacagcaacuguuacccuuaugaugugccggauuaugccucccuuaggucacuaguugccucauccggcacacuggaguuuaacaaugaaagcuucaauuggaccggagucacucaaaacggaacaagcucugcuugcauaaggagaucuaauaacaguuucuuuaguagauugaauugguugacccacuuaaaauucaaauacccagcauugaacgugacuaugccaaacaaugaacaauuugacaaauuguacauuugggggguucaccacccggguacggacaaugaccaaaucuuccuguaugcucaagcaucaggaagaaucacagucucuaccaaaagaagccaacaaacuguaaucccgaauaucggaucuagacccagaguaaggaauaucccuagcagaauaagcaucuauuggacaauaguaaaaccgggagauauacuuuugauuaacagcacagggaaucuaauugcuccuagggguuacuucaaaauacgaagugggaaaagcucaauaaugagaucagaugcacccauuggcaaaugcaacucugaaugcaucacuccaaauggaagcauucccaaugacaaaccauuccaaaauguaaacaggaucacauacggggccugccccagauauguuaagcaaaacacucugaaauuggcaacagggaugcgaaauguaccagagaaacaaacuagaggcauauuuggcgcaaucgcggguuucauagaaaaugguugggagggaaugguggaugguugguacgguuucaggcaucaaaauucugagggaagaggacaagcagcagaucucaaaagcacucaagcagcaaucgaucaaaucaaugggaagcugaauagauugaucgggaaaaccaacgagaaauuccaucagauugaaaaagaauucucagaagucgaagggagaauucaggaccuugagaaauauguugaggacacuaaaauagaucuauggucauacaacgcggagcuucuuguugcccuggagaaccaacauacaauucaucuaacugacucagaaaugaacaaacuguuugaaaaaacaaagaagcaacugagggaaaaugcugaggauaugggcaaugguuguuucaaaauauaccacaaaugugacaaugccugcauaggaucaaucagaaauggaacuuaugaccacgauguauacagagaugaagcauuaaacaaccgguuccagaucaagggaguugagcugaagucaggguacaaagauuggauccuauggauuuccuuugccauaucauguuuuuugcuuuguguugcuuuguugggguucaucaugugggccugccaaaaaggcaacauuaggugcaacauuugcauuuga

SEQ ID NO: 38978 - RNA, 1701 nt, Artificial Sequence
  derived and/or modified CDS sequence (wt) from hemagglutinin__InfluenzaA__AEK28993
augaagacuaucauugcuuugagcuacauucuaugucugguuuucgcucaaaaacuuccuggaaauuacaacagcacggcaacgcugugccuugggcaccaugcaguaccaaacggaacgauagugaaaacaaucacgaaugaccaaauugaaguuacuaaugcuacugagcugguucagaguuccucaacaggugaaauaugcgacaguccucaucagauccuugauggagaaaacugcacacuaauagaugcucuauugggagacccucagugugauggcuuccaaaauaagaaaugggaccuuuuuguugaacgcagcaaagccuacagcaacuguuacccuuaugaugugccggauuaugccucccuuaggucacuaguugccucauccggcacacuggaguuuaacaaugaaagcuucaauuggaccggagucacucaaaacggaacaagcucugcuugcauaaggagaucuaauaacaguuucuuuaguagauugaauugguugacccacuuaaaauucaaauacccagcauugaacgugacuaugccaaacaaugaacaauuugacaaauuguacauuugggggguucaccacccggguacggacaaugaccaaaucuuccuguaugcucaagcaucaggaagaaucacagucucuaccaaaagaagccaacaaacuguaaucccgaauaucggaucuagacccagaguaaggaauaucccuagcagaauaagcaucuauuggacaauaguaaaaccgggagauauacuuuugauuaacagcacagggaaucuaauugcuccuagggguuacuucaaaauacgaagugggaaaagcucaauaaugagaucagaugcacccauuggcaaaugcaacucugaaugcaucacuccaaauggaagcauucccaaugacaaaccauuccaaaauguaaacaggaucacauacggggccugccccagauauguuaagcaaaacacucugaaauuggcaacagggaugcgaaauguaccagagaaacaaacuagaggcauauuuggcgcaaucgcggguuucauagaaaaugguugggagggaaugguggaugguugguacgguuucaggcaucaaaauucugagggaagaggacaagcagcagaucucaaaagcacucaagcagcaaucgaucaaaucaaugggaagcugaauagauugaucgggaaaaccaacgagaaauuccaucagauugaaaaagaauucucagaagucgaagggagaauucaggaccuugagaaauauguugaggacacuaaaauagaucuauggucauacaacgcggagcuucuuguugcccuggagaaccaacauacaauugaucuaacugacucagaaaugaacaaacuguuugaaaaaacaaagaagcaacugagggaaaaugcugaggauaugggcaaugguuguuucaaaauauaccacaaaugugacaaugccugcauaggaucaaucagaaauggaacuuaugaccacgauguauacagagaugaagcauuaaacaaccgguuccagaucaagggaguugagcugaagucaggguacaaagauuggauccuauggauuuccuuugccauaucauguuuuuugcuuuguguugcuuuguugggguucaucaugugggccugccaaaaaggcaacauuaggugcaacauuugcauuuga

SEQ ID NO: 38979 - RNA, 1701 nt, Artificial Sequence
  derived and/or modified CDS sequence (wt) from hemagglutinin__InfluenzaA__AEK29004
augaagacuaucauugcuuugagcuacauucuaugucugguuuucgcucaaaaacuuccuggaaaugacaacagcacggcaacgcugugccuugggcaccaugcagugccaaacggaacgauagugaaaacaaucacgaaugaccaaauugaagucacuaaugcuacugagcugguccagaguuccucaacaggugaaauaugcaacaguccucaucagauccuugauggagaaaacugcacacuaauagaugcucuauugggagacccucagugugauggcuuccaaaacaagaaaugggaccuuuuuguugaacgaagcaaagcccacagcaacuguuacccuuaugaugugccggauuaugucucccuuaggucacuaguugccucauccggcacacuggaguuuaacaaugaaagcuucaauuggacuggagucacucaaaacggaacaagcucugcuugcauaaggagaucuaauaauaguuucuuuaguagauugaauugguugacccacuuaaacuucaaguacccagcauugaacgugacuaugccaaacaaugaacaauuugacaaauuguacauuugggggguucaccacccggguacggacaaggaccaaaucuuccuguaugcucaagcaucaggaagaaucacaguaucuaccaaaagaagccaacaagcuguaauuccgaauaucggaucuagacccagaguaaggaauaucccuagcagaguaagcaucuauuggacaauaguaaaaccgggagacauacuuuugauuaacagcacagggaaucuaauugcuccuagggguuacuucaaaauacgaagugggaaaagcucaauaaugagaucagaugcacccauuggcaaaugcaauucugcaugcaucacuccaaauggaagcauucccaaugacaaaccauuccaaaauguaaacaggaucacauacggggccugucccagauauguuaagcaaaacacuuugaaauuggcaacaggaaugagaaauguaccagagaaacaaacuagaggcauauuuggcgcaauagcggguuucauagaaaaugguugggagggaaugguggaugguugguacgguuucaggcaucaaaauucugagggaaggggacaagcagcagaucucaaaagcacucaagcagcaaucgaucaaaucaauggaaagcugaauagauugaucgggaaaaccaacgagaaauuccaucagauugaaaaagaauucucagaagucgaagggagaauucaggaccuugagaaauauguugaggacacuaaaauagaucucuggucauacaacgcggagcuucuuguugcccuggagaaccaacauacaauugaucuaacugacucagaaaugaacaaacuguuugaaaaaacaaagaagcaacugagggaaaaugcugaggauaugggcaaugguuguuucaaaauauaccacaaaugugacaaugccugcauaggaucaaucagaaauggaacuuaugaccacgauguguacagagaugaagcauuaaacaaccgauuccagaucaagggaguugagcugaagucaggguacaaagauuggauccuauggauuuccuuugccauaucauguuuuuugcuuuguguugcuuuguugggguucaucaugugggccugccaaaaaggcaacauuaggugcaacauuugcauuuga

SEQ ID NO: 38980 - RNA, 1701 nt, Artificial Sequence
  derived and/or modified CDS sequence (wt) from hemagglutinin__InfluenzaA__AEK29026
augaagacuaucauugcuuugagcuacauucuaugucugguuuucgcucagaaacuuccuggaaaugacaacagcacggcaacgcugugccuugggcaccaugcaguaccaaacggaacgauagugaaaacaaucacgaaugaccaaauugaaguuacuaaugcuacugagcugguucagaguucuucaacaggugaaauaugcgacaguccucaucagauccuugaugggaaaaacugcacacuaauagaugcucuauugggagacccucagugugauggcuuccaagauaagaaaugggaccuuuuuguugaacgcagcaaagccuacagcaacuguuacccuuaugaugugccggauuaugccucccuuaggucacuaguugccucauccggcacacuggaauuuaacaaugaaagcuucaauuggacuggagucacucaaaacggaacaagcucugcuugcauaaggagaucuaaaaacaguuucuuuaguagauugaauugguugacccacuuaaacuucaaauacucagcauugaacgugacuaugccgaacaaugaacaauuugacaaauuguacauuugggggguucaccacccggguacggacaaagaccaaaucuuccuguaugcucaagcaucaggaagaaucacagucucuaccaaaaggagccaacaaacuguaaucccgaauaucggaucuagaccccgaguaaggaauaucccuagcagaauaagcaucuauuggacaauaguaaaaccgggagacauacuuuugauuaacagcacagggaaucuaauugcuccuagggguuacuucaaaaugcaaagugggaaaagcucaauaaugagaucagaugcacccauuggcaaaugcaauucugaaugcaucacuccaaauggaagcauucccaaugacaaaccauuccaaaaugugaacaggaucacauacggggccugucccagauauguuaagcaaaacacucugaaauuggcaacagggaugcgaaauguaccagagaaacaaacuagaggcauauuuggcgcaaucgcggguuucauagaaaaugguugggagggaaugguggaugguugguacgguuucaggcaucaaaauucugagggaagaggacaagcagcagaucucaaaagcacucaagcagcaaucgaucaaaucaaugggaagcugaauagauugaucgggaaaaccaacgagaaauuccaucagauugaaaaagaauucucagaagucgaagggagaauucaggaccuugagaaauauguugaggacacuaaaauagaucucuggucauacaacgcggagcuucuuguugcccuggagaaccaacauacaauugaucuaacugacucagaaaugaacaaacuguuugaaaaaacaaagaagcaacugagggaaaaugcugaggauaugggcaaugguuguuucaaaauauaccacaaaugugacaaugccugcauaggaucaaucagaaauggaacuuaugaccacgauguauacagagaugaagcauuaaacaaccgguuucagaucaagggaguugagcugaagucaggguacaaagauuggauccuauggauuuccuuugccauaucauguuuuuugcuuuguguugcuuuguugggguucaucaugugggccugccaaaaaggcaacauuaggugcaacauuugcauuuga

SEQ ID NO: 38981 - RNA, 1701 nt, Artificial Sequence
  derived and/or modified CDS sequence (wt) from hemagglutinin__InfluenzaA__AEK29048
augaagacuaucauugcuuugagcuacauucuaugucugguuuucgcucaaaaacuuccuggaaaugacaacagcacggcaacgcugugccuugggcaccaugcagugccaaacggaacgauagugaaaacaaucacgaaugaccaaauugaaguuacuaaugcuacugagcugguucagaguuccucaacaggugaaauaugcaacaguccucaucagauccuugauggagaaaacugcacacuaauagaugcucuauugggagacccucagugugauggcuuccaaaacaagaaaugggaccuuuuuguugaacgaagcaaagcccacagcaacuguuacccuuaugaugugccggauuaugccucccuuaggucacuaguugccucauccggcacacuggaguuuaacaaugaaagcuucaauuggacuggagucgcucaaaacggaacaagcucugcuugcauaaggagaucuaauaauaguuucuuuaguagauugaauugguugacccacuuaaacuucaaauacccagcauugaacgugacuaugccaaacaaugaacaauuugacaaauuguacauuugggggguucaccacccggguacggacaaggaccaaaucuuccuguaugcucaagcagcaggaagaaucacaguaucuaccaaaagaagccaacaggcuguaaucccgaauaucggaucuagacccagaguaaggaauaucccuagcagaguaagcaucuauuggacaauaguaaaaccgggagacauacuuuugauuaacagcacagggaaucuaauugcuccuagggguuacuucaaaauacgaagugggaaaagcucaauaaugagaucagaugcacccauuggcaaaugcaauucugcaugcaucacuccaaaugguagcauucccaaugacaaaccauuccaaaauguaaacaggaucacauacggggccugucccagauauguuaagcaaaacacucugaaguuggcaacaggaaugagaaauguaccagagaaacaaacuagaggcauauuuggcgcaauagcugguuucauagaaaaugguugggagggaaugguggaugguugguacgguuucaggcaucaaaauucugagggaaggggacaagcagcagaucucaaaagcacucaagcagcaaucgaucaaaucaaugggaagcugaauagauugaucgggaaaaccaacgagaaauuccaucagauugaaaaagaauucucagaagucgaagggagaauucaggaccuugagaaauauguugaggacacuaaaauagaucucuggucauacaacgcggagcuucuuguugcccuggagaaccaacauacaauugaucuaacugacucagaaaugaacaaacuguuugaaaaaacaaagaagcaacugagggaaaaugcugaggauaugggcaaugguuguuucaaaauauaccacaaaugugacaaugccugcauaggaucaaucagaaauggaacuuaugaccacgauguguacagagaugaagcauuaaacaaccgauuccagaucaagggaguugagcugaagucaggguacaaagauuggauccuauggauuuccuuugccauaucauguuuuuugcuuuguguugcuuuguugggguucaucaugugggccugccaaaaaggcaacauuaggugcaacauuugcauuuga

SEQ ID NO: 38982 - RNA, 1701 nt, Artificial Sequence
  derived and/or modified CDS sequence (wt) from hemagglutinin__InfluenzaA__AEK29070
augaagacuaucauugcuuugagcuacauucuaugucugguuuucgcucaaaaacuuccuggaaaugacaacagcacggcaacgcugugccuugggcaccaugcaguaccaaacggaacgauagugaaaacaaucacgaaugaccaaauugaaguuacuaaugcuacugagcugguucagaguuccucaacaggugaaauaugcgacaguccucaucagauccuugauggagaaaacugcacacuaauagaugcucuauugggagacccucagugugauggcuuccaaaauaagaaaugggaccuuuuuguugaacgaagcaaagccuacagcaacuguuacccuuaugaugugccggauuaugccucccuuaggucacuaguugccucauccggcacacuggaguuuaacaaugaaagcuucaauuggacuggagucacucaaaacggaacaagcucugcuugcauaaggagaucuaauaauaguuucuuuaguagauugaauugguugacccacuuaaacuucaaauacccagcauugaacgugacuaugccaaacaaugaacaauuugacaaauuguacauuugggggguucaccacccggguacugacaaggaccaaaucuuccuguaugcucaagcaucaggaagaaucacaguaucuaccaaaagaagccaacaagcuguaaucccgaauaucggaucuagacccagaguaaggaauaucccuagcagaauaagcaucuauuggacaauaguaaaaccgggagacauacuuuuaauuaacagcacagggaaucuaauugcuccuagggguuacuucaaaauacgaagugggaaaagcucaauaaugagaucagaugcacccauuggcaaaugcaauucugaaugcaucacuccaaauggaagcauucccaaugacaaaccauuccaaaauguaaacaggaucacauacggggccugucccagauauguuaagcaaaacacucugaaauuggcaacaggaaugcgaaauguaccagagaaacaaacuagaggcauauuuggcgcaauagcggguuucauagaaaaugguugggagggaaugguggaugguugguacgguuucaggcaucaaaauucugagggaagaggacaagcagcagaucucaaaagcacucaagcagcaaucgaucaaaucaaugggaagcugaauagauugaucgggaaaaccaacgagaaauuccaucagauugaaaaagaauucucagaagucgaagggagaauucaggaccuugagaaauauguugaggacacuaaaauagaucucuggucauacaacgcggagcuucuuguugcccuggagaaccaacauacaauucaucuaacugacucagaaaugaacaaacuguuugaaaaaacaaagaagcaacugagggaaaaugcugaggauaugggcaaugguuguuucaaaauauaccacaaaugugacaacgccugcauaggaucaaucagaaauggaacuuaugaccacgauguauacagagaugaagcauuaaacaaccgguuccagaucaagggaguugagcugaagucaggguacaaagauuggauccuauggauuuccuuugccauaucauguuuuuugcuuuguguugcuuuguugggguucaucaugugggccugccaaaaaggcaacauuaggugcaacauuugcauuuga

SEQ ID NO: 38983 - RNA, 1701 nt, Artificial Sequence
  derived and/or modified CDS sequence (wt) from hemagglutinin__InfluenzaA__AEK29081
augaagacuaucauugcuuugagcuacauucuaugucugguuuucgcucaaaaacuuccuggaaaugacaacagcacggcaacgcugugccuugggcaccaugcaguaccaaacggaacgauagugaaaacaaucacgaaugaccaaauugaaguuacuaaugcuacugagcugguucagaguuccucaacaggugaaauaugcgacaguccucaucagauccuugauggagaaaacugcacacuaauagaugcucuauugggagacccucagugugauggcuuccaaaauaagaaaugggaccuuuuuguugaacgaagcaaagccuacagcaacuguuacccuuaugaugugccggauuaugccucccuuaggucacuaguugccucauccggcacacuggaguuuaacaaugaaagcuucaauuggacuggagucacucaaaacggaacaagcucuucuugcauaaggagaucuaauaauaguuucuuuaguagauugaauugguugacccacuuaaacuucaaauacccagcauugaacgugacuaugccaaacaaugaacaauuugacaaauuguacauuugggggguucaccacccggguacugacaaggaccaaaucuuccuguaugcucaagcaucaggaagaaucacaguaucuaccaaaagaagccaacaagcuguaaucccgaauaucggaucuagacccagaguaaggaauaucccuagcagaauaagcaucuauuggacaauaguaaaaccgggagacauacuuuuaauuaacagcacagggaaucuaauugcuccuagggguuacuucaaaauacgaagugggaaaagcucaauaaugagaucagaugcacccauuggcaaaugcaauucugaaugcaucacuccaaauggaagcauucccaaugacaaaccauuccaaaauguaaacaggaucacauacggggccugucccagauauguuaagcaaaacacucugaaauuggcaacaggaaugcgaaauguaccagagaaacaaacuagaggcauauuuggcgcaauagcggguuucauagaaaaugguugggagggaaugguggaugguugguacgguuucaggcaucaaaauucugagggaagaggacaagcagcagaucucaaaagcacucaagcagcaaucgaucaaaucaaugggaagcugaauagauugaucgggaaaaccaacgagaaauuccaucagauugaaaaagaauucucagaagucgaagggagaauucaggaccuugagaaauauguugaggacacuaaaauagaucucuggucauacaacgcggagcuucuuguugcccuggagaaccaacauacaauucaucuaacugacucagaaaugaacaaacuguuugaaaaaacaaagaagcaacugagggaaaaugcugaggauaugggcaaugguuguuucaaaauauaccacaaaugugacaacgccugcauaggaucaaucagaaauggaacuuaugaccacgauguauacagagaugaagcauuaaacaaccgguuccagaucaagggaguugagcugaagucaggguacaaagauuggauccuauggauuuccuuugccauaucauguuuuuugcuuuguguugcuuuguugggguucaucaugugggccugccaaaaaggcaacauuaggugcaacauuugcauuuga

SEQ ID NO: 38984 - RNA, 1701 nt, Artificial Sequence
  derived and/or modified CDS sequence (wt) from hemagglutinin__InfluenzaA__AEK29092
augaagacuaucauugcuuugagcuacauucuaugucugguuuucgcucaaaaacuuccuggaaaugacaacagcacggcaacgcugugccuugggcaccaugcaguaccaaacggaacgauagugaaaacaaucacgaaugaccaaauugaaguuacuaaugcuacugagcugguucagaguuccucaacaggugaaauaugcgacaguccucaucagauccuugauggagaaaacugcacacuaauagaugcucuauugggagacccucagugugauggcuuccaaaauaagaaaugggaccuuuuuguugaacgaagcaaagccuacagcaacuguuacccuuaugaugugccggauuaugccucccuuaggucacuaguugccucauccggcacacuggaguuuaacaaugaaagcuucaauuggacuggagucacucaaaacggaacaagcucugcuugcauaaggagaucuaauaauaguuucuuuaguagauugaauugguugacccacuuaaacuucaaauacccagcauugaacgugacuaugccaaacaaugaacaauuugacaaauuguacauuugggggguucaccacccggguacggacaaggaccaaaucuuccuguaugcucaagcaucaggaagaaucacaguaucuaccaaaagaagccaacaagcuguaaucccgaauaucggaucuagacccagaguaaggaauaucccuagcagaauaagcaucuauuggacaauaguaaaaccgggagacauacuuuugauuaacagcacagggaaucuaauugcuccuagggguuacuucaaaauacgaaguggaaaaagcucaauaaugagaucagaugcacccauuggcaaaugcaauucugaaugcaucacuccaaauggaagcauucccaaugacaaaccauuccaaaauguaaacaggaucacauacggggccugucccagauauguuaagcaaagcacucugaaauuggcaacaggaaugcgaaauguaccagagaaacaaacuagaggcauauuuggcgcaauagcggguuucauagaaaaugguugggagggaaugguggaugguugguacgguuucaggcaucaaaauucugagggaagaggacaagcagcagaucucaaaagcacucaagcagcaaucgaucaaaucaaugggaagcugaauagauugaucgggaaaaccaacgagaaauuccaucagauugaaaaagaauucucagaagucgaagggagaauucaggaccuugagaaauauguugaggacacuaaaauagaucucuggucauacaacgcggagcuucuuguugcccuggagaaccaacauacaauugaucuaacugacucagaaaugaacaaacuguuugaaaaaacaaagaagcaacugagggaaaaugcugaggauaugggcaaugguuguuucacaauauaccacaaaugugacaaugccugcauaggaucaaucagaaauggaacuuaugaccacaauguauacagagaugaagcauuaaacaaccgguuccagaucaagggaguugagcugaagucaggguacaaagauuggauccuauggauuuccuuugccauaucauguuuuuugcuuuguguugcuuuguugggguucaucaugugggccugccaaaaaggcaauauuaggugcaacauuugcauuuga

SEQ ID NO: 38985 - RNA, 1701 nt, Artificial Sequence
  derived and/or modified CDS sequence (wt) from hemagglutinin__InfluenzaA__AEK29125
augaagacuaucauugcuuugagcuacauucuaugucugguuuucgcucaaaaacuuccuggaaaugacaacagcacggcaacgcugugccuugggcaccaugcagugccaaacggaacgauagugaaaacaaucacgaaugaccaaauugaaguuacuaaugcuacugagcugguucagaguuccucaacaggugaaauaugcaacaguccucaucagauccuugauggagaaaacugcacacuaauagaugcucuauugggagacccucagugugauggcuuccaaaacaagaaaugggaccuuuuuguugaacgaagcaaagcccacagcaacuguuacccuuaugaugugccggauuaugccucccuuaggucacuaguugccucauccggcacacuggaguuuaacaaugaaagcuucaauuggacuggagucacucaaaacggaacaagcucugcuugcauaaggagaucuaauaauaguuucuuuaguagauugaauugguugacccacuuaaacuucaaauacccagcauugaacgugacuaugccaaacaaugaacaauuugacaaauuguacauuugggggguucaccacccggguacggacaaggaccaaaucuuccuguaugcucaagcagcaggaagaaucacaguaucuaccaaaagaagccaacaagcuguaauuccgaauaucggaucuagacccagaguaaggaauaucccuagcagaguaagcaucuauuggacaauaguaaaaccgggagacauacuuuugauuaacagcacagggaaucuaauugcuccuagggguuacuucaaaauacgaagugggaaaagcucaauaaugagaucagaugcacccauuggcaaaugcaauucugcaugcaucacuccaaauggaagcauucccaaugacaaaccauuccaaaauguaaacaggaucacauacggggccugucccagauauguuaagcaaaacacucugaaauuggcaacaggaaugagaaauguaccagagaaacaaacuagaggcauauuuggcgcaauagcugguuucauagaaaaugguugggagggaaugguggaugguugguacgguuucaggcaucaaaauucugagggaaggggacaagcagcagaucucaaaagcacucaagcagcaaucgaucaaaucaaugggaagcugaauagauugaucgggaaaaccaacgagaaauuccaucagauugaaaaagaauucucagaagucgaagggagaauucaggaccuugagaaauauguugaggacacuaaaauagaucucuggucauacaacgcggagcuucuuguugcccuggagaaccaacauacaauugaucuaacugacucagaaaugaacaaauuguuugaaaaaacaaagaagcaacugagggaaaaugcugaggauaugggcaaugguuguuucaaaauauaccacaaaugugacaaugccugcauaggaucaaucagaaauggaacuuaugaccacgauguguacagagaugaagcauuaaacaaccgauuccagaucaagggaguugagcugaagucaggguacaaagauuggauccuauggauuuccuuugccauaucauguuuuuugcuuuguguugcuuuguugggguucaucaugugggccugccaaaaaggcaacauuaggugcaacauuugcauuuga

SEQ ID NO: 38986 - RNA, 1701 nt, Artificial Sequence; identical to SEQ ID NO: 38985
  derived and/or modified CDS sequence (wt) from hemagglutinin__InfluenzaA__AEK29136

SEQ ID NO: 38987 - RNA, 1701 nt, Artificial Sequence; identical to SEQ ID NO: 38985
  derived and/or modified CDS sequence (wt) from hemagglutinin__InfluenzaA__AEK29169

SEQ ID NO: 38988 - RNA, 1701 nt, Artificial Sequence; identical to SEQ ID NO: 38985
  derived and/or modified CDS sequence (wt) from hemagglutinin__InfluenzaA__AEK29180

SEQ ID NO: 38989 - RNA, 1701 nt, Artificial Sequence
  derived and/or modified CDS sequence (wt) from hemagglutinin__InfluenzaA__AEK29191
augaagacuaucauugcuuugagcuacauucuaugucugguuuucgcucaaaaacuuccuggaaaugacaacagcacggcaacgcugugccuugggcaccaugcagugccaaacggaacgauagugaaaacaaucacgaaugaccaaauugaaguuacuaaugcuacugagcugguucagaguuccucaacaggugaaauaugcaacaguccucaucagauccuugauggagaaaacugcacacuaauagaugcucuauugggagacccucagugugauggcuuccaaaacaagaaaugggaccuuuuuguugaacgaagcaaagcccacagcaacuguuacccuuaugaugugccggauuaugccucccuuaggucacuaguugccucauccggcacacuggaguuuaacaaugaaagcuucaauuggacuggagucacucaaaacggaacaagcucugcuugcauaaggagaucuaauaauaguuucuuuaguagauugaauugguugacccacuuaaacuucaaauacccagcauugaacgugacuaugccaaacaaugaacaauuugacaaauuguacauuugggggguucaccacccggguacggacaaggaccaaaucuuccuguaugcucaagcagcaggaagaaucacaguaucuaccaaaagaagccaacaagcuguaauuccgaauaucggaucuagacccagaguaaggaauaucccuagcagaguaagcaucuauuggacaauaguaaaaccgggagacauacuuuugauuaacagcacagggaaucuaauugcuccuagggguuacuucaaaauacgaagugggaaaagcucaauaaugagaucagaugcacccauuggcaaaugcaauucugcaugcaucacuccaaauggaagcauucccaaugacaaaccauuccaaaauguaaacaggaucacauacggggccugucccagauauguuaagcaaaacacucugaaauuggcaacaggaaugagaaauguaccagagaaacaaacuagaggcauauuuggcgcaauagcugguuucauagaaaaugguugggagggaaugguggaugguugguacgguuucaggcaucaaaauucugagggaaggggacaagcagcagaucucaaaagcacucaagcagcaaucgaucaaaucaaugggaagcugaauagauugaucgggaaaaccaacgagaaauuccaucagauugaaaaagaauucucagaagucgaagggagaauucaggaccuugagaaauauguugaggacacuaaaauagaucucuggucauacaacgcggagcuucuuguugcccuggagaaccaacauacaauugaucuaacugacucagaaaugaacaaacuguuugaaaaaacaaagaagcaacugagggaaaaugcugaggauaugggcaaugguuguuucaaaauauaccacaaaugugacaaugccugcauaggaucaaucagaaauggaacuuaugaccacgauguguacagagaugaagcauuaaacaaccgauuccagaucaagggaguugagcugaagucaggguacaaagauuggauccuauggauuuccuuugccauaucauguuuuuugcuuuguguugcuuuguugggguucaucaugugggccugccaaaaaggcaacauuaggugcaacauuugcauuuga

SEQ ID NO: 38990 - RNA, 1701 nt, Artificial Sequence; identical to SEQ ID NO: 38989
  derived and/or modified CDS sequence (wt) from hemagglutinin__InfluenzaA__AEK29202

SEQ ID NO: 38991 - RNA, 1701 nt, Artificial Sequence; identical to SEQ ID NO: 38985
  derived and/or modified CDS sequence (wt) from hemagglutinin__InfluenzaA__AEK29213

SEQ ID NO: 38992 - RNA, 1701 nt, Artificial Sequence
  derived and/or modified CDS sequence (wt) from hemagglutinin__InfluenzaA__AEK29224
augaagacuaucauugcuuugagcuacauucuaugucugguuuucgcucaaaaacuuccuggaaaugacaacagcacggcaacgcugugccuugggcaccaugcagugccaaacggaacgauagugaaaacaaucacgaaugaccaaauugaaguuacuaaugcuacugagcugguucagaguuccucaacaggugaaauaugcaacaguccucaucagauccuugauggagaaaacugcacacuaauagaugcucuauugggagacccucagugugauggcuuccaaaacaagaaaugggaccuuuuuguugaacgaagcaaagcccacagcaacuguuacccuuaugaugugccggauuaugccucccuuaggucacuaguugccucauccggcacacuggaguuuaacaaugaaagcuucaauuggacuggagucacucaaaacggaacaagcucugcuugcauaaggagaucuaauaauaguuucuuuaguagauugaauugguugacccacuuaaacuucaaauacccagcauugaacgugacuaugccaaacaaugaacaauuugacaaauuguacauuugggggguucaccacccggguacggacaaggaccaaaucuuccuguaugcucaagcagcaggaagaaucacaguaucuaccaaaagaagccaacaagcuguaauuccgaauaucggaucuagacccagaguaaggaauaucccuagcagaguaagcaucuauuggacaauaguaaaaccgggagacauacuuuugauuaacagcacagggaaucuaauugcuccuagggguuacuucaaaauacgaagugggaaaagcucaauaaugagaucagaugcacccauuggcaaaugcaauucugcaugcaucacuccaaauggaagcauucccaaugacaaaccauuccaaaauguaaacaggaucacauacggggccugucccagauauguuaagcaaaacacucugaaauuggcaacaggaaugagaaauguaccagagaaacaaacuagaggcauauuuggcgcaauagcugguuucauagaaaaugguugggagggaaugguggaugguugguacgguuucaggcaucaaaauucugagggaaggggacaagcagcagaucucaaaagcacucaagcagcaaucgaucaaaucaaugggaagcugaauagauugaucgggaaaaccaacgagaaauuccaucagauugaaaaagaauucucagaagucgaagggagaauucaggaccuugagaaauauguugaggacacuaaaauagaucucuggucauacaacgcggagcuucuuguugcccuggagaaccaacacacaauugaucuaacugacucagaaaugaacaaauuguuugaaaaaacaaagaagcaacugagggaaaaugcugaggauaugggcaaugguuguuucaaaauauaccacaaaugugacaaugccugcauaggaucaaucagaaauggaacuuaugaccacgauguguacagagaugaagcauuaaacaaccgauuccagaucaagggaguugagcugaagucaggguacaaagauuggauccuauggauuuccuuugccauaucauguuuuuugcuuuguguugcuuuguugggguucaucaugugggccugccaaaaaggcaacauuaggugcaacauuugcauuuga

SEQ ID NO: 38993 - RNA, 1701 nt, Artificial Sequence; identical to SEQ ID NO: 38989
  derived and/or modified CDS sequence (wt) from hemagglutinin__InfluenzaA__AEK29235

SEQ ID NO: 38994 - RNA, 1701 nt, Artificial Sequence
  derived and/or modified CDS sequence (wt) from hemagglutinin__InfluenzaA__AEK29268
augaagacuaucauugcuuugagcuacauucuaugucugguuuucgcucaaaaacuuccuggaaaugacaacagcacggcaacgcugugccuugggcaccaugcagugccaaacggaacgauagugaaaacaaucacgaaugaccaaauugaaguuacuaaugcuacugagcugguucagaguuccucaacaggugaaauaugcaacaguccucaucagauccuugauggagaaaacugcacacuaauagaugcucuauugggagacccucagugugauggcuuccaaaacaagaaaugggaccuuuuuguugaacgaagcaaagcccacagcaacuguuacccuuaugaugugccggauuaugccucccuuaggucacuaguugccucauccggcacacuggaguuuaacaaugaaagcuucaauuggacuggagucacucaaaacggaacaagcucugcuugcauaaggagaucuaauaauaguuucuuuaguagauugaauugguugacccacuuaaacuucaaauacccagcauugaaugugacuaugccaaacaaugaacaauuugacaaauuguacauuugggggguucaccacccggguacggacaaggaccaaaucuuccuguaugcucaagcaucaggaagaaucacaguaucuacaaaaagaagccaacaagcuguaauuccgaauaucggaucuagacccagaguaaggaauaucccuagcagaguaagcaucuauuggacaauaguaaaaccgggagacauacuuuugauuaacagcacagggaaucuaauugcuccuagggguuacuucaaaauacgaagugggaaaagcucaauaaugagaucagaugcacccauuggcaaaugcaauucugcaugcaucacuccaaauggaagcauucccaaugacaaaccauuccaaaauguaaacaggaucacauacggggccugucccagauauguuaagcaaaacacucugaaauuggcaacaggaaugagaaauguaccagagaaacaaacuagaggcauauuuggcgcaauagcggguuucauagaaaaugguugggagggaaugguggaugguugguacgguuucaggcaucaaaauucugagggaaggggacaagcagcagaucucaaaagcacucaagcagcaaucgaucaaaucaaugggaagcugaauagauugaucgggaaaaccaacgagaaauuccaucagauugaaaaagaauucucagaagucgaagggagaauucaggaccuugagaaauauguugaggacacuaaaauagaucucuggucauacaacgcggagcuucuuguugcccuggagaaccaacauacaauugaucuaacugacucagaaaugaacaaacuguuugaaaaaacaaagaagcaacugagggaaaaugcugaggauaugggcaaugguuguuucaaaauauaccacaaaugugacaaugccugcauaggaucaaucagaaauggaacuuaugaccacgauguguacagagaugaagcauuaaacaaccgauuccagaucaagggaguugagcugaagucaggguacaaagauuggauccuauggauuuccuuugccauaucauguuuuuugcuuuguguugcuuuguugggguucaucaugugggccugccaaaaaggcaacauuaggugcaacauuugcauuuga

SEQ ID NO: 38995 - RNA, 1698 nt, Artificial Sequence
  derived and/or modified CDS sequence (wt) from hemagglutinin__InfluenzaA__AEK59838
augaaaguaaaacuacugguccuguuaugcacauuuacagcuacauaugcagacacaauauguauaggcuaccaugccaacaacucaaccgacacuguugacacaguacuugaaaagaaugugacagugacacacucugucaaccugcuugaggacagucacaauggaaaacuaugucuauuaaaaggaauagccccacuacaauuggguaauugcagcguugccggguggaucuuaggaaacccagaaugcgaauuacugauuuccaaggagucaugguccuacauuguagaaaaaccagauccugagaauggaacauguuacccagggcauuucgcugacuaugaggaacugagggagcaauugaguucaguaucuucauuugagagguucgaaauauuccccaaagaaagcucauggcccaaccacaccguaaccggaguaucagcaucaugcucccauaaugggaaaagcaguuuuuacaaaaauuugcuauggcugacggggaagaaugguuuguacccaaaccugagcaaguccuaugcaaacaacaaagagaaagaaguccuuguacuaugggguguucaucacccgccaaacauaggugaccaaaaggcccucuaucauacagaaaaugcuuaugucucuguagugucuucacauuauagcaaaaaauucaccccagaaauagccaaaagacccaaaguaagagaucaagaaggaagaaucaacuacuacuggacucugcuugaacccgggaauacaauaauauuugaggcaaauggaaaucuaauagcgccaagauaugcuuucgcacugaguagaggcuuuggaucaggaaucaucaauucaaaugcaccaauggauaaaugugaugcgaagugccaaacaccucagggagcuauaaacagcagucuuccuuuccagaaugugcacccagucacaauaggagaguguccaaaguaugucaggagugcaaaauuaaggaugguuacaggacuaaggaacaucccauccauucaauccagagguuuguuuggagccauugccgguuucauugaaggaggguggacuggaaugguagaugguugguaugguuaucaucaucagaaugagcaaggaucuggcuaugcugcagaucaaaaaagcacacaaaaugccauuaaugggauuacaaacaaggugaauucuguaauugagaaaaugaacacucaauucacagcagugggcaaagaauucaacaaauuggaaagaaggauggaaaacuuaaauaaaaaaguugaugauggguuuauagacauuuggacauacaaugcagaacuguugguucuacuggaaaaugaaaggacuuuggauuuccaugacuccaaugugaagaaucuguaugagaaaguaaaaagccaguuaaagaauaaugccaaagaaauaggaaaugggugcuuugaauucuaucacaaguguaacgaugaaugcauggagaguguaaaaaauggaacuuaugacuauccaaaauauuccgaagaaucaaaguuaaacagggagaaaauugauggagugaaauuggaaucaaugggagucuaucagauucuggcgaucuacucaacagucgccaguucucugguucuuuuggucucccugggggcaaucagcuucuggauguguuccaaugggucuuugcaguguagaauaugcaucuga

SEQ ID NO: 38996 - RNA, 1701 nt, Artificial Sequence
  derived and/or modified CDS sequence (wt) from hemagglutinin__InfluenzaA__AEK98378
augaagacuaucauugcuuugagcuacauucuaugucugguuuucgcucaaaaacuucccggaaaugacaacagcacggcaacgcugugccuugggcaccaugcaguaccaaacggaacgauagugaaaacaaucacgaaugaccaaauugaaguuacuaaugcuacugagcugguucagaguuccucaacaggugaaauaugcgacaguccucaucagauccuugauggagaaaacugcacacuaauagaugcucuauugggagacccucagugugauggcuuccaaaauaagaaaugggaccuuuuuguugaacgcagcaaagccuacagcaacuguuacccuuaugaugugccggauuaugccucccuuaggucacuaguugccucauccggcacacuggaguuuaacaaugaaagcuucaauuggacuggagucacucaaaacggaacaagcucugcuugcauaaggagaucuaauaacaguuucuuuaguagauugaauugguugacccacuuaaaauucaaauacccagcauugaacgugacuaugccaaacaaugaaaaauuugacaaauuguacauuugggggguucaccacccggguacggacaaugaccaaaucuucccguaugcucaagcaucaggaagaaucacagucucuaccaaaagaagccaacaaacuguaaucccgaauaucggaucuagacccagaguaaggaauauccccagcagaauaagcaucuauuggacaauaguaaaaccgggagacauacuuuugauuaacagcacagggaaucuaauugcuccuagggguuacuucaaaauacaaagugggaaaagcucaauaaugagaucagaugcacccauuggcaaaugcaauucugaaugcaucacuccaaauggaagcauucccaaugacaaaccauuccaaaauguaaacaggaucacauacggggccugucccagauauguuaagcaaaacacucugaaauuggcaacagggaugcgaaauguaccagagaaacaaacuagaggcauauuuggcgcaaucgcggguuucauagaaaaugguugggagggaaugguggaugguugguacgguuucaggcaucaaaauucugagggaauaggacaagcagcagaucucaaaagcacucaagcagcaaucgaucaaaucaaugggaagcugaauagguugaucgggaaaaccaacgagaaauuccaucagauugaaaaagaauucucagaagucgaagggagaauucaggaccucgagaaauacguugaggacaccaaaauagaucucuggucauacaacgcggagcuucuuguugcccuggagaaccaacauacaauugaucuaacugacucagaaaugaacaaacuguuugaaaaaacaaagaagcaacugagggaaaaugcugaggauaugggcaaugguuguuucaaaauauaccacaaaugugacaaugccugcauaggaucaaucagaaauggaacuuaugaccacgauguauacagagaugaagcauuaaacaaccgguuccagaucaagggcguugagcugaagucaggauacaaagauuggauccuauggauuuccuuugccauaucauguuuuuugcuuuguguugcuuuguugggguucaucaugugggccugccaaaaaggcaacauuaggugcaacauuugcauuuga

SEQ ID NO: 38997 - RNA, 1701 nt, Artificial Sequence
  derived and/or modified CDS sequence (wt) from hemagglutinin__InfluenzaA__AEK98380
augaagacuaucauugcuuugagcuacauucuaugucugguuuucgcucaaaaacuucccggaaaugacaacagcacggcaacgcugugccuugggcaccaugcaguaccaaacggaacgauagugaaaacaaucacgaaugaccaaauugaaguuacuaaugcuacugagcugguucagaguuccucaacaggugaaauaugcgacaguccucaucagauccuugauggagaaaacugcacacuaauagaugcucuauugggagacccucagugugauggcuuccaaaauaagaaaugggaccuuuuuguugaacgcagcaaagccuacagcaacuguuacccuuaugaugugccggauuaugccucccuuaggucacuaguugccucauccggcacacuggaguuuaacaaugaaagcuucaauuggacuggagucacucaaaacggaacaagcucugcuugcauaaggagaucuaauaacaguuucuuuaguagauugaauugguugacccacuuaaaauucaaauacccagcauugaacgugacuaugccaaacaaugaaaaauuugacaaauuguacauuugggggguucaccacccggguacggacaaugaccaaaucuuccuguaugcucaagcaucaggaagaaucacagucucuaccaaaagaagccaacaaacuguaaucccgaauaucggaucuagacccagaguaaggaauauccccagcagaauaagcaucuauuggacaauaguaaaaccgggagacauacuuuugauuaacagcacagggaaucuaauugcuccuagggguuacuucaaaauacaaagugggaaaagcucaauaaugagaucagaugcacccauuggcaaaugcaauucugaaugcaucacuccaaauggaagcauucccaaugacaaaccauuccaaaauguaaacaggaucacauacggggccugucccagauauguuaagcaaaacacucugaaauuggcaacagggaugcgaaauguaccagagaaacaaacuagaggcauauuuggcgcaaucgcggguuucauagaaaaugguugggagggaaugguggaugguugguacgguuucaggcaucaaaauucugagggaauaggacaagcagcagaucucaaaagcacucaagcagcaaucgaucaaaucaaugggaagcugaauagguugaucgggaaaaccaacgagaaauuccaucagauugaaaaagaauucucagaagucgaagggagaauucaggaccucgagaaauauguugaggacaccaaaauagaucucuggucauacaacgcggagcuucuuguugcccuggagaaccaacauacaauugaucuaacugacucagaaaugaacaaacuguuugaaaaaacaaagaagcaacugagggaaaaugcugaggauaugggcaaugguuguuucaaaauauaccacaaaugugacaaugccugcauaggaucaaucagaaauggaacuuaugaccacgauguauacagagaugaagcauuaaacaaccgguuccagaucaagggcguugagcugaagucaggauacaaagauuggauccuauggauuuccuuugccauaucauguuuuuugcuuuguguugcuuuguugggguucaucaugugggccugccaaaaaggcaacauuaggugcaacauuugcauuuga

SEQ ID NO: 38998 - RNA, 1701 nt, Artificial Sequence
  derived and/or modified CDS sequence (wt) from hemagglutinin__InfluenzaA__AEK98382
augaagacuaucauugcuuugagcuacauucuaugucugguuuucgcucaaaaacuucccggaaaugacaacagcacggcaacgcugugccuugggcaccaugcaguaccaaacggaacgauagugaaaacaaucacgaaugaccaaauugaaguuacuaaugcuacugagcugguucagaauuccucaacaggugaaauaugcgacaguccucaucagauccuugauggagaaaacugcacacuaauagaugcucuauugggagacccucagugugauggcuuccaaaauaagaaaugggaccuuuuuguugaacgcagcaaagccuacagcaacuguuacccuuaugaugugccggauuaugccucccuuaggucacuaguugccucauccggcacacuggaguuuaacaaugaaagcuucaauuggacuggagucacucaaaacggaacaagcucugcuugcauaaggagaucuaauaacaguuucuuuaguagauugaauugguugacccacuuaaaauucaaauacccagcauugaacgugacuaugccaaacaaugaaaaauuugacaaauuguacauuugggggguucaccacccggguacggacaaugaccaaaucuuccuguaugcucaagcaucaggaagaaucacagucucuaccaaaagaagccaacaaacugugaucccgaauaucggaucuagacccagaauaaggaauauccccagcagaauaagcaucuauuggacaauaguaaaaccgggagacauacuuuugauuaacagcacagggaaucuaauugcuccuagggguuacuucaaaauacaaauuggaaaaagcucaauaaugagaucagaugcacccauuggcaaaugcaauucugaaugcaucacuccaaauggaagcauucccaaugacaaaccauuccaaaauguaaacaggaucacauacggggccugucccagauauguuaagcaaaacacucugaaauuggcaacagggaugcgaaauguaccagagaaacaaacuagaggcauauuuggcgcaaucgcggguuucauagaaaaugguugggagggaaugguggaugguugguacgguuucaggcaucaaaauucugagggaauaggacaagcagcagaucucaaaagcacucaagcagcaaucgaucaaaucaaugggaagcugaauagguugaucgggaaaaccaacgagaaauuccaucagauugaaaaagaauucucagaagucgaagggagaauucaggaccucgagaaauauguugaggacaccaaaauagaucucuggucauacaacgcggagcuucuuguugcccuggagaaccaacauacaauugaucuaacugacucagaaaugaacaaacuguuugaaaaaacaaagaagcaacugagggaaaaugcugaggauaugggcaaugguuguuucaaaauauaccacaaaugugacaaugccugcauaggaucaaucagaaauggaacuuaugaccacgauguauacagagaugaagcauuaaacaaccgguuccagaucaagggcguugagcugaagucaggauacaaagauuggauccuauggauuuccuuugccauaucauguuuuuugcuuuguguugcuuuguugggguucaucaugugggccugccaaaaaggcaacauuaggugcaacauuugcauuuga

SEQ ID NO: 38999 - RNA, 1701 nt, Artificial Sequence
  derived and/or modified CDS sequence (wt) from hemagglutinin__InfluenzaA__AEK98386
augaagacuaucauugcuuugagcuacauucuaugucugguuuucgcucaaaaacuuccuggaaaugacaacagcacggcaacgcugugccuugggcaccaugcagugccaaacggaacgauagugaaaacaaucacgaaugaccaaauugaagucacuaaugcuacugagcugguucagaguuccucaacaggugaaauaugcaacaguccucaucagauccuugauggagaaaacugcacacuaauagaugcucuauugggagacccucagugugauggcuuccaaaacaagaaaugggaccuuuuuguugaacgaagcaaagcccacagcaacuguuacccuuaugaugugccggauuaugccucccuuaggucacuaguugccucauccggcacacuggaguuuaacaaugaaagcuucaauuggacuggagucacucaaaacggaacaagcucugcuugcauaaggagaucuaauaauaguuucuuuaguagauugaauugguugacccacuuaaacuucaaauacccagcauugaacgugacuaugccaaacaaugaacaauuugacaaauuguacauuugggggguucaccacccggguacggacaaggaccaaaucuuccuguaugcucaagcaucaggaagaaucacaguaucuaccaaaagaagccaacaagcuguaauuccgaauaucggaucuagaaccagaguaaggaauaucccuagcagaguaagcaucuauuggacaauaguaaaaccgggagacauacuuuugauuaacagcacagggaaucuaauugcuccuagggguuacuucaaaauacgaagugggaaaagcucaauaaugagaucagaugcacccauuggcaaaugcaauucugcaugcaucacuccaaauggaagcauucccaaugacaaaccauuccaaaauguaaacaggaucacauacggggccugucccagauauguuaagcaaaacacucugaaauuggcaacaggaaugagaaauguaccagagaaacaaacuagaggcauauuuggcgcaauagcggguuucauagaaaaugguugggagggaaugguggaugguugguacgguuucaggcaucaaaauucugagggaaggggacaagcagcagaucucaaaagcacucaagcagcaaucgaucaaaucaaugggaagcugaauagauugaucgggaaaaccaacgagaaauuccaucagauugaaaaagaauucucagaagucgaagggagaauucaggaccucgagaaauauguugaggacacuaaaauagaucucuggucauacaacgcggagcuucuuguugcccuggagaaccaacacacaauugaucuaacugacucagaaaugaacaaacuguuugaaaaaacaaagaagcaacugagggaaaaugcugaggauaugggcaaugguuguuucaaaauauaccacaaaugugacaaugccugcauaggaucaaucagaaauggaacuuaugaccacgauguguacagagaugaagcauuaaacaaccgauuccagaucaagggaguugagcugaagucaggguacaaagauuggauccuauggauuuccuuugccauaucauguuuuuugcuuuguguugcuuuguugggguucaucaugugggccugccaaaaaggcaacauuaggugcaacauuugcauuuga

SEQ ID NO: 39000 - RNA, 1701 nt, Artificial Sequence
  derived and/or modified CDS sequence (wt) from hemagglutinin__InfluenzaA__AEK98388
augaagacuaucauugcuuugagcuacauucuaugucugguuuucgcucaaaaacuuccuggaaaugacaacagcacggcaacgcugugccuugggcaccaugcaguaccaaacggaacgauagugaaaacaaucacgaaugaccaaauugaaguuacuaaugcuacugagcugguucagaguuccucaacaggugaaauaugcgacaguccucaucagauccuugauggaaaaaacugcacacuaauagaugcucuauugggagacccucagugugauggcuuacaaaauaagaaaugggaccuuuuuguugaacgcagcaaagccuacagcaacuguuacccuuaugaugugccggauuaugccucccuuaggucacuaguugccucauccggcacacuggaguuuaacaaugaaagcuucaauuggacuggagucacucaaaacggaacaagcucugcuugcauaaggagaucuaaaaacaguuucuuuaguagauugaauugguugacccacuuaaacuucaaauacccagcauugaacgugacuaugccaaacaaugaacaauuugacaaauuguacauuugggggguucaccacccggguacggacaaagaccaaaucuuccuguaugcucaagcaucaggaagaaucacagucucuaccaaaagaagccaacaaacugcaaucccgaauaucggaucuagacccagaguaaggaauaucccuagcagaauaagcaucuauuggacaauaguaaaaccgggagacauacuuuugauuaacagcacagggaaucuaauugcuccuagggguuacuucaaaauacgaagugggaaaagcucaauaaugagaucagaugcacccauuggcaaaugcaauucugaaugcaucacuccaaauggaagcauucccaaugacaaaccauuccaaaauguaaacaggaucacauacggggccugucccagauauguuaagcaaaacacucugaaauuggcaacagggaugcgaaauguaccagagaaacaaacuagaggcauauuuggcgcaaucgcggguuucauagaaaaugguugggagggaaugguggaugguugguacgguuucaggcaucaaaauucugagggaagaggacaagcagcagaucucaaaagcacucaagcagcaaucgaucaaaucaaugggaagcugaauagauugaucgggaaaaccaacgagaaauuccaucagauugaaaaagaauucucagaagucgaagggagaauucaggaccucgagaaauauguugaggacacuaaaauagaucucuggucauacaacgcggagcuucuuguugcccuggagaaccaacauacaauugaucuaacugacucagaaaugaacaaacuguuugaaaaaacaaagaagcaacugagggaaaaugcugaggauaugggcaaugguuguuucaaaauauaccacaaaugugacaaugccugcauaggaucaaucagaaauggaacuuaugaccacgauguauacagagaugaagcauuaaacaaccgguuucagaucaagggaguugagcugaagucaggguacaaagauuggauccuauggauuuccuuugccauaucauguuuuuugcuuuguguugcuuuguugggguucaucaugugggccugccaaaaaggcaacauuaggugcaacauuugcauuuga

SEQ ID NO: 39001 - RNA, 1701 nt, Artificial Sequence
  derived and/or modified CDS sequence (wt) from hemagglutinin__InfluenzaA__AEK98390
augaagacuaucauugcuuugagcuacauucuaugucugguuuucgcucaagaacuuccuggaaaugacaacagcacggcaacgcugugccuugggcaccaugcagugccaaacggaacgauagugaaaacaaucacgaaugaccaaauugaaguuacuaaugcuacugagcugguucagaguuccucaacaggugaaauaugcaacaguccucaucagauucuugauggagaaaacugcacacuaauagaugcucuauugggagacccucagugugauggcuuccaaaacaagaaaugggaccuuuuuguugaacgaagcaaagcccacagcaacuguuacccuuaugaugugccggauuaugccucccuuaggucacuaguugccucauccggcacacuggaguuuaacaaugaaagcuucaauuggacuggagucacucaaaacggaacaagcucugcuugcauaaggagaucuaauaauaguuucuuuaguagauugaauugguugacccacuugaacuucaaauacccagcauugaacgugacuaugccaaacaaugaacaauuugacaaauuguacauuugggggguucaccacccggguacggacaaggaccaaaucuuccuguaugcucaagcaucaggaagaaucacaguaucuaccaaaagaagccaacaagcuguaauuccgaauaucggaucuagacccagaguaaggaauaucccuagcagaguaagcaucuauuggacaauaguaaaaccgggagauauacuuuugauuaacagcacagggaaucuaauugcuccuagggguuacuucaaaauacgaagugggaaaagcucaauaaugagaucagaugcacccauuggcaaaugcaaaucugcaugcaucacuccaaauggaagcauucccaaugacaaaacauuccaaaauguaaacaggaucacauacggggccugucccagauauguuaagcaaaacacucugaaauuggcaacaggaaugcgaaauguaccagagaaacaaacuagaggcauauuuggcgcaauagcggguuucauagaaaaugguugggagggaaugguggaugguugguaugguuucaggcaucaaaauucugagggaaggggacaagcagcagaucucaaaagcacucaagcagcaaucgaucaaaucaaugggaagcugaauagauugaucgggaaaaccaacgagaaauuccaucagauugaaaaagaauucucagaagucgaagggagaauucaggaccucgagaaauacguugaggacacuaaaauagaucucuggucauacaacgcggagcuucuuguugcccuggagaaccaacacacaauugaucuaacugacucagaaaugaacaaacuguuugaaaaaacaaagaagcaacugagggaaaaugcugaggauaugggcaaugguuguuucaaaauauaccacaaaugugacaaugccugcauaggaucgaucagaaauggaacuuaugaccacgauguguacagagaugaagcauuaaacaaccgauuccagaucaagggaguugagcugaagucaggguacaaagauuggauccuauggauuuccuuugccauaucauguuuuuugcuuuguguugcucuguugggguucaucaugugggccugccaaaaaggcaacauuaggugcaacauuugcauuuga

SEQ ID NO: 39002 - RNA, 1701 nt, Artificial Sequence
  derived and/or modified CDS sequence (wt) from hemagglutinin__InfluenzaA__AEK98392
augaagacuaucauugcuuugagcuacauucuaugucugguuuucgcucaaaaacuuccuggaaaugacaacagcacggcaacgcugugccuugggcaccaugcagugccaaacggaacaauagugaaaacaaucacggaugaccaaauugaaguuacuaaugcuacugagcugguucagaguuccucaacaggugaaauaugcaacaguccucaucagauccuugauggagaaaacugcacacuaauagaugcucuauugggagacccucagugugauggcuuccaaaacaagaaaugggaccuuuuuguugaacgaagcaaagcccacagcaacuguuacccuuaugaugugccggauuaugccucccuuaggucacuaguugccucauccggcacacuggaguuuaacaaugaaaacuucaauuggacuggagucacucaaaacggaacaagcucugcuugcauaaggagaucuaauaauaguuucuuuaguagauugaauugguugacccacuugaacuucaaauacccagcauugaacgugaccaugccaaacaaugaacaauuugacaaauuguacauuugggggguucaccacccggguacggacaaggaccaaaucuuccuguaugcucaagcaucaggaagaaucacaguaucuaccaaaagaagccaacaagcuguaauuccgaauaucggaucuagacucagaguaaggaauaucccuagcagaguaagcaucuauuggacaauaguaaaaccgggagauauacuuuugauuaacagcacagggaaucuaauugcuccuagggguuacuucaaaauacgaagugggaaaagcucaauaaugagaucagaugcacccauuggcaaaugcaauucugcaugcaucacuccaaauggaagcauucccaaugacaaaccauuccaaaauguaaacaggauaacauacggggccugucccagauauguuaagcaaaacacucugaaauuggcaacaggaaugcgaaauguaccagagaaacaaacuagaggcauauuuggcgcaauagcggguuucauagaaaaugguugggagggaaugguggaugguugguacgguuucaggcaucaaaauucugagggaaggggacaagcagcagaucucaaaagcacucaagcagcaaucgaucaaaucaaugggaagcuaaauagauugaucgggaaaaccaacgagaaauuccaucagauugaaaaagaauucucagaagucgaagggagaauucaggaccucgagaaauauguugaggacacuaaaauagaucucuggucauacaacgcggagcuucuuguugcccuggagaaccaacacacaauugaucuaacugacucagaaaugaacaaacuguuugaaaaaacaaagaagcaacugagggaaaaugcugaggauaugggcaaugguuguuucaaaauauaccacaaaugugacaaugccugcauaggaucaaucagaaauggaacuuaugaccacgauguguacagagaugaagcauuaaacaaccgauuccagaucaagggaguugagcugaagucaggguacaaagauuggauccuauggauuuccuuugccauaucauguuuuuugcuuuguguugcuuuguugggguucaucaugugggccugccaaaaaggcaacauuaggugcaacauuugcauuuga

SEQ ID NO: 39003 - RNA, 1701 nt, Artificial Sequence
  derived and/or modified CDS sequence (wt) from hemagglutinin__InfluenzaA__AEK98394
augaagacuaucauugcuuugagcuacauucuaugucugguuuucgcucaaaaacuuccuggaaaugacaacagcacggcaacgcugugccuugggcaccaugcagugccaaacggaacgauagugaaaacaaucacgaaugaccaaauugaagucacuaaugcuacugagcugguucagaguuccucaacaggugaaauaugcaacaguccucaucagauccuugauggagaaaacugcacacuaauagaugcucuauugggagacccucagugugauggcuuccaaaacaagaaaugggaccuuuuuguugaacgaagcaaagcccacagcaacuguuacccuuaugaugugccggauuaugccucccuuaggucacuaguugccucauccggcacacuggaguuuaacaaugaaagcuucaauuggacuggagucacucaaaacggaacaagcucugcuugcauaaggagaucuaauaauaguuucuuuaguagauugaauugguugacccacuuaaacuucaaguacccagcauugaacgugacuaugccaaacaaugaacaauuugacaaauuguacauuugggggguucaccacccggguacggacaaggaccaaaucuuccuguaugcucaagcaucaggaagaaucacaguaucuaccaaaagaagccaacaagcuguaauuccgaauaucggaucuagacucagaguaaggaauaucccuagcagaguaagcaucuauuggacaauaguaaaaccgggagacauacuuuugauuaacagcacagggaaucuaauugcuccuagggguuacuucaaaauacgaagugggaaaagcucaauaaugagaucagaugcacccauuggcaaaugcaauucugcaugcaucacuccaaauggaagcauucccaaugacaaaccauuccaaaauguaaacaggaucacauacggggccugucccagauauguuaagcaaaacacucugaaauuggcaacaggaaugagaaauguaccagagaaacaaacuagaggcauauuuggcgcaauagcggguuucauagaaaaugguugggagggaaugguggaugguugguacgguuucaggcaucaaaauucugagggaaggggacaagcagcagaucucaaaagcacucaagcagcaaucgaucaaaucaaugggaagcugaauagauugaucgggaaaaccaacgagaaauuccaucagauugaaaaagaauucucagaagucgaagggagaauucaggaccucgagaaauauguugaggacacuaaaauagaucucuggucauacaaugcggagcuucuuguugcccuggagaaccaacacacaauugaucuaacugacucagaaaugaacaaacuguuugaaaaaacaaagaagcaacugagggaaaaugcugaggauaugggcaaugguuguuucaaaauauaccacaaaugugacaaugccugcauaggaucaaucagaaauggaacuuaugaccacgauguguacagagaugaagcauuaaacaaccgauuccagaucaagggaguugagcugaagucaggguacaaagauuggauccuauggauuuccuuugccauaucauguuuuuugcuuuguguugcuuuguugggguucaucaugugggccugccaaaaaggcaacauuaggugcaacauuugcauuuga

SEQ ID NO: 39004 - RNA, 1701 nt, Artificial Sequence
  derived and/or modified CDS sequence (wt) from hemagglutinin__InfluenzaA__AEK98396
augaagacuaucauugcuuugagcuacauucuaugucugguuuucgcucaaaaacuuccuggaaaugacaacagcacggcaacgcugugccuugggcaccaugcaguaccaaacggaacgauagugaaaacaaucacgaaugaccaaauugaaguuacuaaugcuacugagcugguucagaguuccucaacaggugaaauaugcgacaguccucaucagauccuugauggagaaaacugcacacuaauagaugcucuauugggagacccucagugugauggcuuccaaaauaagaaaugggaccuuuuuguugaacgcagcaaagccuacagcaacuguuacccuuaugaugugccagauuaugccucccuuaggucacuaguugccucauccggcacacuggaguuuaacaaugaaagcuucaauuggacuggagucacucaaaacggaacaagcucugcuuguauaaggagaucuaauaaaaguuucuuuaguagauugaauugguugacccacuuaaaauucaaauacccagcauugaacgugacuaugccaaacaaugaacaauuugacaaauuguacauuugggggguucaccacccggguacggacaaugaccaaaucucccuguaugcucaagcaucaggaagaaucacagucucuaccaaaagaagccaacaaacuguaaucccgaauaucggaucuagacccagaguaaggaauaucccuagcagaauaagcaucuauuggacaauaguaaaaccgggagacauacuuuugauuaacagcacagggaaucuaauugcuccuagggguuacuucaaaauacgaagugggaaaagcucaauaaugagaucagaugcacccauuggcaaaugcaauucugaaugcaucacuccaaauggaagcauucccaaugacaaaccauuccaaaauguaaacaggaucacauacggggccugucccagauauguuaagcaaaacacucuaaaauuggcaacagggaugcgaaauguaccagagaaacaaacuagaggcauauuuggcgcaaucgcggguuucauagaaaaugguugggagggaaugguggaugguugguacgguuucaggcaucaaaauucugaaggaagaggacaagcagcagaucucaaaagcacucaagcagcaaucgaucaaaucaaugggaagcugaauagauugaucgggaaaaccaacgagaaauuccaucagauugaaaaagaauucucagaagucgaagggagaauucaggaccucgagaaauauguugaggacaccaaaauagaucucuggucauacaacgcggagcuucuuguugcccuggagaaccaacauacaauugaucuaacugacucagaaaugaacaaacuguuugaaaaaacaaagaagcaacugagggaaaaugcugaggauaugggcaaugguuguuucaaaauauaccacaaaugugacaaugccuguauaggaucaaucagaaaugggacuuaugaccacgauguauacagagaugaagcauuaaacaaccgauuccagaucaagggaguugaguugaagucaggguacaaagauuggauccuauggaucuccuuugccauaucauguuuuuugcuuuguauugcuuuguugggguucaucaugugggccugccaaaaaggcaacauuaggugcaacauuugcauuuga

SEQ ID NO: 39005 - RNA, 1701 nt, Artificial Sequence
  derived and/or modified CDS sequence (wt) from hemagglutinin__InfluenzaA__AEK98398
augaagacuaucauugcuuugagcuacauucuaugucugguuuucgcucaaaaacuuccuggaaaugacaacagcacggcaacgcugugccuugggcaccaugcaguaccaaacggaacgauagugaaaacaaucacgaaugaccaaauugaaguuacuaaugcuacugagcugguucagaguuccucaacaggugaaauaugcgacaguccucaucagauccuugauggaaaaaacugcacacuaauagaugcucuauugggagacccucagugugauggcuuacaaaauaagaaaugggaccuuuuuguugaacgcagcaaagccuacagcaacuguuacccuuaugaugugccggauuaugccucccuuaggucacuaguugccucauccggcacacuggaguuuaacaaugaaagcuucaauuggacuggagucacucaaaacggaacaagcucugcuugcauaaggagaucuaaaaacaguuucuuuaguagauugaauugguugacccacuuaaacuucaaauacccagcauugaacgugacuaugccaaacaaugaacaauuugacaaauuguacauuugggggguucaccacccggguacggacaaagaccaaaucuuccuguaugcucaagcaucaggaagaaucacagucucuaccaaaagaagccaacaaacugcaaucccgaauaucggaucuagacccagaguaaggaauaucccuagcagaauaagcaucuauuggacaauaguaaaaccgggagacauacuuuugauuaacagcacagggaaucuaauugcuccuagggguuacuucaaaauacgaagugggaaaagcucaauaaugagaucagaugcacccauuggcaaaugcaauucugaaugcaucacuccaaauggaagcauucccaaugacaaaccauuccaaaauguaaacaggaucacauacggggccugucccagauauguuaagcaaaacacucugaaauuggcaacagggaugcgaaauauaccagagaaacaaacuagaggcauauuuggcgcaaucgcggguuucauagaaaaugguugggagggaaugguggaugguugguacgguuucaggcaucaaaauucugagggaagaggacaagcagcagaucucaaaagcacucaagcagcaaucgaucaaaucaaugggaagcugaauagauugaucgggaaaaccaacgagaaauuccaucagauugaaaaagaauucucagaagucgaagggagaauucaggaccucgagaaauauguugaggacacuaaaauagaucucuggucauacaacgcggagcuucuuguugcccuggagaaccaacauacaauugaucuaacugacucagaaaugaacaaacuguuugaaaaaacaaagaagcaacugagggaaaaugcugaggauaugggcaaugguuguuucaaaauauaccacaaaugugacaaugccugcauaggaucaaucagaaauggaacuuaugaccacgauguauacagagaugaagcauuaaacaaccgguuucagaucaagggaguugagcugaagucaggguacaaagauuggaucauauggauuuccuuugccauaucauguuuuuugcuuuguguugcuuuguugggguucaucaugugggccugccaaaaaggcaacauuaggugcaacauuugcauuuga

SEQ ID NO: 39006 - RNA, 1701 nt, Artificial Sequence
  derived and/or modified CDS sequence (wt) from hemagglutinin__InfluenzaA__AEK98400
auggagacuaucauugcuuugagcuacauucuaagucugguuuucgcucaaaaacuuccuggaaaugacaacagcacggcaacgcugugccuugggcaccaugcaguaccaaacgggacgauagugaagacaaucacgaacgaccaaauugaaguuacuaaugcuacugagcugguucagaguuccucaacaggugaaauaugcgacaguccucaucagauccuugauggagaaaacugcacacuaauagaugcucuauugggagacccucagugugauggcuuucaaaauaagaaaugggaccuuuuuguugaacgcagcaaagccuacagcaacuguuacccuuaugaugugccggauuaugccucccuuaggucacuaguugccucauccggcacacuggaguuuaacaaugaaaacuucaauuggacuggagucacucaaaacggaacaagcucugcuugcauaaggagaucuaauaacaguuucuuuaguagauugaauugguugacccacuuaagauucaaauacccagcauugaacgugaccaugccaaacaaugaagaauuugacaaauuguacauuugggggguucaccacccggguacggacaaugaccaaaucuuccuguaugcucaagcaucaggaagaaucacagucucuaccaaaagaagccaacaaacuguaaucccgaauaucggaucuagacccagaguaaggaauaucccuagcagaauaagcaucuauuggacaauaguaaaaccgggagacauacuuuugauuaacagcacagggaaucuaauugcuccuagggguuacuucaaaauacgaagugggaaaagcucaauaaugagaucagaugcacccauuggcaaaugcaguucugaaugcaucacuccaaauggaagcaucccuaaugacaaaccauuccaaaauguaaacaggaucacauacggggccugucccagauauguuaagcaaaacacucugaaauuggcaacagggaugcgaaauguaccagagaaacaaacuagaggcauauuuggcgcaaucgcggguuucauagaaaaugguugggagggaaugguggaugguugguacgguuucaggcaucaaaauucugagggaauaggacaagcagcagaucucaaaagcacucaagcagcaaucgaucaaaucaaugggaagcugaauagguugaucgggaaaaccaacgagaaauuccaucagauugaaaaagaauucucagaaaucgaagggagaauucaggaccucgagaaauauguugaggacaccaaaauagaucucuggucauacaacgcggagcuucuuguugcccuggagaaccaacauacaauugaucuaacugauucagaaaugaacaaacuguuugaaaaaacaaagaagcaacugagggaaaaugcugaggauaugggcaaugguuguuucaagaucuaccacaaaugugacaaugccugcauaggaucaaucagaaauggaacuuaugaccacgauguauacagagaugaagcauuaaacaaccgguuccagaucaagggcguugagcugaagucaggauacaaagauuggauccuauggauuuccuuugccauaucauguuuuuugcuuuguguugcuuuguugggguucaucaugugggccugccaaaaaggcaacauuaggugcaacauuugcauuuga

SEQ ID NO: 39007 - RNA, 1701 nt, Artificial Sequence
  derived and/or modified CDS sequence (wt) from hemagglutinin__InfluenzaA__AEK98402
augaagacuaucauugcuuugagcuacauucuaugucuggguuucgcucaaaaacuuccuggaaaugacaacagcacggcaacgcugugccuugggcaccaugcaguaccaaacggaacgauagugaaaacaaucacgaaugaccaaauugaaguuacuaaugcuacugagcugguucagaguuccucaacaggugaaauaugcgacaguccucaucagauccuugauggaaaaaacugcacacuaauagaugcucuauugggagacccucagugugauggcuuccaaaauaagaaaugggaccuuuuuguugaacgcagcaaagccuacagcaacuguuacccuuaugaugugccggauuaugccucccuuaggucacuaguugccucauccggcacacuggaguuuaacaaugaaagcuucaauuggacuggagucacucaaaacggaacaagcucugcuugcauaaggagaucuaaaaacaguuucuuuaguagauugaauugguugacccacuuaaacuucaaauacccagcauugaacgugacuaugccaaacaaugaacaauuugacaaauuguacauuugggggguucaccacccggguacggacaaagaccaaaucuuccuguaugcucaagcaucaggaagaaucacagucucuaccaaaagaagccaacaaacugcaaucccgaauaucggaucuagacccagaguaaggaauaucccuagcagaauaagcaucuauuggacaauaguaaaaccgggagacauacuuuugauuaacagcacagggaaucuaauugcuccuagggguuacuucaaaauacgaagugggaaaagcucaauaaugagaucagaugcacccauuggcaaaugcaauucugaaugcaucacuccaaauggaagcauucccaaugacaaaccauuccaaaauguaaacaggaucacauacggggccugucccagauauguuaagcaaaacacucugaaauuggcaacagggaugcgaaauguaccagagaaacaaacuagaggcauauuuggcgcaaucgcggguuucauagaaaaugguugggagggaaugguggaugguugguacgguuucaggcaucaaaauucugagggaagaggacaagcagcagaucucaaaagcacucaagcagcaaucaaucaaaucaaugggaagcugaauagauugaucgggaaaaccaacgagaaauuccaucagauugaaaaagaauucucagaagucgaagggagaauucaggaccucgagaaauacguugaggacacuaaaauagaucucuggucauacaacgcggagcuucuuguugcccuggagaaccaacauacaauugaucuaacugacucagaaaugaacaaacuguuugaaaaaacaaagaagcaacugagggaaaaugcugaggauaugggcaaugguuguuucaaaauauaccacaaaugugacaaugccugcauaggaucaaucagaaauggaacuuaugaccacgauguauacagagaugaagcauuaaacaaccgguuucagaucaagggaguugagcugaagucaggguacaaagauuggauccuauggauuuccuuugccauaucauguuuuuugcuuuguguugcuuuguugggguucaucaugugggccugccaaaaaggcaacauuaggugcaacauuugcauuuga

SEQ ID NO: 39008 - RNA, 1701 nt, Artificial Sequence
  derived and/or modified CDS sequence (wt) from hemagglutinin__InfluenzaA__AEK98404
augaagacuaucauugcuuugagcuacauucuaagucugguuuucgcucaaaaacuuccuggaaaugacaacagcacggcaacgcugugccuugggcaccaugcaguaccaaacgggacgauagugaaaacaaucacgaacgaccaaauugaaguuacuaaugcuacugagcugguccagaguuccucaacaggugaaauaugugacaguccucaucagauccuugauggagaaaacugcacacuaauagaugcucuauugggagacccucagugugauggcuuccaaaauaagaaaugggaccuuuuuguugaacgcagcaaagcuuacagcaacuguuacccuuaugauguuccggauuaugccucccuuaggucacuaguugccucauccggcacacuggaguuuaacaaugaaaacuucaauuggacuggagucacucaaaacggaacaagcucugcuugcauaaggagaucuaauaacaguuucuuuaguagauugaauugguugacccacuuaagauucaaauacccagcauugaacgugacuaugccaaacaaugaagaauuugacaaauuguacauuuggggaguucaccacccggguacggacaaugaccaaaucuuccuguaugcucaagcaucaggaagaaucacagucucuaccaaaagaagccaacaaacuguaaucccgaauaucggaucuagacccagaguaaggaauaucccuagcagaauaagcaucuauuggacaauaguaaaaccaggagacauacuuuugauuaacagcacagggaaucuaauugcuccuagggguuacuucaaaaugcgaagugggaaaagcucaauaaugagaucagaugcacccauuggcaaaugcaauucugaaugcaucacuccaaauggaagcauccccaaugacaaaccauuccaaaauguaaacaggaucacauacggggccugucccagauauguuaagcaaaacacucugaaauuggcaacagggaugcgaaauguaccagagaaacaaacuagaggcauauuuggcgcaaucgcggguuucauagaaaaugguugggagggaaugguggaugguugguacgguuucaggcaucaaaauucugagggaauaggacaagcagcagaucucaaaagcacucaagcugcaaucgaucaaaucaaugggaagcugaauagguugauugggaaaaccaacgagaaauuccaucagauugaaaaagaauucucagaagucgaagggagaauucaggaccuugagaaauacguugaggacaccaaaauagaucucuggucauacaacgcggagcuucuuguugcccuggagaaccaacauacaauugaucuaacugauucagaaaugaacaaacuguuugaaaaaacaaagaagcaacugagggaaaaugcugaggauaugggcaaugguuguuucaaaaucuaccacaaaugugacaaugccugcauaggaucaaucagaaauggaacuuaugaccacgauguauacagagaugaagcauuaaacaaccgguuccagaucaagggcguugagcugaagucaggauacaaagauuggauccuauggauuuccuuugccauaucauguuuuuugcuuuguguugcuuuguugggguucaucaugugggccugccaaaaaggcaacauuaggugcaacauuugcauuuga

SEQ ID NO: 39009 - RNA, 1701 nt, Artificial Sequence
  derived and/or modified CDS sequence (wt) from hemagglutinin__InfluenzaA__AEK98406
augaagacuaucauugcuuugagcuacauucuaagucugguuuucgcucaaaaacuuccuggaaaugacaacagcacggcaacgcugugccuugggcaccaugcaguaccaaacgggacgauagugaaaacaaucacgaacgaccaaauugaaguuacuaaugcuacugagcugguucagaguuccucaacaggugaaauaugcgacaguccucaucagauccuugauggagaaaacugcacacuaauagaugcucuauugggagacccucagugugauggcuuccaaaauaagaaaugggaccuuuuuguugaacgcagcaaagccuacagcaacuguuacccuuaugaugugccggauuaugccucccuuaggucacuaguugccucauccggcacacuggaguuuaacaaugaaaacuucaauuggacuggagucacucaaaacggaacaagcucugcuugcauaaggagaucuaauaacaguuucuuuaguagauugaauugguugacccacuuaagauucaaauacccagcauugaacgugacuaugccaaacaaugaagaauuagacaaauuguacauuugggggguucaccacccggguacggacaaugaccaaaucuuccuguaugcucaagcaucaggaagaaucacagucucuaccaaaagaagccaacaaacuguaaucccgaauaucggaucuagacccagaguaaggaauaucccuagcagaauaagcaucuauuggacaauaguaaaaccgggagacauacuuuugauuaacagcacagggaaucuaauugcuccuagggguuacuucaaaauacgaagugggaaaagcucaauaaugagaucagaugcacccauuggcaaaugcaauucugaaugcaucacuccaaauggaagcauccccaaugacaaaccauuccaaaauguaaacaggaucacauacggggccugucccagauauguuaagcaaaacacucugaaauuggcaacagggaugcgaaauguaccagagaaacaaacuagaggcauauuuggcgcaaucgcggguuucauagaaaaugguugggagggaaugguggaugguugguacgguuucaggcaucaaaauucugagggaauaggacaagcagcagaucucaaaagcacucaagcagcaaucgaucaaaucaaugggaagcugaauagguugaucgggaaaaccaacgagaaauuccaucagauugaaaaagaauucucagaagucgaagggagaauucaggaccucgagaaauauguugaggacaccaaaauagaucucuggucauacaacgcggagcuucuuguugcccuggagaaccaacauacaauugaucuaacugauucagaaaugaacaaacuguuugaaaaaacaaagaagcaacugagggaaaaugcugaggauaugggcaaugguuguuucaaaaucuaccacaaaugugacaaugccugcauaggaucaaucagaaauggaacuuaugaccacgauguauacagagaugaagcauuaaacaaccgguuccagaucaagggcguugagcugaagucaggauacaaagauuggauccuauggauuuccuuugccauaucauguuuuuugcuuuguguugcuuuguugggguucgucaugugggccugccaaaaaggcaacauuaggugcaacauuugcauuuga

SEQ ID NO: 39010 - RNA, 1701 nt, Artificial Sequence
  derived and/or modified CDS sequence (wt) from hemagglutinin__InfluenzaA__AEL11687
augaagacuaucauugcuuugagcuacauucuaugucugguuuucgcccaaaaacuucccggaaaugacaacagcacggcaacgcugugccuugggcaccaugcaguaccaaacggaacgauagugaaaacaaucacgaaugaccaaauugaaguuacuaaugcuacugagcugguucagaguuccucaacagguggaauaugcgacaguccucaucagauccuugauggagaaaacugcacacuaauagaugcucuauugggagacccucagugugauggcuuccaaaauaagaaaugggaccuuuuuguugaacgcagcaaagccuacagcaacuguuacccuuaugauguaccggauuaugccucccuuaggucacuaguugccucauccggcacacuggaguuuaacaaugaaagcuucaauuggacuggagucacucaaaauggaacaagcucuucuugcaaaaggagaucuaauaacaguuucuuuaguagauugaauugguugacccacuuaaaauucaaauacccagcauugaacgugacuaugccaaacaaugaaaaauuugacaaauuguacauuugggggguucaccacccgguuacggacaaugaccaaaucagacuauaugcucaagcuucaggaagaaucacagucucuaccaaaagaagccaacaaacuguaaucccgaauaucggauauagacccaggguaagggauauccccagcagaauaagcaucuauuggacaauaguaaaaccgggagacauacuuuugauuaacagcacagggaaucuaauugcuccucgggguuacuucaaaauacgaagugggaaaagcucaauaaugagaucagaugcacccauuggcaaaugcaauucugaaugcaucacuccaaauggaagcauucccaaugacaaaccauuucaaaauguaaacaggaucacauauggggccugucccagauauguuaagcaaaacacucugaaauuggcaacagggaugcgaaauguaccagagaaacaaacuagaggcauauuuggcgcaaucgcggguuucauagaaaaugguugggagggaaugguggaugguugguacgguuucaggcaucaaaauucugagggaauaggacaagcagcagaucucaaaagcacucaagcagcaaucaaccaaaucaaugggaaacugaauagguugaucgggaaaaccaacgagaaauuccaucagauugaaaaagaauucucagaaguagaagggagaauucaggaccucgagaaauauguugaggacacuaaaauagaucucuggucauacaacgcggagcuucuuguugcccuggagaaccaacauacaauugaucuaacugacucagaaaugaacaaacuguuugaaagaacaaagaagcaacugagggaaaaugcugaggauaugggcaaugguuguuucaaaauauaccacaaaugugacaaugccugcauagggucaaucagaaauggaacuuaugaccaugauguauacagagaugaagcauuaaacaaccgguuccagaucaaagguguugagcugaagucaggauacaaagauuggauccuauggauuuccuuugccauaucauguuuuuugcuuuguguuguuuuguugggguucaucaugugggccugccaaaaaggcaacauuaggugcaacauuugcauuuga

SEQ ID NO: 39011 - RNA, 1692 nt, Artificial Sequence
  derived and/or modified CDS sequence (wt) from hemagglutinin__InfluenzaA__AEL31632
auggagaaaauagugcuucuucuugcaauagucagucuuguuaaaagugaucagauuugcauugguuaccaugcaaacaacucgacagagcagguugacacaauaauggaaaagaacgucacuguuacacacgcccaagacauacuggaaaagacacacaacgggaaacucugcaaucuagauggagugaagccucuaauuuuaagagauuguagcguagccggauggcuccucgggaacccaaugugcgacgaauuccucaaugugccggaauggucuuacauaguggagaagaucaauccagccaaugaccucuguuauccagggaauuucaacgacuaugaagaacugaaacaccuauugagcagaauaaaccauuuugagaaaauucagaucauccccaaaaguucuuggucagaucaugaagccucaggagugagcucaguauguccauaccagggaagauccuccuuuuuuagaaaugugguauggcuuaccaaaaaggacaaugcauacccaacaauaaagagaaguuacaauaauaccaaccaagaagaucuuuugguacuaugggggauucaccauccaaaugaugcggcagagcagacaaggcuuuaucaaaacccaacuaccuauauuuccguugggacaucaacacuaaaccagagauugguaccaaaaauagcuacuagaucuaagguaaacgggcaaaguggaaggauggaguucuuuuggacaauuuuaaaaucgaaugaugcaauaaacuuugagaguaauggaaauuucauugcuccagaaaaugcauacaaaauugucaagaaaggggacucaacaauuaugaaaagugaguuggaauaugguaacugcaacaccaagugucagacuccaauaggggcgauaaacuccaguaugccauuccacaacauccacccucucaccaucggggaaugccccaaauaugugaaaucaaacagauuaguccuugcuacugggcuaagaaauagcccucaaggagagacgcgaggacuauuuggagcuauagcagguuuuauagagggaggauggcagggaaugguagaugguugguauggguaccaccauagcaacgagcaggggaguggguacgcugcagacaaagaauccacucaaaaggcaauagauggagucaccaauaaggucaacucaaucauugacaaaaugaacacucaguuugaggcuguuggaagggaauuuaauaacuuagaaaggagaauagaaaauuuaaacaagaagauggaagacggauuccuagaugucuggacuuauaaugcugaacuucugguucucauggaaaaugagagaacucuagacuuucaugacucaaaugucaagaaccuuuacgacaagguccggcuacagcuuagggauaaugcaaaggagcuugguaacgguuguuucgaguucuaucacagaugugauaaugaauguauggaaaguguaagaaacggaacguaugacuacccgcaguauucagaagaagcaagauuaaaaagagaggaaauaaguggaguaaaauuggagucaauaggaacuuaccaaauacugucaauuuauucaacaguggcgagcucccuagcacuggcaaucaugguggcuggucuauuuuuauggaugugcuccaauggaucguuacaaugcagaauuugcauuuaa

SEQ ID NO: 39012 - RNA, 1701 nt, Artificial Sequence; identical to SEQ ID NO: 38932
  derived and/or modified CDS sequence (wt) from hemagglutinin__InfluenzaA__AEL89297

SEQ ID NO: 39013 - RNA, 1701 nt, Artificial Sequence
  derived and/or modified CDS sequence (wt) from hemagglutinin__InfluenzaA__AEL89307
augaaggcaauacuaguaguucugcuauauacauuagcaaccgcaaaugcagacacauuauguauagguuaucaugcgaacaauucaacagacacuguagacacaguacuagaaaagaauguaacaguaacacacucuguuaaccuucuagaagacaagcaugacgggaaacuaugcaaacuaagagggguagccccauugcauuuggguaaauguaacauugcuggcuggauccugggaaauccagagugugaaucacucuccacagcaagcucaugguccuacauuguggaaacaucuaguucagacaauggaacguguuacccaggagauuucaucgauuaugaagagcuaagagagcaauugagcucagugucaucauuugaaagguuugagauauuccccaagacaaguucauggcccaaucaugacucgaacaaagguguaacggcagcauguccucaugcuggagcaaaaagcuucuacaaaaauuuaauauggcuaguuaaaaaaggaaauucauacccaaagcucagcaaauccuacauuaaugauaaagggaaagaaguccucgugcuauggggcauucaccauccaucuacuagugcugaccaacaaagucucuaucagaaugcagaugcauauguuuuuguggggacaucaagauacagcaagaaguucaagccggaaauagcaauaagacccaaagugagggaucaagaagggagaaugaacuauuacuggacacuaguagagccgggagacaaaauaacauucgaagcaacuggaaaucuagugguaccgagauaugcauucgcaauggaaagaaaugcuggaucugguauuaucauuucagauacaccaguccacgauugcaaugcaacuugucagacacccaagggugcuauaaacaccagccucccauuucagaauauacauccgaucacaauuggaaaauguccaaaauauguaaaaagcacaaaauugagacuggccacaggauugaggaaugucccgucuauucaaucuagaggccuauuuggggccauugccgguuucauugaagggggguggacagggaugguagauggaugguacgguuaucaccaucaaaaugagcaggggucaggauaugcagccgaccugaagagcacacagaaugccauugacaagauuacuaacaaaguaaauucuguuauugaaaagaugaauacacaguucacagcaguaggcaaagaguucaaccaccuggaaaaaagaauagagaauuuaaauaaaaaaguugaugaugguuuccuggacauuuggacuuacaaugccgaacuguugguucuauuggaaaaugaaagaacuuuggacuaccacgauucaaaugugaagaacuuauaugaaaagguaagaagccaguuaaaaaacaaugccaaggaaauuggaaacggcugcuuugaauuuuaccacaaaugcgauaacacgugcauggaaagugucaaaaaugggacuuaugacuacccaaaauacucagaggaagcaaaauuaaacagagaagaaauagaugggguaaagcuggaaucaacaaggauuuaccagauuuuggcgaucuauucaacugucgccaguucauugguacugguagucucccugggggcaaucaguuucuggaugugcucuaaugggucucuacaguguagaauauguauuuaa

SEQ ID NO: 39014 - RNA, 1701 nt, Artificial Sequence; identical to SEQ ID NO: 38933
  derived and/or modified CDS sequence (wt) from hemagglutinin__InfluenzaA__AEL89317

SEQ ID NO: 39015 - RNA, 1701 nt, Artificial Sequence; identical to SEQ ID NO: 38933
  derived and/or modified CDS sequence (wt) from hemagglutinin__InfluenzaA__AEL89327

SEQ ID NO: 39016 - RNA, 1701 nt, Artificial Sequence; identical to SEQ ID NO: 38933
  derived and/or modified CDS sequence (wt) from hemagglutinin__InfluenzaA__AEL89337

SEQ ID NO: 39017 - RNA, 1701 nt, Artificial Sequence; identical to SEQ ID NO: 38933
  derived and/or modified CDS sequence (wt) from hemagglutinin__InfluenzaA__AEL89347

SEQ ID NO: 39018 - RNA, 1701 nt, Artificial Sequence; identical to SEQ ID NO: 38933
  derived and/or modified CDS sequence (wt) from hemagglutinin__InfluenzaA__AEL89357

SEQ ID NO: 39019 - RNA, 1701 nt, Artificial Sequence; identical to SEQ ID NO: 38933
  derived and/or modified CDS sequence (wt) from hemagglutinin__InfluenzaA__AEL89367

SEQ ID NO: 39020 - RNA, 1701 nt, Artificial Sequence; identical to SEQ ID NO: 38932
  derived and/or modified CDS sequence (wt) from hemagglutinin__InfluenzaA__AEL89391

SEQ ID NO: 39021 - RNA, 1701 nt, Artificial Sequence; identical to SEQ ID NO: 38933
  derived and/or modified CDS sequence (wt) from hemagglutinin__InfluenzaA__AEL89401

SEQ ID NO: 39022 - RNA, 1701 nt, Artificial Sequence; identical to SEQ ID NO: 38933
  derived and/or modified CDS sequence (wt) from hemagglutinin__InfluenzaA__AEL89411

SEQ ID NO: 39023 - RNA, 1701 nt, Artificial Sequence; identical to SEQ ID NO: 38933
  derived and/or modified CDS sequence (wt) from hemagglutinin__InfluenzaA__AEL89421

SEQ ID NO: 39024 - RNA, 1701 nt, Artificial Sequence; identical to SEQ ID NO: 38933
  derived and/or modified CDS sequence (wt) from hemagglutinin__InfluenzaA__AEL89441

SEQ ID NO: 39025 - RNA, 1701 nt, Artificial Sequence; identical to SEQ ID NO: 38933
  derived and/or modified CDS sequence (wt) from hemagglutinin__InfluenzaA__AEL89451

SEQ ID NO: 39026 - RNA, 1701 nt, Artificial Sequence; identical to SEQ ID NO: 38933
  derived and/or modified CDS sequence (wt) from hemagglutinin__InfluenzaA__AEL89461

SEQ ID NO: 39027 - RNA, 1701 nt, Artificial Sequence; identical to SEQ ID NO: 38933
  derived and/or modified CDS sequence (wt) from hemagglutinin__InfluenzaA__AEL89471

SEQ ID NO: 39028 - RNA, 1701 nt, Artificial Sequence
  derived and/or modified CDS sequence (wt) from hemagglutinin__InfluenzaA__AEL89481
augaagguaauacuaguaguucugcuauauacauuugcaaccgcaaaugcagacacauuauguauagguuaucaugcgaacaauucaacagacacuguagacacaguacuagaaaagaauguaacaguaacacacucuguuaaccuucuagaagacaagcauaacgggaaacuaugcaaacuaagagggguagccccauugcauuuggguaaauguaacauugcuggcuggauccugggaaauccagagugugaaucacucuccacagcaagcucaugguccuacauuguggaaacaucuaguucagacaauggaacguguuacccaggagauuucaucgauuaugaggagcuaagagagcaauugagcucagugucaucauuugaaagguuugagauauuccccaagacaaguucauggcccaaucaugacucgaacaaagguguaacggcagcauguccucaugcuggagcaaaaagcuucuacaaaaauuuaauauggcuaguuaaaaaaggaaauucauacccaaagcucagcaaauccuacauuaaugauaaagggaaagaaguccucgugcuauggggcauucaccauccaucuacuagugcugaccaacaaagucucuaucagaaugcagaugcauauguuuuuguggggacaucaagauacagcaagaaguucaagccggaaauagcaauaagacccaaagugagggaucaagaagggagaaugaacuauuacuggacacuaguagagccgggagacaaaauaacauucgaagcaacuggaaaucuagugguaccgagauaugcauucgcaauggaaagaaaugcuggaucugguauuaucauuucagauacaccaguccacgauugcaauacaacuugucagacacccaagggugcuauaaacaccagccucccauuucagaauauacauccgaucacaauuggaaaauguccaaaauauguaaaaagcacaaaauugagacuggccacaggauugaggaaugucccgucuauucaaucuagaggccuauuuggggccauugccgguuucauugaagggggguggacagggaugguagauggaugguacgguuaucaccaucaaaaugagcaggggucaggauaugcagccgaccugaagagcacacagaaugccauugacaagauuacuaacaaaguaaauucuguuauugaaaagaugaauacacaguucacagcaguagguaaagaguucaaccaccuggaaaaaagaauagagaauuuaaauaaaaaaguugaugaugguuuccuggacauuuggacuuacaaugccgaacuguugguucuauuggaaaaugaaagaacuuuggacuaccacgauucaaaugugaagaacuuauaugaaaagguaagaagccaguuaaaaaacaaugccaaggaaauuggaaacggcugcuuugaauuuuaccacaaaugcgauaacacgugcauggaaagugucaaaaaugggacuuaugacuacccaaaauacucagaggaagcaaaauuaaacagagaagaaauagaugggguaaagcuggaaucaacaaggauuuaccagauuuuggcgaucuauucaacugucgccaguucauugguacugguagucucccugggggcaaucaguuucuggaugugcucuaaugggucucuacaguguagaauauguauuuaa

SEQ ID NO: 39029 - RNA, 1701 nt, Artificial Sequence; identical to SEQ ID NO: 38890
  derived and/or modified CDS sequence (wt) from hemagglutinin__InfluenzaA__AEL89491

SEQ ID NO: 39030 - RNA, 1701 nt, Artificial Sequence
  derived and/or modified CDS sequence (wt) from hemagglutinin__InfluenzaA__AEL89501
augaaggcaauacuaguaguucugcuauauacauuugcaaccgcaaaugcagacacauuauguauagguuaucaugcgaacaauucaacagacacuguagacacaguacuagaaaagaauguaacaguaacacacucuguuaaccuucuagaagacaagcauaacgggaaacuaugcaaacuaagagggguagccccauugcauuuggguaaauguaacaucgcuggcuggauccugggaaauccagagugugaaucacucuccacagcaagcucaugguccuacauuguggaaacaucuaguucagacaauggaacguguuacccaggagauuucaucgauuaugaggagcuaagagagcaauugagcucagugucaucauuugaaagguuugagauauuccccaagacaaguucauggcccgaucaugacucgaacaaagguguaacggcagcauguccucaugcuggagcaaaaagcuucuacaaaaauuuaauauggcuaguuaaaaaaggaaauucauacccaaagcucagcaaauccuacauuaaugaugaagggaaagaaguccucgugcuauggggcauucaccauccaucuacuagugcugaccaacaaagucucuaucagaaugcagaugcauauguuuuuguggggacaucaagauacagcaagaaguucaagccggaaauagcaauaagacccaaagugagggaucaagaagggagaaugaacuauuacuggacacuaguagagccgggagacaaaauaacauucgaagcaacuggaaaucuagugguaccgagauaugcauucgcaauggaaagaaaugcuggaucugguauuaucauuucagauacaccaguccacgauugcaauacaacuugucagacacccaagggugcuauaaacaccagccucccauuucagaauauacauccgaucacaauuggaaaauguccaaaauauguaaaaagcacaaaauugagacuggccacaggauugaggaaugucccgucuauucaaucuagaggccuauuuggggccauugccgguuucauugaagggggguggacagggaugguagauggaugguacgguuaucaccaucaaaaugagcaggggucaggauaugcagccgaccugaagagcacacagaaugccauugacaagauuacuaacaaaguaaauucuguuauugaaaagaugaauacacaguucacagcaguagguaaagaguucaaccaccuggaaaaaagaauagagaauuuaaauaaaaaaguugaugaugguuuccuggacauuuggacuuacaaugccgaacuguugguucuauuggaaaaugaaagaacuuuggacuaccacgauucaaaugugaagaacuuauaugaaaagguaagaagccaguuaaaaaacaaugccaaggaaauuggaaacggcugcuuugaauuuuaccacaaaugcgauaacacgugcauggaaagugucaaaaaugggacuuaugacuacccaaaauacucagaggaagcaaaauuaaacagagaagaaauagaugggguaaaacuggaaucaacaaggauuuaccagauuuuggcgaucuauucaacugucgccaguucauugguacugguagucucccugggggcaaucaguuucuggaugugcucuaaugggucucuacaguguagaauauguauuuaa

SEQ ID NO: 39031 - RNA, 1701 nt, Artificial Sequence
  derived and/or modified CDS sequence (wt) from hemagglutinin__InfluenzaA__AEL89511
augaaggcaauacuaguaguucugcuauauacauuugcaaccgcaaaugcagacacauuauguauagguuaucaugcgaacaauucaacagacacuguagacacaguacuagaaaagaauguaacaguaacacacucuguuaaccuucuagaagacaagcauaacgggaaacuaugcaaacuaagagggguagccccauugcauuuggguaaauguaacaucgcuggcuggauccugggaaauccagagugugaaucacucuccacagcaagcucaugguccuacauuguggaaacaucuaguucagacaauggaacguguuacccaggagauuucaucgauuaugaggagcuaagagagcaauugagcucagugucaucauuugaaagguuugagauauuccccaagacaaguucauggcccaaucaugacucgaacaaagguguaacggcagcauguccucaugcuggagcaaaaagcuucuacaaaaauuuaauauggcuaguuaaaaaaggaaauucauacccaaagcucagcaaauccuacauuaaugauaaagggaaagaaguccucgugcuauggggcauucaccauccaucuacuagugcugaccaacaaagucucuaucagaaugcagaugcauauguuuuuguggggacaucaagauacagcaagaaguucaagccggaaauagcaauaagacccaaagugagggaucaagaagggagaaugaacuauuacuggacacuaguagagccgggagacaaaauaacauucgaagcaacuggaaaucuagugguaccgagauaugcauucgcaauggaaagaaaugcuggaucugguauuaucauuucagauacaccaguccacgauugcaauacaacuugucagacacccaagggugcuauaaacaccagccucccauuucagaauauacauccgaucacaauuggaaaauguccaaaauauguaaaaagcacaaaauugagacuggccacaggauugaggaaugucccgucuauucaaucuagaggccuauuuggggccauugccgguuucauugaagggggguggacagggaugguagauggaugguacgguuaucaccaucaaaaugagcaggggucaggauaugcagccgaccugaagagcacacagaaugccauugacaagauuacuaacaaaguaaauucuguuauugaaaagaugaauacacaguucacagcaguagguaaagaguucaaccaccuggaaaaaagaauagagaauuuaaauaaaaaaguugaugaugguuuccuggacauuuggacuuacaaugccgaacuguugguucuauuggaaaaugaaagaacuuuggacuaccacgauucaaaugugaagaacuuauaugaaaagguaagaagccaguuaaaaaacaaugccaaggaaauuggaaacggcugcuuugaguuuuaccacaaaugcgauaacacgugcauggaaagugucaaaaaugggacuuaugacuacccaaaauacucagaggaagcaaaauuaaacagagaagaaauagaugggguaaagcuggaaucaacaaggauuuaccagauuuuggcgaucuauucaacugucgccaguucauugguacugguagucucccugggggcaaucaguuucuggaugugcucuaaugggucucuacaguguagaauauguauuuaa

SEQ ID NO: 39032 - RNA, 1701 nt, Artificial Sequence; identical to SEQ ID NO: 38906
  derived and/or modified CDS sequence (wt) from hemagglutinin__InfluenzaA__AEL89521

SEQ ID NO: 39033 - RNA, 1701 nt, Artificial Sequence
  derived and/or modified CDS sequence (wt) from hemagglutinin__InfluenzaA__AEL89531
augaaggcaauacuaguaguucugcuauauacauuuacaaccgcaaaugcagacacauuauguauagguuaucaugcgaacaauucaacagacacuguagacacaguacuagaaaagaauguaacaguaacacacucuguuaaccuucuagaagacaagcauaacgggaaacuaugccaacuaagagggguagccccauugcauuuggguaaauguaacauugcuggcuggauccugggaaauccagagugugaaucacucuccacagcaagcucaugguccuacauuguggaaacaucuaguucagacaauggaacguguuacccaggagauuucaucgauuaugaggagcuaagagagcaauugagcucagugucaucauuugaaagguuugagauguuccccaagacaaguucauggcccaaucaugacucgaacaaagguguaacggcagcauguccucaugcuggagcaaaaagcuucuacaaaaauuuaauauggcuaguuaaaaaaggaaauucauacccaaagcucagcaaauccuacauuaaugauaaagggaaagaaguccucgugcuauggggcauucaccauccaucuacuagugcugaccaacaaagucucuaucagaaugcagaugcauauguuuuuguggggacaucaagauacagcaagaaguucaagccggaaauagcaauaagacccaaagugagggaucaagaagggagaaugaacuauuacuggacacuaguagagccgggagacaaaauaacauucgaagcaacuggaaaucuagugguaccgagauaugcauucgcaauggaaagaaaugcuggaucugguauuaucauuucagauacaccaguccacgauugcaauacaacuugucagacacccaagggugcuauaaacaccagccucccauuucagaauauacauccgaucacaauuggaaaauguccaaaauauguaaaaagcacaaaauugagacuggccacaggauugaggaaugucccgucuauucaaucuagaggccuauuuggggccauugcugguuucauugaagggggguggacagggaugguagauggaugguacgguuaucaccaucaaaaugagcaggggucaggauaugcagccgaccugaagagcacacagaaugccauugacaagauuacuaacaaaguaaauucuguuauugaaaagaugaauacacaguucacagcaguagguaaagaguucaaccaccuggaaaaaagaauagagaauuuaaauaaaaaaguugaugaugguuuccuggacauuuggacuuacaaugccgaacuguugguucuauuggaaaaugaaagaacuuuggacuaccacgauucaaaugugaagaacuuauaugaaaagguaagaagccaguuaaaaaacaaugccaaggaaauuggaaacggcugcuuugaauuuuaccacaaaugcgauaacacgugcauggaaagugucaaaaaugggacuuaugacuacccaaaauacucagaggaagcaaaauuaaacagagaagaaauagaugggguaaagcuggaaucaacaaggauuuaccagauuuuggcgaucuauucaacugucgccaguucauugguacugguagucucccugggggcaaucaguuucuggaugugcucuaaugggucucuacaguguagaauauguauuuaa

SEQ ID NO: 39034 - RNA, 1701 nt, Artificial Sequence
  derived and/or modified CDS sequence (wt) from hemagglutinin__InfluenzaA__AEL89541
augaaggcaauacuaguaguucugcuauauacauuugcaaccgcaaaugcagacacauuauguauagguuaucaugcgaacaauucaacagacacuguagacacaguacuagaaaagaauguaacaguaacacacucuguuaaccuucuagaagacaagcauaacgggaaacuaugcaaacuaagagggguagccccauugcauuuggguaaauguaacaucgcuggcuggauccugggaaauccagagugugaaucacucuccacagcaagcucaugguccuacauuguggaaacaucuaguucagacaauggaacguguuacccaggagauuucaucgauuaugaggagcuaagagagcaauugagcucagugucaucauuugaaagguuugagauauuccccaagacaaguucauggcccgaucaugacucgaacaaagguguaacggcagcauguccucaugcuggagcaaaaagcuucuacaaaaauuuaauauggcuaguuaaaaaaggaaauucauacccaaagcucagcaaauccuacauuaaugauaaagggaaagaaguccucgugcuauggggcauucaccauccaucuacuagugcugaccaacaaagucucuaucagaaugcagaugcauauguuuuuguggggacaucaagauacagcaagaaguucaagccggaaauagcaauaagacccaaagugagggaucaagaagggagaaugaacuauuacuggacacuaguagagccgggagacaaaauaacauucgaagcaacuggaaaucuagugguaccgagauaugcauucgcaauggaaagaaaugcuggaucugguauuaucauuucagauacaccaguccacgauugcaauacaacuugucagacacccaagggugcuauaaacaccagccucccauuucagaauauacauccgaucacaauuggaaaauguccaaaauauguaaaaagcacaaaauugagacuggccacaggauugaggaaugucccgucuauucaaucuagaggccuauuuggggccauugccgguuucauugaagggggguggacagggaugguagauggaugguacgguuaucaccaucaaaaugagcaggggucaggauaugcagccgaccugaagagcacacagaaugccauugacaagauuacuaacaaaguaaauucuguuauugaaaagaugaauacacaguucacagcaguagguaaagaguucaaccaccuggaaaaaagaauagagaauuuaaauaaaaaaguugaugaugguuuccuggacauuuggacuuacaaugccgaacuguugguucuauuggaaaaugaaagaaccuuggacuaccacgauucaaaugugaagaacuuauaugaaaagguaagaagccaguuaaaaaacaaugccaaggaaauuggaaacggcugcuuugaguuuuaccacaaaugcgauaacacgugcauggaaagugucaaaaaugggacuuaugacuacccaaaauacucagaggaagcaaaauuaaacagagaagaaauagaugggguaaagcuggaaucaacaaggauuuaccagauuuuggcgaucuauucaacugucgccaguucauugguacugguagucucccugggggcaaucaguuucuggaugugcucuaaugggucucuacaguguagaauauguauuuaa

SEQ ID NO: 39035 - RNA, 1701 nt, Artificial Sequence
  derived and/or modified CDS sequence (wt) from hemagglutinin__InfluenzaA__AEL89551
augaaggcaauacuaguaguucugcuauauacauuugcaaccgcaaaugcagacacauuauguauagguuaucaugcgaacaauucaacagacacuguagacacaguacuagaaaagaauguaacaguaacacacucuguuaaccuucuagaagacaagcauaacgggaaacuaugcaaacuaagagggguagccccauugcauuuggguaaauguaacaucgcuggcuggauccugggaaauccagagugugaaucacucuccacagcaagcucaugguccuacauuguggaaacaucuaguucagacaauggaacguguuacccaggagauuucaucgauuaugaggagcuaagagagcaauugagcucagugucaucauuugaaagguuugagauauuccccaagacaaguucauggcccgaucaugacucgaacaaagguguaacggcagcauguccucaugcuggagcaaaaagcuucuacaaaaauuuaauauggcuaguuaaaaaaggaaauucauacccaaagcucagcaaauccuacauuaaugauaaagggaaagaaguccucgugcuauggggcauucaccauccaucuacuagugcugaccaacaaagucucuaucagaaugcagaugcauauguuuuuguggggacaucaagauacagcaagaaguucaagccggaaauagcaauaagacccaaagugagggaucaagaagggagaaugaacuauuacuggacacuaguagagccgggagacaaaauaacauucgaagcaacuggaaaucuagugguaccgagauaugcauucgcaauggaaagaaaugcuggaucugguauuaucauuucagauacaccagcccacgauugcaauacaacuugucagacacccaagggugcuauaaacaccagccucccauuucagaauauacauccgaucacaauuggaaaauguccaaaauauguaaaaagcacaaaauugagacuggccacaggauugaggaaugucccgucuauucaaucuagaggccuauuuggggccauugccgguuucauugaagggggguggacagggaugguagauggaugguacgguuaucaccaucaaaaugagcaggggucaggauaugcagccgaccugaagagcacacagaaugccauugacaagauuacuaacaaaguaaauucuguuauugaaaagaugaauacacaguucacagcaguagguaaagaguucaaccaccuggaaaaaagaauagagaauuuaaauaaaaaaguugaugaugguuuccuggacauuuggacuuacaaugccgaacuguugguucuauuggaaaaugaaagaacuuuggacuaccacgauucaaaugugaagaacuuauaugaaaagguaagaagccaguuaaaaaacaaugccaaggaaauuggaaacggcugcuuugaguuuuaccacaaaugcgauaacacgugcauggaaagugucaaaaaugggacuuaugacuacccaaaauacucagaggaagcaaaauuaaacagagaagaaauagaugggguaaagcuggaaucaacaaggauuuaccagauuuuggcgaucuauucaacugucgccaguucauugguacugguagucucccugggggcaaucaguuucuggaugugcucuaaugggucucuacaguguagaauauguauuuaa

SEQ ID NO: 39036 - RNA, 1701 nt, Artificial Sequence
  derived and/or modified CDS sequence (wt) from hemagglutinin__InfluenzaA__AEL89561
augaaggcaauacuaguaguucugcuauauacauuugcaaccgcaaaugcagacacauuauguauagguuaucaugcgaacaauucaacagacacuguagacacaguacuagaaaagaauguaacaguaacacacucuguuaaccuucuagaagacaagcauaacgggaaauuaugcaaacuaagagggguagccccauugcauuuggguaaauguaacauugcuggcuggauccugggaaauccagagugugaaucacucuccacagcaagcucaugguccuacauuguggaaacaucuaguucaggcaauggaacguguuacccaggagauuucaucgauuaugaggagcuaagagaacaauugagcucagugucaucauuugaaagguuugagauauuccccaagacaaguucauggcccgaucaugacucgaacaaagguguaacggcagcauguccucaugcuggagcaaaaagcuucuacaaaaauuuaauauggcuaguuaaaaaaggaaauucauacccaaagcucagcaaauccuacauuaaugauaaaggaaaagaaguccucgugcuauggggcauucaccauccaucuacuagugcugaccaacaaagucucuaucagaaugcagaugcauauguuuuuguggggacaucaagauacagcaagaaguucaagccggaaauagcaauaagacccaaagugagggaucaagaagggagaaugaacuauuacuggacacuaguagagccgggagacaaaauaacauucgaagcaacuggaaaucuagugguaccgagauaugcauucgcaauggaaagaaaugcuggaucugguauuaucauuucagauacgccaguccacgauugcaauacaacuugucagacacccaagggugcuauaaacaccagccucccauuucagaauauacauccgaucacaaucggaaaauguccaaaauauguaaaaagcacaaaauugagacuggccacaggauugaggaaugucccgucuauucaaucuagaggccuauuuggggccauugccgguuucauugaagggggguggacagggaugguagauggaugguacgguuaucaccaucaaaaugagcaagggucaggauaugcagccgaccugaagagcacacagaaugccauugacaagauuacuaacaaaguaaauucuguuauugaaaagaugaauacacaguucacagcaguagguaaagaguucaaccaccuggaaaaaagaauagagaauuuaaauaaaaaaguugaugaugguuuccuggacauuuggacuuacaaugccgaacuguugguucuguuggaaaaugaaagaacuuuggacuaccacgauucaaaugugaagaacuuauaugaaaagguaagaagccaguuaaaaaacaaugccaaggaaauuggaaacggcugcuuugaauuuuaccacaaaugcgauaacacgugcauggaaagugucaaaaaugggacuuaugacuacccaaaauacucagaggaagcaaaauuaaacagagaagaaauagaugggguaaagcuggaaucaacagagauuuaccagauuuuggcgaucuauucaacugucgccaguucauugguacugguagucucccugggggcaaucaguuucuggaugugcucuaaugggucucuacaguguagaauauguauuuaa

SEQ ID NO: 39037 - RNA, 1701 nt, Artificial Sequence
  derived and/or modified CDS sequence (wt) from hemagglutinin__InfluenzaA__AEL89571
augaaggcaauacuaguaguucugcuauauacauuugcaaccgcaaaugcagacacauuauguauagguuaucaugcgaacaauucaacagacacuguagacacaguacuagaaaagaauguaacaguaacacacucuguuaaccuucuagaagacaagcauaacgggaaacuaugcaaacuaagagggguagccccauugcauuuggguaaauguaacaucgcuggcuggauccugggaaauccagagugugaaucacucuccacagcaagcucaugguccuacauuguggaaacaucuaguucagacaauggaacguguuacccaggagauuucaucgauuaugaggagcuaagagagcaauugagcucagugucaucauuugaaagguuugagauauuccccaagacaaguucauggcccgaucaugacucgaacaaagguguaacggcagcauguccucaugcuggagcaaaaagcuucuacaaaaauuuaauauggcuaguuaaaaaaggaaauucauacccaaagcucagcaaauccuacauuaaugauaaagggaaagaaguccucgugcuauggggcauucaccauccaucuacuagugcugaccaacaaagucucuaucagaaugcagaugcauauguuuuuguggggacaucaagauacagcaagaaguucaagccggaaauagcaauaagacccaaagugagggaucaagaagggagaaugaacuauuacuggacacuaguagagccaggagacaaaauaacauucgaagcaacuggaaaucuagugguaccgagauaugcauucgcaauggaaagaaaugcuggaucugguauuaucauuucagauacaccaguccacgauugcaauacaacuugucagacacccaagggugcuauaaacaccagccucccauuucagaauauacauccgaucacaauuggaaaauguccaaaauauguaaaaagcacaaaauugagacuggccacaggauugaggaaugucccgucuauucaaucuagaggccuauuuggggccauugccgguuucauugaagggggguggacagggaugguagauggaugguacgguuaucaccaucaaaaugagcaggggucaggauaugcagccgaccugaagagcacacagaaugccauugacaagauuacuaacaaaguaaauucuguuauugaaaagaugaauacacaguucacagcaguagguaaagaguucaaccaccuggaaaaaagaauagagaauuuaaauaaaaaaguugaugaugguuuccuggacauuuggacuuacaaugccgaacuguugguucuauuggaaaaugaaagaacuuuggacuaccacgauucaaaugugaagaacuuauaugaaaagguaagaagccaguuaaaaaacaaugccaaggaaauuggaaacggcugcuuugaguuuuaccacaaaugcgauaacacgugcauggaaagugucaaaaaugggacuuaugacuacccaaaauacucagaggaagcaaaauuaaacagagaagaaauagaugggguaaagcuggaaucaacaaggauuuaccagauuuuggcgaucuauucaacugucgccaguucauugguacugguagucucccugggggcaaucaguuucuggaugugcucuaaugggucucuacaguguagaauauguauuuaa

SEQ ID NO: 39038 - RNA, 1701 nt, Artificial Sequence
  derived and/or modified CDS sequence (wt) from hemagglutinin__InfluenzaA__AEL89581
augaaggcaauacuaguaguucugcuauauacauuugcaaccgcaaaugcagacacauuauguauagguuaucaugcgaacaauucaacagacacuguagacacaguacuagaaaagaauguaacaguaacacacucuguuaaccuucuagaagacaagcauaacgggaaacuaugcaaacuaagagggguagccccauugcauuuggguaaauguaacaucgcuggcuggauccugggaaauccagagugugaaucacucuccacagcaagcucaugguccuacauuguggaaacaucuaguucagacaauggaacguguuacccaggagauuucaucgauuaugaggagcuaagagagcaauugagcucagugucaucauuugaaagguuugagauguuccccaagacaaguucauggcccgaucaugacucgaacaaagguguaacggcagcauguccucaugcuggagcaaaaagcuucuacaaaaauuuaauauggcuaguuaaaaaaggaaauucauacccaaagcucagcaaauccuacauuaaugauaaagggaaagaaguccucgugcuauggggcauucaccauccaucuacuagugcugaccaacaaagucucuaucagaaugcagaugcauauguuuuuguggggacaucaagauacagcaagaaguucaagccggaaauagcaauaagacccaaagugagggaucaagaagggagaaugaacuauuacuggacacuaguagagccgggagacaaaauaacauucgaagcaacuggaaaucuagugguaccgagauaugcauucgcaauggaaagaaaugcuggaucugguauuaucauuucagauacaccaguccacgauugcaauacaacuugucagacacccaagggugcuauaaacaccagccucccauuucagaauauacauccgaucacaauuggaaaauguccaaaauauguaaaaagcacaaaauugagacuggccacaggauugaggaaugucccgucuauucaaucuagaggccuauuuggggccauugccgguuucauugaagggggguggacagggaugguagauggaugguacgguuaucaccaucaaaaugagcaggggucaggauaugcagccgaccugaagagcacacagaaugccauugacaagauuacuaacaaaguaaauucuguuauugaaaagaugaauacacaguucacagcaguagguaaagaguucaaccaccuggaaaaaagaauagagaauuuaaauaaaaaaguugaugaugguuuccuggacauuuggacuuacaaugccgaacuguugguucuauuggaaaaugaaagaacuuuggacuaccacgauucaaaugugaagaacuuauaugaaaagguaagaagccaguuaaaaaacaaugccaaggaaauuggaaacggcugcuuugaguuuuaccacaaaugcgauaacacgugcauggaaagugucaaaaaugggacuuaugacuacccaaaauacucagaggaagcaaaauuaaacagagaagaaauagaugggguaaagcuggaaucaacaaggauuuaccagauuuuggcgaucuauucaacugucgccaguucauugguacugguagucucccugggggcaaucaguuucuggaugugcucuaaugggucucuacaguguagaauauguauuuaa

SEQ ID NO: 39039 - RNA, 1701 nt, Artificial Sequence
  derived and/or modified CDS sequence (wt) from hemagglutinin__InfluenzaA__AEL89591
augaaggcaauacuaguaguucugcuauauacauuugcaaccgcaaaugcagacacauuauguauagguuaucaugcgaacaauucaacagacacuguagacacaguacuagaaaagaauguaacaguaacacacucuguuaaucuucuagaagacaagcauaacgggaaacuaugcaaacuaagagggguagccccauugcauuuggguaaauguaacauugcuggcuggauccugggaaauccagagugugaaucacucuccacagcaagcucaugguccuacauuguggaaacaucuaguucagacaauggaacguguuacccaggagauuucaucgauuaugaggagcuaagagagcaauugagcucagugucaucauuugaaagguuugagauauuccccaagacaaguucauggcccaaucaugacucgaacaaagguguaacggcagcauguccucaugcuggagcaaaaggcuucuacaaaaauuuaauauggcuaguuaaaaaaggaaauucauacccaaagcucagcaaauccuacauuaaugauaaagggaaagaaguccucgugcuauggggcauucaccauccaucuacuacugcugaccaacaaagucucuaucagaaugcagauacauauguuuuuguggggacaucaagauacagcaagaaguucaagccggaaauagcaauaagacccaaagugagggaucaagaagggagaaugaacuauuacuggacacuaguagagccgggagacaaaauaacauucgaagcaacuggaaaucuagugguaccgagauaugcauucgcaauggaaagaaaugcuggaucugguauuaucauuucagauacaccaguccacgauugcaauacaacuugucagacacccaagggugcuauaaacaccagccucccauuucagaauauacauccgaucacaauuggaaaauguccaaaauauguaaaaagcacaaaauugagacuggccacaggauugaggaaugucccgucuauucaaucuagaggccuauuuggggccauugccggcuucauugaagggggguggacagggaugguagauggaugguacgguuaucaccaucaaaaugagcaggggucaggauaugcagccgaccugaagagcacacagaaugccauugacaagauuacuaacaaaguaaauucuguuauugaaaagaugaauacacaguucacagcaguagguaaagaguucaaccaccuggaaaaaagaauagagaauuuaaauaaaaaaguugaugaugguuuccuggacauuuggacuuacaaugccgaacuguugguucuauuggaaaaugaaagaacuuuggacuaccacgauucaaaugugaagaacuuauaugaaaagguaagaaaccaguuaaaaaacaaugccaaggaaauuggaaauggcugcuuugaauuuuaccacaaaugcgauaacacgugcauggaaagugucaaaaaugggacuuaugacuacccaaaauacucagaggaagcaaaauuaaacagagaagaaauagaugggguaaagcuggaaucaacaaggauuuaccagauuuuggcgaucuauucaacugucgccaguucauugguacugguagucucccugggggcaaucaguuuuuggaugugcucuaaugggucucuacaguguagaauauguauuuaa

SEQ ID NO: 39040 - RNA, 1701 nt, Artificial Sequence
  derived and/or modified CDS sequence (wt) from hemagglutinin__InfluenzaA__AEL89601
augaaggcaauacuaguaguucugcuauauacauuugcaaccgcaaaugcagacacauuauguauagguuaucaugcgaacaauucaacagacacuguagacacaguacuagaaaagaauguaacaguaacacacucuguuaaccuucuagaagacaagcauaacgggaaacuaugcaaacuaagagggguagccccauugcauuuggguaaauguaacauugcuggcuggauccugggaaauccagagugugaaucacucuccacagcaagcucaugguccuacauuguggaaacaucuaguucagacaauggaacguguuacccaggagauuucaucgauuaugaggagcuaagagagcaauugagcucagugucaucauuugaaagguuugagauauuccccaagacaaguucauggcccaaucaugacucgaacaaagguguaacgacagcauguccucaugcuggagcaaaaagcuucuacaaaaauuuaauauggcuaguuaaaaaaggaaauucauacccaaagcucagcaaauccuacauuaaugauaaagggaaagaaguccucgugcuauggggcauucaccauccaccuacuagugcugaccaacaaagucucuaucagaaugcagaugcauauguuuuuguggggacaucaagauacagcaagaaguucaagccggaaauagcaauaagacccaaagugagggaucaagaagggagaaugaacuauuacuggacacuaguagagccgggagacaaaauaacauucgaagcaacuggaaaucuagugguaccgagauaugcauucgcaauggaaagaaaugcuggaucugguauuaucauuucagauacaccaguccacgauugcaauacaacuugucagacacccaagggugcuauaaacaccagccucccauuucagaacauacauccgaucacaauuggaaaauguccaaaauauguaaaaagcacaaaauugagacuggccacaggauugaggaaugucccguccauucaaucuagaggccuauuuggggccauugccgguuucauugaagggggguggacagggaugguagauggaugguacgguuaucaccaucaaaaugagcaggggucaggauaugcagccgaccugaagagcacacagaaugccauugacgagauuacuaacaaaguaaauucuguuauugaaaaaaugaauacacaguucacagcaguagguaaagaguucaaccaccuggaaaaaagaauagagaauuuaaauaaaaaaguugaugaugguuuccuggacauuuggacuuacaaugccgagcuguugguucuauuggaaaaugaaagaacuuuggacuaccacgauucaaaggugaagaacuuauaugaaaagguaagaagccaguuaaaaaacaaugccaaggaaauuggaaacggcugcuuugaauuuuaccacaaaugugauaacacgugcauggaaagugucaaaaaugggacuuaugacuacccaaaauacucagaggaagcaaaauuaaacagagaagaaauagaugggguaaagcuggaaucaacaaggauuuaccagauuuuggcgaucuauucaacugucgccaguucauugguacugguagucucccugggggcaaucaguuucuggaugugcucuaaugggucucuacaguguagaauauguauuuaa

SEQ ID NO: 39041 - RNA, 1701 nt, Artificial Sequence; identical to SEQ ID NO: 39039
  derived and/or modified CDS sequence (wt) from hemagglutinin__InfluenzaA__AEL89611

SEQ ID NO: 39042 - RNA, 1701 nt, Artificial Sequence
  derived and/or modified CDS sequence (wt) from hemagglutinin__InfluenzaA__AEL89621
augaaggcaauacuaguaguucugcuauauacauuugcaaccgcaaaugcagacacauuauguauagguuaucaugcgaacaauucaacagacacuguagacacaguacuagaaaagaauguaacaguaacacacucuguuaaccuucuagaagacaagcauaacgggaaacuaugcaaacuaagagggguagccccauugcauuuggguaaauguaacauugcuggcuggauccugggaaauccagagugugaaucacucuccacagcaagcucaugguccuacauuguggaaacaucuaguucagacaauggaacguguuacccaggagauuucaucgauuaugaggagcuaagagagcaauugagcucagugucaucauuugaaagguuugagauauuccccaagacaaguucauggcccaaucaugacucgaacaaagguguaacggcagcauguccucaugcuggagcaaaaagcuucuacaaaaauuuaauauggcuaguuaaaaaaggaaauucauacccaaagcucagcaaauccuacauuaaugacaaagggaaagaaguccucgugcuauggggcauucaccauccaucuacuacugcugaccaacaaagucucuaucagaaugcagauacauauguuuuuguggggacaucaagauacagcaagaaguucaagccggaaauagcaauaagacccaaagugagggaucaagaagggagaaugaacuauuacuggacacuaguagagccgggagacaaaauaacauucgaagcaacuggaaaucuagugguaccgagauaugcauucgcaauggaaagaaaugcuggaucugguauuaucauuucagauacaccaguccacgauugcaauacaacuugucagacacccaagggugcuauaaacaccagccucccauuucagaauauacauccgaucacaauuggaaaauguccaaaauauguaaaaagcacaaaauugagacuggccacaggauugaggaaugucccgucuauucaaucuagaggccuauuuggggccauugccggcuucauugaagggggguggacagggaugguagauggaugguacgguuaucaccaucaaaaugagcaggggucaggauaugcagccgaccugaagagcacacagaaugccauugacaagauuacuaacaaaguaaauucuguuauugaaaagaugaauacacaguucacagcaguagguaaagaguucaaccaccuggaaaaaagaauagagaauuuaaauaaaaaaguugaugaugguuuccuggacauuuggacuuacaaugccgaacuguugguucuauuggaaaaugaaagaacuuuggacuaccacgauucaaaugugaagaacuuauaugaaaagguaagaaaccaguuaaaaaacaaugccaaggaaauuggaaauggcugcuuugaauuuuaccacaaaugcgauaacacgugcauggaaagugucaaaaaugggacuuaugacuacccaaaauacucagaggaagcaaaauuaaacagagaagaaauagaugggguaaagcuggaaucaacaaggauuuaccagauuuuggcgaucuauucaacugccgccaguucauugguacugguagucucccugggggcaaucaguuuuuggaugugcucuaaugggucucuacaguguagaauauguauuuaa

SEQ ID NO: 39043 - RNA, 1701 nt, Artificial Sequence
  derived and/or modified CDS sequence (wt) from hemagglutinin__InfluenzaA__AEL89631
augaaggcaauacuaguaguucugcuauauacauuugcaaccgcaaaugcagacacauuauguauagguuaucaugcgaacaauucaacagacacuguagacacaguacuagaaaagaauguaacaguaacacacucuguuaaccuucuagaagacaagcauaacgggaaauuaugcaaacuaagagggguagccccauugcauuuggguaaauguaacauugcuggcuggauccugggaaauccagagugugaaucacucuccacagcaagcucaugguccuacauuguggaaacaucuaguucagacaauggaacguguuacccaggagauuucaucgauuaugaggagcuaagggaacaauugagcucagugucaucauuugaaagguuugagauauuccccaagacaaguucauggcccgaucaugacucgaacaaagguguaacggcagcauguccucaugcuggagcaaaaagcuucuacaaaaauuuaauauggcuaguuaaaaaaggaaauucauacccaaagcucagcaaauccuacauuaaugauaaagggaaagaaguccucgugcuauggggcauucaccauccaucuacuagugcugaccaacaaagucucuaucagaaugcagaugcauauguuuuuguggggacaucaagauacagcaagaaguucaagccggaaauagcaauaagacccaaagugagggaucaagaagggagaaugaacuauuacuggacacuaguagagccgggagacaaaauaacauucgaagcaacuggaaaucuagugguaccgagauaugcauucgcaauggaaagaaaugcuggaucugguauuaucauuucagauacaccaguccacgauugcaauacaacuugucagacacccaagggugcuauaaacaccagccucccauuucagaauauacauccgaucacaauuggaaaauguccaaaauauguaaaaagcacaaaauugagacuggccacaggauugaggaaugucccgucuauucaaucuagaggccuauuuggggccauugccgguuucauugaagggggguggacagggaugguagauggaugguacgguuaucaucaucaaaaugagcaggggucaggauaugcagccgaccugaagagcacacagaaugccauugacaagauuacuaacaaaguaaauucuguuauugaaaagaugaauacacaguucacagcaguagguaaagaguucaaccaccuggaaaaaagaauagagaauuuaaauaaaaaaguugaugaugguuuccuggacauuuggacuuacaaugccgaacuguugguucuauuggaaaaugaaagaacuuuggacuaccacgauucaaaugugaagaacuuauaugaaaagguaagaagccaguuaaaaaacaaugccaaggaaauuggaaacggcugcuuugaauuuuaccacaaaugcgauaacacgugcauggaaagugucaaaaaugggacuuaugacuacccaaaauacucagaggaagcaaaauuaaacagagaagaaauagaugggguaaagcuggaaucaacaaggauuuaccagauuuuggcgaucuauucaacugucgccaguucauugguacugguagucucccugggggcaaucaguuucuggaugugcucuaaugggucucuacaguguagaauauguauuuaa

SEQ ID NO: 39044 - RNA, 1701 nt, Artificial Sequence
  derived and/or modified CDS sequence (wt) from hemagglutinin__InfluenzaA__AEL89641
augaaggcaauacuaguaguucugcuauauacauuagcaaccgcaaaugcagacacauuauguauagguuaucaugcgaacaauucaacagacacuguagacacaguacuagaaaagaauguaacaguaacacacucuguuaaccuucuagaagacaagcaugacgggaaacuaugcaaacuaagagggguagccccauugcauuuggguaaauguaacauugcuggcuggauccugggaaauccagagugugaaucacucuccacagcaagcucaugguccuacauuguggaaacaucuaguucagacaauggaacguguuacccaggagauuucaucgauuaugaagagcuaagagagcaauugagcucagugucaucauuugaaagguuugagauauuccccaagacaaguucauggcccaaucaugacucgaacaaagguguaacggcagcauguccucaugcuggagcaaaaagcuucuacaaaaauuuaauauggcuaguuaaaaaaggaaauucauacccaaagcucagcaaauccuacauuaaugauaaagggaaagaaguccucgugcuauggggcauucaccauccaucuacuagugcugaccaacaaagucucuaucagaaugcagaugcauauguuuuuguggggacaucaagauacagcaagaaguucaagccggaaauagcaauaagacccaaagugagggaucaagaagggagaaugaacuauuacuggacacuaguagagccgggagacaaaauaacauucgaagcaacuggaaaucuagugguaccgagauaugcauucgcaauggaaagaaaugcuggaucugguauuaucauuucagauacaccaguccacgauugcaaugcaacuugucagacacccaagggagcuauaaacaccagccucccauuucagaauauacauccgaucacaauuggaaaauguccaaaauauguaaaaagcacaaaauugagacuggccacaggauugaggaaugucccgucuauucaaucuagaggccuauuuggggccauugccgguuucauugaagggggguggacagggaugguagauggaugguaugguuaucaccaucaaaaugagcaggggucaggauaugcagccgaccugaagagcacacagaaugccauugacaagauuacuaacaaaguaaauucuguuauugaaaagaugaauacacaguucacagcaguagguaaagaguucaaccaccuggaaaaaagaauagagaauuuaaauaaaaaaguugaugaugguuuccuggacauuuggacuuacaaugccgaacuguugguucuauuggaaaaugaaagaacuuuggacuaccacgauucaaaugugaagaacuuauaugaaaagguaagaagccaguuaaaaaacaaugccaaggaaauuggaaacggcugcuuugaauuuuaccacaaaugcgauaacacgugcauggaaagugucaaaaaugggacuuaugacuacccaaaauacucagaggaagcaaaauuaaacagagaagaaauagaugggguaaagcuggaaucaacaaggauuuaccagauuuuggcgaucuauucaacugucgccaguucauugguacugguagucucccugggggcaaucaguuucuggaugugcucuaaugggucucuacaguguagaauauguauuuaa

SEQ ID NO: 39045 - RNA, 1701 nt, Artificial Sequence
  derived and/or modified CDS sequence (wt) from hemagglutinin__InfluenzaA__AEL89651
augaaggcaauacuaguaguucugcuauauacauuugcaaccgcaaaugcagacacauuauguauagguuaucaugcgaacaauucaacagacacuguagacacaguacuagaaaagaauguaacaguaacacacucuguuaaccuucuagaagacaagcauaacgggaaacuaugcaaacuaagagggguagccccauugcauuuggguaaauguaacauugcuggcuggauccugggaaauccagagugugaaucacucuccacagcaagcucaugguccuacauuguggaaacaucuaguucagacaauggaacguguuacccaggaguuuucaucgauuaugaggagcuaagagagcaauugagcucagugucaucauuugaaagguuugagauauuccccaagacaaguucauggcccaaucaugacucgaacaaagguguaacggcagcauguccucaugcuggagcaaaaagcuucuacaaaaauuuaauauggcuaguuaaaaaaggaaauucauacccaaagcucagcaaauccuacauuaaugauaaagggaaagaaguccucgugcuauggggcauucaccauccaucuacuacugcugaccaacaaagucucuaucagaaugcagaugcauauguuuuuguggggacaucaagauacagcaagaaguucaagccggaaauagcaauaagacccaaagugagggaucaagaagggagaaugaacuauuacuggacacuaguagagccgggagacaaaauaacauucgaagcaacuggaaaucuagugguaccgagauaugcauucgcaauggaaagaaaugcuggaucugguauuaucauuucagauacaccaguccacgauugcaauacaacuugucagacacccaagggugcuauaaacaccagccucccauuucagaauauacauccgaucacaauuggaaaauguccaaaauuuguaaaaagcacaaaauugagacuggccacaggauugaggaaugucccgucuauucaaucuagaggccuauuuggggccauugccggcuucauugaagggggguggacagggaugguagauggaugguacgguuaucaccaucaaaaugagcaggggucaggauaugcagccgaccugaagagcacacagaaugccauugacaagauuacuaacaaaguaaauucuguuauugaaaagaugaauacacaguucacagcaguagguaaagaguucaaccaccuggaaaaaagaauagagaauuuaaauaaaaaaguugaugaugguuuccuggacauuuggacuuacaaugccgaacuguugguucuauuggaaaaugaaagaacuuuggacuaccacgauucaaaugugaagaacuuauaugaaaagguaagaaaccaguuaaaaaacaaugccaaggaaauuggaaacggcugcuuugaauuuuaccacaaaugcgauaacacgugcauggaaagugucaaaaaugggacuuaugacuacccaaaauacucagaggaagcaaaauuaaacagagaagaaauagaugggguaaagcuggaaucaacaaggauuuaccagauuuuggcgaucuauucaacugucgccaguucauugguacugguagucucccugggggcaaucaguuucuggaugugcucuaaugggucucuacaguguagaauauguauuuaa

SEQ ID NO: 39046 - RNA, 1701 nt, Artificial Sequence
  derived and/or modified CDS sequence (wt) from hemagglutinin__InfluenzaA__AEL89661
augaaggcaauacuaguaguucugcuauauacauuugcaaccgcaaaugcagacacauuauguauagguuaucaugcgaacaauucaacagacacuguagacacaguacuagaaaagaauguaacaguaacacacucuguuaaccuucuagaagacaagcauaacgggaaacuaugcaaacuaagagggguagccccauugcauuuggguaaauguaacauugcuggcuggauccugggaaauccagagugugaaucacucuccacagcaagcucaugguccuacauuguggaaacaucuaguucagacaauggaacguguuacccaggagauuucaucgauuaugaggagcuaagagagcaauugagcucagugucaucauuugaaagguuugagauauuccccaagacaaguucauggcccaaucaugacucgaacaaagguguaacggcagcauguccucaugcuggagcaaaaagcuucuacaaaaauuuaauauggcuaguuaaaaaaggaaauucauacccaaagcucagcaaauccuacauuaaugauaaagggaaagaaguccucgugcuauggggcauucaccauccaucuacuacugcugaccaacaaagucucuaucagaaugcagauacauauguuuuuguggggacaucaagauacagcaagaaguucaagccggaaauagcaauaagacccaaagugagggaucaagaagggagaaugaacuauuacuggacacuaguagagccgggagacaaaauaacauucgaagcaacuggaaaucuagugguaccgagauaugcauucgcaauggaaagaaaugcuggaucugguauuaucauuucagauacaccaguccacgauugcaauacaacuugucagacacccaagggugcuauaaacaccagccucccauuucagaauauacauccgaucacaauuggaaaauguccaaaauauguaaaaagcacaaaauugagacuggccacaggauugaggaaugucccgucuauucaaucuagaggccuauuuggggccauugccggcuucauugaagggggguggacagggaugguagauggaugguacgguuaucaccaucaaaaugagcaggggucaggauaugcagccgaccugaagagcacacagaaugccauugacaagauuacuaacaaaguaaauucuguuauugaaaagaugaauacacaguucacagcaguagguaaagaguucaaccaccuggaaaaaagaauagagaauuuaaauaaaaaaguugaugaugguuuccuggacauuuggacuuacaaugccgaacuguugguucuauuggaaaaugaaagaacuuuggacuaccacgauucaaaugugaagaacuuauaugaaaagguaagaaaccaguuaaaaaacaaugccaaggaaauuggaaauggcugcuuugaauuuuaccacaaaugcgauaacacgugcauggaaagugucaaaaaugggacuuaugacuacccaaaauacucagaggaagcaaaauuaaacagagaagaaauagaugggguaaagcuggaaucaacaaggauuuaccagauuuuggcgaucuauucaacugucgccaguucauugguacugguagucucccugggggcaaucaguuuuuggaugugcucuaaugggucucuacaguguagaauauguauuuaa

SEQ ID NO: 39047 - RNA, 1701 nt, Artificial Sequence
  derived and/or modified CDS sequence (wt) from hemagglutinin__InfluenzaA__AEL89671
augaaggcaauacuaguaguucugcuauauacauuugcaaccgcaaaugcagacacauuauguauagguuaucaugcgaacaauucaacagacacuguagacacaguacuagaaaagaauguaacaguaacacacucuguuaaccuucuagaagacaagcauaacgggaaacuaugcaaacuaagagggguagccccauugcauuuggguaaauguaacauugcuggcuggauccugggaaauccagagugugaaucacucuccacagcaagcucaugguccuacauuguggaaacaucuaguucagacaauggaacguguuacccaggagauuucaucgauuaugaggagcuaagagagcaauugagcucagugucaucauuugaaagguuugagauauuccccaagacaaguucauggcccaaucaugacucgaacaaagguguaacggcagcauguccucaugcuggagcaaaaagcuucuacaaaaauuuaauauggcuaguuaaaaaaggaaauucauacccaaagcucagcaaauccuacauuaaugauaaagggaaagaaguccucgugcuauggggcauucaccauccaucuacuacugcugaccaacaaagucucuaucagagugcagauacauauguuuuuguggggacaucaagauacagcaagaaguucaagccggaaauagcaauaagacccaaagugagggaucaagaagggagaaugaacuauuacuggacacuaguagagccgggagacaaaauaacauucgaagcaacuggaaaucuagugguaccgagauaugcauucgcaauggaaagaaaugcuggaucugguauuaucauuucagauacaccaguccacgauugcaauacaacuugucagacacccaagggugcuauaaacaccagccucccauuucagaauauacauccgaucacaauuggaaaauguccaaaauauguaaaaagcacaaaauugagacuggccacaggauugaggaaugucccgucuauucaaucuagaggccuauuuggggccauugccggcuucauugaagggggguggacagggaugguagauggaugguacgguuaucaccaucaaaaugagcaggggucaggauaugcagccgaccugaagagcacacagaaugccauugacaagauuacuaacaaaguaaauucuguuauugaaaagaugaauacacaguucacagcaguagguaaagaguucaaccaccuggaaaaaagaauagagaauuuaaauaaaaaaguugaugaugguuuccuggacauuuggacuuacaaugccgaacuguugguucuauuggaaaaugaaagaacuuuggacuaccacgauucaaaugugaagaacuuauaugaaaagguaagaaaccaguuaaaaaacaaugccaaggaaauuggaaauggcugcuuugaauuuuaccacaaaugcgauaacacgugcauggaaagugucaaaaaugggacuuaugacuacccaaaauacucagaggaagcaaaauuaaacagagaagaaauagaugggguaaagcuggaaucaacaaggauuuaccagauuuuggcgaucuauucaacugucgccaguucauugguacugguagucucccugggggcaaucaguuuuuggaugugcucuaaugggucucuacaguguagaauauguauuuaa

SEQ ID NO: 39048 - RNA, 1701 nt, Artificial Sequence; identical to SEQ ID NO: 38450
  derived and/or modified CDS sequence (wt) from hemagglutinin__InfluenzaA__AEL89691

SEQ ID NO: 39049 - RNA, 1701 nt, Artificial Sequence
  derived and/or modified CDS sequence (wt) from hemagglutinin__InfluenzaA__AEL89701
augaaggcaauacuaguaguucugcuauauacauuugcaaccgcaaaugcagacacauuauguauagguuaucaugcgaacaauucaacagacacuguagacacaguacuagaaaagaauguaacaguaacacacucuguuaaccuucuagaagacaagcauaacgggaaacuaugcaaacuaagagggguagccccauugcauuuggguaaauguaacauugcuggcuggauccugggaaauccagagugugaaucacucuccacagcaagcucaugguccuacauuguggaaacaucuaguucagacaauggaacguguuacccaggagauuucaucgauuaugaggagcuaagagagcaauugagcucagugucaucauuugaaagguuugagauauuccccaagacaaguucauggcccaaucaugacucgaacaaagguguaacgacagcauguccucaugcuggagcaaaaagcuucuacaaaaauuuaauauggcuaguuaaaaaaggaaauucauacccaaagcucagcaaauccuacauuaaugauaaagggaaagaaguccucgugcuauggggcauucaccauccaccuacuagugcugaccaacaaaaucucuaucagaaugcagaugcauauguuuuuguggggacaucaagauacagcaagaaguucaagccggaaauagcaauaagacccaaagugagggaucaagaagggagaaugaacuauuacuggacacuaguagagccgggagacaaaauaacauucgaagcaacuggaaaucuagugguaccgagauaugcauucgcaauggaaagaaaugcuggaucugguauuaucauuucagauacaccaguccacgauugcaauacaacuugucagacacccaagggugcuauaaacaccagccucccauuucagaauauacauccgaucacaauuggaaaauguccaaaauauguaaaaagcacaaaauugagacuggccacaggauugaggaaugucccgucuauucaaucuagaggccuauuuggggccauugccgguuucauugaagggggguggacagggaugguagauggaugguacgguuaucaccaucaaaaugagcaggggucaggauaugcagcugaccugaagagcacacagaaugccauugacgggauuacuaacaaaguaaauucuguuauugaaaagaugaauacacaguucacagcaguagguaaagaguucaaccaccuggaaaaaagaauagagaauuuaaauaaaaaaguugaugaugguuuccuggacauuuggacuuacaaugccgaacuguugguucuauuggaaaaugaaagaacuuuggacuaccacgauucaaaugugaagaacuuauaugaaaagguaagaagccaguuaaaaaacaaugccaaggaaauuggaaacggcugcuuugaauuuuaccacaaaugugauaacacgugcauggaaagugucaaaaaugggacuuaugacuacccaaaauacucagaggaagcaaaauuaaacagagaagaaauagaugggguaaagcuggaaucaacaaugauuuaccagauuuuggcgaucuauucaacugucgccaguucauugguacugguagucucccugggggcaaucaguuucuggaugugcucuaaugggucucuacaguguagaauauguauuuaa

SEQ ID NO: 39050 - RNA, 1701 nt, Artificial Sequence; identical to SEQ ID NO: 39049
  derived and/or modified CDS sequence (wt) from hemagglutinin__InfluenzaA__AEL89711

SEQ ID NO: 39051 - RNA, 1701 nt, Artificial Sequence
  derived and/or modified CDS sequence (wt) from hemagglutinin__InfluenzaA__AEL89721
augaaggcaauacuaguaguucugcuauauacauuugcaaccgcaaaugcagacacauuauguauagguuaucaugcgaacaauucaacagacacuguagacacaguacuagaaaagaauguaacaguaacacacucuguuaaccuucuagaagacaagcauaacgggaaacuaugcaaacuaagagggguagccccauugcauuuggguaaauguaacauugcuggcuggauccugggaaauccagagugugaaucacucuccacagcaagcucaugguccuacauuguggaaacaucuaguucagacaauggaacguguuacccaggagauuucaucgauuaugaggagcuaagagagcaauugagcucagugucaucauuugaaagguuugagauauuccccaagacaaguucauggcccaaucaugacucgaacaaagguguaacggcagcauguccucaugcuggagcaaaaagcuucuacaaaaauuuaauauggcuaguuaaaaaaggaaauucauacccaaagcucagcaaauccuacauuaaugauaaagggaaagaaguccucgugcuauggggcauucaccauccaucuacuacugcugaccaacaaagucucuaucagaaugcagauacauauguuuuuguggggacaucaagauacagcaagaaguucaagccggaaauagcaauaagacccaaagugagggaucaagaagggagaaugaacuauuacuggacacuaguagagccgggagacaaaauaacauucgaagcaacuggaaaucuagugguaccgagauaugcauucgcaauggaaagaaaugcuggaucugguauuaucauuucagauacaccaguccacgauugcaauacaacuugucagacacccaagggugcuauaaacaccagccucccauuucagaauauacauccgaucacaauuggaaaauguccaaaauauguaaaaagcacaaaauugagacuggccacaggauugaggaaugucccgucuauucaaucuagaggccuauuuggggccauugccggcuuuauugaagggggguggacagggaugguagauggaugguacgguuaucaccaucaaaaugagcaggggucaggauaugcagccgaccugaagagcacacagaaugccauugacaagauuacuaacaaaguaaauucuguuauugaaaagaugaauacacaguucacagcaguagguaaagaguucaaccaccuggaaaaaagaauagagaauuuaaauaaaaaaguugaugaugguuuccuggacauuuggacuuacaaugccgaacuguugguucuauuggaaaaugaaagaacuuuggacuaccacgauucaaaugugaagaacuuauaugaaaagguaagaaaccaguuaaaaaacaaugccaaggaaauuggaaauggcugcuuugaauuuuaccacaaaugcgauaacacgugcauggaaagugucaaaaaugggacuuaugacuacccaaaauacucagaggaagcaaaauuaaacagagaagaaauagaugggguaaagcuggaaucaacaaggauuuaccagauuuuggcgaucuauucaacugucgccaguucauugguacugguagucucccugggggcaaucaguuuuuggaugugcucuaaugggucucuacaguguagaauauguauuuaa

SEQ ID NO: 39052 - RNA, 1701 nt, Artificial Sequence
  derived and/or modified CDS sequence (wt) from hemagglutinin__InfluenzaA__AEL89741
augaaggcaauacuaguaguucugcuauauacauuugcaaccacaaaugcagacacauuauguauagguuaucaugcgaacaauucaacagacacuguagacacaguacuagaaaagaauguaacaguaacacacucuguuaaucuucuagaagacaagcauaacgggaaacuaugcaaacuaagagggguagccccauugcauuuggguaaauguaacauugcuggcuggauccugggaaauccagagugugaaucacucuccacagcaagcucaugguccuacauuguggaaacaucuaguucagacaauggaacguguuacccaggagauuucaucgauuaugaggagcuaagagagcaauugagcucagugucaucauuugaaagguuugagauauuccccaagacaaguucauggcccaaucaugacucgaacaaagguguaacggcagcauguccucaugcuggagcaaaaagcuucuacaaaaauuuaauauggcuaguuaaaaaaggaaauucauacccaaagcucagcaaauccuacauuaaugauaaagggaaagaaguccucgugcuauggggcauucaccauccaucuacuacugcugaccaacaaagucucuaucagaaugcagauacauauguuuuuguggggacaucaagauacagcaagaaguucaagccggaaauagcaauaagacccaaagugagggaucaagaagggagaaugaacuauuacuggacacuaguagagccgggagacaaaauaacauucgaagcaacuggaaaucuagugguaccgagauaugcauucgcaauggaaagaaaugcuggaucugguauuaucauuucagauacaccaguccacgauugcaauacaacuugucagacacccaagggugcuauaaacaccagccucccauuucagaauauacauccgaucacaauuggaaaauguccaaaauauguaaaaagcacaaaauugagacuggccacaggauugaggaaugucccgucuauucaaucuagaggccuauuuggggccauugccggcuucauugaagggggguggacagggaugguagauggaugguacgguuaucaccaucaaaaugagcaggggucaggauaugcagccgaccugaagagcacacagaaugccauugacaagauuacuaacaaaguaaauucuguuauugaaaagaugaauacacaguucacagcaguagguaaagaguucaaccaccuggaaaaaagaauagagaauuuaaauaaaaaaguugaugaugguuuccuggacauuuggacuuacaaugccgaacuguugguucuauuggaaaaugaaagaacuuuggacuaccacgauucaaaugugaagaacuuauaugaaaagguaagaaaccaguuaaaaaacaaugccaaggaaauuggaaauggcugcuuugaauuuuaccacaaaugcgauaacacgugcauggaaagugucaaaaaugggacuuaugacuacccaaaauacucagaggaagcaaaauuaaacagagaagaaauagauggaguaaagcuggaaucaacaaggauuuaccagauuuuggcgaucuauucaacugucgccaguucauugguacugguagucucccugggggcaaucaguuuuuggaugugcucuaaugggucucuacaguguagaauauguauuuaa

SEQ ID NO: 39053 - RNA, 1701 nt, Artificial Sequence
  derived and/or modified CDS sequence (wt) from hemagglutinin__InfluenzaA__AEL89751
augaaggcaauacuaguaguucugcuauauacauuugcaaccgcaaaugcagacacauuauguauagguuaucaugcgaacaauucaacagacacuguagacacaguacuagaaaagaauguaacaguaacacacucuguuaaccuucuagaagacaagcauaacgggaaauuaugcaaacuaagagggguagccccauugcauuuggguaaauguaacauugcuggcuggauccugggaaauccagagugugaaucacucuccacagcaagcucaugguccuacauuguggaaacaucuaguucagacaauggaacguguuacccaggagauuucaucgauuaugaggagcuaagagaacaauugagcucagugucaucauuugaaagguuugagauauuccccaagacaaguucauggcccgaucaugacucgaacaaagguguaacggcagcauguccucaugcuggagcaaaaagcuucuacaaaaauuuaauauggcuaguuaaaaaaggaaauucauacccaaagcucagcaaauccuacauuaaugauaaagggaaagaaguccucgugcuauggggcauucaccauccaucuacuagugcugaccaacaaagucucuaucagaaugcagaugcauauguuuuuguggggacaucaagauacagcaagaaguucaagccggaaauagcaauaagacccaaagugagggaucaagaagggagaaugaacuauuacuggacacuaguagagccgggagacaaaauaacauucgaagcaacuggaaaucuaguggugccgagauaugcauucgcaauggaaagaaaugcuggaucugguauuaucauuucagauacaccaguccacgauugcaauacaacuugucagacacccaagggugcuauaaacaccagccucccauuucagaauauacauccgaucacaauuggaaaauguccaaaauauguaaaaagcacaaaauugagacuggccacaggauugaggaaugucccgucuauucaaucuagaggccuauuuggggccauugccgguuucauugaagggggguggacagggaugguagauggaugguacgguuaucaccaucaaaaugagcaggggucaggauaugcagccgaccugaagagcacacagaaugccauugacaagauuacuaacaaaguaaauucuguuauugaaaagaugaauacacaguucacagcaguagguaaagaguucaaccaccuggaaaaaagaauagagaauuuaaauaaaaaaguugaugaugguuuccuggacauuuggacuuacaaugccgaacuguugguucuauuggaaaaugaaagaacuuuggacuaccacgauucaaaugugaagaacuuauaugaaaagguaagaagccaguuaaaaaacaaugccaaggaaauuggaaacggcugcuuugaauuuuaccacaaaugcgauaacacgugcauggaaagugucaaaaaugggacuuaugacuacccaaaauacucagaggaagcaaaauuaaacagagaagaaauagaugggguaaagcuggaaucaacaaggauuuaccagauuuuggcgaucuauucaacugucgccaguucauugguacugguagucucccugggggcaaucaguuucuggaugugcucuaaugggucucuacaguguagaauauguauuuaa

SEQ ID NO: 39054 - RNA, 1701 nt, Artificial Sequence
  derived and/or modified CDS sequence (wt) from hemagglutinin__InfluenzaA__AEL89761
augaaggcaauacuaguaguucugcuauauacauuugcaaccgcaaaugcagacacauuauguauagguuaucaugcgaacaauucaacagacacuguagacacaguacuagaaaagaauguaacaguaacacacucuguuaaccuucuagaagacaagcauaacgggaaacuaugcaaacuaagagggguagccccauugcauuuggguaaauguaacauugcuggcuggauccugggaaauccagagugugaaucacucuccacagcaagcucaugguccuacauuguggaaacaucuaguucagacaauggaacguguuacccaggagauuucaucgauuaugaggagcuaagagagcaauugagcucagugucaucauuugaaagguuugagauauuccccaagacaaguucauggcccaaucaugacucgaacaaagguguaacgacagcauguccucaugcuggagcaaaaagcuucuacaaaaauuuaauauggcuaguuaaaaaaggaaauucauacccaaagcucagcaaauccuacauuaaugauaaagggaaagaaguccucgugcuauggggcauucaccauccaccuacuagugcugaccaacaaagucucuaucagaaugcagaugcauauguuuuuguggggacaucaagauacagcaagaaguucaagccggaaauagcaauaagacccaaagugagggaucaagaagggagaaugaacuauuacuggacacuaguagagccgggagacaaaauaacauucgaagcaacuggaaaucuagugguaccgagauaugcauucgcaauggaaagaaaugcuggaucugguauuaucauuucagauacaccaguccacgauugcaauacaacuugucagacacccaagggugcuauaaacaccagccucccauuucagaauauacauccgaucacaauuggaaaauguccaaaauauguaaaaagcacaaaauugagacuggccacaggauugaggaaugucccgucuauucaaucuagaggccuauuuggggccauugccgguuucauugaagggggguggacagggaugguagauggaugguacgguuaucaccaucaaaaugagcaggggucaggauaugcagccgaccugaagagcacacagaaugccauugacgggauuacuaacaaaguaaauucuguuauugaaaagaugaauacacaguucacagcaguagguaaagaguucaaccaccuggaaaaaagaauagagaauuuaaauaaaaaaguugaugaugguuuccuggacauuuggacuuacaaugccgaacuguugguucuauuggaaaaugaaagaacuuuggacuaccacgauucaaaugugaagaacuuauaugaaaagguaagaagccaguuaaaaaacaaugccaaggaaauuggaaacggcugcuuugaauuuuaccacaaaugugauaacacgugcauggaaagugucaaaaaugggacuuaugacuacccaaaauacucagaggaagcaaaauuaaacagagaagaaauagaugggguaaagcuggaaucaacaaugauuuaccagauuuuggcgaucuauucaacugucgccaguucauugguacugguagucucccugggggcaaucaguuucuggaugugcucuaaugggucucuacaguguagaauauguauuuaa

SEQ ID NO: 39055 - RNA, 1701 nt, Artificial Sequence
  derived and/or modified CDS sequence (wt) from hemagglutinin__InfluenzaA__AEL89771
augaaggcaauacuaguaguucugcuauauacauuagcaaccgcaaaugcagacacauuauguauagguuaucaugcgaacaauucaacagacacuguagacacaguacuagaaaagaauguaacaguaacacacucuguuaaccuucuagaagacaagcaugacgggaaacuaugcaaacuaagagggguagccccauugcauuuggguaaauguaacauugcuggcuggauccugggaaauccagagugugaaucacucuccacagcaagcucaugguccuacauuguggaaacaucuaguucagacaauggaacguguuacccaggagauuucaucgauuaugaagagcuaagagagcaauugagcucagugucaucauuugaaagguuugagauauuccccaagacaaguucauggcccaaucaugacucgaacaaagguguaacggcagcauguccucaugcuggagcaaaaagcuucuacaaaaauuuaauauggcuaguuaaaaaaggaaauucauacccaaagcucagcaaauccuacauuaaugauaaagggaaagaaguccucgugcuauggggcauucaccauccaucuacuagugcugaccaacaaagucucuaucagaaugcagaugcauauguuuuuguggggacaucaagauacagcaagaaguucaagccggaaauagcaauaagacccaaagugagggaucaagaagggagaaugaacuauuacuggacacuaguagagccgggagacaaaauaacauucgaagcaacuggaaaucuagugguaccgagauaugcauucgcaauggaaagaaaugcuggaucugguauuaucauuucagauacaccaguccacgauugcaaugcaacuugucagacacccaagggugcuauaaacaccagccucccauuucagaauauacauccgaucacaauuggaaaauguccaaaauauguaaaaagcacaaaauugagacuggccacaggauugaggaaugucccgucuauucaaucuagaggccuauuuggggccauugccgguuucauugaagggggguggacagggaugguagauggaugguacgguuaucaccaucaaaaugagcaggggucaggauaugcagccgaccugaagagcacacagaaugccauugacaagauuacuaacaaaguaaauucuguuauugaaaagaugaauacacaguucacagcaguagguaaagaguucaaccaccuggaaaaaagaauagagaauuuaaauaaaaaaguugaugaugguuuccuggacauuuggacuuacaaugccgaacuguugguucuauuggaaaaugaaagaacuuuggacuaccacgauucaaaugugaagaacuuauaugaaaagguaagaagccaguuaaaaaacaaugccaaggaaauuggaaacggcugcuuugaauuuuaccacaaaugcgauaacacgugcauggaaagugucaaaaaugggacuuaugacuacccaaaauacucagaggaagcaaaauuaaacagagaagaaauagaugggguaaagcuggaaucaacaaggauuuaccagauuuuggcgaucuauucaacugucgccaguucauugguacugguagucucccugggggcaaucaguuucuggaugugcucuaaugggucucuacaguguagaauauguauuuaa

SEQ ID NO: 39056 - RNA, 1701 nt, Artificial Sequence
  derived and/or modified CDS sequence (wt) from hemagglutinin__InfluenzaA__AEL89781
augaaggcaauacuaguaguucugcuauauacauuugcaaccgcaaaugcagacacauuauguauagguuaucaugcgaacaauucaacagacacuguagacacaguacuagaaaagaauguaacaguaacacacucuguuaaccuucuagaagacaagcauaacgggaaacuaugcaaacuaagagggguagccccauugcauuuggguaaauguaacauugcuggcuggauccugggaaauccagagugugaaucacucuccacagcaagcucaugguccuacauuguggaaacaucuaguucagacaauggaacguguuacccaggagauuucaucgauuaugaggagcuaagagagcaauugagcucagugucaucauuugaaagguuugagauauuccccaagacaaguucauggcccaaucaugacucaaacaaagguguaacgacagcauguccucaugcuggagcaaaaagcuucuacaaaaauuuaauauggcuaguuaaaaaaggaaauucauacccaaagcucagcaaauccuacauuaaugauaaagggaaagaaguccucgugcuauggggcauucaccauccaccuacuagugcugaccaacaaagucucuaucagaaugcagaugcauauguuuuuguggggacaucaagauacagcaagaaguucaagccggaaauagcaauaagacccaaagugagggaucaagaagggagaaugaacuauuacuggacacuaguagagccgggagacaaaauaacauucgaagcaacuggaaaucuagugguaccgagauaugcauucgcaauggaaagaaaugcuggaucugguauuaucauuucagauacaccaguccacgauugcaauacaacuugucagacacccaagggugcuauaaacaccagccucccauuucagaauauacauccgaucacaauuggaaaauguccaaaauauguaaaaagcacaaaauugagacuggccacaggauugaggaaugucccgucuauucaaucuagaggccuauuuggggccauugccgguuucauugaagggggguggacagggaugguagauggaugguacgguuaucaccaucaaaaugagcaggggucaggauaugcagccgaccugaagagcacacagaaugccauugacgggauuacuaacaaaguaaauucuguuauugaaaagaugaauacacaguucacagcaguagguaaagaguucaaccaccuggaaaaaagaauagagaauuuaaauaaaaaaguugaugaugguuuccuggacauuuggacuuacaaugccgaacuguugguucuauuggaaaaugaaagaacuuuggacuaccacgauucaaaugugaagaacuuauaugaaaagguaagaagccaguuaaaaaacaaugccaaggaaauuggaaacggcugcuuugaauuuuaccacaaaugugauaacacgugcauggaaagugucaaaaaugggacuuaugacuacccaaaauacucagaggaagcaaaauuaaacagagaagaaauagaugggguaaagcuggaaucaacaaugauuuaccagauuuuggcgaucuauucaacugucgccaguucauugguacugguagucucccugggggcaaucaguuucuggaugugcucuaaugggucucuacaguguagaauauguauuuaa

SEQ ID NO: 39057 - RNA, 1701 nt, Artificial Sequence; identical to SEQ ID NO: 38450
  derived and/or modified CDS sequence (wt) from hemagglutinin__InfluenzaA__AEL89791

SEQ ID NO: 39058 - RNA, 1701 nt, Artificial Sequence
  derived and/or modified CDS sequence (wt) from hemagglutinin__InfluenzaA__AEL89801
augaaggcaauacuaguaguucugcuauauacauuugcaaccgcaaaugcagacacauuauguauagguuaucaugcgaacaauucaacagacacuguagacacaguacuagaaaagaauguaacaguaacacacucuguuaaccuucuagaagacaagcauaacgggaaacuaugcaaacuaagagggguagccccauugcauuuggguaaauguaacauugcuggcuggauccugggaaauccagagugugaaucacucuccacagcaagcucaugguccuacauuguggaaacaucuaguucagacaauggaacguguuacccaggaguuuucaucgauuaugaggagcuaagagagcaauugagcucagugucaucauuugaaagguuugagauauuccccaagacaaguucauggcccaaucaugacucgaacaaagguguaacggcagcauguccucaugcuggagcaaaaagcuucuacaaaaauuuaauauggcuaguuaaaaaaggaaauucauacccaaagcucagcaaauccuacauuaaugauaaagggaaagaaguccucgugcuauggggcauucaccauccaucuacuacugcugaccaacaaagucucuaucagaaugcagaugcauauguuuuuguggggacaucaagauacagcaagaaguucaagccggaaauagcaguaagacccaaagugagggaucaagaagggagaaugaacuauuacuggacacuaguagagccgggagacaaaauaacauucgaagcaacuggaaaucuagugguaccgagauaugcauucgcaauggaaagaaaugcuggaucugguauuaucauuucagauacaccaguccacgauugcaauacaacuugucagacacccaagggugcuauaaacaccagccucccauuucagaauauacauccgaucacaauuggaaaauguccaaaauauguaaaaagcacaaaauugagacuggccacaggauugaggaaugucccgucuauucaaucuagaggccuguuuggggccauugccggcuucauugaagggggguggacagggaugguagauggaugguacgguuaucaccaucaaaaugagcaggggucaggauaugcagccgaccugaagagcacacagaaugccaucgacaagauuacuaacaaaguaaauucuguuauugaaaagaugaauacacaguucacagcaguagguaaagaguucaaccaccuggaaaaaagaauagagaauuuaaauaaaaaaguugaugaugguuuccuggacauuuggacuuacaaugccgaacuguugguucuauuggaaaaugaaagaacuuuggacuaccacgauucaaaugugaagaacuuauaugaaaagguaagaaaccaguuaaaaaacaaugccaaggaaauuggaaacggcugcuuugaauuuuaccacaaaugcgauaacacgugcauggaaagugucaaaaaugggacuuaugacuauccaaaauacucagaggaagcaaaauuaaacagagaagaaauagaugggguaaagcuggaaucaacaaggauuuaccagauuuuggcgaucuauucaacugucgccaguucauugauacugguagucucccugggggcaaucaguuucuggaugugcucuaaugggucucuacaguguagaauauguauuuaa

SEQ ID NO: 39059 - RNA, 1701 nt, Artificial Sequence
  derived and/or modified CDS sequence (wt) from hemagglutinin__InfluenzaA__AEL89812
augaaggcaauacuaguaguucugcuauauacauuugcaaccgcaaaugcagacacauuauguauagguuaucaugcgaacaauucaacagacacuguagacacaguacuagaaaagaauguaacaguaacacacucuguuaaccuucuagaagacaagcauaacgggaaacuaugcaaacuaagagggguagccccauugcauuuggguaaauguaacauugcuggcuggauccugggaaauccagagugugaaucacucuccacagcaagcucaugguccuacauuguggaaacaucuaguucagacaauggaacguguuacccaggagauuucaucgauuaugaggagcuaagagagcaauugagcucagugucaucauuugaaagguuugagauauuccccaagacaaguucauggcccaaucaugacucgaacaaagguguaacgacagcauguccucaugcuggagcaaaaagcuucuacaaaaauuuaauauggcuaguuaaaaaaggaaauucauacccaaagcucagcaaauccuacauuaaugauaaagggaaagaaguccucgugcuauggggcauucaccauccaccuacuagugcugaccaacaaagucucuaucagaaugcagaugcauauguuuuuguggggacaucaagauacagcaagaaguucaagccggaaauagcaauaagacccaaagugagggaucaagaagggagaaugaacuauuacuggacacuaguagagccgggagacaaaauaacauucgaagcaacuggaaaucuagugguaccgagauaugcauucgcaauggaaagaaaugcuggaucugguauuaucauuucagauacaccaguccacgauugcaaugcaacuugucagacacccaaggguguuauaaacaccagccucccauuucagaauauacauccgaucacaauuggaaaauguccaaaauauguaaaaagcacaaaauugagacuggccacaggauugaggaaugucccgucuauucaaucuagaggccuauuuggggccauugccgguuucauugaagggggguggacagggaugguagauggaugguacgguuaucaccaucaaaaugagcaggggucaggauaugcagccgaccugaagagcacacagaaugccauugacgggauuacuaacaaaguaaauucuguuauugaaaagaugaauacacaguucacagcaguagguaaagaguucaaccaccuggaaaaaagaauagagaauuuaaauaaaaaaguugaugaugguuuccuggacauuuggacuuacaaugccgaacuguugguucuauuggaaaaugaaagaacuuuggacuaccacgauucaaaugugaagaacuuauaugaaaagguaagaagccaguuaaaaaacaaugccaaggaaauuggaaacggcugcuuugaauuuuaccacaaaugugauaacacgugcauggaaagugucaaaaaugggacuuaugacuacccaaaauacucagaggaagcaaaauuaaacagagaagaaauagaugggguaaagcuggaaucaacaaugauuuaccagauuuuggcgaucuauucaacugucgccaguucauugguacugguagucucccugggggcaaucaguuucuggaugugcucuaaugggucucuacaguguagaauauguauuuaa

SEQ ID NO: 39060 - RNA, 1701 nt, Artificial Sequence; identical to SEQ ID NO: 39046
  derived and/or modified CDS sequence (wt) from hemagglutinin__InfluenzaA__AEL89832

SEQ ID NO: 39061 - RNA, 1701 nt, Artificial Sequence
  derived and/or modified CDS sequence (wt) from hemagglutinin__InfluenzaA__AEL89842
augaaggcaauacuaguaguucugcuauauacauuagcaaccgcaaaugcagacacauuauguauagguuaucaugcgaacaauucaacagacacuguagacacaguacuagaaaagaauguaacaguaacacacucuguuaaccuucuagaagacaagcaugacgggaaacuaugcaaacuaagagggguagccccauugcauuuggguaaauguaacauugcuggcuggauccugggaaauccagagugugaaucacucuccacagcaagcucaugguccuacauuguggaaacaucuaguucagacaauggaacguguuacccaggagauuucaucgauuaugaagaguuaagagagcaauugagcucagugucaucauuugaaagguuugagauauuccccaagacaaguucauggcccaaucaugacucgaacaaagguguaacggcagcauguccucaugcuggagcaaaaagcuucuacaaaaauuuaauauggcuaguuaaaaaaggaaauucauacccaaagcucagcaaauccuacauuaaugauaaagggaaagaaguccucgugcuauggggcauucaccauccaucuacuagugcugaccaacaaagucucuaucagaaugcagaugcauauguuuuuguggggacaucaagauacagcaagaaguucaagccggaaauagcaauaagacccaaagugagggaucaagaagggagaaugaacuauuacuggacacuaguagagccgggagacaaaauaacauucgaagcaacuggaaaucuagugguaccgagauaugcauucgcaauggaaagaaaugcuggaucggguauuaucauuucagauacaccaguccacgauugcaaugcaacuugucagacacccaagggugcuauaaacaccagccucccauuucagaauguacauccgaucacaauuggaaaauguccaaaauauguaaaaagcacaaaauugagacuggccacaggauugaggaaugucccgucuauucaaucuagaggccuauuuggggccauugccgguuucauugaagggggguggacagggaugguagauggaugguacgguuaucaccaucaaaaugagcaggggucaggauaugcagccgaccugaagagcacacagaaugccauugacaagauuacuaacaaaguaaauucuguuauugaaaagaugaauacacaguucacagcaguagguaaagaguucaaccaccuggaaaaaagaauagagaauuuaaauaaaaaaguugaugaugguuuccuggacauuuggacuuacaaugccgaacuguugguucuacuggaaaaugaaagaacuuuggacuaccacgauucaaaugugaagaacuuauaugaaaagguaagaagccaguuaaaaaacaaugccaaggaaauuggaaacggcugcuuugaauuuuaccacaaaugcgauaacacgugcauggaaagugucaaaaaugggacuuaugacuacccaaaauacucagaggaagcaaaauuaaacagagaagaaauagaugggguaaagcuggaaucaacaaggauuuaccagauuuuggcgaucuauucaacugucgccaguucauugguacugguagucucccugggggcaaucaguuucuggaugugcucuaaugggucucuacaguguagaauauguauuuaa

SEQ ID NO: 39062 - RNA, 1701 nt, Artificial Sequence
  derived and/or modified CDS sequence (wt) from hemagglutinin__InfluenzaA__AEL89852
augaaggcaauacuaguaguucugcuauauacauuugcaaccgcaaaugcagacacauuauguauagguuaucaugcgaacaauucaacagacacuguagacacaguacuagaaaagaauguaacaguaacacacucuguuaaccuucuagaagacaagcauaacgggaaacuaugcaaacugagagggguagccccauugcauuuggguaaauguaacauugcuggcuggauccugggaaauccagagugugaaucacucuccacagcaagcucaugguccuacauuguggaaacaucuaguucagacaauggaacguguuacccaggagauuucaucaauuaugaggagcuaagagagcaauugagcucagugucaucauuugaaagguuugagauauuccccaagacaaguucauggcccaaucaugacucgaacaaagguguaacggcagcauguccucaugcuggagcaaaaagcuucuacaaaaauuuaauauggcuaguuaaaaaaggaaauucauacccaaagcucagcaaauccuacauuaacgauaaagggaaagaaguccucgugcuauggggcauucaccauccaucuacuagugcugaccaacaaagucucuaucagaaugcagaugcauauguuuuuguggggacaucaaaauacagcaagaaguucaagccggaaauagcaguaagacccaaagugagggaucaagaagggagaaugaacuauuacuggacacuaguagagccgggagacaaaauaacauucgaagcaacuggaaaucuauugguaccgagauaugcauucgcaauggaaagaaaugcuggaucugguauuaucauuucagauacaccaguccacgauugcaauacaacuugucagacacccaagggugcuauaaacaccagccucccauuucagaauauacauccgaucacaauuggaaaauguccaaaauauguaaaaagcacaaaauugagacuggccacaggauugaggaaugucccgucuauucaaucuagaggccuauuuggggccauugccgguuucauugaagggggguggacagggaugguagauggaugguacgguuaucaccaucaaaaugagcaggggucaggauaugcagccgaccugaagagcacacagaaugccauugacaagauuacuaacaaaguaaauucuguuauugaaaagaugaauacacaguucacagcaguagguaaagaguucaaccaccuggaaaaaagaauagagaauuuaaauaaaaaaguugaugaugguuuccuggacauuuggacuuacaaugccgaacuguugguucuauuggaaaaugaaagaacuuuggacuaccacgauucaaaugugaaaaacuuauaugaaaagguaagaagccaguuaaaaaacaaugccaaggaaauuggaaacggcugcuuugaauuuuaccacaaaugcgauaacacgugcauggaaagugucaaaaaugggacuuaugacuacccaaaauacucagaggaagcaaaauuaaacagagaagaaauagaugggguaaagcuggaaucaacaaggauuuaccagauuuuggcgaucuauucaacugucgccaguucauugguacugguagucucccugggggcaaucaguuucuggaugugcucuaaugggucucuacaguguagaauauguauuuaa

SEQ ID NO: 39063 - RNA, 1701 nt, Artificial Sequence
  derived and/or modified CDS sequence (wt) from hemagglutinin__InfluenzaA__AEL93568
augaaggcaauacuaguaguucugcuauauacauuugcaaccgcaaaugcagacacauuauguauagguuaccaugcgaacaauucaacagacacuguagacacaguacuagaaaagaauguaacaguaacacacucuguuaaucuucuagaagacaagcauaacgggaaacuaugcaaacuaagagggguagccccauugcauuuggguaaauguaacauugcuggcuggauccugggaaauccagagugugaaucacucuccacagcaagcucaugguccuacauuguggaaacaucuaguucagacaauggaacguguuacccaggagauuucaucgauuaugaggagcuaagagagcaauugagcucagugucaucauuugaaagguuugagauauuccccaaaacaaguucauggcccaaucaugacucgaacaaagguguaacggcagcauguccucaugcuggagcaaaaggcuucuacaaaaauuuaauauggcuaguuaaaaaaggaaauucauacccaaagcucagcaaauccuacauuaaugauaaagggaaagaaguccucgugcuauggggcauucaccauccaucuacuacugcugaccaacaaagucucuaucagaaugcagauacauauguuuuuguggggacaucaagauacagcaagaaguucaagccggaaauagcaauaagacccaaagugagggaucaagaagggagaaugaacuauuacuggacacuaguagagccgggagacaaaauaacauucgaagcaacuggaaaucuagugguaccgagauaugcauucgcaauggaaagaaaugcuggaucugguauuaucauuucagauacaccaguccacgauugcaauacaacuugucagacacccaagggugcuauaaacaccagccucccauuucagaauauacauccgaucacaauuggaaaauguccaaaauauguaaaaagcacaaaauugagacuggccacaggauugaggaaugucccgucuauucaaucuagaggccuauuuggggccauugccggcuucauugaagggggguggacagggaugguagauggaugguacgguuaucaccaucaaaaugagcaggggucaggauaugcagccgaccugaagagcacacagaaugccauugacaagauuacuaacaaaguaaauucuguuauugaaaagaugaauacacaguucacagcaguagguaaagaguucaaccaccuggaaaaaagaauagagaauuuaaauaaaaaaguugaugaugguuuccuggacauuuggacuuacaaugccgaacuguugguucuauuggaaaaugaaagaacuuuggacuaccacgauucaaaugugaagaacuuauaugaaaagguaagaaaccaguuaaaaaacaaugccaaggaaauuggaaauggcugcuuugaauuuuaccacaaaugcgauaacacgugcauggaaagugucaaaaaugggacuuaugacuacccaaaauacucagaggaagcaaaauuaaacagagaagaaauagaugggguaaagcuggaaucaacaaggauuuaccagauuuuggcgaucuauucaacugucgccaguucauugguacugguagucucccugggggcaaucaguuuuuggaugugcucuaaugggucucuacaguguagaauauguauuuaa

SEQ ID NO: 39064 - RNA, 1701 nt, Artificial Sequence
  derived and/or modified CDS sequence (wt) from hemagglutinin__InfluenzaA__AEL93578
augaaggcaauacuaguaguucugcuauauacauuugcaaccgcaaaugcagacacauuauguauagguuaucaugcgaacaauucaacagacacuguagacacaguacuagaaaagaauguaacaguaacacacucuguuaaccuucuagaagacaagcauaacgggaaacuaugcaaacuaagagggguagccccauugcauuuggguaaauguaacauugcuggcuggauccugggaaauccagagugugaaucacucuccacagcaagcucaugguccuacauuguggaaacaucuaguucagacaauggaacguguuacccaggagauuucaucgauuaugaggagcuaagagagcaauugagcucagugucaucauuugaaagguuugagauauuccccaagacaaguucauggcccaaucaugacucgaacaaagguguaacggcagcauguccucaugcuggagcaaaaagcuucuacaaaaauuuaauauggcuaguuaaaaaaggaaauucauacccaaagcucagcaaauccuacauuaaugauaaagggaaagaaguccucgugcuauggggcauucaccauccaucuacuacugcugaccaacaaagucucuaucagaaugcagauacauauguuuuuguggggacaucaagauacagcaagaaguucaagccggaaauagcaauaagacccaaagugagggaucaagaagggagaaugaacuauuacuggacacuaguagagccgggagacaaaauaacauucgaagcaacuggaaaucuagugguaccgagauaugcauucgcaauggaaagaaaugcuggaucugguauuaucauuucagauacaccaguccacgauugcaauacaacuugucagacacccaagggugcuauaaacaccagccucccauuucagaauauacauccgaucacaauuggaaaauguccaaaauauguaaaaagcacaaaauugagacuggccacaggauugaggaaugucccgucuauucaaucuagaggccuauuuggggccauugccggcuucauugaagggggguggacagggaugguagauggaugguacgguuaucaccaucaaaaugagcaggggucaggauaugcagccgaccugaagagcacacagaaugccauugacaagauuacuaacaaaguaaauucuguuauugaaaagaugaauacacaguucacagcaguagguaaagaguucaaccaccuggaaaaaagaauagagaauuuaaauaaaaaaguugaugaugguuuccuggacauuuggacuuacaaugccgaacuguugguucuauuggaaaaugaaagaacuuuggacuaccacgauucaaaugugaagaacuuauaugaaaagguaagaaaccaguuaaaaaacaaugccaaggaaauuggaaauggcugcuuugaauuuuaccacaaaugcgauaacacgugcauggaaagugucaaaaaugggacuuaugacuacccaaaauacucagaggaagcaaaauuaaacagagaagaaauagaugggguaaagcuggaaucaacaaggauuuaccagauuuuggcgaucuauucaacugucgccaguucguugguacugguagucucccugggggcaaucaguuuuuggaugugcucuaaugggucucuacaguguagaauauguauuuaa

SEQ ID NO: 39065 - RNA, 1701 nt, Artificial Sequence
  derived and/or modified CDS sequence (wt) from hemagglutinin__InfluenzaA__AEL93598
augaaggcaauacuaguaguucugcuauauacauuugcaaccgcaaaugcagacacauuauguauagguuaucaugcgaacaauucaacagacacuguagacacaguacuagaaaagaauguaacaguaacacacucuguuaaccuucuagaagacaagcauaacgggaaacuaugcaaacuaagagggguagccccauugcauuuggguaaauguaacauugcuggcuggauccugggaaauccagagugugaaucacucuccacagcaagcucaugguccuacauuguggaaacaucuaguucagacaauggaacguguuacccaggaguuuucaucgauuaugaggagcuaagagagcaauugagcucagugucaucauuugaaagguuugagauauuccccaagacaaguucauggcccaaucaugacucgaacaaagguguaacggcagcauguccucaugcuggagcaaaaagcuucuacaaaaauuuaauauggcuaguuaaaaaaggaaauucauacccaaagcucagcaaauccuacauuaaugauaaagggaaagaaguccucgugcuauggggcauucaccauccaucuacuacugcugaccaacaaagucucuaucagaaugcagaugcauauguuuuuguggggacaucaagauacagcaagaaguucaagccggaaauagcaauaagacccaaagugagggaucaagaagggagaaugaacuauuacuggacacuaguagagccgggagacaaaauaacauucgaagcaacuggaaaucuagugguaccgagauaugcauucgcaauggaaagaaaugcuggaucugguauuaucauuucagauacaccaguccacgauugcaauacaacuugucagacacccaagggugcuauaaacaccagccucccauuucagaauauacauccgaucacaauuggaaaauguccaaaauauguaaaaagcacaaaauugagacuggccacaggauugaggaaugucccgucuauucaaucuagaggccuauuuggggccauugccggcuucauugaagggggguggacagggaugguagauggaugguacgguuaucaccaucaaaaugagcaggggucaggauaugcagccgaccugaagaguacacagaaugccauugacaagauuacuaacaaaguaaauucuguuauugaaaagaugaauacacaguucacagcaguagguaaagaguucaaccaccuggaaaaaagaauagagaauuuaaauaaaaaaguugaugaugguuuccuggacauuuggacuuacaaugccgaacuguugguucuauuggaaaaugaaagaacuuuggacuaccacgauucaaaugugaagaacuuauaugaaaagguaagaaaccaguuaaaaaacaaugccaaggaaauuggaaacggaugcuuugaauuuuaccacaaaugcgauaacacgugcauggaaagugucaaaaaugggacuuaugacuacccaaaauacucagaggaagcaaaauuaaacagagaagaaauagaugggguaaagcuggaaucaacaaggauuuaccagauuuuggcgaucuauucaacugucgccaguucauugguacugguagucucccugggggcaaucaguuucuggaugugcucuaaugggucucuacaguguagaauauguauuuaa

SEQ ID NO: 39066 - RNA, 1701 nt, Artificial Sequence
  derived and/or modified CDS sequence (wt) from hemagglutinin__InfluenzaA__AEL93618
augaaggcaauacuaguaguuaugcuauauacauuugcaaccgcaaaugcagacacauuauguauagguuaucaugcgaacaauucaacagacacuguagacacaguacuagaaaagaauguaacaguaacacacucuguuaaucuucuagaagacaagcauaacgggaaacuaugcaaacuaagagggguagccccauugcauuuggguaaauguaacauugcuggcuggauccugggaaauccagagugugaaucacucuccacagcaagcucaugguccuacauuguggaaacaucuaguucagacaauggaacguguuacccaggagauuucaucgauuaugaggagcuaagagagcaauugagcucagugucaucauuugaaagguuugagauauuccccaagacaaguucauggcccaaucaugacucgaacaaagguguaacggcagcaugcccucaugcuggagcaaaaagcuucuacaaaaauuuaauauggcuaguuaaaaaaggaaauucauacccaaagcucagcaaauccuacauuaaugauaaagggaaagaaguccucgugcuauggggcauucaccauccaucuacuacugcugaccaacaaagucucuaucagaaugcagauacauauguuuuuguggggacaucaagauacagcaagaaguucaagccggaaauagcaauaagacccaaagugagggaucaagaagggagaaugaacuauuacuggacacuaguagagccgggagacaaaauaacauucgaagcaacuggaaaucuagugguaccgagauaugcauucgcaauggaaagaaaugcuggaucugguauuaucauuucagauacaccaguccacgauugcaauacaacuugucagacacccaagggugcuauaaacaccagccucccauuucagaauauacauccgaucacaauuggaaaauguccaaaauauguaaaaagcacaaaauugagacuggccacaggauugaggaaugucccgucuauucaaucuagaggccuauuuggggccauugccggcuucauugaagggggguggacagggaugguagauggaugguacgguuaucaccaucaaaaugagcaggggucaggauaugcagccgaccugaagagcacacagaaugccauugacaagauuacuaacaaaguaaauucuguuauugaaaagaugaauacacaguucacagcaguagguaaagaguucaaccaccuggaaaaaagaauagagaauuuaaauaaaaaaguugaugaugguuuccuggacauuuggacuuacaaugccgaacuguugguucuauuggaaaaugaaagaacuuuggacuaccacgauucaaaugugaagaacuuauaugaaaagguaagaaaccaguuaaaaaacaaugccaaggaaauuggaaauggcugcuuugaauuuuaccacaaaugcgauaacacgugcauggaaagugucaaaaaugggacuuaugacuacccaaaauacucagaggaagcaaaauuaaacagagaagaaauagaugggguaaagcuggaaucaacaaggauuuaccagauuuuggcgaucuauucaacugucgccaguucauugguacugguagucucccugggggcaaucaguuuuuggaugugcucuaaugggucucuacaguguagaauauguauuuaa

SEQ ID NO: 39067 - RNA, 1701 nt, Artificial Sequence; identical to SEQ ID NO: 38450
  derived and/or modified CDS sequence (wt) from hemagglutinin__InfluenzaA__AEL93628

SEQ ID NO: 39068 - RNA, 1701 nt, Artificial Sequence; identical to SEQ ID NO: 38882
  derived and/or modified CDS sequence (wt) from hemagglutinin__InfluenzaA__AEL93638

SEQ ID NO: 39069 - RNA, 1701 nt, Artificial Sequence
  derived and/or modified CDS sequence (wt) from hemagglutinin__InfluenzaA__AEL94870
augaaggcaauacuaguaguucugcuauauacauuugcaaccgcaaaugcagacacauuauguauagguuaucaugcgaacaauucaacagacacuguagacacaguacuagaaaagaauguaacaguaacacacucuguuaaccuucuagaagacaagcauaacgggaaacuaugcaaacuaagagggguagccccauugcauuuggguaaauguaacaucgcuggcuggauccugggaaauccagagugugaaucacucuccacagcaagcucaugguccuacauuguggaaacaucuaguucagacaauggaacguguuacccaggagauuucaucgauuaugaggagcuaagagagcaauugagcucagugucaucauuugaaagguuugagauauuccccaagacaaguucauggcccgaucaugacucgaacaaagguguaacggcagcauguccucaugcuggagcaaaaagcuucuacaaaaauuuaauauggcuaguuaaaaaaggaaauucauacccaaagcucagcaaauccuacauuaaugauaaagggaaagaaguccucgugcuauggggcauucaccauccaucuacuagugcugaccaacaaagucucuaucagaaugcagaugcauauguuuuuguggggacaucaagauacagcaagaaguucaagccggaaauagcaauaagacccaaagugagggaucaagaagggagaaugaacuauuacuggacacuaguagagccgggagacaaaauaacauucgaagcaacuggaaaucuagugguaccgagauaugcauucgcaauggaaagaaaugcuggaucugguauuaucauuucagauacaccagcccacgauugcaauacaacuugucagacacccaagggugcuauaaacaccagccucccauuucagaauauacauccgaucacaauuggaaaauguccaaaauauguaaaaagcacaaaauugagacuggccacaggauugaggaaugucccgucuauucaaucuagaggccuauuuggggccauugccgguuucauugaagggggguggacagggaugguagauggaugguacgguuaucaccaucaaaaugagcaggggucaggauaugcagccgaccugaagagcacacagaaugccauugacaagauuacuaacaaaguaaauucuguuauuaaaaagaugaauacacaguucacagcaguagguaaagaguucaaccaccuggaaaaaagaauagagaauuuaaauaaaaaaguugaugaugguuuccuggacauuuggacuuacaaugccgaacuguugguucuauuggaaaaugaaagaacuuuggacuaccacgauucaaaugugaagaacuuauaugaaaagguaagaagccaguuaaaaaacaaugccaaggaaauuggaaacggcugcuuugaguuuuaccacaaaugcgauaacacgugcauggaaagugucaaaaaugggacuuaugacuacccaaaauacucagaggaagcaaaauuaaacagagaagaaauagaugggguaaagcuggaaucaacaaggauuuaccagauuuuggcgaucuauucaacugucgccaguucauugguacugguagucucccugggggcaaucaguuucuggaugugcucuaaugggucucuacaguguagaauauguauuuaa

SEQ ID NO: 39070 - RNA, 1701 nt, Artificial Sequence
  derived and/or modified CDS sequence (wt) from hemagglutinin__InfluenzaA__AEL95426
augaaggcaauacuaguaguucugcuauauacauuugcaaccgcaaaugcagacacauuauguauagguuaucaugcgaacaauucaacagacacuguagacacaguacuagaaaagaauguaacaguaacacacucuguuaaccuucuagaagacaagcauaacgggaaacuaugcaaacuaagagggguagccccauugcauuuggguaaauguaacauugcuggcuggauccugggaaauccagagugugaaucacucuccacagcaagcucaugguccuacauuguggaaacaucuaguucagacaauggaacguguuacccaggagauuucaucgauuaugaggagcuaagagagcaauugagcucagugucaucauuugaaagguuugagauauuccccaagacaaguucauggcccaaucaugacucgaacaaagguguaacggcagcauguccucaugcuggagcaaaaagcuucuacaaaaauuuaauauggcuaguuaaaaaaggaaauucauacccaaagcucagcaaauccuacauuaaugauaaagggaaagaaguccucgugcuauggggcauucaccauccaucuacuacugcugaccaacaaagucucuaucagaaugcagauacauauguuuuuguggggacaucaagauacagcaagaaguucaagccggaaauagcaacaagacccaaagugagggaucaagaagggagaaugaacuauuacuggacacuaguagagccgggagacaaaauaacauucgaagcaacuggaaaucuagugguaccgagauaugcauucgcaauggaaagaaaugcuggaucugguauuaucauuucagauacaccaguccacgauugcaauacaacuugucagacacccaagggugcuauaaacaccagccucccauuucagaauauacauccgaucacaauuggaaaauguccaaaauauguaaaaagcacaaaauugagacuggccacaggauugaggaaugucccgucuauucaaucuagaggccuauuuggggccauugccggcuucauugaagggggguggacagggaugguagauggaugguacgguuaucaccaucaaaaugagcaggggucaggauaugcagccgaccugaagagcacacagaaugccauugacaagauuacuaacaaaguaaauucuguuauugaaaagaugaauacacaguucacagcaguagguaaagaguucaaccaccuggaaaaaagaauagagaauuuaaauaaaaaaguugaugaugguuuccuggacauuuggacuuacaaugccgaacuguugguucuauuggaaaaugaaagaacuuuggacuaccacgauucaaaugugaagaacuuauaugaaaagguaagaaaccaguuaaaaaacaaugccaaggaaauuggaaauggcugcuuugaauuuuaccacaaaugcgauaacacgugcauggaaagugucaaaaaugggacuuaugacuacccaaaauacucagaggaagcaaaauuaaacagagaagaaauagaugggguaaagcuggaaucaacaaggauuuaccagauuuuggcgaucuauucaacugucgccaguucauugguacugguagucucccugggggcaaucaguuuuuggaugugcucuaaugggucucuacaguguagaauauguauuuaa

SEQ ID NO: 39071 - RNA, 1701 nt, Artificial Sequence
  derived and/or modified CDS sequence (wt) from hemagglutinin__InfluenzaA__AEL97631
augaaggcaauacuaguaguucugcuauauacauuugcaaccgcaaaugcagacacauuauguauagguuaucaugcgaacaauucaacagacacuguagacacaguacuagaaaagaauguaacaguaacacacucuguuaacauucuagaagacaagcauaacgggaaacuaugcaaacuaagagggguagccccauugcauuuggguaaauguaacauugcuggcuggauccugggaaauccagagugugaaucacucuccacagcaagcucaugguccuacauuguggaaacaucuaguucagacaauggaacguguuacccaggagauuucaucgauuaugaggagcuaagagagcaauugagcucagugucaucauuuaaaagguuugagauauuccccaagacaaguucauggcccaaucaugacucgaacaaagguguaacggcagcauguccucaugcuggagcaaaaagcuucuacaaaaauuuaauauggcuaguuaaaaaaggaaacucauacccaaagcucagcaaauccuacauuaaugauaaagggaaagaaguccucgugcuauggggcauucaccauccaucuacuagugcugaccaacaaagccucuaucagaaugcagaugcauauguuuuuguggggacaucaagauacagcaagaaguucaagccggaaauagcaauaagacccaaagugagggaucaagaagggagaaugaacuauuacuggacacuaguagagccgggagacaaaauaacauucgaagcaacuggaaaucuagugguaccgagauaugcauucgcaauggaaagaaaugcuggaucugguauuaucauuucagauacaccaguccacgauugcaauacaacuugucagacacccaagggugcuauaaacaccagccucccauuucagaauauacauccgaccacaauuggaaaauguccaaaauauguaaaaagcacaaaauugagacuggccacaggauugaggaaugucccgucuauucaaucuagaggccuauuuggggccauugccgguuucauugaagggggguggacagggaugguagauggaugguacgguuaucaccaucaaaaugagcaggggucaggauaugcagccgaccugaagagcacacagaaugccauugacgagauuacuaacaaaguaaauucuguuauugaaaagaugaauacacaguucacagcaguagguaaagaguucaaccaccuggaaaaaagaauagagaauuuaaauaaaaagguugaugaugguuuccuggacauuuggacuuacaaugccgaacuguugguucuauuggaaaaugaaagaacuuuggacuaccaugauucaaaugugaagaacuuauaugaaaagguaagaagccaguuaaaaaacaaugccaaggaaauuggaaacggcugcuuugaauuuuaccacaaaugcgauaacacgugcauggaaagugucaaaaaugggacuuaugacuacccaaaauacucagaggaagcaaaauuaaacagagaagaaauagaugggguaaagcuggaaucaacaaggauuuaccagauuuuggcgaucuauucaacugucgccaguucauugguacugguagucucccugggggcaaucaguuucuggaugugcucuaaugggucucuacaguguagaauauguauuuaa

SEQ ID NO: 39072 - RNA, 1701 nt, Artificial Sequence
  derived and/or modified CDS sequence (wt) from hemagglutinin__InfluenzaA__AEL99664
augaaagcaauacuaguaguucugcuauauacauuugcaaccgcaaaugcagacacauuauguauagguuaucaugcgaacaauucaacagacacuguagacacaauacuagaaaagaauguaacaguaacacauucuguuaaccuucuagaagacaagcauaacgggaaacuaugcaaacuaagagggguagccccauugcauuuggguaaauguaacauugcuggcuggauccugggaaauccagagugugaaucacucuccacagcaagcucaugguccuacauuguggaaacaucuaguucagacaauggaacguguuacccaggagauuucaucgauuaugaggaacuaagagagcaauugagcucagugucaucauuuaaaagguuugagauauuccccaagacaaguucauggcccaaucaugacucgaacaaagguguaacggcagcauguccucaugcuggagcaaaaagcuucuacaaaaauuuaauauggcuaguuaaaaaaggaaauucauacccaaagcucagcaaauccuacauuaaugauaaagggaaagaaguccucgugcuauggggcauucaccauccaucuacuagugcugaccaacaaagucucuaucagaaugcagaugcauauguuuuuguggggacaucaagauacagcaagaaguucaagccggaaauagcaauaagacccaaagugagggaucaagaagggagaaugaacuauuacuggacacuaguagagccgggagacaaaauaacauucgaagcaacuggaaaucuagugguaccgagauaugcauucgcaauggaaagaaaugcuggaucugguauuaucauuucagauacaucaguccacgauugcaauacaacuugucagacacccaagggugcuauaaacaccagccucccauuucagaauauacauccgaucacaauuggaaaauguccaaaauauguaaaaagcacaaaauugagacuggccacaggauugaggaaugucccgucuauucaaucuagaggccuauuuggggccauugccgguuucauugaagggggguggacagggaugguagauggaugguacgguuaucaccaucaaaaugagcaggggucaggauaugcagccgaccugaagagcacacagaaugccauugacgagauuacuaacaaaguaaauucuguuauugaaaagaugaauacacaguucacagcaguagguaaagaguucaaccaccuggaaaaaagaauagagaauuuaaauaaaaagguugaugaugguuuccuggacauuuggacuuacaaugccgaacuguugguucuauuggaaaaugaaagaacuuuggacuaccacgauucaaaugugaagaacuuauaugaaaagguaagaagccaguuaaaaaacaaugccaaggaaauuggaaacggcugcuuugaauuuuaccacaaaugcgauaacacgugcauggaaagugucaaaaaugggacuuaugacuacccaaaauacucagaggaagcaaaauuaaacagagaagaaauagaugggguaaagcuggaaucaacaaggauuuaccagauuuuggcgaucuauucaacugucgccaguucauugguacugguagucucccugggggcaaucaguuucuggaugugcucuaaugggucucuacaguguagaauauguauuuaa

SEQ ID NO: 39073 - RNA, 1701 nt, Artificial Sequence
  derived and/or modified CDS sequence (wt) from hemagglutinin__InfluenzaA__AEL99674
augaaggcaauacuaguaguucugcuauauacauuugcaaccgcaaaugcagacacauuauguauagguuaucaugcgaacaauucaacagacacuguagacacaguacuagaaaagaauguaacaguaacacacucuguuaaccuucuagaagacaagcauaacgggaaacuaugcaaacuaagagggguagccccauugcauuuggguaaauguaacauugcuggcuggauccugggaaauccagagugugaaucacucuccacagcaagcucaugguccuacauuguggaaacaucuaguucagacaauggaacguguuacccaggagauuucaucgauuaugaggagcuaagagagcaauugagcucagugucaucauuugaaagguuugagauauuccccaagacaaguucauggcccaaucaugacucgaacaaagguguaacggcagcauguccucaugcuggggcaaaaagcuucuacaaaaauuuaauauggcuaguuaaaaaaggaaauucauacccaaagcucagcaaauccuacauuaaugauaaagggaaagaaguccucgugcuauggggcauucaccauccaucuacuagugccgaccaacaaagucucuaucagaaugcagaugcauauguuuuuguggggacaucaagauacagcaagaaguucaagccggaaauagcaauaagacccaaagugagggaucaagaagggagaaugaacuauuacuggacacuaguagagccgggagacaaaauaauauucgaagcaacuggaaaucuagugguaccgagauaugcauucgcaauggaaagaaaugcuggaucugguauuaucauuucagauacaccaguccacgauugcaauacaacuugucagacacccaagggugcuauaaacaccagccuuccauuucagaauauacauccgaucacaauuggaaaauguccaaaauauguaaaaagcacaaaauugagacuggccacaggauugaggaaugucccgucuauucaaucuagaggccuauuuggggccaucgccgguuucauugaagggggguggacagggaugguagauggaugguacgguuaucaccaucaaaaugagcaggggucaggauaugcagccgaccugaagagcacacagaaugccauugacgagauuacuaacaaaguaaauucuguuauugaaaagaugaauacacaguucacagcaguagguaaagaguucaaccaccuggaaaaaagaauagagaauuuaaauaaaaaaguugaugaugguuuccuggacauuuggacuuacaaugccgaacuguugguucuauuggaaaaugaaagaacuuuggacuaccacgauucaaaugugaagaacuuauaugaaaagguaagaagccaguuaaaaaacaaugccaaggaaauuggaaacggcugcuuugaauuuuaccacaaaugcgauaacacgugcauggaaagugucaaaaaugggacuuaugacuacccaaaauacucagaggaagcaaaauuaaacagagaagaaauagaugggguaaagcuggaaucaacaaggauuuaccagauuuuggcgaucuauucaacugucgccaguucauugguacugguagucucccugggggcaaucaguuucuggaugugcucuaaugggucucuacaguguagaauauguauuuaa

SEQ ID NO: 39074 - RNA, 1689 nt, Artificial Sequence
  derived and/or modified CDS sequence (wt) from hemagglutinin__InfluenzaA__AEM53455
auggccaucauuuaucucauucuccuguucacagcagugagaggggaccagauaugcauuggauaccaugccaauaauuccacagagaaggucgacacaauucuagagcggaacgucacugugacucaugccaaggacauucuugagaagacccauaacggaaaguuaugcaaacuaaacggaaucccuccacuugaacuaggggacuguagcauugccggauggcuccuuggaaauccagaaugugauaggcuucuaagugugccagaaugguccuauauaauggagaaagaaaacccgagagacgguuuguguuauccaggcagcuucaaugauuaugaagaauugaaacaucuccucagcagcgugaaacauuucgagaaaguaaagauucugcccaaagauagauggacacagcauacaacaacuggagguucacgggccugcgcggugucugguaauccaucauucuucaggaacauggucuggcugacaaagaaaggaucaaauuauccgguugccaaaggaucguacaacaauacaagcggagaacaaaugcuaauaauuuggggggugcaccaucccaaugaugagacagaacaaagaacauuguaccagaaugugggaaccuauguuuccguaggcacaucaacauugaacaaaaggucaaccccagacauagcaacaaggccuaaagugaauggacuaggagguagaauggaauucucuuggacccuauuggauaugugggacaccauaaauuuugagaguacugguaaucuaauugcaccagaguauggauucaaaauaucgaaaagagguaguucagggaucaugaaaacagaaggaacacuugggaacugugagaccaaaugccaaacuccuuugggagcaauaaauacaacauugccuuuucacaauguccacccacugacaauaggugagugccccaaauauguaaaaucggagaaguuggucuuagcaacaggacuaaggaauguuccccagauugaaucaagaggauuguuuggggcaauagcugguuuuauagaaggaggauggcaaggaaugguugaugguugguauggauaccaucacagcaaugaccagggaucaggguaugcagcggacaaagaauccacucaaaaggcauuugauggaaucaccaacaagguaaauucugugauugaaaagaugaacacccaauuugaagcuguugggaaagaauucaguaacuuagagagaagacuggagaacuugaacaaaaagauggaagacggguuucuagauguguggacauacaaugcugagcuucuaguucugauggaaaaugagaggacacuugacuuucaugauucuaaugucaagaaucuguaugauaaagucagaaugcagcugagagacaacgucaaagaacuaggaaauggauguuuugaauuuuaucacaaaugugaugaugaaugcaugaauagugugaaaaacgggacguaugauuaucccaaguaugaagaagagucuaaacuaaauagaaaugaaaucaaagggguaaaauugagcagcauggggguuuaucaaauccuugccauuuaugcuacaguagcagguucucugucacuggcaaucaugauggcugggaucucuuucuggaugugcuccaacgggucucugcagugcaggaucugcauauga

SEQ ID NO: 39075 - RNA, 1689 nt, Artificial Sequence; identical to SEQ ID NO: 33632
  derived and/or modified CDS sequence (wt) from hemagglutinin__InfluenzaA__AEM53468

SEQ ID NO: 39076 - RNA, 1698 nt, Artificial Sequence; identical to SEQ ID NO: 34127
  derived and/or modified CDS sequence (wt) from hemagglutinin__InfluenzaA__AEM60037

SEQ ID NO: 39077 - RNA, 1698 nt, Artificial Sequence
  derived and/or modified CDS sequence (wt) from hemagglutinin__InfluenzaA__AEM60058
augaaaguaaaacuacuuguucuguuauguacauuuacagcuacauaugcagacacaauauguauaggcuaccaugccaacaacucgacugacacuguugacacaguacuugagaagaaugugacagugacacacucugucaaccuacuugaggaaagucacaauggaaaacuaugucuacuaaaaggaauagccccacuacaauuggguaauugcagcguugccggauggaucuuaggaaacccagaaugcgaauuacugauuuccaaggaaucaugguccuacauuguagaaacaccaaauccugagaauggaacauguuacccaggauauuucgccgacuaugaggagcugagggagcaauugaguucaguaucuucauuugagagguucgaaauauuccccaaagagagcucauggcccaaucacaccguaaccggaguaucagcaucaugcucccauaacggggaaagcaguuuuuacagaaauuuguuauggcugacggggaagaaugguuuguauccaaaccugagcaaguccuaugcaaacaacaaagagaaagacguccuuguacugugggguguucaucacccgccuaacauaggagaccaaagggcccucuaucauacagaaaaugcuuaugucucuguagugucuucacauuauagcagaagauucaccccagaaauagccaaaagacccaaggugagagaucaggaaggaagaaucaacuacuacuggacucugcuggaacccggggauacaauaauauuugaggcaaauggaaaucuaauagcgccaagguuugcuuucgcacuggguagaggcuuuggaucaggaaucaucaccucaaaugcaccaauggauaaaugugaugcgaagugucaaacaccucagggagcuauaaacagcagucuuccuuuccagaauguacacccagucacaauaggagaguguccaaaguaugucaggaguacaaaauuaagaaugguuacaggacuaaggaacaucccauccauucaauccagagguuuguuuggagccauugccgguuucauugaagggggguggacuggaaugguagaugguugguaugguuaucaccaucagaaugagcaaggaucuggguaugcugcagaucaaaaaagcacacaaaaugccauuaacgggauuacaaacaaggugaauucuguaauugagaaaaugaacacucaauucacagcugugggcaaagaauucaacaaauuggaaagaaggauggaaaauuuaaauaaaaagguugaugauggguuucuagacauuuggacauauaaugcagaauuguugguucuacuggaaaaugaaaggacuuuggacuuccaugacuccaacgugaagaaucuguaugagaaaguaaaaagccaauuaaagaauaaugccaaagaaauaggaaacggguguuuugaauucuaucacaaguguaacgaugaaugcauggagagugugaaaaauggaacuuaugacuauccaaaauauuccgaagaaucaaaguugaacagggagaaaauugauggagugaaauuggaaucaaugggagucuaucagauucuggcgaucuacucaacagucgccaguuccuugguucuuuuggucucccugggggcaaucagcuucuggauguguuccaaugggucuuugcagugucgaauaugcaucuaa

SEQ ID NO: 39078 - RNA, 1701 nt, Artificial Sequence
  derived and/or modified CDS sequence (wt) from hemagglutinin__InfluenzaA__AEM60069
augaagacuaucauugcuuugagcuacauuuucugucugguuuucgcccaaaaacuucccggaaaugacaacagcacagcaacgcugugccugggacaucaugcagugccaaacggaacucuagugaaaacaaucacgaaugaucagauugaagugacuaaugcuacugagcugguucagaguuccucaacagguagaauaugcgacaguccucaccgaauccuugauggaaaaaacugcacacugauagaugcucuauugggagacccucauugugauggcuuccaaaaugagaaaugggaccuuuuuguugaacgcagcaaagcuuacagcaacuguuacccuuaugaugugccggauuaugccucccuuagaucacuaguugccucaucaggcacccuggaguuuaucaaugaagacuucaauuggacuggagucacucagagugggggaagcuaugcuugcaaaaggggaucuguuaaaaguuucuucaguagauugaauugguugcacgaaucagaauacaaauauccagcgcugaacgugacuaugccaaacaauggcaaauuugacaaauuguacauuugggggguucaccauccgagcacagacagagaacaaaccaaccuauauguucgagcaucagggagagucacagucucuaccaagagaagccagcaaacuguaaucccgaauaucgggucuagacccuggguaaggggucuguccaguagaauaagcaucuauuggacaauaguaaaaccgggagacauacuguugauuaauagcaccgggaaccuaauugcuccucgggguuacuucaaaauacgcacugggaaaagcucaauaaugaggucagaugcaccuauuggcaccugcagcucugaaugcaucacuccaaauggaagcauucccaaugacaaacccuuucaaaauguaaacaagaucacauauggggcaugucccagguauguuaagcaaaacacucugaaauuggcaacagggaugcggaauguaccagagaaacaaacuagaggcauauucggcgcaauagcagguuucauagaaaaugguugggagggaaugguagacgguugguacgguuucaggcaucaaaauucugagggcacaggacaagcagcagaucuuaaaagcacucaagcagcaaucgaccaaaucaacgggaaacugaauagguuaaucgagaaaacgaacgagaaauuccaucaaaucgaaaaggaauucucagaaguagaagggagaauucaggaccucgagaaauauguugaagacacuaaaauagaucucuggucuuacaacgcggagcuucuugucgcccuggagaaccaacauacaauugaucugacugacucagaaaugaacaaacuguuugaaaaaacaaggaagcaacugagggaaaaugcugaggacaugggcaaugguugcuucaagauauaccacaaaugugacaaugccugcauagggucaaucagaaauggaacuuaugaccaugauguauacagagacgaagcauuaaacaaccgguuccagaucaaagguguugagcugaagucaggauacaaagacuggaucuuauggauuuccuuugccauaucaugcuuuuugcuuuguguuguuuugcugggguucaucaugugggccugccaaaaaggcaacauuaggugcaacauuugcauuuga

SEQ ID NO: 39079 - RNA, 1701 nt, Artificial Sequence
  derived and/or modified CDS sequence (wt) from hemagglutinin__InfluenzaA__AEM92308
augaaggcaauacuaguaguucugcuauauacauuugcaaccgcaaaugcagacacauuauguauagguuaucaugcgaacaauucaacagacacuguagacacaguacuagaaaagaauguaacaguaacacacucuguuaaccuucuagaagacaagcauaacgggaaacuaugcaaacuaagagggguagccccauugcauuuggguaaauguaacauugcuggcuggauccugggaaauccagagugugaaucacucuccacagcaagcucaugguccuacauuguggaaacaucuaguucagacaauggaacguguuacccaggagauuucaucgauuaugaggagcuaagagagcaauugagcucagugucaucauuugaaagguuugagauauuccccaagacaaguucauggcccaaucaugacucgaacaaagguguaacggcagcauguccucaugcuggagcaaaaagcuucuacaaaaauuuaauuuggcuaguuaaaaaaagaaauucauacccaaagcucagcaaauccuacauuaaugauaaagggaaagaaguccucgugcuauggggcauucaccauccaucuacuagugcugaccaacaaagucucuaucagaaugcagaugcauauguuuuuguggggucaucaagauacagcaagaaguucaagccggaaauagcaauuagacccaaagugagggaucaagaagggagaaugaacuauuacuggacacuaguagagccgggagacaaaauaacauucgaagcaacugaaaaucuagugguaccgagauaugcauucgcaauggaaagaaaugcuggaucugguauuaucauuucagauacaccaguccaugauugcaauacaacuugucagacacccaagggugcuauaaacaccagccucccauuucagaauauacauccgaucacaauuggaaaauguccaaaauauguaaaaagcacaaaauugagacuggccacaggauugaggaaugucccgucuauucaaucuagaggccuauuuggggccauugccgguuucauugaagggggguggacagggaugguagauggaugguacgguuaucaccaucaaaaugagcaggggucaggauaugcagccgaccugaagagcacacagaaugccauugacgagauuacuaacaaaguaaauucuguuauugaaaagaugaauacacaguucacagcaguagguaaagaguucaaccaccuggaaaaaagaauagagaauuuaaauaaaaaaguugaugaugguuuccuggacauuuggacuuacaaugccgaacuguugguucuauuggaaaaugaaagaacuuuggacuaccacgauucaaaugugaagaacuuauaugaaaagguaagaagccagcuaaaaaacaaugccaaggaaguuggaaacggcugcuuugaauuuuaccacaaaugcgauaacacgugcauggaaagugucaaaaaugggacuuaugacuacccaaaauacucagaggaagcaaaauuaaacagagaagaaauagaugggguaaagcuggaaucaacaaggauuuaccagauuuuggcgaucuauucaacugccgccaguucauugguacugguagucucccugggggcaaucaguuucuggaugugcucuaaugggucucuacaguguagaauauguauuuaa

SEQ ID NO: 39080 - RNA, 1701 nt, Artificial Sequence
  derived and/or modified CDS sequence (wt) from hemagglutinin__InfluenzaA__AEM92318
augaaggcaauacuaguaguucugcuauauacauuugcgaccgcaaaugcagacacauuauguauagguuaucaugcgaacaauucaacagacacuguagacacaguacuagaaaagaauguaacaguaacacacucuguugaccuucuagaagacaagcauaacgggaaacuaugcaaacuaagagggguagccccauugcauuuggguaaauguaacauugcuggcuggauccugggaaauccagagugugaaucacucuccacagcaagcucaugguccuacauuguggaaacaucuaguucagacaauggaacguguuacccaggagauuucaucgauuaugaggagcuaagagagcaauugagcucagugucaucauuugaaagguuugaaauauuccccaagacaaguucauggcccaaucaugacucgaacaaagguguaacggcagcauguccucaugcuggagaaaaaagcuucuacaaaaauuuaauauggcuaguuaaaaaaggaaauucauacccaaagcucaacaaauccuacauuaaugauaaagggaaagaaguccucgugcuauggggcauucaccauccaucuacuagugcugaccaacaaagucucuaucagaaugcagaugcauauguuuuuguggggacaucaagauacagcaagaaguuuaagccggaaauagcaauaagacccaaagugagggaucaagaagggagaaugaacuauuacuggacacuaguagagccgggagacaaaauaacauucgaagcaacuggaaaucuagugguaccgagauaugcauucgcaauggaaagaaaugcuggaucugguauuaucauuucagauacaccaauccacgauugcaauacaacuugucagacacccaagggggcuauaaacaccagccucccauuucagaauauacauccgaucacaauuggaaaguguccaaaauauguaaaaagcacaaaauugagacuggccacaggauugaggaaugucccgucuauucaaucuagaggccuauuuggggccauugccgguuucauugaagggggguggacaggaaugguagauggaugguacgguuaucaccaucaaaaugagcaggggucaggauaugcagccgaccugaagagcacacagaaugccauugacgagauuacuaacaaaguaaauucuguuauugaaaagaugaacacacaguucacagcaguagguaaagaguucaaccaccuggaaaaaagaauagagaauuuaaauaaaaaaguugaugaugguuuccuggacauuuggacuuacaaugccgaacuguugguucuauuggaaaaugaaagaacuuuggacuaccacgauucaaaugugaagaacuuauaugaaaagguaagaaaccaguuaaaaaacaaugccaaggaaauuggaaacggcugcuuugaauuuuaccacaaaugcgauaacacgugcauggaaagugucaaaaaugggacuuaugacuacccaaaauacucagaggaagcaaaauuaaacagagaagaaauagaugggguaaagcuggaaucaacaaggauuuaccagauuuuggcgaucuauucaacugucgccaguucauugguacugguagucucccugggggcaaucaguuucuggaugugcucuaaugggucucuacaguguagaauauguauuuaa

SEQ ID NO: 39081 - RNA, 1701 nt, Artificial Sequence
  derived and/or modified CDS sequence (wt) from hemagglutinin__InfluenzaA__AEM92328
augaaggcaauacuaguaguucugcuauauacauuugcaaccgcaaaugcagacacauuauguauagguuaucaugcgaacaauucaacagacacuguagacacaguacuagaaaagaauguaacaguaacacacucuguuaaccuucuagaagacaagcauaacgggaaacuaugcaaacuaagagggguagccccauugcauuuggguaaauguaacauugcuggcuggauccugggaaauccagagugugaaucacucuccacagcaagcucaugguccuacauuguggaaacaucuaguucagacaauggaacguguuacccaggagauuucaucgauuaugaggagcuaagagagcaauugagcucagugucaucauuugaaagguuugagauauuccccaagacaaguucauggcccaaucaugacucgaacaaagguguaacggcagcauguccucaugcuggagcaaaaagcuucuacaaaaauuuaauauggcuaguuaaaaaaggaaauucauacccaaagcucaacauauccuacauuaaugauaaagggaaagaaguccucgugcuauggggcauucaccauccaucuacuacugcugaccaacaaagucucuaucagaaugcagaugcauauguuuuuguggggacaucaagauacagcaagaaguucaagccggaaauagcaauaagacccaaaguaagggaucaagaagggagaaugaacuauuacuggacacuaguagagccuggagacaaaauaacauucgaagcaacuggaaaucuagugguaccgagauaugcauucgcaauggaaagaaaugcuggaucugguauuaucauuucagauacaccaguccacgauugcaauacaacuugucagacacccaagggugcuauaaacaccagccucccauuucagaauauacauccgaucacaauuggaaaauguccaaaauauguaaaaagcacaaaauugagacuggccacaggauugaggaaugucccaucuauucaaucuagaggccuauuuggggccauugccggcuucauugaagggggguggacagggaugguagauggaugguacgguuaucaccaucaaaaugagcaggggucaggauaugcagccgaccugaagagcacacagaaugccauugacaagauuacuaacaaaguaaauucuguuauugaaaagaugaacacacaguucacagcaguagguaaagaguucaaccaccuggaaaaaagaauagagaauuuaaauaaaaaaguugaugaugguuuccuggacauuuggacuuacaaugccgaacuguugguucuauuggaaaaugaaagaacuuuggacuaccacgauucaaaugugaagaacuuauaugaaaagguaagaaaccaguuaaaaaacaaugccaaggaaauuggaaacggcugcuuugaauuuuaccacaaaugcgauaacacgugcauggaaagugucaaaaaugggacuuaugacuacccaaaauacucagaggaagcaaaauuaaacagagaagaaauagaugggguaaagcuggaaucaacaaggauuuaccagauuuuggcgaucuauucaacugucgccaguucauugguacugguagucucccugggggcaaucaguuucuggaugugcucuaaugggucucuacaguguagaauauguauuuaa

SEQ ID NO: 39082 - RNA, 1701 nt, Artificial Sequence
  derived and/or modified CDS sequence (wt) from hemagglutinin__InfluenzaA__AEM92348
augaaggcaauacuaguaguucugcuauauacauuugcgaccgcaaaugcagacacauuauguauagguuaucaugcgaacaauucaacagacacuguagacacaguacuagaaaagaauguaacaguaacacacucuguugaccuucuagaagacaagcauaacgggaaacuaugcaaacuaagagggguagccccauugcauuuggguaaauguaacauugcuggcuggauccugggaaauccagagugugaaucacucuccacagcaagcucaugguccuacauuguggaaacaucuaguucagacaauggaacguguuacccaggagauuucaucgauuaugaggagcuaagagagcaauugagcucagugucaucauuugaaagguuugaaauauuccccaagacaaguucauggcccaaucaugacucgaacaaagguguaacggcagcauguccucaugcuggagaaaaaagcuucuacaaaaauuuaauauggcuaguuaaaaaaggaaauucauacccaaagcucaacaaauccuacauuaaugauaaagggaaagaaguccucgugcuauggggcauucaccauccaucuacuagugcugaccaacaaagucucuaucagaaugcagaugcauauguuuuuguggggacaucaagauacagcaagaaguuuaagccggaaauagcaauaagacccaaagugagggaucaagaagggagaaugaacuauuacuggacacuaguagagccgggagacaaaauaacauucgaagcaacuggaaaucuagugguaccgagauaugcauucgcaauggaaagaaaugcuggaucugguauuaucauuucagauacaccaauccacgauugcaauacaacuugucagacacccaagggggcuauaaacaccagccucccauuucagaauauacauccgaucacaauuggaaaguguccaaaauauguaaaaagcacaaaauugagacuggccacaggauugaggaaugucccgucuauucaaucuagaggccuauuuggggccauugccgguuucauugaagggggguggacaggaaugguagauggaugguacgguuaucaccaucaaaaugagcaggggucaggauaugcagccgaccugaagagcacacagaaugccauugacgagauuacuaacaaaguaaauucuguuauugaaaagaugaauacacaguucacagcaguagguaaagaguucaaccaccuggaaaaaagaauagagaauuuaaauaaaaaaguugaugaugguuuccuggacauuuggacuuacaaugccgaacuguugguucuauuggaaaaugaaagaacuuuggacuaccacgauucaaaugugaagaacuuauaugaaaagguaaaaagccaguuaaaaaacaacgccaaggaaauuggaaacggcugcuuugaauuuuaccacaaaugcgauaacacgugcauggaaagugucaaaaaugggacuuaugacuacccaaaauacucagaggaagcaaaauuaaacagagaaaaaauagaugggguaaagcuggaaucaacaaggauuuaccagauuuuggcgaucuauucaacugucgccaguucauugguacugguagucucccugggggcaaucaguuucuggaugugcucuaaugggucucuacaguguagaauauguauuuaa

SEQ ID NO: 39083 - RNA, 1701 nt, Artificial Sequence
  derived and/or modified CDS sequence (wt) from hemagglutinin__InfluenzaA__AEM92358
augaaggcaauacuaguaguucugcuauauacauuugcaaccgcaaaugcagacacauuauguauagguuaucaugcgaacaauucaacagacacuguagacacaguacuagaaaagaauguaacaguaacacacucuguuaaccuucuagaagacaagcauaacgggaaacuaugcaaacuaagagggguagccccauugcauuuggguaaauguaacauugcuggcuggauccugggaaauccagagugugaaucacucuccacagcaagcucaugguccuacauuguggaaacaucuaguucagacaauggaacguguuacccaggagauuucaucaauuaugaggagcuaagagagcaauugagcucagugucaucauuugaaagguuugagauauuccccaagacaaguucauggcccaaucaugacucgaacaaagguguaacggcagcauguccucaugcuggagcaaaaagcuucuacaaaaauuuaauauggcuaguuaaagaaggaaauucauacccaaagcucagcaaauccuacauuaaugauaaagggaaagaaguccucgugcuauggggcauucaccauccaucuacuacuacugaccaacaaagucucuaucagaaugcagaugcauauguuuuuguggggacaucaagauacagcaagaaguucaagccggaaauagcaauaagacccaaaaugagggaucaagaagggagaaugaacuauuacuggacacuaguagagccgggagacaaaauaacauuugaagcaacuggaaaucuagugguaccgagauaugcauucgcaauggaaagaaaugcuggaucugguauuaucauuucagauacaccaguccacgauugcaauacaacuugucagacacccaagggugcuauaaacaccagccucccauuucagaauauacauccgaucacaauuggaaaauguccaaaauauguaaaaagcacaaaauugagacuggccacaggauugaggaaugucccgucuauucaaucuagaggccuauuuggggccauugccggcuucauugaagggggguggacagggaugguagauggaugguacgguuaucaccaucaaaaugagcaggggucaggauaugcagccgaccugaagagcacacagaaugccauugacaagauuacuaacaaaguaaauucuguuauugaaaagaugaauacacaguucacagcaguagguaaagaguucaaccaccuggaaaaaagaauagagaauuuaaauaaaaaaguugaugaugguuuccuggacauuuggacuuacaaugccgaacuguugguucuauuggaaaaugaaagaacuuuggacuaccacgauucaaaugugaagaacuuauaugaaaagguaagaaaccaguuaaaaaacaaugccaaggaaauuggaaacggcugcuuugaauuuuaccacaaaugcgauaacacgugcauggaaagugucaaaaaugggacuuaugacuacccaaaauacucagaggaagcaaaauuaaacagagaagaaauagaugggguaaagcuggaaucaacaaggauuuaccagauuuuggcgaucuauucaacugucgccaguucauugguacugguagucucccugggggcaaucagcuucuggaugugcucuaaugggucucuacaguguagaauauguauuuaa

SEQ ID NO: 39084 - RNA, 1701 nt, Artificial Sequence
  derived and/or modified CDS sequence (wt) from hemagglutinin__InfluenzaA__AEM92368
augaaggcaauacuaguaguucugcuauauacauuugcaaccgcaaaugcagacacauuauguauagguuaucaugcgaacaauucaacagacacuguagacacaguacuagaaaagaauguaacaguaacacacucuguuaaccuucuagaagacaagcauaacgggaaacuaugcaaacuaagagggguagccccauugcauuuggguaaauguaacauugcuggcuggauccugggaaauccagagugugaaucacucuccacagcaagcucaugguccuacauuguggaaacaucuaguucagacaauggaacguguuacccaggagauuucaucgauuaugaggagcuaagagagcaauugagcucagugucaucauuugaaagguuugagauauuccccaagacaaguucauggcccaaucaugacucgaacaaagguguaacggcagcauguccucaugcuggagcaaaaagcuucuacaaaaauuuaauauggcuaguuaaaaaaggaaauucauacccaaagcucaacaaauccuacauuaaugauaaagggaaagaaguccucgugcuauggggcauucaccauccaucuacuacugcugaccaacaaagucucuaucagaaugcagaugcauauguuuuuguggggacaucaagauacagcaagaaguucaagccggaaauagcaauaagacccaaagugagggaucaagaagggagaaugaacuauuacuggacacuaguagagccuggagacaaaauaacauucgaagcaacuggaaaucuagugguaccgagauaugcauucgcaauggaaagaaaugcuggaucugguauuaucauuucagauacaccaguccacgauugcaauacaacuugucagacacccaagggugcuauaaacaccagccucccauuucagaauauacauccgaucacaauuggaaaauguccaaaauauguaaaaagcacaaaauugagacuggccacaggauugaggaaugucccaucuauucaaucuagaggccuauuuggggccauugccggcuucauugaagggggguggacagggaugguagauggaugguacgguuaucaccaucaaaaugagcaggggucaggauaugcagccgaccugaagagcacacagaaugccauugacaagauuacuaacaaaguaaauucuguuauugaaaagaugaacacacaguucacagcaguagguaaagaguucaaccaccuggaaaaaagaauagagaauuuaaauaaaaaaguugaugaugguuuccuggacauuuggacuuacaaugccgaacuguugguucuauuggaaaaugaaagaacuuuggacuaccacgauucaaaugugaagaacuuauaugaaaagguaagaaaccaguuaaaaaacaaugccaaggaaauuggaaacggcugcuuugaauuuuaccacaaaugcgauaacacgugcauggaaagugucaaaaaugggacuuaugacuacccaaaauacucagaggaagcaaaauuaaacagagaagaaauagaugggguaaagcuggaaucaacaaggauuuaccagauuuuggcgaucuauucaacugucgccaguucauugguacugguagucucccugggggcaaucaguuucuggaugugcucuaaugggucucuacaguguagaauauguauuuaa

SEQ ID NO: 39085 - RNA, 1701 nt, Artificial Sequence
  derived and/or modified CDS sequence (wt) from hemagglutinin__InfluenzaA__AEM92378
augaaggcaauacuaguaguucugcuauauacauuugcaaccgcaaaugcagacacauuauguauagguuaucaugcgaacaauucaacagacacuguagacacaguacuagaaaagaauguaacaguaacacacucuguuaaccuucuagaagacaagcauaacgggaaacuaugcaaacuaagagggguagccccauugcauuuggguaaauguaacauugcuggcuggauccugggaaauccagagugugaaucacucuccacagcaagcucaugguccuacauuguggaaacaucuaguucagacaauggaacguguuacccaggagauuucaucgauuaugaggagcuaagagagcaauugaacucagugucaucauuugaaagguuugagauauuccccaagacaaguucauggcccaaucaugacucgaacaaagguguaacggcagcauguccucaugcuggagcaaaaagcuucuacaaaaauuuaauauggcuaguuaaaaaaggaaauucauacccaaagcucaacaaauccuacauuaaugauaaagggaaagaaguccucgugcuauggggcauucaccauccaucuacuacugcugaccaacaaagucucuaucagaaugcagaugcauauguuuuuguggggacaucaagauacagcaagaaguucaagccggaaauagcaauaagacccaaagugagggaucaagaagggagaaugaacuauuacuggacacuaguagagccuggagacaaaauaacauucgaagcaacuggaaaucuagugguaccgagauaugcauucgcaauggaaagaaaugcuggaucugguauuaucauuucagauacaccaguccacgauugcaauacaacuugucagacacccaagggugcuauaaacaccagccucccauuucagaauauacauccgaucacaauuggaaaauguccaaaauauguaaaaagcacaaaauugagacuggccacaggauugaggaaugucccaucuauucaaucuagaggccuauuuggggccauugccggcuucauugaagggggguggacagggaugguagauggaugguacgguuaucaccaucaaaaugagcaggggucaggauaugcagccgaccugaagagcacacagaaugccauugacaagauuacuaacaaaguaaauucuguuauugaaaagaugaacacacaguucacagcaguagguaaagaguucaaccaccuggaaaaaagaauagagaauuuaaauaaaaaaguugaugaugguuuccuggacauuuggacuuacaaugccgaacuguugguucuauuggaaaaugaaagaacuuuggacuaccacgauucaaaugugaagaacuuauaugaaaagguaagaaaccaguuaaaaaacaaugccaaggaaauuggaaacggcugcuuugaauuuuaccacaaaugcgauaacacgugcauggaaagugucaaaaaugggacuuaugacuacccaaaauacucagaggaagcaaaauuaaacagagaagaaauagaugggguaaagcuggaaucaacaaggauuuaccagauuuuggcgaucuauucaacugucgccaguucauugguacugguagucucccugggggcaaucaguuucuggaugugcucuaaugggucucuacaguguagaauauguauuuaa

SEQ ID NO: 39086 - RNA, 1701 nt, Artificial Sequence
  derived and/or modified CDS sequence (wt) from hemagglutinin__InfluenzaA__AEM92407
augaaggcaauacuaguaguucugcuauauacauuugcaacugcaaaugcagacacauuaugcauagguuaucaugcgaacaauucaacagacacuguagacacaguacuagaaaagaauguaacaguaacacacucuguuaaccuucuagaagacaagcauaacgggaaacuaugcaaacuaagagggguagccccauugcauuuggguaaauguaacauugcuggcuggaucuugggaaauccagagugugaaucacucuccacagcaaacucaugguccuacauuguggaaacauccaguucagacaauggaacguguuacccaggagauuucaucgauuaugaggagcuaagagagcaauugagcucagugucaucauucgaaagguuugagauauuccccaagacaaauucauggcccaaucaugacucgaacaaagguguaacggcagcauguccucaugcuggagcaaaaagcuucuacaaaaauuuaauauggcuaguuaaaaaaggaaauucauacccaaagcucagcaaauccuacauuaaugauaaaggaaaagaaguccucgugcuauggggcauucaccauccaucuacuaguacugaccaacaaagucucuaucagaaugcagaugcauauguuuuuguggggacaucaagauacagcaagaaguuuaagccggaaauagcaauaagacccaaagugaggaaucaagaagggagaaugaacuauuacuggacacuaguagagccgggagacaaaauaacauucgaagcaacuggaaaucuagugguaccgagauaugcauucacaauugaaagaaaugcuggaucugguauuaucauuucagauacaccaauccacgauugcaauacaacuugucagacacccaagggggcuauaaacaccagccucccauuucagaauauacauccgaucacaauuggaaaguguccaaaauauguaaaaagcacaaaauugcgacuggccacaggauugaggaaugucccgucuauucaaucuagaggccuauuuggggccauugccgguuucauugaagggggguggacaggaaugguagauggaugguacgguuaucaccaucaaaaugagcaggggucaggauaugcagccgaccugaagagcacacagaaugccauugacgagauuacuaacaaaguaaauucuguuauugaaaagaugaauacacaguucacagcaguaggcaaagaguucaaccaccuggaaaaaagaauagagaauuuaaauaaaaaaguugaugaugguuuccuggacauuuggacucacaaugccgaacuguugguucuauuggaaaaugaaagaacuuuggacuaccacgauucaaaugugaagaacuuauaugaaaagguaagaagccaguuaaaaaacaaugccaaggaaauuggaaacggcugcuuugaauuuuaccacaaaugcgauaacacgugcauggaaagugucaaaaaugggacuuaugacuacccaaaauacucagaggaagcaaaauuaaacagagaagaaauagaugggguaaagcuggaaucaacaaggauuuaccagauuuuggcgaucuauucaacugucgccaguucauugguacugguagucucccugggggcaaucaguuucuggaugugcucuaugggaucucuacaguguagaauauguauuuaa

SEQ ID NO: 39087 - RNA, 1701 nt, Artificial Sequence
  derived and/or modified CDS sequence (wt) from hemagglutinin__InfluenzaA__AEM92417
augaaggcaauacuaguaguucugcuauauacauuugcaaccgcaaaugcagacacauuauguauagguuaucaugcgaacaauucaacagacacuguagacacaguacuagaaaagaauguaacaguaacacacucuguuaacauucuagaagacaagcauaacgggaaacuaugcaaacuaagagggguagccccauugcauuuggguaaaugcaacauugcuggcuggauccugggaaauccagagugugaaucacucuccacagcaagcucaugguccuacauuguggaaacaucuaguucagacaauggaacguguuacccaggagauuucaucgauuaugaggagcuaagagagcaauugagcucagugucaucauuugaaagguuugagauauuccccaaggcaaguucauggcccaaucaugacucgaacaaagguguaacggcagcauguccucaugcuggagcaaaaagcuucuacaaaaauuuaauauggcuaguuaaaaaagaaaauucauacccaaagcucagcaaauccuacauuaaugauaaagggaaagaaguccucgugcuauggggcauucaccauccaucuacuagugcugaccaacaaagucucuaucagaaugcagaugcauauguuuuuguggggucaucaagauacagcaagaaguucaagccggaaauagcaauaagacccaaagugagggaucaagaagggagaaugaacuauuacuggacacuaguagagccgggagacaaaauaacauucgaagcaacuggaaaucuagugguaccgagauaugcauucgcaauggaaagaaaugcuggaucugguauuaucauuucagauacaccaguccacgauugcaauacaacuugucagacacccaagggugcuauaaacaccagccucccauuucagaauauacauccgaucacaauuggaaaauguccaaaauauguaaaaagcacaaaauugagacuggccacaggauugaggaaugucccgucuauucaaucuagaggccuauuuggggccauugccgguuucauugaagggggguggacagggaugguagauggaugguacgguuaucaccaucaaaaugagcaggggucaggauaugcagccgaccugaagagcacacagaaugccauugacgagauuacuaacaaaguaaauucuguuauugaaaagaugaauacacaguucacagcaguagguaaagaguucaaccaccuggaaaaaagaauagagaauuuaaauaaaaaaguugaugaugguuuccuggacauuuggacuuacaaugccgaacuguugguucuauuggaaaaugaaagaacuuuggacuaccacgauucaaaugugaagaacuuauaugaaaagguaagaagccagcuaaaaaacaaugccaaggaaauuggaaacggcugcuuugaauuuuaccacaaaugcgauaacacgugcauggaaagugucaaaaaugggacuuaugacuacccaaaauacucagaggaagcaaaauuaaacagagaagaaauagaugggguaaagcuggaaucaacaaggauuuaccagauuuuggcgaucuauucaacugucgccaguucauugguacugguagucucccugggggcaaucaguuucuggaugugcucuaaugggucucuacaguguagaauauguauuuaa

SEQ ID NO: 39088 - RNA, 1701 nt, Artificial Sequence
  derived and/or modified CDS sequence (wt) from hemagglutinin__InfluenzaA__AEM92428
augaaggcaauacuaguaguucugcuauauacauuugcaaccgcaaaugcagacacauuauguauagguuaucaugcgaacaauucaacagacacuguagacacaguacuagaaaagaauguaacaguaacacacucuguuaaccuucuagaagacaagcauaacgggaaacuaugcaaacuaagagggguagccccauugcauuuggguaaauguaacauugcuggcuggauccugggaaauccagagugugaaucacucuccacagcaagcucaugguccuacauuguggaaacaucuaguucagacaauggaacguguuacccaggagauuucaucgauuaugaggagcuaagagagcaauugagcucagugucaucauuugaaagguuugagauauuccccaagacaaguucauggcccaaucaugacucgaacaaagguguaacggcagcauguccucaugcuggagcaaaaagcuucuacaaaaauuuaauauggcuaguuaaaaaaggaaauucauacccaaagcucagcaaauccuacauuaaugauaaagggaaagaaguccucgugcuauggggcauucaccauccaucuacuagugcugaccaacaaagucucuaucagaaugcagaugcauauguuuuuguggggacaucaagauacagcaagaaguucaagccggaaauagcaauaagacccaaagugagggaucaagaagggagaaugaacuauuacuggacacuaguagagccgggagacaaaauaacauucgaagcaacuggaaaucuagugguaccgagauaugcauucgcaauggaaagaaaugcuggaucugguauuaucauuucagauacaccaguccacgauugcaauacaacuugucagacacccaagggugcuauaaacaccagccucccauuucagaauauacauccgaucacaauuggaaaauguccaaaauauguaaaaagcacaaaauugagacuggccacaggauugaggaaugucccgucuauucaaucuagaggccuauuuggggccauugccgguuucauugaagggggguggacagggaugguagauggaugguacgguuaucaccaucaaaaugagcaggguucaggauaugcagccgaccugaagagcacacagaaugccauugacgagauuacuaacaaaguaaauucuguuauugaaaagaugaauacacaguucacagcaguagguaaagaguucaaccaccuggaaaaaagaauagagaauuuaaauaaaaaaguugaugaugguuuccuggacauuuggacuuacaaugccgaacuguugguucuauuggaaaaugaaagaacuuuggacuaccacgauucaaaugugaagaacuuauaugaaaagguaagaagccagcuaaaaaacaaugccaaggaaauuggaaacggcugcuuugaauuuuaccacaaaugcgauaacaugugcauggaaagugucaaaaaugggacuuaugacuacccaaaauacucagaggaagcaaaauuaaacagagaagaaauagaugggguaaagcuggaaucaacaaggauuuaccagauuuuggcgaucuauucaacugucgccaguucauugguacugguagucucccugggggcaaucaguuucuggaugugcucuaaugggucucuacaguguagaauauguauuuaa

SEQ ID NO: 39089 - RNA, 1701 nt, Artificial Sequence
  derived and/or modified CDS sequence (wt) from hemagglutinin__InfluenzaA__AEM92438
augaaggcaauacuaguaguucugcuauauacauuugcaaccgcaaaugcagacacauuauguauagguuaucaugcgaacaauucaacagacacuguagacacaguacuagaaaagaauguaacaguaacacacucuguuaaucuucuagaagacaagcauaacgggaaacuaugcaaacuaagagggguagccccauugcauuuggguaaauguaacauugcuggcuggauccugggaaauccagagugugaaucacucuccacagcaagcucaugguccuacauuguggaaacaucuaguucagacaauggaacguguuacccaggagauuucaucgauuaugaggagcuaagagagcaauugagcucagugucaucauuugaaagguuugagauauuccccaagacaaguucauggcccaaucaugacucgaacaaagguguaacggcagcauguccucaugcuggagcaaaaggcuucuacaaaaauuuaauauggcuaguuaaaaaaggaaauucauacccaaagcucagcaaauccuacauuaaugauaaagggaaagaaguccucgugcuauggggcauucaccauccaucuacuacugcugaccaacaaagucucuaucagaaugcagauacauauguuuuuguggggacaucaagauacagcaagaaguucaagccggaaauagcaauaagacccaaagugagggaucaagaagggagaaugaacuauuacuggacacuaguagagccgggagacaaaauaacauucgaagcaacuggaaaucuagugguaccgagauaugcauucgcaauggaaagaaaugcuggaucugguauuaucauuucagauacaccaguccacgauugcaauacaacuugucagacacccaagggugcuauaaacaccagccucccauuucagaauauacauccgaucacaauuggaaaauguccaaaauauguaaaaagcacaaaauugagacuggccacaggauugaggaaugucccgucuauucaaucuagaggccuauuuggggccauugccggcuucauugaagggggguggacagggaugguagauggaugguacgguuaucaccaucaaaaugagcaggggucaggauaugcagccgaccugaagagcacacagaaugccauugacaagauuacuaacaaaguaaauucuguuauugaaaagaugaauacacaguucacagcaguagguaaagaguucaaccaccuggaaaaaagaauagagaauuuaaauaaaaaaguugaugaugguuuccuggacauuuggacuuacaaugccgaacuguugguucuauuggaaaaugaaagaacuuuggacuaccacgauucaaaugugaagaacuuauaugaaaagauaagaaaccaguuaaaaaacaaugccaaggaaauuggaaauggcugcuuugaauuuuaccacaaaugcgauaacacgugcauggaaagugucaaaaaugggacuuaugacuacccaaaauacucagaggaagcaaaauuaaacagagaagaaauagaugggguaaagcuggaaucaacaaggauuuaccagauuuuggcgaucuauucaacugucgccaguucauugguacugguagucucccugggggcaaucaguuucuggaugugcucuaaugggucucuacaguguagaauauguauuuaa

SEQ ID NO: 39090 - RNA, 1701 nt, Artificial Sequence
  derived and/or modified CDS sequence (wt) from hemagglutinin__InfluenzaA__AEM92448
augaaggcaauacuaguaguucugcuauauacauuugcaaccgcaaaugcagacacauuauguauagguuaucaugcgaacaauucaacagacacuguagacacaguacuagaaaagaauguaacaguaacacacucuguuaaccuucuagaagacaagcauaacgggaaacuaugcaaacugagagggguagccccauugcauuuggguaaauguaacauugcuggcuggauccugggaaauccagagugugaaucacucuccacagcaagcucaugguccuacaucguggaaacaucuaguucagacaauggaacgugcuacccaggagauuucaucaauuaugaggagcuaagagagcaauugagcucagugucaucauuugaaagguuugagauauuccccaagacaaguucauggcccaaucaugacucgaacaaagguguaacggcagcauguccucaagcuggagcaaaaagcuucuacaaaaauuuaauauggcuaguuaaaaaaggaaauucauacccaaagcucagcaaauccuacauuaacgauaaagggaaagaaguccucgugcuauggggcauucaccauccaucuacuagugcugaccaacaaagucucuaucagaaugcagaugcauauguuuuuguggggacaucaaaauacagcaagaaguucaagccggaaauagcaguaagacccaaagugagggaucaagaagggagaaugaacuauuacuggacacuaguagagccgggagacaaaauaacauucgaagcaacuggaaaucuauugguaccgagauaugcauucgcaauggaaagaaaugcuggaucugguauuaucauuucagauacaccaguccacgauugcaauacaacuugucagacacccaagggugcuauaaacaccagccucccauuucagaauauacauccgaucacaauuggaaaaugucccaaauauguaaaaagcacaaaauugagacuggccacaggauugaggaaugucccgucuauucaaucuagaggccuauuuggggccauugccgguuucauugaagggggguggacagggaugguagauggaugguacgguuaucaccaucaaaaugcgcaggggucaggauaugcagccgaccugaagagcacacagaaugccauugacaagauuacuaacaaaguaaauucuguuauugaaaagaugaauacacaguucacagcaguagguaaagaguucaaccaccuggaaaaaagaauagagaauuuaaauaaaaaaguugaugaugguuuccuggacauuuggacuuacaaugccgaacuguugguucuauuggaaaaugaaagaacuuuggacuaccacgauucaaaugugaaaaacuuauaugaaaagguaagaagccaguuaaaaaacaaugccaaggaaauuggaaacggcugcuuugaauuuuaccacaaaugcgauaacacgugcauggaaagugucaaaaaugggacuuaugacuacccaaaauacucagaggaagcaaaauuaaacagagaagaaauagaugggguaaagcuggaaucaacaaggauuuaccagauuuuggcgaucuauucaacugucgccaguucauugguacugguagucucccugggggcaaucaguuucuggaugugcucuaaugggucucuacaguguagaauauguauuuaa

SEQ ID NO: 39091 - RNA, 1701 nt, Artificial Sequence; identical to SEQ ID NO: 39090
  derived and/or modified CDS sequence (wt) from hemagglutinin__InfluenzaA__AEM92458

SEQ ID NO: 39092 - RNA, 1701 nt, Artificial Sequence
  derived and/or modified CDS sequence (wt) from hemagglutinin__InfluenzaA__AEM92468
augaaggcaauacuaguaguucugcuauauacauuugcaaccgcaaaugcagacacauuauguauagguuaucaugcgaacaauucaacagacacuguagacacaguacuagaaaagaauguaacaguaacacacucuguuaaccuucuagaagacaagcauaacgggaaacuaugcaaacugagagggguagccccauugcauuuggguaaauguaacauugcuggcuggauccugggaaauccagagugugaaucacucuccacagcaagcucaugguccuacauuguggaaacaucuaguucagacaauggaacguguuacccaggagauuucaucaauuaugaagagcuaagagagcaauugagcucagugucaucauuugaaagguuugagauauuccccaagacaaguucauggcccaaucaugacucgaacaaagguguaacggcagcauguccucaugcuggagcaaaaagcuucuacaaaaauuuaauauggcuaguuaaaaaaggaaauucauacccaaagcucagcaaauccuacauuaacgauaaagggaaagaaguccucgugcuauggggcauucaccauccaucuacuagugcugaccaacaaagucucuaucagaaugcagaugcauauguuuuuguggggacaucaaaauacagcaaggaguucaagccggaaauagcaguaagacccaaagugagggaucaagaagggagaaugaacuauuacuggacacuaguagagccgggagacaaaauaacauucgaagcaacuggaaaucuauugguaccgagauaugcauucgcaauggaaagaaaugcuggaucugguauuaucauuucagauacaccaguccacgauugcaauacaauuugucagacacccaagggugcuauaaacaccagccucccauuucagaauauacauccgaucacaauuggaaaauguccaaaauauguaaaaagcacaaaauugagacuggccacaggauugaggaaugucccgucuauucaaucuagaggccuauuuggggccauugccgguuucauugaagggggguggacagggaugguagauggaugguacgguuaucaccaucaaaaugagcaggggucaggauaugcagccgaccugaagagcacacagaaugcuauugacaagauuacuaacaaaguaaauucuguuauugaaaagaugaauacacaguucacagcaguagguaaagaguucaaccaccuggaaaaaagaauagagaauuuaaauaaaaaaguugaugaugguuuccuggacauuuggacuuacaaugccgaacuguugguucuauuggaaaaugaaagaacuuuggacuaccacgauucaaaugugaaaaacuuauaugaaaagguaagaagccaguuaaaaaacaaugccaaggaaauuggaaacggcugcuuugaauuuuaccacaaaugcgauaacacgugcauggaaagugucaaaaaugggacuuaugacuacccaaaauacucagaggaagcaaaauuaaacagagaagaaauagaugggguaaagcuggaaucaacaaggauuuaccagauuuuggcgaucuauucaacugucgccaguucauugguacugguagucucccugggggcaaucaguuucuggaugugcucuaaugggucucuacaguguagaauauguauuuaa

SEQ ID NO: 39093 - RNA, 1701 nt, Artificial Sequence
  derived and/or modified CDS sequence (wt) from hemagglutinin__InfluenzaA__AEM92478
augaaggcaauacuaguaguucugcuauauacauuugcaaccgcaaaugcagacacauuauguauagguuaucaugcgaacaauucaacagacacuguagacacaguacuagaaaagaauguaacaguaacacacucuguuaaccuucuagaagacaagcauaacgggaaacuaugcaaacugagagggguagccccauugcauuuggguaaauguaacauugcuggcuggauccugggaaauccagagugugaaucacucuccacagcaagcucaugguccuacauuguggaaacaucuaguucagacaauggaacguguuacccaggagauuucaucaauuaugaagagcuaagagagcaauugagcucagugucaucauuugaaagguuugagauauuccccaagacaaguucauggcccaaucaugacucgaacaaagguguaacggcagcauguccucaugcuggagcaaaaagcuucuacaaaaauuuaauauggcuaguuaaaaaaggaaauucauacccaaagcucagcaaauccuacauuaacgauaaagggaaagaaguccucgugcuauggggcauucaccauccaucuacuagugcugaccaacaaagucucuaucagaaugcagaugcauauguuuuuguggggacaucaaaauacagcaagaaguucaagccggaaauagcaguaagacccaaagugagggaucaagaagggagaaugaacuauuacuggacacuaguagagccgggagacaaaauaacauucgaagcaacuggaaaucuauugguaccgagauaugcauucgcaauggaaagaaaugcuggaucugguauuaucauuucagauacaccaguccacgauugcaauacaauuugucagacacccaagggugcuauaaacaccagccucccauuucagaauauacauccgaucacaauuggaaaauguccaaaauauguaaaaagcacaaaauugagacuggccacaggauugaggaaugucccgucuauucaaucuagaggccuauuuggggccauugccgguuucauugaagggggguggacagggaugguagauggaugguacgguuaucaccaucaaaaugagcaggggucaggauaugcagccgaccugaagagcacacagaaugcuauugacaagauuacuaacaaaguaaauucuguuauugaaaagaugaauacacaguucacagcaguagguaaagaguucaaccaccuggaaaaaagaauagagaauuuaaauaaaaaaguugaugaugguuuccuggacauuuggacuuacaaugccgaacuguugguucuauuggaaaaugaaagaacuuuggacuaccacgauucaaaugugaaaaacuuauaugaaaagguaagaagccaguuaaaaaacaaugccaaggaaauuggaaacggcugcuuugaauuuuaccacaaaugcgauaacacgugcauggaaagugucaaaaaugggacuuaugacuacccaaaauacucagaggaagcaaaauuaaacagagaagaaauagaugggguaaagcuggaaucaacaaggauuuaccagauuuuggcgaucuauucaacugucgccaguucauugguacugguagucucccugggggcaaucaguuucuggaugugcucuaaugggucucuacaguguagaauauguauuuaa

SEQ ID NO: 39094 - RNA, 1701 nt, Artificial Sequence
  derived and/or modified CDS sequence (wt) from hemagglutinin__InfluenzaA__AEM92498
augaaggcaauacuaguaguucugcuauauacauuugcaacugcaaaugcagacacauuaugcauagguuaucaugcgaacaauucaacagacacuguagacacaguacuagaaaagaauguaacaguaacacacucuguuaaccuucuagaagacaagcauaacgggaaacuaugcaaacuaagagggguagccccauugcauuuggguaaauguaacauugcuggcuggaucuugggaaauccagagugugaaucacucuccacagcaaacucaugguccuacauuguggaaacauccaguucagacaauggaacguguuacccaggagauuucaucgauuaugaggagcuaagagagcaauugagcucagugucaucauucgaaagguuugagauauuccccaagacaaauucauggcccaaucaugacucgaacaaagguguaacggcagcauguccucaugcuggagcaaaaagcuucuacaaaaauuuaauauggcuaguuaaaaaaggaaauucauacccaaagcucagcaaauccuacauuaaugauaaagggaaagaaguccucgugcuauggggcauucaccauccaucuacuagugcugaccaacaaagucucuaucagaaugcagaugcauauguuuuuguggggacaucaagauacagcaagaaguucaagccggaaauagcaauaagacccaaagugagggaucaagaagggagaaugaacuauuacuggacacuaguagagccgggagacaaaauaacauucgaagcaacuggaaaucuagugguaccgagauaugcauucgcaauggaaagaaaugcuggaucugguauuaucauuucagauacaccagcccacgauugcaauacaacuugucagacacccaagggugcuauaaacaccagccucccauuucagaauauacauccgaucacaauuggaaaauguccaaaauauguaaaaagcaccaaauugagacuggccacaggauugaggaaugucccguccauucaaucuagaggccuauuuggggccauugccgguuucauugaagggggguggacagggaugguagauggaugguacgguuaccaccaucaaaaugagcaggggucaggauaugcagccgaccugaagagcacacagaaugccauugacaagauuacuaacaaaguaaauucuguuauugaaaagaugaauacacaguucacagcaguagguaaagaguucaaccaccuggaaaaaagaauagagaaucuaaauaaaaaaguugaugaugguuuccuggacauuuggacuuacaaugccgaacuguugguucuauuggaaaaugaaagaacuuuggacuaccacgauucaaaugugaagaacuuauaugaaaagguaagaagccaguuaaaaaacaaugccaaggaaauuggaaauggcugcuuugaauuuuaccacaaaugcgauaacacgugcauggaaagugucaaaaaugggacuuaugacuacccaaaauacucagaggaagcaaaauuaaacagagaagaaauagaugggguaaagcuggaaucaacaaggauuuaccagauuuuggcgaucuauucaacugucgccaguucauugguacugguagucucccugggggcaaucaguuucuggaugugcucuaaugggucucuacaguguagaauauguauuuaa

SEQ ID NO: 39095 - RNA, 1701 nt, Artificial Sequence
  derived and/or modified CDS sequence (wt) from hemagglutinin__InfluenzaA__AEM92518
augaaggcaauacuaguaguucugcuauauacauuugcaaccgcaaaugcagacacauuauguauagguuaucaugcgaacaauucaacagacacuguagacacaguacuagaaaagaauguaacaguaacacacucuguuaaccuucuagaagacaagcauaacgggaaacuaugcaaacuaagagggguagccccauugcauuuggguaaauguaacauugcuggcuggauccugggaaauccagagugugaaucacucuccacagcaagcucaugguccuacauuguggaaacaucuaguucagacaauggaacguguuacccaggagauuucaucgauuaugaggagcuaagagagcaauugagcucagugucaucauuugaaagguuugagauauuccccaagacaaguucauggcccaaucaugacucgaacaaagguguaacgacagcauguccucaugcuggagcaaaaagcuucuacaaaaauuuaauauggcuaguuaaaaaaggaaauucauacccaaagcucagcaaauccuacauuaaugauaaaaggaaagaaguccucgugcuauggggcauucaccauccaccuacuagugcugaccaacaaagucucuaucagaaugcagaugcauauguuuuuguggggacaucaagauacagcaagaaguucaagccggaaauagcaauaagacccaaagugagggaucaagaagggagaaugaacuauuacuggacacuaguagagccgggagacaaaauaacauucgaagcaacuggaaaucuagugguaccgagauaugcauucgcaauggaaagaaaugcuggaucugguauuaucauuucagauacaccaguccacgauugcaaugcaacuugucagacacccaagggugcuauaaacaccagccucccauuucagaacauacauccgaucacaauuggaaaauguccaaaauauguaaaaagcacaaaauugagacuggccacaggauugaggaaugucccguccauucaaucuagaggccuauuuggggccauugccgguuucauugaagggggguggacagggaugguagauggaugguacgguuaucaccaucaaaaugagcaggggucaggauaugcagccgaccugaagagcacacagaaugccauugacgagauuacuaacaaaguaaacucuguuauugaaaaaaugaauacacaguucacagcaguagguaaagaguucaaccaccuggaaaaaagaauagagaauuuaaauaaaaaaguugaugaugguuuccuggacauuuggacuuacaaugccgaacuguugguucuauuggaaaaugaaagaacuuuggacuaccacgauucaaaggugaagaacuuauaugaaaagguaagaagccaguuaaaaaacaaugccaaggaaauuggaaacggcugcuuugaauuuuaccacaaaugugauaacacgugcauggaaagugucaaaaaugggacuuaugacuacccaaaauacucagaggaagcaaaauuaaacagagaagaaauagaugggguaaagcuggaaucaacaaggauuuaccagauuuuggcgaucuauucaacugucgccaguucauugguacugguagucucccugggggcaaucaguuucuggaugugcucuaaugggucucuacaguguagaauauguauuuaa

SEQ ID NO: 39096 - RNA, 1701 nt, Artificial Sequence
  derived and/or modified CDS sequence (wt) from hemagglutinin__InfluenzaA__AEM92528
augaaggcaauacuaguaguucugcuauauacauuugcaaccgcaaaugcagacacauuauguauagguuaucaugcgaacaauucaacagacacuguagacacaguacuagaaaagaauguaacaguaacacacucuguuaaccuucuagaagacaagcauaacgggaaacuaugcaaacuaagagggguagccccauugcauuuggguaaauguaacauugcuggcuggauccugggaaauccagagugugaaucacucuccacagcaagcucaugguccuacauuguggaaacaucuaguucagacaauggaacguguuacccaggagauuucaucgauuaugaggagcuaagagagcaauugagcucagugucaucauuugaaagguuugagauauuccccaagacaaguucauggcccaaucaugacucgaacaaagguguaacggcagcauguccucaugcuggagcaaaaagcuucuacaaaaauuuaauauggcuaguuaaaaaaggaaauucauacccaaagcucaacaaauccuacauuaaugauaaagggaaagaaguccucgugcuauggggcauucaccauccaucuacuagugcugaccaacaaagucucuaucagaaugcagaugcauauguuuuuguggggacaucaagauacagcaagaaguucaagccggaaauagcaauaagacccaaagugagggaucaagaagggagaaugaacuauuacuggacacuaguagagccgggagacaaaauaacauuugaagcaacuggaaaucuagugguaccgagauaugcauucgcaauggaaagaaaugcuggaucugguauuaucauuucagauacaccaguccacgauugcaauacaacuugucagacacccaagggugcuauaaacaccagccucccauuucagaauauacauccgaucacaauuggaaaauguccaaaauauguaaaaagcacaaaauugagacuggccacaggauugaggaaugucccgucuauucaaucuagaggccuauuuggggccauugccggcuucauugaagggggguggacagggaugguagauggaugguacgguuaucaccaucaaaaugagcaggggucaggauaugcagccgaccugaagagcacacagaaugccauugacaagauuacuaacaaaguaaauucuguuauugaaaagaugaauacacaguucacagcaguagguaaagcguucaaccaccuggaaaaaagaauagagaauuuaaauaaaaaaguugaugaugguuuccuggacauuuggacuuacaaugccgaacuguugguucuauuggaaaaugaaagaacuuuggacuaccacgauucaaaugugaagaacuuauaugaaaagguaagaaaccaguuaaaaaacaaugccaaggaaauuggaaacggcugcuuugaauuuuaccacaaaugcgauaacacgugcauggaaagugucaaaaaugggacuuaugacuacccaaaauacucagaggaagcaaaauuaaacagagaagaaauagaugggguaaagcuggaaucaacaaggauuuaccagauuuuggcgaucuauucaacugucgccaguucauugguacugguagucucccugggggcaaucaguuucuggaugugcucuaaugggucucuacaguguagaauauguauuuaa

SEQ ID NO: 39097 - RNA, 1701 nt, Artificial Sequence
  derived and/or modified CDS sequence (wt) from hemagglutinin__InfluenzaA__AEM92548
augaaggcaauacuaguaguucugcuauauacauuugcaaccgcaacugcagacacauuauguauagguuaucaugcgaacaauucaacagacacuguagacacaguacuagaaaagaauguaacaguaacacacucuguuaaccuucuagaagacaagcauaacgggaaacuaugcaaacuaagagggguagccccauugcauuuggguaaauguaacauugcuggcuggauccugggaaauccagagugugaaucacucuccacagcaagcucaugguccuacauuguggaaacaucuaguucagacaauggaacguguuacccaggagauuucaucaauuaugaggagcuaagagagcaauugagcucagugucaucauuugaaagguuugagauauuccccaagacaaguucauggcccaaucaugacucgaacaaagguguaacggcagcauguccucaugcuggagcaaaaagcuucuacaaaaauuuaauauggcuaguuaaaaaaggaaauucauacccaaagcucagcaaauccuacauuaaugauaaagggaaagaaguccucgugcuguggggcauucaccauccaucuacuagugcugaccaacaaagucucuaucagaaugcagaugcauauguuuuuguggggacaucaagauacagcaagaaguucaagccggaaauagcaauaagacccaaagugagggaucaagaagggagaaugaacuauuacuggacacuaguagagccgggagacaaaauaacauucgaagcaacuggaaaucuagugguaccgagauaugcauucgcaauggaaagaaaugcuggaucugguauuaucauuucagauacaccaguccacgauugcaauacaacuugucagacacccaagggugcuauaaacaccagccucccauuucagaauauacauccgaucacaauuggaaaauguccaaaauauguaaaaagcacaaaauugagacuggccacaggauugaggaaugucccgucuauucaaucuagaggccuauuuggggccauugccggcuucauugaagggggguggacagggaugguagauggaugguacgguuaucaccaucaaaaugagcaggggucaggauaugcagccgaccugaagagcacacagaaugccauugacaagauuacuaacaaaguaaauucuguuauugaaaagaugaauacacaguucacagcaguagguaaagaguucaaccaccuggaaaaaagaauagagaauuuaaauaaaaaaguugaugaugguuuccuggacauuuggacuuacaaugccgaacuguugguucuauuggaaaaugaaagaacuuuggacuaccacgauucaaaugugaagaacuuguaugaaaagguaagaaaccaguuaaaaaacaaugccaaggaaauuggaaacggcugcuuugaauuuuaccacaaaugcgauaacacgugcauggaaagugucaaaaaugggacuuaugacuacccaaaauacucagaggaagcaaaauuaaacagagaagaaauagaugggguaaagcuggaaucaacaaggauuuaccagauuuuggcgaucuauucaacugucgccaguucauugguacugguagucucccugggggcaaucaguuucuggaugugcucuaaugggucucuacaguguagaauauguauuuaa

SEQ ID NO: 39098 - RNA, 1701 nt, Artificial Sequence
  derived and/or modified CDS sequence (wt) from hemagglutinin__InfluenzaA__AEM92558
augaaggcaauacuaguaguucugcuauauacauuugcaaccgcaaaugcagacacauuauguauagguuaucaugcgaacaauucaacagacacuguagacacaguacuagaaaagaauguaacaguaacacacucuguuaaccuucuagaagacaagcauaacgggaaacuaugcaaacuaagagggguagccccauugcauuuggguaaauguagcauugcuggcuggauccugggaaauccagaaugugaaucacucuccacagcaagcucaugguccuacauuguggaaacaucuaguucagacaauggaacguguuacccaggagauuucaucaauuaugaggagcuaagagagcaauugagcucagugucaucauuugaaagguuugagauauuccccaagacaaguucauggcccaaucaugacucgaacaaagguguaacggcagcauguccucaugcuggagcaaaaagcuucuacaaaaauuuaauauggcuaguuaaaaaaggaaauucauacccaaagcucagcaaauccuacauuaaugauaaagggaaagaaguccucgugcuauggggcauucaccauccaucuacuacugcugaccaacaaagucucuaucagaaugcagaugcauauguuuuuguggggacaucaagauacagcaagaaguucaagccggaaauagcaauaagacccaaagugagggaucaagaagggagaaugaacuauuacuggacacuaguagagccgggagacaaaauaacauucgaagcaacuggaaaucuagugguaccgagauaugcauucgcaauggaaagaaaugcuggaucugguauuaucauuucagauacaccaguccacgauugcaauacaacuugucagacacccaagggugcuauaaacaccagccucccauuucagaauauacauccgaucacaauuggaaaauguccaaaauauguaaaaagcacaaaauugagacuggccacaggauugaggaaugucccgucuauucaaucuagaggccuauuuggggccauugccggcuucauugaagggggguggacagggaugguagauggaugguacgguuaucaccaucaaaaugagcaggggucaggauaugcagccgaccugaagagcacacagaaugccauugacaagauuacuaacaaaguaaauucuguuauugaaaagaugaauacacaguucacagcaguagguaaagaguucaaccaccuggaaaaaagaauagagaauuuaaauaaaaaaguugaugaugguuuccuggacauuuggacuuacaaugccgaacuguugguucuauuggaaaaugaaagaacuuuggacuaccacgauucaaaugugaagaacuuauaugaaaagguaagaaaccaguuaaaaaacaaugccaaggaaauuggaaacggcugcuuugaauuuuaccacaaaugcgauaacacgugcauggaaagugucaaaaaugggacuuaugacuacccaaaauacucagaggaagcaaaauuaaacagagaagaaauagaugggguaaagcuggaaucaacaaggauuuaccagauuuuggcgaucuauucaacugucgccaguucauugguacugguagucucccugggggcaaucaguuucuggaugugcucuaaugggucucuacaguguagaauauguauuuaa

SEQ ID NO: 39099 - RNA, 1701 nt, Artificial Sequence; identical to SEQ ID NO: 39098
  derived and/or modified CDS sequence (wt) from hemagglutinin__InfluenzaA__AEM92568

SEQ ID NO: 39100 - RNA, 1701 nt, Artificial Sequence
  derived and/or modified CDS sequence (wt) from hemagglutinin__InfluenzaA__AEM92578
augaaggcaauacuaguaguucugcuauauacauuugcaaccgcaaaugcagacacauuauguauagguuaucaugcgaacaauucaacagacacuguagacacaguacuagaaaagaauguaacaguaacacacucuguuaaccuucuagaagacaagcauaacgggaaacuaugcaaacuaagagggguagccccauugcauuuggguaaauguaacauugcuggcuggauccugggaaauccagagugugaaucacucuccacagcaagcucaugguccuacauuguggaaacaucuauuucagacaauggaacguguuacccaggagauuucaucaauuaugaggagcuaagagagcaauugagcucagugucaucauuugaaagguuugagauauuccccaagacaaguucauggcccaaucaugacucgaacaaagguguaacggcagcauguccucaugcuggagcaaaaagcuucuacaaaaauuuaauauggcuaguuaaaaaaggaaauucauacccaaagcucagcaaauccuacauuaaugauaaagggaaagaaguccucgugcuauggggcauucaccauccaucuacuagugcugaccaacaaagucucuaucaaaaugcagaugcauauguuuuuguggggacaucaagauacagcaagaaguucaagccggaaauagcaauaagacccaaagugagggaucaagaagggagaaugaacuauuacuggacacuaguagagccgggagacaaaauaacauucgaagcaacuggaaaucuagugguaccgagauaugcauucgcaauggaaagaaaugcuggaucugguauuaucauuucagauacaccaguccacgauugcaauacaacuugucagacacccaagggugcuauaaacaccagccucccauuucagaauauacauccgaucacaauuggaaaauguccaaaauauguaaaaagcacaaaauugagacuggccacaggauugaggaaugucccgucuauucaaucuagaggccuauuuggggccauugccgguuucauugaagggggguggacagggaugguagauggaugguacgguuaucaccaucaaaaugagcaggggucaggauaugcagccgaccugaagagcacacagaaugccauugacaagauuacuaacaaaguaaauucuguuauugaaaagaugaauacacaguucacagcaguagguaaagaguucaaccaccuggaaaaaagaauagagaauuuaaauaaaaaaguugaugaugguuuccuggacauuuggacuuacaaugccgaacuguugguucuauuggaaaaugaaagaacuuuggacuaccaugauucaaaugugaagaacuuauaugaaaagguaagaaaccaguuaaaaaacaaugccaaggaaauuggaaacggcugcuuugaauuuuaccacaaaugcgauaacacgugcauggaaagugucaaaaaugggacuuaugacuacccaaaauacucagaggaagcaaaauuaaacagagaagaaauagaugggguaaagcuggaaucaacaaggauuuaccagauuuuggcgaucuauucaacugucgccaguucauugguacugguagucucccugggggcaaucaguuucuggaugugcucuaaugggucucuacaguguagaauauguauuuaa

SEQ ID NO: 39101 - RNA, 1701 nt, Artificial Sequence
  derived and/or modified CDS sequence (wt) from hemagglutinin__InfluenzaA__AEM92608
augaaggcaauacuaguaguucugcuauauacauuugcaaccgcaaaugcagacacauuauguauagguuaucaugcgaacaauucaacagacacuguagacacaguacuagaaaagaauguaacaguaacacacucuguuaaccuucuagaagacaagcauaacgggaaacuaugcaaacuaagagggguagccccauugcauuuggguaaauguaacauugcuggcuggauccugggaaauccagagugugaaucacucuccacagcaagcucaugguccuacauuguggaaacaucuaguucagacaauggaacguguuacccaggagauuucaucgauuaugaggagcuaagagagcaauugagcucagugucaucauuugaaagguuugagauauuccccaagacaaguucauggcccaaucaugacucgaacaaagguguaacggcagcauguccucaugcuggagcaaaaagcuucuacaaaaauuuaauauggcuaguuaaaaaaggaaauucauacccaaagcucagcaaauccuacauuaaugauaaagggaaagaaguccucgugcuauggggcauucaccauccaucuacuacugcugaccaacaaagucucuaucagaaugcagaugcauauguuuuuguggggacaucaagauacagcaagaaguucaagccggaaauagcaauaagacccaaagugagggaucaagaagggagaaugaacuauuacuggacacuaguagagccgggagacaaaauaacauucgaagcaacuggaaaucuagugguaccgagauaugcauucgcaauggaaagaaaugcuggaucugguauuaucauuucagauacaccaguccacgauugcaauacaacuugucagacacccaagggugcuauaaacaccagccucccauuucagaauauacauccgaucacaauuggaaaauguccaaaauauguaaaaagcacaaaauugagacuggccacaggauugaggaaugucccgucuauucaaucuagaggccuauuuggggccauugccggcuucauugaagggggguggacagggaugguagauggaugguacgguuaccaccaucaaaaugagcaggggucaggauaugcagccgaccugaagagcacacagaaugccauugacaagauuacuaacaaaguaaauucuguuauugaaaagaugaauacacaguucacagcaguagguaaagaguucaaccaccuggaaaaaagaauagagaauuuaaauaaaaaaguugaugaugguuuccuggacauuuggacuuacaaugccgaacuguugguucuauuggaaaaugaaagaacuuuggacuaccacgauucaaaugugaagaacuuauaugaaaagguaagaaaccaguuaaaaaacaaugccaaggaaauuggaaacggcugcuuugaauuuuaccacaaaugcgauaacacgugcauggaaagugucaaaaaugggacuuaugacuacccaaaauacucagaggaagcaaaauuaaacagagaagaaauagaugggguaaagcuggaaucaacaaggauuuaccagauuuuggcgaucuauucaacugucgccaguucauugguacugguagucucccugggggcaaucaguuucuggaugugcucuaaugggucucuacaguguagaauauguauuuaa

SEQ ID NO: 39102 - RNA, 1701 nt, Artificial Sequence
  derived and/or modified CDS sequence (wt) from hemagglutinin__InfluenzaA__AEM92618
augaaggcaauacuaguaguucugcuauauacauuugcaacugcaaaugcagacacauuaugcauagguuaucaugcgaacaauucaacagacacuguagacacaguacuagaaaagaauguaacaguaacacacucuguuaaccuucuagaagacaagcauaacgggaaacuaugcaaacuaagagggguagccccauugcauuuggguaaauguaacauugcuggcuggaucuugggaaauccagagugugaaucacucuccacagcaaacucaugguccuacauuguggaaacauccaguucagacaauggaacguguuacccaggagauuucaucgauuaugaggagcuaagagagcaauugagcucagugucaucauucgaaagguuugagauauuccccaagacaaauucauggcccaaucaugacucgaacaaagguguaacggcagcauguccucaugcuggagcaaaaagcuucuacaaaaauuuaauauggcuaguuaaaacaggaaauucauacccaaagcucagcaaauccuacauuaaugauaaagggaaagaaguccucgugcuauggggcauucaccauccaucuacuagugcugaccaacaaagucucuaucagaaugcagaugcauauguuuuuguggggacaucaagauacagcaggaaguucaagccggaaauagcaauaagacccaaagugagggaucaagaagggagaaugaacuauuacuggacacuaguagagccgggagacaaaauaacauucgaagcaacuggaaaucuagugguaccgagauaugcauucgcaauggaaagaaaugcuggaucugguauuaucauuucagauacaccagcccacgauugcaauacaacuugucagacacccaagggugcuauaaacaccagccucccauuucagaauauacauccgaucacaauuggaaaauguccaaaauauguaaaaagcaccaaauugagacuggccacaggauugaggaaugucccguccauucaaucuagaggccuauuuggggccauugccgguuucauugaagggggguggacagggaugguagauggaugguacgguuaccaccaucaaaaugagcaggggucaggauaugcagccgaccugaagagcacacagaaugccauugacaagauuacuaacaaaguaaauucuguuauugaaaagaugaauacacaguucacagcaguagguaaagaguucaaccaccuggaaaaaagaauagagaaucuaaauaaaaaaguugaugaugguuuccuggacauuuggacuuacaaugccgaacuguugguucuauuggaaaaugaaagaacuuuggacuaccacgauucaaaugugaagaacuuauaugaaaagguaagaagccaguuaaaaaacaaugccaaggaaauuggaaauggcugcuuugaauuuuaccacaaaugcgauaacacgugcauggaaagugucaaaaaugggacuuaugacuacccaaaauacucagaggaagcaaaauuaaacagagaagaaauagaugggguaaagcuggaaucaacaaggauuuaccagauuuuggcgaucuauucaacugucgccaguucauugguacugguagucucccugggggcaaucaguuucuggaugugcucuaaugggucucuacaguguagaauauguauuuaa

SEQ ID NO: 39103 - RNA, 1701 nt, Artificial Sequence
  derived and/or modified CDS sequence (wt) from hemagglutinin__InfluenzaA__AEM92638
augaaggcaauacuaguaguucugcuauauacauuugcaaccgcaaaugcagacacauuauguauagguuaucaugcgaacaauucaacagacacuguagacacaguacuagaaaagaauguaacaguaacacacucuguuaacauucuagaagacaagcauaacgggaaacuaugcaaacuaagagggguagccccauugcauuuggguaaauguaacauugcuggcuggauccugggaaauccagagugugaaucacucuccacagcaagcucaugguccuacauuguggaaacaucuaguucagacaauggaacguguuacccaggagauuucauugauuaugaggagcuaagagagcaauugagcucagugucaucauuugaaagguuugagauauuccccaaaacaaguucauggcccaaucaugacacgaacaaagguguaacggcagcauguccucaugcuggagcaaaaagcuucuacaaaaauuuaauuuggcuaguuaaaaaaggaaauucauacccaaagcucagcaaauccuacauuaaugauaaagggaaagaaguccucgugcuauggggcauucaccauccaucuacuagugcugaccaacaaagucucuaucagaaugcagaugcauauguuuuuguggggucaucaagauacagcaagaaguucaaaccggaaauagcaauuagacccaaagugagggaucaagaagggagaaugaacuauuacuggacacuaguagagccgggagacaaaauaacauucgaagcaacuggaaaucuagugguaccaagauaugcauucgcaauggaaaaaaaugcuggaucugguauuaucauuucagauacaccaguccaugauugcaauacaacuugucagacacccaagggugcuauaaacaccagccucccauuucagaauauacauccgauuacaauuggaaaauguccaaaauauguaaaaagcacaaaauugagacuggccacaggauugaggaaugucccgucuauucaaucuagaggucuauuuggggccauugcugguuucauugaagggggguggacagggaugguagauggaugguacgguuaucaccaucaaaaugagcaggggucaggauaugcagccgaccugaagagcacacagaaugccauugacgagauuacuaacaaaguaaauucuguuauugaaaagaugaauacacaguucacagcaguagguaaagaguucaaccaccuggaaaaaagaauagagaauuuaaauaaaaaaguugaugaugguuuccuggacauuuggacuuacaaugccgaacuguugguucuauuggagaaugaaagaacuuuggacuaccacgauucaaaugugaagaacuuauaugaaaaaguaagaagccagcuaaaaaacaaugccaaggaaguuggaaacggcugcuuugaauuuuaccacaaaugcgauaacacgugcauggaaagugucaaaaaugggacuuaugacuacccaaaauacucagaggaagcaaaauuaaacagagaagaaauagaugggguaaagcuggaaucaacaaggauuuaccagauuuuggcgaucuauucaacugccgccaguucauugguacugguagucucccugggggcaaucaguuucuggaugugcucuaaugggucucuacaguguagaauauguauuuaa

SEQ ID NO: 39104 - RNA, 1701 nt, Artificial Sequence
  derived and/or modified CDS sequence (wt) from hemagglutinin__InfluenzaA__AEM92648
augaaggcaauacuaguaguucugcuauauacauuugcaaccgcaaaugcagacacauuauguauagguuaucaugcgaacaauucaacagacacuguagacacaguacuagaaaagaauguaacaguaacacacucuguuaacauucuagaagacaagcauaacgggaaacuaugcaaacuaagagggguagccccauugcauuuggguaaauguaacauugcuggcuggauccugggaaauccagagugugaaucacucuccacagcaagcucaugguccuacauuguggaaacaucuaguucagacaauggaacguguuacccaggagauuucauugauuaugaggagcuaagagagcaauugagcucagugucaucauuugaaagguuugagauauuccccaaaacaaguucauggcccaaucaugacacgaacaaagguguaacggcagcauguccucaugcuggagcaaaaagcuucuacaaaaauuuaauuuggcuaguuaaagaaggaaauucauacccaaagcucagcaaauccuacauuaaugauaaagggaaagaaguccucgugcuauggggcauucaccauccaucuacuagugcugaccaacaaagucucuaucagaaugcagaugcauauguuuuuguggggucaucaagauacagcaagaaguucaaaccggaaauagcaauuagacccaaagugagggaucaagaagggagaaugaacuauuacuggacacuaguagagccgggagacaaaauaacauucgaagcaacuggaaaucuagugguaccaagauaugcauucgcaauggaaaaaaaugcuggaucugguauuaucauuucagauacaccaguccaugauugcaauacaacuugucagacacccaagggugcuauaaacaccagccucccauuucagaauauacauccgauuacaauuggaaaauguccaaaauauguaaaaagcacaaaauugagacuggccacaggauugaggaaugucccgucuauucaaucuagaggucuauuuggggccauugcugguuucauugaagggggguggacagggaugguagauggaugguacgguuaucaccaucaaaaugagcaggggucaggauaugcagccgaccugaagagcacacagaaugccauugacgagauuacuaacaaaguaaauucuguuauugaaaagaugaauacacaguucacagcaguagguaaagaguucaaccaccuggaaaaaagaauagagaauuuaaauaaaaaaguugaugaugguuuccuggacauuuggacuuacaaugccgaacuguugguucuauuggagaaugaaagaacuuuggacuaccacgauucaaaugugaagaacuuauaugaaaaaguaagaagccagcuaaaaaacaaugccaaggaaguuggaaacggcugcuuugaauuuuaccacaaaugcgauaacacgugcauggaaagugucaaaaaugggacuuaugacuacccaaaauacucagaggaagcaaaauuaaacagagaagaaauagaugggguaaagcuggaaucaacaaggauuuaccagauuuuggcgaucuauucaacugccgccaguucauugguacugguagucucccugggggcaaucaguuucuggaugugcucuaaugggucucuacaguguagaauauguauuuaa

SEQ ID NO: 39105 - RNA, 1701 nt, Artificial Sequence; identical to SEQ ID NO: 37545
  derived and/or modified CDS sequence (wt) from hemagglutinin__InfluenzaA__AEM98407

SEQ ID NO: 39106 - RNA, 1701 nt, Artificial Sequence; identical to SEQ ID NO: 38056
  derived and/or modified CDS sequence (wt) from hemagglutinin__InfluenzaA__AEM98418

SEQ ID NO: 39107 - RNA, 1701 nt, Artificial Sequence; identical to SEQ ID NO: 37545
  derived and/or modified CDS sequence (wt) from hemagglutinin__InfluenzaA__AEM98429

SEQ ID NO: 39108 - RNA, 1701 nt, Artificial Sequence
  derived and/or modified CDS sequence (wt) from hemagglutinin__InfluenzaA__AEN55398
augaaggcaauacuaguaguucugcuauauacauuugcaaccgcaaaugcagacacauuauguauagguuaucaugcgaacaauucaacagacacuguagacacaguacuagaaaagaauguaacaguaacacacucuguuaaccuucuagaagacaagcauaacgggaaauuaugcaaacuaagagggguagccccauugcauuuggguaaauguaacauugcuggcuggauccugggaaauccagagugugaaucacucuccacagcaagcucaugguccuacauuguggaaacaucuaguucagacaauggaacguguuacccaggaaauuucaucgauuaugaggagcuaagagaacaauugagcucagugucaucauuugaaagguuugagauauuccccaagacaaguucauggcccgaucaugacucgaacaaagguguaacggcagcauguccucaugcuggagcaaaaagcuucuacaaaaauuuaauauggcuaguuaaaaaaggaaauucauacccaaagcucagcaaauccuacauuaaugauaaagggaaagaaguccucgugcuauggggcauucaccauccaucuacuagugcugaccaacaaagucucuaucagaaugcagaugcauauguuuuuguggggacaucaagauacagcaagaaguucaagccggaaauagcaauaagacccaaagugagggaucaagaagggagaaugaacuauuacuggacacuaguagagccgggagacaaaauaacauucgaagcaacuggaaaucuaguggcaccgagauaugcauucgcaauggaaagaaaugcuggaucugguauuaucauuucagauacaccaguccacgauugcaauacaacuugucagacacccaagggugcuauaaacaccagccucccauuucagaauauacauccgaucacaauuggaaaauguccaaaauauguaaaaagcacaaaauugagacuggucacaggauugaggaaugucccgucuauucaaucuagaggccuauuuggggccauugccgguuucauugaagggggguggacagggaugguagauggaugguacgguuaucaccaucaaaaugagcaggggucuggauaugcagccgaccugaagagcacacagaaugccauugacaagauuacuaacaaaguaaauucuguuauugaaaagaugaauacacaguucacagcaguagguaaagaguucaaccaccuggaaaaaagaauagagaauuuaaauaaaaaaguugaugaugguuuccuggacauuuggacuuacaaugccgaacuguugguucuauuggaaaaugaaagaacuuuggacuaccacgauucaaaugugaagaacuuauaugaaaagguaagaagccaguuaaaaaacaaugccaaggaaauuggaaacggcugcuuugaauuuuaccacaaaugcgauaacacgugcauggaaagugucaaaaaugggacuuaugacuacccaaaauacucagaggaagcaaaauuaaacagagaagaaauagaugggguaaagcuggaaucaacaaggauuuaccagauuuuggcgaucuauucaacugucgccaguucauugguacugguagucucccugggggcaaucaguuucuggaugugcucuaaugggucucuacaguguagaauauguauuuaa

SEQ ID NO: 39109 - RNA, 1701 nt, Artificial Sequence; identical to SEQ ID NO: 38933
  derived and/or modified CDS sequence (wt) from hemagglutinin__InfluenzaA__AEN55408

SEQ ID NO: 39110 - RNA, 1701 nt, Artificial Sequence; identical to SEQ ID NO: 39046
  derived and/or modified CDS sequence (wt) from hemagglutinin__InfluenzaA__AEN55418

SEQ ID NO: 39111 - RNA, 1701 nt, Artificial Sequence
  derived and/or modified CDS sequence (wt) from hemagglutinin__InfluenzaA__AEN55463
augaaggcaauacuaguaguucugcuauauacauuugcaaccgcaaaugcagacacauuauguauagguuaucaugcgaacaauucaacagacacuguagacacaguacuagaaaagaauguaacaguaacacacucuguuaaccuucuagaagacaagcauaacgggaaauuaugcaaacuaagagggguagccccauugcauuuggguaaauguaacauugcuggcuggauccugggaaauccagagugugaaucacucuccacagcaagcucaugguccuacauuguggaaacaucuaguucagacaauggaacguguuacccaggagauuucaucgauuaugaggagcuaagagaacaauugagcucagugucaucauuugaaagguuugagauauuccccaagacaaguucauggcccgaucaugacucgaacaaagguguaacggcagcauguccucaugcuggagcaaaaagcuucuacaaaaauuuaauauggcuaguuaaaaaaggaaauucauacccaaagcucagcaaauccuacauuaaugauaaagggaaagaaguccucgugcuauggggcauucaccauccaucuacuagugcugaccaacaaagucucuaucagaaugcagaugcauauguuuuuguggggacaucaagauacagcaagaaguucaagccggaaauagcaauaagacccaaagugagggaucaagaagggagaaugaacuauuacuggacacuaguagagccgggagacaaaauaacauucgaagcaacuggaaaucuagugguaccgagauaugcauucgcaauggaaagaaaugcuggaucugguauuaucauuucagauacaccaguccacgauugcaauacaacuugucagacacccaagggugcuauaaacaccagccucccauuucagaauauacauccgaucacaauuggaaaauguccaaaauauguaaaaagcacaaaauugagacuggccacaggauugaggaaugucccgucuauucaaucuagaggccuauuuggggccauugccgguuucauugaagggggguggacagggaugguggauggaugguacgguuaucaccaucaaaaugagcaggggucaggauaugcagccgaccugaagagcacacagaaugccauugacaagauuacuaacaaaguaaauucuguuauugaaaagaugaauacacaguucacagcaguagguaaagaguucaaccaccuggaaaaaagaauagagaauuuaaauaaaaaaguugaugaugguuuccuggacauuuggacuuacaaugccgaacuguugguucuauuggaaaaugaaagaacuuuggacuaccacgauucaaaugugaagaacuuauaugaaaaaguaagaagccaguuaaaaaacaaugccaaggaaauuggaaacggcugcuuugaauuuuaccacaaaugcgauaacacgugcauggaaagugucaaaaaugggacuuaugacuacccaaaauacucagaggaagcaaaauuaaacagagaagaaauagaugggguaaagcuggaaucaacaaggauuuaccagauuuuggcgaucuauucaacugucgccaguucauugguacugguagucucccugggggcaaucaguuucuggaugugcucuaaugggucucuacaguguagaauauguauuuaa

SEQ ID NO: 39112 - RNA, 1701 nt, Artificial Sequence
  derived and/or modified CDS sequence (wt) from hemagglutinin__InfluenzaA__AEN55473
augaaggcaauacuaguaguucugcuauauacauuugcaaccgcaaaugcagacacauuauguauagguuaucaugcgaacaauucaacagacacuguagacacaguacuagaaaagaauguaacaguaacacacucuguuaaccuucuagaagacaagcauaacgggaaacuaugcaaacuaagagggguagccccauugcauuuggguaaauguaacauugcuggcuggauccugggaaauccagagugugaaucacucuccacagcaagcucaugguccuacauuguggaaacaucuaguucagacaauggaacguguuacccaggagauuucauugauuaugaggagcuaagagagcaauugagcucagugucaucauuugaaagguuugagauauuccccaagacaaguucauggcccaaucaugacucgaacaaagguguaacggcagcauguccucaugcuggagcaaaaagcuucuacaaaaauuuaauauggcuaguuaaaaaaggaaauucauacccaaagcucagcaaauccuacauuaaugauaaagggaaagaaguccucgugcuauggggcauucaccauccaucuacuacuacugaccaacaaagucucuaucagacugcagauacauauguuuuuguggggacaucaagauacagcaagaaguucaagccggaaauagcaauaagacccaaagugagggaucaagaagggagaaugaacuauuacuggacacuaguagagccgggagacaaaauaacauucgaagcaacuggaaaucuagugguaccgagauaugcauucgcaauggaaagaaaugcuggaucugguauuaucauuucagauacaccaguccacgauugcaauacaacuugucagacacccaagggugcuauaaacaccagccucccauuucagaauauacauccgaucacaauuggaaaauguccaaaauauguaaaaagcacaaaauugagacuggccacaggauugaggaaugucccgucuauucaaucuagaggccuauuuggggccauugccggcuucauugaagggggguggacagggaugguagauggaugguacgguuaucaccaucaaaaugagcaggggucaggauaugcagccgaccugaagagcacacagaaugccauugacaagauuacuaacaaaguaaauucuguuauugaaaagaugaauacacaguucacagcaguagguaaagaguucaaccaccuggaaaaaagaauagagaauuuaaauaaaaaaguugaugaugguuuccuggacauuuggacuuacaaugccgaacuguugguucuauuggaaaaugaaagaacuuuggacuaccacgauucaaaugugaagaacuuauaugaaaagguaagaaaccaguuaaaaaccaaugccaaggaaauuggaaauggcugcuuugaauuuuaccacaaaugcgauaacacgugcauggaaagugucaaaaaugggacuuaugacuacccaaaauacucagaggaagcaaaauuaaacagagaagaaauagaugggguaaagcuggaaucaacaaggauuuaccagauuuuggcgaucuauucaacugucgccaguucauugguacugguagucucccugggggcaaucaguuuuuggaugugcucuaaugggucucuacaguguagaauauguauuuaa

SEQ ID NO: 39113 - RNA, 1701 nt, Artificial Sequence; identical to SEQ ID NO: 39046
  derived and/or modified CDS sequence (wt) from hemagglutinin__InfluenzaA__AEN55483

SEQ ID NO: 39114 - RNA, 1701 nt, Artificial Sequence
  derived and/or modified CDS sequence (wt) from hemagglutinin__InfluenzaA__AEN55493
augaaggcaauacuaguaguucugcuauauacauuugcaaccgcaaaugcagacacauuauguauagguuaucaugcgaacaauucaacagacacuguagacacaguacuagaaaagaauguaacaguaacacacucuguuaaccuucuagaagacaagcauaacgggaaacuaugcaaacuaagagggguagccccauugcauuuggguaaauguaacauugcuggcuggauccugggaaauccagagugugaaucacucuccacagcaagcucaugguccuacauuguggaaacaucuaguucagacaauggaacguguuacccaggagauuucaucgauuaugaggagcuaagagagcaauugagcucagugucaucauuugaaagguuugagauauuccccaagacaaguucauggcccaaucaugacucgaacaaagguguaacgacagcauguccucaugcuggagcaaaaagcuucuacaaaaauuuaauauggcuaguuaaaaaaggaaauucauacccaaagcucagcaaauccuacauuaaugauaaagggaaagaaguccucgugcuauggggcauucaccauccaccuacuagugcugaccaacaaagucucuaucagaaugcagaugcauauguuuuuguggggacaucaagauacagcaagaaguucaagccggaaauagcaauaagacccaaagugagggaucaagaagggagaaugaacuauuacuggacacuaguagagccgggagacaaaauaacauucgaagcaacuggaaaucuagugguaccgagauaugcauucgcaauggaaagaaaugcuggaucugguauuaucauuucagauacaccaguccacgauugcaauacaacuugucagacacccaagggugcuauaaacaccagccucccauuucagaauauacauccgaucacaauuggaaaauguccaaaauauguaaaaagcacaaaauugagacuggccacaggauugaggaaugucccgucuauucaaucuagaggccuauuuggggccauugccgguuucauugaagggggguggacagggaugguagauggaugguacgguuaucaccaucaaaaugagcaggggucaggauaugcagccgaccugaagagcacacagaaugccauugacgggauuacuaacaaaguaaauucuguuauugaaaagaugaauacacaguucacagcaguagguaaagaguucaaccaccuggaaaaaagaauagagaauuuaaauaaaaagguugaugaugguuuccuggacauuuggacuuacaaugccgaacuguugguucuauuggaaaaugaaagaacuuuggacuaccacgauucaaaugugaagaacuuauaugaaaagguaagaagccaguuaaaaaacaaugccaaggaaauuggaaacggcugcuuugaauuuuaccacaaaugugauaacacgugcauggaaagugucaaaaaugggacuuaugacuacccaaaauacucagaggaagcaaaauuaaacagagaagaaauagaugggguaaagcuggaaucaacaaugauuuaccagauuuuggcgaucuauucaacugucgccaguucauugguacugguagucucccugggggcaaucaguuucuggaugugcucuaaugggucucuacaguguagaauauguauuuaa

SEQ ID NO: 39115 - RNA, 1701 nt, Artificial Sequence; identical to SEQ ID NO: 39046
  derived and/or modified CDS sequence (wt) from hemagglutinin__InfluenzaA__AEN55503

SEQ ID NO: 39116 - RNA, 1701 nt, Artificial Sequence
  derived and/or modified CDS sequence (wt) from hemagglutinin__InfluenzaA__AEN55513
augaaggcaauacuaguaguucugcuauauacauuugcaaccgcaaaugcagacacauuauguauagguuaucaugcgaacaauucaacagacacuguagacacaguacuagaaaagaauguaacaguaacacacucuguuaaccuucuagaagacaagcauaacgggaaacuaugcaaacuaagagggguagccccauugcauuuggguaaauguaacauugcuggcuggauccugggaaauccagagugugaaucacucuccacagcaagcucaugguccuacauuguggaaacaucuaguucagacaauggaacguguuacccaggagauuucaucgauuaugaggagcuaagagagcaauugagcucagugucaucauuugaaagguuugagauauuccccaagacaaguucauggcccaaucaugacucgaacaaagguguaacggcagcauguccucaugcuggagcaaaaagcuucuacaaaaauuuaauauggcuaguuaaaaaaggaaauucauacccaaagcucagcaaauccuacauuaaugauaaagggaaagaaguccucgugcuauggggcauucaccauccaucuacuacugcugaccaacaaaaucucuaucagaaugcagauacauauguuuuuguggggacaucaagauacagcaagaaguucaagccggaaauagcaauaagacccaaagugagggaucaagaagggagaaugaacuauuacuggacacuaguagagccgggagacaaaauaacauucgaagcaacuggaaaucuagugguaccgagauaugcauucgcaauggaaagaaaugcuggaucugguauuaucauuucagauacaccaguccacgauugcaauacaacuugucagacacccaagggugcuauaaacaccagccucccauuucagaauauacauccgaucacaauuggaaaauguccaaaauauguaaaaagcacaaaauugagacuggccacaggauugaggaaugucccgucuauucaaucuagaggccuauuuggggccauugccggcuuuauugaagggggguggacagggaugguagauggaugguacgguuaucaccaucaaaaugagcaggggucaggauaugcagccgaccugaagagcacacagaaugccauugacaagauuacuaacaaaguaaauucuguuauugaaaagaugaauacacaguucacagcaguagguaaagaguucaaccaccuggaaaaaagaauagagaauuuaaauaaaaaaguugaugaugguuuccuggacauuuggacuuacaaugccgaacuguugguucuauuggaaaaugaaagaacuuuggacuaccacgauucaaaugugaagaacuuauaugaaaagguaagaaaccaguuaaaaaacaaugccaaggaaauuggaaauggcugcuuugaauuuuaccacaaaugcgauaacacgugcauggaaagugucaaaaaugggacuuaugacuacccaaaauacucagaggaagcaaaauuaaacagagaagaaauagaugggguaaagcuggaaucaacaaggauuuaccagauuuuggcgaucuauucaacugucgccaguucauugguacugguagucucccugggggcaaucaguuuuuggaugugcucuaaugggucucuacaguguagaauauguauuuaa

SEQ ID NO: 39117 - RNA, 1701 nt, Artificial Sequence
  derived and/or modified CDS sequence (wt) from hemagglutinin__InfluenzaA__AEN55523
augaaggcaauacuaguaguucugcuauauacauuugcaaccgcaaaugcagacacauuauguauagguuaucaugcgaacaauucaacagacacuguagacacaguacuagaaaagaauguaacaguaacacacucuguuaaucuucuagaagacaagcauaacgggaaacuaugcaaacuaagagggguagccccauugcauuuggguaaauguaacauugcuggcuggauccugggaaauccagagugugaaucacucuccacagcaagcucaugguccuacauuguggaaacaucuaguucagacaauggaacguguuacccaggagauuucaucgauuaugaggagcuaagagagcaauugagcucagugucaucauuugaaagguuugagauauuccccaagacaaguucauggcccaaucaugacucgaacaaagguguaacggcagcauguccucaugcuggagcaaaaagcuucuacaaaaauuuaauauggcuaguuaaaaaaggaaauucauacccaaagcucagcaaauccuacauuaaugauaaagggaaagaaguccucgugcuauggggcauucaccauccaucuacuacugcugaccaacaaagucucuaucagaaugcagauacauauguuuuuguggggacaucaagauacagcaagaaguucaagccggaaauagcaauaagacccaaagugagggaucaagaagggagaaugaacuauuacuggacacuaguagagccgggagacaaaauaacauucgaagcaacuggaaaucuagugguaccgagauaugcauucgcaauggaaagaaaugcuggaucugguauuaucauuucagauacaccaguccacgauugcaauacaacuugucagacacccaagggugcuauaaacaccagccucccauuucagaauauacauccgaucacaauuggaaaauguccaaaauauguaaaaagcacaaaauugagacuggccacaggauugaggaaugucccgucuauucaaucuagaggccuauuuggggccauugccggcuucauugaagggggguggacagggaugguagauggaugguacgguuaucaccaucaaaaugagcaggggucaggauaugcagccgaccugaagagcacacagaaugccauugacaagauuacuaacaaaguaaauucuguuauugaaaagaugaauacacaauucacagcaguagguaaagaguucaaccaccuggaaaaaagaauagagaauuuaaauaaaaaaguugaugaugguuuccuggacauuuggacuuacaaugccgaacuguugguucuauuggaaaaugaaagaacuuuggacuaccacgauucaaaugugaagaacuuauaugaaaagguaagaaaccaguuaaaaaacaaugccaaggaaauuggaaauggcugcuuugaauuuuaccacaaaugcgauaacacgugcauggaaagugucaaaaaugggacuuaugacuacccaaaauacucagaggaagcaaaauuaaacagagaagaaauagaugggguaaagcuggaaucaacaaggauuuaccagauuuuggcgaucuauucaacugucgccaguucauugguacugguagucucccugggggcaaucaguuuuuggaugugcucuaaugggucucuacaguguagaauauguauuuaa

SEQ ID NO: 39118 - RNA, 1701 nt, Artificial Sequence
  derived and/or modified CDS sequence (wt) from hemagglutinin__InfluenzaA__AEN68904
augaaggcaauacuaguaguucugcuauauacauuugcaaccgcaaaugcagacacauuauguauagguuaucaugcgaacaauucaacagacacuguagacacaguacuagaaaagaauguaacaguaacacacucuguuaaccuucuagaagacaagcauaacgggaaacuaugcaaacuaagagggguagccccauugcauuuggguaaauguaacauugcuggcuggauccugggaaauccagagugugaaucacucuccacagcaagcucaugguccuacauuguggaaacaucuaguucagacaauggaacguguuacccaggagauuucaucgauuaugaggagcuaagagagcaauugagcucagugucaucauuugaaagguuugagauauuccccaagacaaguucauggcccaaucaugacucgaacaaagguguaacggcagcauguccucaugcuggagcaaaaagcuucuacaaaaauuuaauauggcuaguuaaaaaagggaauucauacccaaagcucagcaaauccuacauuaaugauaaagggaaagaaguccucgugcuauggggcauucaccauccaucuacuagugcugaccaacaaagucucuaucagaaugcagaugcauauguuuuuguggggacaucaaaauacagcaagaaguucaagccggaaauagcaauaagacccaaagugagggaucaagaagggagaaugaacuauuacuggacacuaguagagccgggagacaaaauaacauucgaagcaacuggaaaucuagugguaccgagauaugcauucgcaauggaaagaaaugcuggaucugguauuaucauuucagauacaccaguccacgauugcaauacaacuugucagacacccaagggugcuauaaacaccagccucccauuucagaauauacauccgaucacaauuggaaaauguccaaaauauguaaaaagcacaaaauugagacuggccacaggauugaggaaugucccgucuauucaaucuagaggccuauuuggggccauugccgguuucauugaagggggguggacagggaugguagauggaugguacgguuaucaccaucaaaaugagcaggggucaggauaugcagccgaccugaagagcacacagaaugccauugacgagauuacuaacaaaguaaauucuguuauugaaaagaugaauacacaguucacagcaguagguaaagaguucaaccaccuggaaaaaagaauagagaauuuaaauaaaaaaguugaugaugguuuccuggacauuuggacuuacaaugccgaacuguugguucuauuggaaaaugaaagaacuuuggacuaccacgauucaaaugugaagaacuuauaugaaaagguaagaagccaguuaaaaaacaaugccaaggaaauuggaaacggcugcuuugaauuuuaccacaaaugcgauaacacgugcauggaaagugucaaaaaugggacuuaugacuacccaaaauacucagaggaagcaaaauuaaacagagaagaaauagaugggguaaagcuggaaucaacaaggauuuaccagauuuuggcgaucuauucaacugucgccaguucauugguacugguagucucccugggggcaaucaguuucuggaugugcucuaaugggucucuacaguguagaauauguauuuaa

SEQ ID NO: 39119 - RNA, 1701 nt, Artificial Sequence; identical to SEQ ID NO: 34714
  derived and/or modified CDS sequence (wt) from hemagglutinin__InfluenzaA__AEN68905

SEQ ID NO: 39120 - RNA, 1701 nt, Artificial Sequence
  derived and/or modified CDS sequence (wt) from hemagglutinin__InfluenzaA__AEN68906
augaaggcaauacuaguaguucugcuauauacauuugcaacagcaaaugcagacacauuauguauagguuaucaugcgaacaauucaacagacacuguagacacaguacuagaaaagaauguaacaguaacacacucuguuaaccuucuagaagacaagcauaacgggaaacuaugcaaacuaagagggguagccccauugcauuuggguaaauguaacauugcuggcuggauccugggaaauccagagugugaaucacucuccacagcaagcucaugguccuacauuguggaaacaucuaguucagacaauggaacguguuacccaggagauuucaucgauuaugaggagcuaagagagcaauugagcucagugucaucauuugaaagguuugagauauuccccaagacaaguucauggcccaaucaugacucgaacaaagguguaacggcagcauguccucaugcuggagcaaaaagcuucuacaaaaauuuaauauggcuaguuaaaaaaggaaauucauacccaaagcucagcaaauccuacauuaaugauaaagggaaagaaguccucgugcuauggggcauucaccauccaucuacuagugcugaccaacaaagucucuaucagaaugcagaugcauauguuuuuguggggacaucaagauacagcaagaaguucaagccggaaauagcaauaagacccaaagugagggaucaagaagggagaaugaacuauuacuggacacuaguagagccgggagacaaaauaacauucgaagcaacuggaaaucuagugguaccgagauaugcauucgcaauggaaagaaaugcuggaucugguauuaucauuucagauacaccaguccacgauugcaauacaacuugucagacacccaagggugcuauaaacaccagccucccauuucagaauauacauccgaucacaauuggaaaauguccaaaauauguaaaaagcacaaaauugagacuggccacaggauugaggaaugucccgucuauucaaucuagaggccuauuuggggccauugccgguuucauugaagggggguggacagggaugguagauggaugguacgguuaucaccaucaaaaugagcaggggucaggauaugcagccgaccugaagagcacacagaaugccauugacgagauuacuaacaaaguaaauucuguuauugaaaagaugaauacacaguucacagcaguagguaaagaguucaaccaccuggaaaaaagaauagagaauuuaaauaaaaaaguugaugaugguuuccuggacauuuggacuuacaaugccgaacuguugguucuauuggaaaaugaaagaacuuuggacuaccacgauucaaaugugaagaacuuauaugaaaagguaagaagccaguuaaaaaacaaugccaaggaaauuggaaacggcugcuuugaauuuuaccacaaaugcgauaacacgugcauggaaagugucaaaaaugggacuuaugacuacccaaaauacucagaggaagcaaaauuaaacagagaggaaauagaugggguaaagcuggaaucaacaaggauuuaccagauuuuggcgaucuauucaacugucgccaguucauugguacugguagucucccugggggcaaucaguuucuggaugugcucuaaugggucucuacaguguagaauauguauuuaa

SEQ ID NO: 39121 - RNA, 1701 nt, Artificial Sequence
  derived and/or modified CDS sequence (wt) from hemagglutinin__InfluenzaA__AEN68907
augaaggcaauacuaguaguucugcuauauacauuugcaaccgcaaaugcagacacauuauguauagguuaucaugcgaacaauucaacagacacuguagacacaguacuagaaaagaauguaacaguaacacacucuguuaaccuucuagaagacaagcauaacgggaaacuaugcaaacuaagagggguagccccauugcauuuggguaaauguaacauugcuggcuggauccugggaaauccagagugugaaucacucuccacagcaagcucaugguccuacauuguggaaacaucuaguucaggcaauggaacguguuacccaggagauuucaucgauuaugaggagcuaagagagcaauugagcucagugucaucauuugaaagguuugagauauuccccaagacaaguucauggcccaaucaugacucgaacaaagguguaacggcagcauguccucaugcuggagcaaaaagcuucuacaaaaauuuaauauggcuaguuaaaaaaggaaacucauacccaaagcucagcaaauccuacauuaaugauaaagggaaagaaguccucgugcuauggggcauucaccauccgucuacuagugcugaccaacaaagucucuaucagaaugcagaugcauauguuuuuguggggacaucaagauacagcaagaaguucaagccggaaauagcaauaagacccaaagugagggaucaagaagggagaaugaacuauuacuggacacuaguagagccgggagacaaaauaacauucgaagcaacuggaaaucuagugguaccgagauaugcauucgcaauggaaagaaaugcuggaucugguauuaucauuucagauacaccaguccacgauugcaauacaacuugucagacacccaagggugcuauaaacaccagccucccauuucagaauauacauccgaucacaauuggaaaauguccaaaauauguaaaaagcacaaaauugagacuggccacaggauugaggaaugucccgucuauucaaucuagaggccuauuuggggccauugccgguuucauugaagggggguggacagggaugguagauggaugguacgguuaucaccaucaaaaugagcaggggucaggauaugcagccgaccugaagagcacacagaaugccauugacgagauuacuaacaaaguaaauucuguuauugaaaagaugaauacacaguucacagcaguagguaaagaguucaaccaccuggaaaaaagaauagagaauuuaaauaaaaaaguugaugaugguuuccuggacauuuggacuuacaaugccgaacuguugguucuauuggaaaaugaaagaacuuuggacuaccacgauucaaaugugaagaacuuauaugaaaagguaagaagccaguuaaaaaacaaugccaaggaaauuggaaacggcugcuuugaauuuuaccacaaaugcgauaacacgugcauggaaagugucaaaaaugggacuuaugacuacccaaaauacucagaggaagcaaaauuaaacagagaagaaauagaugggguaaagcuggaaucaacaaggauuuaccagauuuuggcgaucuauucaacugucgccaguucauugguacugguagucucccugggggcaaucaguuucuggaugugcucuaaugggucucuacaguguagaauauguauuuaa

SEQ ID NO: 39122 - RNA, 1701 nt, Artificial Sequence; identical to SEQ ID NO: 34714
  derived and/or modified CDS sequence (wt) from hemagglutinin__InfluenzaA__AEN68908

SEQ ID NO: 39123 - RNA, 1701 nt, Artificial Sequence
  derived and/or modified CDS sequence (wt) from hemagglutinin__InfluenzaA__AEN68909
augaaggcaauacuaguaguucugcuauauacauuugcaaccgcaaaugcagacacauuauguguagguuaucaugcgaacaauucaacagacacuguagacacaguacuagaaaagaauguaacaguaacacacucuguuaaccuucuagaagacaagcauaacgggaaacuaugcaaacuaagagggguagccccauugcauuuggguaaauguaacauugcuggcuggauccugggaaauccagagugugaaucacucuccacagcaagcucaugguccuacauuguggaaacaucuaguucagacaauggaacguguuacccaggagauuucaucgauuaugaggagcuaagagagcaauugagcucagugucaucauuugaaagguuugagauauuccccaagacaaguucauggcccaaucaugacucgaacaaagguguaacggcagcauguccucaugcuggagcaaaaagcuucuacaaaaauuuaauauggcuaguuaaaaaaggaaauucauacccaaagcucagcaaauccuacauuaaugauaaagggaaagaaguccucgugcuauggggcauucaccauccaucuacuagugcugaccaacaaagucucuaucagaaugcagaugcauauguuuuuguggggacaucaagauacagcaagaaguucaagccggaaauagcaauaagacccaaagugagggaucaagaagggagaaugaacuacuacuggacacuaguagagccgggagacaaaauaacauucgaagcaacuggaaaucuagugguaccgagauaugcauucgcaauggaaagaaaugcuggaucugguauuaucauuucagauacaccaguccacgauugcaauacaacuugucagacacccaagggugcuauaaacaccagccucccauuucagaauauacauccgaucacaauuggaaaauguccaaaauauguaaaaaguacaaaauugagacuggccacaggauugaggaaugucccgucuauucaaucuagaggccuauuuggggccauugccgguuucauugaagggggguggacagggaugguagauggaugguacgguuaucaccaucaaaaugagcagggaucaggauaugcagccgaccugaagagcacacagaaugccauugacgagauuacuaacaaaguaaauucuguuauugaaaagaugaauacacaguucacagcaguagguaaagaguucaaccaccuggaaaaaagaauagagaauuuaaauaaaaaaguugaugaugguuuccuggacauuuggacuuacaaugccgaacuguugguucuauuggaaaaugaaagaacuuuggacuaccacgauucaaaugugaagaacuuauaugaaaagguaagaagccaguuaaaaaacaaugccaaggaaauuggaaacggcugcuuugaauuuuaccacaaaugcgauaacacgugcauggaaagugucaaaaaugggacuuaugacuacccaaaauacucagaggaagcaaaauuaaacagagaagaaauagaugggguaaagcuggaaucaacaaggauuuaccagauuuuggcgaucuauucaacugucgccaguucauugguacugguagucucccugggggcaaucaguuucuggaugugcucuaaugggucucuacaguguagaauauguauuuaa

SEQ ID NO: 39124 - RNA, 1701 nt, Artificial Sequence
  derived and/or modified CDS sequence (wt) from hemagglutinin__InfluenzaA__AEN68910
augaaggcaauacuaguaguucugcuauauacauuugcaaccgcaaaugcagacacauuauguguagguuaucaugcgaacaauucaacagacacuguagacacaguacuagaaaagaauguaacaguaacacacucuguuaaccuucuagaagacaagcauaacgggaaacuaugcaaacuaagagggguagccccauugcauuuggguaaauguaacauugcuggcuggauccugggaaauccagagugugaaucacucuccacagcaagcucaugguccuacauuguggaaacaucuaguucagacaauggaacguguuacccaggagauuucaucgauuaugaggagcuaagagagcaauugagcucagugucaucauuugaaagguuugagauauuccccaagacaaguucauggcccaaucaugacucgaacaaagguguaacggcagcauguccucaugcuggagcaaaaagcuucuacaaaaauuuaauauggcuaguuaaaaaaggaaauucauacccaaagcucagcaaauccuacauuaaugauaaagggaaagaaguccucgugcuauggggcauucaccauccaucuacuagugcugaccaacaaagucucuaucagaaugcagaugcauauguuuuuguggggacaucaagauacagcaagaaguucaagccggaaauagcaauaagacccaaagugagggaucaagaagggagaaugaacuacuacuggacacuaguagagccgggagacaaaauaacauucgaagcaacuggaaaucuagugguaccgagauaugcauucgcaauggaaagaaaugcuggaucugguauuaucauuucagauacaccaguccacgauugcaauacaacuugucagacacccaagggugcuauaaacaccagccucccauuucagaauauacauccgaucacaauuggaaaauguccaaaauauguaaaagguacaaaauugagacuggccacaggauugaggaaugucccgucuauucaaucuagaggccuauuuggggccauugccgguuucauugaagggggguggacagggaugguagauggaugguacgguuaucaccaucaaaaugagcagggaucaggauaugcagccgaccugaagagcacacagaaugccauugacgagauuacuaacaaaguaaauucuguuauugaaaagaugaauacacaguucacagcaguagguaaagaguucaaccaccuggaaaaaagaauagagaauuuaaauaaaaaaguugaugaugguuuccuggacauuuggacuuacaaugccgaacuguugguucuauuggaaaaugaaagaacuuuggacuaccacgauucaaaugugaagaacuuauaugaaaagguaagaagccaguuaaaaaacaaugccaaggaaauuggaaacggcugcuuugaauuuuaccacaaaugcgauaacacgugcauggaaagugucaaaaaugggacuuaugacuacccaaaauacucagaggaagcaaaauuaaacagagaagaaauagaugggguaaagcuggaaucaacaaggauuuaccagauuuuggcgaucuauucaacugucgccaguucauugguacugguagucucccugggggcaaucaguuucuggaugugcucuaaugggucucuacaguguagaauauguauuuaa

SEQ ID NO: 39125 - RNA, 1701 nt, Artificial Sequence
  derived and/or modified CDS sequence (wt) from hemagglutinin__InfluenzaA__AEN68911
augaaggcaauacuaguaguucugcuauauacauuugcaaccgcaaaugcagacacauuauguauagguuaucaugcgaacaauucaacagacacuguagacacaguacuagaaaagaauguaacaguaacacacucuguuaaccuucuagaagacaagcauaacgggaaacuaugcaaacuaagagggguagccccauugcauuuggguaaauguaacauugcuggcuggauccugggaaauccagagugugaaucacucuccacagcaagcucaugguccuacauuguggaaacaucuaguucagacaauggaacguguuacccaggagauuucaucgauuaugaggagcuaagagagcaauugagcucagugucaucauuugaaagguuugagauauuccccaagacaaguucauggcccaaucaugacucgaacaaagguguaacggcagcauguccucaugcuggagcaaaaagcuucuacaaaaauuuaauauggcuaguuaaaaaaggaaauucauacccaaagcucagcaaaucuuacauuaaugauaaagggaaagaaguccucgugcuauggggcauucaccauccaucuacuagugcugaccaacaaagucucuaucagaaugcagaugcauauguuuuuguggggacaucaagauacagcaagaaguucaagccggaaauagcaauaagacccaaagugagggaucaagaagggagaaugaacuauuacuggacacuaguagagccgggagacaaaauaacauucgaagcaacuggaaaucuagugguaccgagauaugcauucgcaauggaaagagaugcuggaucugguauuaucauuucagauacaccaguccacgauugcaauacaacuugucagacacccaagggugcuauaaacaccagccucccauuucagaauauacauccgaucacaauuggaaaauguccaaaauauguaaaaagcacaaaauugagacuggccacaggauugaggaaugucccgucuauucaaucuagaggccuauuuggggccauugccgguuucauugaagggggguggacagggaugguagauggaugguacgguuaucaccaucaaaaugagcaggggucaggauaugcagccgaccugaagagcacacagaaugccauugacgagauuacuaacaaaguaaauucuguuauugaaaagaugaauacacaguucacagcaguagguaaagaguucaaccaccuggaaaaaagaauagagaauuuaaauaaaaaaauugaugaugguuuccuggauauuuggacuuacaaugccgaacuguugguucuauuggaaaaugaaagaacuuuggacuaccacgauucaaaugugaagaacuuguaugaaaagguaagaagccaguuaaaaaacaaugccaaggaaauuggaaacggcugcuuugaauuuuaccacaaaugcgauaacacgugcauggaaagugucaaaaaugggacuuaugacuacccaaaauacucagaggaagcaaaauuaaacagagaagaaauagaugggguaaagcuggaaucaacaaggauuuaccagauuuuggcgaucuauucaacugucgccaguucauugguacugguagucucccugggggcaaucaguuucuggaugugcucuaaugggucucuacaguguagaauauguauuuaa

SEQ ID NO: 39126 - RNA, 1701 nt, Artificial Sequence
  derived and/or modified CDS sequence (wt) from hemagglutinin__InfluenzaA__AEN68912
augaaggcaauacuaguaguucugcuauauacauuugcaaccgcaaaugcagacacauuauguauagguuaucaugcgaacaauucaacagacacuguagacacaguacuagaaaagaauguaacaguaacacacucuguuaaccuucuagaagacaagcauaacgggaaacuaugcaaacuaagagggguagccccauugcauuuggguaaauguaacauugcuggcuggauccugggaaauccagagugugaaucacucuccacagcaagcucaugguccuacauuguggaaacaucuaguucagacaauggaacguguuacccaggagauuucaucgauuaugaggagcuaagagagcaauugagcucagugucaucauuugaaagguuugagauauuccccaagacaaguucauggcccaaucaugacucgaacaaagguguaacggcagcauguccucaugcuggagcaaaaagcuucuacaaaaauuuaauauggcuaguuaaaaaaggaaauucauauccaaagcucagcaaauccuacauuaaugauaaagggaaagaaguccucgugcuauggggcauucaccauccaucuacuagugcugaccaacaaagucucuaucagaaugcagaugcauauguuuuuguggggacaucaagauacagcaagaaguucaagccggaaauagcaauaagacccaaagugagggaucaagaagggagaaugaacuauuacuggacacuaguagagccgggagacaaaauaacauucgaagcaacuggaaaucuagugguaccgagauaugcauucgcaauggaaagaaaugcuggaucugguauuaucauuucagauacaccaguccacgauugcaauacaacuugucagacacccaagggugcuauaaacaccagccucccauuucagaauauacauccgaucacaauuggaaaauguccaaaauauguaaaaagcacaaaauugagacuggccacaggauugaggaaugucccgucuauucaaucuagaggccuauuuggggccauugccgguuucauugaagggggguggacagggaugguagauggaugguacgguuaucaccaucaaaaugagcaggggucaggauaugcagccgaccugaagagcacacagaaugccauugacgagauuacuaacaaaguaaauucuguuauugaaaagaugaauacacaguucacagcaguagguaaagaguucaaccaccuggaaaaaagaauagagaauuuaaauaaaaagguugaugaugguuuccuggacauuuggacuuacaaugccgaacuguugguucuauuggaaaaugaaagaacuuuggacuaccacgauucaaaugugaagaacuuauaugaaaagguaagaagccaguuaaaaaacaaugccaaggaaauuggaaacggcugcuuugaauuuuaccacaaaugcgauaacacgugcauggaaagugucaaaaaugggacuuaugacuacccaaaauacucagaggaagcaaaauuaaacagagaagaaauagaugggguaaagcuggaaucaacaaggauuuaccagauuuuggcgaucuauucaacugucgccaguucauugguacugguagucucccugggggcaaucaguuucuggaugugcucuaaugggucucuacaguguagaauauguauuuaa

SEQ ID NO: 39127 - RNA, 1701 nt, Artificial Sequence
  derived and/or modified CDS sequence (wt) from hemagglutinin__InfluenzaA__AEN68913
augaaggcaauacuaguaguucugcuauauacauuugcaaccgcaaaugcagacacauuauguauagguuaucaugcgaacaauucaacagacacuguagacacaguacuggaaaagaauguaacaguaacacacucuguuaaccuucuagaagacaagcauaacgggaaacuaugcaaacuaagagggguagccccauugcauuuggguaaauguaacauugcuggcuggauccugggaaauccagagugugaaucacucuccacagcaagcucaugguccuacauuguggaaacaucuaguucagacaauggaacguguuacccaggagauuucaucgauuaugaggagcuaagagagcaauugagcucagugucaucauuugaaagguuugagauauuccccaagacaaguucauggcccaaucaugacucgaacaaagguguaacggcagcauguccucaugcuggagcaaaaagcuucuacaaaaauuuaauauggcuaguuaaaaaaggaaauucauacccaaagcucagcaaauccuacauuaaugauaaagggaaagaaguccucgugcuauggggcauucaccauccaucuacuagugcugaccaacaaagucucuaucagaaugcagaugcauauguuuuuguggggacaucaagauacagcaagaaguucaagccggaaauagcaauaagacccaaagugagggaucaagaagggagaaugaacuauuacuggacacuaguagagccgggagacaaaauaacauucgaagcaacuggaaaucuagugguaccgagauaugcauucgcaauggaaagaaaugcuggaucugguauuaucauuucagauacaccaguccacgauugcaauacaacuugucagacacccaagggugcuauaaacaccagccucccauuucagaauauacauccgaucacaauuggaaaauguccaaaauauguaaaaagcacaaaauugagacuggccacaggauugaggaaugucccgucuauucaaucuagaggccuauuuggggccauugccgguuucauugaagggggguggacagggaugguagauggaugguacgguuaucaccaucaaaaugagcaggggucaggauaugcagccgaccugaagagcacacagaaugccauugacgagauuacuaacaaaguaaauucuguuauugaaaagaugaauacacaguucacagcaguagguaaagaguucaaccaccuggaaaaaagaauagagaauuuaaauaaaaaaauugaugaugguuuccuggacauuuggacuuacaaugccgaacuguugguucuauuggaaaaugaaagaacuuuggacuaccacgauucaaaugugaagaacuuauaugaaaagguaagaagccaguuaaaaaacaaugccaaggaaauuggaaacggcugcuuugaauuuuaccacaaaugcgauaacacgugcauggaaagugucaaaaaugggacuuaugacuacccaaaauacucagaggaagcaaaauuaaacagagaagaaauagaugggguaaagcuggaaucaacaaggauuuaccagauuuuggcgaucuauucaacugucgccaguucauugguacugguagucucccugggggcaaucaguuucuggaugugcucuaaugggucucuacaguguagaauauguauuuaa

SEQ ID NO: 39128 - RNA, 1701 nt, Artificial Sequence
  derived and/or modified CDS sequence (wt) from hemagglutinin__InfluenzaA__AEN68914
augaaggcaauacuaguaguucugcuauauacauuugcaaccgcaaaugcagacacauuauguauagguuaucaugcgaacaauucaacagacacuguagacacaguacuggaaaagaauguaacaguaacacacucuguuaaccuucuagaagacaagcauaacgggaaacuaugcaaacuaagagggguagccccauugcauuuggguaaauguaacauugcuggcuggauccugggaaauccagagugugaaucacucuccacagcaagcucaugguccuacauuguggaaacaucuaguucagacaauggaacguguuacccaggagauuucaucgauuaugaggagcuaagggagcaauugagcucagugucaucauuugaaagguuugagauauuccccaagacaaguucauggcccaaucaugacucgaacaaagguguaacggcagcauguccucaugcuggagcaaaaagcuucuacaaaaauuuaauauggcuaguuaaaaaaggaaauucauacccaaagcucagcaaauccuacauuaaugauaaagggaaagaaguccucgugcuauggggcauucaccauccaucuacuagugcugaccaacaaagucucuaucagaaugcagaugcauauguuuuuguggggacaucaaaauacagcaagaaguucaagccggaaauagcaauaagacccaaagugagggaucaagaagggagaaugaacuauuacuggacacuaguagagccgggagacaaaauaacauucgaagcaacuggaaaucuagugguaccgagauaugcauucgcaauggaaagaaaugcuggaucugguauuaucauuucagauacaccaguccacgauugcaauacaacuugucagacacccaagggugcuauaaacaccagccucccauuucagaauauacauccgaucacaauuggaaaauguccaaaauauguaaaaagcacaaaauugagacuggccacaggauugaggaaugucccgucuauucaaucuagaggccuauuuggggccauugccgguuucauugaagggggguggacagggaugguagauggaugguacgguuaucaccaucaaaaugagcaggggucaggauaugcagccgaccugaagagcacacaaaaugccauugacgagauuacuaacaaaguaaauucuguuauugaaaagaugaauacacaguucacagcaguagguaaagaguucaaccaccuggaaaaaagaauagagaauuuaaauaaaaaaauugaugaugguuuccuggacauuuggacuuacaaugccgaacuguugguucuauuggaaaaugaaagaacuuuggacuaccacgauucaaaugugaagaacuuauaugaaaagguaagaagccaguuaaaaaacaaugccaaggaaauuggaaacggcugcuuugaauuuuaccacaaaugcgauaacacgugcauggaaagugucaaaaaugggacuuaugacuacccaaaauacucagaggaagcaaaauuaaacagagaagaaauagaugggguaaagcuggaaucaacaaggauuuaccagauuuuggcgaucuauucaacugucgccaguucauugguacugguagucucccugggggcaaucaguuucuggaugugcucuaaugggucucuacaguguagaauauguauuuaa

SEQ ID NO: 39129 - RNA, 1701 nt, Artificial Sequence; identical to SEQ ID NO: 37886
  derived and/or modified CDS sequence (wt) from hemagglutinin__InfluenzaA__AEN68915

SEQ ID NO: 39130 - RNA, 1701 nt, Artificial Sequence
  derived and/or modified CDS sequence (wt) from hemagglutinin__InfluenzaA__AEN68916
augaaggcaauacuaguaguucugcuauauacauuugcaaccgcaaaugcagacacauuauguauagguuaucaugcgaacaauucaacagacacuguagacacaguacuagaaaagaauguaacaguaacacacucuguuaaccuucuagaagacaagcauaacgggaaacuaugcaaacuaagagggguagccccauugcauuuggguaaauguaacauugcuggcuggauccugggaaauccagagugugaaucacucuccacagcaagcucaugguccuacauuguggaaacaucuaguucagacaauggaacguguuacccaggagauuucaucgauuaugaggagcuaagagagcaauugagcucagugucaucauuugaaagguuugagauauuccccaagacaaguucauggcccaaucaugacucgaacaaagguguaacggcagcauguccucaugcuggagcaaaaagcuucuacaaaaauuuaauauggcuaguuaaaaaaggaaauucauacccaaagcucagcaaauccuacauuaaugauaaagggaaagaaguccucgugcuauggggcauucaccauccaucuacuagugcugaccaacaaagucucuaucagaaugcagaugcauauguuuuugugggaacaucaagauacagcaagaaguucaagccggaaauagcaauaagacccaaagugagggaucaagaagggagaaugaacuauuacuggacacuaguagagccgggagacaaaauaacauucgaagcaacuggaaaucuagugguaccgagauaugcauucgcaauggaaagaaaugcuggaucugguauuaucauuucagauacaccaguccacgauugcaauacaacuugucagacacccaagggugcuauaaacaccagccucccauuucagaauauacauccgaucacaauuggaaaauguccaaaauauguaaaaagcacaaaauugagacuggccacaggauugaggaaugucccgucuauucaaucuagaggccuauuuggggccauugccgguuucauugaagggggguggacagggaugguagauggaugguacgguuaucaccaucaaaaugagcaggggucaggauaugcagccgaccugaagagcacacagaaugccauugacgagauuacuaacaaaguaaauucuguuauugaaaagaugaauacacaguucacagcaguagguaaagaguucaaccaccuggaaaaaagaauagagaauuuaaauaaaaaaguugaugaugguuuccuggacauuuggacuuacaaugccgaacuguugguucuauuggaaaaugaaagaacuuuggacuaccacgauucaaaugugaagaacuuauaugaaaagguaagaagccaguuaaaaaacaaugccaaggaaauuggaaacggcugcuuugaauuuuaccacaaaugcgauaacacgugcauggaaagugucaaaaaugggacuuaugacuacccaaaauacucagaggaagcaaaauuaaacagagaagaaauagaugggguaaagcuggaaucaacaaggauuuaccagauuuuggcgaucuauucaacugucgccaguucauugguacugguagucucccugggggcaaucaguuucuggaugugcucuaaugggucucuacaguguagaauauguauuuaa

SEQ ID NO: 39131 - RNA, 1701 nt, Artificial Sequence
  derived and/or modified CDS sequence (wt) from hemagglutinin__InfluenzaA__AEN68917
augaaggcaauacuaggaguucugcuauauacauuugcaaccgcaaacgcagacacauuauguauagguuaucaugcgaacaauucaacagacacuguagacacaguacuagaaaagaauguaacaguaacacacucuguuaaccuucuagaagacaagcauaacgggaaacuaugcaaacuaagagggguagccccauugcauuuggguaaauguaacauugcuggcuggauccugggaaauccagagugugaaucacucuccacagcaagcucaugguccuacauuguggaaacaucuaguucagacaauggaacguguuacccaggagauuucaucgauuaugaggagcuaagagagcaauugagcucagugucaucauuugaaagguuugagauauuccccaagacaaguucauggcccaaucaugacucgaacaaagguguaacggcagcauguccucaugcuggagcaaaaagcuucuacaaaaauuuaauauggcuaguuaaaaaaggaaauucauacccaaagcucagcaaguccuacauuaaugauaaagggaaagaaguccucgugcuauggggcauucaccauccaucuacuagugcugaccaacaaagucucuaucagaaugcagaugcauauguuuuuguggggacaucaagauacagcaagaaguucaagccggaaauagcaauaagacccaaagugagggaucaagaagggagaaugaacuauuacuggacacuaguagagccgggagacaaaauaacauuugaagcaacuggaaaucuagugguaccgagauaugcauucgcaauggaaagaaaugcuggaucugguauuaucauuucagauacaccaguccacgauugcaauacaacuugucagacacccaagggugcuauaaacaccagccucccauuucagaauauacauccggucacaauuggaaaauguccaaaauauguaaaaagcacaaaauugagacuggccacaggauugaggaaugucccgucuauucaaucuagaggccuauuuggggccauugccgguuucauugaagggggguggacaggaaugguagauggaugguacgguuaucaccaucaaaaugagcaggggucaggauaugcagccgaccugaagagcacacagaaugccauugacaagauuacuaacaaaguaaauucuguuauugaaaagaugaauacacaguucacagcaguagguaaagaguucaaccaccuggaaaaaagaauagagaauuuaaauaaaaaaguugaugaugguuuccuggacauuuggacuuacaaugccgaacuguugguucuauuggaaaaugaaagaacuuuggacuaccacgauucaaaugugaagaacuuauaugaaaagguaagaagccaguuaaaaaacaaugccaaggaaauuggaaacggcugcuuugaauuuuaccacaaaugcgauaacacgugcauggaaagugucaaaaaugggacuuaugacuacccaaaauacucagaggaagcaaaauuaaacagagaagaaauagaugggguaaagcuggaaucaacgaggauuuaccagauuuuggcgaucuauucaacugucgccaguucauugguacugguagucucccugggggcaaucaguuucuggaugugcucuaaugggucucuacaguguagaauauguauuuaa

SEQ ID NO: 39132 - RNA, 1701 nt, Artificial Sequence
  derived and/or modified CDS sequence (wt) from hemagglutinin__InfluenzaA__AEN68918
augaaggcaauacuaguaguucugcuauauacauuugcaaccgcaaaugcagacacauuauguauagguuaucaugcgaacaauucaacagacacuguagacacaguacuagaaaagaauguaacaguaacacacucuguuaaccuucuagaagacaagaauaacgggaaacuaugcaaacuaagagggguagccccauugcauuuggguaaauguaacauugcuggcuggauccugggaaauccagagugugaaucacucuccacagcaagcucaugguccuacauuguggaaacaucuaguucagacaauggaacauguuacccaggagauuucaucgauuaugaggagcuaagagagcaauugagcucagugucaucauuugaaagguuugagauguuccccaagacaaguucauggcccaaucaugacucgaacaaagguguaacggcagcauguccucaugcuggagcaaaaagcuucuacaaaaauuuaauauggcuaguuaaaaaaggaaauucauacccaaagcucagcaaauccuacauuaaugauaaagggaaagaaguccucgugcuauggggcauucaccauccauccacuagugcugaccaacaaagucuauaucagaaugcagaugcauauguuuuuguggggacaucaagauacagcaagaaguucaagccggaaauagcaauaagacccaaagugagggaucaagaagggagaaugaacuauuacuggacacuaguagagccgggagacaaaauaacauucgaagcaacuggaaaucuagugguaccgagauacgcauucgcaauggaaagaaaugcuggaucugguauuaucauuucagauacaccaguccacgauugcaauacaacuugucagacacccaagggugcuauaaacaccagccucccauuucagaauauacauccgaucacaauuggaaaauguccaaaauauguaaaaagcacaaaauugagacuggccacaggauugaggaaugucccgucuauucaaucuagaggccuauuuggggccauugccgguuucauugaagggggguggacagggaugguagauggaugguacgguuaucaccaucaaaaugagcaggggucaggauaugcagccgaccugaagagcacacagaaugccauugacgagauuacuaacaaaguaaauucuguuauugaaaagaugaauacacaguucacagcaguagguaaagaguucaaccaccuggaaaaaagaauagagaauuuaaauaaaaaaguugaugaugguuuccuggacauuuggacuuacaaugccgaacuguugguucuauuggaaaaugaaagaacuuuggacuaccacgauucaaaugugaagaacuuauaugaaaagguaagaagccaguuaaaaaacaaugccaaggaaguuggaaacggcugcuuugaauuuuaccacaaaugcgauaacacgugcauggaaagugucaaaaaugggacuuaugacuacccaaaauacucagaggaagcaaaauuaaacagagaagaaauagaugggguaaagcuggaaucaacaaggauuuaccagauuuuggcgaucuauucaacugucgccaguucauugguacugguagucucccugggggcaaucaguuucuggaugugcucuaaugggucucuacaguguagaauauguauuuaa

SEQ ID NO: 39133 - RNA, 1701 nt, Artificial Sequence
  derived and/or modified CDS sequence (wt) from hemagglutinin__InfluenzaA__AEN68919
augaaggcaauacuaguaguucugcuauauacauuugcaaccgcaaaugcagacacauuauguauagguuaucaugcgaacaauucaacagacacuguagacacaguacuagaaaagaauguaacaguaacacacucuguuaaccuucuagaagacaagcauaacgggaaacuaugcaaacuaagagggguagccccauugcauuuggguaaauguaacaucgcuggcuggauccugggaaauccagagugugaaucacucuccacagcaagcucaugguccuacauuguggaaacaucuaguucagacaauggaacguguuacccaggagauuucaucgauuaugaggagcuaagagagcaauugagcucagugucaucauuugaaagguuugagauauuccccaagacaaguucauggcccgaucaugacucgaacaaagguguaacggcagcauguccucaugcuggagcaaaaagcuucuacaaaaauuuaauauggcuaguuaaaaaaggaaauucauacccaaagcucagcaaauccuacauuaaugauaaagggaaagaaguccucgugcuauggggcauucaccauccaucuacuagugcugaccaacaaagucucuaucagaaugcagaugcauauguuuuuguggggacaucaagauacagcaagaaguucaagccggaaauagcaauaagacccaaagugagggaucaagaagggagaaugaacuauuacuggacacuaguagagccgggagacaaaauaacauucgaagcaacuggaaaucuagugguaccgagauaugcauucgcaauggaaagaaaugcuggaucugguauuaucauuucagauacaccaguccacgauugcaauacaacuugucagacacccaagggugcuauaaacaccagccucccauuucagaauauacauccgaucacaauuggaaaauguccaaaauauguaaaaagcacaaaauugagacuggccacaggauugaggaaugucccgucuauucaaucuagaggccuauuuggggccauugccgguuucauugaagggggguggacagggaugguagauggaugguacgguuaucaccaucaaaaugagcaggggucaggauaugcagccgaccugaagagcacacagaaugccauugacaagauuacuaacaaaguaaauucuguuauugaaaagaugaauacacaguucacagcaguagguaaagaguucaaccaccuggaaaaaagaauagagaauuuaaauaaaaaaguugaugaugguuuccuggacauuuggacuuacaaugccgaacuguugguucuauuggaaaaugaaagaacuuuggacuaccacgauucaaaugugaagaacuuauaugaaaagguaagaagccaguuaaaaaacaaugccaaggaaauuggaaacggcugcuuugaauuuuaccacaaaugcgauaacacgugcauggaaagugucaaaaaugggacuuaugacuacccaaaauacucagaggaagcaaaauuaaacagagaagaaauagaugggguaaagcuggaaucaacaaggauuuaccagauuuuggcgaucuauucaacugucgccaguucauugguacugguagucucccugggggcaaucaguuucuggaugugcucuaaugggucucuacaguguagaauauguauuuaa

SEQ ID NO: 39134 - RNA, 1701 nt, Artificial Sequence
  derived and/or modified CDS sequence (wt) from hemagglutinin__InfluenzaA__AEN68920
augaaggcaauacuaguaguucugcuauauacauuugcaaccgcaaaugcagacacauuauguauagguuaucaugcgaacaauucaacagacacuguagacacaguacuagaaaagaauguaacaguaacacacucuguuaaccuucuagaagacaagcauaacgggaaacuaugcaaacuaagagggguagccccauugcauuuggguaaauguaacauugcuggcuggauccugggaaauccagagugugaaucacucuccacagcaagcucaugguccuacauuguggaaacaucuaguucagacaauggaacauguuacccaggagauuucaucgauuaugaggagcuaagagagcaauugagcucagugucaucauuugaaagguuugagauguuccccaagacaaguucauggcccaaucaugacucgaacaaagguguaacggcagcauguccucaugcuggagcaaaaagcuucuacaaaaauuuaauauggcuaguuaaaaaaggaaauucauacccaaagcucagcaaauccuacauuaaugauaaagggaaagaaguccucgugcuauggggcauucaccauccauccacuagugcugaccaacaaagucucuaucagaaugcagaugcauauguuuuuguggggacaucaagauacagcaagaaguucaagccggaaauagcaauaagacccaaagugagggaucaagaagggagaaugaacuauuacuggacacuaguagagccgggagacaaaauaacauucgaagcaacuggaaaucuagugguaccgagauacgcauucgcaauggaaagaaaugcuggaucugguauuaucauuucagauacaccaguccacgauugcaauacaacuugucagacacccaagggugcuauaaacaccagccucccauuucagaauauacauccgaucacaauuggaaaauguccaaaauauguaaaaagcacaaaauugagacuggccacaggauugaggaaugucccgucuauucaaucuagaggccuauuuggggccauugccgguuucauugaagggggguggacagggaugguagauggaugguacgguuaucaccaucaaaaugagcaggggucaggauaugcagccgaccugaagagcacacagaaugccauugacgagauuacuaacaaaguaaauucuguuauugaaaagaugaauacacaguucacagcaguagguaaagaguucaaccaccuggaaaaaagaauagagaauuuaaauaaaaaaguugaugaugguuuccuggacauuuggacuuacaaugccgaacuguugguucuauuggaaaaugaaagaacuuuggacuaccacgauucaaaugugaagaacuuauaugaaaagguaagaagccaguuaaaaaacaaugccaaggaaguuggaaacggcugcuuugaauuuuaccacaaaugcgauaacacaugcauggaaagugucaaaaaugggacuuaugacuacccaaaauacucagaggaagcaaaauuaaacagagaagaaauagaugggguaaagcuggaaucaacaaggauuuaccagauuuuggcgaucuauucaacugucgccaguucauugguacugguagucucccugggggcaaucaguuucuggaugugcucuaaugggucucuacaguguagaauauguauuuaa

SEQ ID NO: 39135 - RNA, 1701 nt, Artificial Sequence
  derived and/or modified CDS sequence (wt) from hemagglutinin__InfluenzaA__AEN68921
augaaggcaauacuaguaguucugcuauauacauuugcaaccgcaaaugcagacacauuauguauagguuaucaugcgaacaauucaacagacacuguagacacaguacuagaaaagaauguaacaguaacacacucuguuaaccuucuagaagacaagcauaacgggaaacuaugcaaacuaagagggguagccccauugcauuuggguaaauguaacauugcuggcuggauccugggaaauccagagugugaaucacucuccacagcaagcucaugguccuacauuguggaaacaucuaguucagacaauggaacguguuacccaggagauuucaucgauuaugaggagcuaagagagcaauugagcucagugucaucauuugaaagguuugagauauuccccaagacaaguucauggcccaaucaugacucgaacaaagguguaacggcagcauguccucaugcuggagcaaaaagcuucuacaaaaauuuaauauggcuaguuaaaaaaggaaauucauacccaaagcucagcaaauccuacauuaaugauaaagggaaagaaguccucgugcuauggggcauucaccauccaucuacuagugcugaccaacaaagucucuaucagaaugcagaugcauauguuuuuguggggacaucaagauauagcaagaaguucaagccggaaauagcaauaagacccaaagugagggaucaagaagggagaaugaacuacuacuggacacuaguagagccgggagacaaaauaacauucgaagcaacuggaaaucuagugguaccgagauaugcauucgcaauggaaagaaaugcuggaucugguauuaucauuucagauacaccaguccacgauugcaauacaacuugucagacacccaagggugcuauaaacaccagccucccauuucagaauauacauccgaucacaauuggaaaauguccaaaauauguaaaaagcacaaaauugagacuggccacaggauugaggaaugucccgucuauucaaucuagaggccuauuuggggccauugccgguuucauugaagggggguggacagggaugguagauggaugguacgguuaucaccaucaaaaugagcaggggucaggauaugcagccgaccugaagagcacacagaaugccauugacaagauuacuaacaaaguaaauucuguuauugaaaagaugaauacacaguucacagcaguagguaaagaguucaaccaccuggaaaaaagaauagagaauuuaaauaaaaaaguugaugaugguuuccuggacauuuggacuuacaaugccgaacuguugguucuauuggaaaaugaaagaacuuuggacuaccacgauucaaaugugaagaacuuauaugaaaagguaagaagccaguuaaaaaacaaugccaaggaaauuggaaacggcugcuuugaauuuuaccacaaaugcgauaacacgugcauggaaagugucaaaaaugggacuuaugacuacccuaaauacucagaggaagcaaaauuaaacagagaagaaauagauggggugaagcuggaaucaacaaggauuuaccagauuuuggcgaucuauucaacugucgccaguucauugguacugguagucucccugggggcaaucaguuucuggaugugcucuaaugggucucuacaguguagaauauguauuuaa

SEQ ID NO: 39136 - RNA, 1701 nt, Artificial Sequence
  derived and/or modified CDS sequence (wt) from hemagglutinin__InfluenzaA__AEN68922
augaaggcaauacuaguaguucugcuauauacauuugcaaccgcaaaugcagacacauuauguauagguuaucaugcgaacaauucaacagacacuguagacacaguacuagaaaagaauguaacaguaacacacucuguuaaccuucuagaagacaagcauaacgggaaacuaugcaaacuaagagggguagccccauugcauuuggguaaauguaacauugcuggcuggauccugggaaauccagagugugaaucacucuccacagcaagcucaugguccuacauuguggaaacaucuaguucagacaauggaacauguuacccaggagauuucaucgauuaugaggagcuaagagagcaauugagcucagugucaucauuugaaagguuugagauguuccccaagacaaguucauggcccaaucaugacucgaacaaagguguaacggcagcauguccucaugcuggagcaaaaagcuucuacaaaaauuuaauauggcuaguuaaaaaaggaaauucauacccaaagcucagcaaauccuacauuaaugauaaagggaaagaaguccucgugcuauggggcauucaccauccaucuacuagugcugaccaacaaagucucuaucagaaugcagaugcauauguuuuuguggggacaucaagauauagcaagaaguucaagccggaaauagcaauaagacccaaagugagggaucaagaagggagaaugaacuacuacuggacacuaguagagccgggagacaaaauaacauucgaagcaacuggaaaucuagugguaccgagauacgcauucgcaauggaaagaaaugcuggaucugguauuaucauuucagauacaccaguccacgauugcaauacaacuugucagacacccaagggugcuauaaacaccagccucccauuucagaauauacauccgaucacaauuggaaaauguccaaaauauguaaaaagcacaaaauugagacuggccacaggauugaggaaugucccgucuauucaaucuagaggccuauuuggggccauugccgguuucauugaagggggguggacagggaugguagauggaugguacgguuaucaccaucaaaaugagcaggggucaggauaugcagccgaccugaagagcacacagaaugccauugacgagauuacuaacaaaguaaauucuguuauugaaaagaugaauacacaguucacagcaguagguaaagaguucaaccaccuggaaaaaagaauagagaauuuaaauaaaaaaguugaugaugguuuccuggacauuuggacuuacaaugccgaacuguugguucuauuggaaaaugaaagaacuuuggacuaccacgauucaaaugugaagaacuuauaugaaaagguaagaagccaguuaaaaaacaaugccaaggaaauuggaaacggcugcuuugaauuuuaccacaaaugcgauaacacgugcauggaaagugucaaaaaugggacuuaugacuacccuaaauacucagaggaagcaaaauuaaacagagaagaaauagauggggugaagcuggaaucaacaaggauuuaccagauuuuggcgaucuauucaacugucgccaguucauugguacugguagucucccugggggcaaucaguuucuggaugugcucuaaugggucucuacaguguagaauauguauuuaa

SEQ ID NO: 39137 - RNA, 1701 nt, Artificial Sequence; identical to SEQ ID NO: 39135
  derived and/or modified CDS sequence (wt) from hemagglutinin__InfluenzaA__AEN68923

SEQ ID NO: 39138 - RNA, 1701 nt, Artificial Sequence; identical to SEQ ID NO: 39135
  derived and/or modified CDS sequence (wt) from hemagglutinin__InfluenzaA__AEN68924

SEQ ID NO: 39139 - RNA, 1701 nt, Artificial Sequence
  derived and/or modified CDS sequence (wt) from hemagglutinin__InfluenzaA__AEN68925
augaaggcaauacuaguaguucugcuauauacauuugcaaccgcaaaugcagacacauuauguauagguuaucaugcgaacaauucaacagacacuguagacacaguacuagaaaagaauguaacaguaacacacucuguuaaccuucuagaagacaagcauaacgggaaacuaugcaaacuaagagggguagccccauugcauuuggguaaauguaacauugcuggcuggauccugggaaauccagagugugaaucacucuccacagcaagcucaugguccuacauuguggaaacaucuaguucagacaauggaacguguuacccaggagauuucaucgauuaugaggagcuaagagagcaauugagcucagugucaucauuugaaagguuugagauauuccccaagacaaguucauggcccaaucaugacucgaacaaagguguaacggcagcauguccucaugcuggagcaaaaagcuucuacaaaaauuuaauauggcuaguuaaaaaaggaaauucauacccaaagcucagcaaauccuacauuaaugauaaagggaaagaaguccucgugcuauggggcauucaccauccaucuacuagugcugaccaacaaagucucuaucagaaugcagaugcauauguuuuuguggagacaucaagauauagcaagaaguucaagccggaaauagcaauaagacccaaagugagggaucaagaagggagaaugaacuacuacuggacacuaguagagccgggagacaaaauaacauucgaagcaacuggaaaucuagugguaccgagauaugcauucgcaauggaaagaaaugcuggaucugguauuaucauuucagauacaccaguccacgauugcaauacaacuugucagacacccaagggugcuauaaacaccagccucccauuucagaauauacauccgaucacaauuggaaaauguccaaaauauguaaaaagcacaaaauugagacuggccacaggauugaggaaugucccgucuauucaaucuagaggccuauuuggggccauugccgguuucauugaagggggguggacagggaugguagauggaugguacgguuaucaccaccaaaaugagcaggggucaggauaugcagccgaccugaagagcacacagaaugccauugacaagauuacuaacaaaguaaauucuguuauugaaaagaugaauacacaguucacagcaguagguaaagaguucaaccaccuggaaaaaagaauagagaauuuaaauaaaaaaguugaugaugguuuccuggacauuuggacuuacaaugccgaacuguugguucuauuggaaaaugaaagaacuuuggacuaccacgauucaaaugugaagaacuuauaugaaaagguaagaagccaguuaaaaaacaaugccaaggaaauuggaaacggcugcuuugaauuuuaccacaaaugcgauaacacgugcauggaaagugucaaaaaugggacuuaugacuacccuaaauacucagaggaagcaaaauuaaacagagaagaaauagauggggugaagcuggaaucaacaaggauuuaccagauuuuggcgaucuauucaacugucgccaguucauugguacugguagucucccugggggcaaucaguuucuggaugugcucuaaugggucucuacaguguagaauauguauuuaa

SEQ ID NO: 39140 - RNA, 1701 nt, Artificial Sequence
  derived and/or modified CDS sequence (wt) from hemagglutinin__InfluenzaA__AEN68926
augaaggcaauacuaguaguucugcuauauacauuugcaaccgcaaaugcagacacauuauguauagguuaucaugcgaacaauucaacagacacuguagacacaguacuagaaaagaauguaacaguaacacacucuguuaaccuucuagaagacaagcauaacgggaaacuaugcaaacuaagagggguagccccauugcauuuggguaaauguaacauugcuggcuggauccugggaaauccagagugugaaucacucgccacagcaagcucaugguccuacauaguggaaacaucuaauucagacaauggaacguguuacccaggagauuucaucgauuaugaggagcuaagagagcaguugagcucagugucaucauuugaaagguuugagauauuccccaagacaaguucauggcccaaucaugacucgaacaaagguguaacggcagcauguccucaugcuggagcaaaaagcuucuacaaaaauuuaauauggcuaguuaaaaaaggaaauucauacccaaagcucagcaaauccuacauuaaugauaaagggagagaaguccucgugcuauggggcauucaccauccaucuacuagugcugaccaacaaagucucuaucagaaugcagauacauauguuuuuguggggacaucaagauacagcaagaaguucaagccggaaauagcaauaagacccaaagugagggaucaagaagggagaaugaacuauuacuggacacuaguagagccgggagacaaaauaacauucgaagcaacuggaaaucuagugguaccgagauaugcauucgcaauggaaagaaaugcuggaucugguauuaucauuucagauacaccaguccacgauugcaauacaacuugucagacacccaagggugcuauaaacaccagccucccauuucagaauauacauccgaucacaauuggaaaauguccaaaauauguaaaaagcacaaaauugagacuggccacaggauugaggaaugucccuucuauucaaucuagaggccuauuuggggccauugccgguuucauugaagggggguggacagggaugguagauggaugguacgguuaucaccaucaaaaugagcaggggucaggauaugcagccgaccugaagagcacacagaaugccauugacgagauuacuaacaaaguaaauucuguuauugaaaagaugaauacacaguucacagcaguagguaaagaguucaaccaccuggaaaaaagaauagagaauuuaaauaaaaaaguugaugaugguuuccuggacauuuggacuuacaaugccgaacuguugguucuauuggaaaaugaaagaacuuuggacuaccacgauucaaaugugaagaacuuauaugaaaagguaagaagccaguugaaaaacaaugccaaggaaauuggaaacggcugcuuugaauuuuaccacaaaugcgauaacacgugcauggaaagugucaaaaaugggacuuaugacuacccaaaauacucagaggaagcaaaauuaaacagagaagaaauagaugggguaaagcuggaaucaacaaggauuuaccagauuuuggcgaucuauucaacugucgccaguucauugguacugguagucucccugggggcaaucaguuucuggaugugcucuaaugggucucuacaguguagaauauguauuuaa

SEQ ID NO: 39141 - RNA, 1701 nt, Artificial Sequence
  derived and/or modified CDS sequence (wt) from hemagglutinin__InfluenzaA__AEN68927
augaaggcaauacuaguaguucugcuauauacauuugcaaccgcaaaugcagacacauuauguauagguuaucaugcgaacaauucaacagacacuguagacacaguacuagaaaagaauguaacaguaacacacucuguuaaccuucuagaagacaagcauaacgggaaauuaugcaaacuaagagggguagccccauugcauuuggguaaauguaacauugcuggcuggauccugggaaauccagagugugaaucacucuccacagcaagcucaugguccuacauuguggaaacaucuaguucagacaauggaacguguuacccaggagauuucaucgauuaugaggagcuaagagaacaauugagcucagugucaucauuugaaagguuugagauauuccccaagacaaguucauggcccgaucaugacucgaacaaagguguaacggcagcauguccucaugcuggagcaaaaagcuucuacaaaaauuuaauauggcuaguuaaaaaaggaaauucauacccaaagcucagcaaauccuacauuaaugauaaagggaaagaaguccucgugcuauggggcauucaccauccaucuacuagugcugaccaacaaagucucuaucagaaugcagaugcauauguuuuuguggggacaucaagauacagcaagaaguucaagccggaaauagcaauaagacccaaagugagggaucaagaagggagaaugaacuauuacuggacacuaguagagccgggagacaaaauaacauucgaagcaacuggaaaucuagugguaccgagauaugcauucgcaauggaaagaaaugcuggaucugguauuaucauuucagauacaccaguccacgauugcaauacaacuugucagacacccaagggugcuauaaacaccagccucccauuucagaauauacauccgaucacaauuggaaaauguccaaaauauguaaaaagcacaaaauugagacuggccacaggauugaggaaugucccgucuauucaaucuagaggccuauuuggggccauugccgguuucauugaagggggguggacagggaugguagauggaugguacgguuaucaccaucaaaaugagcaggggucaggauaugcagccgaccugaagagcacacagaaugccauugacaagauuacuaacaaaguaaauucuguuauugaaaagaugaauacacaguucacagcaguagguaaagaguucaaccaccuggaaaaaagaauagagaauuuaaauaaaaaaguugaugaugguuuccuggacauuuggacuuacaaugccgaacuguugguucuauuggaaaaugaaagaacuuuggacuaccacgauucaaaugugaagaacuuauaugaaaagguaagaaaccaguuaaaaaacaaugccaaggaaauuggaaacggcugcuuugaauuuuaccacaaaugcgauaacacgugcauggaaagugucaaaaaugggacuuaugacuacccaaaauacucagaggaagcaaaauuaaacagagaagaaauagaugggguaaagcuggaaucaacaaggauuuaccagauuuuggcgaucuauucaacugucgccaguucauugguacugguagucucccugggggcaaucaguuucuggaugugcucuaaugggucucuacaguguagaauauguauuuaa

SEQ ID NO: 39142 - RNA, 1701 nt, Artificial Sequence
  derived and/or modified CDS sequence (wt) from hemagglutinin__InfluenzaA__AEN68928
augaaggcaauacuaguaguucugcuauauacauuugcaaccgcaaaugcagacacauuauguauagguuaucaugcgaacaauucaacagacacuguagacacaguacuagaaaagaauguaacaguaacacacucuguuaaccuucuagaagacaagcauaacgggaaacuaugcaaacuaagagggguagccccauugcauuuggguaaauguaacauugcuggcuggauccugggaaauccagagugugaaucacucuccacagcaagcucaugguccuacauuguggaaacaucuaguucagacaauggaacguguuacccaggagauuucaucgauuaugaggagcuaagagagcaauugagcucagugucaucauuugaaagguuugagauauuccccaagacaaguucguggcccaaucaugacucgaacaaagguguaacggcagcauguccucaugcuggagcaaaaagcuucuacaaaaauuuaauauggcuaguuaaaaaaggaaauucauacccaaagcucagcaaauccuacauuaaugauaaagggaaagaaguccucgugcuauggggcauucaccauccaucuacuagugcugaccaacaaagucucuaucagaaugcagaugcauauguuuuuguggggacaucaagauauagcaagaaguucaagccggaaauagcaauaagacccaaagugagggaucaagaagggagaaugaacuacuacuggacacuaguagagccgggagacaaaauaacauucgaagcaacuggaaaucuagugguaccgagauaugcauucgcaauggaaagaaaugcuggaucugguauuaucauuucagauacaccaguccacgauugcaauacaacuugucagacacccaagggugcuauaaacaccagccucccauuucagaauauacauccgaucacaauuggaaaauguccaaaauauguaaaaagcacaaaauugagacuggccacaggauugaggaaugucccgucuauucaaucuagaggccuauuuggggccauugccgguuucauugaagggggguggacagggaugguagauggaugguacgguuaucaccaucaaaaugagcaggggucaggauaugcagccgaccugaagagcacacagaaugccauugacaagauuacuaacaaaguaaauucuguuauugaaaagaugaauacacaguucacagcaguagguaaagaguucaaccaccuggaaaaaagaauagagaauuuaaauaaaaaaguugaugaugguuuccuggacauuuggacuuacaaugccgaacuguugguucuauuggaaaaugaaagaacuuuggacuaccacgauucaaaugugaagaacuuauaugaaaagguaagaagccaguuaaaaaacaaugccaaggaaauuggaaacggcugcuuugaauuuuaccacaaaugcgauaacacgugcauggaaagugucaaaaaugggacuuaugacuacccaaaauacucagaggaagcaaaauuaaacagagaagaaauaaaugggguaaagcuggaaucaacaaggauuuaccagauuuuggcgaucuauucaacugucgccaguucauugguacugguagucucccugggggcaaucaguuucuggaugugcucuaaugggucucuacaguguagaauauguauuuaa

SEQ ID NO: 39143 - RNA, 1701 nt, Artificial Sequence
  derived and/or modified CDS sequence (wt) from hemagglutinin__InfluenzaA__AEN68929
augaaggcaauacuaguaguucugcuauauacauuugcaaccgcaaacgcagacacauuauguauagguuaucaugcgaacaauucaacagacacuguagacacaguacuagaaaagaauguaacaguaacacacucuguuaaccuucuagaagacaagcauaacgggaaacuaugcaaacuaagagggauagccccauugcauuuggguaaauguaacauugcuggcuggauccugggaaauccagagugugaaucacucuccacagcaagcucaugguccuacauuguggaaacaucuaguucagacaauggaacguguuacccaggagauuucaucgauuaugaggagcuaagagagcaauugagcucagugucaucauuugaaagguuugagauauuccccaagacaaguucauggcccaaucaugacucgaacaaagguguaacggcagcauguccucaugcuggagcaaaaagcuucuacaaaaauuuaauauggcuaguuaaaaaaggaaauucauacccaaagcucagcaaguccuacauuaaugauaaagggaaagaaguccucgugcuauggggcauucaccauccaucuacuagugcugaccaacaaagucucuaucagaaugcagaugcauauguuuuuguggggacaucaagauacagcaagaaguucaagccggaaauagcaauaagacccaaagugagggaucaagaagggagaaugaacuauuacuggacacuaguagagccgggagacaaaauaacauuugaagcaacuggaaaucuagugguaccgagauaugcauucgcaauggaaagaaaugcuggaucugguauuaucauuucagauacaccaguccacgauugcaauacaacuugucagacacccaagggugcuauaaacaccagccucccauuucagaauauacauccgaucacaauuggaaaauguccaaaauauguaaaaagcacaaaauugagacuggccacaggauugaggaaugucccgucuauucaaucuagaggccuauuuggggccauugccgguuucauugaagggggguggacagggaugguagauggaugguacgguuaucaccaucaaaaugagcaggggucaggauaugcagccgaccugaagagcacacagaaugccauugacaagauuacuaacaaaguaaauucugucauugaaaagaugaauacacaguucacagcaguagguaaagaguucaaccaccuggaaaaaagaauagagaauuuaaauaaaaaaguugaugaugguuuccuggacauuuggacuuacaaugccgaacuguugguucuauuggaaaaugaaagaacuuuggacuaccacgauucaaaugugaagaacuuauaugaaaagguaagaagccaguuaaaaaacaaugccaaggaaauuggaaacggcugcuuugaauuuuaccacaaaugcgauaacacgugcauggaaagugucaaaaaugggacuuaugacuacccaaaauacucagaggaagcaaaauuaaacagagaagaaauagaugggguaaagcuggaaucaacaaggauuuaccagauuuuggcgaucuauucaacugucgccaguucauugguacugguagucucccugggggcaaucaguuucuggaugugcucuaaugggucucuacaguguagaauauguauuuaa

SEQ ID NO: 39144 - RNA, 1701 nt, Artificial Sequence
  derived and/or modified CDS sequence (wt) from hemagglutinin__InfluenzaA__AEN68930
augaaggcaauacuaguaguucugcuauauacauuugcaaccgcaaaugcagacacauuauguauagguuaucaugcgaacaauucaacagacacuguagacacaguacuagaaaagaauguaacaguaacacacucuguuaaccuucuagaagacaagcauaacgggaaauuaugcaaacuaagagggguagccccauugcauuuggguaaauguaacauugcuggcuggauccugggaaauccagagugugaaucacucuccacagcaagcucaugguccuacauuguggaaacaucuaguucagacaauggaacguguuacccaggagauuucaucgauuaugaggagcuaagagaacaauugagcucagugucaucauuugaaagguuugagauauuccccaagacaaguucauggcccgaucaugacucgaacaaagguguaacggcagcauguccucaugcuggagcaaaaagcuucuacaaaaauuuaauauggcuaguuaaaaaaggaaauucauacccaaagcucagcaaauccuacauuaaugauaaagggaaagaaguccucgugcuauggggcauucaccauccaucuacuagugcugaccaacaaagucucuaucagaaugcagaugcauauguuuuuguggggacaucaagauacagcaagaaguucaagccggaaauagcaauaagacccaaagugagggaucaagaagggagaaugaacuauuacuggacacuaguagagccgggagacaaaauaacauucgaagcaacuggaaaucuagugguaccgagauaugcauucgcaauggaaagaaaugcuggaucugguauuaucauuucagauacaccaguccacgauugcaauacaacuugucagacacccaagggugcuauaaacaccagccucccauuucagaauauacauccgaucacaauuggaaaauguccaaaauauguaaaaagcacaaaauugagacuggccacaggauugaggaaugucccgucuauucaaucuagaggccuauuuggggccauugccgguuucauugaagggggguggacagggaugguagauggaugguacgguuaucaccaucaaaaugagcaggggucaggauaugcagccgaccugaagagcacacagaaugccauugacaagauuacuaacaaaguaaauucuguuauugaaaagaugaauacacaguucacagcaguagguaaagaguucaaccaccuggaaaaaagaauagagaauuuaaauaaaaaaguugaugaugguuuccuggacauuuggacuuacaaugccgaacuguugguucuauuggaaaaugaaagaacuuuggacuaccacgauucaaaugugaagaacuuauaugaaaagguaagaagccaguuaaaaaacaaugccaaggaaauuggaaacggcugcuuugaauuuuaccacaaaugcgauaacacgugcauggaaagugucaaaaaugggacuuaugacuacccaaaauacucagaggaagcaaaauuaaacagagaagaaauagaugggguaaagcuggaaucaacaaggauuuaccagauuuuggcgaucuauucaacugucgccaguucauugguacugguagucucccugggggcaaucaguuucuggaugugcucuaaugggucucuacaguguagaauauguauuuaa

SEQ ID NO: 39145 - RNA, 1701 nt, Artificial Sequence
  derived and/or modified CDS sequence (wt) from hemagglutinin__InfluenzaA__AEN68931
augaaggcaauacuaguaguucugcuauauacauuugcaaccgcaaaugcagacacauuauguauagguuaucaugcgaacaauucaacagacacuguagacacaguacuagaaaagaauguaacaguaacacacucuguuaaccuucuagaagacaagcauaacgggaaauuaugcaaacuaagagggguagccccauugcauuuggguaaauguaacauugcuggcuggauccugggaaauccagagugugaaucacucuccacagcaagcucgugguccuacauuguggaaacaucuaguucagacaauggaacguguuacccaggagauuucaucgauuaugaggagcuaagagaacaauugagcucagugucaucauuugaaagguuugagauauuccccaagacaaguucauggcccgaucaugacucgaacaaagguguaacggcagcauguccucaugcuggagcaaaaagcuucuacaaaaauuuaauauggcuaguuaaaaaaggaaauucauacccaaagcucagcaaauccuacauuaaugauaaagggaaagaaguccucgugcuauggggcauucaccauccaucuacuagugcugaccaacaaagucucuaucagaaugcagaugcauauguuuuuguggggacaucaagauacagcaagaaguucaagccggaaauagcaauaagacccaaagugagggaucaagaagggagaaugaacuauuacuggacacuaguagagccgggagacaaaauaacauucgaagcaacuggaaaucuagugguaccgagauaugcauucgcaauggaaagaaaugcuggaucugguauuaucauuucagauacaccaguccacgauugcaauacaacuugucagacacccaagggugcuauaaacaccagccucccauuucagaauauacauccgaucacaauuggaaaauguccaaaauauguaaaaagcacaaaauugagacuggccacaggauugaggaaugucccgucuauucaaucuagaggccuauuuggggccauugccgguuucauugaagggggguggacagggaugguagauggaugguacgguuaucaccaucaaaaugagcaggggucaggauaugcagccgaccugaagagcacacagaaugccauugacaagauuacuaacaaaguaaauucuguuauugaaaagaugaauacacaguucacagcaguagguaaagaguucaaccaccuggaaaaaagaauagagaauuuaaauaaaaaaguugaugaugguuuccuggacauuuggacuuacaaugccgaacuguugguucuauuggaaaaugaaagaacuuuggacuaccacgauucaaaugugaagaacuuauaugaaaagguaagaagccaguuaaaaaacaaugccaaggaaauuggaaacggcugcuuugaauuuuaccacaaaugcgauaacacgugcauggaaagugucaaaaaugggacuuaugacuacccaaaauacucagaggaagcaaaauuaaacagagaagaaauagaugggguaaagcuggaaucaacaaggauuuaccagauuuuggcgaucuauucaacugucgccaguucauugguacugguagucucccugggggcaaucaguuucuggaugugcucuaaugggucucuacaguguagaauauguauuuaa

SEQ ID NO: 39146 - RNA, 1701 nt, Artificial Sequence; identical to SEQ ID NO: 39144
  derived and/or modified CDS sequence (wt) from hemagglutinin__InfluenzaA__AEN68932

SEQ ID NO: 39147 - RNA, 1701 nt, Artificial Sequence
  derived and/or modified CDS sequence (wt) from hemagglutinin__InfluenzaA__AEN69426
augaaggcaauacuaguaguucugcuauauacauuugcaaccucaaaugcagacacauuauguauagguuaucaugcgaacaauucaacagacacuguagacacaguacuagaaaagaauguaacaguaacacacucuguuaaccuucuagaagacaagcauaacgggaaauuaugcaaacuaagagggguagccccauugcauuuggguaaauguaacauugcuggcuggauccugggaaauccagagugugaaucacucuccacagcaagcucaugguccuacauuguggaaacaucuaguucagacaauggaacguguuacccaggaaauuucaucgauuaugaggagcuaagagaacaauugagcucagugucaucauuugaaagguuugagauauuccccaagacaaguucauggcccgaucaugacucgaacaaagguguaacggcagcauguccucaugcuggagcaaaaagcuucuacaaaaauuuaauauggcuaguuaaaaaaggaaauucauacccaaagcucagcaaauccuacauuaaugauaaagggaaagaaguccucgugcuauggggcauucaccauccaucuacuagugcugaccaacaaagucucuaucagaaugcagaugcauauguuuuuguggggacaucaagauacagcaagaaguucaagccggaaauagcaauaagacccaaagugagggaucaagaagggagaaugaacuauuacuggacacuaguagagccgggagacaaaauaacauucgaagcaacuggaaaucuaguggcaccgagauaugcauucgcaauggaaagaaaugcuggaucugguauuaucauuucagauacaccaguccacgauugcaauacaacuugucagacacccaagggugcuauaaacaccagccucccauuucagaauauacauccgaucacaauuggaaaauguccaaaauauguaaaaagcacaaaauugagacuggccacaggauuaaggaaugucccgucuauucaaucuagaggccuauuuggggccauugccgguuucauugaagggggguggacagggaugguagauggaugguacgguuaucaccaucaaaaugagcaggggucuggauaugcagccgaccugaagagcacacagaaugccauugacaagauuacuaacaaaguaaauucuguuauugaaaagaugaauacacaguucacagcaguagguaaagaguucaaccaccuggaaaaaagaauagagaauuuaaauaaaaaaguugaugaugguuuccuggacauuuggacuuacaaugccgaacuguugguucuauuggaaaaugaaagaacuuuggacuaccacgauucaaaugugaagaacuuauaugaaaagguaagaagccaguuaaaaaacaaugccaaggaaauuggaaacggcugcuuugaauuuuaccacaaaugcgauaacacgugcauggaaagugucaaaaaugggacuuaugacuacccaaaauacucagaggaagcaaaauuaaacagagaagaaauagaugggguaaagcuggaaucaacaaggauuuaccagauuuuggcgaucuauucaacugucgccaguucauugguacugguagucucccugggggcaaucaguuucuggaugugcucuaaugggucucuacaguguagaauauguauuuaa

SEQ ID NO: 39148 - RNA, 1701 nt, Artificial Sequence
  derived and/or modified CDS sequence (wt) from hemagglutinin__InfluenzaA__AEN69475
augaaggcaauacuaguaguucugcuauauacauuagcaaccgcaaaugcagacacauuauguauagguuaucaugcgaacaauucaacagacacuguagacacaguacuagaaaagaauguaacaguaacacacucuguuaaccuucuagaagacaagcaugacgggaaacuaugcaaacuaagagggguagccccauugcauuuggguaaauguaacauugcuggcuggauccugggaaauccagagugugaaucacucuccacagcaagcucaugguccuacauuguggaaacaucuaguucagacaauggaacguguuacccaggagauuucaucgauuaugaagagcuaagagagcaauugagcucagugucaucauuugaaagguuugagauauuccccaagacaaguucauggcccaaucaugacucgaacaaagguguaacggcagcauguccucaugcuggagcaaaaagcuucuacaaaaauuuaauauggcuaguuaaaaaaggaaauucauacccaaagcucagcaaauccuacauuaaugauaaagggaaagaaguccucgugcuauggggcauucaccauccaucuacuagugcugaccaacaaagucucuaucagaaugcagaugcauauguuuuuguggggacaucaagauacagcaagaaguucaagccggaaauagcaauaagacccaaagugagggaucaagaagggagaaugaacuauuacuggacacuaguagagccgggagacaaaauaacauucgaagcaacuggaaaucuagugguaccgagauaugcauucgcaauggaaagaaaugcuggaucugguauuaucauuucagauacaccaguccacgauugcaaugcaacuugucagacacccaagggugcuauaaacaccagccucccauuucagaauauacauccgaucacaauuggaaaauguccaaaauauguaaaaagcacaaaauugagacuggccacaggguugaggaaugucccgucuauucaaucuagaggccuauuuggggccauugccgguuucauugaagggggguggacagggaugguagauggaugguacgguuaucaccaucaaaaugagcaggggucaggauaugcagccgaccugaagagcacacagaaugccauugacaagauuacuaacaaaguaaauucuguuauugaaaagaugaauacacaguucacagcaguagguaaagaguucaaccaccuggaaaaaagaauagagaauuuaaauaaaaaaguugaugaugguuuccuggacauuuggacuuacaaugccgaacuguugguucuacuggaaaaugaaagaacuuuggacuaccacgauucaaaugugaagaacuuauaugaaaagguaagaagccaguuaaaaaacaaugccaaggaaauuggaaacggcugcuuugaauuuuaccacaaaugcgauaacacgugcauggaaagugucaaaaaugggacuuaugacuacccaaaauacucagaggaagcaaaauuaaacagagaagaaauagaugggguaaagcuggaaucaacaaggauuuaccagauuuuggcgaucuauucaacugucgccaguucauugguacugguagucucccugggggcaaucaguuucuggaugugcucuaaugggucucuacaguguagaauauguauuuaa

SEQ ID NO: 39149 - RNA, 1701 nt, Artificial Sequence; identical to SEQ ID NO: 38933
  derived and/or modified CDS sequence (wt) from hemagglutinin__InfluenzaA__AEN69481

SEQ ID NO: 39150 - RNA, 1701 nt, Artificial Sequence; identical to SEQ ID NO: 34934
  derived and/or modified CDS sequence (wt) from hemagglutinin__InfluenzaA__AEO01032

SEQ ID NO: 39151 - RNA, 1701 nt, Artificial Sequence; identical to SEQ ID NO: 35772
  derived and/or modified CDS sequence (wt) from hemagglutinin__InfluenzaA__AEO01033

SEQ ID NO: 39152 - RNA, 1701 nt, Artificial Sequence; identical to SEQ ID NO: 35772
  derived and/or modified CDS sequence (wt) from hemagglutinin__InfluenzaA__AEO01034

SEQ ID NO: 39153 - RNA, 1701 nt, Artificial Sequence; identical to SEQ ID NO: 34676
  derived and/or modified CDS sequence (wt) from hemagglutinin__InfluenzaA__AEO01035

SEQ ID NO: 39154 - RNA, 1701 nt, Artificial Sequence; identical to SEQ ID NO: 35772
  derived and/or modified CDS sequence (wt) from hemagglutinin__InfluenzaA__AEO01036

SEQ ID NO: 39155 - RNA, 1701 nt, Artificial Sequence; identical to SEQ ID NO: 34965
  derived and/or modified CDS sequence (wt) from hemagglutinin__InfluenzaA__AEO01037

SEQ ID NO: 39156 - RNA, 1701 nt, Artificial Sequence; identical to SEQ ID NO: 35772
  derived and/or modified CDS sequence (wt) from hemagglutinin__InfluenzaA__AEO01038

SEQ ID NO: 39157 - RNA, 1701 nt, Artificial Sequence; identical to SEQ ID NO: 34898
  derived and/or modified CDS sequence (wt) from hemagglutinin__InfluenzaA__AEO01039

SEQ ID NO: 39158 - RNA, 1701 nt, Artificial Sequence
  derived and/or modified CDS sequence (wt) from hemagglutinin__InfluenzaA__AEO01040
augaaggcaauacuaguaguucugcuauauacauuugcaaccgcaaaugcagacacauuauguauagguuaucaugcgaacaauucaacagacacuguagacacaguacuagaaaagaauguaacaguaacacacucuguuaaccuucuagaagacaagcauaacgggaaacuaugcaaacuaagagggguagccccauugcauuuggguaaauguaacauugcuggcuggauccugggaaauccagagugugaaucacucuccacagcaagcucaugguccuacauuguggaaacaucuaguucagacaauggaacguguuacccaggagauuucaucgauuaugaggagcuaagagagcaauugagcucagugucaucauuugaaagguuugagauauuccccaagacaaguucauggcccaaucaugacucgaacaaagguguaacggcagcauguccucaugcuggagcaaaaagcuucuacaaaaauuuaauauggcuaguuaaaaaagggaauucauacccaaagcucagcaaauccuacauuaaugauaaagggaaaaaaguccucgugcuauggggcauucaccauccaucuacuagugcugaccaacaaagucucuaucagaaugcagaugcauauguuuuuguggggacaucaagauacagcaagaaguucaagccggaaauagcaauaagacccaaagugagggaucaagaagggagaaugaacuauuacuggacacuaauagagccgggagacaaaauaacauucgaagcaacuggaaaucuagugguaccgagauaugcauucacaauggaaagaaaugcuggaucugguauuaucauuucagauacaccaguccacgauugcaauacaacuugucagacacccaagggugcuauaaacaccagccucccauuucagaauauacauccgaucacaauuggaaaauguccaaaauauguaaaaagcacaaaauugagacuggccacaggauugaggaaugucccgucuauucaaucuagaggccuauuuggggccauugccgguuucauugaagggggguggacagggaugguagauggaugguacgguuaucaccaucaaaaugagcaggggucaggauaugcagccgaccugaagagcacacagaaugccauugacgagauuacuaacaaaguaaauucuguuauugaaaagaugaauacacaguucacagcaguagguaaagaguucaaccaccuggaaaaaagaauagagaauuuaaauaaaaaaguugaugaugguuuccuggacauuuggacuuacaaugccgaacuguugguucuauuggaaaaugaaagaacuuuggacuaccacgauucaaaugugaagaacuuauaugaaaagguaagaagccaguuaaaaaacaaugccaaggaaauuggaaacggcugcuuugaauuuuaccacaaaugcgauaacacgugcauggaaagugucaaaaaugggacuuaugacuacccaaaauacucagaggaagcaaaauuaaacagagaagaaauagaugggguaaagcuggaaucaacaaggauuuaccagauuuuggcgaucuauucaacugucgccaguucauugguacugguagucucccugggggcaaucaguuucuggaugugcucuaaugggucucuacaguguagaauauguauuuaa

SEQ ID NO: 39159 - RNA, 1701 nt, Artificial Sequence; identical to SEQ ID NO: 34681
  derived and/or modified CDS sequence (wt) from hemagglutinin__InfluenzaA__AEO01041

SEQ ID NO: 39160 - RNA, 1701 nt, Artificial Sequence; identical to SEQ ID NO: 35772
  derived and/or modified CDS sequence (wt) from hemagglutinin__InfluenzaA__AEO01042

SEQ ID NO: 39161 - RNA, 1701 nt, Artificial Sequence
  derived and/or modified CDS sequence (wt) from hemagglutinin__InfluenzaA__AEO01043
augaaggcaauacuaguaguucugcuauauacauuugcaaccgcaaaugcagacacauuauguauagguuaucaugcgaacaauucaacagacacuguagacacaguacuagaaaagaauguaacaguaacacacucuguuaaccuucuagaagacaagcauaacgggaaacuaugcaaacuaagagggguagccccauugcauuuggguaaauguaacauugcuggcuggauccugggaaauccagagugugaaucacucuccacagcaagcucaugguccuacauuguggaaacaucuaguucaaacaauggaacguguuacccaggagauuucaucgauuaugaggagcuaagagagcaauugagcucagugucaucauuugaaagguuugagauauuccccaagacaaguucauggcccaaucaugacucgaacaaagguguaacggcagcauguccucaugcuggagcaaaaagcuucuacaaaaauuuaauauggcuaguuaaaaaaggaaauucauacccaaagcucagcaaauccuacauuaaugauaaagggaaagaaguccucgugcuauggggcauucaccauccaucuacuagugcugaccaacaaagucucuaucagaaugcagaugcauauguuuuuguggggacaucaagauacagcaagaaguucaagccggaaauagcaauaagacccaaagugagggaacaagaagggagaaugaacuauuacuggacacuaguagagccgggagacaaaauaacauucgaagcaacuggaaaucuagugguaccgagauaugcauucgcaauggaaagaaaugcuggaucugguauuaucauuucagauacaccaguccacgauugcaauacaacuugucagacacccaagggugcuauaaacaccagccucccauuucagaauauacacccgaucacaauuggaaaauguccaaaauauguaaaaagcacaaaauugagacuggccacaggauugaggaaugucccgucuauucaaucuagaggccuauuuggggccauugccgguuucauugaagggggguggacagggaugguagauggaugguacgguuaucaccaucaaaaugagcaggggucaggauaugcagcagaccugaagagcacacagaaugccauugacgagauuacuaacaaaguaaauucuguuauugaaaagaugaauacacaguucacagcaguagguaaagaguucaaccaccuggaaaaaagaauagagaauuuaaauaaaaaaguugaugaugguuuccuggacauuuggacuuacaaugccgaacuguugguucuauuggaaaaugaaagaacuuuggacuaccacgauucaaaugugaagaacuuauaugaaaagguaagaagccaguuaaaaaacaaugccaaggaaauuggaaacggcugcuuugaauuuuaccacaaaugcgauaacacgugcauggaaagugucaaaaaugggacuuaugacuacccaaaauacucagaggaagcaaaauuaaacagagaagaaauagaugggguaaagcuggaaucaacaaggauuuaccagauuuuggcgaucuauucaacugucgccaguucauugguacugguagucucccugggggcaaucaguuucuggaugugcucuaaugggucucuacaguguagaauauguauuuaa

SEQ ID NO: 39162 - RNA, 1701 nt, Artificial Sequence
  derived and/or modified CDS sequence (wt) from hemagglutinin__InfluenzaA__AEO01044
augaaggcaauacuaguaguucugcuauauacauuugcaaccgcaaaugcagacacauuauguauagguuaucaugcgaacaauucaacagacacuguagacacaguacuagaaaagaauguaacaguaacacacucuguuaaccuucuagaagacaagcauaacgggaaacuaugcaaacuaagagggguagccccauugcauuuggguaaauguaacauugcuggcuggauccugggaaauccagagugugaaucacucuccacagcaagcucaugguccuacauuguggaaacaucuaguucagacaauggaacauguuacccaggagauuucaucgauuaugaggagcuaagagagcaauugagcucagugucaucauuugaaagguuugagauauuccccaagacaaguucauggcccaaucaugacucgaacaaagguguaacggcagcauguccucaugcuggagcaaaaagcuucuacaaaaauuuaauauggcuaguuaaaaaaggaaauucauacccaaagcucagcaaauccuacauuaaugauaaagggaaagaaguccucgugcuauggggcauucaccauccaucuacuagugcugaccaacaaagucucuaucagaaugcagaugcauauguuuuuguggggacaucaagauacagcaagaaguucaagccagaaauagcaauaagacccaaagugagggaucaagaagggagaaugaacuauuacuggacacuaguagagccgggagacaaaauaacauucgaagcaacuggaaaucuagugguaccgagauaugcauucgcaauggaaagaaaugcuggaucugguauuaucauuucagauacaccaguccacgauugcaauacaacuugucagacacccaagggugcuauaaacaccagccucccauuucagaauauacauccgaucacaauuggaaaauguccaaaauauguaaaaagcacaaaauugagacuggccacaggauugaggaaugucccgucuauucaaucuagaggccuauuuggggccauugccgguuucauugaagggggguggacagggaugguagauggaugguacgguuaucaccaucaaaaugagcaggggucaggauaugcagccgaccugaagagcacacagaaugccauugacgagauuacuaacaaaguaaauucuguuauugaaaagaugaauacacaguucacagcaguagguaaagaguucaaccaccuggaaaaaagaauagagaauuuaaauaaaaaaguugaugaugguuuccuggacauuuggacuuacaaugccgaacuguugguucuauuggaaaaugaaagaacuuuggacuaccacgauucaaaugugaagaacuuauaugaaaagguaagaagccaguuaaaaaacaaugccaaggaaauuggaaacggcugcuuugaauuuuaccacaaaugcgauaacacgugcauggaaagugucaaaaaugggacuuaugacuacccaaaauacucagaggaagcaaaauuaaacagagaagaaauagaugggguaaagcuggaaucaacaaggauuuaccagauuuuggcgaucuauucaacugucgccaguucauugguacugguagucucccugggggcaaucaguuucuggaugugcucuaaugggucucuacaguguagaauauguauuuaa

SEQ ID NO: 39163 - RNA, 1701 nt, Artificial Sequence
  derived and/or modified CDS sequence (wt) from hemagglutinin__InfluenzaA__AEO01045
augaaggcaauacuaguaguucugcuauauacauuugcaaccgcaaaugcagacacauuauguauagguuaucaugcgaacaauucaacagacacuguagacacaguacuagaaaagaauguaacaguaacacacucuguuaaccuucuagaagacaagcauaacgggaaacuaugcaaacuaagagggguagccccauugcauuuggguaaauguaacauugcuggcuggauccugggaaaucuagagugugaaucacucuccacagcaagcucaugguccuacauuguggaaacaucuaguucagacaauggaacguguuacccaggagauuucaucgauuaugaggagcuaagagagcaauugagcucagugucaucauuugaaagguuugagauauuccccaagacaaguucauggcccaaucaugacucgaacaaagguguaacggcagcauguccucaugcuggagcaaaaagcuucuacaaaaauuuaauauggcuaguuaaaaaaggaaauucauacccaaagcucagcaaauccuacauuaaugauaaagggaaagaaguccucgugcuauggggcauucaccauccaucuacuagugcugaccaacaaagucucuaucagaaugcagaugcauauguuuuuguggggacaucaagauacagcaagaaguucaagccggaaauagcaauaagacccaaagugagggaucaagaagggagaaugaacuauuacuggacacuaguagagccgggagacaaaauaacauucgaagcaacuggaaaucuagugguaccgagauaugcauucgcaauggaaagaaaugcuggaucugguauuaucauuucagauacaccaguccacgauugcaauacaacuugucagacacccaagggugcuauaaacaccagccucccauuucagaauauacauccgaucacaauuggaaaauguccaaaauauguaaaaagcacaaaauugagacuggccacaggauugaggaaugucccgucuauucaaucuagaggccuauuuggggccauugccgguuucauugaagggggguggacagggaugguagauggaugguacgguuaucaccaucaaaaugagcaggggucaggauaugcagccgaccugaaaagcacacagaaugccauugacgagauuacuaacaaaguaaauucuguuauugaaaagaugaauacacaguucacagcaguagguaaagaguucaaccaccuggaaaaaagaauagagaauuuaaauaaaaaaguugaugaugguuuccuggacauuuggacuuacaaugccgaacuguugguucuauuggaaaaugaaagaacuuuggacuaccacgauucaaaugugaagaacuuauaugaaaagguaagaagccaguuaaaaaacaaugccaaggaaauuggaaacggcugcuuugaauuuuaccacaaaugcgauaacacgugcauggaaagugucaaaaaugggacuuaugacuacccaaaauacucggaggaagcaaaauuaaacagagaagaaauagaugggguaaagcuggaaucaacaaggauuuaccagauuuuggcgaucuauucaacugucgccaguucauugguacugguagucucccugggggcaaucaguuucuggaugugcucuaaugggucucuacaguguagaauauguauuuaa

SEQ ID NO: 39164 - RNA, 1701 nt, Artificial Sequence; identical to SEQ ID NO: 34714
  derived and/or modified CDS sequence (wt) from hemagglutinin__InfluenzaA__AEO01046

SEQ ID NO: 39165 - RNA, 1701 nt, Artificial Sequence; identical to SEQ ID NO: 34714
  derived and/or modified CDS sequence (wt) from hemagglutinin__InfluenzaA__AEO01047

SEQ ID NO: 39166 - RNA, 1701 nt, Artificial Sequence
  derived and/or modified CDS sequence (wt) from hemagglutinin__InfluenzaA__AEO01048
augaaggcaauacuaguaguucugcuauauacauuugcaaccgcaaaugcagacacauuauguauagguuaucaugcgaacaauucaacagacacuguagacacaguacuagaaaagaauguaacaguaacacacucuguuaaccuucuagaagacaagcauaacgggaaacuaugcaaacuaagagggguagccccauugcauuuggguaaauguaacauugcuggcuggauccugggaaauccagagugugaaucacucuccacagcaagcucaugguccuacauuguggaaacaucuaguucagacaauggaacauguuacccaggagauuucaucgauuaugaggagcuaagagagcaauugagcucagugucaucauuugaaagguuugagauauuccccaagacaaguucauggcccaaucaugacucgaacaaagguguaacggcagcauguccucaugcuggagcaaaaagcuucuacaaaaauuuaauauggcuaguuaaaaaaggaaauucauacccaaagcucagcaaauccuacauuaaugauaaagggaaagaaguccucgugcuauggggcauucaccauccaucuacuagugcugaccaacaaagucucuaucagaaugcagaugcauauguuuuuguggggacaucaagauacagcaagaaguucaagccagaaauagcaauaagacccaaagugagggaucaagaagggagaaugaacuauuacuggacacuaguagagccgggagacaaaauaacauucgaagcaacuggaaaucuagugguaccgagauaugcauucgcaauggaaagaaaugcuggaucugguauuaucauuucagauacaccaguccacgauugcaauacaacuugucagacacccaagggugcuauaaacaccagccucccauuucagaauauacauccgaucacaauuggaaaauguccaaaauauguaaaaagcacaaaauugagacuggccacaggauugaggaaugucccgucuauucaaucuagaggccuauuuggggccauugccgguuucauugaagggggguggacagggaugguagauggaugguacgguuaucaccaucaaaaugagcaggggucaggauaugcagccgaccugaagagcacacagaaugccauugacgagauuacuaacaaaguaaauucuguuauugaaaagaugaauacacaguucacagcaguagguaaagaguucaaccaccuggaaaaaagaauagagaauuuaaauaaaaaaguugaugaugguuuccuggacauuuggacuuacaaugccgaacuguugguucuauuggaaaaugaaagaacuuuggacuaccacgauucaaaugugaagaacuuauaugaaaagguaagaagccaguuaaaaaacaaugccaaggaaauuggaaacggcugcuuugaauuuuaccacaaaugcgauaacacgugcauggaaagugucaaaaaugggacuuaugacuacccaaaauacucagaggaagcaaaauuaaacagagaagaaauagaugggguaaagcuggaaucaacaaggauuuaccagauuuuggcgaucuauucaacugucgccaguucauugguacugguagucucccugggggcaaucaguuucuggaugugcucuaaugggucucuacaguguaaaauauguauuuaa

SEQ ID NO: 39167 - RNA, 1701 nt, Artificial Sequence; identical to SEQ ID NO: 35579
  derived and/or modified CDS sequence (wt) from hemagglutinin__InfluenzaA__AEO01049

SEQ ID NO: 39168 - RNA, 1701 nt, Artificial Sequence; identical to SEQ ID NO: 34714
  derived and/or modified CDS sequence (wt) from hemagglutinin__InfluenzaA__AEO01050

SEQ ID NO: 39169 - RNA, 1701 nt, Artificial Sequence; identical to SEQ ID NO: 35772
  derived and/or modified CDS sequence (wt) from hemagglutinin__InfluenzaA__AEO01051

SEQ ID NO: 39170 - RNA, 1701 nt, Artificial Sequence
  derived and/or modified CDS sequence (wt) from hemagglutinin__InfluenzaA__AEO01052
augaaggcaauaauaguaguucugcuauauacauuugcaaccgcaaaugcagacacauuauguauagguuaucaugcgaacaauucaacagacacuguagacacaguacuagaaaagaauguaacaguaacacacucuguuaaccuucuagaagacaagcauaacgggaaacuaugcaaacuaagagggguagccccauugcauuuggguaaauguaacauugcuggcuggauccugggaaauccagagugugaaucacucuccacagcaagcucaugguccuacauuguggaaacaucuaguucagacaauggaacguguuacccaggagauuucaucgauuaugaggagcuaagagagcaauugagcucagugucaucauuugaaagguuugagauauuccccaagacaaguucauggcccaaucaugacucgaacaaagguguaacggcagcauguccucaugcuggagcaaaaagcuucuacaaaaauuuaauauggcuaguuaaaaaaggaaauucauacccaaagcucagcaaauccuacauuaaugauaaagggaaagaaguccucgugcuauggggcauucaccauccaucuacuagugcugaccaacaaagucucuaucagaaugcagaugcauauguuuuuguggggacaucaagauacagcaagaaguucaagccggaaauagcaauaagacccaaagugagggaucaagaagggagaaugaacuauuacuggacacuaguagagccgggagacaaaauaacauucgaagcaacuggaaaucuagugguaccgagauaugcauucgcaauggaaagaaaugcuggaucugguauuaucauuucagauacaccaguccacgauugcaauacaacuugucagacacccaagggugcuauaaacaccagccucccauuucagaauauacauccgaucacaauuggaaaauguccaaaauauguaaaaagcacaaaauugagacuggccacaggauugaggaaugucccgucuauucaaucuagaggccuauuuggggccauugccgguuucauugaagggggguggacagggaugguagauggaugguacgguuaucaccaucaaaaugagcaggggucaggauaugcagccgaccugaagagcacacagaaugccauugacaagauuacuaacaaaguaaauucuguuauugaaaagaugaauacacaguucacagcaguagguaaagaguucaaccaccuggaaaaaagaauagagaauuuaaauaaaaaaguugaugaugguuuccuggacauuuggacuuacaaugccgaacuguugguucuauuggaaaaugagagaacuuuggacuaccacgauucaaaugugaagaacuuauaugaaaagguaagaagccaguuaaaaaacaaugccaaggaaauuggaaacggcugcuuugaauuuuaccacaaaugcgauaacacgugcauggaaagugucaaaaaugggacuuaugacuacccaaaauacucagaggaagcaaaauuaaacagagaagaaauagaugggguaaagcuggaaucaacaaggauuuaccagauuuuggcgaucuauucaacugucgccaguucauugguacugguagucucccugggggcaaucaguuucuggaugugcucuaaugggucucuacaguguagaauauguauuuaa

SEQ ID NO: 39171 - RNA, 1701 nt, Artificial Sequence; identical to SEQ ID NO: 36353
  derived and/or modified CDS sequence (wt) from hemagglutinin__InfluenzaA__AEO01053

SEQ ID NO: 39172 - RNA, 1701 nt, Artificial Sequence; identical to SEQ ID NO: 34681
  derived and/or modified CDS sequence (wt) from hemagglutinin__InfluenzaA__AEO01054

SEQ ID NO: 39173 - RNA, 1701 nt, Artificial Sequence
  derived and/or modified CDS sequence (wt) from hemagglutinin__InfluenzaA__AEO01055
augaaggcaauacuaguaguucugcuauauacauuugcaaccgcaaaugcagacacauuauguauagguuaucaugcgaacaauucaacagacacuguagacacaguacuagaaaagaauguaacaguaacacacucuguuaaccuucuagaagacaagcauaacgggaaacuaugcaaacuaagagggguagccccauugcauuuggguaaauguaacauugcuggcuggauccugggaaauccagagugugaaucacucuccacaacaagcucaugguccuacauuguggaaacaucuaguucagacaauggaacguguuacccaggagauuucaucgauuaugaggagcuaagagagcaauugagcucagugucaucauuugaaagguuugagauauuccccaagacaaguucauggcccaaucaugacucgaacaaagguguaacggcagcauguccucaugcuggagcaaaaagcuucuacaaaaauuuaauauggcuaguuaaaaaaggaaauucauacccaaagcucagcaaauccuacauuaaugauaaagggaaagaaguccucgugcuauggggcauucaccauccaucuacuagugcugaccaacaaagucucuaucagaaugcagaugcauauguuuuuguggggacaucaagauacagcaagaaguucaagccggaaauagcaauaagacccaaagugagggaucaagaagggagaaugaacuauuacuggacacuaguagagccgggagacaaaauaacauucgaagcaacuggaaaucuagugguaccgagauaugcauucgcaauggaaagaaaugcuggaucugguauuaucauuucagauacaccaguccacgauugcaauacaacuugucagacacccaagggugcuauaaacaccagccucccauuucagaauauacauccgaucacaauuggaaaauguccaaaauauguaaaaagcacaaaauugagacuggccacaggauugaggaaugucccgucuauucaaucuagaggccuauuuggggccauugccgguuucauugaagggggguggacagggaugguagauggaugguacgguuaucaccaucaaaaugagcaggggucaggauaugcagccgaccugaagagcacacagaaugccauugacgagauuacuaacaaaguaaauucuguuauugaaaagaugaauacacaguucacagcaguagguaaagaguucaaccaccuggaaaaaagaauagagaauuuaaauaaaaagguugaugaugguuuccuggacauuuggacuuacaaugccgaacuguugguucuauuggaaaaugaaagaacuuuggacuaccacgauucaaaugugaagaacuuauaugaaaagguaagaagccaguuaaaaaacaaugccaaggaaauuggaaacggcugcuuugaauuuuaccacaaaugcgauaacacgugcauggaaagugucaaaaaugggacuuaugacuacccaaaauacucagaggaagcaaaauuaaacagagaagaaauagaugggguaaagcuggaaucaacaaggauuuaccagauuuuggcgaucuauucaacugucgccaguucauugguacugguagucucccugggggcaaucaguuucuggaugugcucuaaugggucucuacaguguagaauauguauuuaa

SEQ ID NO: 39174 - RNA, 1701 nt, Artificial Sequence; identical to SEQ ID NO: 35772
  derived and/or modified CDS sequence (wt) from hemagglutinin__InfluenzaA__AEO01056

SEQ ID NO: 39175 - RNA, 1701 nt, Artificial Sequence
  derived and/or modified CDS sequence (wt) from hemagglutinin__InfluenzaA__AEO01057
augaaggcaauacuaguaguucugcuauauacauuugcaaccgcaaaugcagacacauuauguauagguuaucaugcgaacaauucaacagacacuguagacacaguacuagaaaagaauguaacaguaacacacucuguuaaccuucuagaagacaagcauaacgggaaacuaugcaaacuaagagggguagccccauugcauuuggguaaauguaacauugcuggcuggauccugggaaauccagagugugaaucacucuccacagcaagcucaugguccuacauuguggaaacaucuaguucagacaauggaacguguuacccaggagauuucaucgauuaugaggagcuaagagagcaauugagcucagugucaucauuugaaagguuugagauauuccccaagacaaguucauggcccaaucaugacucgaacaaagguguaacggcagcauguccucaugcuggagcaaaaagcuucuacaaaaauuuaauauggcuaguuaaaaaaggaaauucauacccaaagcucagcaaauccuacauuaaugauaaagggaaagaaguccucgugcuauggggcauucaccauccaucuacuagugcugaccaacaaagucucuaucagaaugcagaugcauauguuuuuguggggacaucaagauacagcaagaaguucaagccggaaauagcaauaagacccaaagugagggaucaagaagggagaaugaacuauuacuggacacuaguagagccgggagacaaaauaacauucgaagcaacuggaaaucuagugguaccgagauaugcauucgcaauggaaagaaaugcuggaucugguauuaucauuucagauacaccaguccacgauugcaauacaacuugucagacacccaagggugcuauaaacaccagccucccauuucagaauauacauccgaucacaauuggaaaauguccaaaauauguaaaaagcacaaaauugagacuggccacaggauugaggaaugucccgucuauucaaucuagaggccuauuuggggccauugccgguuucauugaagggggguggacagggaugguagauggaugguacgguuaucaccaucaaaaugagcaggggucaggauaugcagccgaccugaaaagcacacagaaugccauugacgagauuacuaacaaaguaaauucuguuauugaaaagaugaauacacaguucacagcaguagguaaagaguucaaccaccuggaaaaaagaauagagaaucuaaauaaaaaaguugaugaugguuuccuggacauuuggacuuacaaugccgaacuauugguucuauuggaaaaugaaagaacuuuggacuaccacgauucaaaugugaagaacuuauaugaaaagguaagaagccaguuaaaaaacaaugccaaggaaauuggaaacggcugcuuugaauuuuaccacaaaugcgauaacacgugcauggaaagugucaaaaaugggacuuaugacuacccaaaauacucagaggaagcaaaauuaaacagagaagaaauagaugggguaaagcuggaaucaacaaggauuuaccagauuuuggcgaucuauucaacugucgccaguucauugguacugguagucucccugggggcaaucaguuucuggaugugcucuaaugggucucuacaguguagaauauguauuuaa

SEQ ID NO: 39176 - RNA, 1701 nt, Artificial Sequence
  derived and/or modified CDS sequence (wt) from hemagglutinin__InfluenzaA__AEO01058
augaaggcaauacuaguaguucugcuauauacauuugcaaccgcaaaugcagacacauuauguauagguuaucaugcgaacaauucaacagacacuguagacacaguacuagaaaagaauguaacaguaacacacucuguuaaccuucuagaagacaagcauaacgggaaacuaugcaaacuaagagggguagccccauugcauuuggguaaauguaacauugcuggcuggauccugggaaauccagagugugaaucacucuccacagcaagcucaugguccuacauuguggaaacaucuaguucagacaauggaacguguuacccaggagauuucaucgauuaugaggagcuaagagagcaauugagcucagugucaucauuugaaagguuugagauauuccccaagacaaguucauggcccaaucaugacucgaacaaagguguaacggcagcauguccucaugcuggagcaaaaagcuucuacaaaaauuuaauauggcuaguuaaaaaaggaaauucauacccaaagcucagcaaauccuacauuaaugauaaagggaaagaaguccucgugcuauggggcauucaccauccaucuacuagugcugaccaacaaagucucuaucagaaugcagaugcauauguuuuuguggggacaucaagauacagcaaaaaguucaagccggaaauagcaauaagacccaaagugagggaucaagaagggagaaugaacuauuacuggacacuaguagagccgggagacaaaauaacauucgaagcaacuggaaaucuagugguaccgagauaugcauucgcaauggaaagaaaugcuggaucugguauuaucauuucagauacaccaguccacgauugcaauacaacuugucagacacccaagggugcuauaaacaccagccucccauuucagaauauacauccgaucacaauuggaaaauguccaaaauauguaaaaagcacaaaauugagacuggccacaggauugaggaaugucccgucuauucaaucuagaggccuauuuggggccauugccgguuucauugaagggggguggacagggaugguagauggaugguacgguuaucaccaucaaaaugagcaggggucaggauaugcagccgaccugaagagcacacagaaugccauugacgagauuacuaacaaaguaaauucuguuauugaaaagaugaauacacaguucacagcaguagguaaagaguucaaccaccuggaaaaaagaauagagaauuuaaauaaaaaaguugaugaugguuuccuggacauuuggacuuacaaugccgaacuguugguucuauuggaaaaugaaagaacuuuggacuaccacgauucaaaugugaagaacuuauaugaaaagguaagaagccaguuaaaaaacaaugccaaggaaauuggaaacggcugcuuugaauuuuaccacaaaugcgauaacacgugcauggaaagugucaaaaaugggacuuaugacuacccaaaauacucagaggaagcaaaauuaaacagagaagaaauagaugggguaaagcuggaaucaacaaggauuuaccagauuuuggcgaucuauucaacugucgccaguucauugguacugguagucucccugggggcaaucaguuucuggaugugcucuaaugggucucuacaguguagaauauguauuuaa

SEQ ID NO: 39177 - RNA, 1701 nt, Artificial Sequence
  derived and/or modified CDS sequence (wt) from hemagglutinin__InfluenzaA__AEO01059
augaaggcaauacuaguaguucugcuauauacauuugcaaccgcaaaugcagacacauuauguauagguuaucaugcgaacaauucaacagacacuguagacacaguacuagaaaagaauguaacaguaacacacucuguuaaccuucuagaagacaagcauaacgggaaacuaugcaaacuaagagggguagccccauugcauuuggguaaauguaacauugcuggcuggauccugggaaauccagagugugaaucacucuccacagcaagcucaugguccuacauuguggaaacaucuaguucagacaauggaacguguuacccaggagauuucaucgauuaugaggagcuaagagagcaauugagcucagugucaucauuugaaagguuugagauauuccccaagacaaguucauggcccaaucaugacucgaacaaagguguaacggcagcauguccucaugcuggagcaaaaagcuucuacaaaaauuuaauauggcuaguuaaaaaaggaaauucauacccaaagcucagcaaauccuacauuaaugauaaagggaaagaaguccucgugcuauggggcauucaccauccaucuacuagugcugaccaacaaagucucuaucagaaugcagaugcauauguuuuuguggggacaucaagauacagcaagaaguucaagccggaaauagcaauaagacccaaagugagggaucaagaagggagaaugaacuauuacuggacacuaguagagccgggagacaaaauaacauucgaagcaacuggaaaucuagugguaccgagauaugcauucgcaauggaaagaaaugcuggaucugguauuaucauuucagauacaccaguccacgauugcaauacaacuugucagacacccaagggugcuauaaacaccagccucccauuucagaauauacauccgaucacaauuggaaaauguccaaaauauguaaaaagcacaaaauugagacuggccacaggauugaggaaugucccgucuauucaaucuagaggccuauuuggggccauugccgguuucauugaagggggguggacagggaugguagacggaugguacgguuaucaccaucaaaaugagcaggggucaggauaugcagccgaccugaaaagcacacagaaugccauugacgagauuacuaacaaaguaaauucuguuauugaaaagaugaauacacaguucacagcaguagguaaagaguucaaccaccuggaaaaaagaauagagaauuuaaauaaaaaaguugaugaugguuuccuggacauuuggacuuacaaugccgaacuauugguucuauuggaaaaugaaagaacuuuggacuaccacgauucaaaugugaagaacuuauaugaaaagguaagaagccaguuaaaaaacaaugccaaggaaauuggaaacggcugcuuugaauuuuaccacaaaugcgauaacacgugcauggaaagugucaaaaaugggacuuaugacuacccaaaauacucagaggaagcaaaauuaaacagagaagaaauagaugggguaaagcuggaaucaacaaggauuuaccagauuuuggcgaucuauucaacugucgccaguucauugguacugguagucucccugggggcaaucaguuucuggaugugcucuaaugggucucuacaguguagaauauguauuuaa

SEQ ID NO: 39178 - RNA, 1701 nt, Artificial Sequence
  derived and/or modified CDS sequence (wt) from hemagglutinin__InfluenzaA__AEO01060
augaaggcaauacuaguaguucugcuauauacauuugcaaccgcaaaugcagacacauuauguauagguuaucaugcgaacaauucaacagacacuguagacacaguacuagaaaagaauguaacaguaacacacucuguuaaccuucuagaagacaagcauaacgggaaacuauguaaacuaagagggguagccccauugcauuuggguaaauguaacauugcuggcuggauccugggaaauccagagugugaaucacucuccacagcaagcucaugguccuacauuguggaaacaucuaguucagacaauggaacguguuacccaggagauuucaucgauuaugaggagcuaagagagcaauugagcucagugucaucauuugaaagguuugagauauuccccaagacaaguucauggcccaaucaugacucgaacaaagguguaacggcagcauguccucaugcuggagcaaaaagcuucuacaaaaauuuaauauggcuaguuaaaaaaggaaauucauacccaaagcucagcaaauccuacauuaaugauaaagggaaagaaguccucgugcuauggggcauucaccauccaucuacuagugcugaccaacaaagucucuaucagaaugcagaugcauauguuuuuguggggacaucaagauacagcaagaaguucaagccggaaauagcaauaagacccaaagugagggaucaagaagggagaaugaacuauuacuggacacuaguagagccgggagacaaaauaacauucgaagcaacuggaaaucuagugguaccgagauaugcauucgcaauggaaagaaaugcuggaucugguauuaucauuucagauacaccaguccacgauugcaauacaacuugucagacacccaagggugcuauaaacaccagccucccauuucagaauauacauccgaucacaauuggaaaauguccaaaauauguaaaaagcacaaaauugagacuggccacaggauugaggaaugucccgucuauucaaucuagaggccuauuuggggccauugccgguuucauugaagggggguggacagggaugguagauggaugguacgguuaucaccaucaaaaugagcaggggucaggauaugcagccgaccugaaaagcacacagaaugccauugacgagauuacuaacaaaguaaauucuguuauugaaaagaugaauacacaguucacagcaguagguaaagaguucaaccaccuggaaaaaagaauagagaauuuaaauaaaaaaguugaugaugguuuccuggacauuuggacuuacaaugccgaacuguugguucuauuggaaaaugaaagaacuuuggacuaccacgauucaaaugugaagaacuuauaugaaaagguaagaagccaguuaaaaaacaaugccaaggaaauuggaaacggcugcuuugaauuuuaccacaaaugcgauaacacgugcauggaaagugucaaaaaugggacuuaugacuacccaaaauacucagaggaagcaaaauuaaacagagaagaaauagaugggguaaagcuggaaucaacaaggauuuaccagauuuuggcgaucuauucaacugucgccaguucauugguacugguagucucccugggggcaaucaguuucuggaugugcucuaaugggucucuacaguguagaauauguauuuaa

SEQ ID NO: 39179 - RNA, 1701 nt, Artificial Sequence
  derived and/or modified CDS sequence (wt) from hemagglutinin__InfluenzaA__AEO01061
augaaggcaauacuaguaguucugcuauauacauuugcaaccgcaaaugcagacacauuauguauagguuaucaugcgaacaauucaacagacacuguagacacaguacuagaaaagaauguaacaguaacacacucuguuaaccuucuagaagacaagcauaacgggaaacuaugcaaacuaagagggguagccccauugcauuuggguaaauguaacauugcuggcuggauccugggaaauccagagugugaaucacucuccacagcaagcucaugguccuacauuguggaaacaucuaguucagacaauggaacguguuacccaggagauuucaucgauuaugaggagcuaagagagcaauugagcucagugucaucauuugaaagguuugagauauuccccaagacaaguucauggcccaaucaugacucgaacaaagguguaacggcagcauguccucaugcuggagcaaaaagcuucuacaaaaauuuaauauggcuaguuaaaaaaggaaauucauacccaaagcucagcaaauccuacauuaaugauaaagggaaagaaguccucgugcuauggggcauucaccauccaucuacuagugcugaccaacaaagucucuaucagaaugcagaugcauauguuuuuguggggacaucaagauacagcaagaaguucaagccggaaauagcaauaagacccaaagugagggaucaagaagggagaaugaacuauuacuggacacuaguagagccgggagacaaaauaacauucgaagcaacuggaaaucuagugguaccgagauaugcauucgcaauggaaagaaaugcuggaucugguauuaucauuucagauacaccaguccacgauugcaauacaacuugucagacacccaagggugcuauaaacaccagccucccauuucagaauauacauccgaucacaauuggaaaauguccaaaauauguaaaaagcacaaaauugagacuggccacaggauugaggaaugucccgucuauucaaucuagaggccuauuuggggccauugccgguuucauugaagggggguggacagggaugguagauggaugguacgguuaucaccaucaaaaugagcaggggucaggauaugcagccgaccugaagagcacacagaaugccauugacgagauuacuaacaaaguaaauucuguuauugaaaagaugaauacacaguucacagcaguagguaaagaguucaaccaccuggaaaaaagaauagagaauuuaaauaaaaaaguugaugaugguuuccuggacauuuggacuuacaaugccgagcuguugguucuauuggaaaaugaaagaacuuuggauuaccacgauucaaaugugaagaacuuauaugaaaagguaagaagccaguuaaaaaacaaugccaaggaaauuggaaacggcugcuuugaauuuuaccacaaaugcgauaacacgugcauggaaagugucaaaaaugggacuuaugacuacccaaaauacucagaggaagcaaaauuaaacagagaagaaauagaugggguaaagcuggaaucaacaaggauuuaccagauuuuggcgaucuauucaacugucgccaguucauugguacugguagucucccugggggcaaucaguuucuggaugugcucuaaugggucucuacaguguagaauauguauuuaa

SEQ ID NO: 39180 - RNA, 1701 nt, Artificial Sequence
  derived and/or modified CDS sequence (wt) from hemagglutinin__InfluenzaA__AEO01062
augaaggcaauacuaguaguucugcuauauacauuugcaaccgcaaaugcagacacauuauguauagguuaucaugcgaacaauucaacagacacuguagacacaguacuagaaaagaauguaacaguaacacacucuguuaaccuucuagaagacaagcauaacgggaaacuaugcaaacuaagagggguagccccauugcauuuggguaaauguaacauugcuggcuggauccugggaaauccagagugugaaucacucuccacagcaagcucaugguccuacauuguggaaacaucuaguucagacaauggaacguguuacccaggagauuucaucgauuaugaggagcuaagagagcaauugagcucagugucaucauuugaaagguuugagauauuccccaagacaaguucauggcccaaucaugacucgaacaaagguguaacggcagcauguccucaugcuggagcaaaaagcuucuacaaaaauuuaauauggcuaguuaaaaaaggaaauucauacccaaagcucagcaaauccuacauuaaugauaaagggaaagaaguccucgugcuauggggcauucaccauccaucuacuagugcugaccaacaaagucucuaucagaaugcagaugcauauguuuuuguggggacaucaagauacagcaagaaguucaagccggaaauagcaauaagacccaaagugagggaucaagaagggagaaugaacuauuacuggacacuaguagagccgggagacaaaauaacauucgaagcaacuggaaaucuagugguaccgagauaugcauucgcaauggaaagaaaugcuggaucugguauuaucauuucagauacaccaguccacgauugcaauacaacuugucagacacccaagggugcuauaaacaccagccucccauuucagaauauacauccgaucacaauuggaaaauguccaaaauauguaaaaagcacaaaauugagacuggccacaggauugaggaaugucccgucuauucaaucuagaggccuauuuggggccauugccgguuucauugaagggggguggacagggaugguagauggaugguacgguuaucaccaucaaaaugagcaggggucaggauaugcagccgaccugaaaagcacacagaaugccauugacgagauuacuaacaaaguaaauucuguuauugaaaagaugaauacacaguucacagcaguagguaaagaguucaaccaccuggaaaaaagaauagagaauuuaaauaaaaaaguugaugaugguuuccuggacauuuggacuuacaaugccgaacuguugguucuauuggaaaaugaaagaacuuuggacuaccacgauucaaaugugaagaacuuauaugaaaagguaagaagccaguuaaaaaacaaugccaaggaaauuggaaacggcugcuuugaauuuuaccacaaaugcgauaacacgugcauggaaagugucaaaaaugggacuuaugacuacccaaaauacucagaggaagcaaaauuaaacagagaagaaauagaugggguaaagcuggaaucaacaaggauuuaccagauuuuggcgaucuauucaacugucgccaguucauugguacugguagucucccugggggcaaucaguuucuggaugugcucuaaugggucucuacaguguagaauauguauuuaa

SEQ ID NO: 39181 - RNA, 1701 nt, Artificial Sequence
  derived and/or modified CDS sequence (wt) from hemagglutinin__InfluenzaA__AEO01063
augaaggcaauacuaguaguucugcuauauacauuugcaaccgcaaaugcagacacauuauguauagguuaucaugcgaacaauucaacagacacuguagacacaguacuagaaaagaauguaacaguaacacacucuguuaaccuucuagaagacaagcauaacgggaaacuaugcaaacuaagagggguagccccauugcauuuggguaaauguaacauugcuggcuggauccugggaaauccagagugugaaucacucuccacagcaagcucaugguccuacauuguggaaacaucuaguucagacaauggaacguguuacccaggagauuucaucgauuaugaggagcuaagagagcaauugagcucagugucaucauuugaaagguuugagauauuccccaagacaaguucauggcccaaucaugacucgaacaaagguguaacggcagcauguccucaugcuggagcaaaaagcuucuacaaaaauuuaauauggcuaguuaaaaaaggaaauucauacccaaagcucagcaaauccuacauuaaugauaaagggaaagaaguccucguguuauggggcauucaccauccaucuacuagugcugaccaacaaagucucuaucagaaugcagaugcauauguuuuuguggggacaucaagauacagcaagaaguucaagccggaaauagcaauaagacccaaagugagggaucaagaagggagaaugaacuauuacuggacacuaguagagccgggagacaaaauaacauucgaagcaacuggaaaucuagugguaccgagauaugcauucgcaauggaaagaaaugcuggaucugguauuaucauuucagauacaccaguccacgauugcaauacaacuugucagacacccaagggugcuauaaacaccagccucccauuucagaauauacauccgaucacaauuggaaaauguccaaaauauguaaaaagcacaaaauugagacuggccacaggauugaggaaugucccgucuauucaaucuagaggccuauuuggggccauugccgguuucauugaagggggguggacagggaugguagauggaugguacgguuaucaccaucaaaaugagcaggggucaggauaugcagccgaccugaagagcacacagaaugccauugacgagauuacuaacaaaguaaauucuguuauugaaaagaugaauacacaguucacagcaguagguaaagaguucaaccaccuggaaaaaagaauagagaauuuaaauaaaaaaguugaugaugguuuccuggacauuuggacuuacaaugccgaacuguugguucuauuggaaaaugaaagaacuuuggacuaccacgauucaaaugugaagaacuuguaugaaaagguaagaagccaguuaaaaaacaaugccaaggaaauuggaaacggcugcuuugaauuuuaccacaaaugcgauaacacgugcauggaaagugucaaaaaugggacuuaugacuacccaaaauacucagaggaagcaaaauuaaacagagaagaaauagaugggguaaagcuggaaucaacaaggauuuaccagauuuuggcgaucuauucaacugucgccaguucauugguacugguagucucccugggggcaaucaguuucuggaugugcucuaaugggucucuacaguguagaauauguauuuaa

SEQ ID NO: 39182 - RNA, 1701 nt, Artificial Sequence
  derived and/or modified CDS sequence (wt) from hemagglutinin__InfluenzaA__AEO01064
augaaggcaauacuaguaguucugcuauauacauuugcaaccgcaaaugcagacacauuauguauagguuaucaugcgaacaauucaacagacacuguagacacaguacuagaaaagaauguaacaguaacacacucuguuaaccuucuagaagacaagcauaacgggaaacuaugcaaacuaagagggguagccccauugcauuuggguaaauguaacauugcuggcuggauccugggaaauccagagugugaaucacucuccacagcaagcucaugguccuacauuguggaaacaucuaguucagacaauggaacguguuacccaggagauuucaucgauuaugaggagcuaagagagcaauugagcucagugucaucauuugaaagguuugagauauuccccaagacaaguucauggcccaaucaugacucgaacaaagguguaacggcagcauguccucaugcuggagcaaaaagcuucuacaaaaauuuaauauggcuaguuaaaaaaggaaauucauacccaaagcucagcaaauccuacauuaaugauaaagggaaagaaguccucgugcuauggggcauucaccauccaucuacuagugcugaccaacaaagucucuaucagaaugcagaugcauauguuuuuguggggacaucaagauacagcaagaaguucaagccggaaauagcaauaagacccaaagugagggaucaagaagggagaaugaacuauuacuggacacuaguagagccgggagacaaaauaacauucgaagcaacuggaaaucuagugguaccgagauaugcauucgcaauggaaagaaaugcuggaucugguauuaucauuucagauacaccaguccacgauugcaauacaacuugucagacacccaagggugcuauaaacaccagccucccauuucagaauauacauccgaucacaauuggaaaauguccaaaauauguaaaaagcacaaaauugagacuggccacaggauugaggaaugucccgucuauucaaucuagaggccuauuuggggccauugccgguuucauugaagggggguggacagggaugguagauggaugguacgguuaucaccaucaaaaugagcaggggucaggauaugcagccgaccugaaaagcacacagaaugccauugacgagauuacuaacaaaguaaauucuguuauugaaaagaugaauacacaguucacagcaguagguaaagaguucaaccaccuggaaaaaagaauagagaauuuaaauaaaaaaguugaugaugguuuccuggacauuuggacuuacaaugccgaacuauugguucuauuggaaaaugaaagaacuuuggacuaccacgauucaaaugugaagaacuuauaugaaaagguaagaagccaguuaaaaaacaaugccaaggaaauuggaaacggcugcuuugaauuuuaccacaaaugcgauaacacgugcauggaaagugucaaaaaugggacuuaugacuacccaaaauacucagaggaagcaaaauuaaacagagaagaaauagaugggguaaagcuggaaucaacaaggauuuaccagauuuuggcgaucuauucaacugucgccaguucauugguacugguagucucccugggggcaaucaguuucuggaugugcucuaaugggucucuacaguguagaauauguauuuaa

SEQ ID NO: 39183 - RNA, 1701 nt, Artificial Sequence; identical to SEQ ID NO: 34965
  derived and/or modified CDS sequence (wt) from hemagglutinin__InfluenzaA__AEO01065

SEQ ID NO: 39184 - RNA, 1701 nt, Artificial Sequence
  derived and/or modified CDS sequence (wt) from hemagglutinin__InfluenzaA__AEO01066
augaaggcaauacuaguaguucugcuauauacauuugcaaccgcaaaugcagacacauuauguauagguuaucaugcgaacaauucaacagacacuguagacacaguacuagaaaagaauguaacaguaacacacucuguuaaccuucuagaagacaagcauaacgggaaacuaugcaaacuaagagggguagccccauugcauuuggguaaauguaacauugcuggcuggauccugggaaauccagagugugaaucacucuccacagcaagcucaugguccuacauuguggaaacaucuaguucagacaauggaacguguuacccaggagauuucaucgauuaugaggagcuaagagagcaauugagcucagugucaucauuugaaagguuugagauauuccccaagacaaguucauggcccaaucaugacucgaacaaagguguaacggcagcauguccucaugcuggagcaaaaagcuucuacaaaaauuuaauauggcuaguuaaaaaaggaaauucauacccaaagcucagcaaauccuacauuaaugauaaagggaaagaaguccucgugcuauggggcauucaucauccaucuacuagugcugaccaacaaagucucuaucagaaugcagaugcauauguuuuuguggggacaucaagauacagcaagaaguucaagccggaaauagcaauaagacccaaagugagggaacaagaagggagaaugaacuauuacuggacacuaguagagccgggagacaaaauaacauucgaagcaacuggaaaucuagugguaccgagauaugcauucgcaauggaaagaaaugcuggaucugguauuaucauuucagauacaccaguccacgauugcaauacaacuugucagacacccaagggugcuauaaacaccagccucccauuucagaauauacauccgaucacaauuggaaaauguccaaaauauguaaaaagcacaaaauugagacuggccacaggauugaggaaugucccgucuauucaaucuagaggccuauuuggggccauugccgguuucauugaagggggguggacagggaugguagauggaugguacgguuaucaccaucaaaaugagcaggggucaggauaugcagccgaccugaagagcacacagaaugccauugacgagauuacuaacaaaguaaauucuguuauugaaaagaugaauacacaguucacagcaguagguaaagaguucaaccaccuggaaaaaagaauagagaauuuaaauaaaaaaguugaugaugguuuccuggacauuuggacuuacaaugccgaacuguugguucuauuggaaaaugaaagaacuuuggacuaccacgauucaaaugugaagaacuuauaugaaaagguaagaagccaguuaaaaaacaaugccaaggaaauuggaaacggcugcuuugaauuuuaccacaaaugcgauaacacgugcauggaaagugucaaaaaugggacuuaugacuacccaaaauacucagaggaagcaaaauuaaacagagaagaaauagaugggguaaagcuggaaucaacaaggauuuaccagauuuuggcgaucuauucaacugucgccaguucauugguacugguagucucccugggggcaaucaguuucuggaugugcucuaaugggucucuacaguguagaauauguauuuaa

SEQ ID NO: 39185 - RNA, 1701 nt, Artificial Sequence
  derived and/or modified CDS sequence (wt) from hemagglutinin__InfluenzaA__AEO01067
augaaggcaauacuaguaguucugcuauauacauuugcaaccgcaaaugcagacacauuauguauagguuaucaugcgaacaauucaacagacacuguagacacaguacuagaaaagaauguaacaguaacacacucuguuaaccuucuagaagacaagcauaacgggaaacuaugcaaacuaagagggguagccccauugcauuuggguaaauguaacauugcuggcuggauccugggaaauccagagugugaaucacucuccacagcaagcucaugguccuacauuguggaaacaucuaguucagacaauggaacguguuacccaggagauuucaucgauuaugaggagcuaagagagcaauugagcucagugucaucauuugaaagguuugagauauuccccaagacaaguucauggcccaaucaugacucgaacaaagguguaacggcagcauguccucaugcuggagcaaaaagcuucuacaaaaauuuaauauggcuaguuaaaaaaggaaauucauacccaaagcucagcaaauccuacauuaaugauaaagggaaagaaguccucgugcuauggggcauucaccauccaucuacuagugcugaccaacaaagucucuaucagaaugcagaugcauauguuuuuguggggacaucaagauacagcaagaaguucaagccggaaauggcaauaagacccaaagugagggaucaagaagggagaaugaacuauuacuggacacuaguagagccgggagacaaaauaacauucgaagcaacuggaaaucuagugguaccgagauaugcauucgcaauggaaagaaaugcuggaucugguauuaucauuucagauacaccaguccacgauugcaauacaacuugucagacacccaagggugcuauaaacaccagccucccauuucagaauauacauccgaucacaauuggaaaauguccaaaauauguaaaaagcacaaaauugagacuggccacaggauugaggaaugucccgucuauucaaucuagaggccuauuuggggccauugccgguuucauugaagggggguggacagggaugguagauggaugguacgguuaucaccaucaaaaugagcaggggucaggauaugcagccgaccugaagagcacacagaaugccauugacgagauuacuaacaaaguaaauucuguuauugaaaagaugaauacacaguucacagcaguagguaaagaguucaaccaccuggaaaaaagaauagagaauuuaaauaaaaagguugaugaugguuuccuggacauuuggacuuacaaugccgaacuguugguucuauuggaaaaugaaagaacuuuggacuaccacgauucaaaugugaagaacuuauaugaaaagguaagaagccaguuaaaaaacaaugccaaggaaauuggaaacggcugcuuugaauuuuaccacaaaugcgauaacacgugcauggaaagugucaaaaaugggacuuaugacuacccaaaauacucagaggaagcaaaauuaaacagagaagaaauagaugggguaaagcuggaaucaacaaggauuuaccagauuuuggcgaucuauucaacugucgccaguucauugguacugguagucucccugggggcaaucaguuucuggaugugcucuaaugggucucuacaguguagaauauguauuuaa

SEQ ID NO: 39186 - RNA, 1701 nt, Artificial Sequence; identical to SEQ ID NO: 35772
  derived and/or modified CDS sequence (wt) from hemagglutinin__InfluenzaA__AEO01068

SEQ ID NO: 39187 - RNA, 1701 nt, Artificial Sequence; identical to SEQ ID NO: 35309
  derived and/or modified CDS sequence (wt) from hemagglutinin__InfluenzaA__AEO01069

SEQ ID NO: 39188 - RNA, 1701 nt, Artificial Sequence; identical to SEQ ID NO: 35772
  derived and/or modified CDS sequence (wt) from hemagglutinin__InfluenzaA__AEO01070

SEQ ID NO: 39189 - RNA, 1701 nt, Artificial Sequence; identical to SEQ ID NO: 36682
  derived and/or modified CDS sequence (wt) from hemagglutinin__InfluenzaA__AEO01071

SEQ ID NO: 39190 - RNA, 1701 nt, Artificial Sequence
  derived and/or modified CDS sequence (wt) from hemagglutinin__InfluenzaA__AEO01073
augaaggcaauacuaguaguucugcuauauacauuugcaaccgcaaaugcagacacauuauguauagguuaucaugcgaacaauucaacagacacuguagacacaguacuagaaaagaauguaacaguaacacacucuguuaaccuucuagaagacaagcauaacgggaaacuaugcaaacuaagagggguagccccauugcauuuggguaaauguaacauugcuggcuggauccuaggaaauccagagugugaaucacucuccacagcaagcucaugguccuacauuguggaaacaucuaguucagacaauggaacguguuacccaggagauuucaucgauuaugaggagcuaagagagcaauugagcucagugucaucauuugaaagguuugagauauuccccaagacaaguucauggcccaaucaugacucgaacaaagguguaacggcagcauguccucaugcuggagcaaaaagcuucuacaaaaauuuaauauggcuaguuaaaaaaggaaauucauacccaaagcucagcaaauccuacauuaaugauaaagggaaagaaguccucgugcuauggggcauucaccauccaucuacuagugcugaccaacaaagucucuaucagaaugcagaugcauauguuuuuguggggacaucaagauacagcaagaaguucaagccggaaauagcaauaagacccaaagugagggaucaagaagggagaaugaacuauuacuggacacuaguagagccgggagacaaaauaacauucgaagcaacuggaaaucuagugguaccgagauaugcauucgcaauggaaagaaaugcuggaucugguauuaucauuucagauacaccaguccacgauugcaauacaacuugucagacacccaagggugcuguaaacaccagccucccauuucagaauauacauccgaucacaauuggaaaauguccaaaauauguaaaaagcacaaaauugagacuggccacaggauugaggaaugucccgucuauucaaucuagaggccuauuuggggccauugccgguuucauugaagggggguggacagggaugguagauggaugguacgguuaucaccaucaaaaugagcaggggucaggauaugcagccgaccugaagagcacacagaaugccauugacgagauuacuaacaaaguaaauucuguuauugaaaagaugaauacacaguucacagcaguagguaaagaguucaaccaccuggaaaaaagaauagagaauuuaaauaaaaaaguugaugaugguuuccuggacauuuggacuuacaaugccgaacuguugguucuauuggaaaaugaaagaacuuuggacuaccacgauucaaaugugaagaacuuauaugaaaagguaagaagccaguuaaaaaacaaugccaaggaaauuggaaacggcugcuuugaauuuuaccacaaaugcgauaacacgugcauggaaagugucaaaaaugggacuuaugacuacccaaaauacucagaggaagcaaaauuaaacagagaagaaauagaugggguaaagcuggaaucaacaaggauuuaccagauuuuggcgaucuauucaacugucgccaguucauugguacugguagucucccugggggcaaucaguuucuggaugugcucuaaugggucucuacaguguagaauauguauuuaa

SEQ ID NO: 39191 - RNA, 1701 nt, Artificial Sequence; identical to SEQ ID NO: 34965
  derived and/or modified CDS sequence (wt) from hemagglutinin__InfluenzaA__AEO01074

SEQ ID NO: 39192 - RNA, 1701 nt, Artificial Sequence; identical to SEQ ID NO: 35772
  derived and/or modified CDS sequence (wt) from hemagglutinin__InfluenzaA__AEO01075

SEQ ID NO: 39193 - RNA, 1701 nt, Artificial Sequence; identical to SEQ ID NO: 35772
  derived and/or modified CDS sequence (wt) from hemagglutinin__InfluenzaA__AEO01076

SEQ ID NO: 39194 - RNA, 1701 nt, Artificial Sequence
  derived and/or modified CDS sequence (wt) from hemagglutinin__InfluenzaA__AEO01077
augaaggcaauacuaguaguucugcuauauacauuugcaaccgcaaaugcagacacauuauguauagguuaucaugcgaacaauucaacagacacuguagacacaguacuagaaaagaauguaacaguaacacacucuguuaaccuucuagaagacaagcauaacgggaaacuaugcaaacuaagagggguagccccauugcauuuggguaaauguaacauugcuggcuggauccugggaaauccagagugugaaucacucuccacagcaagcucaugguccuacauuguggaaacaucuaguucagacaauggaacguguuacccaggagauuucaucgauuaugaggagcuaagagagcaauugagcucagugucaucauuugaaagguuugagauauuccccaagacaaguucauggcccaaucaugacucgaacaaagguguaacggcagcauguccucaugcuggagcaaaaagcuucuacaaaaauuuaauauggcuaguuaaaaaaggaaauucauacccaaagcucagcaaauccuacauuaaugauaaagggaaagaaguccuagugcuauggggcauucaccauccaucuacuagugcugaccaacaaagucucuaucagaaugcagaugcauauguuuuuguggggacaucaagauacagcaagaaguucaagccggaaauagcaauaagacccaaagugagggaacaagaagggagaaugaacuauuacuggacacuaguagagccgggagacaaaauaacauucgaagcaacuggaaaucuagugguaccgagauaugcauucgcaauggaaagaaaugcuggaucugguauuaucauuucagauacaccaguccacgauugcaauacaacuugucagacacccaagggugcuauaaacaccagccucccauuucagaauauacauccgaucacaauuggaaaauguccaaaauauguaaaaagcacaaaauugagacuggccacaggauugaggaaugucccgucuauucaaucuagaggccuauuuggggccauugccgguuucauugaagggggguggacagggaugguagauggaugguacgguuaucaccaucaaaaugagcaggggucaggauaugcagccgaccugaagagcacacagaaugccauugacgagauuacuaacaaaguaaauucuguuauugaaaagaugaauacacaguucacagcaguagguaaagaguucaaccaccuggaaaaaagaauagagaauuuaaauaaaaaaguugaugaugguuuccuggacauuuggacuuacaaugccgaacuguugguucuauuggaaaaugaaagaacuuuggacuaccacgauucaaaugugaagaacuuauaugaaaagguaagaagccaguuaaaaaacaaugccaaggaaauuggaaacggcugcuuugaauuuuaccacaaaugcgauaacacgugcauggaaaaugucaaaaaugggacuuaugacuacccaaaauacucagaggaagcaaaauuaaacagagaagaaauagaugggguaaagcuggaaucaacaaggauuuaccagauuuuggcgaucuauucaacugucgccaguucauugguacugguagucucccugggggcaaucaguuucuggaugugcucuaaugggucucuacaguguagaauauguauuuaa

SEQ ID NO: 39195 - RNA, 1701 nt, Artificial Sequence; identical to SEQ ID NO: 34681
  derived and/or modified CDS sequence (wt) from hemagglutinin__InfluenzaA__AEO01078

SEQ ID NO: 39196 - RNA, 1701 nt, Artificial Sequence
  derived and/or modified CDS sequence (wt) from hemagglutinin__InfluenzaA__AEO01079
augaaggcaauacuaguaguucugcuauauacauuugcaaccgcaaaugcagacacauuauguauagguuaucaugcaaacaauucaacagacacuguagacacaguacuagaaaagaauguaacaguaacacacucuguuaaccuucuagaagacaagcauaacgggaaacuaugcaaacuaagagggguagccccauugcauuuggguaaauguaacauugcuggcuggauccugggaaauccagagugugaaucacucuccacagcaagcucaugguccuacauuguggaaacaucuaguucagacaauggaacguguuacccaggagauuucaucgauuaugaggagcuaagagagcaauugagcucagugucaucauuugaaagguuugagauauuccccaagacaaguucauggcccaaucaugacucgaacaaagguguaacggcagcauguccucaugcuggagcaaaaagcuucuacaaaaauuuaauauggcuaguuaaaaaaggaaauucauacccaaagcucagcaaauccuacauuaaugauaaagggaaagaaguccucgugcuauggggcauucaccauccaucuacuagugcugaccaacaaagucucuaucagaaugcagaugcauauguuuuuguggggacaucaagauacagcaagaaguucaagccggaaauagcaauaagacccaaagugagggaucaagaagggagaaugaacuauuacuggacacuaguagagccgggagacaaaauaacauucgaagcaacuggaaaucuagugguaccgagauaugcauucgcaauggaaagaaaugcuggaucugguauuaucauuucagauacaccaguccacgauugcaauacaacuugucagacacccaagggugcuauaaacaccagccucccauuucagaauauacauccgaucacaauuggaaaauguccaaaauauguaaaaagcacaaaauugagacuggccacaggauugaggaaugucccgucuauucaaucuagaggccuauuuggggccauugccgguuucauugaagggggguggacagggaugguagauggaugguacgguuaucaccaucaaaaugagcaggggucaggauaugcagccgaccugaagagcacacagaaugccauugacgagauuacuaacaaaguaaauucuguuauugaaaagaugaauacacaguucacagcaguagguaaagaguucaaccaccuggaaaaaagaauagagaauuuaaauaaaaagguugaugaugguuuccuggacauuuggacuuacaaugccgaacuguugguucuauuggaaaaugaaagaacuuuggacuaccacgauucaaaugugaagaacuuauaugaaaagguaagaagccaguuaaaaaacaaugccaaggaaauuggaaacggcugcuuugaauuuuaccacaaaugcgauaacacgugcauggaaagugucaaaaaugggacuuaugacuacccaaaauacucagaggaagcaaaauuaaacagagaagaaauagaugggguaaagcuggaaucaacaaggauuuaccagauuuuggcgaucuauucaacugucgccaguucauugguacugguagucucccugggggcaaucaguuucuggaugugcucuaaugggucucuacaguguagaauauguauuuaa

SEQ ID NO: 39197 - RNA, 1701 nt, Artificial Sequence; identical to SEQ ID NO: 34714
  derived and/or modified CDS sequence (wt) from hemagglutinin__InfluenzaA__AEO01080

SEQ ID NO: 39198 - RNA, 1701 nt, Artificial Sequence; identical to SEQ ID NO: 35772
  derived and/or modified CDS sequence (wt) from hemagglutinin__InfluenzaA__AEO01081

SEQ ID NO: 39199 - RNA, 1701 nt, Artificial Sequence; identical to SEQ ID NO: 39196
  derived and/or modified CDS sequence (wt) from hemagglutinin__InfluenzaA__AEO01082

SEQ ID NO: 39200 - RNA, 1701 nt, Artificial Sequence; identical to SEQ ID NO: 34714
  derived and/or modified CDS sequence (wt) from hemagglutinin__InfluenzaA__AEO01083

SEQ ID NO: 39201 - RNA, 1701 nt, Artificial Sequence
  derived and/or modified CDS sequence (wt) from hemagglutinin__InfluenzaA__AEO01084
augaaggcaauacuaguaguucugcuauauacauuugcaaccgcaaaugcagacacauuauguauagguuaucaugcgaacaauucaacagacacuguagacacaguacuagaaaagaauguaacaguaacacacucuguuaaccuuuuagaagacaagcauaacgggaaacuaugcaaacuaagagggguagccccauugcauuuggguaaauguaacauugcuggcuggauccugggaaauccagagugugaaucacucuccacagcaagcucaugguccuacauuguggaaacaucuaguucagacaauggaacguguuacccaggagauuucaucgauuaugaggagcuaagagagcaauugagcucagugucaucauuugaaagguuugagauauuccccaagacaaguucauggcccaaucaugacucgaacaaagguguaacggcagcauguccucaugcuggagcaaaaagcuucuacaaaaauuuaauauggcuaguuaaaaaaggaaauucauacccaaagcucagcaaauccuacauuaaugauaaagggaaagaaguccucguguuauggggcauucaccauccaucuacuagugcugaccaacaaagucucuaucagaaugcagaugcauauguuuuuguggggacaucaagauacagcaagaaguucaagccggaaauagcaauaagacccaaagugagggaucaagaagggagaaugaacuauuacuggacacuaguagagccgggagacaaaauaacauucgaagcaacuggaaaucuagugguaccgagauaugcauucgcaauggaaagaaaugcuggaucugguauuaucauuucagauacaccaguccacgauugcaauacaacuugucagacacccaagggugcuauaaacaccagccucccauuucagaauauacauccgaucacaauuggaaaauguccaaaauauguaaaaagcacaaaauugagacuggccacaggauugaggaaugucccgucuauucaaucuagaggccuauuuggggccauugccgguuucauugaagggggguggacagggaugguagauggaugguacgguuaucaccaucaaaaugagcaggggucaggauaugcagccgaccugaagagcacacagaaugccauugacgagauuacuaacaaaguaaauucuguuauugaaaagaugaauacacaguucacagcaguagguaaagaguucaaccaccuggaaaaaagaauagagaauuuaaauaaaaaaguugaugaugguuuccuggacauuuggacuuacaaugccgaacuguugguucuauuggaaaaugaaagaacuuuggacuaccacgauucaaaugugaagaacuuguaugaaaagguaagaagccaguuaaaaaacaaugccaaggaaauuggaaacggcugcuuugaauuuuaccacaaaugcgauaacacgugcauggaaagugucaaaaaugggacuuaugacuacccaaaauacucagaggaagcaaaauuaaacagagaagaaauagaugggguaaagcuggaaucaacaaggauuuaccagauuuuggcgaucuauucaacugucgccaguucauugguacugguagucucccugggggcaaucaguuucuggaugugcucuaaugggucucuacaguguagaauauguauuuaa

SEQ ID NO: 39202 - RNA, 1701 nt, Artificial Sequence; identical to SEQ ID NO: 35772
  derived and/or modified CDS sequence (wt) from hemagglutinin__InfluenzaA__AEO01085

SEQ ID NO: 39203 - RNA, 1701 nt, Artificial Sequence
  derived and/or modified CDS sequence (wt) from hemagglutinin__InfluenzaA__AEO01086
augaaggcaauacuaguaguucugcuauauacauuugcaaccgcaaaugcugacacauuauguauagguuaucaugcgaacaauucaacagacacuguagacacaguacuagaaaagaauguaacaguaacacacucuguuaaccuucuagaagacaagcauaacgggaaacuaugcaaacuaagagggguagccccauugcauuuggguaaauguaacauugcuggcuggauccugggaaauccagagugugaaucacucuccacagcaagcucaugguccuacauuguggaaacaucuaguucagacaauggaacguguuacccaggagauuucaucgauuaugaggagcuaagagagcaauugagcucagugucaucauuugaaagguuugagauauuccccaagacaaguucauggcccaaucaugacucgaacaaagguguaacggcagcauguccucaugcuggagcaaaaagcuucuacaaaaauuuaauauggcuaguuaaaaaaggaaauucauacccaaagcucagcaaauccuacauuaaugauaaagggaaagaaguccucgugcuauggggcauucaccauccaucuacuagugcugaccaacaaagucucuaucagaaugcagaugcauauguuuuuguggggacaucaagauacagcaagaaguucaagccggaaauagcaauaagacccaaagugagggaucaagaagggagaaugaacuauuacuggacacuaguagagccgggagacaaaauaacauucgaagcaacuggaaaucuagugguaccgagauaugcauucgcaauggaaagaaaugcuggaucugguauuaucauuucagauacaccaguccacgauugcaauacaacuugucagacacccaagggugcuauaaacaccagccucccauuucagaauauacauccgaucacaauuggaaaauguccaaaauauguaaaaagcacaaaauugagacuggccacaggauugaggaaugucccgucuauucaaucuagaggccuauuuggggccauugccgguuucauugaagggggguggacagggaugguagauggaugguacgguuaucaccaucaaaaugagcaggggucaggauaugcagccgaccugaagagcacacagaaugccauugacgagauuacuaacaaaguaaauucuguuauugaaaagaugaauacacaguucacagcaguagguaaagaguucaaccaccuggaaaaaagaauagagaauuuaaauaaaaaaguugaugaugguuuccuggacauuuggacuuacaaugccgaacuguugguucuauuggaaaaugaaagaacuuuggacuaccacgauucaaaugugaagaacuuauaugaaaagguaagaagccaguuaaaaaacaaugccaaggaaauuggaaacggcugcuuugaauuuuaccacaaaugcgauaacacgugcauggaaagugucaaaaaugggacuuaugacuacccaaaauacucagaggaagcaaaauuaaacagagaagaaauagaugggguaaagcuggaaucaacaaggauuuaccagauuuuggcgaucuauucaacugucgccaguucauugguacugguagucucccugggggcaaucaguuucuggaugugcucuaaugggucucuacaguguagaauauguauuuaa

SEQ ID NO: 39204 - RNA, 1701 nt, Artificial Sequence
  derived and/or modified CDS sequence (wt) from hemagglutinin__InfluenzaA__AEO01087
augaaggcaauacuaguaguucugcuauauacauuugcaaccgcaaaugcagacacauuauguauagguuaucaugcgaacaauucaacagacacuguagacacaguacuagaaaagaauguaacaguaacacacucuguuaaccuucuagaagacaagcauaacgggaaacuaugcaaacuaagagggguagccccauugcauuuggguaaauguaacauugcuggcuggauccugggaaauccagagugugaaucacucuccacagcaagcucaugguccuacauuguggaaacaucuaguucagacaauggaacguguuacccaggagauuucaucgauuaugaggagcuaagagagcaauugagcucagugucaucauuugaaagguuugagauauuccccaagacaaguucauggcccaaucaugacucgaacaaagguguaacggcagcauguccucaugcuggagcaaaaagcuucuacaaaaauuuaauauggcuaguuaaaaaaggaaauucauacccaaagcucagcaaauccuacauuaaugauaaagggaaagaaguccucgugcuauggggcauucaccauccaucuacuagugcugaccaacaaagucucuaucagaaugcagaugcauauguuuuuguggggacaucaagauacagcaagaaguucaagccggaaauagcaauaagacccaaagugagggaacaagaagggagaaugaacuauuacuggacacuaguagagccgggagacaaaauaacauucgaagcaacuggaaaucuagugguaccgagauaugcauucgcaauggaaagaaaugcuggaucugguauuaucauuucagauacaccaguccacgauugcaauacaacuugccagacacccaagggugcuauaaacaccagccucccauuucagaauauacauccgaucacaauuggaaaauguccaaaauauguaaaaagcacaaaauugagacuggccacaggauugaggaaugucccgucuauucaaucuagaggccuauuuggggccauugccgguuucauugaagggggguggacagggaugguagauggaugguacgguuaucaccaucaaaaugagcaggggucaggauaugcagccgaccugaagagcacacagaaugccauugacgagauuacuaacaaaguaaauucuguuauugaaaagaugaauacacaguucacagcaguagguaaagaguucaaccaccuggaaaaaagaauagagaauuuaaauaaaaaaguugaugaugguuuccuggacauuuggacuuacaaugccgaacuguugguucuauuggaaaaugaaagaacuuuggacuaccacgauucaaaugugaagaacuuauaugaaaagguaagaagccaguuaaaaaacaaugccaaggaaauuggaaacggcugcuuugaauuuuaccacaaaugcgauaacacgugcauggaaagugucaaaaaugggacuuaugacuacccaaaauacucagaggaagcaaaauuaaacagagaagaaauagaugggguaaagcuggaaucaacaaggauuuaccagauuuuggcgaucuauucaacugucgccaguucauugguacugguagucucccugggggcaaucaguuucuggaugugcucuaaugggucucuacaguguagaauauguauuuaa

SEQ ID NO: 39205 - RNA, 1701 nt, Artificial Sequence; identical to SEQ ID NO: 34898
  derived and/or modified CDS sequence (wt) from hemagglutinin__InfluenzaA__AEO01088

SEQ ID NO: 39206 - RNA, 1701 nt, Artificial Sequence; identical to SEQ ID NO: 35772
  derived and/or modified CDS sequence (wt) from hemagglutinin__InfluenzaA__AEO01089

SEQ ID NO: 39207 - RNA, 1701 nt, Artificial Sequence
  derived and/or modified CDS sequence (wt) from hemagglutinin__InfluenzaA__AEO01090
augaaggcaauacuaguaguucugcuauauacauuugcaaccgcaaaugcagacacauuauguauagguuaucaugcgaacaauucaacagacacuguagacacaguacuagaaaagaauguaacaguaacacacucuguuaaccuucuagaagacaagcauaacgggaaacuaugcaaacuaagagggguagccccauugcauuuggguaaauguaacauugcuggcuggauccugggaaauccagagugugaaucacucuccacagcaagcucaugguccuacauuguggaaacaucuaguucagacaauggaacguguuacccaggagauuucaucgauuaugaggagcuaagagagcaauugagcucagugucaucauuugaaagguuugagauauuccccaagacaaguucauggcccaaucaugacucgaacaaagguguaacggcagcauguccucaugcuggagcaaaaagcuucuacaaaaauuuaauauggcuaguuaaaaaaggaaauucauacccaaagcucagcaaauccuacauuaaugauaaagggaaagaaguccucgugcuauggggcauucaccauccaucuacuagugcugaccaacaaagucucuaucagaaugcagaugcauauguuuuuguggggacaucaagauacagcaagaaguucaagccggaaauagcaauaagacccaaagugagggaacaagaagggagaaugaacuauuacuggacacuaguagagccgggagacaaaauaacauucgaagcaacuggaaaucuagugguaccgagauaugcauucgcaauggaaagaaaugcuggaucugguauuaucauuucagauacaccaguccacgauugcaauacaacuugucagacacccaagggugcuauaaacaccagccucccauuucagaauauacauccgaucacaauuggaaaauguccaaaauauguaaaaagcacaaaauugagacuggccacuggauugaggaaugucccgucuauucaaucuagaggccuauuuggggccauugccgguuucauugaagggggguggacagggaugguagauggaugguacgguuaucaccaucaaaaugagcaggggucaggauaugcagccgaccugaagagcacacagaaugccauugacgagauuacuaacaaaguaaauucuguuauugaaaagaugaauacacaguucacagcaguagguaaagaguucaaccaccuggaaaaaagaauagagaauuuaaauaaaaaaguugaugaugguuuccuggacauuuggacuuacaaugccgaacuguugguucuauuggaaaaugaaagaacuuuggacuaccacgauucaaaugugaagaacuuauaugaaaagguaagaagccaguuaaaaaacaaugccaaggaaauuggaaacggcugcuuugaauuuuaccacaaaugcgauaacacgugcauggaaagugucaaaaaugggacuuaugacuacccaaaauacucagaggaagcaaaauuaaacagagaagaaauagaugggguaaagcuggaaucaacaaggauuuaccagauuuuggcgaucuauucaacugucgccaguucauugguacugguagucucccugggggcaaucaguuucuggaugugcucuaaugggucucuacaguguagaauauguauuuaa

SEQ ID NO: 39208 - RNA, 1701 nt, Artificial Sequence; identical to SEQ ID NO: 35772
  derived and/or modified CDS sequence (wt) from hemagglutinin__InfluenzaA__AEO01091

SEQ ID NO: 39209 - RNA, 1701 nt, Artificial Sequence
  derived and/or modified CDS sequence (wt) from hemagglutinin__InfluenzaA__AEO01092
augaaggcaauacuaguaguucugcuauauacauuugcaaccgcaaaugcagacacauuauguauagguuaucaugcgaacaauucaacagacacuguagacacaguacuagaaaagaauguaacaguaacacacucuguuaaccuucuagaagacaagcauaacgggaaacuaugcaaacuaagagggguagccccauugcauuuggguaaauguaacauugcuggcuggauccugggaaauccagagugugaaucacucuccacagcaagcucaugguccuacauuguggaaacaucuaguucagacaauggaacguguuacccaggagauuucaucgauuaugaggagcuaagagagcaauugagcucagugucaucauuugaaagguuugagauauuccccaagacaaguucauggcccaaucaugacucgaacaaagguguaacggcagcauguccucaugcuggagcaaaaagcuucuacaaaaauuuaauauggcuaguuaaaaaaggaaauucauacccaaagcucagcaaauccuacauuaaugauaaagggaaagaaguccucgugcuauggggcauucaccauccaucuacuagugcugaccaacaaagucucuaucagaaugcagaugcauauguuuuuguggggacaucaagauacagcaagaaguucaagccggaaauagcaauaagacccaaagugagggaucaagaagggagaaugaacuauuacuggacacuaguagagccgggagacaaaauaacauucgaagcaacuggaaaucuagugguaccgagauaugcauucgcaauggaaagaaaugcuggaucugguauuaucauuucagauacaccaguccacgauugcaauacaacuugucagacacccaagggugcuauaaacaccagccucccauuucagaauauacauccgaucacaauuggaaaauguccaaaauauguaaaaagcacaaaauugagacuggccacaggauugaggaaugucccgucuauucaaucuagaggccuauuuggggccauugccgguuucauugaagggggguggacagggaugguagauggaugguacgguuaucaccaucaaaaugagcaggggucaggauaugcagccgaccugaagagcacacagaaugccauugacgagauuacuaacaaaguaaauucuguuauugaaaagaugaauacacaguucacagcaguagguaaagaguucaaccaccuggaaaaaagaauagagaauuuaaauaaaaaaguugaugaugguuuccuggacauuuggacuuacaaugccgaacuguugguucuauuggaaaaugaaagaacuuuggacuaccacgauucaaaugugaagaacuuauaugaaaggguaagaagccaguuaaaaaacaaugccaaggaaauuggaaacggcugcuuugaauuuuaccacaaaugcgacaacacgugcauggaaagugucaaaaaugggacuuaugacuacccaaaauacucagaggaagcaaaauuaaacagagaagaaauagaugggguaaagcuggaaucaacaaggauuuaccagauuuuggcgaucuauucaacugucgccaguucauugguacugguagucucccugggggcaaucaguuucuggaugugcucuaaugggucucuacaguguagaauauguauuuaa

SEQ ID NO: 39210 - RNA, 1701 nt, Artificial Sequence; identical to SEQ ID NO: 34714
  derived and/or modified CDS sequence (wt) from hemagglutinin__InfluenzaA__AEO01093

SEQ ID NO: 39211 - RNA, 1701 nt, Artificial Sequence
  derived and/or modified CDS sequence (wt) from hemagglutinin__InfluenzaA__AEO01094
augaaggcaauacuaguaguucugcuauauacauuugcaaccgcaaaugcagacacauuauguauagguuaucaugcgaacaauucaacagacacuguagacacaguacuagaaaagaauguaacaguaacacacucuguuaaccuucuagaagacaagcauaacgggaaacuaugcaaacuaagagggguagccccauugcauuuggguaaauguaacauugcuggcuggauccugggaaauccagagugugaaucacucuccacagcaagcucaugguccuacauuguggaaacaucuaguucagacaauggaacguguuacccaggagauuucaucgauuaugaggagcuaagagagcaauugagcucagugucaucauuugaaagguuugagauauuccccaagacaaguucauggcccaaucaugacucgaacaaagguguaacggcagcauguccucaugcuggagcaaaaagcuucuacaaaaauuuaauauggcuaguuaaaaaaggaaauucauacccaaagcucagcaaauccuacauuaaugauaaagggaaagaaguccucgugcuauggggcauucaccauccaucuacuagugcugaccaacaaagucucuaucagaaugcagaugcauauguuuuuguggggacaucaagauacagcaagaaguucaagccggaaauagcaauaagacccaaagugagggaucaagaagggagaaugaacuauuacuggacacuaguagagccgggagacaaaauaacauucgaagcaacuggaaaucuagugguaccgagauaugcauucgcaauggaaagaaaugcuggaucugguauuaucauuucagauacaccaguccacgauugcaauacaacuugucagacacccaagggugcuauaaacaccagccucccauuucagaauauacauccgaucacaauuggaaaauguccaaaauauguaaaaagcacaaaauugagacuggccacaggauuaaggaaugucccgucuauucaaucuagaggccuauuuggggccauugccgguuucauugaagggggguggacagggaugguagauggaugguacgguuaucaccaucaaaaugagcaggggucaggauaugcagccgaccugaagagcacacagaaugccauugacgagauuacuaacaaaguaaauucuguuauugaaaagaugaauacacaguucacagcaguagguaaagaguucaaccaccuggaaaaaagaauagagaauuuaaauaaaaaaguugaugaugguuuccuggacauuuggacuuacaaugccgaacuguugguucuauuggaaaaugaaagaacuuuggauuaccacgauucaaaugugaagaacuuauaugaaaagguaagaagccaguuaaaaaacaaugccaaggaaauuggaaacggcugcuuugaauuuuaccacaaaugcgauaacacgugcauggaaagugucaaaaaugggacuuaugacuacccaaaauacucagaggaagcaaaauuaaacagagaagaaauagaugggguaaagcuggaaucaacaaggauuuaccagauuuuggcgaucuauucaacugucgccaguucauugguacugguagucucccugggggcaaucaguuucuggaugugcucuaaugggucucuacaguguagaauauguauuuaa

SEQ ID NO: 39212 - RNA, 1701 nt, Artificial Sequence; identical to SEQ ID NO: 37929
  derived and/or modified CDS sequence (wt) from hemagglutinin__InfluenzaA__AEO01095

SEQ ID NO: 39213 - RNA, 1701 nt, Artificial Sequence; identical to SEQ ID NO: 35772
  derived and/or modified CDS sequence (wt) from hemagglutinin__InfluenzaA__AEO01096

SEQ ID NO: 39214 - RNA, 1701 nt, Artificial Sequence; identical to SEQ ID NO: 35772
  derived and/or modified CDS sequence (wt) from hemagglutinin__InfluenzaA__AEO01097

SEQ ID NO: 39215 - RNA, 1701 nt, Artificial Sequence; identical to SEQ ID NO: 35772
  derived and/or modified CDS sequence (wt) from hemagglutinin__InfluenzaA__AEO01098

SEQ ID NO: 39216 - RNA, 1701 nt, Artificial Sequence; identical to SEQ ID NO: 34714
  derived and/or modified CDS sequence (wt) from hemagglutinin__InfluenzaA__AEO01099

SEQ ID NO: 39217 - RNA, 1701 nt, Artificial Sequence; identical to SEQ ID NO: 34965
  derived and/or modified CDS sequence (wt) from hemagglutinin__InfluenzaA__AEO01100

SEQ ID NO: 39218 - RNA, 1701 nt, Artificial Sequence; identical to SEQ ID NO: 34714
  derived and/or modified CDS sequence (wt) from hemagglutinin__InfluenzaA__AEO01101

SEQ ID NO: 39219 - RNA, 1701 nt, Artificial Sequence
  derived and/or modified CDS sequence (wt) from hemagglutinin__InfluenzaA__AEO01102
augaaggcaauacuaguaguucugcuauauacauuugcaaccgcaaaugcagacacauuauguauagguuaucaugcgaacaauucaacagacacuguagacacaguacuagaaaagaauguaacaguaacacacucuguuaaccuucuagaagacaagcauaacgggaaacuaugcaaacuaagagggguagccccauugcauuuggguaaauguaacauugcuggcuggauccugggaaauccagagugugaaucacucuccacagcaagcucaugguccuacauuguggaaacaucuaguucagacaauggaacguguuacccaggagauuucaucgauuaugaggagcuaagagagcaauugagcucagugucaucauuugaaagguuugagauauuccccaagacaaguucauggcccaaucaugacucgaacaaagguguaacggcagcauguccucaugcuggagcaaaaagcuucuacaaaaauuuaauauggcuaguuaaaaaaggaaauucauacccaaagcucagcaaauccuacauuaaugauaaagggaaagaaguccucgugcuauggggcauucaccauccaucuacuagugcugaccaacaaagucucuaucagaaugcagaugcauauguuuuuguggggacaucaagauacagcaagaaguucaagccggaaauagcaauaagacccaaagugagggaucaagaagggagaaugaacuauuacuggacacuaguagagccgggagacaaaauaacauucgaagcaacuggaaaucuagugguaccgagauaugcauucgcaauggaaagaaaugcuggaucugguauuaucauuucagauacaccaguccacgauugcaauacaacuugucagacacccaagggugcuauaaacaccagccucccauuucagaauauacauccgaucacaauuggaaaauguccaaaauauguaaaaagcacaaaauugagacuggccacaggauugaggaaugucccgucuauucaaucuagaggccuauuuggggccauugccgguuucauugaagggggguggacagggaugguagauggaugguacgguuaucaccaucaaaaugagcaggggucaggauaugcagccgaccugaagagcacacagaaugccauugacgagauuacuaacaaaguaaauucuguuauugaaaagaugaauacacaguucacagcaguagguaaagaguucaaccaccuggaaaaaagaauagagaauuuaaauaaaaaaguugaugaugguuuccuggacauuuggacuuacaaugccgaacuguugguucuauuagaaaaugaaagaacuuuggacuaccacgauucaaaugugaagaacuuauaugaaaagguaagaagccaguuaaaaaacaaugccaaggaaauuggaaacggcugcuuugaauuuuaccacaaaugcgauaacacgugcauggaaagugucaaaaaugggacuuaugacuacccaaaauacucagaggaagcaaaauuaaacagagaagaaauagaugggguaaagcuggaaucaacaaggauuuaccagauuuuggcgaucuauucaacugucgccaguucauugguacugguagucucccugggggcaaucaguuucuggaugugcucuaaugggucucuacaguguagaauauguauuuaa

SEQ ID NO: 39220 - RNA, 1701 nt, Artificial Sequence
  derived and/or modified CDS sequence (wt) from hemagglutinin__InfluenzaA__AEO01103
augaaggcaauacuaguaguucugcuauauacauuugcaaccgcaaaugcagacacauuauguauagguuaucaugcgaacaauucaacagacacuguagacacaguacuagaaaagaauguaacaguaacacacucuguuaaccuucuagaagacaagcauaacgggaaacuaugcaaacuaagagggguagccccauugcauuuggguaaauguaacauugcuggcuggauccugggaaauccagagugugaaucacucuccacagcaagcucaugguccuacauuguggaaacaucuaguucagacaauggaacguguuacccaggagauuucaucgauuaugaggagcuaagagagcaauugagcucagugucaucauuugaaagguuugagauauuccccaagacaaguucauggcccaaucaugacucgaacaaagguguaacggcagcauguccucaugcuggagcaaaaagcuucuacaaaaauuuaauauggcuaguuaaaaaaggaaauucauacccaaagcucagcaaauccuacauuaaugauaaagggaaagaaguccucgugcuauggggcauucaccauccaucuacuagugcugaccaacaaagucucuaucagaaugcagaugcauauguuuuuguggggacaucaagauacagcaagaaguucaagccggaaauagcaauaagacccaaagugagggaacaagaagggagaaugaacuauuacuggacacuaguagagccgggagacaaaauaacauucgaagcaacuggaaaucuagugguaccgagauaugcauucgcaauggaaagaaaugcuggaucugguauuauaauuucagauacaccaguccacgauugcaauacaacuugucagacacccaagggugcuauaaacaccagccucccauuucagaauauacauccgaucacaauuggaaaauguccaaaauauguaaaaagcacaaaauugagacuggccacaggauugaggaaugucccgucuauucaaucuagaggccuauuuggggccauugccgguuucauugaagggggguggacagggaugguagauggaugguacgguuaucaccaucaaaaugagcaggggucaggauaugcagccgaccugaagagcacacagaaugccauugacgagauuacuaacaaaguaaauucuguuauugaaaagaugaauacacaguucacagcaguagguaaagaguucaaccacuuggaaaaaagaauagagaauuuaaauaaaaaaguugaugaugguuuccuggacauuuggacuuacaaugccgaacuguugguucuauuggaaaaugaaagaacuuuggacuaccacgauucaaaugugaagaacuuauaugaaaagguaagaagccaguuaaaaaacaaugccaaggaaauuggaaacggcugcuuugaauuuuaccacaaaugcgauaacacgugcauggaaagugucaaaaaugggacuuaugacuacccaaaauacucagaggaagcaaaauuaaacagagaagaaauagaugggguaaagcuggaaucaacaaggauuuaccagauuuuggcgaucuauucaacugucgccaguucauugguacugguagucucccugggggcaaucaguuucuggaugugcucuaaugggucucuacaguguagaauauguauuuaa

SEQ ID NO: 39221 - RNA, 1701 nt, Artificial Sequence; identical to SEQ ID NO: 35772
  derived and/or modified CDS sequence (wt) from hemagglutinin__InfluenzaA__AEO01104

SEQ ID NO: 39222 - RNA, 1701 nt, Artificial Sequence
  derived and/or modified CDS sequence (wt) from hemagglutinin__InfluenzaA__AEO01105
augaaggcaauacuaguaguucugcuauauacauuugcaaccgcaaaugcagacacauuauguauagguuaucaugcgaacaauucaacagacacuguagacacaguacuagaaaagaauguaacaguaacacacucuguuaaccuucuagaagacaagcauaacgggaaacuaugcaaacuaagagggguagccccauugcauuuggguaaauguaacauugcuggcuggauccugggaaauccagagugugaaucacucuccacagcaagcucaugguccuacauuguggaaacaucuaguucagacaauggaacguguuacccaggagauuucaucgauuaugaggagcuaagagagcaauugagcucagugucaucauuugaaagguuugagauauuccccaagacaaguucauggcccaaucaugacucgagcaaagguguaacggcagcauguccucaugcuggagcaaaaagcuucuacaaaaauuuaauauggcuaguuaaaaaaggaaauucauacccaaagcucagcaaauccuacauuaaugauaaagggaaagaaguccucgugcuauggggcauucaccauccaucuacuagugcugaccaacaaagucucuaucagaaugcagaugcauauguuuuuguggggacaucaagauacagcaagaaguucaagccggaaauagcaauaagacccaaagugagggaucaagaagggagaaugaacuauuacuggacacuaguagagccgggagacaaaauaacauucgaagcaacuggaaaucuagugguaccgagauaugcauucgcaauggaaagaaaugcuggaucugguauuaucauuucagauacaccaguccacgauugcaauacaacuugucagacacccaagggugcuauaaacaccagccucccauuucagaauauacauccgaucacaauuggaaaauguccaaaauauguaaaaagcacaaaauugagacuggccacaggauugaggaaugucccgucuauucaaucuagaggccuauuuggggccauugccgguuucauugaagggggguggacagggaugguagauggaugguacgguuaucaccaucaaaaugagcaggggucaggauaugcagccgaccugaagagcacacagaaugccauugacgagauuacuaacaaaguaaauucuguuauugaaaagaugaauacacaguucacagcaguagguaaagaguucaaccaccuggaaaaaagaauagagaauuuaaauaaaaaaguugaugaugguuuccuggacauuuggacuuacaaugccgaacuguugguucuauuggaaaaugaaagaacuuuggacuaccacgauucaaaugugaagaacuuauaugaaaagguaagaagccaguuaaaaaacaaugccaaggaaauuggaaacggcugcuuugaauuuuaccacaaaugcgauaacacgugcauggaaagugucaaaaaugggacuuaugacuacccaaaauacucagaggaagcaaaauuaaacagagaagaaauagaugggguaaagcuggaaucaacaaggauuuaccagauuuuggcgaucuauucaacugucgccaguucauuaguacugguagucucccugggggcaaucaguuucuggaugugcucuaaugggucucuacaguguagaauauguauuuaa

SEQ ID NO: 39223 - RNA, 1701 nt, Artificial Sequence
  derived and/or modified CDS sequence (wt) from hemagglutinin__InfluenzaA__AEO01106
augaaggcaauacuaguaguucugcuauauacauuugcaaccgcaaaugcagacacauuauguauagguuaucaugcgaacaauucaacagacacuguagacacaguacuagaaaagaauguaacaguaacacacucuguuaaccuucuagaagacaagcauaacgggaaacuaugcaaacuaagagggguagccccauugcauuuggguaaauguaacauugcuggcuggauccugggaaauccagagugugaaucacucuccacagcaagcucaugguccuacauuguggaaacaucuaguucagacaauggaacguguuacccaggagauuucaucgauuaugaggagcuaagagagcaauugagcucagugucaucauuugaaagguuugagauauuccccaagacaaguucauggcccaaucaugacucgaacaaagguguaacggcagcauguccucaugcuggagcaaaaagcuucuacaaaaauuuaauauggcuaguuaaaaaaggaaauucauacccaaagcucagcaaauccuacauuaaugauaaagggaaagaaguccucgugcuauggggcauucaccauccaucuacuagugcugaccaacaaagucucuaucagaaugcagaugcauauguuuuuguggggacaucaagauacagcaagaaguucaagccggaaauagcaauaagacccaaagugagggaacaagaagggagaaugaacuauuacuggacacuaguagagccgggagacaaaauaacauucgaagcaacuggaaaucuagugguaccgagauaugcauucgcaauggaaagaaaugcuggaucugguauuaucauuucagauacaccaguccacgauugcaauacaacuugucagacacccaagggugcuauaaacaccagccucccauuucagaauauacauccgaucacaauuggaaaauguccaaaauauguaaaaagcacaaaauugagacuggccacaggauugaggaaugucccgucuauucaaucuagaggccuauuuggggccauugccgguuucauugaagggggguggacagggaugguagauggaugguacgguuaucaccaucaaaaugagcaggggucaggauaugcagccgaccugaagagcacacagaaugccauugacgagauuacuaacaaaguaaauucuguuauugaaaagaugaauacacaguucacagcaguagguaaagaguucaaccaccuggaaaaaagaauagagaauuuaaauaaaaaaguugaugaugguuuccuggacauuuggacuuacaaugccgaacuguugguucuauuggaaaaugaaagaacuuuggacuaccacgauucaaaugugaagaacuuauaugaaaagguaagaagccaguuaaaaaacaaugccaaggaaauuggaaacggcugcuuugaauuuuaccacaaaugcgauaacacgugcauggaaagugucaaaaaugggacuuaugacuacccaaaauacucagaggaagcaaaauuaaacagagaagaaauagaugggguaaaguuggaaucaacaaggauuuaccagauuuuggcgaucuauucaacugucgccaguucauugguacugguagucucccugggggcaaucaguuucuggaugugcucuaaugggucucuacaguguagaauauguauuuaa

SEQ ID NO: 39224 - RNA, 1701 nt, Artificial Sequence; identical to SEQ ID NO: 34714
  derived and/or modified CDS sequence (wt) from hemagglutinin__InfluenzaA__AEO01107

SEQ ID NO: 39225 - RNA, 1701 nt, Artificial Sequence; identical to SEQ ID NO: 34714
  derived and/or modified CDS sequence (wt) from hemagglutinin__InfluenzaA__AEO01108

SEQ ID NO: 39226 - RNA, 1701 nt, Artificial Sequence
  derived and/or modified CDS sequence (wt) from hemagglutinin__InfluenzaA__AEO01109
augaaggcaauacuaguaguucugcuauauacauuugcaaccgcaaaugcagacacauuauguauagguuaucaugcgaacaauucaacagacacuguagacacaguacuagaaaagaauguaacaguaacacacucuguuaaccuucuagaagacaagcauaacgggaaacuaugcaaacuaagagggguagccccauugcauuuggguaaauguaacauugcuggcuggauccugggaaauccagagugugaaucacucuccacagcaagcucaugguccuacauuguggaaacaucuaguucagacaauggaacguguuacccaggagauuucaucgauuaugaggagcuaagagagcaauugagcucagugucaucauuugaaagguuugagauauuccccaagacaaguucauggcccaaucaugacucgaacaaagguguaacggcagcauguccucaugcuggagcaaaaagcuucuacaaaaauuuaauauggcuaguuaaaaaaggaaauucauacccaaagcucagcaaauccuacauuaaugauaaagggaaagaaguccucguguuauggggcauucaccauccaucuacuagugcugaccaacaaagucucuaucagaaugcagaugcauauguuuuuguggggacaucaagauacagcaagaaguucaagccggagauagcaauaagacccaaagugagggaucaagaagggagaaugaacuauuacuggacacuaguagagccgggagacaaaauaacauucgaagcaacuggaaaucuagugguaccgagauaugcauucgcaauggaaagaaaugcuggaucugguauuaucauuucagauacaccaguccacgauugcaauacaacuugucagacacccaagggugcuauaaacaccagccucccauuucagaauauacauccgaucacaauuggaaaauguccaaaauauguaaaaagcacaaaauugagacuggccacaggauugaggaaugucccgucuauucaaucuagaggccuauuuggggccauugccgguuucauugaagggggguggacagggaugguagauggaugguacgguuaucaccaucaaaaugagcaggggucaggauaugcagccgaccugaagagcacacagaaugccauugacgagauuacuaacaaaguaaauucuguuauugaaaagaugaauacacaguucacagcaguagguaaagaguucaaccaccuggaaaaaagaauagagaauuuaaauaaaaaaguugaugaugguuuccuggacauuuggacuuacaaugccgaacuguugguucuauuggaaaaugaaagaacuuuggacuaccacgauucaaaugugaagaacuuguaugaaaagguaagaagccaguuaaaaaacaaugccaaggaaauuggaaacggcugcuuugaauuuuaccacaaaugcgauaacacgugcauggaaagugucaaaaaugggacuuaugacuacccaaaauacucagaggaagcaaaauuaaacagagaagaaauagaugggguaaagcuggaaucaacaaggauuuaccagauuuuggcgaucuauucaacugucgccaguucauugguacugguagucucccugggggcaaucaguuucuggaugugcucuaaugggucucuacaguguagaauauguauuuaa

SEQ ID NO: 39227 - RNA, 1701 nt, Artificial Sequence; identical to SEQ ID NO: 39180
  derived and/or modified CDS sequence (wt) from hemagglutinin__InfluenzaA__AEO01110

SEQ ID NO: 39228 - RNA, 1701 nt, Artificial Sequence; identical to SEQ ID NO: 34681
  derived and/or modified CDS sequence (wt) from hemagglutinin__InfluenzaA__AEO01111

SEQ ID NO: 39229 - RNA, 1701 nt, Artificial Sequence; identical to SEQ ID NO: 39181
  derived and/or modified CDS sequence (wt) from hemagglutinin__InfluenzaA__AEO01112

SEQ ID NO: 39230 - RNA, 1701 nt, Artificial Sequence
  derived and/or modified CDS sequence (wt) from hemagglutinin__InfluenzaA__AEO01113
augaaggcaauacuaguaguucugcuauauacauuugcaaccgcaaaugcagacacauuauguauagguuaucaugcgaacaauucaacagacacuguagacacaguacuagaaaagaauguaacaguaacacacucuguuaaccuucuagaagacaagcauaacgggaaacuaugcaaacuaagagggguagccccauugcauuuggguaaauguaacauugcuggcuggauccugggaaauccagagugugaaucacucuccacagcaagcucaugguccuacauuguggaaacaucuaguucagacaauggaacguguuacccaggagauuucaucgauuaugaggagcuaagagagcaauugagcucagugucaucauuugaaagguuugagauauuccccaagacaaguucauggcccaaucaugacucgaacaaagguguaacggcagcaugucuucaugcuggagcaaaaagcuucuacaaaaauuuaauauggcuaguuaaaaaaggaaauucauacccaaagcucagcaaauccuacauuaaugauaaagggaaagaaguccucguguuauggggcauucaccauccaucuacuagugcugaccaacaaagucucuaucagaaugcagaugcauauguuuuuguggggacaucaagauacagcaagaaguucaagccggaaauagcaauaagacccaaagugagggaucaagaagggagaaugaacuauuacuggacacuaguagagccgggagacaaaauaacauucgaagcaacuggaaaucuagugguaccgagauaugcauucgcaauggaaagaaaugcuggaucugguauuaucauuucagauacaccaguccacgauugcaauacaacuugucagacacccaagggugcuauaaacaccagccucccauuucagaauauacauccgaucacaauuggaaaauguccaaaauauguaaaaagcacaaaauugagacuggccacaggauugaggaaugucccgucuauucaaucuagaggccuauuuggggccauugccgguuucauugaagggggguggacagggaugguagauggaugguacgguuaucaccaucaaaaugagcaggggucaggauaugcagccgaccugaagagcacacagaaugccauugacgagauuacuaacaaaguaaauucuguuauugaaaagaugaauacacaguucacagcaguagguaaagaguucaaccaccuggaaaaaagaauagagaauuuaaauaaaaaaguugaugaugguuuccuggacauuuggacuuacaaugccgaacuguugguucuauuggaaaaugaaagaacuuuggacuaccacgauucaaaugugaagaacuuguaugaaaagguaagaagccaguuaaaaaacaaugccaaggaaauuggaaacggcugcuuugaauuuuaccacaaaugcgauaacacgugcauggaaagugucaaaaaugggacuuaugacuacccaaaauacucagaggaagcaaaauuaaacagagaagaaauagaugggguaaagcuggaaucaacaaggauuuaccagauuuuggcgaucuauucaacugucgccaguucauugguacugguagucucccugggggcaaucaguuucuggaugugcucuaaugggucucuacaguguagaauauguauuuaa

SEQ ID NO: 39231 - RNA, 1701 nt, Artificial Sequence; identical to SEQ ID NO: 34965
  derived and/or modified CDS sequence (wt) from hemagglutinin__InfluenzaA__AEO01114

SEQ ID NO: 39232 - RNA, 1701 nt, Artificial Sequence
  derived and/or modified CDS sequence (wt) from hemagglutinin__InfluenzaA__AEO01115
auggaggcaauacuaguaguucugcuauauacauuugcaaccgcaaaugcagacacauuauguauagguuaucaugcgaacaauucaacagacacuguagacacaguacuagaaaagaauguaacaguaacacacucuguuaaccuucuagaagacaagcauaacgggaaacuaugcaaacuaagagggguagccccauugcauuuggguaaauguaacauugcuggcuggauccugggaaauccagagugugaaucacucuccacagcaagcucaugguccuacauuguggaaacaucuaguucagacaauggaacguguuacccaggagauuucaucgauuaugaggagcuaagagagcaauugagcucagugucaucauuugaaagguuugagauauuccccaagacaaguucauggcccaaucaugacucgaacaaagguguaacggcagcaugucuucaugcuggagcaaaaagcuucuacaaaaauuuaauauggcuaguuaaaaaaggaaauucauacccaaagcucagcaaauccuacauuaaugauaaagggaaagaaguccucguguuauggggcauucaccauccaucuacuagugcugaccaacaaagucucuaucagaaugcagaugcauauguuuuuguggggacaucaagauacagcaagaaguucaagccggaaauagcaauaagacccaaagugagggaucaagaagggagaaugaacuauuacuggacacuaguagagccgggagacaaaauaacauucgaagcaacuggaaaucuagugguaccgagauaugcauucgcaauggaaagaaaugcuggaucugguauuaucauuucagauacaccaguccacgauugcaauacaacuugucagacacccaagggugcuauaaacaccagccucccauuucauaauauacauccgaucacaauuggaaaauguccaaaauauguaaaaagcacaaaauugagacuggccacaggauugaggaaugucccgucuauucaaucuagaggccuauuuggggccauugccgguuucauugaagggggguggacagggaugguagauggaugguacgguuaucaccaucaaaaugagcaggggucaggauaugcagccgaccugaagagcacacagaaugccauugacgagauuacuaacaaaguaaauucuguuauugaaaagaugaauacacaguucacagcaguagguaaagaguucaaccaccuggaaaaaagaauagagaauuuaaauaaaaaaguugaugaugguuuccuggacauuuggacuuacaaugccgaacuguugguucuauuggaaaaugaaagaacuuuggacuaccacgauucaaaugugaagaacuuguaugaaaagguaagaagccaguuaaaaaacaaugccaaggaaauuggaaacggcugcuuugaauuuuaccacaaaugcgauaacacgugcauggaaagugucaaaaaugggacuuaugacuacccaaaauacucagaggaagcaaaauuaaacagagaagaaauagaugggguaaagcuggaaucaacaaggauuuaccagauuuuggcgaucuauucaacugucgccaguucauugguacugguagucucccugggggcaaucaguuucuggaugugcucuaaugggucucuacaguguagaauauguauuuaa

SEQ ID NO: 39233 - RNA, 1701 nt, Artificial Sequence; identical to SEQ ID NO: 39182
  derived and/or modified CDS sequence (wt) from hemagglutinin__InfluenzaA__AEO01116

SEQ ID NO: 39234 - RNA, 1701 nt, Artificial Sequence; identical to SEQ ID NO: 39182
  derived and/or modified CDS sequence (wt) from hemagglutinin__InfluenzaA__AEO01117

SEQ ID NO: 39235 - RNA, 1701 nt, Artificial Sequence; identical to SEQ ID NO: 35547
  derived and/or modified CDS sequence (wt) from hemagglutinin__InfluenzaA__AEO01118

SEQ ID NO: 39236 - RNA, 1701 nt, Artificial Sequence; identical to SEQ ID NO: 39182
  derived and/or modified CDS sequence (wt) from hemagglutinin__InfluenzaA__AEO01119

SEQ ID NO: 39237 - RNA, 1701 nt, Artificial Sequence
  derived and/or modified CDS sequence (wt) from hemagglutinin__InfluenzaA__AEO01120
augaaggcaauacuaguaguucugcuauauacauuugcaaccgcaaaugcagacacauuauguauagguuaucaugcgaacaauucaacagacacuguagacacaguacuagaaaagaauguaacaguaacacacucuguuaaccuucuagaagacaagcauaacgggaaacuaugcaaacuaagagggguagccccauugcauuuggguaaauguaacauugcuggcuggauccugggaaauccagagugugaaucacucuccacagcaagcucaugguccuacauuguggaaacaucuaguucagacaauggaacguguuacccaggagauuucaucgauuaugaggagcuaagagagcaauugagcucagugucaucauuugaaagguuugagauauuccccaagacaaguucauggcccaaucaugacucgaacaaagguguaacggcagcauguccucaugcuggagcaaaaagcuucuacaaaaauuuaauauggcuaguuaaaaaaggaaauucauacccaaagcucagcaaauccuacauuaaugauaaagggaaagaaguccucgugcuauggggcauucaccauccaucuacuagugcugaccaacaaagucucuaucagaaugcagaugcauauguuuuuguggggacaucaagauacagcaagaaguucaagccggaaauagcaauaagacccaaagugagggaacaagaagggagaaugaacuauuacuggacacuaguagagccgggagacaaaauaacauucgaagcaacuggaaaucuagugguaccgagauaugcauucgcaauggaaagaaaugcuggaucugguauuaucauuucagauacaccaguccacgauugcaauacaacuugucagacacccaagggugcuauaaacaccagccucccauuucagaauauacauccgaucacaauuggaaaauguccaaaauauguaaaaagcacaaaauugagacuggccacaggauugaggaauaucccgucuauucaaucuagaggccuauuuggggccauugccgguuucauugaagggggguggacagggaugguagauggaugguacgguuaucaccaucaaaaugagcaggggucaggauaugcagccgaccugaagagcacacagaaugccauugacgagauuacuaacaaaguaaauucuguuauugaaaagaugaauacacaguucacagcaguagguaaagaguucaaccaccuggaaaaaagaauagagaauuuaaauaaaaaaguugaugaugguuuccuggacguuuggacuuacaaugccgaacuguugguucuauuggaaaaugaaagaacuuuggacuaccacgauucaaaugugaagaacuuauaugaaaagguaagaagccaguuaaaaaacaaugccaaggaaauuggaaacggcugcuuugaauuuuaccacaaaugcgauaacacgugcauggaaagugucaaaaaugggacuuaugacuacccaaaauacucagaggaagcaaaauuaaacagagaagaaauagaugggguaaagcuggaaucaacaaggauuuaccagauuuuggcgaucuauucaacugucgccaguucauugguacugguagucucccugggggcaaucaguuucuggaugugcucuaaugggucucuacaguguagaauauguauuuaa

SEQ ID NO: 39238 - RNA, 1701 nt, Artificial Sequence; identical to SEQ ID NO: 34681
  derived and/or modified CDS sequence (wt) from hemagglutinin__InfluenzaA__AEO01121

SEQ ID NO: 39239 - RNA, 1701 nt, Artificial Sequence; identical to SEQ ID NO: 35772
  derived and/or modified CDS sequence (wt) from hemagglutinin__InfluenzaA__AEO01122

SEQ ID NO: 39240 - RNA, 1701 nt, Artificial Sequence; identical to SEQ ID NO: 34681
  derived and/or modified CDS sequence (wt) from hemagglutinin__InfluenzaA__AEO01123

SEQ ID NO: 39241 - RNA, 1701 nt, Artificial Sequence
  derived and/or modified CDS sequence (wt) from hemagglutinin__InfluenzaA__AEO01124
augaaggcaauacuaguaguucugcuauauacauuugcaaccgcaaaugcagacacauuauguauagguuaucaugcgaacaauucaacagacacuguagacacaguacuagaaaagaauguaacaguaacacacucuguuaaccuuuuagaagacaagcauaacgggaaacuaugcaaacuaagagggguagccccauugcauuuggguaaauguaacauugcuggcuggauccugggaaauccagagugugaaucacucuccacagcaagcucaugguccuacauuguggaaacaucuaguucagacaauggaacguguuacccaggagauuucaucgauuaugaggagcuaagagagcaauugagcucagugucaucauuugaaagguuugagauauuccccaagacaaguucauggcccaaucaugacucgaacaaagguguaacggcagcauguccucaugcuggagcaaaaagcuucuacaaaaauuuaauauggcuaguuaaaaaaggaaauucauacccaaagcucagcaaauccuacauuaaugauaaagggaaagaaguccucgugcuauggggcauucaccauccaucuacuagugcugaccaacaaagucucuaucagaaugcagaugcauauguuuuuguggggacaucaagauacagcaagaaguucaagccggaaauagcaauaagacccaaagugagggaucaagaagggagaaugaacuauuacuggacacuaguagagccgggagacaaaauaacauucgaagcaacuggaaaucuagugguaccgagauaugcauucgcaauggaaagaaaugcuggaucugguauuaucauuucagauacaccaguccacgauugcaauacaacuugucagacacccaagggugcuauaaacaccagccucccauuucagaauauacauccgaucacaauuggaaaauguccaaaauauguaaaaagcacaaaauugagacuggccacaggauugaggaaugucccgucuauucaaucuagaggccuauuuggggccauugccgguuucauugaagggggguggacagggaugguagauggaugguacgguuaucaccaucaaaaugagcaggggucaggauaugcagccgaccugaagagcacacagaaugccauugacgagauuacuaacaaaguaaauucuguuauugaaaagaugaauacacaguucacagcaguagguaaagaguucaaccaccuggaaaaaagaauagagaauuuaaauaaaaaaguugaugaugguuuccuggacauuuggacuuacaaugccgaacuguugguucuauuggaaaaugaaagaacuuuggacuaccacgauucaaaugugaagaacuuauaugaaaagguaagaagccaguuaaaaaauaaugccaaggaaauuggaaacggcugcuuugaauuuuaccacaaaugcgauaacacgugcauggaaagugucaaaaaugggacuuaugacuacccaaaauacucagaggaagcaaaauuaaacagagaagaaauagaugggguaaagcuggaaucaacaaggauuuaccagauuuuggcgaucuauucaacugucgccaguucauugguacugguagucucccugggggcaaucaguuucuggaugugcucuaaugggucucuacaguguagaauauguauuuaa

SEQ ID NO: 39242 - RNA, 1701 nt, Artificial Sequence; identical to SEQ ID NO: 35772
  derived and/or modified CDS sequence (wt) from hemagglutinin__InfluenzaA__AEO01125

SEQ ID NO: 39243 - RNA, 1701 nt, Artificial Sequence
  derived and/or modified CDS sequence (wt) from hemagglutinin__InfluenzaA__AEO01126
augaaggcaacacuaguaguucugcuauauacauuugcaaccgcaaaugcagacacauuauguauagguuaucaugcgaacaauucaacagacacuguagacacaguacuagaaaagaauguaacaguaacacacucuguuaaucuucuagaagacaagcauaacgggaaacuaugcaaacuaagagggguagccccauugcauuuggguaaauguaacauugcuggcuggauccugggaaauccagagugugaaucacucuccacagcaagcucaugguccuacauuguggaaacaucuaguucagacaauggaacguguuacccaggagauuucaucgauuaugaggagcuaagagagcaauugagcucagugucaucauuugaaagguuugagauauuccccaagacaaguucauggcccaaucaugacucgaacaaagguguaacggcagcauguccucaugcuggagcaaaaagcuucuacaaaaauuuaauauggcuaguuaaaaaaggaaauucauacccaaagcucagcaaauccuacauuaaugauaaagggaaagaaguccucgugcuauggggcauucaccauccaucuacuagugcugaccaacaaagucucuaucagaaugcagaugcauauguuuuuguggggacaucaagauacagcaagaaguucaagccggaaauagcaauaagacccaaagugagggaacaagaagggagaaugaacuauuacuggacacuaguagagccgggagacaaaauaacauucgaagcaacuggaaaucuagugguaccgagauaugcauucgcaauggaaagaaaugcuggaucugguauuaucauuucagauacaccaguccacgauugcaauacaacuugucagacacccaagggugcuauaaacaccagccucccauuucagaauauacauccgaucacaauuggaaaauguccaaaauauguaaaaagcacaaaauugagacuggccacaggauugaggaaugucccgucuauucaaucuagaggccuauuuggggccauugccgguuucauugaagggggguggacagggaugguagauggaugguacgguuaucaccaucaaaaugagcaggggucaggauaugcagccgaccugaagagcacacagaaugccauugacgagauuacuaacaaaguaaauucuguuauugaaaagaugaauacacaguucacagcaguagguaaagaguucaaccaccuggaaaaaagaauagagaauuuaaauaaaaaaguugaugaugguuuccuggacauuuggacuuacaaugccgaacuguugguucuauuggaaaaugaaagaacuuuggacuaccacgauucaaaugugaagaacuuauaugaaaagguaagaagccaguuaaaaaacaaugccaaggaaauuggaaacggcugcuuugaauuuuaccacaaaugcgauaacacgugcauggaaagugucaaaaaugggacuuaugacuacccaaaauacucagaggaagcaaaauuaaacagagaagaaauagaugggguaaagcuggaaucaacaaggauuuaccagauuuuggcgaucuauucaacugucgccaguucauugguacugguagucucccugggggcaaucaguuucuggaugugcucuaaugggucucuacaguguagaauauguauuuaa

SEQ ID NO: 39244 - RNA, 1701 nt, Artificial Sequence; identical to SEQ ID NO: 34681
  derived and/or modified CDS sequence (wt) from hemagglutinin__InfluenzaA__AEO01127

SEQ ID NO: 39245 - RNA, 1701 nt, Artificial Sequence
  derived and/or modified CDS sequence (wt) from hemagglutinin__InfluenzaA__AEO01128
augaaggcaauacuaguaguucugcuauauacauuugcaaccgcaaaugcagacacauuauguauagguuaucaugcgaacaauucaacagacacuguagacacaguacuagaaaagaauguaacaguaacacacucuguuaaccuucuagaagacaagcauaacgggaaacuaugcaaacuaagagggguagccccauugcauuuagguaaauguaacauugcuggcuggauccugggaaauccagagugugaaucacucuccacagcaagcucaugguccuacauuguggaaacaucuaguucagacaauggaacguguuacccaggagauuucaucgauuaugaggagcuaagagagcaauugagcucagugucaucauuugaaagguuugagauauuccccaagacaaguucauggcccaaucaugacucgaacaaagguguaacggcagcauguccucaugcuggagcaaaaagcuucuacaaaaauuuaauauggcuaguuaaaaaaggaaauucauacccaaagcucagcaaauccuacauuaaugauaaagggaaagaaguccucgugcuauggggcauucaccauccaucuacuagugcugaccaacaaagucucuaucagaaugcagaugcauauguuuuuguggggacaucaagauacagcaagaaguucaagccggaaauagcaauaagacccaaagugagggaucaagaagggagaaugaacuauuacuggacacuaguagagccgggagacaaaauaacauucgaagcaacuggaaaucuagugguaccgagauaugcauucgcaauggaaagaaaugcuggaucugguauuaucauuucagauacaccaguccacgauugcaauacaacuugucagacacccaagggugcuauaaacaccagccucccauuucagaauauacauccgaucacaauuggaaaauguccaaaauauguaaaaagcacaaaauugagacuggccacaggauugaggaaugucccgucuauucaaucuagaggccuauuuggggccauugccgguuucauugaagggggguggacagggaugguagauggaugguacgguuaucaccaucaaaaugagcaggggucaggauaugcagccgaccugaagagcacacagaaugccauugacgagauuacuaacaaaguaaauucuguuauugaaaagaugaauacacaguucacagcaguagguaaagaguucaaccaccuggaaaaaagaauagagaauuuaaauaaaaagguugaugaugguuuccuggacauuuggacuuacaaugccgaacuguugguucuauuggaaaaugaaagaacuuuggacuaccacgauucaaaugugaagaacuuauaugaaaagguaagaagccaguuaaaaaacaaugccaaggaaauuggaaacggcugcuuugaauuuuaccacaaaugcgauaacacgugcauggaaagugucaaaaaugggacuuaugacuacccaaaauacucagaggaagcaaaauuaaacagagaagaaauagaugggguaaagcuggaaucaacaaggauuuaccagauuuuggcgaucuauucaacugucgccaguucauugguacugguagucucccugggggcaaucaguuucuggaugugcucuaaugggucucuacaguguagaauauguauuuaa

SEQ ID NO: 39246 - RNA, 1701 nt, Artificial Sequence; identical to SEQ ID NO: 39220
  derived and/or modified CDS sequence (wt) from hemagglutinin__InfluenzaA__AEO01129

SEQ ID NO: 39247 - RNA, 1701 nt, Artificial Sequence
  derived and/or modified CDS sequence (wt) from hemagglutinin__InfluenzaA__AEO01130
augaaggcaauacuaguaguucugcuauauacauuugcaaccgcaaaugcagacacauuauguauagguuaucaugcgaacaauucaacagacacuguagacacaguacuagaaaagaauguaacaguaacacacucuguuaaccuucuagaagacaagcauaacgggaaacuaugcaaacuaagagggguagccccauugcauuuggguaaauguaacauugcuggcuggauccugggaaauccagagugugaaucacucuccacagcaagcucaugguccuacauuguggaaacaucuaguucagacaauggaacguguuacccaggagauuucaucgauuaugaggagcuaagagagcaauugagcucagugucaucauuugaaagguuugagauauuccccaagacaaguucauggcccaaucaugacucgaacaaagguguaacggcagcaugcccucaugcuggagcaaaaagcuucuacaaaaauuuaauauggcuaguuaaaaaaggaaauucauacccaaagcucagcaaauccuacauuaaugauaaagggaaagaaguccucgugcuauggggcauucaccauccaucuacuagugcugaccaacaaagucucuaucagaaugcagaugcauauguuuuuguggggacaucaagauacagcaagaaguucaaaccggaaauagcaauaagacccaaagugagggaucaagaagggagaaugaacuauuacuggacacuaguagagccgggagacaaaauaacauucgaagcaacuggaaaucuagugguaccgagauaugcauucgcaauggaaagaaaugcuggaucugguauuaucauuucagauacaccaguccacgauugcaauacaacuugucagacacccaagggugcuauaaacaccagccucccauuucagaauauacauccgaucacaauuggaaaauguccaaaauauguaaaaagcacaaaauugagacuggccacaggauugaggaaugucccgucuauucaaucuagaggccuauuuggggccauugccgguuucauugaagggggguggacagggaugguagauggaugguacgguuaucaccaucaaaaugagcaggggucaggauaugcagccgaccugaagagcacacagaaugccauugacgagauuacuaacaaaguaaauucuguuauugaaaagaugaauacacaguucacagcaguagguaaagaguucaaccaccuggaaaaaagaauagagaauuuaaauaaaaaaguugaugaugguuuccuggacauuuggacuuacaaugccgaacuguugguucuauuggaaaaugaaagaacuuuggacuaccacgauucaaaugugaagaacuuauaugaaaagguaagaagccaguuaaaaaacaaugccaaggaaauuggaaacggaugcuuugaauuuuaccacaaaugcgauaacacgugcauggaaagugucaaaaaugggacuuaugacuacccaaaauacucagaggaagcaaaauuaaacagagaagaaauagaugggguaaagcuggaaucaacaaggauuuaccagauuuuggcgaucuauucaacugucgccaguucauugguacugguagucucccugggggcaaucaguuucuggaugugcucuaaugggucucuacaguguagaauauguauuuaa

SEQ ID NO: 39248 - RNA, 1701 nt, Artificial Sequence
  derived and/or modified CDS sequence (wt) from hemagglutinin__InfluenzaA__AEO01131
augaaggcaauacuaguaguucugcuauauacauuugcaaccgcaaaugcagacacauuauguauagguuaucaugcgaacaauucaacagacacuguagacacaguacuagaaaagaauguaacaguaacacacucuguuaaccuucuagaagacaagcauaacgggaaacuaugcaaacuaagagggguagccccauugcauuuggguaaauguaacauugcuggcuggauccugggaaauccagagugugaaucacucuccacagcaagcucaugguccuacauuguggaaacaucuaguucagacaauggaacguguuacccaggagauuucaucgauuaugaggagcuaagagagcaauugagcucagugucaucauuugaaagguuugagauauuccccaagacaaguucauggcccaaucaugacucgaacaaagguguaacggcagcauguccucaugcuggagcaaaaagcuucuacaaaaauuuaauauggcuaguuaaaaaaggaaauucauacccaaagcucagcaaauccuacauuaaugauaaagggaaagaaguccucgugcuauggggcauucaccauccaucuacuagugcugaccaacaaagucucuaucagaaugcagaugcauauguuuuuguggggacaucaagauacagcaagaaguucaagccggaaauagcaauaagacccaaagugagggaacaagaagggagaaugaacuauuacuggacacuaguagagccgggagacaaaauaacauucgaagcaacuggaaaucuagugguaccgagauaugcauucgcaauggaaagaaaugcuggaucugguauuaucauuucagauacaccaguccacgauugcaauacaacuugucagacacccaagggugcuauaaacaccagccucccauuucagaauauacauccgaucacaauuggaaaauguccaaaauauguaaaaagcacaaaauugagacuggccacaggauugaggaaugucccgucuauucaaucuagaggccuauuuggggccauugccgguuucauugaagggggguggacagggaugguagauggaugguacgguuaucaccaucaaaaugagcaggggucaggauaugcagccgaccugaaaagcacacagaaugccauugacgagauuacuaacaaaguaaauucuguuauugaaaagaugaauacacaguucacagcaguagguaaagaguucaaccaccuggaaaaaagaauagagaauuuaaauaaaaaaguugaugaugguuuccuggacauuuggacuuacaaugccgaacuguugguucuauuggaaaaugaaagaacuuuggacuaccacgauucaaaugugaagaacuuauaugaaaagguaagaagccaguuaaaaaacaaugccaaggaaauuggaaacggcugcuuugaauuuuaccacaaaugcgauaacacgugcauggaaagugucaaaaaugggacuuaugacuacccaaaauacucagaggaagcaaaauuaaacagagaagaaauagaugggguaaagcuggaaucaacaaggauuuaccagauuuuggcgaucuauucaacugucgccaguucauugguacugguagucucccugggggcaaucaguuucuggaugugcucuaaugggucucuacaguguagaauauguauuuaa

SEQ ID NO: 39249 - RNA, 1701 nt, Artificial Sequence; identical to SEQ ID NO: 34714
  derived and/or modified CDS sequence (wt) from hemagglutinin__InfluenzaA__AEO01132

SEQ ID NO: 39250 - RNA, 1701 nt, Artificial Sequence
  derived and/or modified CDS sequence (wt) from hemagglutinin__InfluenzaA__AEO01133
augaaggcaauacuaguaguucugcuauauacauuugcaaccgcaaaugcagacacauuauguauagguuaucaugcgaacaauucaacagacacuguagacacaguacuagaaaagaauguaacaguaacacacucuguuaacauucuagaagacaagcauaacgggaaacuaugcaaacuaagagggguagccccauugcauuuggguaaauguaacauugcuggcuggauccugggaaauccagagugugaaucacucuccacagcaagcucaugguccuacauuguggaaacaucuaguucagacaauggaacguguuacccaggagauuucaucgauuaugaggagcuaagagagcaauugagcucagugucaucauuugaaagguuugagauauuccccaagacaaguucauggcccaaucaugacucgaacaaagguguaacggcagcauguccucaugcuggagcaaaaagcuucuacaaaaauuuaauauggcuaguuaaaaaaggaaauucauacccaaagcucagcaaauccuacauuaaugauaaagggaaagaaguccucgugcuauggggcauucaccauccaucuacuagugcugaccaacaaagucucuaucagaaugcagaugcauauguuuuuguggggucaucaagauacagcaagaaguucaagccggaaauagcaauaagacccaaagugagggaucaagaagggagaaugaacuauuacuggacacuaguagagccgggagacaaaauaacauucgaagcaacuggaaaucuagugguaccgagauaugcauucgcaauggaaagaaaugcuggaucugguauuaucauuucagauacaccaguccacgauugcaauacaacuugucagacacccaagggugcuauaaacaccagccucccauuucagaauauacauccgaucacaauuggaaaauguccaaaauauguaaaaagcacaaaauugagacuggccacaggauugaggaaugucccuucuauucaaucuagaggccuauuuggggccauugccgguuucauugaagggggguggacagggaugguagauggaugguacgguuaucaccaucaaaaugagcaggggucaggauaugcagccgaccugaagagcacacagaaugccauugacgagauuacuaacaaaguaaauucuguuauugaaaagaugaauacacaguucacagcaguagguaaagaguucaaccaccuggaaaaaagaauagagaauuuaaauaaaaaaguugaugaugguuuccuggacauuuggacuuacaaugccgaacuguugguucuauuggaaaaugaaagaacuuuggacuaccacgauucaaaugugaagaacuuauaugaaaagguaagaagccagcuaaaaaacaaugccaaggaaauuggaaacggcugcuuugaauuuuaccacaaaugcgauaacacgugcauggaaagugucaaaaaugggacuuaugacuacccaaaauacucagaggaagcaaaauuaaacagagaagaaauagaugggguaaagcuggaaucaacaaugauuuaccagauuuuggcgaucuauucaacugucgccaguucauugguacugguagucucccugggggcaaucaguuucuggaugugcucuaaugggucucuacaguguagaauauguauuuaa

SEQ ID NO: 39251 - RNA, 1701 nt, Artificial Sequence; identical to SEQ ID NO: 35772
  derived and/or modified CDS sequence (wt) from hemagglutinin__InfluenzaA__AEO01134

SEQ ID NO: 39252 - RNA, 1701 nt, Artificial Sequence; identical to SEQ ID NO: 35772
  derived and/or modified CDS sequence (wt) from hemagglutinin__InfluenzaA__AEO01135

SEQ ID NO: 39253 - RNA, 1701 nt, Artificial Sequence
  derived and/or modified CDS sequence (wt) from hemagglutinin__InfluenzaA__AEO01136
augaaggcaauacuaguaguucugcuauauacauuugcaaccgcaaaugcagacacauuauguauagguuaucaugcgaacaauucaacagacacuguagacacaguacuagaaaagaauguaacaguaacacacucuguuaaccuucuagaagacaagcauaacgggaaacuaugcaaacuaagagggguagccccauugcauuuggguaaauguaacauugcuggcuggauccugggaaauccagagugugaaucacucuccacagcaagcucaugguccuacauuguggaaacaucuaguucagacaauggaacguguuacccaggagauuucaucgauuaugaggagcuaagagagcaauugagcucagugucaucauuugaaagguuugaaauauuccccaagacgaguucauggcccaaucaugacucgaacaaagguguaacggcagcauguccucaugcuggagcaaaaagcuucuacaaaaauuuaauauggcuaguuaaaaaaggaaauucauacccaaagcucagcaaauccuacauuaaugauaaagggaaagaaguccucgugcuauggggcauucaccauccaucuacuagugcugaccaacaaagucucuaucagaaugcagaugcauauguuuuuguggggacaucaagauacagcaagaaguucaagccggaaauagcaauaagacccaaagugagggaucaagaagggagaaugaacuauuacuggacacuaguagagccgggagacaaaauaacauucgaagcaacuggaaaucuagugguaccgagauaugcauucgcaauggaaagaaaugcuggaucugguauuaucauuucagauacaccaguccacgauugcaauacaacuugucagacacccaagggugcuauaaacaccagccucccauuucagaauauacauccgaucacaauuggaaaauguccaaaauauguaaaaagcacaaaauugagacuggccacaggauugaggaaugucccgucuauucaaucuagaggccuauuuggggccauugccgguuucauugaagggggguggacagggaugguagauggaugguacgguuaucaccaucaaaaugagcaggggucaggauaugcagccgaccugaaaagcacacagaaugccauugacgagauuacuaacaaaguaaauucuguuauugaaaagaugaauacacaguucacagcaguagguaaagaguucaaccaccuggaaaaaagaauagagaauuuaaauaaaaaaguugaugaugguuuccuggacauuuggacuuacaaugccgaacuauugguucuauuggaaaaugaaagaacuuuggacuaccacgauucaaaugugaagaacuuauaugaaaagguaagaagccaguuaaaaaacaaugccaaggaaauuggaaacggcugcuuugaauuuuaccacaaaugcgauaacacgugcauggaaagugucaaaaaugggacuuaugacuacccaaaauacucagaggaagcaaaauuaaacagagaagaaauagaugggguaaagcuggaaucaacaaggauuuaccagauuuuggcgaucuauucaacugucgccaguucauugguacugguagucucccugggggcaaucaguuucuggaugugcucuaaugggucucuacaguguagaauauguauuuaa

SEQ ID NO: 39254 - RNA, 1701 nt, Artificial Sequence; identical to SEQ ID NO: 35128
  derived and/or modified CDS sequence (wt) from hemagglutinin__InfluenzaA__AEO01137

SEQ ID NO: 39255 - RNA, 1701 nt, Artificial Sequence; identical to SEQ ID NO: 35128
  derived and/or modified CDS sequence (wt) from hemagglutinin__InfluenzaA__AEO01138

SEQ ID NO: 39256 - RNA, 1701 nt, Artificial Sequence
  derived and/or modified CDS sequence (wt) from hemagglutinin__InfluenzaA__AEO01139
augaaggcaauacuaguaguucugcuauauacauuugcaaccgcaaaugcagacacauuauguauagguuaucaugcgaacaauucaacagacacuguagacacaguacuagaaaagaauguaacaguaacacacucuguuaaccuucuagaagacaagcauaacgggaaacuaugcaaacuaagagggguagccccauugcauuuggguaaauguaacauugcuggcuggauccuggguaauccagagugugaaucacucuccacagcaagcucaugguccuacauuguggaaacaucuaguucagacaauggaacguguuacccaggagauuucaucgauuaugaggagcuaagagagcaauugagcucagugucaucauuugaaagguuugagauauuccccaagacaaguucauggcccaaucaugacucgaacaaagguguaacggcagcauguccucaugcuggagcaaaaagcuucuacaaaaauuuaauauggcuaguuaaaaaaggaaauucauacccaaagcucagcaaauccuacauuaaugauaaagggaaagaaguccucgugcuauggggcauucaccauccaucuacuagugcugaccaacaaagucucuaucagaaugcagaugcauauguuuuuguggggacaucaagauacagcaagaaguucaagccggaaauagcaauaagacccaaagugagggaucaagaagggagaaugaacuauuacuggacacuaguagagccgggagacaaaauaacauucgaagcaacuggaaaucuagugguaccgagauaugcauucgcaauggaaagaaaugcuggaucugguauuaucauuucagauacaccaguccacgauugcaauacaacuugucagacacccaagggugcuauaaacaccagccucccauuucagaauauacauccgaucacaauuggaaaauguccaaaauauguaaaaagcacaaaauugagacuggccacaggauugaggaaugucccgucuauucaaucuagaggccuauuuggggccauugccgguuucauugaagggggguggacagggaugguagauggaugguacgguuaucaccaucaaaaugagcaggggucaggauaugcagccgaccugaagagcacacagaaugccauugacgagauuacuaacaaaguaaauucuguuauugaaaagaugaauacacaguucacagcaguagguaaagaguucaaccaccuggaaaaaagaauagagaauuuaaauaaaaaaguugaugaugguuuccuggacauuuggacuuacaaugccgaacuguugguucuauuggaaaaugaaagaacuuuggacuaccacgauucaaaugugaagaacuuauaugaaaagguaagaagccaguuaaaaaacaaugccaaggaaauuggaaacggcugcuuugaauuuuaccacaaaugcgauaacacgugcauggaaagugucaaaaaugggacuuaugacuacccaaaauacucagaggaagcaaaauuaaacagagaagaaauagaugggguaaagcuggaaucaacaaggauuuaccagauuuuggcgaucuauucaacugucgccaguucauugguacugguagucucccugggggcaaucaguuucuggaugugcucuaaugggucucuacaguguagaauauguauuuaa

SEQ ID NO: 39257 - RNA, 1701 nt, Artificial Sequence; identical to SEQ ID NO: 34681
  derived and/or modified CDS sequence (wt) from hemagglutinin__InfluenzaA__AEO01140

SEQ ID NO: 39258 - RNA, 1701 nt, Artificial Sequence; identical to SEQ ID NO: 34714
  derived and/or modified CDS sequence (wt) from hemagglutinin__InfluenzaA__AEO01141

SEQ ID NO: 39259 - RNA, 1701 nt, Artificial Sequence; identical to SEQ ID NO: 34681
  derived and/or modified CDS sequence (wt) from hemagglutinin__InfluenzaA__AEO01142

SEQ ID NO: 39260 - RNA, 1701 nt, Artificial Sequence
  derived and/or modified CDS sequence (wt) from hemagglutinin__InfluenzaA__AEO01144
augaaggcaauacuaguaguucugcuauauacauuugcaaccgcaaaugcagacacauuauguauagguuaucaugcuaacaauucaacagacacuguagacacaguacuagaaaagaauguaacaguaacacacucuguuaaccuucuagaagacaagcauaacgggaaacuaugcaaacuaagagggguagccccauugcauuuggguaaauguaacauugcuggcuggauccugggaaauccagagugugaaucacucuccacagcaagcucaugguccuacauuguggaaacaucuauuucagacaauggaacguguuacccaggagauuucaucgauuaugaggagcuaagagagcaauugagcucagugucaucauuugaaagguuugagauauuccccaagacaaguucauggcccaaucaugacucgaacaaagguguaacggcagcauguccucaugcuggagcaaaaggcuucuacaaaaauuuaauauggcuaguuaaaaaaggaaauucauacccaaagcucagcaaauccuacauuaaugauaaagggaaagaaguccucgugcuauggggcauucaccauccaucuacuagugcugaccaacaaagucucuaucagaaugcagaugcauauguuuuuguggggacaucaagauacagcaagaaguucaagccggaaauagcaauaagacccaaagugagggaucaagaagggagaaugaacuauuacuggacacuaguagagccgggagacaaaauaacauucgaagcaacuggaaaucuagugguaccgagauaugcauucgcaauggaaagaaaugcuggaucugguauuaucauuucagauacaccaguccacgauugcaauacaacuugucagacacccaagggugcuauaaacaccagccucccauuucagaauauacauccgaucacaauuggaaaauguccaaaauauguaaaaagcacaaaauugagacuggccacaggauugaggaaugucccgucuauucaaucuagaggccuauuuggggccauugccgguuucauugaagggggguggacagggaugguagauggaugguacgguuaucaccaucaaaaugagcaggggucaggauaugcagccgaccugaagagcacacagaaugccauugacgagauuacuaacaaaguaaauucuguuauugaaaagaugaauacacaguucacagcaguagguaaagaguucaaccaccuggaaaaaagaauagagaauuuaaauaaaaaaguugaugaugguuuccuggacauuuggacuuacaaugccgaacuguugguucuauuggaaaaugaaagaacuuuggacuaccacgauucaaaugugaagaacuuauaugaaaagguaagaagccaguuaaaaaacaaugccaaggaaauuggaaacggcugcuuugaauuuuaccacaaaugcgauaacacgugcauggaaagugucaaaaaugggacuuaugacuacccaaaauacucagaggaagcaaaauuaaacagagaagaaauagaugggguaaagcuggaaucaacaaggauuuaccagauuuuggcgaucuauucaacugucgccaguucauugguacugguagucucccugggggcaaucaguuucuggaugugcucuaaugggucucuacaguguagaauauguauuuaa

SEQ ID NO: 39261 - RNA, 1701 nt, Artificial Sequence
  derived and/or modified CDS sequence (wt) from hemagglutinin__InfluenzaA__AEO01145
augaaggcaauacuaguaguucugcuauauacauuugcaaccgcaaaugcagacacauuauguauagguuaucaugcgaacaauucaacagacacuguagacacaguacuagaaaagaauguaacaguaacacacucuguuaacauucuagaagacaagcauaacgggaaacuaugcaaacuaagagggguagccccauugcauuuggguaaauguaacauugcuggcuggauccugggaaauccagagugugaaucacucuccacagcaagcucaugguccuacauuguggaaacaucuaguucagacaauggaacguguuacccaggagauuucaucgauuaugaggagcuaagagagcaauugagcucagugucaucauuugaaagguuugagauauuccccaagacaaguucauggcccaaucaugacucgaacaaagguguaacggcagcauguccucaugcuggagcaaaaagcuucuacaaaaauuuaauauggcuaguuaaaaaaggaaauucauacccaaagcucagcaaauccuacauuaaugauaaagggaaagaaguccucgugcuauggggcauucaccauccaucuacuagugcugaccaacaaagucucuaucagaaugcagaugcauauguuuuuguggggucaucaagauacagcaagaaguucaagccggaaauagcaauaagacccaaagugagggaucaagaagggagaaugaacuauuacuggacacuaguagagccgggagacaaaauaacauucgaagcaacuggaaaucuagugguaccgagauaugcauucgcaauggaaagaaaugcuggaucugguauuaucauuucagauacaccaguccacgauugcaauacaacuugucagacacccaagggugcuauaaacaccagccucccauuucagaauauacauccgaucacaauuggaaaauguccaaaauauguaaaaagcacaaaauugagacuggccacaggauugaggaaugucccuucuauucaaucuagaggccuauuuggggccauugccgguuucauugaagggggguggacagggaugguagauggaugguacgguuaucaccaucaaaaugagcaggggucaggauaugcagccgaccugaagagcacacagaaugccauugacgagauuacuaacaaaguaaauucuguuauugaaaagaugaauacacaguucacagcaguagguaaagaguucaaccaccuggaaaaaagaauagagaauuuaaauaaaaaaguugaugaugguuuccuggacauuuggacuuacaaugccgaacuguugguucuauuggaaaaugaaagaacuuuggacuaccacgauucaaaugugaagaacuuauaugaaaagguaagaagccagcuaaaaaacaaugccaaggaaauuggaaacggcugcuuugaauuuuaccacaaaugcgauaacacgugcauggaaagugucaaaaaugggacuuaugacuacccaaaauacucagaggaagcaaaauuaaacagagaagaaauagaugggguaaagcuggaaucaacaaggauuuaccagauuuuggcgaucuauucaacugucgccaguucauugguacugguagucucccugggggcaaucaguuucuggaugugcucuaaugggucucuacaguguagaauauguauuuaa

SEQ ID NO: 39262 - RNA, 1701 nt, Artificial Sequence
  derived and/or modified CDS sequence (wt) from hemagglutinin__InfluenzaA__AEO01146
augaaggcaauacuaguaguucugcuauauacauuugcaaccgcaaaugcagacacauuauguauagguuaucaugcgaacaauucaacagacacuguagacacaguacuagaaaagaauguaacaguaacacacucuguuaaccuucuagaagacaagcauaacgggaaacuaugcaaacuaagagggguagccccauugcauuuggguaaauguaacauugcuggcuggauccugggaaauccagagugugaaucacucuccacagcaagcucaugguccuacauuguggaaacaucuaguucagacaauggaacguguuacccaggagauuucaucgauuaugaggagcuaagagagcaauugagcucagugucaucauuugaaagguuugagauauuccccaagacaaguucauggcccaaucaugacucgaacaaagguguaacggcagcauguccucaugcuggagcaaaaagcuucuacaaaaauuuaauauggcuaguuaaaaaaggaaauucauacccaaagcucagcaaauccuacauuaaugauaaagggaaagaaguccucgugcuauggggcauucaccauccaucuacuagugcugaccaacaaagucucuaucagaaugcagaugcauauguuuuuguggggacaucaagauacagcaagaaguucaauccggaaauagcaauaagacccaaagugagggaucaagaagggagaaugaacuauuacuggacacuaguagagccgggagacaaaauaacauucgaagcaacuggaaaucuagugguaccgagauaugcauucgcaauggaaagaaaugcuggaucugguauuaucauuucagauacaccaguccacgauugcaauacaacuugucagacacccaagggugcuauaaacaccagccucccauuucagaauauacauccgaucacaauuggaaaauguccaaaauauguaaaaagcacaaaauugagacuggccacaggauugaggaaugucccgucuauucaaucuagaggccuauuuggggccauugccgguuucauugaagggggguggacagggaugguagauggaugguacgguuaucaccaucaaaaugagcaggggucaggauaugcagccgaccugaagagcacacagaaugccauugacgagauuacuaacaaaguaaauucuguuauugaaaagaugaauacacaguucacagcaguagguaaagaguucaaccaccuggaaaaaagaauagagaauuuaaauaaaaagguugaugaugguuuccuggacauuuggacuuacaaugccgaacuguugguucuauuggaaaaugaaagaacuuuggacuaccacgauucaaaugugaagaacuuauaugaaaagguaagaagccaguuaaaaaacaaugccaaggaaauuggaaacggcugcuuugaauuuuaccacaaaugcgauaacacgugcauggaaagugucaaaaaugggacuuaugacuacccaaaauacucagaggaagcaaaauuaaacagagaagaaauagaugggguaaagcuggaaucaacaaggauuuaccagauuuuggcgaucuauucaacugucgccaguucauugguacugguagucucccugggggcaaucaguuucuggaugugcucuaaugggucucuacaguguagaauauguauuuaa

SEQ ID NO: 39263 - RNA, 1701 nt, Artificial Sequence; identical to SEQ ID NO: 34714
  derived and/or modified CDS sequence (wt) from hemagglutinin__InfluenzaA__AEO01147

SEQ ID NO: 39264 - RNA, 1701 nt, Artificial Sequence; identical to SEQ ID NO: 35772
  derived and/or modified CDS sequence (wt) from hemagglutinin__InfluenzaA__AEO01148

SEQ ID NO: 39265 - RNA, 1701 nt, Artificial Sequence
  derived and/or modified CDS sequence (wt) from hemagglutinin__InfluenzaA__AEO01149
augaaggcaauacuaguaguucugcuauauacauuugcaaccgcaaaugcagacacauuauguauagguuaucaugcgaacaauucaacagacacuguagacacaguacuagaaaagaauguaacaguaacacacucuguuaaccuucuagaagacaagcauaacgggaaacuaugcaaacuaagagggguagccccauugcauuuggguaaauguaacauugcuggcuggauccugggaaauccagagugugaaucacucuccacagcaagcucaugguccuacauuguggaaacaucuaguucagacaauggaacguguuacccaggagauuucaucgauuaugaggagcuaagagagcaauugagcucagugucaucauuugaaagguuugagauauuccccaagacaaguucauggcccaaucaugacucgaacaaagguguaacggcagcauguccucaugcuggagcaaaaagcuucuacaaaaauuuaauauggcuaguuaaaaaaggaaauucauacccaaagcucagcaaauccuacauuaaugauaaagggaaagaaguccucgugcuauggggcauucaccauccaucuacuagugcugaccaacaaagucucuaucagaaugcagaugcauauguuuuuguggggacaucaagauacagcaagaaguucaagccggaaauagcaauaagacccaaagugagggaacaagaagggagaaugaacuauuacuggacacuaguagagccgggagacaaaauaacauucgaagcaacuggaaaucuagugguaccgagauaugcauucgcaauggaaagaaaugcuggaucugguauuaucauuucagauacaccaguccacgauugcaauacaacuugucagacacccaagggugcuauaaacaccagccucccauuucagaauauacauccgaucacaauuggaaaauguccaaaauauguaaaaagcacaaaauugagacuggccacaggauugaggaaugucccgucuauucaaucucgaggccuauuuggggccauugccgguuucauugaagggggguggacagggaugguagauggaugguacgguuaucaccaucaaaaugagcaggggucaggauaugcagccgaccugaagagcacacagaaugccauugacgagauuacuaacaaaguaaauucuguuauugaaaagaugaauacacaguucacagcaguagguaaagaguucaaccaccuggaaaaaagaauagagaauuuaaauaaaaaaguugaugaugguuuccuggacauuuggacuuacaaugccgaacuguugguucuauuggaaaaugaaagaacuuuggacuaccacgauucaaaugugaagaacuuauaugaaaagguaagaagccaguuaaaaaacaaugccaaggaaauuggaaacggcugcuuugaauuuuaccacaaaugcgauaacacgugcauggaaagugucaaaaaugggacuuaugacuacccaaaauacucagaggaagcaaaauuaaacagagaagaaauagaugggguaaagcuggaaucaacaaggauuuaccagauuuuggcgaucuauucaacugucgccaguucauugguacugguagucucccugggggcaaucaguuucuggaugugcucuaaugggucucuacaguguagaauauguauuuaa

SEQ ID NO: 39266 - RNA, 1701 nt, Artificial Sequence; identical to SEQ ID NO: 37929
  derived and/or modified CDS sequence (wt) from hemagglutinin__InfluenzaA__AEO01150

SEQ ID NO: 39267 - RNA, 1701 nt, Artificial Sequence; identical to SEQ ID NO: 34714
  derived and/or modified CDS sequence (wt) from hemagglutinin__InfluenzaA__AEO01151

SEQ ID NO: 39268 - RNA, 1701 nt, Artificial Sequence
  derived and/or modified CDS sequence (wt) from hemagglutinin__InfluenzaA__AEO01152
augaaggcaauacuaauaguucugcuauauacauuugcaaccgcaaaugcagacacauuauguauagguuaucaugcgaacaauucaacagacacuguagacacaguacuagaaaagaauguaacaguaacacacucuguuaaccuucuagaagacaagcauaacgggaaacuaugcaaacuaagagggguagccccauugcauuuggguaaauguaacauugcuggcuggauccugggaaauccagagugugaaucacucuccacagcaagcucaugguccuacauuguggaaacaucuaguucagacaauggaacguguuacccaggagauuucaucgauuaugaggagcuaagagagcaauugagcucagugucaucauuugaaagguuugagauauuccccaagacaaguucauggcccaaucaugacucgaacaaagguguaacggcagcauguccucaugcuggagcaaaaagcuucuacaaaaauuuaauauggcuaguuaaaaaaggaaauucauacccaaagcucagcaaauccuacauuaaugauaaagggaaagaaguccucgugcuauggggcauucaccauccaucuacuagugcugaccaacaaagucucuaucagaaugcagaugcauauguuuuuguggggacaucaagauacagcaagaaguucaagccggaaauagcaauaagacccaaagugaggggacaagaagggagaaugaacuauuacuggacacuaguagagccgggagacaaaauaacauucgaagcaacuggaaaucuagugguaccgagauaugcauucgcaauggaaagaaaugcuggaucugguauuaucauuucagauacaccaguccacgauugcaauacaacuugucagacacccaagggugcuauaaacaccagccucccauuucagaauauacauccgaucacaauuggaaaauguccaaaauauguaaaaagcacaaaauugagacuggccacaggauugaggaaugucccgucuauucaaucuagaggccuauuuggggccauugccgguuucauugaagggggguggacagggaugguagauggaugguacgguuaucaccaucaaaaugagcaggggucaggauaugcagccgaccugaagagcacacagaaugccauugacgagauuacuaacaaaguaaauucuguuauugaaaagaugaauacacaguucacagcaguagguaaagaguucaaccaccuggaaaaaagaauagagaauuuaaauaaaaaaguugaugaugguuuccuggacauuuggacuuacaaugccgaacuguugguucuauuggaaaaugaaagaacuuuggacuaccacgauucaaaugugaagaacuuauaugaaaagguaagaagccaguuaaaaaacaaugccaaggaaauuggaaacggcugcuuugaauuuuaccacaaaugcgauaacacgugcauggaaagugucaaaaaugggacuuaugacuacccaaaauacucagaggaagcaaaauuaaacagagaagaaauagaugggguaaagcuggaaucaacaaggauuuaccagauuuuggcgaucuauucaacugucgccaguucauugguacugguagucucccugggggcaaucaguuucuggaugugcucuaaugggucucuacaguguagaauauguauuuaa

SEQ ID NO: 39269 - RNA, 1701 nt, Artificial Sequence
  derived and/or modified CDS sequence (wt) from hemagglutinin__InfluenzaA__AEO01153
augaaggcaauacuaguaguucugcuauauacauuugcaaccgcaaaugcagacacauuauguauagguuaucaugcgaacaauucaacagacacuguagacacaguacuagaaaagaauguaacaguaacacacucuguuaaccuucuagaagacaagcauaacgggaaacuaugcaaacuaagagggguagccccauugcauuuggguaaauguaacauugcuggcuggauccugggaaauccagagugugaaucacucuccacagcaagcucaugguccuacauuguggaaacaucuaguucagacaauggaacguguuacccaggagauuucaucgauuaugaggagcuaagagagcaauugagcucagugucaucauuugaaagguuugagauauuccccaagacaaguucauggcccaaucaugacucgaacaaagguguaacggcagcauguccucaugcuggagcaaaaagcuucuacaaaaauuuaauauggcuaguuaaaaaaggaaauucauacccaaagcucagcaaauccuacauuaauaauaaagggaaagaaguccucgugcuauggggcauucaccauccaucuacuagugcugaccaacaaagucucuaucagaaugcagaugcauauguuuuuguggggacaucaagauacagcaagaaguucaagccggaaauagcaauaagacccaaagugagggaucaagaagggagaaugaacuauuacuggacacuaguagagccgggagacaaaauaacauucgaagcaacuggaaaucuagugguaccgagauaugcauucgcaauggaaagaaaugcuggaucugguauuaucauuucaaauacaccaguccacgauugcaauacaacuugucagacacccaagggugcuauaaacaccagccucccauuucagaauauacauccgaucacaauuggaaaauguccaaaauauguaaaaagcacaaaauugagacuggccacaggauugaggaaugucccgucuauucaaucuagaggccuauuuggggccauugccgguuucauugaagggggguggacagggaugguagauggaugguacgguuaucaccaucaaaaugagcaggggucaggauaugcagccgaccugaagagcacacagaaugccauugacgagauuacuaacaaaguaaauucuguuauugaaaagaugaauacacaguucacagcaguagguaaagaguucaaccaccuggaaaaaagaauagagaauuuaaauaaaaaaguugaugaugguuuccuggacauuuggacuuacaaugccgaacuguugguucuauuggaaaaugaaagaacuuuggacuaccacgauucaaaugugaagaaccuauaugaaaagguaagaagccaguuaaaaaacaaugccaaggaaauuggaaacggcugcuuugaauuuuaccacaaaugcgauaacacgugcauggaaagugucaaaaaugggacuuaugacuacccaaaauacucagaggaagcaaaauuaaacagagaagaaauagaugggguaaagcuggaaucaacaaggauuuaccagauuuuggcgaucuauucaacugucgccaguucauugguacugguagucucccugggggcaaucaguuucuggaugugcucuaaugggucucuacaguguagaauauguauuuaa

SEQ ID NO: 39270 - RNA, 1701 nt, Artificial Sequence; identical to SEQ ID NO: 34714
  derived and/or modified CDS sequence (wt) from hemagglutinin__InfluenzaA__AEO01154

SEQ ID NO: 39271 - RNA, 1701 nt, Artificial Sequence; identical to SEQ ID NO: 35772
  derived and/or modified CDS sequence (wt) from hemagglutinin__InfluenzaA__AEO01155

SEQ ID NO: 39272 - RNA, 1701 nt, Artificial Sequence; identical to SEQ ID NO: 35772
  derived and/or modified CDS sequence (wt) from hemagglutinin__InfluenzaA__AEO01156

SEQ ID NO: 39273 - RNA, 1701 nt, Artificial Sequence
  derived and/or modified CDS sequence (wt) from hemagglutinin__InfluenzaA__AEO01157
augaaggcaauacuaguaguucugcuauauacauuugcaaccgcaaaugcagacacauuauguauagguuaucaugcgaacaauucaacagacacuguagacacaguacuagaaaagaauguaacaguaacacacucuguuaaccuucuagaagacaagcauaacgggaaacuaugcaaacuaagagggguagccccauugcauuuggguaaauguaacauugcuggcuggauccugggaaauccagagugugaaucacucuccacagcaagcucaugguccuacauuguggaaacaucuaguucagacaauggaacguguuacccaggagauuucaucgauuaugaggagcuaagagagcaauugagcucagugucaucauuugaaagguuugagauauuccccaagacaaguucauggcccaaucaugacucgaacaaagguguaacggcagcauguccccaugcuggagcaaaaagcuucuacaaaaauuuaauauggcuaguuaaaaaaggaaauucauacccaaagcucagcaaauccuacauuaaugauaaagggaaagaaguccucgugcuauggggcauucaccauccaucuacuagugcugaccaacaaagucucuaucagaaugcagaugcauauguuuuuguggggacaucaagauacagcaagaaguucaagccggaaauagcaauaagacccaaagugagggaucaagaagggagaaugaacuauuacuggacacuaguagagccgggagacaaaauaacauucgaagcaacuggaaaucuagugguaccgagauaugcauucgcaauggaaagaaaugcuggaucugguauuaucauuucagauacaccaguccacgauugcaauacaacuugucagacacccaagggugcuauaaacaccagccucccauuucagaauauacauccgaucacaauuggaaaauguccaaaauauguaaaaagcacaaaauugagacuggccacaggauugaggaaugucccgucuauucaaucuagaggccuauuuggggccauugccgguuucauugaagggggguggacagggaugguagauggaugguacgguuaucaccaucaaaaugagcaggggucaggauaugcagccgaccugaagagcacacagaaugccauugacgagauuacuaacaaaguaaauucuguuauugaaaagaugaauacacaguucacagcaguagguaaagaguucaaccaccuggaaaaaagaauagagaauuuaaauaaaaagguugaugaugguuuccuggacauuuggacuuacaaugccgaacuguugguucuauuggaaaaugaaagaacuuuggacuaccacgauucaaaugugaagaacuuauaugaaaagguaagaagccaguuaaaaaacaaugccaaggaaauuggaaacggcugcuuugaauuuuaccacaaaugcgauaacacgugcauggaaagugucaaaaaugggacuuaugacuacccaaaauacucagaggaagcaaaauuaaacagagaagaaauagaugggguaaagcuggaaucaacaaggauuuaccagauuuuggcgaucuauucaacugucgccaguucauugguacugguagucucccugggggcaaucaguuucuggaugugcucuaaugggucucuacaguguagaauauguauuuaa

SEQ ID NO: 39274 - RNA, 1701 nt, Artificial Sequence; identical to SEQ ID NO: 34714
  derived and/or modified CDS sequence (wt) from hemagglutinin__InfluenzaA__AEO01158

SEQ ID NO: 39275 - RNA, 1701 nt, Artificial Sequence; identical to SEQ ID NO: 35308
  derived and/or modified CDS sequence (wt) from hemagglutinin__InfluenzaA__AEO01159

SEQ ID NO: 39276 - RNA, 1701 nt, Artificial Sequence
  derived and/or modified CDS sequence (wt) from hemagglutinin__InfluenzaA__AEO01160
augaaggcaauacuaguagcucugcuauauacauuugcaaccgcaaaugcagacacauuauguauagguuaucaugcgaacaauucaacagacacuguagacacaguacuagaaaagaauguaacaguaacacacucuguuaaccuucuagaagacaagcauaacgggaaacuaugcaaacuaagagggguagccccauugcauuuggguaaauguaacauugcuggcuggauccugggaaauccagagugugaaucacucuccacagcaagcucaugguccuacauuguggaaacaucuaguucagacaauggaacguguuacccaggagauuucaucgauuaugaggagcuaagagagcaauugagcucagugucaucauuugaaagguuugagauauuccccaagacaaguucauggcccaaucaugacucgaacaaagguguaacggcagcauguccucaugcuggagcaaaaagcuucuacaaaaauuuaauauggcuaguuaaaaaaggaaauucauacccaaagcucagcaaauccuacauuaaugauaaagggaaagaaguccucgugcuauggggcauucaccauccaucuacuagugcugaccaacaaagucucuaucagaaugcagaugcauauguuuuuguggggacaucaagauacagcaagaaguucaagccggaaauagcaauaagacccaaagugagggaacaagaagggagaaugaacuauuacuggacacuaguagagccgggagacaaaauaacauucgaagcaacuggaaaucuagugguaccgagauaugcauucgcaauggaaagaaaugcuggaucugguauuaucauuucagauacaccaguccacgauugcaauacaacuugucagacacccaagggugcuauaaacaccagccucccauuucagaauauacauccgaucacaauuggaaaauguccaaaauauguaaaaagcacaaaauugagacuggccacaggauugaggaaugucccgucuauucaaucuagaggccuauuuggggccauugccgguuucauugaagggggguggacagggaugguagauggaugguacgguuaucaccaucaaaaugagcaggggucaggauaugcagccgaccugaagagcacacagaaugccauugacgagauuacuaacaaaguaaauucuguuauugaaaagaugaauacacaguucacagcaguagguaaagaguucaaccaccuggaaaaaagaauagagaauuuaaauaaaaaaguugaugaugguuuccuggacauuuggacuuacaaugccgaacuguugguucuauuggaaaaugaaagaacuuuggacuaccacgauucaaaugugaagaacuuauaugaaaagguaagaagccaguuaaaaaacaaugccaaggaaauuggaaacggcugcuuugaauuuuaccacaaaugcgauaacacgugcauggaaagugucaaaaaugggacuuaugacuacccaaaauacucagaggaagcaaaauuaaacagagaagaaauagaugggguaaagcuggaaucaacaaggauuuaccagauuuuggcgaucuauucaacugucgccaguucauugguacugguagucucccugggggcaaucaguuucuggaugugcucuaaugggucucuacaguguagaauauguauuuaa

SEQ ID NO: 39277 - RNA, 1701 nt, Artificial Sequence; identical to SEQ ID NO: 34681
  derived and/or modified CDS sequence (wt) from hemagglutinin__InfluenzaA__AEO01161

SEQ ID NO: 39278 - RNA, 1701 nt, Artificial Sequence; identical to SEQ ID NO: 35772
  derived and/or modified CDS sequence (wt) from hemagglutinin__InfluenzaA__AEO01162

SEQ ID NO: 39279 - RNA, 1701 nt, Artificial Sequence; identical to SEQ ID NO: 35772
  derived and/or modified CDS sequence (wt) from hemagglutinin__InfluenzaA__AEO01163

SEQ ID NO: 39280 - RNA, 1701 nt, Artificial Sequence; identical to SEQ ID NO: 39265
  derived and/or modified CDS sequence (wt) from hemagglutinin__InfluenzaA__AEO01164

SEQ ID NO: 39281 - RNA, 1701 nt, Artificial Sequence
  derived and/or modified CDS sequence (wt) from hemagglutinin__InfluenzaA__AEO01165
augaaggcaauacuaguaguucugcuauauacauuugcaaccgcaaaugcagacacauuauguauagguuaucaugcgaacaauucaacagacacuguagacacaguacuagaaaagaauguaacaguaacacacucuguuaaccuucuagaagacaagcauaacgggaaacuaugcaaacuaagagggguagccccauugcauuuggguaaauguaacauugcuggcuggauccugggaaauccagagugugaaucacucuccacagcaagcucaugguccuacauuguugaaacaucuaguucagacaauggaacguguuacccaggagauuucaucgauuaugaggagcuaagagagcaauugagcucagugucaucauuugaaagguuugagauauuccccaagacaaguucauggcccaaucaugacucgaacaaagguguaacggcagcauguccucaugcuggagcaaaaagcuucuacaaaaauuuaauauggcuaguuaaaaaaggaaauucauacccaaaguucagcaaauccuacauuaaugauaaagggaaagaaguccucgugcuauggggcauucaccauccaucuacuagugcugaccaacaaagucucuaucagaaugcagaugcauauguuuuuguggggacaucaagauacagcaagaaguucaagccggaaauagcaauaagacccaaagugagggaucaagaagggagaaugaacuauuacuggacacuaguagagccgggagacaaaauaacauucgaagcaacuggaaaucuagugguaccgagauaugcauucgcaauggaaagaaaugcuggaucugguauuaucauuucagauacaccaguccacgauugcaauacaacuugucagacacccaagggugcuauaaacaccagccucccauuucagaauauacauccgaucacaauuggaaaauguccaaaauauguaaaaagcacaaaauugagacuggccacaggauugaggaaugucccgucuauucaaucuagaggccuauuuggggccauugccgguuucauugaagggggguggacagggaugguagauggaugguacgguuaucaccaucaaaaugagcaggggucaggauaugcagccgaccugaagagcacacagaaugccauugacgagauuacuaacaaaguaaauucuguuauugaaaagaugaauacacaguucacagcgguagguaaagaguucaaccaccuggaaaaaagaauagagaauuuaaauaaaaaaguugaugaugguuuccuggacauuuggacuuacaaugccgaacuguugguucuauuggaaaaugaaagaacuuuggacuaccacgauucaaaugugaagaacuuauaugaaaagguaagaagccaguuaaaaaacaaugccaaggaaauuggaaacggcugcuuugaauuuuaccacaaaugcgauaacacgugcauggaaagugucaaaaaugggacuuaugacuacccaaaauacucagaggaagcaaaauuaaacagagaagaaauagaugggguaaagcuggaaucaacaaggauuuaccagauuuuggcgaucuauucaacugucgccaguucauugguacugguagucucccugggggcaaucaguuucuggaugugcucuaaugggucucuacaguguagaauauguauuuaa

SEQ ID NO: 39282 - RNA, 1701 nt, Artificial Sequence; identical to SEQ ID NO: 35772
  derived and/or modified CDS sequence (wt) from hemagglutinin__InfluenzaA__AEO01166

SEQ ID NO: 39283 - RNA, 1701 nt, Artificial Sequence
  derived and/or modified CDS sequence (wt) from hemagglutinin__InfluenzaA__AEO01167
augaaggcaauacuaguaguucugcuauauacauuugcaaccgcaaaugcagacacauuauguauagguuaucaugcgaacaauucaacagacacuguagacacaguacuagaaaagaauguaacaguaacacacucuguuaaccuucuagaagacaagcauaacgggaaacuaugcaaacuaagagggguagccccauugcauuuggguaaauguaacauugcuggcuggauccugggaaauccagagugugaaucacucuccacagcaagcucaugguccuacauuguggaaacaucuaguucagacaauggaacguguuacccaggagauuucaucgauuaugaggagcuaagagagcaauugagcucagugucaucauuugaaagguuugagauauuccccaagacaaguucauggcccaaucaugacucgaacaaagguguaacggcagcauguccucaugcuggagcaaaaagcuucuacaaaaauuuaauauggcuaguuaaaaaaggaaauucauacccaaagcucagcaaauccuacauuaaugauaaagggaaagaaguccucgugcuauggggcauucaccauccaucuacuagugcugaccaacaaagucucuaucagaaugcagaugcauauguuuuuguggggacaucaagauacagcaagaaguucaagccggaaauagcaauaagacccaaagugagggaacaagaagggagaaugaacuauuacuggacacuaguagagccgggagacaaaauaacauucgaagcaacuggaaaucuagugguaccgagauaugcauucgcaauggaaagaaaugcuggaucugguauuaucauuucagauacaucaguccacgauugcaauacaacuugucagacacccaagggugcuauaaacaccagccucccauuucagaauauacauccgaucacaauuggaaaauguccaaaauauguaaaaagcacaaaauugagacuggccacaggauugaggaaugucccgucuauucaaucuagaggccuauuuggggccauugccgguuucauugaagggggguggacagggaugguagauggaugguacgguuaucaccaucaaaaugagcaggggucaggauaugcagccgaccugaagagcacacagaaugccauugacgagauuacuaacaaaguaaauucuguuauugaaaagaugaauacacaguucacagcaguagguaaagaguucaaccaccuggaaaaaagaauagagaauuuaaauaaaaaaguugaugaugguuuccuggacauuuggacuuacaaugccgaacuguugguucuauuggaaaaugaaagaacuuuggacuaccacgauucaaaugugaagaacuuauaugaaaagguaagaagccaguuaaaaaacaaugccaaggaaauuggaaacggcugcuuugaauuuuaccacaaaugcgauaacacgugcauggaaagugucaaaaaugggacuuaugacuacccaaaauacucagaggaagcaaaauuaaacagagaagaaauagaugggguaaagcuggaaucaacaaggauuuaccagauuuuggcgaucuauucaacugucgccaguucauugguacugguagucucccugggggcaaucaguuucuggaugugcucuaaugggucucuacaguguagaauauguauuuaa

SEQ ID NO: 39284 - RNA, 1701 nt, Artificial Sequence; identical to SEQ ID NO: 34714
  derived and/or modified CDS sequence (wt) from hemagglutinin__InfluenzaA__AEO01168

SEQ ID NO: 39285 - RNA, 1701 nt, Artificial Sequence; identical to SEQ ID NO: 35772
  derived and/or modified CDS sequence (wt) from hemagglutinin__InfluenzaA__AEO01169

SEQ ID NO: 39286 - RNA, 1701 nt, Artificial Sequence
  derived and/or modified CDS sequence (wt) from hemagglutinin__InfluenzaA__AEO01170
augaaggcaauacuaguaguucugcuauauacauuugcaaccgcaaaugcagacacauuauguauagguuaucaugcgaacaauucaacagacacuguagacacaguacuagaaaagaauguaacaguaacacacucuguuaaccuucuagaagacaagcauaacgggaaacuaugcaaacuaagagggguagccccauugcauuuggguaaauguaacauugcuggcuggauccugggaaauccagagugugaaucacucuccacagcaagcucaugguccuacauuguggaaacaucuaguucagacaauggaacguguuacccaggagauuucaucgauuaugaggagcuaagagagcaauugagcucagugucaucauuugaaagguuugagauauuccccaagacaaguucauggcccaaucaugacucgaacaaagguguaacggcagcauguccucaugcuggagcaaaaagcuucuacaaaaauuuaauauggcuaguuaaaaaaggaaauucauacccaaagcucagcaaauccuacauuaaugauaaagggaaagaaguccucgugcuauggggcauucaccauccaucuacuagugcugaccaacaaagucucuaucagaaugcagaugcauauguuuuuguggggacaucaagauacagcaagaaguucaagccggaaauagcaauaagacccaaagugagggaacaagaagggagaaugaacuauuacuggacacuaguagagccgggagacaaaauaacauucgaagcaacuggaaaucuagugguaccgagauaugcauucgcaauggaaagaaaugcuggaucugguauuaucauuucagauacaccaguccacgauugcaauacaacuugucagacacccaagggugcuauaaacaccagccucccauuucagaauauacauccgaucacaauuggaaaauguccaaaauauguaaaaagcacaaaauugagacuggccacaggauugaggaaugucccgucuauucaaucuagaggccuauuuggggccauugccgguuucauugaagggggguggacagggaugguagauggaugguacgguuaucaccaucaaaaugagcaggggucaggauaugcagccgaccugaagagcacacagaaugccauugacgagauuacuaacaaaguaaauucuguuauugaaaagaugaauacacaguucacagcaguagguaaagaguucaaccaccuggaaaaaagaauagagaauuuaaauaaaaaaguugaugaugguuucuuggacauuuggacuuacaaugccgaacuguugguucuauuggaaaaugaaagaacuuuggacuaccacgauucaaaugugaagaacuuauaugaaaagguaagaagccaguuaaaaaacaaugccaaggaaauuggaaacggcugcuuugaauuuuaccacaaaugcgauaacacgugcauggaaagugucaaaaaugggacuuaugacuacccaaaauacucagaggaagcaaaauuaaacagagaagaaauagaugggguaaagcuggaaucaacaaggauuuaccagauuuuggcgaucuauucaacugucgccaguucauugguacugguagucucccugggggcaaucaguuucuggaugugcucuaaugggucucuacaguguagaauauguauuuaa

SEQ ID NO: 39287 - RNA, 1701 nt, Artificial Sequence
  derived and/or modified CDS sequence (wt) from hemagglutinin__InfluenzaA__AEO01171
augaaggcaauacuaguaguucugcuauauacauuugcaaccgcaaaugcagacacauuauguauagguuaucaugcgaacaauucaacagacacuguagacacaguacuagaaaagaauguaacaguaacacacucuguuaaccuucuagaagacaagcauaacgggaaacuaugcaaacuaagagggguagccccauugcauuuggguaaauguaacauugcuggcuggauccugggaaauccagagugugaaucacucuccacagcaagcucaugguccuacauuguggaaacaucuaguucagacaauggaacguguuacccaggagauuucaucgauuaugaggagcuaagagagcaauugagcucagugucaucauuugaaagguuugagauauuccccaagacaaguucauggcccaaucaugacucgaacaaagguguaacggcagcauguccucaugcuggagcaaaaagcuucuacaaaaauuuaauauggcuaguuaaaaaaggaaauucauacccaaagcucagcaaauccuacauuaaugauaaagggaaagaaguccucgugcuauggggcauucaccauccaucuacuagugcugaccaacaaagucucuaucagaaugcagaugcauauguuuuuguggggacaucaagauacagcaagaaguucaagccggaaauagcaauaagacccaaagugagggaacaagaagggagaaugaacuauuacuggacacuaguagagccgggagacaaaauaacauucgaagcaacuggaaaucuagugguaccgagauaugcauucgcaauggaaagaaaugcuggaucugguauuaucauuucagauacaccaguccacgauugcaauacaaccugucagacacccaagggugcuauaaacaccagccucccauuucagaauauacauccgaucacaauuggaaaauguccaaaauauguaaaaagcacaaaauugagacuggccacaggauugaggaaugucccgucuauucaaucuagaggccuauuuggggccauugccgguuucauugaagggggguggacagggaugguagauggaugguacgguuaucaccaucaaaaugagcaggggucaggauaugcagccgaccugaagagcacacagaaugccauugacgagauuacuaacaaaguaaauucuguuauugaaaagaugaauacacaguucacagcaguagguaaagaguucaaccaccuggaaaaaagaauagagaauuuaaauaaaaaaguugaugaugguuuccuggacauuuggacuuacaaugccgaacuguugguucuauuggaaaaugaaagaacuuuggacuaccacgauucaaaugugaagaacuuauaugaaaagguaagaagccaguuaaaaaacaaugccaaggaaauuggaaacggcugcuuugaauuuuaccacaaaugcgauaacacgugcauggaaagugucaaaaaugggacuuaugacuacccaaaauacucagaggaagcaaaauuaaacagagaagaaauagaugggguaaagcuggaaucaacaaggauuuaccagauuuuggcgaucuauucaacugucgccaguucauugguacugguagucucccugggggcaaucaguuucuggaugugcucuaaugggucucuacaguguagaauauguauuuaa

SEQ ID NO: 39288 - RNA, 1701 nt, Artificial Sequence
  derived and/or modified CDS sequence (wt) from hemagglutinin__InfluenzaA__AEO01172
augaaggcaauacuaguaguucugcuauauacauuugcaaccgcaaaugcagacacauuauguauagguuaucaugcgaacaauucaacagacacuguagacacaguacuagaaaagaauguaacaguaacacacucuguuaaccuucuagaagacaagcauaacgggaaacuaugcaaacuaagagggguagccccauugcauuuggguaaauguaacauugcuggcuggauccugggaaauccagagugugaaucacucuccacagcaagcucaugguccuacauuguggaaacaucuaguucagacaauggaacguguuacccaggagauuucaucgauuaugaggagcuaagagagcaauugagcucagugucaucauuugaaagguuugagauauuccccaagacaaguucauggcccaaucaugacucgaacaaagguguaacggcagcauguccucaugcuggagcaaaaagcuucuacaaaaauuuaauauggcuaguuaaaaaaggaaauucauacccaaagcucagcaaauccuacauuaaugauaaagggaaagaaguccuugugcuauggggcauucaccauccaucuacuagugcugaccaacaaagucucuaucagaaugcagaugcauauguuuuuguggggacaucaagauacagcaagaaguucaagccggaaauagcaauaagacccaaagugagggaucaagaagggagaaugaacuauuacuggacacuaguagagccgggagacaaaauaacauucgaagcaacuggaaaucuagugguaccgagauaugcauucgcaauggaaagaaaugcuggaucugguauuaucauuucagauacaccaguccacgauugcaauacaacuugucagacacccaagggugcuauaaacaccagccucccauuucagaauauacauccgaucacaauuggaaaauguccaaaauauguaaaaagcacaaaauugagacuggccacaggauugaggaaugucccgucuauucaaucuagaggccuauuuggggccauugccgguuucauugaagggggguggacagggaugguagauggaugguacgguuaucaccaucaaaaugagcaggggucaggauaugcagccgaccugaagagcacacagaaugccauugacgagauuacuaacaaaguaaauucuguuauugaaaagaugaauacacaguucacagcaguagguaaagaguucaaccaccuggaaaaaagaauagagaauuuaaauaaaaaaguugaugaugguuuccuggacauuuggacuuacaaugccgaacuguugguucuauuggaaaaugaaagaacuuuggacuaccacgauucaaaugugaagaacuuauaugaaaagguaagaagccaguuaaaaaacaaugccaaggaaauuggaaacggcugcuuugaauuuuaccacaaaugcgauaacacgugcauggaaagugucaaaaaugggacuuaugacuacccaaaauacucagaggaagcaaaauuaaacagagaagaaauagaugggguaaagcuggaaucaacaaggauuuaccagauuuuggcgaucuauucaacugucgccaguucauugguacugguagucucccugggggcaaucaguuucuggaugugcucuaaugggucucuacaguguagaauauguauuuaa

SEQ ID NO: 39289 - RNA, 1701 nt, Artificial Sequence
  derived and/or modified CDS sequence (wt) from hemagglutinin__InfluenzaA__AEO01173
augaaggcaauacuaguaguucugcuauauacauuugcaaccgcaaaugcagacacauuauguauagguuaucaugcgaacaauucaacagacacuguagacacaguacuagaaaagaauguaacaguaacacacucuguuaaccuucuagaagacaagcauaacgggaaacuaugcaaacuaagagggguagcuccauugcauuuggguaaauguaacauugcuggcuggauccugggaaauccagagugugaaucacucuccacagcaagcucaugguccuacauuguggaaacaucuaguucagacaauggaacguguuacccaggagauuucaucgauuaugaggagcuaagagagcaauugagcucagugucaucauuugaaagguuugagauauuccccaagacaaguucauggcccaaucaugacucgaacaaagguguaacggcagcauguccucaugcuggagcaaaaagcuucuacaaaaauuuaauauggcuaguuaaaaaaggaaauucauacccaaagcucagcaaauccuacauuaaugauaaagggaaagaaguccucgugcuauggggcauucaccauccaucuacuagugcugaccaacaaagucucuaucagaaugcagaugcauauguuuuuguggggacaucaagauacagcaagaaguucaagccggaaauagcaauaagacccaaagugagggaucaagaagggagaaugaacuauuacuggacacuaguagagccgggaggcaaaauaacauucgaagcaacuggaaaucuagugguaccgagauaugcauucgcaauggaaagaaaugcuggaucugguauuaucauuucagauacaccaguccacgauugcaauacaacuugucagacacccaagggugcuauaaacaccagccucccauuucagaauauacauccgaucacaauuggaaaauguccaaaauauguaaaaagcacaaaauugagacuggccacaggauugaggaaugucccgucuauucaaucuagaggccuauuuggggccauugccgguuucauugaagggggguggacagggaugguagauggaugguacgguuaucaccaucaaaaugagcaggggucaggguaugcagccgaccugaagagcacacagaaugccauugacgagauuacuaacaaaguaaauucuguuauugaaaagaugaauacacaguucacagcaguagguaaagaauucaaccaccuggaaaaaagaauagagaauuuaaauaaaaaaguugaugaugguuuccuggacauuuggacuuacaaugccgaacuguugguucuauuggaaaaugaaagaacuuuggacuaccacgauucaaaugugaagaacuuauaugaaaagguaagaagccaguuaaaaaacaaugccaaggaaauuggaaacggcugcuuugaauuuuaccacaaaugcgauaacacgugcauggaaagugucaaaaaugggacuuaugacuacccaaaauacucagaggaagcaaaauuaaacagagaagaaauagaugggguaaagcuggaaucaacaaggauuuaccagauuuuggcgaucuauucaacugucgccaguucauugguacugguagucucccugggggcaaucaguuucuggaugugcucuaaugggucucuacaguguagaauauguauuuaa

SEQ ID NO: 39290 - RNA, 1701 nt, Artificial Sequence
  derived and/or modified CDS sequence (wt) from hemagglutinin__InfluenzaA__AEO01174
augaaggcaauacuaguaguucugcuauauacauuugcaaccgcaaaugcagacacauuauguauagguuaucaugcgaacaauucaacagacacuguagacacaguacuagaaaagaauguaacaguaacacacucuguuaaccuucuagaagacaagcauaacgggaaacuaugcaaacuaagagggguagccccauugcauuuggguaaauguaacauugcuggcuggauccugggaaauccagagugugaaucacucuccacagcaagcucaugguccuacauuguggaaacaucuaguucaggcaauggaacguguuacccaggagauuucaucgauuaugaggagcuaagagagcaauugagcucagugucaucauuugaaagguuugagauauuccccaagacaaguucauggcccaaucaugacucgaacaaagguguaacggcagcauguccucaugcuggagcaaaaagcuucuacaaaaauuuaauauggcuaguuaaaaaaggaaauucauacccaaagcucagcaaauccuacauuaaugauaaagggaaagaaguccucgugcuauggggcauucaccauccaucuacuagugcugaccaacaaagucucuaucagaaugcagaugcauauguuuuuguggggacaucaagauacagcaagaaguucaagccggaaauagcaauaagacccaaagugagggaacaagaagggagaaugaacuauuacuggacacuaguagagccgggagacaaaauaacauucgaagcaacuggaaaucuagugguaccgagauaugcauucgcaauggaaagaaaugcuggaucugguauuaucauuucagauacaccaguccacgauugcaauacaacuugucagacacccaagggugcuauaaacaccagccucccauuucagaauauacauccgaucacaauuggaaaauguccaaaauauguaaaaagcacaaaauugagacuggccacaggauugaggaaugucccgucuauucaaucuagaggccuauuuggggccauugccgguuucauugaagggggguggacagggaugguagauggaugguacgguuaucaccaucaaaaugagcaggggucaggauaugcagccgaccugaagagcacacagaaugccauugacgagauuacuaacaaaguaaauucuguuauugaaaagaugaauacacaguucacagcaguagguaaagaguucaaccaccuggaaaaaagaauagagaauuuaaauaaaaaaguugaugaugguuuccuggacauuuggacuuacaaugccgaacuguugguucuauuggaaaaugaaagaacuuuggacuaccacgauucaaaugugaagaacuuauaugaaaagguaagaagccaguuaaaaaacaaugccaaggaaauuggaaacggcugcuuugaauuuuaccacaaaugcgauaacacgugcauggaaagugucaaaaaugggacuuaugacuacccaaaauacucagaggaagcaaaauuaaacagagaagaaauagaugggguaaagcuggaaucaacaaggauuuaccagauuuuggcgaucuauucaacugucgccaguucauugguacugguagucucccugggggcaaucaguuucuggaugugcucuaaugggucucuacaguguagaauauguauuuaa

SEQ ID NO: 39291 - RNA, 1701 nt, Artificial Sequence; identical to SEQ ID NO: 34681
  derived and/or modified CDS sequence (wt) from hemagglutinin__InfluenzaA__AEO01176

SEQ ID NO: 39292 - RNA, 1701 nt, Artificial Sequence; identical to SEQ ID NO: 34681
  derived and/or modified CDS sequence (wt) from hemagglutinin__InfluenzaA__AEO01177

SEQ ID NO: 39293 - RNA, 1701 nt, Artificial Sequence
  derived and/or modified CDS sequence (wt) from hemagglutinin__InfluenzaA__AEO01179
augaaggcaauacuaguaguucugcuauauacauuugcaaccgcaaaugcagacacauuauguauagguuaucaugcgaacaauucaacagacacuguagacacaguacuagaaaagaauguaacaguaacacacucuguuaaccuucuagaagacaagcauaacgggaaacuaugcaaacuaagagggguagccccauugcauuuggguaaauguaacauugcuggcuggauccugggaaauccagagugugaaucacucuccacagcaagcucaugguccuacauuguggaaacaucuaguucagacaauggaacguguuacccaggagauuucaucgauuaugaggagcuaagagagcaauugagcucagugucaucauuugaaagguuugagauauuccccaagacaaguucauggcccaaucaugacucgaacaaagguguaacggcagcauguccucaugcuggagcaaaaagcuucuacaaaaauuuaauauggcuaguuaaaaaaggaaauucauacccaaagcucagcaaauccuacauuaaugauaaagggaaagaaguccucgugcuauggggcauucaccauccaucuacuagugcugaccaacaaagucucuaucagaaugcagaugcauauguuuuuguggggacaucaagauacagcaagaaguucaagccggaaauagcaauaagacccaaagugagggaacaagaagggagaaugaacuauuacuggacacuaguagagccgggagacaaaauaacauucgaagcaacuggaaaucuagugguaccgagauaugcauucgcaauggaaagaaaugcuggaucugguauuaucauuucagauacaccaguccacgauugcaauacaacuugucagacacccaagggugcuauaaacaccagccucccauuucagaauauacauccgaucacaauuggaaaauguccaaaauauguaaaaagcacaaaauugaggcuggccacaggauugaggaaugucccgucuauucaaucuagaggccuauuuggggccauugccgguuucauugaagggggguggacagggaugguagauggaugguacgguuaucaccaucaaaaugagcaggggucaggauaugcagccgaccugaagagcacacagaaugccauugacgagauuacuaacaaaguaaauucuguuauugaaaagaugaauacacaguucacagcaguagguaaagaguucaaccaccuggaaaaaagaauagagaauuuaaauaaaaaaguugaugaugguuuccuggacauuuggacuuacaaugccgaacuguugguucuauuggaaaaugaaagaacuuuggacuaccacgauucaaaugugaagaacuuauaugaaaagguaagaagccaguuaaaaaacaaugccaaggaaauuggaaacggcugcuuugaauuuuaccacaaaugcgauaacacgugcauggaaagugucaaaaaugggacuuaugacuacccaaaauacucagaggaagcaaaauuaaacagagaagaaauagaugggguaaagcuggaaucaacaaggauuuaccagauuuuggcgaucuauucaacugucgccaguucauugguacugguagucucccugggggcaaucaguuucuggaugugcucuaaugggucucuacaguguagaauauguauuuaa

SEQ ID NO: 39294 - RNA, 1701 nt, Artificial Sequence; identical to SEQ ID NO: 39265
  derived and/or modified CDS sequence (wt) from hemagglutinin__InfluenzaA__AEO01180

SEQ ID NO: 39295 - RNA, 1701 nt, Artificial Sequence; identical to SEQ ID NO: 39293
  derived and/or modified CDS sequence (wt) from hemagglutinin__InfluenzaA__AEO01181

SEQ ID NO: 39296 - RNA, 1701 nt, Artificial Sequence; identical to SEQ ID NO: 35772
  derived and/or modified CDS sequence (wt) from hemagglutinin__InfluenzaA__AEO01182

SEQ ID NO: 39297 - RNA, 1701 nt, Artificial Sequence; identical to SEQ ID NO: 34681
  derived and/or modified CDS sequence (wt) from hemagglutinin__InfluenzaA__AEO01183

SEQ ID NO: 39298 - RNA, 1701 nt, Artificial Sequence
  derived and/or modified CDS sequence (wt) from hemagglutinin__InfluenzaA__AEO01184
augaaggcaauacuaguaguucugcuauauacauuugcaaccgcaaaugcagacacauuauguauagguuaucaugcgaacaauucaacagacacuguagacacaguacuagaaaagaauguaacaguaacacacucuguuaaccuucuagaagacaagcauaacgggaaacuaugcaaacuaagagggguagccccauugcauuuggguaaauguaacauugcuggcuggauccugggaaauccagagugugaaucacucuccacagcaagcucaugguccuacauuguggaaacaucuaguucagacaauggaacguguuacccaggagauuucaucgauuaugaggagcuaagagagcaauugagcucagugucaucauuugaaagguuugagauauuccccaagacaaguucauggcccaaucaugacucgaacaaagguguaacagcagcauguccucaugcuggagcaaaaagcuucuacaaaaauuuaauauggcuaguuaaaaaaggaaauucauacccaaagcucagcaaauccuacauuaaugauaaagggaaagaaguccucgugcuauggggcauucaccauccaucuacuagugcugaccaacaaagucucuaucagaaugcagaugcauauguuuuuguggggacaucaagauacagcaagaaguucaagccggaaauagcaauaagacccaaagugagggaacaagaagggagaaugaacuauuacuggacacuaguagagccgggagacaaaauaacauucgaagcaacuggaaaucuagugguaccgagauaugcauucgcaauggaaagaaaugcuggaucugguauuaucauuucagauacaccaguccacgauugcaauacaacuugucagacacccaagggugcuauaaacaccagccucccauuucagaauauacauccgaucacaauuggaaaauguccaaaauauguaaaaagcacaaaauugagacuggccacaggauugaggaaugucccgucuauucaaucuagaggccuauuuggggccauugccgguuucauugaagggggguggacagggaugguagauggaugguacgguuaucaccaucaaaaugagcaggggucaggauaugcagccgaccugaagagcacacagaaugccauugacgagauuacuaacaaaguaaauucuguuauugaaaagaugaauacacaguucacagcaguagguaaagaguucaaccaccuggaaaaaagaauagagaauuuaaauaaaaaaguugaugaugguuuccuggacauuuggacuuacaaugccgaacuguugguucuauuggaaaaugaaagaacuuuggacuaccacgauucaaaugugaagaacuuauaugaaaagguaagaagccaguuaaaaaacaaugccaaggaaauuggaaacggcugcuuugaauuuuaccacaaaugcgauaacacgugcauggaaagugucaaaaaugggacuuaugacuacccaaaauacucagaggaagcaaaauuaaacagagaagaaauagaugggguaaagcuggaaucaacaaggauuuaccagauuuuggcgaucuauucaacugucgccaguucauugguacugguagucucccugggggcaaucaguuucuggaugugcucuaaugggucucuacaguguagaauauguauuuaa

SEQ ID NO: 39299 - RNA, 1701 nt, Artificial Sequence; identical to SEQ ID NO: 39181
  derived and/or modified CDS sequence (wt) from hemagglutinin__InfluenzaA__AEO01185

SEQ ID NO: 39300 - RNA, 1701 nt, Artificial Sequence; identical to SEQ ID NO: 39181
  derived and/or modified CDS sequence (wt) from hemagglutinin__InfluenzaA__AEO01186

SEQ ID NO: 39301 - RNA, 1701 nt, Artificial Sequence; identical to SEQ ID NO: 39181
  derived and/or modified CDS sequence (wt) from hemagglutinin__InfluenzaA__AEO01187

SEQ ID NO: 39302 - RNA, 1701 nt, Artificial Sequence; identical to SEQ ID NO: 39180
  derived and/or modified CDS sequence (wt) from hemagglutinin__InfluenzaA__AEO01188

SEQ ID NO: 39303 - RNA, 1701 nt, Artificial Sequence; identical to SEQ ID NO: 39181
  derived and/or modified CDS sequence (wt) from hemagglutinin__InfluenzaA__AEO01189

SEQ ID NO: 39304 - RNA, 1701 nt, Artificial Sequence; identical to SEQ ID NO: 39182
  derived and/or modified CDS sequence (wt) from hemagglutinin__InfluenzaA__AEO01191

SEQ ID NO: 39305 - RNA, 1701 nt, Artificial Sequence; identical to SEQ ID NO: 34681
  derived and/or modified CDS sequence (wt) from hemagglutinin__InfluenzaA__AEO01192

SEQ ID NO: 39306 - RNA, 1701 nt, Artificial Sequence
  derived and/or modified CDS sequence (wt) from hemagglutinin__InfluenzaA__AEO01193
augaaggcaauacuaguaguucugcuauauacauuugcaaccgcaaaugcagacacauuauguauagguuaucaugcgaacaauucaacagacacuguagacacaguacuagaaaagaauguaacaguaacacacucuguuaaccuucuagaagacaagcauaacgggaaacuaugcaaacuaagagggguagccccauugcauuuggguaaauguaacauugcuggcuggauccugggaaauccagagugugaaucacucuccacagcaagcucaugguccuacauuguggaaacaucuaguucagacaauggaacguguuacccaggagauuucaucgauuaugaggagcuaagagagcaauugagcucagugucaucauuugaaagguuugagauauuccccaagacaaguucauggcccaaucaugacucgaacaaagguguaacggcagcauguccucaugcuggagcaaaaagcuucuacaaaaauuuaauauggcuaguuaaaaaagggaauucauacccaaagcucagcaaauccuacauuaaugauaaagggaaagaaguccucgugcuauggggcauucaccauccaucuacuaaugcugaccaacaaagucucuaucagaaugcagaugcauauguuuuuguggggacaucaagauacagcaagaaguucaagccggaaauagcaauaagacccaaagugagggaucaagaagggagaaugaacuauuacuggacacuaguagagccgggagacaaaauaacauucgaagcaacuggaaaucuagugguaccgagauaugcauucgcaauggaaagaaaugcuggaucugguauuaucauuucagauacaccaguccacgauugcaauacaacuugucagacacccaagggugcuauaaacaccagccucccauuucagaauauacauccgaucacaauuggaaaauguccaaaauauguaaaaagcacaaaauugagacuggccacaggauugaggaaugucccgucuauucaaucuagaggccuauuuggggccauugccgguuucauugaagggggguggacagggaugguagauggaugguacgguuaucaccaucaaaaugagcaggggucaggauaugcagccgaccugaagagcacacagaaugccauugacgagauuacuaacaaaguaaauucuguuauugaaaagaugaauacacaguucacagcaguagguaaagaguucaaccaccuggaaaaaagaauagagaauuuaaauaaaaagguugaugaugguuuccuggacauuuggacuuacaaugccgaacuguugguucuauuggaaaaugaaagaacuuuggacuaccacgauucaaaugugaagaacuuauaugaaaagguaagaagccaguuaaaaaacaaugccaaggaaauuggaaacggcugcuuugaauuuuaccacaaaugcgauaacacgugcauggaaagugucaaaaaugggacuuaugacuacccaaaauacucagaggaagcaaaauuaaacagagaagaaauagaugggguaaagcuggaaucaacaaggauuuaccagauuuuggcgaucuauucaacugucgccaguucauugguacugguagucucccugggggcaaucaguuucuggaugugcucuaaugggucucuacaguguagaauauguauuuaa

SEQ ID NO: 39307 - RNA, 1701 nt, Artificial Sequence; identical to SEQ ID NO: 35772
  derived and/or modified CDS sequence (wt) from hemagglutinin__InfluenzaA__AEO01194

SEQ ID NO: 39308 - RNA, 1701 nt, Artificial Sequence; identical to SEQ ID NO: 35772
  derived and/or modified CDS sequence (wt) from hemagglutinin__InfluenzaA__AEO01195

SEQ ID NO: 39309 - RNA, 1701 nt, Artificial Sequence
  derived and/or modified CDS sequence (wt) from hemagglutinin__InfluenzaA__AEO01196
augaaggcaauacuaguaguucugcuauauacauuugcaaccgcaaaugcagacacauuauguauagguuaucaugcgaacaauucaacagacacuguagacacaguacuagaaaagaauguaacaguaacacacucuguuaaccuucuagaagacaagcauaacgggaaacuaugcaaacuaagagggguagccccauugcauuuggguaaauguaacauugcuggcuggauccugggaaauccagagugugaaucacucuccacagcaagcucaugguccuacauuguggaaacaucuaguucagacaauggaacguguuacccaggagauuucaucgauuaugaggagcuaagagagcaauugagcucagugucaucauuugaaagguuugagauauuccccaaaacaaguucauggcccaaucaugacucgaacaaagguguaacggcagcauguccucaugcuggagcaaaaagcuucuacaaaaauuuaauauggcuaguuaaaaaaggaaauucauacccaaagcucagcaaauccuacauuaaugauaaagggaaagaaguccucgugcuauggggcauucaccauccaucuacuagugcugaccaacaaagucucuaucagaaugcagaugcauauguuuuuguggggacaucaagauacagcaagaaguucaagccggaaauagcaauaagacccaaagugagggaucaagaagggagaaugaacuauuacuggacacuaguagagccgggagacaaaauaacauucgaagcaacuggaaaucuagugguaccgagauaugcauucgcaauggaaagaaaugcuggaucugguauuaucauuucagauacaccaguccacgauugcaauacaacuugucagacacccaagggugcuauaaacaccagccucccauuucagaauauacauccgaucacaauuggaaaauguccaaaauauguaaaaagcacaaaauugagacuggccacaggauugaggaaugucccgucuauucaaucuagaggccuauuuggggccauugccgguuucauugaagggggguggacagggaugguagauggaugguacgguuaucaccaucaaaaugagcaggggucaggauaugcagccgaccugaagagcacacagaaugccauugacgagauuacuaacaaaguaaauucuguuauugaaaagaugaauacacaguucacagcaguagguaaagaguucaaccaccuggaaaaaagaauagagaauuuaaauaaaaagguugaugaugguuuccuggacauuuggacuuacaaugccgaacuguugguucuauuggaaaaugaaagaacuuuggacuaccacgauucaaaugugaagaacuuauaugaaaagguaagaagccaguuaaaaaacaaugccaaggaaauuggaaacggcugcuuugaauuuuaccacaaaugcgauaacacgugcauggaaagugucaaaaaugggacuuaugacuacccaaaauacucagaggaagcaaaauuaaacagagaagaaauagaugggguaaagcuggaaucaacaaggauuuaccagauuuuggcgaucuauucaacugucgccaguucauugguacugguagucucccugggggcaaucaguuucuggaugugcucuaaugggucucuacaguguagaauauguauuuaa

SEQ ID NO: 39310 - RNA, 1701 nt, Artificial Sequence; identical to SEQ ID NO: 34714
  derived and/or modified CDS sequence (wt) from hemagglutinin__InfluenzaA__AEO01197

SEQ ID NO: 39311 - RNA, 1701 nt, Artificial Sequence; identical to SEQ ID NO: 35167
  derived and/or modified CDS sequence (wt) from hemagglutinin__InfluenzaA__AEO01198

SEQ ID NO: 39312 - RNA, 1701 nt, Artificial Sequence
  derived and/or modified CDS sequence (wt) from hemagglutinin__InfluenzaA__AEO01200
augaaggcaauacuaguaguucugcuauauacauuugcaaccgcaaaugcagacacauuauguauagguuaucaugcgaacaauucaacagacacuguagacacaguacuagaaaagaauguaacaguaacacacucuguuaaccuucuagaagacaagcauaacgggaaacuaugcaaacuaagagggguagccccauugcauuuggguaaauguaacauugcuggcuggauccugggaaauccagagugugaaucacucuccacagcaagcucaugguccuacauuguggaaacaucuaguucagacaauggaacguguuacccaggaaauuucaucgauuaugaggagcuaagagagcaauugagcucagugucaucauuugaaagguuugagauauuccccaagacaaguucauggcccaaucaugacucgaacaaagguguaacggcagcauguccucaugcuggagcaaaaagcuucuacaaaaauuuaauauggcuaguuaaaaaaggaaauucauacccaaagcucagcaaauccuacauuaaugauaaagggaaagaaguccucgugcuauggggcauucaccauccaucuacuagugcugaccaacaaagucucuaucagaaugcagaugcauauguuuuuguggggacaucaagauacagcaagaaguucaagccggaaauagcaauaagacccaaagugagggaucaagaagggagaaugaacuauuacuggacacuaguagagccgggagacaaaauaacauucgaagcaacuggaaaucuagugguaccgagauaugcauucgcaauggaaagaaaugcuggaucugguauuaucauuucagauacaccaguccacgauugcaauacaacuugucagacacccaagggugcuauaaacaccagccucccauuucagaauauacauccgaucacaauuggaaaauguccaaaauauguaaaaagcacaaaauugagacuggccacaggauugaggaaugucccgucuauucaaucuagaggccuauuuggggccauugccgguuucauugaagggggguggacagggaugguagauggaugguacgguuaucaccaucaaaaugagcaggggucaggauaugcagccgaccugaagagcacacagaaugccauugacgagauuacuaacaaaguaaauucuguuauugaaaagaugaauacacaguucacagcaguagguaaagaguucaaccaccuggaaaaaagaauagagaauuuaaauaaaaagguugaugaugguuuccuggacauuuggacuuacaaugccgaacuguugguucuauuggaaaaugaaagaacuuuggacuaccacgauucaaaugugaagaacuuauacgaaaagguaagaagccaguuaaaaaacaaugccaaggaaauuggaaacggcugcuuugaauuuuaccacaaaugcgauaacacgugcauggaaagugucaaaaaugggacuuaugacuacccaaaauacucagaggaagcaaaauuaaacagagaagaaauagaugggguaaagcuggaaucaacaaggauuuaccagauuuuggcgaucuauucaacugucgccaguucauugguacugguagucucccugggggcaaucaguuucuggaugugcucuaaugggucucuacaguguagaauauguauuuaa

SEQ ID NO: 39313 - RNA, 1701 nt, Artificial Sequence
  derived and/or modified CDS sequence (wt) from hemagglutinin__InfluenzaA__AEO01201
augaaggcaauacuaguaguucugcuauauacauuugcaaccgcaaaugcagacacauuauguauagguuaucaugcgaacaauucaacagacacuguagacacaguacuagaaaagaauguaacaguaacacacucuguuaaccuucuagaagaaaagcauaacgggaaacuaugcaaacuaagagggguagccccauugcauuuggguaaauguaacauugcuggcuggauccugggaaauccagagugugaaucacucuccacagcaagcucaugguccuacauuguggaaacaucuaguucagacaauggaacguguuacccaggagauuucaucgauuaugaggagcuaagagagcaauugagcucagugucaucauuugaaagguuugagauauuccccaagacaaguucauggcccaaucaugacucgaacaaagguguaacggcagcauguccucaugcuggagcaaaaagcuucuacaaaaauuuaauauggcuaguuaaaaaaggaaauucauacccaaagcucagcaaauccuacauuaaugauaaagggaaagaaguccucgugcuauggggcauucaccauccaucuacuagugcugaccaacaaagucucuaucagaaugcagaugcauauguuuuuguggggacaucaagauacagcaagaaguucaagccggaaauagcaauaagacccaaagugagggaacaagaagggagaaugaacuauuacuggacacuaguagagccgggagacaaaauaacauucgaagcaacuggaaaucuagugguaccgagauaugcauucgcaauggaaagaaaugcuggaucugguauuaucauuucagauacaccaguccacgauugcaauacaacuugucagacacccaagggugcuauaaacaccagccucccauuucagaauauacauccgaucacaauuggaaaauguccaaaauauguaaaaagcacaaaauugagacuggccacaggauugaggaaugucccgucuauucaaucuagaggccuauuuggggccauugccgguuucauugaagggggguggacagggaugguagauggaugguacgguuaucaccaucaaaaugagcaggggucaggauaugcagccgaccugaagagcacacagaaugccauugacgagauuacuaacaaaguaaauucuguuauugaaaagaugaauacacaguucacagcaguagguaaagaguucaaccaccuggaaaaaagaauagagaauuuaaauaaaaaaguugaugaugguuuccuggacauuuggacuuacaaugccgaacuguugguucuguuggaaaaugaaagaacuuuggacuaccacgauucaaaugugaagaacuuauaugaaaagguaagaagccaguuaaaaaacaaugccaaggaaauuggaaacggcugcuuugaauuuuaccacaaaugcgauaacacgugcauggaaagugucaaaaaugggacuuaugacuacccaaaauacucagaggaagcaaaauuaaacagagaagaaauagaugggguaaagcuggaaucaacaaggauuuaccagauuuuggcgaucuauucaacugucgccaguucauugguacugguagucucccugggggcaaucaguuucuggaugugcucuaaugggucucuacaguguagaauauguauuuga

SEQ ID NO: 39314 - RNA, 1701 nt, Artificial Sequence
  derived and/or modified CDS sequence (wt) from hemagglutinin__InfluenzaA__AEO01202
augaaggcaauacuaguaguucugcuauauacauuugcaaccgcaaaugcagacacauuauguauagguuaucaugcgaacaauucaacagacacuguagacacaguacuagaaaagaauguaacaguaacacacucuguuaaccuucuagaagacaagcauaacgggaaacuaugcaaacuaagagggguagccccauugcauuuggguaaauguaacauugcuggcuggauccugggaaauccagagugugaaucacucuccacagcaagcucaugguccuacauuguggaaacaucuaguucagacaauggaacguguuacccaggagauuucaucgauuaugaggagcuaagagagcaauugagcucagugucaucauuugaaagguuugagauauuccccaagacaaguucauggcccaaucaugacucgaacaaagguguaacggcagcauguccucaugcuggagcaaaaagcuucuacaaaaauuuaauauggcuaguuaaaaaaggaaauucauacccaaagcucagcaaauccuacauuaaugauaaagggaaagaaguccucguacuauggggcauucaccauccaucuacuagugcugaccaacaaagucucuaucagaaugcagaugcauauguuuuuguggggacaucaagauacagcaagaaguucaagccggaaauagcaauaagacccaaagugagggaucaagaagggagaaugaacuauuacuggacacuaguagagccgggagacaaaauaacauucgaagcaacuggaaaucuagugguaccgagauaugcauucgcaauggaaagaaaugcuggaucugguauuaucauuucagauacaccaguccacgauugcaauacaacuugucagacacccaagggugcuauaaacaccagccucccauuucagaauauacauccgaucacaauuggaaaauguccaaaauauguaaaaagcacaaaauugagacuggccacaggauugaggaaugucccgucuauucaaucuagaggccuauuuggggccauugccgguuucauugaagggggguggacagggaugguagauggaugguacgguuaucaccaucaaaaugagcaggggucaggauaugcagccgaccugaagagcacacagaaugccauugacgagauuacuaacaaaguaaauucuguuauugaaaagaugaauacacaguucacagcaguagguaaagaguucaaccaccuggaaaaaagaauagagaauuuaaauaaaaaaguugaugaugguuuccuggacauuuggacuuacaaugccgaacuguugguucuauuggaaaaugaaagaacuuuggacuaccacgauucaaaugugaagaacuuauaugaaaagguaagaagccaguuaaaaaacaaugccaaggaaauuggaaacggcugcuuugaauuuuaccacaaaugcgauaacacgugcauggaaagugucaaaaaugggacuuaugacuacccaaaauacucagaggaagcaaaauuaaacagagaagaaauagaugggguaaagcuggaaucaacaaggauuuaccagauuuuggcgaucuauucaacugucgccaguucauugguacugguagucucccugggggcaaucaguuucuggaugugcucuaaugggucucuacaguguagaauauguauuuaa

SEQ ID NO: 39315 - RNA, 1701 nt, Artificial Sequence
  derived and/or modified CDS sequence (wt) from hemagglutinin__InfluenzaA__AEO01203
augaaggcaauacuaguaguucugcuauauacauuugcaaccgcaaaugcagacacauuauguauagguuaucaugcgaacaauucaacagacacuguagacacaguacuagaaaagaauguaacaguaacacacucuguuaaccuucuagaagacaagcauaacgggaaacuaugcaaacuaagagggguagccccauugcauuuggguaaauguaacauugcuggcuggauccugggaaauccagagugugaaucacucuccacagcaagcucaugguccuacauuguggaaacaucuaguucagacaauggaacguguuacccaggagauuucaucgauuaugaggagcuaagagagcaauugagcucagugucaucauuugaaagguuugagauauuccccaagacaaguucauggcccaaucaugacucgaacaaagguguaacggcagcauguccucaugcuggagcaaaaagcuucuacaaaaauuuaauauggcuaguuaaaaaaggaaauucauacccaaagcucagcaaauccuacauuaaugauaaagggaaagaaguccucgugcuauggggcauucaccauccaucuacuagugcugaccaacaaagucucuaucagaaugcagaugcauauguuuuuguggggacaucaagauacagcaagaaguucaagccggaaauagcaauaagacccaaagugagggaucaagaagggagaaugaacuauuacuggacacuaguagagccgggagacaaaauaacauucgaagcaacuggaaaucuagugguaccgagauaugcauucacaauggaaagaaaugcuggaucugguauuaucauuucagauacaccaguccacgauugcaauacaacuugucagacacccaagggugcuauaaacaccagccucccauuucagaauauacauccgaucacaauuggaaaauguccaaaauauguaaaaagcacaaaauugagacuggccacaggauugaggaaugucccgucuauucaaucuagaggccuauuuggggccauugccgguuucauugaagggggguggacagggaugguagauggaugguacgguuaucaccaucaaaaugagcaggggucaggauaugcagccgaccugaagagcacacagaaugccauugacgagauuacuaacaaaguaaauucuguuauugaaaagaugaauacacaguucacagcaguagguaaagaguucaaccaccuggaaaaaagaauagagaauuuaaauaaaaaaguugaugaugguuuccuggacauuuggacuuacaaugccgaacuguugguucuauuggaaaaugaaagaacuuuggacuaccacgauucaaaugugaagaacuuauaugaaaagguaagaagccaguuaaaaaacaaugccaaggaaauuggaaacggcugcuuugaauuuuaccacaaaugcgauaacacgugcauggaaagugucaaaaaugggacuuaugacuacccaaaauacucagaggaagcaaaauuaaacagagaagaaauagaugggguaaagcuggaaucaacaaggauuuaccagauuuuggcgaucuauucaacugucgccaguucauugguacugguagucucccugggggcaaucaguuucuggaugugcucuaaugggucucuacaguguagaauauguauuuaa

SEQ ID NO: 39316 - RNA, 1701 nt, Artificial Sequence; identical to SEQ ID NO: 34714
  derived and/or modified CDS sequence (wt) from hemagglutinin__InfluenzaA__AEO01204

SEQ ID NO: 39317 - RNA, 1701 nt, Artificial Sequence; identical to SEQ ID NO: 34714
  derived and/or modified CDS sequence (wt) from hemagglutinin__InfluenzaA__AEO01205

SEQ ID NO: 39318 - RNA, 1701 nt, Artificial Sequence; identical to SEQ ID NO: 34681
  derived and/or modified CDS sequence (wt) from hemagglutinin__InfluenzaA__AEO01206

SEQ ID NO: 39319 - RNA, 1701 nt, Artificial Sequence; identical to SEQ ID NO: 34681
  derived and/or modified CDS sequence (wt) from hemagglutinin__InfluenzaA__AEO01207

SEQ ID NO: 39320 - RNA, 1701 nt, Artificial Sequence
  derived and/or modified CDS sequence (wt) from hemagglutinin__InfluenzaA__AEO01208
augaaggcaauacuaguaguucugcuauauacauuugcaaccgcaaaugcagacacauuauguauagguuaucaugcgaacaauucaacagacacuguagacacaguacuagaaaagaauguaacaguaacacacucuguuaaccuucuagaagacaagcauaacgggaaacuaugcaaacuaagagggguagccccauugcauuuggguaaauguaacauugcuggcuggauccugggaaauccagagugugaaucacucuccacagcaagcucaugguccuacauuguggaaacaucuaguucagacaauggaacguguuacccaggagauuucaucgauuaugaggagcuaagagagcaauugagcucagugucaucauuugaaagguuugagauauuccccaagacaaguucauggcccaaucaugacucgaacaaagguguaacggcagcauguccucaugcuggagcaaaaagcuucuacaaaaauuuaauauggcuaguuaaaaaaggaaauucauacccaaagcucagcaaauccuacauuaaugauaaagggaaagaaguccucgugcuauggggcauucaccauccaucuacuagugcugaccaacaaagucucuaucagaaugcagaugcauauguuuuuguggggacaucaagauacagcaagaaguucaagccagaaauagcaauaagacccaaagugagggaucaagaagggagaaugaacuauuacuggacacuaguagagccgggagacaaaauaacauucgaagcaacuggaaaucuagugguaccgagauaugcauucgcaauggaaagaaaugcuggaucugguauuaucauuucagauacaccaguccacgauugcaauacaacuugucagacacccaagggugcuauaaacaccagccucccauuucagaauauacauccgaucacaauuggaaaauguccaaaauauguaaaaagcacaaaauugagacuggccacaggauugaggaaugucccgucuauucaaucuagaggccuauuuggggccauugccgguuucauugaagggggguggacagggaugguagauggaugguacgguuaucaccaucaaaaugagcaggggucaggauaugcagccgaccugaagagcacacagaaugccauugacgagauuacuaacaaaguaaauucuguuauugaaaagaugaauacacaguucacagcaguagguaaagaguucaaccaccuggaaaaaagaauagagaauuuaaauaaaaaaguugaugaugguuuccuggacauuuggacuuacaaugccgaacuguugguucuauuggaaaaugaaagaacuuuggacuaccacgauucaaaugugaagaacuuauaugaaaagguaagaagccaguuaaaaaacaaugccaaggaaauuggaaacggcugcuuugaauuuuaccacaaaugcgauaacacgugcauggaaagugucaaaaaugggacuuaugacuacccaaaauacucagaggaagcaaaauuaaacagagaagaaauagaugggguaaagcuggaaucaacaaggauuuaccagauuuuggcgaucuauucaacugucgccaguucauugguacugguagucucccugggggcaaucaguuucuggaugugcucuaaugggucucuacaguguagaauauguauuuaa

SEQ ID NO: 39321 - RNA, 1701 nt, Artificial Sequence
  derived and/or modified CDS sequence (wt) from hemagglutinin__InfluenzaA__AEO01209
augaaggcaauacuaguaguucugcuauauacauuugcaaccgcaaaugcagacacauuauguauagguuaucaugcgaacaauucaacagacacuguagacacaguacuagaaaagaauguaacaguaacacacucuguuaaccuucuagaagacaagcauaacgggaaacuaugcaaacuaagagggguagccccauugcauuuggguaaauguaacauugcuggcuggauccugggaaauccagagugugaaucacucuccacagcaagcucaugguccuacauuguggaaacaucuaguucagacaauggaacguguuacccaggagauuucaucgauuaugaggagcuaagagagcaauugagcucagugucaucauuugaaagguuugagauauuccccaagacaaguucauggcccaaucaugacucgaacaaagguguaacggcagcauguccucaugcuggagcaaaaagcuucuacaaaaauuuaauauggcuaguuaaaaaaggaaauucauacccaaagcucagcaaauccuacauuaaugauaaagggaaagaaguccucgugcuauggggcauucaccauccaucuacuagugcugaccaacaaagucucuaucagaaugcagaugcauauguuuuuguggggacaucaagauacagcaagaaguucaagccggaaauagcaauaagacccaaagugagggaacaagaagggagaaugaacuauuacuggacacuaguagagccgggagacaaaauaacauucgaagcaacuggaaaucuagugguaccgagauaugcauucgcaauggaaagaaaugcuggaucugguauuaucauuucagauacaccaguccacgauugcaauacaacuugucagacacccaagggugcuauaaacaccagccucccauuucagaauauacauccgaucacaauuggaaaauguccaaaauauguaaaaagcacaaaauugagacuggccacaggauugaggaaugucccgucuauucaaucuagaggccuauuuggggccauugccgguuucauugaagggggguggacagggaugguagauggaugguacgguuaucaccaucaaaaugagcaggggucaggauaugcagccgaccugaagagcacacagaaugccauugacgagauuacuaacaaaguaaauucuguuauugaaaagaugaauacacaguucacagcaguagguaaagaguucaaccaccuggaaaaaagaauagagaauuuaaauaaaaaaguugaugacgguuuccuggacauuuggacuuacaaugccgaacuguugguucuauuggaaaaugaaagaacuuuggacuaccacgauucaaaugugaagaacuuauaugaaaagguaagaagccaguuaaaaaacaaugccaaggaaauuggaaacggcugcuuugaauuuuaccacaaaugcgauaacacgugcauggaaagugucaaaaaugggacuuaugacuacccaaaauacucagaggaagcaaaauuaaacagagaagaaauagaugggguaaagcuggaaucaacaaggauuuaccagauuuuggcgaucuauucaacugucgccaguucauugguacugguagucucccugggggcaaucaguuucuggaugugcucuaaugggucucuacaguguagaauauguauuuaa

SEQ ID NO: 39322 - RNA, 1701 nt, Artificial Sequence; identical to SEQ ID NO: 34681
  derived and/or modified CDS sequence (wt) from hemagglutinin__InfluenzaA__AEO01210

SEQ ID NO: 39323 - RNA, 1701 nt, Artificial Sequence
  derived and/or modified CDS sequence (wt) from hemagglutinin__InfluenzaA__AEO01211
augaaggcaauacuaguaguucugcuauauacauuugcaaccgcaaaugcagacacauuauguauagguuaucaugcgaacaauucaacagacacuguagacacaguacuagaaaagaauguaacaguaacacacucuguuaaccuucuagaagacaagcauaacgggaaacuaugcaaacuaagagggguagccccauugcauuuggguaaauguaacauugcuggcuggauccugggaaauccagagugugaaucacucuccacagcaagcucaugguccuacauuguggaaacaucuaguucagacaauggaacguguuacccaggagauuucaucgauuaugaggagcuaagagagcaauugagcucagugucaucauuugaaagguuugagauauuccccaagacaaguucauggcccaaucaugacucgaacaaagguguaacggcagcauguccucaugcuggagcaaaaagcuucuacaaaaauuuaauauggcuaguuaaaaaaggaaauucauacccaaagcucagcaaauccuacauuaaugauaaagggaaagaaguccucgugcuauggggcauucaccauccaucuacuagugcugaccaacaaagucucuaucagaaugcagaugcauauguuuuuguggggacaucaagauacagcaagaaguucaagccggaaauagcaauaagacccaaagugagggaacaagaagggagaaugaacuauuacuggacacuaguagagccgggagacaaaauaacauucgaagcaacuggaaaucuagugguaccgagauaugcauucgcaauggaaagaaaugcuggaucugguauuaucauuucagauacaccaguccacgauugcaauacaacuugucagacacccaagggugcuauaaacaccagccucccauuucagaauauacauccgaucacaauuggaaaauguccaaaauauguaaaaagcacaaaauugagacuggccacaggauugaggaaugucccgucuauucaaucuagaggccuauuuggggccauugccgguuucauugaagggggguggacagggaugguagauggaugguacgguuaucaccaucaaaaugagcaggggucaggauaugcagccgaccugaagagcacacagaaugccauugacgagauuacuaacaaaguaaauucuguuauugaaaagaugaauacacaguucacagcaguagguaaagaguucaaccaccuggaaaaaagaauagagaauuuaaauaaaaaaguugaugaugguuuccuggacauuuggacuuacaaugccgaacuguugguucuauuggaaaaugaaagaacuuuggacuaccacgauucaaaugugaagaacuuauaugaaaagguaagaagccaguuaaaaaacaaugccaaggaaauuggaaacggcugcuuugaauuuuaccacaaaugcgauaacacgugcauggaaagugucaaaaaugggacuuaugacuacccaaaauacucagaggaggcaaaauuaaacagagaagaaauagaugggguaaagcuggaaucaacaaggauuuaccagauuuuggcgaucuauucaacugucgccaguucauugguacugguagucucccugggggcaaucaguuucuggaugugcucuaaugggucucuacaguguagaauauguauuuaa

SEQ ID NO: 39324 - RNA, 1701 nt, Artificial Sequence
  derived and/or modified CDS sequence (wt) from hemagglutinin__InfluenzaA__AEO01212
augaaggcaauacuaguaguucugcuauauacauuugcaaccgcaaaugcagacacauuauguauagguuaucaugcgaacaauucaacagacacuguagacacaguacuagaaaagaauguaacaguaacacacucuguuaaccuucuagaagacaagcauaacgggaaacuaugcaaacuaagagggguagccccauugcauuuggguaaauguaacauugcuggcuggauccugggaaauccagagugugaaucacucuccacagcaagcucaugguccuacauuguggaaacaucuaguucagacaauggaacguguuacccaggagauuucaucgauuaugaggagcuaagagagcaauugagcucagugucaucauuugaaagguuugagauauuccccaagacaaguucauggcccaaucaugacucgaacaaagguguaacggcagcauguccucaugcuggagcaaaaagcuucuacaaaaauuuaauauggcuaguuaaaaaaggaaauucauacccaaagcucagcaaauccuacauuaaugauaaagggaaagaaguccucguguuauggggcauucaccauccaucuacuagugcugaccaacaaagucucuaucagaaugcagaugcauauguuuuuguggggacaucaagauacagcaagaaguucaagccggaaauagcaauaagacccaaagugagggaucaagaagggagaaugaacuauuacuggacacuaguagagccuggagacaaaauaacauucgaagcaacuggaaaucuagugguaccgagauaugcauucgcaauggaaagaaaugcuggaucugguauuaucauuucagauacaccaguccacgauugcaauacaacuugucagacacccaagggugcuauaaacaccagccucccauuucagaauauacauccgaucacaauuggaaaauguccaaaauauguaaaaagcacaaaauugagacuggccacaggauugaggaaugucccgucuauucaaucuagaggccuauuuggggccauugccgguuucauugaagggggguggacagggaugguagauggaugguacgguuaucaccaucaaaaugagcaggggucaggauaugcagccgaccugaagagcacacagaaugccauugacgagauuacuaacaaaguaaauucuguuauugaaaagaugaauacacaguucacagcaguagguaaagaguucaaccaccuggaaaaaagaauagagaauuuaaauaaaaaaguugaugaugguuuccuggacauuuggacuuacaaugccgaacuguugguucuauuggaaaaugaaagaacuuuggacuaccacgauucaaaugugaagaacuuguaugaaaagguaagaagccaguuaaaaaacaaugccaaggaaauuggaaacggcugcuuugaauuuuaccacaaaugcgauaacacgugcauggaaagugucaaaaaugggacuuaugacuacccaaaauacucagaggaagcaaaauuaaacagagaagaaauagaugggguaaagcuggaaucaacaaggauuuaccagauuuuggcgaucuauucaacugucgccaguucauugguacugguagucucccugggggcaaucaguuucuggaugugcucuaaugggucucuacaguguagaauauguauuuaa

SEQ ID NO: 39325 - RNA, 1701 nt, Artificial Sequence
  derived and/or modified CDS sequence (wt) from hemagglutinin__InfluenzaA__AEO01213
augaaggcaauacuaguaguucugcuauauacauuugcaaccgcaaaugcagacacauuauguauagguuaucaugcgaacaauucaacagacacuguagacacaguacuagaaaagaauguaacaguaacacacucuguuaaccuucuagaagacaagcauaacgggaaacuaugcaaacuaagagggguagccccauugcauuuggguaaauguaacauugcuggcuggauccugggaaauccagagugugaaucacucuccacagcaagcucaugguccuacauuguggaaacaucuaguucagacaauggaacguguuacccaggagauuucaucgauuaugaggagcuaagagagcaauugagcucagugucaucauuugaaagguuugagauauuccccaagacaaguucauggcccaaucaugacucgaacaaagguguaacggcagcauguccucaugcuggagcaaaaagcuucuacaaaaauuuaauauggcuaguuaaaaaaggaaauucauacccaaagcucagcaaauccuacauuaaugauaaagggaaagaaguccucgugcuauggggcauucaccauccaucuacuagugcugaccaacaaagucucuaucagaaugcagaugcauauguuuuuguggggacaucaagauacagcaagaaguucaagccggaaauagcaauaagacccaaagugagggaucaagaagggagaaugaacuauuacuggacacuaguagagccgggagacaaaauaacauucgaagcaacuggaaaucuagugguaccgagauaugcauuugcaauggaaagaaaugcuggaucugguauuaucauuucagauacaccaguccacgauugcaauacaacuugucagacacccaagggugcuauaaacaccagccucccauuucagaauauacauccgaucacaauuggaaaauguccaaaauauguaaaaagcacaaaauugagacuggccacaggauugaggaaugucccgucuauucaaucuagaggccuauuuggggccauugccgguuucauugaagggggguggacagggaugguagauggaugguacgguuaucaccaucaaaaugagcaggggucaggauaugcagccgaccugaagagcacacagaaugccauugacgagauuacuaacaaaguaaauucuguuauugaaaagaugaauacacaguucacagcaguagguaaagaguucaaccaccuggaaaaaagaauagagaauuuaaauaaaaaaguugaugaugguuuccuggacauuuggacuuacaaugccgaacuguugguucuauuggaaaaugaaagaacuuuggacuaccacgauucaaaugugaagaacuuauaugaaaagguaagaagccaguuaaaaaacaaugccaaggaaauuggaaacggcugcuuugaauuuuaccacaaaugcgauaacacgugcauggaaagugucaaaaaugggacuuaugauuacccaaaauacucagaggaagcaaaauuaaacagagaagaaauagaugggguaaagcuggaaucaacaaggauuuaccagauuuuggcgaucuauucaacugucgccaguucauugguacugguagucucccugggggcaaucaguuucuggaugugcucuaaugggucucuacaguguagaauauguauuuaa

SEQ ID NO: 39326 - RNA, 1701 nt, Artificial Sequence
  derived and/or modified CDS sequence (wt) from hemagglutinin__InfluenzaA__AEO01214
augaaggcaauacuaguaguucugcuauauacauuugcaaccgcaaaugcagacacauuauguauagguuaucaugcgaacaauucaacagacacuguagacacaguacuagaaaagaauguaacaguaacacacucuguuaaccuucuagaagacaaacauaacgggaaacuaugcaaacuaagagggguagccccauugcauuuggguaaauguaacauugcuggcuggauccugggaaauccagagugugaaucacucuccacagcaagcucaugguccuacauuguggaaacaucuaguucagacaauggaacguguuacccaggagauuucaucgauuaugaggagcuaagagagcaauugagcucagugucaucauuugaaagguuugagauauuccccaagacaaguucauggcccaaucaugacucgaacaaagguguaacggcagcaugcccucaugcuggagcaaaaagcuucuacaaaaauuuaauauggcuaguuaaaaaaggaaauucauacccaaagcucagcaaauccuacauuaaugauaaagggaaagaaguccucgugcuauggggcauucaccauccaucuacuagugcugaccaacaaagucucuaucagaaugcagaugcauauguuuuuguggggacaucaagauacagcaagaaguucaagccggaaauagcaauaagacccaaagugagggaucaagaagggagaaugaacuauuacuggacacuaguagagccgggagacaaaauaacauucgaagcaacuggaaaucuaguggcaccgagauaugcauucgcaauggaaagaaaugcuggaucugguauuaucauuucagauacaccaguccacgauugcaauacaacuugucagacacccaagggugcuauaaacaccagccucccauuucagaauauacauccgaucacaauuggaaaauguccaaaauauguaaaaagcacaaaauugagacuggccacaggauugaggaaugucccgucuauucaaucuagaggccuauuuggggccauugccgguuucauugaagggggguggacagggaugguagauggaugguacgguuaucaccaucaaaaugagcaggggucaggauaugcagccgaccugaagagcacacagaaugccauugacgagauuacuaacaaaguaaauucuguuauugaaaagaugaauacacaguucacagcaguagguaaagaguucaaccaccuggaaaaaagaauagagaauuuaaauaaaaaaguugaugaugguuuccuggacauuuggacuuacaaugccgaacuguugguucuauuggaaaaugaaagaacuuuggacuaccacgauucaaaugugaagaacuuauaugaaaagguaagaagccaguuaaaaaacaaugccaaggaaauuggaaacggcugcuuugaauuuuaccacaaaugcgauaacacgugcauggaaagugucaaaaaugggacuuaugacuacccaaaauacucagaggaagcaaaauuaaacagagaagaaauagaugggguaaagcuggaaucaacaaggauuuaccagauuuuggcgaucuauucaacugucgccaguucauugguacugguagucucccugggggcaaucaguuucuggaugugcucuaaugggucucuacaguguagaauauguauuuaa

SEQ ID NO: 39327 - RNA, 1701 nt, Artificial Sequence; identical to SEQ ID NO: 37243
  derived and/or modified CDS sequence (wt) from hemagglutinin__InfluenzaA__AEO01215

SEQ ID NO: 39328 - RNA, 1701 nt, Artificial Sequence
  derived and/or modified CDS sequence (wt) from hemagglutinin__InfluenzaA__AEO01216
augaaggcaauacuaguaguucugcuauauacauuugcaaccgcaaaugcagacacauuauguauagguuaucaugcgaacaauucaacagacacuguagacacaguacuagaaaagaauguaacaguaacacacucuguuaaccuucuagaagacaagcauaacgggaaacuaugcaaacuaagagggguagccccauugcauuuggguaaauguaacauugcuggcuggauccugggaaauccagagugugaaucacucuccacagcaagcucaugguccuacauuguggaaacaucuaguucagacaauggaacguguuacccaggagauuucaucgauuaugaggagcuaagagagcaauugagcucagugucaucauuugaaagguuugagauauuccccaagacaaguucauggcccaaucaugacucgaacaaagguguaacggcagcauguccucaugcuggagcaaaaagcuucuacaaaaauuuaauauggcuaguuaaaaaaggaaauucauacccaaagcucagcaaauccuacauuaaugauaaagggaaagaaguccucgugcuauggggcauucaccauccaucuacuagugcugaccaacaaagucucuaucagaaugcagaugcauauguuuuuguggggacaucaagauacagcaagaaguucaagccggaaauagcaauaagacccaaagugagggaacaagaagggagaaugaacuauuacuggacacuaguagagccgggagacaaaauaacauucgaagcaacuggaaaucuagugguaccgagauaugcauucgcaauggaaagaaaugcuggaucugguauuaucauuucagauacaccaguccacgauugcaauacaacuugucagacacccaagggugcuauaaacaccagccucccauuucagaauauacauccgaucacaauuggaaaauguccaaaauauguaaaaagcacaaaauugagacuggccacaggauugaggaaugucccgucuauucaaucuagaggccuauuuggggccauugccgguuucauugaagggggguggacagggaugguagauggaugguacgguuaucaccaucaaaaugagcaggggucaggauaugcagccgaccugaagagcacacagaaugccauugacgagauuacuaacaaaguaaauucuguuauugaaaagaugaauacacaguucacagcaguagguaaagaguucaaccacuuggaaaaaagaguagagaauuuaaauaaaaaaguugaugaugguuuccuggacauuuggacuuacaaugccgaacuguugguucuauuggaaaaugaaagaacuuuggacuaccacgauucaaaugugaagaacuuauaugaaaagguaagaagccaguuaaaaaacaaugccaaggaaauuggaaacggcugcuuugaauuuuaccacaaaugcgauaacacgugcauggaaagugucaaaaaugggacuuaugacuacccaaaauacucagaggaagcaaaauuaaacagagaagaaauagaugggguaaagcuggaaucaacaaggauuuaccagauuuuggcgaucuauucaacugucgccaguucauugguacugguagucucccugggggcaaucaguuucuggaugugcucuaaugggucucuacaguguagaauauguauuuaa

SEQ ID NO: 39329 - RNA, 1701 nt, Artificial Sequence; identical to SEQ ID NO: 37243
  derived and/or modified CDS sequence (wt) from hemagglutinin__InfluenzaA__AEO01217

SEQ ID NO: 39330 - RNA, 1701 nt, Artificial Sequence
  derived and/or modified CDS sequence (wt) from hemagglutinin__InfluenzaA__AEO01218
augaaggcaauacuaguaguucugcuauauacauuugcaaccgcaaaugcagacacauuauguauagguuaucaugcgaacaauucaacagacacuguagacacaguacuagaaaagaauguaacaguaacacacucuguuaaccuucuagaagacaagcauaacgggaaacuaugcaaacuaagagggguagccccacugcauuuggguaaauguaacauugcuggcuggauccugggaaauccagagugugaaucacucuccacagcaagcucaugguccuacauuguggaaacaucuaguucagacaauggaacguguuacccaggagauuucaucgauuaugaggagcuaagagagcaauugagcucagugucaucauuugaaagguuugagauauuccccaagacaaguucauggcccaaucaugacucgaacaaagguguaacggcagcauguccucaugcuggagcaaaaagcuucuacaaaaauuuaauauggcuaguuaaaaaaggaaauucauacccaaagcucagcaaauccuacauuaaugauaaagggaaagaaguccucgugcuauggggcauucaccauccaucuacuagugcugaccaacaaagucucuaucagaaugcagaugcauauguuuuuguggggacaucaagauacagcaagaaguucaagccggaaauagcaauaagacccaaagugagggaacaagaagggagaaugaacuauuacuggacacuaguagagccgggagacaaaauaacauucgaagcaacuggaaaucuagugguaccgagauaugcauucgcaauggaaagaaaugcuggaucugguauuaucauuucagauacaccaguccacgauugcaauacaacuugucagacacccaagggugcuauaaacaccagccucccauuucagaauauacauccgaucacaauuggaaaauguccaaaauauguaaaaagcacaaaauugagacuggccacaggauugaggaaugucccgucuauucaaucuagaggccuauuuggggccauugccgguuucauugaagggggguggacagggaugguagauggaugguacgguuaucaccaucaaaaugagcaggggucaggauaugcagccgaccugaagagcacacagaaugccauugacgagauuacuaacaaaguaaauucuguuauugaaaagaugaauacacaguucacagcaguagguaaagaguucaaccaccuggaaaaaagaauagagaauuuaaauaaaaaaguugaugaugguuuccuggacauuuggacuuacaaugccgaacuguugguucuauuggaaaaugaaagaacuuuggacuaccacgauucaaaugugaagaacuuauaugaaaagguaagaagccaguuaaaaaacaaugccaaggaaauuggaaacggcugcuuugaauuuuaccacaaaugcgauaacacgugcauggaaagugucaaaaaugggacuuaugacuacccaaaauacucagaggaagcaaaauuaaacagagaagaaauagaugggguaaagcuggaaucaacaaggauuuaccagauuuuggcgaucuauucaacugucgccaguucauugguacugguagucucccugggggcaaucaguuucuggaugugcucuaaugggucucuacaguguagaauauguauuuaa

SEQ ID NO: 39331 - RNA, 1701 nt, Artificial Sequence; identical to SEQ ID NO: 35772
  derived and/or modified CDS sequence (wt) from hemagglutinin__InfluenzaA__AEO01219

SEQ ID NO: 39332 - RNA, 1701 nt, Artificial Sequence; identical to SEQ ID NO: 34772
  derived and/or modified CDS sequence (wt) from hemagglutinin__InfluenzaA__AEO01220

SEQ ID NO: 39333 - RNA, 1701 nt, Artificial Sequence
  derived and/or modified CDS sequence (wt) from hemagglutinin__InfluenzaA__AEO01221
augaaggcaauacuaguaguucugcuauauacauuugcaaccgcaaaugcagacacauuauguauagguuaucaugcgaacaauucaacagacacuguagacacaguacuagaaaagaauguaacaguaacacacucuguuaaccuucuagaagacaagcauaacgggaaacuaugcaaacuaagagggguagccccauugcauuuggguaaauguaacauugcuggcuggauccugggaaauccagagugugaaucacucuccacagcaagcucaugguccuacauuguggaaacaucuaguucagacaauggaacguguuacccaggagauuucaucgauuaugaggagcuaagagagcaauugagcucagugucaucauuugaaagauuugagauauuccccaagacaaguucauggcccaaucaugacucgaacaaagguguaacggcagcauguccucaugcuggagcaaaaagcuucuacaaaaauuuaauauggcuaguuaaaaaaggaaauucauacccaaagcucagcaaauccuacauuaaugauaaagggaaagaaguccucguguuauggggcauucaccauccaucuacuagugcugaccaacaaagucucuaucagaaugcagaugcauauguuuuuguggggacaucaagauacagcaagaaguucaagccggaaauagcaauaagacccaaagugagggaucaagaagggagaaugaacuauuacuggacacuaguagagccgggagacaaaauaacauucgaagcaacuggaaaucuagugguaccgagauaugcauucgcaauggaaagaaaugcuggaucugguauuaucauuucagauacaccaguccacgauugcaauacaacuugucagacacccaagggugcuauaaacaccagccucccauuucagaauauacauccgaucacaauuggaaaauguccaaaauauguaaaaagcacaaaauugagacuggccacaggauugaggaaugucccgucuauucaaucuagaggccuauuuggggccauugccgguuucauugaagggggguggacagggaugguagauggaugguacgguuaucaccaucaaaaugagcaggggucaggauaugcagccgaccugaagagcacacagaaugccauugacgagauuacuaacaaaguaaauucuguuauugaaaagaugaauacacaguucacagcaguagguaaagaguucaaccaccuggaaaaaagaauagagaauuuaaauaaaaaaguugaugaugguuuccuggacauuuggacuuacaaugccgaacuguugguucuauuggaaaaugaaagaacuuuggacuaccacgauucaaaugugaagaacuuguaugaaaagguaagaagccaguuaaaaaacaaugccaaggaaauuggaaacggcugcuuugaauuuuaccacaaaugcgauaacacgugcauggaaagugucaaaaaugggacuuaugacuacccaaaauacucagaggaagcaaaauuaaacagagaagaaauagaugggguaaagcuggaaucaacaaggauuuaccagauuuuggcgaucuauucaacugucgccaguucauugguacugguagucucccugggggcaaucaguuucuggaugugcucuaaugggucucuacaguguagaauauguauuuaa

SEQ ID NO: 39334 - RNA, 1701 nt, Artificial Sequence; identical to SEQ ID NO: 34714
  derived and/or modified CDS sequence (wt) from hemagglutinin__InfluenzaA__AEO01222

SEQ ID NO: 39335 - RNA, 1701 nt, Artificial Sequence; identical to SEQ ID NO: 35772
  derived and/or modified CDS sequence (wt) from hemagglutinin__InfluenzaA__AEO01223

SEQ ID NO: 39336 - RNA, 1701 nt, Artificial Sequence
  derived and/or modified CDS sequence (wt) from hemagglutinin__InfluenzaA__AEO01224
augaaggcaauacuaguaguucugcuauauacauuugcaaccgcaaaugcagacacauuauguauagguuaucaugcgaacaauucaacagacacuguagacacaguacuagaaaagaauguaacaguaacacacucuguuaaccuucuagaagacaagcauaacgggaaacuaugcaaacuaagagggguagccccauugcauuuggguaaauguaacauugcuggcuggauccugggaaauccagagugugaaucacucuccacagcaagcucaugguccuacauuguggaaacaucuaguucagacaauggaacguguuacccaggagauuucaucgauuaugaggagcuaagagagcaauugagcucagugucaucauuugaaagguuugagauauuccccaagacaaguucauggcccaaucaugacucgaacaaagguguaacggcagcauguccucaugcuggagcaaaaagcuucuacaaaaauuuaauauggcuaguuaaaaaaggaaauucauacccaaagcucagcaaauccuacauuaaugauaaagggaaagaaguccucgugcuauggggcauucaccauccaucuacuagugcugaccaacaaagucucuaucagaaugcagaugcauauguuuuuguggggacaucaagauacagcaagaaguucaagccggaaauagcaauaagacccaaagugagggaucaagaagggagaaugaacuauuacuggacacuaguagagccgggagacaaaauaacauucgaagcaacuggaaaucuagugguaccgagauaugcauucgcaacggaaagaaaugcuggaucugguauuaucauuucagauacaccaguccacgauugcaauacaacuugucagacacccaagggugcuauaaacaccagccucccauuucagaauauacauccgaucacaauuggaaaauguccaaaauauguaaaaagcacaaaauugagacuggccacaggauugaggaaugucccgucuauucaaucuagaggccuauuuggggccauugccgguuucauugaagggggguggacagggaugguagauggaugguacgguuaucaccaucaaaaugagcaggggucaggauaugcagccgaccugaagagcacacagaaugccauugacgagauuacuaacaaaguaaauucuguuauugaaaagaugaauacacaguucacagcaguagguaaagaguucaaccaccuggaaaaaagaauagagaauuuaaauaaaaaaguugaugaugguuuccuggacauuuggacuuacaaugccgaacuguugguucuauuggaaaaugaaagaacuuuggacuaccacgauucaaaugugaagaacuuauaugaaaagguaagaagccaguuaaaaaacaaugccaaggaaauuggaaacggcugcuuugaauuuuaccacaaaugcgauaacacgugcauggaaagugucaaaaaugggacuuaugacuacccaaaauacucagaggaagcaaaauuaaacagagaagaaauagaugggguaaagcuggaaucaacaaggauuuaccagauuuuggcgaucuauucaacugucgccaguucauugguacugguagucucccugggggcaaucaguuucuggaugugcucuaaugggucucuacaguguagaauauguauuuaa

SEQ ID NO: 39337 - RNA, 1701 nt, Artificial Sequence
  derived and/or modified CDS sequence (wt) from hemagglutinin__InfluenzaA__AEO01225
augaaggcaauacuaguaguucugcuauauacauuugcaaccgcaaaugcagacacauuauguauagguuaucaugcgaacaauucaacagacacuguagacacaguacuagaaaagaauguaacaguaacacacucuguuaaccuucuagaagacaagcauaacgggaaacuaugcaaacuaagagggguagccccauugcauuuggguaaauguaacauugcuggcuggauccugggaaauccagagugugaaucacucuccacagcaagcucaugguccuacauuguggaaacaucuaguucagacaauggaacguguuacccaggagauuucaucgauuaugaggagcuaagagagcaauugagcucagugucaucauuugaaagguuugagauauuccccaagacaaguucauggcccaaucaugacucgaacaaagguguaacggcagcauguccucaugcuggagcaaaaagcuucuacaaaaauuuaauauggcuaguuaaaaaaggaaauucauacccaaagcucagcaaauccuacauuaaugauaaagggaaagaaguccucgugcuauggggcauucaccauccaucuacuagugcugaccaacaaagucucuaucagaaugcagaugcauauguuuuuguggggacaucaagauacagcaagaaguucaagccggaaauagcaauaagacccaaagugagggaucaagaagggagaaugaacuauuacuggacaguaguagagccgggagacaaaauaacauucgaagcaacuggaaaucuagugguaccgagauaugcauucgcaauggaaagaaaugcuggaucugguauuaucauuucagauacaccaguccacgauugcaauacaacuugucagacacccaagggugcuauaaacaccagccucccauuucagaauauacauccgaucacaauuggaaaauguccaaaauauguaaaaagcacaaaauugagacuggccacaggauugaggaaugucccgucuauucaaucuagaggccuauuuggggccauugccgguuucauugaagggggguggacagggaugguagauggaugguacgguuaucaccaucaaaaugagcaggggucaggauaugcagccgaccugaagagcacacagaaugccauugacgagauuacuaacaaaguaaauucuguuauugaaaagaugaauacacaguucacagcaguagguaaagaguucaaccaccuggaaaaaagaauagagaauuuaaauaaaaaaguugaugaugguuuccuggacauuuggacuuacaaugccgaacuguugguucuauuggaaaaugaaagaacuuuggauuaccacgauucaaaugugaagaacuuauaugaaaagguaagaagccaguuaaaaaacaaugccaaggaaauuggaaacggcugcuuugaauuuuaccacaaaugcgauaacacgugcauggaaagugucaaaaaugggacuuaugacuacccaaaauacucagaggaagcaaaauuaaacagagaagaaauagaugggguaaagcuggaaucaacaaggauuuaccagauuuuggcgaucuauucaacugucgccaguucauugguacugguagucucccugggggcaaucaguuucuggaugugcucuaaugggucucuacaguguagaauauguauuuaa

SEQ ID NO: 39338 - RNA, 1701 nt, Artificial Sequence
  derived and/or modified CDS sequence (wt) from hemagglutinin__InfluenzaA__AEO01226
augaaggcaauacuaguaguucugcuauauacauuugcaaccgcaaaugcagacacauuauguauagguuaucaugcgaacaauucaacagacacuguagacacaguacuagaaaagaauguaacaguaacacacucuguuaaccuucuagaagacaagcauaacgggaaacuaugcaaacuaagagggguagccccauugcauuuggguaaauguaacauugcuggcuggauccugggaaauccagagugugaaucacucuccacagcaagcucaugguccuacauuguggaaacaucuaguucagacaauggaacguguuacccaggagauuucaucgauuaugaggagcuaagagagcaauugagcucagugucaucauuugaaagguuugagauauuccccaagacaaguucauggcccaaucaugacucgaacaaagguguaacggcagcauguccucaugcuggagcaaaaagcuucuacaaaaauuuaauauggcuaguuaaaaaaggaaauucauacccaaagcucagcaaauccuacauuaaugauaaagggaaagaaguccucgugcuauggggcauucaccauccaucuacuagugcugaccaacaaagucucuaucagaaugcagaugcauauguuuuuguggggacaucaagauacagcaagaaguucaagccggaaauagcaauaagacccaaagugagggaucaagaagggagaaugaacuauuacuggacacuaguagagccgggagacaaaauaacauucgaagcaacuggaaaucuagugguaccgagauaugcauucgcaauggaaagaaaugauggaucugguauuaucauuucagauacaccaguccacgauugcaauacaacuugucagacacccaagggugcuauaaacaccagccucccauuucagaauauacauccgaucacaauuggaaaauguccaaaauauguaaaaagcacaaaauugagacuggccacaggauugaggaaugucccgucuauucaaucuagaggccuauuuggggccauugccgguuucauugaagggggguggacagggaugguagauggaugguacgguuaucaccaucaaaaugagcaggggucaggauaugcagccgaccugaagagcacacagaaugccauugacgagauuacuaacaaaguaaauucuguuauugaaaagaugaauacacaguucacagcaguagguaaagaguucaaccaccuggaaaaaagaauagagaauuuaaauaaaaagguugaugaugguuuccuggacauuuggacuuacaaugccgaacuguugguucuauuggaaaaugaaagaacuuuggacuaccacgauucaaaugugaagaacuuauaugaaaagguaagaagccaguuaaaaaacaaugccaaggaaauuggaaacggcugcuuugaauuuuaccacaaaugcgauaacacgugcauggaaagugucaaaaaugggacuuaugacuacccaaaauacucagaggaagcaaaauuaaacagagaagaaauagaugggguaaagcuggaaucaacaaggauuuaccagauuuuggcgaucuauucaacugucgccaguucauugguacugguagucucccugggggcaaucaguuucuggaugugcucuaaugggucucuacaguguagaauauguauuuaa

SEQ ID NO: 39339 - RNA, 1701 nt, Artificial Sequence
  derived and/or modified CDS sequence (wt) from hemagglutinin__InfluenzaA__AEO01227
augaaggcaauacuaguaguucugcuauauacauuugcaaccgcaaaugcagacacauuauguauagguuaucaugcgaacaauucaacagacacuguagacacaguacuagaaaagaauguaacaguaacacacucuguuaaccuucuagaagacaagcauaacgggaaacuaugcaaacuaagagggauagccccauugcauuuggguaaauguaacauugcuggcuggauccugggaaauccagagugugaaucacucuccacagcaagcucaugguccuacauuguggaaacaucuaguucagacaauggaacguguuacccaggagauuucaucgauuaugaggagcuaagagagcaauugagcucagugucaucauuugaaagguuugagauauuccccaagacaaguucauggcccaaucaugacucgaacaaagguguaacggcagcaugcccucaugcuggagcaaaaagcuucuacaaaaauuuaauauggcuaguuaaaaaaggaaauucauacccaaagcucagcaaauccuacauuaaugauaaagggaaagaaguccucgugcuauggggcauucaccauccaucuacuagugcugaccaacaaagucucuaucagaaugcagaugcauauguuuuuguggggacaucaagauacagcaagaaguucaagccggaaauagcaauaagacccaaagugagggaucaagaagggagaaugaacuauuacuggacacuaguagagccgggagacaaaauaacauucgaagcaacuggaaaucuagugguaccgagauaugcauucgcaauggaaagaaaugcuggaucugguauuaucauuucagauacaccaguccacgauugcaauacaacuugucagacacccaagggugcuauaaacaccagccucccauuucagaauauacauccgaucacaauuggaaaauguccaaaauauguaaaaagcacaaaauugagacuggccacaggauugaggaaugucccgucuauucaaucuagaggccuauuuggggccauugccgguuucauugaagggggguggacagggaugguagauggaugguacgguuaucaccaucaaaaugagcaggggucaggauaugcagccgaccugaagagcacacagaaugccauugacgagauuacuaacaaaguaaauucuguuauugaaaagaugaauacacaguucacagcaguagguaaagaguucaaccaccuggaaaaaagaauagagaauuuaaauaaaaaaguugaugaugguuuccuggacauuuggacuuacaaugccgaacuguugguucuauuggaaaaugaaagaacuuuggacuaccacgauucaaaugugaagaacuuauaugaaaagguaagaagccaguuaaaaaacaaugccaaggaaauuggaaacggcugcuuugaauuuuaccacaaaugcgauaacacgugcauggaaagugucaaaaaugggacuuaugacuacccaaaauacucagaggaagcaaaauuaaacagagaagaaauagaugggguaaagcuggaaucaacaaggauuuaccagauuuuggcgaucuauucaacugucgccaguucauugguacugguagucucccugggggcaaucaguuucuggaugugcucuaaugggucucuacaguguagaauauguauuuaa

SEQ ID NO: 39340 - RNA, 1701 nt, Artificial Sequence
  derived and/or modified CDS sequence (wt) from hemagglutinin__InfluenzaA__AEO01228
augaaggcaauacuaguaguucugcuauauacauuugcaaccgcaaaugcagacacauuauguauagguuaucaugcgaacaauucaacagacacuguagacacaguacuagaaaagaauguaacaguaacacacucuguuaaccuucuagaagacaagcauaacgggaaacuaugcaaacuaagagggguagccccauugcauuuggguaaauguaacauugcuggcuggauccuggggaauccagagugugaaucacucuccacagcaagcucaugguccuacauuguggaaacaucuaguucagacaauggaacguguuacccaggagauuucaucgauuaugaggagcuaagagagcaauugagcucagugucaucauuugaaagguuugagauauuccccaagacaaguucauggcccaaucaugacucgaacaaagguguaacggcagcauguccucaugcuggagcaaaaagcuucuacaaaaauuuaauauggcuaguuaaaaaaggaaauucauacccaaagcucagcaaauccuacauuaaugauaaagggaaagaaguccucgugcuauggggcauucaccauccaucuacuagugcugaccaacaaagucucuaucagaaugcagaugcauauguuuuuguggggacaucaagauacagcaagaaguucaagccggaaauagcaauaagacccaaagugagggaucaagaagggagaaugaacuauuacuggacacuaguagagccgggagacaaaauaacauucgaagcaacuggaaaucuagugguaccgagauaugcauucgcaauggaaagaaaugcuggaucugguauuaucauuucagauacaccaguccacgauugcaauacaacuugucagacacccaagggugcuauaaacaccagccucccauuucagaauauacauccgaucacaauuggaaaauguccaaaauauguaaaaagcacaaaauugagacuggccacaggauugaggaaugucccgucuauucaaucuagaggccuauuuggggccauugccgguuucauugaagggggguggacagggaugguagauggaugguacgguuaucaccaucaaaaugagcaggggucaggauaugcagccgaccugaagagcacacagaaugccauugacgagauuacuaacaaaguaaauucuguuauugaaaagaugaauacacaguucacagcaguagguaaagaguucaaccaccuggaaaaaagaauagagaauuuaaauaaaaagguugaugaugguuuccuggacauuuggacuuacaaugccgaacuguugguucuauuggaaaaugaaagaacuuuggacuaccacgauucaaaugugaagaacuuauaugaaaagguaagaagccaguuaaaaaacaaugccaaggaaauuggaaacggcugcuuugaauuuuaccacaaaugcgauaacacgugcauggaaagugucaaaaaugggacuuaugacuacccaaaauacucagaggaagcaaaauuaaacagagaagaaauagaugggguaaagcuggaaucaacaaggauuuaccagauuuuggcgaucuauucaacugucgccaguucauugguacugguagucucccugggggcaaucaguuucuggaugugcucuaaugggucucuacaguguagaauauguauuuaa

SEQ ID NO: 39341 - RNA, 1701 nt, Artificial Sequence
  derived and/or modified CDS sequence (wt) from hemagglutinin__InfluenzaA__AEO01229
augaaggcaauacuaguaguucugcuauauacauuugcaaccgcaaaugcagacacauuauguauagguuaucaugcgaacaauucaacagacacuguagacacaguacuagaaaagaauguaacaguaacacacucuguuaaccuucuagaagacaagcauaacgggaaacuaugcaaacuaagagggguagccccauugcauuuggguaaauguaacauugcuggcuggauccugggaaauccagagugugaaucacucuccacagcaagcucaugguccuacauuguggaaacaucuaguucagacaauggaacguguuacccaggagauuucaucgauuaugaggagcuaagagagcaauugagcucagugucaucauuugaaagguuugagauauuccccaagacaaguucauggcccaaucaugacucgaacaaagguguaacggcagcauguccucaugcuggagcaaaaagcuucuacaaaaauuuaauauggcuaguuaaaaaaggaaauucauacccaaagcucagcaaauccuacauuaaugauaaagggaaagaaguccucgugcuauggggcauucaccauccaucuacuagugcugaccaacaaagucucuaucagaaugcagaugcauauguuuuuguggggacaucaagauacagcaagaaguucaagccggaaauagcaauaagacccaaagugagggaucaagaagggagaaugaacuauuacuggacacuaguagagccgggagacaaaauaacauucgaagcaacuggaaaucuagugguaccgagauaugcauucgcaauggaaagaaaugcuggaucugguauuaucauuucagauacaccaguccacgauugcaauacaacuugucagacacccaagggugcuauaaacaccagccucccauuucagaauauacauccgaucacaauuggaaaauguccaaaauauguaaaaagcacaaaauugagacuggccacaggauugaggaaugucccgucuauucaaucuagaggccuauuuggggccauugccgguuucauugaagggggguggacagggaugguagauggaugguacgguuaucaccaucaaaaugagcaggggucaggauaugcagccgaccugaagagcacacagaaugccauugacgagauuacuaacaaaguaaauucuguuauugaaaagaugaauacacaguucacagcaguagguaaagaguucaaccaccuggagaaaagaauagagaauuuaaauaaaaaaguugaugaugguuuccuggacauuuggacuuacaaugccgaacuguugguucuauuggaaaaugaaagaacuuuggacuaccacgauucaaaugugaagaacuuauaugaaaagguaagaagccaguuaaaaaacaaugccaaggaaauuggaaacggcugcuuugaauuuuaccacaaaugcgauaacacgugcauggaaagugucaaaaaugggacuuaugacuacccaaaauacucagaggaagcaaaauuaaacagagaagaaauagaugggguaaagcuggaaucaacaaggauuuaccagauuuuggcgaucuauucaacugucgccaguucauugguacugguagucucccugggggcaaucaguuucuggaugugcucuaaugggucucuacaguguagaauauguauuuaa

SEQ ID NO: 39342 - RNA, 1701 nt, Artificial Sequence
  derived and/or modified CDS sequence (wt) from hemagglutinin__InfluenzaA__AEO01230
augaaggcaauacuaguaguucugcuauauacauuugcaaccgcaaaugcagacacauuauguauagguuaucaugcgaacaauucaacagacacuguagacacaguacuagaaaggaauguaacaguaacacacucuguuaaccuucuagaagacaagcauaacgggaaacuaugcaaacuaagagggguagccccauugcauuuggguaaauguaacauugcuggcuggauccugggaaauccagagugugaaucacucuccacagcaagcucaugguccuacauuguggaaacaucuaguucagacaauggaacguguuacccaggagauuucaucgauuaugaggagcuaagagagcaauugagcucagugucaucauuugaaagauuugagauauuccccaagacaaguucauggcccaaucaugacucgaacaaagguguaacggcagcauguccucaugcuggagcaaaaagcuucuacaaaaauuuaauauggcuaguuaaaaaaggaaauucauacccaaagcucagcaaauccuacauuaaugauaaagggaaagaaguccucgugcuauggggcauucaccauccaucuacuagugcugaccaacaaagucucuaucagaaugcagaugcauauguuuuuguggggacaucaagauacagcaagaaguucaagccggaaauagcaauaagacccaaagugagggaucaagaagggagaaugaacuauuacuggacacuaguagagccgggagacaaaauaacauucgaagcaacuggaaaucuagugguaccgagauaugcauucgcaauggaaagaaaugcuggaucugguauuaucauuucagauacaccaguccacgauugcaauacaacuugucagacacccaagggugcuauaaacaccagccucccauuucagaauauacauccgaucacaauuggaaaauguccaaaauauguaaaaagcacaaaauugagacuggccacaggauugaggaaugucccgucuauucaaucuagaggccuauuuggggccauugccgguuucauugaagggggguggacagggaugguggauggaugguacgguuaucaccaucaaaaugagcaggggucaggauaugcagccgaccugaagagcacacagaaugccauugacgagauuacuaacaaaguaaauucuguuauugaaaagaugaauacacaguucacagcaguagguaaagaguucaaccaccuggaaaaaagaauagagaauuuaaauaaaaaaguugaugaugguuuccuggacauuuggacuuacaaugccgaacuguugguucuauuggaaaaugaaagaacuuuggacuaccacgauucaaaugugaagaacuuauaugaaaagguaagaagccaguuaaaaaacaaugccaaggaaauuggaaacggcugcuuugaauuuuaccacaaaugcgauaacacgugcauggaaagugucaaaaaugggacuuaugacuacccaaaauacucaaaggaagcaaaauuaaacagagaagaaauagaugggguaaagcuggaaucaacaaggauuuaccagauuuuggcgaucuauucaacugucgccaguucauugguacugguagucucccugggggcaaucaguuucuggaugugcucuaaugggucucuacaguguagaauauguauuuaa

SEQ ID NO: 39343 - RNA, 1701 nt, Artificial Sequence; identical to SEQ ID NO: 35308
  derived and/or modified CDS sequence (wt) from hemagglutinin__InfluenzaA__AEO01231

SEQ ID NO: 39344 - RNA, 1701 nt, Artificial Sequence; identical to SEQ ID NO: 39207
  derived and/or modified CDS sequence (wt) from hemagglutinin__InfluenzaA__AEO01232

SEQ ID NO: 39345 - RNA, 1701 nt, Artificial Sequence
  derived and/or modified CDS sequence (wt) from hemagglutinin__InfluenzaA__AEO01233
augaaggcaauacuaguaguucugcuauauacauuugcaaccgcaaaugcagacacauuauguauagguuaucaugcgaacaauucaacagacacuguagacacaguacuagaaaagaauguaacaguaacacacucuguuaaccuucuagaagacaagcauaacgggaaacuaugcaaacuaagagggguagccccauugcauuuggguaaauguaacauugcuggcuggauccugggaaauccagagugugaaucacucuccacagcaagcucaugguccuacauuguggaaacaucuaguucagacaauggaacguguuacccaggagauuucaucgauuaugaggagcuaagagagcaauugagcucagugucaucauuugaaagguuugagauauuccccaagacaaguucauggcccaaucaugacucgaacaaagguguaacggcagcauguccucaugcuggagcaaaaagcuucuacaaaaauuuaauauggcuaguuaaaaaaggaaauucauacccaaagcucagcaaauccuacauuaaugauaaagggaaagaaguccucgugcuauggggcauucaccauccaucuacuagugcugaccaacaaagucucuaucagaaugcagaugcauauguuuuuguggggacaucaagauacagcaagaaguucaagccggaaauagcaauaagacccaaagugagggaucaagaagggagaaugaacuauuacuggacacuaguagagccgggagacaaaauaacauucgaagcaacuggaaaucuagugguaccgagauaugcauucgcaauggaaagaaaugcuggaucugguauuauuauuucagauacaccaguccacgauugcaauacaacuugucagacacccaagggugcuauaaacaccagccucccauuucagaauauacauccgaucacaauuggaaaauguccaaaauauguaaaaagcacaaaauugagacuggccacaggauugaggaaugucccgucuauucaaucuagaggccuauuuggggccauugccgguuucauugaagggggguggacagggaugguagauggaugguacgguuaucaccaucaaaaugagcaggggucaggauaugcagccgaccugaagagcacacagaaugccauugacgagauuacuaacaaaguaaauucuguuauugaaaagaugaauacacaguucacagcaguagguaaagaguucaaccaccuggaaaaaagaauagagaauuuaaauaaaaagguugaugaugguuuccuggacauuuggacuuacaaugccgaacuguugguucuauuggaaaaugaaagaacuuuggacuaccacgauucaaaugugaagaacuuauaugaaaagguaagaagccaguuaaaaaacaaugccaaggaaauuggaaacggcugcuuugaauuuuaccacaaaugcgauaacacgugcauggaaagugucaaaaaugggacuuaugacuacccaaaauacucagaggaagcaaaauuaaacagagaagaaauagaugggguaaagcuggaaucaacaaggauuuaccagauuuuggcgaucuauucaacugucgccaguucauugguacugguagucucccugggggcaaucaguuucuggaugugcucuaaugggucucuacaguguagaauauguauuuaa

SEQ ID NO: 39346 - RNA, 1701 nt, Artificial Sequence; identical to SEQ ID NO: 34681
  derived and/or modified CDS sequence (wt) from hemagglutinin__InfluenzaA__AEO01234

SEQ ID NO: 39347 - RNA, 1701 nt, Artificial Sequence
  derived and/or modified CDS sequence (wt) from hemagglutinin__InfluenzaA__AEO01235
augaaggcaauacuaguaguucugcuauauacauuugcaaccgcaaaugcagacacauuauguauagguuaucaugcgaacaauucaacagacacuguagacacaguacuagaaaagaauguaacaguaacacacucuguuaaccuucuagaagacaagcauaacgggaaacuaugcaaacuaagagggguagccccauugcauuuggguaaauguaacauugcuggcuggauccugggaaauccagagugugaaucacucuccacagcaagcucaugguccuacauuguggaaacaucuaguucagacaauggaacguguuacccaggagauuucaucgauuaugaggagcuaagagagcaauugagcucagugucaucauuugaaagguuugagauauuccccaagacaaguucauggcccaaucaugacucgaacaaagguguaacggcagcaugcccucaugcuggagcaaaaagcuucuacaaaaauuuaauauggcuaguuaaaaaaggaaauucauacccaaagcucagcaaauccuacauuaaugauaaagggaaagaaguccucgugcuauggggcauucaccauccaucuacuagugcugaccaacaaagucucuaucagaaugcagaugcauauguuuuuguggggacaucaagauacagcaagaaguucaagccggaaauagcaauaagacccaaagugagggaucaagaagggagaaugaacuauuacuggacacuaguagagccgggagacaaaauaacauucgaagcaacuggaaaucuagugguaccgagauaugcauucgcaauggaaagaaaugcuggaucugguauuaucauuucagauacaccaguccacgauugcaauacaacuugucagacacccaagggugcuauaaacaccagccucccauuucagaauauacauccgaucacaauuggaaaauguccaaaauauguaaaaagcacaaaauugagacuggccacaggauugaggaaugucccgucuauucaaucuagaggccuauuuggggccauugccgguuucauugaagggggguggacagggaugguagauggaugguacgguuaucaccaucaaaaugagcaggggucaggauaugcagccgaccugaagagcacacagaaugccauugacgagauuacuaacaaaguaaauucuguuauugaaaagaugaacacacaguucacagcaguagguaaagaguucaaccaccuggaaaaaagaauagagaauuuaaauaaaaaaguugaugaugguuuccuggacauuuggacuuacaaugccgaacuguugguucuauuggaaaaugaaagaacuuuggacuaccacgauucaaaugugaagaacuuauaugaaaagguaagaagccaguuaaaaaacaaugccaaggaaauuggaaacggcugcuuugaauuuuaccacaaaugcgauaacacgugcauggaaagugucaaaaaugggacuuaugacuacccaaaauacucagaggaagcaaaauuaaacagagaagaaauagaugggguaaagcuggaaucaacaaggauuuaccagauuuuggcgaucuauucaacugucgccaguucauugguacugguagucucccugggggcaaucaguuucuggaugugcucuaaugggucucuacaguguagaauauguauuuaa

SEQ ID NO: 39348 - RNA, 1701 nt, Artificial Sequence
  derived and/or modified CDS sequence (wt) from hemagglutinin__InfluenzaA__AEO01236
augaaggcaauacuaguaguucugcuauauacauuugcaaccgcaaaugcagacacauuauguauagguuaucaugcgaacaauucaacagacacuguagacacaguacuagaaaagaauguaacaguaacacacucuguuaaccuucuagaagacaagcauaacgggaaacuaugcaaacuaagagggguagccccauugcauuuggguaaauguaacauugcuggcuggauccugggaaauccagagugugaaucacucuccacagcaagcucaugguccuacauuguggaaacaucuaguucagacaauggaacguguuacccaggagauuucaucgauuaugaggagcuaagagagcaauugagcucagugucaucauuugaaagguuugagauauuccccaagacaaguucauggcccaaucaugacucgaacaaagguguaacggcagcauguccucaugcuggagcaaaaagcuucuacaaaaauuuaauauggcuaguuaaaaaaggaaauucauacccaaagcucagcaaauccuacauuaaugauaaagggaaagaaguccucgugcuauggggcauucaccauccaucuacuagugcugaccaacaaagucucuaucagaaugcagaugcauauguuuuuguggggacaucaagauacagcaagaaguucaagccggaaauagcaauaagacccaaagugagggaucaagaagggagaaugaacuauuacuggacacuaguagagccgggagacaaaauaacauucgaagcaacuggaaaucuagugguaccgagauaugcauucgcaauggaaagaaaugcuggaucugguauuaucauuucagauacaccaguccacgauugcaauacaacuugucagacacccaagggugcuauaaacaccagccucccauuucagaauauacauccgaucacaauuggaaaauguccaaaauauguaaaaagcacaaaauugagacuggccacaggauugaggaaugucccgucuauucaaucuagaggccuauuuggggccauugccgguuucauugaagggggguggacagggaugguagauggaugguacgguuaucaccaucaaaaugagcaggggucaggauaugcagccgaccugaagagcacacagaaugccauugacgagauuacuaacaaaguaaauucuauuauugaaaagaugaauacacaguucacagcaguagguaaagaguucaaccaccuggaaaaaagaauagagaauuuaaauaaaaaaguugaugaugguuuccuggacauuuggacuuacaaugccgaacuguugguucuauuggaaaaugaaagaacuuuggacuaccacgauucaaaugugaagaacuuauaugaaaagguaagaagccaguuaaaaaacaaugccaaggaaauuggaaacggcugcuuugaauuuuaccacaaaugcgauaacacgugcauggaaagugucaaaaaugggacuuaugacuacccaaaauacucagaggaagcaaaauuaaacagagaagaaauagaugggguaaagcuggaaucaacaaggauuuaccagauuuuggcgaucuauucaacugucgccaguucauugguacugguagucucccugggggcaaucaguuucuggaugugcucuaaugggucucuacaguguagaauauguauuuaa

SEQ ID NO: 39349 - RNA, 1701 nt, Artificial Sequence
  derived and/or modified CDS sequence (wt) from hemagglutinin__InfluenzaA__AEO01237
augaaggcaauacuaguaguucugcuauauacauuugcaaccgcaaaugcagacacauuauguauagguuaucaugcgaacaauucaacagacacuguagacacaguacuagaaaagaauguaacaguaacacacucuguuaaccuucuagaagacaagcauaacgggaaacuaugcaaacuaagagggguagccccauugcauuuggguaaauguaacauugcuggcuggauccugggaaauccagagugugaaucacucuccacagcaagcucaugguccuacauuguggaaacaucuaguucagacaauggaacguguuacccaggagauuucaucgauuaugaggagcuaagagagcaauugagcucagugucaucauuugaaagguuugagauauuccccaagacaaguucauggcccaaucaugacucgaacaaagguguaacggcagcauguccucaugcuggagcaaaaagcuucuacaaaaauuuaauauggcuaguuaaaaaaggaaauucauauccaaagcucagcaaauccuacauuaaugauaaagggaaagaaguccucguguuauggggcauucaccauccaucuacuagugcugaccaacaaagucucuaucagaaugcagaugcauauguuuuuguggggacaucaagauacagcaagaaguucaagccggaaauagcaauaagacccaaagugagggaucaagaagggagaaugaacuauuacuggacacuaguagagccgggagacaaaauaacauucgaagcaacuggaaaucuagugguaccgagauaugcauucgcaauggaaagaaaugcuggaucugguauuaucauuucagauacaccaguccacgauugcaauacaacuugucagacacccaagggugcuauaaacaccagccucccauuucagaauauacauccgaucacaauuggaaaauguccaaaauauguaaaaagcacaaaauugagacuggccacaggauugaggaaugucccgucuauucaaucuagaggccuauuuggggccauugccgguuucauugaagggggguggacagggaugguagauggaugguacgguuaucaccaucaaaaugagcaggggucaggauaugcagcugaccugaagagcacacagaaugccauugacgagauuacuaacaaaguaaauucuguuauugaaaagaugaauacacaguucacagcaguagguaaagaguucaaccaccuggaaaaaagaauagagaauuuaaauaaaaaaguugaugaugguuuccuggacauuuggacuuacaaugccgaacuguugguucuauuggaaaaugaaagaacuuuggacuaccacgauucaaaugugaagaacuuguaugaaaagguaagaagccaguuaaaaaacaaugccaaggaaauuggaaacggcugcuuugaauuuuaccacaaaugcgauaacacgugcauggaaagugucaaaaaugggacuuaugacuacccaaaauacucagaggaagcaaaauuaaacagagaagaaauagaugggguaaagcuggaaucaacaaggauuuaccagauuuuggcgaucuauucaacugucgccaguucauugguacugguagucucccugggggcaaucaguuucuggaugugcucuaaugggucucuacaguguagaauauguauuuaa

SEQ ID NO: 39350 - RNA, 1701 nt, Artificial Sequence
  derived and/or modified CDS sequence (wt) from hemagglutinin__InfluenzaA__AEO01238
augaaggcaauacuaguaguucugcuauauacauuugcaaccgcaaaugcagacacauuauguauagguuaucaugcgaacaauucaacagacacuguagacacaguacuagaaaagaauguaacaguaacacacucuguuaaccuucuagaagacaagcauaacgggaaacuaugcaaacuaagagggguagccccauugcauuuggguaaauguaacauugcuggcuggauccugggaaauccagagugugaaucacucuccacagcaagcucaugguccuacauuguggaaacaucuaguucagacaauggaacguguuacccaggagauuucaucgauuaugaggagcuaagagagcaauugagcucagugucaucauuugaaagguuugagauauuccccaagacaaguucauggcccaaucaugauucgaacaaagguguaacggcagcauguccucaugcuggagcaaaaagcuucuacaaaaauuuaauauggcuaguuaaaaaaggaaauucauacccaaagcucagcaaauccuacauuaaugauaaagggaaagaaguccucgugcuauggggcauucaccauccaucuacuagugcugaccaacaaagucucuaucagaaugcagaugcauauguuuuuguggggacaucaagauacagcaagaaguucaagccggaaauagcaauaagacccaaagugagggaucaagaagggagaaugaacuauuacuggacacuaguagagccgggagacaaaauaacauucgaagcaacuggaaaucuagugguaccgagauaugcauucgcaauggaaagaaaugcuggaucugguauuaucauuucagauacaccaguccacgauugcaauacaacuugucagacacccaagggugcuauaaacaccagccucccauuucagaauauacauccgaucacaauuggaaaauguccaaaauauguaaaaagcacaaaauugagacuggccacaggauugaggaaugucccgucuauucaaucuagaggccuauuuggggccauugccgguuucauugaagggggguggacagggaugguagauggaugguacgguuaucaccaucaaaaugagcaggggucaggauaugcagccgaccugaagagcacacagaaugccauugacgagauuacuaacaaaguaaauucuguuauugaaaagaugaauacacaguucacagcaguagguaaagaguucaaccaccuggaaaaaagaauagagaauuuaaauaaaaaaguugaugaugguuuccuggacauuuggacuuacaaugccgaauuguugguucuauuggaaaaugaaagaacuuuggacuaccacgauucaaaugugaagaacuuauaugaaaagguaagaagccaguuaaaaaacaaugccaaggaaauuggaaacggcugcuuugaauuuuaccacaaaugcgauaacacgugcauggaaagugucaaaaaugggacuuaugacuacccaaaauacucagaggaagcaaaauuaaacagagaagaaauagaugggguaaagcuggaaucaacaaggauuuaccagauuuuggcgaucuauucaacugucgccaguucauugguacugguagucucccugggggcaaucaguuucuggaugugcucuaaugggucucuacaguguagaauauguauuuaa

SEQ ID NO: 39351 - RNA, 1701 nt, Artificial Sequence
  derived and/or modified CDS sequence (wt) from hemagglutinin__InfluenzaA__AEO01240
augaaggcaauacuaguaguucugcuauauacauuugcaaccgcaaaugcagacacauuauguauagguuaucaugcgaacaauucaacagacacuguagacacaguacuagaaaagaauguaacaguaacacacucuguuaaccuucuagaagacaagcauaaugggaaacuaugcaaacuaagagggguagccccauugcauuuggguaaauguaacauugcuggcuggauccugggaaauccagagugugaaucacucuccacagcaagcucaugguccuacauuguggaaacaucuaguucagacaauggaacguguuacccaggagauuucaucgauuaugaggagcuaagagagcaauugagcucagugucaucauuugaaagguuugagauauuccccaagacaaguucauggcccaaucaugacucgaacaaagguguaacggcagcauguccucaugcuggagcaaaaagcuucuacaaaaauuuaauauggcuaguuaaaaaaggaaauucauacccaaagcucagcaaauccuacauuaaugauaaagggaaagaaguccucgugcuauggggcauucaccauccaucuacuagugcugaccaacaaagucucuaucagaaugcagaugcauauguuuuuguggggacaucaagauacagcaagaaguucaagccggaaauagcaauaagacccaaagugagggaucaagaagggagaaugaacuauuacuggacacuaguagagccgggagacaaaauaacauucgaagcaacuggaaaucuagugguaccgagauaugcauucgcaauggaaagaaaugcuggaucugguauuaucauuucagauacaccaguccacgauugcaauacaacuugucagacacccaaaggugcuauaaacaccagccucccauuucagaauauacauccgaucacaauuggaaaauguccaaaauauguaaaaagcacaaaauugagacuggccacaggauugaggaaugucccgucuauucaaucuagaggccuauuuggggccauugccgguuucauugaagggggguggacagggaugguagauggaugguacgguuaucaccaucaaaaugagcaggggucaggauaugcagccgaccugaagagcacacagaaugccauugacgagauuacuaacaaaguaaauucuguuauugaaaagaugaauacacaguucacagcaguagguaaagaguucaaccaccuggaaaaaagaauagagaauuuaaauaaaaagguugaugaugguuuccuggacauuuggacuuacaaugccgaacuguugguucuauuggaaaaugaaagaacuuuggacuaccacgauucaaaugugaagaacuuauaugaaaagguaagaagccaguuaaaaaacaaugccaaggaaauuggaaacggcugcuuugaauuuuaccacaaaugcgauaacacgugcauggaaagugucaaaaaugggacuuaugacuacccaaaauacucagaggaagcaaaauuaaacagagaagaaauagaugggguaaagcuggaaucaacaaggauuuaccagauuuuggcgaucuauucaacugucgccaguucauugguacugguagucucccugggggcaaucaguuucuggaugugcucuaaugggucucuacaguguagaauauguauuuaa

SEQ ID NO: 39352 - RNA, 1701 nt, Artificial Sequence
  derived and/or modified CDS sequence (wt) from hemagglutinin__InfluenzaA__AEO01241
augaaggcaauacuaguaguucugcuauauacauuugcaaccgcaaaugcagacacauuauguauagguuaucaugcgaacaauucaacagacacuguagacacaguacuagaaaagaauguaacaguaacacacucuguuaaccuucuagaagacaagcauaacgggaaacuaugcaaacuaagagggguagccccauugcauuuggguaaauguaacauugcuggcuggauccugggaaauccagagugugaaucacucuccacagcaagcucaugguccuacauuguggaaacaucuaguucagacaauggaacguguuacccaggagauuucaucgauuaugaggagcuaagagagcaauugagcucagugucaucauuugaaagguuugagauauuccccaagacaaguucauggcccaaucaugacucgaacaaagguguaacggcagcauguccucaugcuggagcaaaaagcuucuacaaaaauuuaauauggcuaguuaaaaaaggaaauucauacccaaagcucagcaaauccuacauuaaugauaaagggaaagaaguccucgugcuauggggcauucaccauccaucuacuagugcugaccaacaaagucucuaucagaaugcagaugcauauguuuuuguggggacaucaagauacagcaagaaguucaagccggaaauagcaauaagacccaaagugagggaacaagaagggagaaugaacuauuacuggacacuaguagagccgggagacaaaauaacauucgaagcaacuggaaaucuagugguaccgagauaugcauucgcaauggaaagaaaugcuggaucugguauuaucauuucagauacaccaguccacgauugcaauacaacuugucagacacccaaaggugcuauaaacaccagccucccauuucagaauauacauccgaucacaauuggaaaauguccaaaauauguaaaaagcacaaaauugagacuggccacaggauugaggaaugucccgucuauucaaucuagaggccuauuuggggccauugccgguuucauugaagggggguggacagggaugguagauggaugguacgguuaucaccaucaaaaugagcaggggucaggauaugcagccgaccugaagagcacacagaaugccauugacgagauuacuaacaaaguaaauucuguuauugaaaagaugaauacacaguucacagcaguagguaaagaguucaaccaccuggaaaaaagaauagagaauuuaaauaaaaaaguugaugaugguuuccuggacauuuggacuuacaaugccgaacuguugguucuauuggaaaaugaaagaacuuuggacuaccacgauucaaaugugaagaacuuauaugaaaagguaagaagccaguuaaaaaacaaugccaaggaaauuggaaacggcugcuuugaauuuuaccacaaaugcgauaacacgugcauggaaagugucaaaaaugggacuuaugacuacccaaaauacucagaggaagcaaaauuaaacagagaagaaauagaugggguaaagcuggaaucaacaaggauuuaccagauuuuggcgaucuauucaacugucgccaguucauugguacugguagucucccugggggcaaucaguuucuggaugugcucuaaugggucucuacaguguagaauauguauuuaa

SEQ ID NO: 39353 - RNA, 1701 nt, Artificial Sequence; identical to SEQ ID NO: 34681
  derived and/or modified CDS sequence (wt) from hemagglutinin__InfluenzaA__AEO01242

SEQ ID NO: 39354 - RNA, 1701 nt, Artificial Sequence
  derived and/or modified CDS sequence (wt) from hemagglutinin__InfluenzaA__AEO01244
augaaggcaauacuaguaguucugcuauauacauuugcaaccgcaaaugcagacacauuauguauagguuaucaugcgaacaauucaacagacacuguagacacaguacuagaaaagaauguaacaguaacacacucuguuaaccuucuagaagacaagcauaacgggaaacuaugcaaacuaagagggguagccccauugcauuuggguaaauguaacauugcuggcuggauccugggaaauccagagugugaaucacucuccacagcaagcucaugguccuacauuguggaaacaucuaguucagacaauggaacguguuacccaggagauuucaucgauuaugaggagcuaagagagcaauugagcucagugucaucauuugaaagguuugagauauuccccaagacaaguucauggcccaaucaugacucgaacaaagguguaacggcagcauguccucaugcuggagcaaaaagcuucuacaaaaauuuaauauggcuaguuaaaaaaggaaauucauacccaaagcucagcaaauccuacauuaaugauaaagggaaagaaguccucgugcuauggggcauucaccauccaucuacuagugcugaccaacaaagucucuaucagaaugcagaugcauauguuuuuguggggacaucaaaauacagcaagaaguucaagccggaaauagcaauaagacccaaagugaggggucaagaagggagaaugaacuauuacuggacacuaguagagccgggagacaaaauaacauucgaagcaacuggaaaucuagugguaccgagauaugcauucgcaauggaaagaaaugcuggaucugguauuaucauuucagauacaccaguccacgauugcaauacaacuugucagacacccaagggugcuauaaacaccagccucccauuucagaauauacauccgaucacaauuggaaaauguccaaaauauguaaaaagcacaaaauugagacuggccacaggauugaggaaugucccgucuauucaaucuagaggccuauuuggggccauugccgguuucauugaagggggguggacagggaugguagauggaugguacgguuaucaccaucaaaaugagcaggggucaggauaugcagccgaccugaagagcacacagaaugccauugacgagauuacuaacaaaguaaauucuguuauugaaaagaugaauacacaguucacagcaguagguaaagaguucaaccaccuggaaaaaagaauagagaauuuaaauaaaaaaguugaugaugguuuccuggacauuuggacuuacaaugccgaacuguugguucuauuggaaaaugaaagaacuuuggacuaccacgauucaaaugugaagaacuuauaugaaaagguaagaagccaguuaaaaaacaaugccaaggaaauuggaaacggcugcuuugaauuuuaccacaaaugcgauaacacgugcauggaaagugucaaaaaugggacuuaugacuacccaaaauacucagaggaagcaaaauuaaacagagaagaaauagaugggguaaagcuggaaucaacaaggauuuaccagauuuuggcgaucuauucaacugucgccaguucauugguacugguagucucccugggggcaaucaguuucuggaugugcucuaaugggucucuacaguguagaauauguauuuaa

SEQ ID NO: 39355 - RNA, 1701 nt, Artificial Sequence; identical to SEQ ID NO: 34681
  derived and/or modified CDS sequence (wt) from hemagglutinin__InfluenzaA__AEO01245

SEQ ID NO: 39356 - RNA, 1701 nt, Artificial Sequence
  derived and/or modified CDS sequence (wt) from hemagglutinin__InfluenzaA__AEO01247
augaaggcaauacuaguaguucugcuauauacauuugcaaccgcaaaugcagacacauuauguauagguuaucaugcgaacaauucaacagacacuguagacacaguacuagaaaagaauguaacaguaacacacucuguuaaccuucuagaagacaagcauaacgggaaacuaugcaaacuaagagggguagccccauugcauuuggguaaauguaacauugcuggcuggauccugggaaauccagagugugaaucacucuccacagcaagcucaugguccuacauuguggaaacaucuaguucagacaauggaacguguuacccaggagauuucaucgauuaugaggagcuaagagagcaauugagcucagugucaucauuugaaagguuugagauauuccccaagacaaguucauggcccaaucaugacucgaacaaagguguaacggcagcauguccucaugcuggagcaaaaagcuucuacaaaaauuuaauauggcuaguuaaaaaaggaaauucauacccaaagcucagcaaauccuacauuaaugauaaagggaaagaaguccucgugcuauggggcauucaccauccaucuacuagugcugaccaacaaagucucuaucagaaugcagaugcauauguuuuuguggggacaucaagauacagcaagaaguucaagccggaaauagcaauaagacccaaagugagggaucaagaagggagaaugaacuauuacuggacacuaguagagccgggagacaaaauaacauucgaagcaacuggaaaucuagugguaccgagauaugcauucgcaauggaaagaaaugcuggaucugguauucucauuucagauacaccaguccacgauugcaauacaacuugucagacacccaagggugcuauaaacaccagccucccauuucagaauauacauccgaucacaauuggaaaauguccaaaauauguaaaaagcacaaaauugagacuggccacaggauugaggaaugucccgucuauucaaucuagaggccuauuuggggccauugccgguuucauugaagggggguggacagggaugguagauggaugguacgguuaucaccaucaaaaugagcaggggucaggauaugcagccgaccugaagagcacacagcaugccauugacgagauuacuaacaaaguaaauucuguuauugaaaagaugaauacacaguucacagcaguagguaaagaguucaaccaccuggaaaaaagaauagagaauuuaaauaaaaaaguugaugaugguuuccuggacauuuggacuuacaaugccgaacuguugguucuauuggaaaaugaaagaacuuuggacuaccacgauucaaaugugaagaacuuauaugaaaagguaagaagccaguuaaaaaacaaugccaaggaaauuggaaacggcugcuuugaauuuuaccacaaaugcgauaacacgugcauggaaagugucaaaaaugggacuuaugacuacccaaaauacucagaggaagcaaaauuaaacagagaagaaauagaugggguaaagcuggaaucaacaaggauuuaccagauuuuggcgaucuauucaacugucgccaguucauugguacugguagucucccugggggcaaucaguuucuggaugugcucuaaugggucucuacaguguagaauauguauuuaa

SEQ ID NO: 39357 - RNA, 1701 nt, Artificial Sequence; identical to SEQ ID NO: 34714
  derived and/or modified CDS sequence (wt) from hemagglutinin__InfluenzaA__AEO01248

SEQ ID NO: 39358 - RNA, 1701 nt, Artificial Sequence; identical to SEQ ID NO: 34681
  derived and/or modified CDS sequence (wt) from hemagglutinin__InfluenzaA__AEO01249

SEQ ID NO: 39359 - RNA, 1701 nt, Artificial Sequence
  derived and/or modified CDS sequence (wt) from hemagglutinin__InfluenzaA__AEO01250
augaaggcaauacuaguaguucugcuauauacauuugcaaccgcaaaugcagacacauuauguauagguuaucaugcgaacaauucaacagacacuguagacacaguacuagaaaagaauguaacaguaacacacucuguuaaccuucuagaagacaagcauaacgggaaacuaugcaaacuaagagggguagccccauugcauuuggguaaauguaacauugcuggcuggauccugggaaauccagagugugaaucacucuccacagcaagcucaugguccuacauuguggaaacaucuaguucagacaauggaacguguuacccaggagauuucaucgauuaugaggagcuaagagagcaauugagcucagugucaucauuugaaagguuugagauauuccccaagacaaguucauggcccaaucaugacucgaacaaagguguaacggcagcauguccucaugcuggagcaaaaagcuucuacaaaaauuuaauauggcuaguuaaaaaaggaaauucauacccaaagcucagcaaauccuacauuaaugauaaagggaaagaaguccucgugcuauggggcauucaccauccaucuacuagugcugaccaacaaagucucuaucagaaugaagaugcauauguuuuuguggggacaucaagauacagcaagaaguucaagccggaaauagcaauaagacccaaagugagggaucaagaagggagaaugaacuauuacuggacacuaguagagccgggagacaaaauaacauucgaagcaacuggaaaucuagugguaccgagauaugcauucgcaauggaaagaaaugcuggaucugguauuaucauuucagauacaccaguccacgauugcaauacaacuugucagacacccaagggugcuauaaacaccagccucccauuucagaauauacauccgaucacaauuggaaaauguccaaaauauguaaaaagcacaaaauugagacuggccacaggauugaggaaugucccgucuauucaaucuagaggccuauuuggggccauugccgguuucauugaagggggguggacagggaugguagauggaugguacgguuaucaccaucaaaaugagcaggggucaggauaugcagccgaccugaagagcacacagaaugccauugacgagauuacuaacaaaguaaauucuguuauugaaaagaugaauacacaguucacagcaguagguaaagaguucaaccaccuggaaaaaagaauagagaauuuaaauaaaaaaguugaugaugguuuccuggacauuuggacuuacaaugccgaacuguugguucuauuggaaaaugaaagaacuuuggacuaccacgauucaaaugugaagaacuuauaugaaaagguaagaagccaguuaaaaaacaaugccaaggaaauuggaaacggcugcuuugaauuuuaccacaaaugcgauaacacgugcauggaaagugucaaaaaugggacuuaugacuacccaaaauacucagaggaagcaaaauuaaacagagaagaaauagaugggguaaagcuggaaucaacaaggauuuaccagauuuuggcgaucuauucaacugucgccaguucauugguacugguagucucccugggggcaaucaguuucuggaugugcucuaaugggucucuacaguguagaauauguauuuaa

SEQ ID NO: 39360 - RNA, 1701 nt, Artificial Sequence; identical to SEQ ID NO: 36866
  derived and/or modified CDS sequence (wt) from hemagglutinin__InfluenzaA__AEO01251

SEQ ID NO: 39361 - RNA, 1701 nt, Artificial Sequence; identical to SEQ ID NO: 34681
  derived and/or modified CDS sequence (wt) from hemagglutinin__InfluenzaA__AEO01252

SEQ ID NO: 39362 - RNA, 1701 nt, Artificial Sequence
  derived and/or modified CDS sequence (wt) from hemagglutinin__InfluenzaA__AEO01253
augaaggcaauacuaguaguucugcuauauacauuugcaaccgcaaaugcagacacauuauguauagguuaucaugcgaacaauucaacagacacuguagacacaguacuagaaaagaauguaacaguaacacacucuguuaaccuucuagaagacaagcauaacgggaaacuaugcaaacuaagagggguagccccauugcauuuggguaaauguaacauugcuggcuggauccugggaaauccagagugugaaucacucuccacagcaagcucaugguccuacauuguggaaacaucuaguucagacaauggaacguguuacccaggagauuucaucgauuaugaggagcuaagagagcaauugagcucagugucaucauuugaaagguuugagauauuccccaagacaaguucauggcccaaucaugacucgaacaaagguguaacggcagcauguccucaugcuggagcaaaaagcuucuacaaaaauuuaauauggcuaguuaaaaaaggaaauucauacccaaagcucagcaaauccuacauuaaugauaaagggaaagaaguccucgugcuauggggcauucaccauccaucuacuagugcugaccaacaaagucucuaucagaaugcagaugcauauguuuuuguggggacaucaagauacagcaagaaguucaagccggaaauagcaauaagacccaaagugagggaucaagaagggagaaugaacuauuauuggacacuaguagagccgggagacaaaauaacauucgaagcaacuggaaaucuagugguaccgagauaugcauucgcaauggaaagaaaugcuggaucugguauuaucauuucagauacaccaguccacgauugcaauacaacuugucagacacccaagggugcuauaaacaccagccucccauuucagaauauacauccgaucacaauuggaaaauguccaaaauauguaaaaagcacaaaauugagacuggccacaggauugaggaaugucccgucuauucaaucuagaggccuauuuggggccauugccgguuucauugaagggggguggacagggaugguagauggaugguacgguuaucaccaucaaaaugagcaggggucaggauaugcagccgaccugaagagcacacagaaugccauugacgagauuacuaacaaaguaaauucuguuauugaaaagaugaauacacaguucacagcaguagguaaagaguucaaccaccuggaaaaaagaauagagaauuuaaauaaaaaaguugaugaugguuuccuggacauuuggacuuacaaugccgaacuguugguucuauuggaaaaugaaagaacuuuggacuaccacgauucaaaugugaagaacuuauaugaaaagguaagaagccaguuaaaaaacaaugccaaggaaauuggaaacggcugcuuugaauuuuaccacaaaugcgauaacacgugcauggaaagugucaaaaaugggacuuaugacuacccaaaauacucagaggaagcaaaauuaaacagagaagaaauagaugggguaaagcuggaaucaacaaggauuuaccagauuuuggcgaucuauucaacugucgccaguucauugguacugguagucucccugggggcaaucaguuucuggaugugcucuaaugggucucuacaguguagaauauguauuuaa

SEQ ID NO: 39363 - RNA, 1701 nt, Artificial Sequence
  derived and/or modified CDS sequence (wt) from hemagglutinin__InfluenzaA__AEO01254
augaaggcaauacuaguaguucugcuauauacauuugcaaccgcaaaugcagacacauuauguauagguuaucaugcgaacaauucaacagacacuguagacacaguacuagaaaagaauguaacaguaacacacucuguuaaccuucuagaagacaagcauaacgggaaacuaugcaaacuaagagggguagccccauugcauuuggguaaauguaacauugcuggcuggauccugggaaauccagagugugaaucacucuccacagcaagcucaugguccuacauuguggaaacaucuaguucagacaauggaacguguuacccaggagauuucaucgauuaugaggagcuaagagagcaauugagcucagugucaucauuugaaagguuugagauauuccccaagacaaguucauggcccaaucaugacucgaacaaagguguaacggcagcauguccucaugcuggagcaaaaagcuucuacaaaaauuuaauauggcuaguuaaaaaaggaaauucauacccaaagcucagcaaauccuacauuaauaauaaagggaaagaaguccucgugcuauggggcauucaccauccaucuacuagugcugaccaacaaagucucuaucagaaugcagaugcauauguuuuuguggggacaucaagauacagcaagaaguucaagccggaaauagcaauaagacccaaagugagggaucaagaagggagaaugaacuauuacuggacacuaguagagccgggagacaaaauaacauucgaagcaacuggaaaucuagugguaccgagauaugcauucgcaauggaaagaaaugcuggaucugguauuaucauuucagauacaccaguccacgauugcaauacaacuugucagacacccaagggugcuauaaacaccagccucccauuucagaauauacauccgaucacaauuggaaaauguccaaaauauguaaaaagcacaaaauugagacuggccacaggauugaggaaugucccgucuauucaaucuagaggccuauuuggggccauugccgguuucauugaagggggguggacagggaugguagauggaugguacgguuaucaccaucaaaaugagcaggggucaggauaugcagccgaccugaagagcacacagaaugccauugacaagauuacuaacaaaguaaauucuguuauugaaaagaugaauacacaguucacagcaguagguaaagaguucaaccaccuggaaaaaagaauagagaauuuaaauaaaaaaguugaugaugguuuccuggacauuuggacuuacaaugccgaacuguugguucuauuggaaaaugaaagaacuuuggacuaccacgauucaaaugugaagaacuuauaugaaaagguaagaagccaguuaaaaaacaaugccaaggaaauuggaaacggcugcuuugaauuuuaccacaaaugcgauaacacgugcauggaaagugucaaaaaugggacuuaugacuacccaaaauacucagaggaagcaaaauuaaacagagaagaaauagaugggguaaagcuggaaucaacaaggauuuaccagauuuuggcgaucuauucaacugucgccaguucauugguacugguagucucccugggggcaaucaguuucuggaugugcucuaaugggucucuacaguguagaauauguauuuaa

SEQ ID NO: 39364 - RNA, 1701 nt, Artificial Sequence
  derived and/or modified CDS sequence (wt) from hemagglutinin__InfluenzaA__AEO01256
augaaggcaauacuaguaguucugcuauauacauuugcaaccgcaaaugcagacacauuauguauagguuaucaugcgaacaauucaacagacacuguagacacaguacuagaaaagaauguaacaguaacacacucuguuaaccuucuagaagacaagcauaacgggaaacuaugcaaacuaagagggguagccccauugcauuuggguaaauguaacauugcuggcuggauccugggaaauccagagugugaaucacucuccacagcaagcucaugguccuacauuguggaaacaucuaguucagacaauggaacguguuacccaggagauuucaucgauuaugaggagcuaagagagcaauugagcucagugucaucauuugaaagguuugagauauuccccaagacaaguucauggcccaaucaugacucgaacaaagguguaacggcagcauguccucaugcuggagcaaaaagcuucuacaaaaauuuaauauggcuaguuaaaaaaggaaauucauacccaaagcucagcaaauccuacauuaaugauaaagggaaagaaguccucgugcuauggggcauucaccauccaucuacuagugcugaccaacaaagucucuaucagaaugcagaugcauauguuuuuguggggacaucaagauacagcaagaaguucaagccggaaauagcaauaagacccaaagugagggaacaagaagggagaaugaacuauuacuggacacuaguagagccgggagacaaaauaacauucgaagcaacuggaaaucuagugguaccgagauaugcauucgcaauggaaagaaaugcuggaucugguauuaucauuucagauacaccaguccacgauugcaauacaacuugucagacacccaagggugcuauaaacaccagccucccauuucagaauauacauucgaucacaauuggaaaauguccaaaauauguaaaaagcacaaaauugagacuggccacaggauugaggaauguuccgucuauucaaucuagaggccuauuuggggccauugccgguuucauugaagggggguggacagggaugguagauggaugguacgguuaucaccaucaaaaugagcaggggucaggauaugcagccgaccugaagagcacacagaaugccauugacgagauuacuaacaaaguaaauucuguuauugaaaagaugaauacacaguucacagcaguagguaaagaguucaaccaccuggaaaaaagaauagagaauuuaaauaaaaaaguugaugaugguuuccuggacauuuggacuuacaaugccgaacuguugguucuauuggaaaaugaaagaacuuuggacuaccacgauucaaaugugaagaacuuauaugaaaagguaagaagccaguuaaaaaacaaugccaaggaaauuggaaacggcugcuuugaauuuuaccacaaaugcgauaacacgugcauggaaagugucaaaaaugggacuuaugacuacccaaaauacucagaggaagcaaaauuaaacagagaagaaauagaugggguaaagcuggaaucaacaaggauuuaccagauuuuggcgaucuauucaacugucgccaguucauugguacugguagucucccugggggcaaucaguuucuggaugugcucuaaugggucucuacaguguagaauauguauuuaa

SEQ ID NO: 39365 - RNA, 1701 nt, Artificial Sequence; identical to SEQ ID NO: 38100
  derived and/or modified CDS sequence (wt) from hemagglutinin__InfluenzaA__AEO01257

SEQ ID NO: 39366 - RNA, 1701 nt, Artificial Sequence; identical to SEQ ID NO: 34681
  derived and/or modified CDS sequence (wt) from hemagglutinin__InfluenzaA__AEO01258

SEQ ID NO: 39367 - RNA, 1701 nt, Artificial Sequence; identical to SEQ ID NO: 39363
  derived and/or modified CDS sequence (wt) from hemagglutinin__InfluenzaA__AEO01259

SEQ ID NO: 39368 - RNA, 1701 nt, Artificial Sequence
  derived and/or modified CDS sequence (wt) from hemagglutinin__InfluenzaA__AEO01260
augaaggcaauacuaguaguucugcuauauacauuugcaaccgcaaaugcagacacauuauguauagguuaucaugcgaacaauucaacagacacuguagacacaguacuagaaaagaauguaacaguaacacacucuguuaaccuucuagaagacaagcauaacgggaaacuaugcaaacuaagagggguagccccauugcauuuggguaaauguaacauugcuggcuggauccugggaaauccagagugugaaucacucuccacagcaagcucaugguccuacauuguggaaacaucuaguucagacaauggaacguguuacccaggggauuucaucgauuaugaggagcuaagagagcaauugagcucagugucaucauuugaaagguuugagauauuccccaagacaaguucauggcccaaucaugacucgaacaaagguguaacggcagcauguccucaugcuggagcaaaaagcuucuacaaaaauuuaauauggcuaguuaaaaaagggaauucauacccaaagcucagcaaauccuacauuaaugauaaagggaaagaaguccucgugcuauggggcauucaccauccaucuacuagugcugaccaacaaagucucuaucagaaugcagaugcauauguuuuuguggggacaucaaaauacagcaagaaguucaagccggaaauagcaauaagacccaaagugagggaucaagaagggagaaugaacuauuacuggacacuaguagagccgggagacaaaauaacauucgaagcaacuggaaaucuagugguaccgagauaugcauucgcaauggaaagaaaugcuggaucugguauuaucauuucagauacaccaguccacgauugcaauacaacuugucagacacccaagggugcuauaaacaccagccucccauuucagaauauacauccgaucacaauugggaaauguccaaaauauguaaaaagcacaaaauugagacuggccacaggauugaggaaugucccgucuauucaaucuagaggccuauuuggggccauugccgguuucauugaagggggguggacagggaugguagauggaugguacgguuaucaccaucaaaaugagcaggggucaggauaugcagccgaccugaagagcacacagaaugccauugacgagauuacuaacaaaguaaauucuguuauugaaaagaugaauacacaguucacagcaguagguaaagaguucaaccaccuggaaaaaagaauagagaauuuaaauaaaaaaguugaugaugguuuccuggacauuuggacuuacaaugccgaacuguugguucuauuggaaaaugaaagaacuuuggacuaccacgauucaaaugugaagaacuuauaugaaaagguaagaagccaguuaaaaaacaaugccaaggaaauuggaaacggcugcuuugaauuuuaccacaaaugcgauaacacgugcauggaaagugucaaaaaugggacuuaugacuacccaaaauacucagaggaagcaaaauuaaacagagaagaaauagaugggguaaagcuggaaucaacaaggauuuaccagauuuuggcgaucuauucaacugucgccaguucauugguacugguagucucccugggggcaaucaguuucuggaugugcucuaaugggucucuacaguguagaauauguauuuaa

SEQ ID NO: 39369 - RNA, 1701 nt, Artificial Sequence
  derived and/or modified CDS sequence (wt) from hemagglutinin__InfluenzaA__AEO01261
augaaggcaauacuaguaguucugcuauauacauuugcaaccgcaaaugcagacacauuauguauagguuaucaugcgaacaauucaacagacacuguagacacaguacuagaaaagaauguaacaguaacacacucuguuaaccuucuagaagacaagcauaacgggaaacuaugcaaacuaagagggguagccccauugcauuuggguaaauguaacauugcuggcuggauccugggaaauccagagugugaaucacucucuacagcaagcucaugguccuacauuguggaaacaucuaguucagacaauggaacguguuacccaggagauuucaucgauuaugaggagcuaagagagcaauugagcucagugucaucauuugaaagguuugagauauuucccaagacaaguucauggcccaaucaugacucgaacaaagguguaacggcagcauguccucaugcuggagcaaaaagcuucuacaaaaauuuaauauggcuaguuaaaaaaggaaauucauacccaaagcucagcaaauccuacauuaaugauaaagggaaagaaguccucgugcuauggggcauucaccauccaucuacuagugcugaccaacaaagucucuaucagaaugcagaugcauauguuuuuguggggacaucaagauacagcaagaaguucaagccggaaauagcaauaagacccaaagugagggaucaagaagggagaaugaacuauuacuggacacuaguagagccgggagacaaaauaacauucgaagcaacuggaaaucuagugguaccgagauaugcauucgcaauggaaagaaaugcuggaucugguauuaucauuucagauacaccaguccacgauugcaauacaacuugucagacacccaagggugcuauaaacaccagccucccauuucagaauauacauccgaucacaauuggaaaauguccaaaauauguaaaaagcacaaaauugagaauggccacaggauugaggaaugucccgucuauucaaucuagaggccuauuuggggccauugccgguuucauugaagggggguggacagggaugguagauggaugguacgguuaucaccaucaaaaugagcaggggucaggauaugcagccgaccugaagagcacacagaaugccauugacgagauuacuaacaaaguaaauucuguuauugaaaagaugaauacacaguucacagcaguagguaaagaguucaaccaccuggaaaaaagaauagagaauuuaaauaaaaaaguugaugaugguuuccuggacauuuggacuuacaaugccgaacuguugguucuauuggaaaaugaaagaacuuuggacuaccacgauucaaaugugaagaacuuauaugaaaagguaagaagccaguuaaaaaacaaugccaaggaaauuggaaacggcugcuuugaauuuuaccacaaaugcgauaacacgugcauggaaagugucaaaaaugggacuuaugacuacccaaaauacucagaggaagcaaaauuaaacagagaagaaauagaugggguaaagcuggaaucaacagggauuuaccagauuuuggcgaucuauucaacugucgccaguucauugguacugguagucucccugggggcaaucaguuucuggaugugcucuaaugggucucuacaguguagaauauguauuuaa

SEQ ID NO: 39370 - RNA, 1701 nt, Artificial Sequence
  derived and/or modified CDS sequence (wt) from hemagglutinin__InfluenzaA__AEO01262
augaaggcaauacuaguaguucugcuauauacauuugcaaccgcaaaugcagacacauuauguauagguuaucaugcgaacaauucaacagacacuguagacacaguacuagaaaagaauguaacaguaacacacucuguuaaccuucuagaagacaagcauaacgggaaacuaugcaaacuaagagggguagccccauugcauuuggguaaauguaacauugcuggcuggauccugggaaauccagagugugaaucacucuccacagcaagcucaugguccuacauuguggaaacaucuaguucagacaauggaacguguuacccaggagauuucaucgauuaugaggagcuaagagagcaauuaagcucagugucaucauuugaaagguuugagauauuccccaagacaaguucauggcccaaucaugacucgaacaaagguguaacggcagcauguccucaugcuggagcaaaaagcuucuacaaaaauuuaauauggcuaguuaaaaaaggaaauucauacccaaagcucagcaaauccuacauuaaugauaaagggaaagaaguccucgugcuauggggcauucaccauccaucuacuagugcugaccaacaaagucucuaucagaaugcagaugcauauguuuuuguggggacaucaagauacagcaagaaguucaagccggaaauagcaauaagacccaaagugagggaucaagaagggagaaugaacuauuacuggacacuaguagagccgggagacaaaauaacauucgaagcaacuggaaaucuagugguaccgagauaugcauucgcaauggaaagaaaugcuggaucugguauuaucauuucagauacaccaguccacgauugcaauacaacuugucagacacccaagggugcuauaaacaccagccucccauuucagaauauacauccgaucacaauuggaaaauguccaaaauauguaaaaagcacaaaauugagacuggccacaggauugaggaaugucccgucuauucaaucuagaggccuauuuggggccauugccgguuucauugaagggggguggacagggaugguagauggaugguacgguuaucaccaucaaaaugagcaggggucaggauaugcagccgaccugaagagcacacagaaugccauugacgagauuacuaacaaaguaaauucuguuauugaaaagaugaauacacaguucacagcaguagguaaagaguucaaccaccuggaaaaaagaauagagaauuuaaauaaaaaaguugaugaugguuuccuggacauuuggacuuacaaugccgaacuguugguucuauuggaaaaugaaagaacuuuggacuaccacgauucaaaugugaagaacuuauaugaaaagguaagaagccaguuaaaaaacaaugccaaggaaauuggaaacggcugcuuugaauuuuaccacaaaugcgauaacacgugcauggaaagugucaaaaaugggacuuaugacuacccaaaauacucagaggaagcaaaauuaaacagagaagaaauagaugggguaaagcuggaaucaacaaggauuuaccagauuuuggcgaucuauucaacugucgccaguucauugguacugguagucucccugggggcaaucaguuucuggaugugcucuaaugggucucuacaguguagaauauguauuuaa

SEQ ID NO: 39371 - RNA, 1701 nt, Artificial Sequence; identical to SEQ ID NO: 37904
  derived and/or modified CDS sequence (wt) from hemagglutinin__InfluenzaA__AEO01263

SEQ ID NO: 39372 - RNA, 1701 nt, Artificial Sequence
  derived and/or modified CDS sequence (wt) from hemagglutinin__InfluenzaA__AEO01264
augaaggcaauacuaguaguucugcuauauacauuugcaaccgcaaaugcagacacauuauguauagguuaucaugcgaacaauucaacagacacuguagacacaguacuagaaaagaauguaacaguaacacacucuguuaaccuucuagaagacaagcauaacgggaaacuaugcaaacuaagagggguagccccauugcauuuggguaaauguaacauugcuggcuggauccugggaaauccagagugugaaucacucuccacagcaagcucaugguccuacauuguggaaacaucuaguucagacaauggaacguguuacccaggagauuucaucgauuaugaggagcuaagagagcaauugagcucagugucaucauuugaaagguuugagauauuccccaagacaaguucauggcccaaucaugacucgaacaaagguguaacggcagcauguccucaugcuggagcaaaaagcuucuacaaaaauuuaauauggcuaguuaaaaaaggaaauucauacccaaagcucagcaaauccuacauuaaugauaaagggaaagaaguccucgugcuauggggcauucaccauccaucuacuagugcugaccaacaaagucucuaucagaaugcagaugcauauguuuuuguggggacaucaagauacagcaagaaguucaagccggaaauagcaauaagacccaaagugagggaacaagaagggagaaugaacuauuacuggacacuaguagagccgggagacaaaauaacauucgaagcaacuggaaaucuagugguaccgagauaugcauucgcaauggaaagaaaugcuggaucugguauuaucauuucagauacaccaguccacgauugcaauacaacuugucagacacccaaaggugcuauaaacaccagccucccauuucagaauauacauccgaucacaauuggaaaauguccaaaauauguaaaaagcacaaaauugagacuggccacaggauugaggaaugucccgucuauucaaucuagaggccuauuuggggccauugccgguuucauugaagggggguggacagggaugguagauggaugguacgguuaucaccaucaaaaugagcaggggucaggauaugcagccgaccugaagagcacacagaaugccauugaugagauuacuaacaaaguaaauucuguuauugaaaagaugaauacacaguucacagcaguagguaaagaguucaaccaccuggaaaaaagaauagagaauuuaaauaaaaaaguugaugaugguuuccuggacauuuggacuuacaaugccgaacuguugguucuauuggaaaaugaaagaacuuuggacuaccacgauucaaaugugaagaacuuauaugaaaagguaagaagccaguuaaaaaacaaugccaaggaaauuggaaacggcugcuuugaauuuuaccacaaaugcgauaacacgugcauggaaagugucaaaaaugggacuuaugacuacccaaaauacucagaggaagcaaaauuaaacagagaagaaauagaugggguaaagcuggaaucaacaaggauuuaccagauuuuggcgaucuauucaacugucgccaguucauugguacugguagucucccugggggcaaucaguuucuggaugugcucuaaugggucucuacaguguagaauauguauuuaa

SEQ ID NO: 39373 - RNA, 1701 nt, Artificial Sequence
  derived and/or modified CDS sequence (wt) from hemagglutinin__InfluenzaA__AEO01265
augaaggcaauacuaguaguucugcuauauacauuugcaaccgcaaaugcagacacauuauguauagguuaucaugcgaacaauucaacagacacuguagacacaguacuagaaaagaauguaacaguaacacacucuguuaaccuucuagaagacaagcacaacgggaaacuaugcaaacuaagagggguagccccauugcauuuggguaaauguaacauugcuggcuggauccugggaaauccagagugugaaucacucuccacagcaagcucaugguccuacauuguggaaacaucuaguucagacaauggaacguguuacccaggagauuucaucgauuaugaggagcuaagagagcaauugagcucagugucaucauuugaaagguuugagauauuccccaagacaaguucauggcccaaucaugacucgaacaaagguguaacggcagcauguccucaugcuggagcaaaaagcuucuacaaaaauuuaauauggcuaguuaaaaaaggaaauucauacccaaagcucagcaaauccuacauuaaugauaaagggaaagaaguccucgugcuauggggcauucaccauccaucuacuagugcugaccaacaaagucucuaucagaaugcagaugcauauguuuuuguggggacaucaagauacagcaagaaguucaagccggaaauagcaauaagacccaaagugagggaucaagaagggagaaugaacuauuacuggacacuaguagagccgggagacaaaauaacauucgaagcaacuggaaaucuagugguaccgagauaugcauucgcaauggaaagaaaugcuggaucugguauuaucauuucagauacaccaguccacgauugcaauacaacuugucagacacccaagggugcuauaaacaccagccucccauuucagaauauacauccgaucacaauuggaaaauguccaaaauauguaaaaagcacaaaauugagacuggccacaggauugaggaaugucccgucuauucaaucuagaggccuauuuggggccauugccgguuucauugaagggggguggacagggaugguagauggaugguacgguuaucaccaucaaaaugagcaggggucaggauaugcagccgaccugaagagcacacagaaugccauugacgagauuacuaacaaaguaaauucuguuauugaaaagaugaauacacaguucacagcaguagguaaagaguucaaccaccuggaaaaaagaauagagaauuuaaauaaaaaaguugaugaugguuuccuggacauuuggacuuacaaugccgaacuguugguucuauuggaaaaugaaagaacuuuggacuaccaugauucaaaugugaagaacuuauaugaaaagguaagaagccaguuaaaaaacaaugccaaggaaauuggaaacggcugcuuugaauuuuaccacaaaugcgauaacacgugcauggaaagugucaaaaaugggacuuaugacuacccaaaauacucagaggaagcaaaauuaaacagagaagaaauagaugggguaaagcuggaaucaacaaggauuuaccagauuuuggcgaucuauucaacugucgccaguucauugguacugguagucucccugggggcaaucaguuucuggaugugcucuaaugggucucuacaguguagaauauguauuuaa

SEQ ID NO: 39374 - RNA, 1701 nt, Artificial Sequence
  derived and/or modified CDS sequence (wt) from hemagglutinin__InfluenzaA__AEO01266
augaaggcaauacuaguaguucugcuauauacauuugcaaccgcaaaugcagacacauuauguauagguuaucaugcgaacaauucaacagacacuguagacacaguacuagaaaagaauguaacaguaacacacucuguuaaccuucuagaagacaagcauaacgggaaacuaugcaaacuaagagggguagccccauugcauuuggguaaauguaacauugcuggcuggauccugggaaauccagagugugaaucacucuccacagcaagcucaugguccuacauuguggaaacaucuaguucagacaauggaacguguuacccaggagauuucaucgauuaugaggagcuaagagagcaauugagcucagugucaucauuugaaagguuugagauauuccccaagacaaguucauggcccaaucaugacucgaacaaagguguaacggcagcauguccucaugcuggagcaaaaagcuucuacaaaaauuuaauauggcuaguuaaaaaaggaaauucauacccaaagcucagcaaauccuacauuaaugauaaagggaaagaaguccucgugcuauggggcauucaccauccaucuacuagugcugaccaacaaagucucuaucagaaugcagaugcauauguuuuuguggggacaucaagauacagcaagaaguucaagccggaaauagcaauaagacccaaagugaggggucaagaagggagaaugaacuauuacuggacacuaguagagccgggagacaaaauaacauucgaagcaacuggaaaucuagugguaccgagauaugcauucgcaauggaaagaaaugcuggaucugguauuaucauuucagaugcaccaguccacgauugcaauacaacuugucagacacccaagggugcuauaaacaccagccucccauuucagaauauacauccgaucacaauuggaaaauguccaaaauauguaaaaagcacaaaauugagacuggccacaggauugaggaaugucccgucuauucaaucuagaggccuauuuggggccauugccgguuucauugaagggggguggacagggaugguagauggaugguacgguuaucaccaucaaaaugagcaggggucaggauaugcagccgaccugaagagcacacagaaugccauugacgagauuacuaacaaaguaaauucuguuauugaaaagaugaauacacaguucacagcaguagguaaagaguucaaccaccuggaaaaaagaauagagaauuuaaauaaaaagguugaugaugguuuccuggacauuuggacuuacaaugccgaacuguugguucuauuggaaaaugaaagaacuuuggacuaccacgauucaaaugugaagaacuuauaugaaaagguaagaagccaguuaaaaaacaaugccaaggaaauuggaaacggcugcuuugaauuuuaccacaaaugcgauaacacgugcauggaaagugucaaaaaugggacuuaugacuacccaaaauacucagaggaagcaaaauuaaacagagaagaaauagaugggguaaagcuggaaucaacaaggauuuaccagauuuuggcgaucuauucaacugucgccaguucauugguacugguagucucccugggggcaaucaguuucuggaugugcucuaaugggucucuacaguguagaauauguauuuaa

SEQ ID NO: 39375 - RNA, 1701 nt, Artificial Sequence
  derived and/or modified CDS sequence (wt) from hemagglutinin__InfluenzaA__AEO01267
augaaggcaauacuaguaguucugcuauauacauuugcaaccgcaaaugcagacacauuauguauagguuaucaugcgaacaauucaacagacacuguagacacaguacuagaaaagaauguaacaguaacacacucuguuaaccuucuagaagacaagcauaacgggaaacuaugcaaacuaagagggguagccccauugcauuuggguaaauguaacauugcuggcuggauccugggaaauccagagugugaaucacucuccacagcaagcucaugguccuacauuguggaaacaucuaguucagacaauggaacguguuacccaggagauuucaucgauuaugaggagcuaagagagcaauugagcucagugucaucauuugaaagguuugagauauuccccaagacaaguucauggcccaaucaugacucgaacaaagguguaacggcagcauguccucaugcuggagcaaaaagcuucuacaaaaauuuaauauggcuaguuaaaaaaggaaauucauacccaaagcucagcaaauccuacauuaaugauaaagggaaagaaguccucgugcuauggggcauucaccauccaucuacuagugcugaccaacaaagucucuaucagaaugcagaugcauauguuuuuguggggacaucaagauacagcaagaaguucaagccggaaauagcaauaagacccaaagugagggaucaagaagggagaaugaacuauuacuggacacuaguagagccgggagacaaaauaacauucgaagcaacuggaaaucuagugguaccgagauaugcauucgcaauggaaagaaaugcuggaucugguauuaucauuucagauacaccaguccacgauugcaauacaacuugucagacacccaagggugcuauaaacaccagccucccauuucagaauauacauccgaucacaauuggaaaauguccaaaauauguaaaaagcacaaaauugagacuggccacaggauugaggaaugucccgucuauucaaucuagaggccuauuuggggccauugccgguuucauugaagggggguggacaggaaugguagauggaugguacgguuaucaccaucaaaaugagcaggggucaggauaugcagccgaccugaagagcacacagaaugccauugacgagauuacuaacaaaguaaauucuguuauugaaaagaugaauacacaguucacagcaguagguaaagaguucaaccaccuggaaaaaagaauagagaauuuaaauaaaaagguugaugaugguuuccuggacauuuggacuuacaaugccgaacuguugguucuauuggaaaaugaaagaacuuuggacuaccacgauucaaaugugaagaacuuauaugaaaagguaagaagccaguuaaaaaacaaugccaaggaaauuggaaacggcugcuuugaauuuuaccacaaaugcgauaacacgugcauggaaagugucaaaaaugggacuuaugacuacccaaaauacucagaggaagcaaaauuaaacagagaagaaauagaugggguaaagcuggaaucaacaaggauuuaccagauuuuggcgaucuauucaacugucgccaguucauugguacugguagucucccugggggcaaucaguuucuggaugugcucuaaugggucucuacaguguagaauauguauuuaa

SEQ ID NO: 39376 - RNA, 1701 nt, Artificial Sequence
  derived and/or modified CDS sequence (wt) from hemagglutinin__InfluenzaA__AEO01268
augaaggcaauacuaguaguucugcuauauacauuugcaaccgcaaaugcagacacauuauguauagguuaucaugcgaacaauucaacagacacuguagacacaguacuagaaaagaauguaacaguaacacacucuguuaaccuucuagaagacaagcauaacgggaaacuaugcaaacuaagagggguagccccauugcauuuggguaaauguaacauugcuggcuggauccugggaaauccagagugugaaucacucuccacagcaagcucaugguccuacauuguggaaacaucuaguucagacaauggaacguguuacccaggagauuucaucgauuaugaggagcuaagagagcaauugagcucagugucaucauuugaaagguuugagauauuccccaagacaaguucauggcccaaucaugacucgaacaaagguguaacggcagcauguccucaugcuggagcaaaaagcuucuacaaaaauuuaauauggcuaguuaaaaaaggaaauucauacccaaagcucagcaaauccuacauuaaugauaaagggaaagaaguccucgugcuauggggcauucaccauccaucuacuagugcugaccaacaaagucucuaucagaaugcagaugcauauguuuuuguggggacaucaagauacagcaagaaguucaagccggaaauagcaauaagacccaaagugagggaucaagaagggagaaugaacuauuacuggacacuaguagagccgggagacaaaauaacauucgaagcaacuggaaaucuagugguaccgagauaugcauucgcaauggaaagaaaugcuggaucugguauuaucauuucagauacaccaguccacgauugcaauacaacuugucagacacccaagggugcuauaaacaccagccucccauuucagaauauacauccgaucacaauuggaaaauguccaaaauauguaaaaagcacaaaauugagacuggccacaggauugaggaaugucccgucuauucaaucuagaggccuauuuggggccauugccgguuucauugaagggggguggacagggaugguagauggaugguacgguuaucaccaucaaaaugagcaggggucaggauaugcagccgaccugaagagcacacagaaugccauugacgagauuacuaacaaaguaaauucuguuauugaaaagaugaauacacaguucacagcaguagguaaagaguucaaccaccuggaaaaaagaauagagaauuuaaauaaaaagguugaugaugguuuccuggacauuuggacuuacaaugccgaacuguugguucuauuggaaaaugaaagaacuuuggacuaccacgauucaaaugugaagaacuuauaugaaaagguaagaagccaguugaaaaacaaugccaaggaaauuggaaacggcugcuuugaauuuuaccacaaaugcgauaacacgugcauggaaagugucaaaaaugggacuuaugacuacccaaaauacucagaggaagcaaaauuaaacagagaagaaauagaugggguaaagcuggaaucaacaaggauuuaccagauuuuggcgaucuauucaacugucgccaguucauugguacugguagucucccugggggcaaucaguuucuggaugugcucuaaugggucucuacaguguagaauauguauuuaa

SEQ ID NO: 39377 - RNA, 1701 nt, Artificial Sequence
  derived and/or modified CDS sequence (wt) from hemagglutinin__InfluenzaA__AEO01269
augaaggcaauacuaguaguucugcuauauacauuugcaaccgcaaaugcagacacauuauguauagguuaucaugcgaacaauucaacagacacuguagacacaguacuagaaaagaauguaacaguaacacacucuguuaaccuucuagaagacaagcauaacgggaaacuaugcaaacuaagagggguagccccauugcauuuggguaaauguaacauugcuggcuggauccugggaaauccagagugugaaucacucuccacagcaagcucaugguccuacauuguggaaacaucuaguucagacaauggaacguguuacccaggagauuucaucgauuaugaggagcuaagagagcaauugagcucagugucaucauuugaaagguuugagauauuccccaagacaaguucauggcccaaucaugacucgaacaaagguguaacggcagcauguccucaugcuggagcaaaaagcuucuacaaaaauuuaauauggcuaguuaaaaaaggaaauucauacccaaagcucagcaaauccuacauuaaugauaaagggaaagaaguccucgugcuauggggcauucaccauccaucuacuagugcugaccaacaaagucucuaucagaaugcagaugcauauguuuuuguggggacaucaagauacagcaagaaguucaagccggaaauagcaauaagacccaaagugagggaacaagaagggagaaugaacuauuacuggacacuaguagagccgggagacaaaauaacauucgaagcaacuggaaaucuagugguaccgagauaugcauucgcaauggaaagaaaugcuggaucugguauugucauuucagauacaccaguccaugauugcaauacaacuugucagacacccaagggugcuauaaacaccagccucccauuucagaauauacauccgaucacaauuggaaaauguccaaaauauguaaaaagcacaaaauugagacuggccacaggauugaggaaugucccgucuauucaaucuagaggccuauuuggggccauugccgguuucauugaagggggguggacagggaugguagauggaugguacgguuaucaccaucaaaaugagcaggggucaggauaugcagccgaccugaagagcacacagaaugccauugacgagauuacuaacaaaguaaauucuguuauugaaaagaugaauacacaguucacagcaguagguaaagaguucaaccaccuggaaaaaagaauggagaauuuaaauaaaaaaguugaugaugguuuccuggacauuuggacuuacaaugccgaacuguugguucuauuggaaaaugaaagaacuuuggacuaccacgauucaaaugugaagaacuuauaugaaaagguaagaagccaguuaaaaaacaaugccaaggaaauuggaaacggcugcuuugaauuuuaccacaaaugcgauaacacgugcauggaaagugucaaaaaugggacuuaugacuacccaaaauacucagaggaagcaaaauuaaacagagaagaaauagaugggguaaagcuggaaucaacaaggauuuaccagauuuuggcgaucuauucaacugucgccaguucauugguacugguagucucccugggggcaaucaguuucuggaugugcucuaaugggucucuacaguguagaauauguauuuaa

SEQ ID NO: 39378 - RNA, 1701 nt, Artificial Sequence
  derived and/or modified CDS sequence (wt) from hemagglutinin__InfluenzaA__AEO01270
augaaggcaauacuaguaguucugcuauacacauuugcaaccgcaaaugcagacacauuauguauagguuaucaugcgaacaauucaacagacacuguagacacaguacuagaaaagaauguaacaguaacacacucuguuaaccuucuagaagacaagcauaacgggaaacuaugcaaacuaagagggguagccccauugcauuuggguaaauguaacauugcuggcuggauccugggaaauccagagugugaaucacucuccacagcaagcucaugguccuacauuguggaaacaucuaguucagacaauggaacguguuacccaggagauuucaucgauuaugaggagcuaagagagcaauugagcucagugucaucauuugaaagguuugagauauuccccaagacaaguucauggcccaaucaugacucgaacaaagguguaacggcagcauguccucaugcuggagcaaaaagcuucuacaaaaauuuaauauggcuaguuaaaaaaggaaauucauacccaaagcucagcaaauccuacauuaaugauaaagggaaagaaguccucgugcuauggggcauucaccauccaucuacuagugcugaccaacaaagucucuaucagaaugcagaugcauauguuuuuguggggacaucaagauacagcaagaaguucaagccggaaauagcaauaagacccaaagugagggaucaagaagggagaaugaacuauuacuggacacuaguagagccgggagacaaaauaacauucgaagcaacuggaaaucuagugguaccgagauaugcauucgcaauggaaagaaaugcuggaucugguauuaucauuucagauacaccaguccacgauugcaauacaacuugucagacacccaagggugcuauaaacaccagccucccauuucagaauauacauccgaucacaauuggaaaauguccaaaauauguaaaaagcacaaaauugagacuggccacaggauugaggaaugucccgucuauucaaucuagaggccuauuuggggccauugccgguuucauugaagggggguggacagggaugguagauggaugguacgguuaucaccaucaaaaugagcaggggucaggauaugcagccgaccugaagagcacacagaaugccauugacaagauuacuaacaaaguaaauucuguuauugaaaagaugaauacacaguucacagcaguagguaaagaguucaaccaccuggaaaaaagaauagagaauuuaaauaaaaaaguugaugaugguuuccuggacauuuggacuuacaaugccgaacuguugguucuauuggaaaaugaaagaacuuuggacuaccacgauucaaaugugaagaacuuauaugaaaagguaagaagccaguuaaaaaacaaugccaaggaaauuggaaacggcugcuuugaauuuuaccacaaaugcgauaacacgugcauggaaagugucaaaaaugggacuuaugacuacccaaaauacucagaggaagcaaaauuaaacagagaagaaauagaugggguaaagcuggaaucaacaaggauuuaccagauuuuggcgaucuauucaacugucgccaguucauugguacugguagucucccugggggcaaucaguuucuggaugugcucuaaugggucucuacaguguagaauauguauuuaa

SEQ ID NO: 39379 - RNA, 1701 nt, Artificial Sequence
  derived and/or modified CDS sequence (wt) from hemagglutinin__InfluenzaA__AEO01271
augaaggcaauacuaguaguucugcuauauacauuugcaaccgcaaaugcagacacauuauguauagguuaucaugcgaacaauucaacagacacuguagacacaguacuagaaaagaauguaacaguaacacacucuguuaaccuucuagaagacaagcauaacgggaaacuaugcaaacuaagagggguagccccauugcauuuggguaaaugugacauugcuggcuggauccugggaaauccagagugugaaucacucuccacagcaagcucaugguccuacauuguggaaacaccuaguucagacaauggaacguguuacccaggagauuucaucgauuaugaggagcuaagagagcaauugagcucagugucaucauuugaaagguuugagauauuccccaagacaaguucauggcccaaucaugacucgaacaaagguguaacggcagcauguccucaugcuggagcaaaaagcuucuacaaaaauuuaauauggcuaguuaaaaaaggaaauucauacccaaagcucagcaaauccuacauuaaugauaaagggaaagaaguccucgugcuauggggaauucaccauccaucuacuagugcugaccaacaaagucucuaucagaaugcagaugcauauguuuuuguggggacaucaagauacagcaagaaguucaagccggaaauagcaauaagacccaaagugagggaucaagaagggagaaugaacuauuacuggacacuaguagagccgggagacaaaauaacauucgaagcaacuggaaaucuagugguaccgagauaugcauucgcaauggaaagaaaugcuggaucugguauuaucauuucagauacaccaguccacgauugcaauacaacuugucagacacccaagggugcuauaaacaccagccucccauuucagaauauacauccgaucacaauuggaaaauguccaaaauauguaaaaagcacaaaauugagacuggccacaggauugaggaaugucccgucuauucaaucuagaggccuauuuggggccauugccgguuucauugaagggggguggacagggaugguagauggaugguacgguuaucaccaucaaaaugagcaggggucaggauaugcagccgaccugaagagcacacagcaugccauugacgagauuacuaacaaaguaaauucuguuauugaaaagaugaauacacaguucacagcaguagguaaagaguucaaccaccuggaaaaaagaauagagaauuuaaauaaaaaaguugaugaugguuuccuggacauuuggacuuacaaugccgaacuguugguucuauuggaaaaugaaagaacuuuggacuaccacgauucaaaugugaagaacuuauaugaaaagguaagaagccaguuaaaaaacaaugccaaggaaauuggaaacggcugcuuugaauuuuaccacaaaugcgauaacacgugcauggaaagugucaaaaaugggacuuaugacuacccaaaauacucagaggaagcaaaauuaaacagagaagaaauagaugggguaaagcuggaaucaacaaggauuuaccagauuuuggcgaucuauucaacugucgccaguucauugguacugguagucucccugggggcaaucaguuucuggaugugcucuaaugggucucuacaguguagaauauguauuuaa

SEQ ID NO: 39380 - RNA, 1701 nt, Artificial Sequence
  derived and/or modified CDS sequence (wt) from hemagglutinin__InfluenzaA__AEO01272
augaaggcaauacuaguaguucugcuauauacauuugcaaccgcaaaugcagacacauuauguauagguuaucaugcgaacaauucaacagacacuguagacacaguacuagaaaagaauguaacaguaacacacucuguuaaccuucuagaagacaagcauaacgggaaacuaugcaaacuaagagggguagccccauugcauuuggguaaauguaacauugcuggcuggauccugggaaauccagagugugaaucacucuccacagcaagcucaugguccuacauuguggaaacaucuaguucagacaauggaacguguuacccaggagauuucaucgauuaugaggagcuaagagagcaauugagcucagugucaucauuugaaagguuugagauauuccccaagacaaguucauggcccaaucaugacucgaacaaagguguaacggcagcauguccucaugcuggagcaaaaagcuucuacaaaaauuuaauauggcuaguuaaaaaaggaaauucauacccaaagcucagcaaauccuacauuaaugauaaagggaaagaaguccucgugcuauggggcauucaccauccaucuacuagugcugaccaacaaagucucuaucagaaugcagaugcauauguuuuuguggggacaucaagauacagcaagaaguucaagccggaaauagcaauaagacccaaagugagggaucaagaagggagaaugaacuauuacuggacacuaguagagccaggagacaaaauaacauucgaagcaacuggaaaucuagugguaccgagauaugcauucgcaauggaaagaaaugcuggaucugguauuaucauuucagauacaccaguccacgauugcaauacaacuugucagacacccaagggugcuauaaacaccagccucccauuucagaauauacauccgaucacaauuggaaaauguccaaaauauguaaaaagcacaaaauugagacuggccacaggauugaggaaugucccgucuauucaaucuagaggccuauuuggggccauugccgguuucauugaagggggguggacagggaugguagauggaugguacgguuaucaccaucaaaaugagcaggggucaggauaugcagccgaccugaagagcacacagaaugccauugacgagauuacuaacaaaguaaauucuguuauugaaaagaugaauacacaguucacagcaguagguaaagaguucaaccaccuggaaaaaagaauagagaauuuaaauaaaaaaguugaugaugguuuccuggacauuuggacuuacaaugccgaacuguugguucuauuggaaaaugaaagaacuuuggacuaccacgauucaaaugugaagaacuuauaugaaaagguaagaagccaguuaaaaaacaaugccaaggaaauuggaaacggcugcuuugaauuuuaccacaaaugcgauaacacgugcauggaaagugucaaaaaugggacuuaugacuacccaaaauacucagaggaagcaaaauuaaacagagaagaaauagaugggguaaagcuggaaucaacaaggauuuaccagauuuuggcgaucuauucaacugucgccaguucauugguacugguagucucccugggggcaaucaguuucuggaugugcucuaaugggucucuacaguguagaauauguauuuaa

SEQ ID NO: 39381 - RNA, 1701 nt, Artificial Sequence
  derived and/or modified CDS sequence (wt) from hemagglutinin__InfluenzaA__AEO01273
augaaggcaauacuaguaguucugcuauauacauuugcaaccgcaaaugcagacacauuauguauagguuaucaugcgaacaauucaacagacacuguagacacaguacuagaaaagaauguaacaguaacacacucuguuaaccuucuagaagacaagcauaacgggaaacuaugcaaacuaagagggguagccccauugcauuuggguaaauguaacauugcuggcuggauccugggaaauccagagugugaaucacucuccacagcaagcucaugguccuacauuguggaaacaucuaguucagacaauggaacguguuacccaggagauuucaucgauuaugaggagcuaagagagcaauugagcucagugucaucauuugaaagguuugagauauuccccaagacaaguucauggcccaaucaugacucgaacaaagguguaacggcagcauguccucaugcuggagcaaaaagcuucuacaaaaauuuaauauggcuaguuaaaaaaggaaauucauacccaaagcucagcaaauccuacauuaaugauaaagggaaagaaguccucgugcuauggggcauucaccauccaucuacuagugcugaccaacaaagucucuaucagaaugcagaugcauauguuuuuguggggacaucaagauacagcaagaaguucaagccggaaauagcaauaagacccaaagugagggaucaagaagggagaaugaacuauuacuggacacuaguagagccgggagacaaaauaacauucgaagcaacuggaaaucuagugguaccgagauaugcauucgcaauggaaagaaaugcuggaucugguauuaucauuucagauacaccaguccacgauugcaauacaacuugucagacacccaagggugcuauaaacaccagccucccauuucagaauauacauccgaucacaauuggaaaauguccaaaauauguaaaaagcacaaaauugagacuggccacaggauugaggaaugucccgucuauucaaucuagaggccuauuuggggccauugccgguuucauugaagggggguggacagggaugguagauggaugguacgguuaucaccaucaaaaugagcaggggucaggauaugcagccgaccugaagagcacacagaaugccauugacgagauuacuaacaaaguaaauucuguuauugaaaagaugaauacacaguucacagcaguagguaaagaguucaaccaccuggaaaaaagaauagagaauuuaaauaaaaagguugaugaugguuuccuggacauuuggacuuacaaugccgaacuguugguucuauuggaaaaugaaagaacuuuggacuaccacgauucaaaugugaagaacuuauaugaaaagguaagaagccaguuaaaaaacaaugccaaggaaauuggaaacggcugcuuugaauuuuaccacaaaugcgauaacacgugcauggaaagugucaaaaaugggacuuaugacuacccaaaauacucagaggaagcaaaauuaaacagagaagaaauagaugggguaaagcuggaaucaacaaggauuuaccagauuuuggcgaucuauucaacugucgccaguucauuggugcugguagucucccugggggcaaucaguuucuggaugugcucuaaugggucucuacaguguagaauauguauuuaa

SEQ ID NO: 39382 - RNA, 1701 nt, Artificial Sequence
  derived and/or modified CDS sequence (wt) from hemagglutinin__InfluenzaA__AEO01274
augaaggcaauacuaguaguucugcuauauacauuugcaaccgcaaaugcagacacauuauguauagguuaucaugcgaacaauucaacagacacuguagacacaguauuagaaaagaauguaacaguaacacacucuguuaaccuucuagaagacaagcauaacgggaaacuaugcaaacuaagagggguagccccauugcauuuggguaaauguaacauugcuggcuggauccugggaaauccagagugugaaucacucuccacagcaagcucaugguccuacauuguggaaacaucuaguucagacaauggaacguguuacccaggagauuucaucgauuaugaggagcuaagagagcaauugagcucagugucaucauuugaaagguuugagauauuccccaagacaaguucauggcccaaucaugacucgaacaaagguguaacggcagcauguccucaugcuggagcaaaaagcuucuacaaaaauuuaauauggcuaguuaaaaaaggaaauucauacccaaagcucagcaaguccuacauuaaugauaaagggaaagaaguccucgugcuauggggcauucaccauccaucuacuagugcugaccaacaaagucucuaucagaaugcagaugcauauguuuuuguggggacaucaagauacagcaagaaguucaagccggaaauagcaauaagacccaaagugagggaucaagaagggagaaugaacuauuacuggacacuaguagagccgggagacaaaauaacauucgaagcaacuggaaaucuagugguaccgagauaugcauucgcaauggaaagaaaugcuggaucugguauuaucauuucagauacaccaguccacgauugcaauacaacuugucagacacccaagggugcuauaaacaccagccucccauuucagaauauacauccgaucacaauuggaaaguguccaaaauauguaaaaagcacaaaauugagacuggccacaggauugaggaaugucccgucuauucaaucuaggggccuauuuggggccauugccgguuucauugaagggggguggacagggaugguagauggaugguacgguuaucaccaucaaaaugagcaggggucaggauaugcagccgaccugaagagcacacagaaugccauugacgagauuacuaacaaaguaaauucuguuauugaaaagaugaauacacaguucacagcaguagguaaagaguucaaccaccuggaaaaaagaauagagaauuuaaauaaaaagguugaugaugguuuccuggacauuuggacuuacaaugccgaacuguugguucuauuggaaaaugaaagaacuuuggacuaccacgauucaaaugugaagaacuuauaugaaaagguaagaagccaguuaaaaaacaaugccaaggaaauuggaaacggcugcuuugaauuuuaccacaaaugcgauaacacgugcauggaaagugucaaaaaugggacuuaugacuacccaaaauacucagaggaagcaaaauuaaacagagaagaaauagaugggguaaagcuggaaucaacaaggauuuaccagauuuuggcgaucuauucaacugucgccaguucauugguacugguagucucccugggggcaaucaguuucuggaugugcucuaaugggucucuacaguguagaauauguauuuaa

SEQ ID NO: 39383 - RNA, 1701 nt, Artificial Sequence
  derived and/or modified CDS sequence (wt) from hemagglutinin__InfluenzaA__AEO01275
augaaggcaauacuaguaguucugcuauauacauuugcaaccgcaaaugcagacacauuauguauagguuaucaugcgaacaauucaacagacacuguagacacaguacuagaaaagaauguaacaguaacacacucuguuaaccuucuagaagacaagcauaacgggaaacuaugcaaacuaagagggguagccccauugcauuuggguaaauguaacauugcuggcuggauccugggaaauccagagugugaaucacucuccacagcaagcucaugguccuacauuguggaaacaucuaguucagacaauggaacguguuacccaggagauuucaucgauuaugaggagcuaagagagcaguugagcucagugucaucauuugaaagguuugagauauuucccaagacaaguucauggcccaaucaugacucgaacaaagguguaacggcagcauguccucaugcuggagcaaaaagcuucuacaaaaauuuaauauggcuaguuaaaaaaggaaauucauacccaaagcucagcaaauccuacauuaaugauaaagggaaagaaguccucgugcuauggggcauucaccauccaucuacuagugcugaccaacaaagucucuaucagaaugcagaugcauauguuuuuguggggacaucaagauacagcaagaaguucaagccggaaauagcaauaagacccaaagugagggaucaagaagggagaaugaacuauuacuggacacuaguagagccgggagacaaaauaacauucgaagcaacuggaaaucuagugguaccgagauaugcauucgcaauggaaagaaaugcuggaucugguauuaucauuucagauacaccaguccacgauugcaauacaacuugucagacacccaagggugcuauaaacaccagccucccauuucagaauauacauccgaucacaauuggaaaauguccaaaauauguaaaaagcacaaaauugagacuggccacaggauugaggaaugucccgucuauucaaucuagaggccuauuuggggccauugccgguuucauugaagggggguggacagggaugguagauggaugguacgguuaucaccaucaaaaugagcaggggucaggauaugcagccgaccugaagagcacacagaaugccauugacgagauuacuaacaaaguaaauucuguuauugaaaagaugaauacacaguucacagcaguagguaaagaguucaaccaccuggaaaaaagaauagagaauuuaaauaaaaagguugaugaugguuuccuggacauuuggacuuacaaugccgaacuguugguucuauuggaaaaugaaagaacuuuggacuaccacgauucaaaugugaagaacuuauaugaaaagguaagaaaccaguuaaaaaacaaugccaaggaaauuggaaacggcugcuuugaauuuuaccacaaaugcgauaacacgugcauggaaagugucaaaaaugggacuuaugacuacccaaaauacucagaggaagcaaaauuaaacagagaagaaauagaugggguaaagcuggaaucaacaaggauuuaccagauuuuggcgaucuauucaacugucgccaguucauugguacugguagucucccugggggcaaucaguuucuggaugugcucuaaugggucucuacaguguagaauauguauuuaa

SEQ ID NO: 39384 - RNA, 1701 nt, Artificial Sequence
  derived and/or modified CDS sequence (wt) from hemagglutinin__InfluenzaA__AEO01276
augaaggcaauacuaguaguucugcuauauacauuugcaaccgcaaaugcagacacauuauguauagguuaucaugcgaacaauucaacagacacuguagacacaguacuaaaaaagaauguaacaguaacacacucuguuaaccuucuagaagacaagcauaacgggaaacuaugcaaacuaagagggguagccccauugcauuuggguaaauguaacauugcuggcuggauccugggaaauccagagugugaaucacucuccacagcaagcucaugguccuacauuguggaaacaucuaguucagacaauggaacguguuacccaggagauuucaucgauuaugaggagcuaagagagcaauugagcucagugucaucauuugaaagguuugagauauuccccaagacaaguucauggcccaaucaugacucgaacaaagguguaacggcagcauguccucaugcuggagcaaaaagcuucuacaaaaauuuaauauggcuaguuaaaaaaggaaauucauacccaaagcucagcaaauccuacauuaaugauaaagggaaagaaguccucgugcuauggggcauucaccauccaucuacuagugcugaccaacaaagucucuaucagaaugcagaugcauauguuuuuguggggacaucaagauacagcaagaaguucaagccggaaauagcaauaagacccaaagugagggaucaagaagggagaaugaacuauuacuggacacuaguagagccgggagacaaaauaacauucgaagcaacuggaaaucuagugguaccgagauaugcauucgcaauggaaagaaaugcuggaucugguauuaucauuucagauacaccaguccacgauugcaauacaacuugucagacacccaagggugcuauaaacaccagccucccauuucagaauauacauccgaucacaauuggaaaauguccaaaauauguaaaaagcacaaaauugagacuggccacaggauugaggaaugucccgucuauucaaucuagaggccuauuuggggccauugccgguuucauugaagggggguggacagggaugguagauggaugguacgguuaucaccaucaaaaugagcaggggucaggauaugcagccgaccugaagagcacacagaaugccauugacgagauuacuaacaaaguaaauucuguuauugaaaagaugaauacacaguucacagcaguagguaaagaguucaaccaccuggaaaaaagaauagagaauuuaaauaaaaagguugaugaugguuuccuggacauuuggacuuacaaugccgaacuguugguucuauuggaaaaugaaagaacuuuggacuaccacgauucaaaugugaagaacuuauaugaaaagguaagaagccaguugaaaaacaaugccgaggaaauuggaaacggcugcuuugaauuuuaccacaaaugcgauaacacgugcauggaaagugucaaaaaugggacuuaugacuacccaaaauacucagaggaagcaaaauuaaacagagaagaaauagaugggguaaagcuggaaucaacaaggauuuaccagauuuuggcgaucuauucaacugucgccaguucauugguacugguagucucccugggggcaaucaguuucuggaugugcucuaaugggucucuacaguguagaauauguauuuaa

SEQ ID NO: 39385 - RNA, 1701 nt, Artificial Sequence
  derived and/or modified CDS sequence (wt) from hemagglutinin__InfluenzaA__AEO01277
augaaggcaauacuaguaguucugcuauauacauuugcaaccgcaaaugcagacacauuauguauagguuaucaugcgaacaauucaacagacacuguagacacaguacuagaaaagaauguaacaguaacacacucuguuaaccuucuagaagacaagcauaacgggaaacuaugcaaacuaagagggguagccccauugcauuuggguaaauguaacauugcuggcuggauccugggaaauccagagugugaaucacucuccacagcaagcucaugguccuacauuguggaaacaucuaguucagacaauggaacguguuacccaggagauuucaucgauuaugaggagcuaagagagcaauugagcucagugucaucauuugaaagguuugagauauuccccaagacaaguucauggcccaaucaugacucgaacaaagguguaacggcagcauguccucaugcuggagcaaaaagcuucuacaaaaauuuaauauggcuaguuaaaaaaggaaauucauacccaaagcucagcaaauccuacauuaaugauaaagggaaagaaguccucgugcuauggggcauucaccauccaucuacuagugcugaccaacaaagucucuaucagaaugcagaugcauauguuuuuguggggacaucaagauacagcaagaaguucaagccggaaauagcaauaagacccaaagugagggaucaagaagggagaaugaacuauuacuggacacuaguagagccgggagacaaaauaacauucgaagcaacuggaaaucuagugguaccgagauaugcauucgcaauggaaagaaaugcuggaucugguauuaucauuucagauacaccaguccaugauugcaauacaacuugucagacacccaagggugcuauaaacaccagccucccauuucagaauauacauccgaucacaauuggaaaauguccaaaauauguaaaaagcacaaaauugagacuggccacaggauugaggaaugucccgucuauucaaucuagaggccuauuuggggccauugccgguuucauugaagggggguggacagggaugguagauggaugguacgguuaucaccaucaaaaugagcaggggucaggauaugcagccgaccugaagagcacacagaaugccauugacgagauuacuaacaaaguaaauucuguuauugaaaagaugaauacacaguucacagcaguagguaaagaguucaaccaccuggaaaaaagaauagagaauuuaaauaaaaaaguugaugaugguuuccuggacauuuggacuuacaaugccgaacuguugguucuauuggaaaaugaaagaacuuuggacuaccacgauucaaaugugaagaacuuauaugaaaagguaagaagccaguuaaaaaacaaugccaaggaaauuggaaacggcugcuuugaauuuuaccacaaaugcgauaacacgugcauggaaagugucaaaaaugggacuuaugacuacccaaaauacucagaggaagcaaaauuaaacagagaagaaauagaugggguaaagcuggaaucaacaaggauuuaccagauuuuggcgaucuauucaacugucgccaguucauugguacugguagucucccugggggcaaucaguuucuggaugugcucuaaugggucucuacaguguagaauauguauuuaa

SEQ ID NO: 39386 - RNA, 1701 nt, Artificial Sequence
  derived and/or modified CDS sequence (wt) from hemagglutinin__InfluenzaA__AEO01278
augaaggcaauacuaguaguucugcuauauacauuugcaaccgcaaaugcagacacauuauguauagguuaucaugcgaacaauucaacagacacuguagacacaguacuagaaaagaauguaacaguaacacacucuguuaaccuucuagaagacaagcauaacgggaaacuaugcaaacuaagagggguagccccauugcauuuggguaaaugugacauugcuggcuggauccugggaaauccagagugugaaucacucuccacagcaagcucaugguccuacauuguggaaacaucuaguucagacaauggaacguguuacccaggagauuucaucgauuaugaggagcuaagagagcaauugagcucagugucaucauuugaaagguuugagauauuccccaagacaaguucauggcccaaucaugacucgaacaaagguguaacggcagcauguccucaugcuggagcaaaaagcuucuacaaaaauuuaauauggcuaguuaaaaaaggaaauucauacccaaagcucagcaaauccuacauuaaugauaaagggaaagaaguccucgugcuauggggaauucaccauccaucuacuagugcugaccaacaaagucucuaucagaaugcagaugcauauguuuuuguggggacaucaagauacagcaagaaguucaagccggaaauagcaauaagacccaaagugagggaucaagaagggagaaugaacuauuacuggacacuaguagagccgggagacaaaauaacauucgaagcaacuggaaaucuagugguaccgagauaugcauucgcaauggaaagaaaugcuggaucugguauuaucauuucagauacaccaguccacgauugcaauacaacuugucagacacccaagggugcuauaaacaccagccucccauuucagaauauacauccgaucacaauuggaaaauguccaaaauauguaaaaagcacaaaauugagacuggccacaggauugaggaaugucccgucuauucaaucuagaggccuauuuggggccauugccgguuucauugaagggggguggacagggaugguagauggaugguacgguuaucaccaucaaaaugagcaggggucaggauaugcagccgaccugaagagcacacagcaugccauugacgagauuacuaacaaaguaaauucuguuauugaaaagaugaauacacaguucacagcaguagguaaagaguucaaccaccuggaaaaaagaauagcgaauuuaaauaaaaaaguugaugaugguuuccuggacauuuggacuuacaaugccgaacuguugguucuauuggaaaaugaaagaacuuuggacuaccacgauucaaaugugaagaacuuauaugaaaagguaagaagccaguuaaaaaacaaugccaaggaaauuggaaacggcugcuuugaauuuuaccacaaaugcgauaacacgugcauggaaagugucaaaaaugggacuuaugacuacccaaaauacucagaggaagcaaaauuaaacagagaagaaauagaugggguaaagcuggaaucaacaaggauuuaccagauuuuggcgaucuauucaacugucgccaguucauugguacugguagucucccugggggcaaucaguuucuggaugugcucuaaugggucucuacaguguagaauauguauuuaa

SEQ ID NO: 39387 - RNA, 1701 nt, Artificial Sequence
  derived and/or modified CDS sequence (wt) from hemagglutinin__InfluenzaA__AEO01279
augaaggcaauacuaguaguucugcuauauacauuugcaaccgcaaaugcagacacauuauguauagguuaucaugcgaacaauucaacagacacuguagacacaguacuagaaaagaauguaacaguaacacacucuguuaaccuucuagaagacaagcauaacgggaaacuaugcaaacuaagagggguagccccauugcauuuggguaaauguaacauugcuggcuggauccugggaaauccagagugugaaucacucuccacagcaagcucaugguccuacauuguggaaacaucuaguucagacaauggaacguguuacccaggagauuucaucgauuaugaggagcuaagagagcaauugagcucagugucaucauuugaaagguuugagauauuccccaagacaaguucauggcccaaucaugacucgaacaaagguguaacggcagcauguccucaugcuggagcaaaaagcuucuacaaaaauuuaauauggcuaguuaaaaaaggaaauucauacccaaagcucagcaaauccuacauuaaugauaaagggaaagaaguccucgugcuauggggcauucaccauccaucuacuagugcugaccaacaaagucucuaucagaaugcagaugcauauguuuuuguggggacaucaagauacagcaagaaguucaagccggaaauagcaauaagacccaaagugagggaucaagaagggagaaugaacuauuacuggacacuaguagagccgggagacaaaauaacauucgaagcaacuggaaaucuagugguaccgagauaugcauucgcaauggaaagaacugcuggaucugguauuaucauuucagauacaccaguccacgauugcaauacaacuugucagacacccaagggugcuauaaacaccagccucccauuucagaauauacauccgaucacaauuggaaaauguccaaaauauguaaaaagcacaaaauugagacuggccacaggauugaggaaugucccgucuauucaaucuagaggccuauuuggggccauugccgguuucauugaagggggguggacagggaugguagauggaugguacgguuaucaccaucaaaaugagcaggggucaggauaugcagccgaccugaagagcacacagaaugccauugacaagauuacuaacaaaguaaauucuguuauugaaaagaugaauacacaguucacagcaguagguaaagaguucaaccaccuggaaaaaagaauagagaauuuaaauaaaaaaguugaugaugguuuccuggacauuuggacuuacaaugccgaacuguugguucuauuggaaaaugaaagaacuuuggacuaccacgauucaaaugugaagaacuuauaugaaaagguaagaagccaguuaaaaaacaaugccaaggaaauuggaaacggcugcuuugaauuuuaccacaaaugcgauaacacgugcauggaaagugucaaaaaugggacuuaugacuacccaaaauacucagaggaagcaaaauuaaacagagaagaaauagaugggguaaagcuggaaucaacaaggauuuaccagauuuuggcgaucuauucaacugucgccaguucauugguacugguagucucccugggggcaaucaguuucuggaugugcucuaaugggucucuacaguguagaauauguauuuaa

SEQ ID NO: 39388 - RNA, 1701 nt, Artificial Sequence
  derived and/or modified CDS sequence (wt) from hemagglutinin__InfluenzaA__AEO01282
augaaggcaauacuaguaguucugcuauauacauuugcaaccgcaaaugcagacacauuauguauagguuaucaugcgaacaauucaacagacacuguagacacaguacuagaaaagaauguaacaguaacacacucuguuaaccuucuagaagacaagcauaacgggaaacuaugcaaacuaagagggguagccccauugcauuuggguaaauguaacauugcuggcuggauccugggaaauccagagugcgaaucacucuccacagcaagcucaugguccuacauuguggaaacaucuaguucagacaauggaacguguuacccaggagauuucaucgauuaugaggagcuaagagagcaauugagcucagugucaucauuugaaagguuugagauauuccccaagacaaguucauggcccaaucaugacucgaacaaagguguaacggcagcauguccucaugcuggagcaaaaagcuucuacaaaaauuuaauauggcuaguuaaaaaagggaauucauacccaaagcucagcaaauccuacauuaaugauaaagggaaagaaguccuugugcuauggggcauucaccauccaucuacuagugcugaccaacaaagucucuaucagaaugcagaugcauauguuuuuguggggacaucaagauacagcaagaaguucaagccggaaauagcaauaagacccaaagugagggaucaagaagggagaaugaacuauuacuggacacuaguagagccgggagacaaaauaacauucgaagcaacuggaaaucuagugguaccgagauaugcauucgcaauggaaagaaaugcuggaucugguauuaucauuucagauacaccaguccacgauugcaauacaacuugucagacacccaagggugcuauaaacaccagccucccauuucagaauauacauccgaucacaauuggaaaauguccaaaauauguaaaaagcacaaaauugagacuggccacaggauugaggaaugucccgucuauucaaucuagaggccuauuuggggccauugccgguuucauugaagggggguggacagggaugguagauggaugguacgguuaucaccaucaaaaugagcaggggucaggauaugcagccgaccugaagagcacacagaaugccauugacgagauuacuaacaaaguaaauucuguuauugaaaagaugaauacacaguucacagcaguagguaaagaguucaaccaccuggaaaaaagaauagagaauuuaaauaaaaaaguugaugaugguuuccuggacauuuggacuuacaaugccgaacuguugguucuauuggaaaaugaaagaacuuuggacuaccaugauucaaaugugaagaaauuauaugaaaagguaagaagccaguuaaaaaacaaugccaaggaaauuggaaacggcugcuuugaauuuuaccacaaaugcaauaacacgugcauggaaagugucaaaaaugggacuuaugacuacccaaaauacucagaggaagcaaaauuaaacagagaagaaauagaugggguaaagcuggaaucaacaaggauuuaccagauuuuggcgaucuauucaacugucgccaguucauugguacugguagucucccugggggcaaucaguuucuggaugugcucuaaugggucucuacaguguagaauauguauuuaa

SEQ ID NO: 39389 - RNA, 1701 nt, Artificial Sequence
  derived and/or modified CDS sequence (wt) from hemagglutinin__InfluenzaA__AEO01283
augaaggcaauacuaguaguucugcuauauacauuugcaaccgcaaaugcagacacauuauguauagguuaucaugcgaacaauucaacagacacuguagacacaguacuagaaaagaauguaacaguaacacacucuguuaaccuucuagaagacaagcauaacgggaaacuaugcaaacuaagagggguagccccauugcauuuggguaaauguaacauugcuggcuggauccugggaaauccagagugugaaucacucuccacagcaagcucaugguccuacauuguggaaacaucuaguucaggcaauggaacguguuacccaggagauuucaucgauuaugaggagcuaagagagcaauugagcucagugucaucauuugaaagguuugagauauuccccaagacaaguucauggcccaaucaugacucgaacaaagguguaacggcagcauguccucaugcuggagcaaaaagcuucuacaaaaauuuaauauggcuaguuaaaaaaggaaacucauacccaaagcucagcaaauccuacauuaaugauaaagggaaagaaguccucgugcuauggggcauucaccauccaucuacuagugcugaccaacaaagucucuaucagaaugcagaugcauauguuuuuguggggacaucaagauacagcaagaaguucaagccggaaauagcaauaagacccaaagugagggaucaagaagggagaaugaacuauuacuggacacuaguagagccgggagacaaaauaacauucgaagcaacuggaaaccuagugguaccgagauaugcauucgcaauggaaagaaaugcuggaucugguauuaucauuucagauacaccaguccacgauugcaauacaacuugucagacacccaagggugcuauaaacaccagccucccauuucagaauauacauccgaucacaauuggaaaauguccaaaauauguaaaaagcacaaaauugagacuggccacaggauugaggaaugucccgucuauucaaucuagaggccuauuuggggccauugccgguuucauugaagggggguggacagggaugguagauggaugguacgguuaucaccaucaaaaugagcaggggucaggauaugcagccgaccugaagagcacacagaaugccauugacgagauuacuaacaaaguaaauucuguuauugaaaagaugaauacacaguucacagcaguagguaaagaguucaaccaccuggaaaaaagaauagagaauuuaaauaaaaaaguugaugaugguuuccuggacauuuggacuuacaaugccgaacuguugguucuauuggaaaaugaaagaacuuuggacuaccacgauucaaaugugaagaauuuauaugaaaagguaagaagccaguuaaaaaacaaugccaaggaaauuggaaacggcugcuuugaauuuuaccacaaaugcgauaacacgugcauggaaagugucaaaaaugggacuuaugacuacccaaaauacucagaggaagcaaaauuaaacagagaagaaauagaugggguaaagcuggaaucgacaaggauuuaccagauuuuggcgaucuauucaacugucgccaguucauugguacugguagucucccugggggcaaucaguuucuggaugugcucuaaugggucucuacaguguagaauauguauuuaa

SEQ ID NO: 39390 - RNA, 1701 nt, Artificial Sequence
  derived and/or modified CDS sequence (wt) from hemagglutinin__InfluenzaA__AEO01284
augaaggcaauacuaguaguucugcuauauacauuugcaaucgcaaaugcagacacauuauguauagguuaucaugcgaacaauucaacagacacuguagacacaguacuagaaaagaauguaacaguaacacacucuguuaaccuucuagaagacaagcauaacgggaaacuaugcaaacuaagagggguagccccauugcauuuggguaaauguaacauugcuggcuggauccugggaaauccagagugugaaucacucuccacagcaagcucaugguccuacauuguggaaacaucuaguucagacaauggaacguguuacccaggagauuucaucgauuaugaggagcuaagagagcaauugagcucagugucaucauuugaaagguuugagauauuccccaagacaaguucauggcccaaucaugacucgaacaaagguguaacggcagcauguccucaugcuggagcaaaaagcuucuacaaaaauuuaauauggcuaguuaaaaaaggaaauucauacccaaagcucagcaaauccuacauuaaugauaaagggaaagaaguccucgugcuauggggaauucaccauccaucuacuagugcugaccaacaaagucucuaucagaaugcagaugcauauguuuuuguggggacaucaagauacagcaagaaguucaagccggaaauagcaauaagacccaaagugagggaucaagaagggagaaugaacuauuacuggacacuaguagagccgggagacaaaauaacauucgaagcaacuggaaaucuagugguaccgagauaugcauucgcaauggaaagaaaugcuggaucugguauuaucauuucagauacaccaguccacgauugcaauacaacuugucagacacccaagggugcuauaaacaccagccucccauuucagaauauacauccgaucacaauuggaaaauguccaaaauauguaaaaagcacaaaauugagacuggccacaggauugaggaaugucccgucuauucaaucuagaggccuauuuggggccauugccgguuucauugaagggggguggacagggaugguagauggaugguacgguuaucaccaucaaaaugagcaggggucaggauaugcagccgaccugaagagcacacagcaugccauugacgagauuacuaacaaaguaaauucuguuauugaaaagaugaauacacaguucacagcaguagguaaagaguucaaccaccuggaaaaaagaauagagaauuuaaauaaaaaaguugaugaugguuuccuggacauuuggacuuacaaugccgaacuguugguucuauuggaaaaugaaagaacuuuggacuaccacgauucaaaugugaagaacuuauaugaaaagguaagaagccaguuaaaaaacaaugccaaggaaauuggaaacggcugcuuugaauuuuaccacaaaugcgauaacacgugcauggaaagugucaaaaaugggacuuaugacuacccaaaauacucagaggaagcaaaauuaaacagagaagaaauaaaugggguaaagcuggaaucaacaaggauuuaccagauuuuggcgaucuauucaacugucgccaguucauugguacugguagucucccugggggcaaucaguuucuggaugugcucuaaugggucucuacaguguagaauauguauuuaa

SEQ ID NO: 39391 - RNA, 1701 nt, Artificial Sequence
  derived and/or modified CDS sequence (wt) from hemagglutinin__InfluenzaA__AEO01285
augaaggcaauacuaguaguucugcuauauacauuugcaaccgcaaaugcagacacauuauguauagguuaucaugcgaacaauucaacagacacuguagacacaguacuagaaaagaauguaacaguaacacacucuguuaaccuucuagaagacaagcauaacgggaaacuaugcaaacuaagagggguagccccauugcauuuggguaaauguaacauugcuggcuggauccugggaaauccagagugugaaucacucuccacagcaagcucaugguccuacauuguggaaacaucuaguucagacaauggaacguguuacccaggagauuucaucgauuaugaggagcuaagagaacaauugagcucagugucaucauuugaaagguuugagauauuccccaagacaaguucauggcccaaucaugacucgaacaaagguguaacggcagcauguccucaugcuggagcaaaaagcuucuacaaaaauuuaauauggcuaguuaaaaaaggaaauucauacccaaagcucagcaaauccuacauuaaugauaaagggaaagaaguccucgugcuauggggcauucaccauccaucuacuagugcugaccaacaaagucucuaucagaaugcagaugcauauguuuuuguggggacaucaagauacagcaagaaguucaagccggagauagcaauaagacccaaagugagggaucaagaagggagaaugaacuauuacuggacacuaguagagccgggagacaaaauaacauucgaagcaacuggaaaucuagugguaccgagauaugcauucgcaauggaaagaaaugcuggaucugguauuaucauuucagauacaccaguccacgauugcaauacaacuugucagacacccaagggugcuauaaacaccagccucccauuucagaauauacauccgaucacaauuggaaaauguccaaaauauguaaaaagcacaaaauugagacuggccacaggauugaggaauaucccgucuauucaaucuagaggccuauuuggggccauugccgguuucauugaagggggguggacagggaugguagauggaugguacgguuaucaccaucaaaaugagcaggggucaggauaugcagccgaccugaagagcacacagaaugccauugacgagauuacuaacaaaguaaauucuguuauugaaaagaugaauacacaguucacagcaguagguaaagaguucaaccaccuggaaaaaagaauagagaauuuaaauaaaaagguugaugaugguuuccuggacauuuggacuuacaaugccgaacuguugguucuauuggaaaaugaaagaacuuuggacuaccacgauucaaaugugaagaacuuauaugaaaagguaagaagccaguuaaaaaacaaugccaaggaaauuggaaacggcugcuuugaauuuuaccacaaaugcgauaacacgugcauggaaagugucaaaaaugggacuuaugacuacccaaaauacucagaggaagcaaaauuaaacagagaagaaauagaugggguaaagcuggaaucaacaaggauuuaccagauuuuggcgaucuauucaacugucgccaguucauugguacugguagucucccugggggcaaucaguuucuggaugugcucuaaugggucucuacaguguagaauauguauuuaa

SEQ ID NO: 39392 - RNA, 1701 nt, Artificial Sequence; identical to SEQ ID NO: 37156
  derived and/or modified CDS sequence (wt) from hemagglutinin__InfluenzaA__AEO01286

SEQ ID NO: 39393 - RNA, 1701 nt, Artificial Sequence
  derived and/or modified CDS sequence (wt) from hemagglutinin__InfluenzaA__AEO01287
augaaggcaauacuaguaguucugcuauauacauuugcaaccgcaaauucagacacauuauguauagguuaucaugcgaacaauucaacagacacuguagacacaguacuagaaaagaauguaacaguaacacacucuguuaaccuucuagaagacaagcauaacgggaaacuaugcaaacuaagagggguagccccauugcauuuggguaaauguaacauugcuggcuggauccugggaaauccagagugugaaucacucuccacagcaagcucaugguccuacauuguggaaacaucuaguucagacaauggaacguguuacccaggagauuucaucgauuaugaggagcuaagagagcaauugagcucagugucaucauuugaaagguuugagauauuccccaagacaaguucauggcccaaucaugauucgaacaaagguguaacggcagcauguccucaugcuggagcaaaaagcuucuacaaaaauuuaauauggcuaguuaaaaaaggaaauucauacccaaagcucagcaaauccuacauuaaugauaaagggaaagaaguccucgugcuauggggcauucaccauccaucuacuagugcugaccaacaaagucucuaucagaaugcagaugcauauguuuuuguggggacaucaagauacagcaagaaguucaagccggaaauagcaauaagacccaaagugagggaucaagaagggagaaugaacuauuacuggacacuaguagagccgggagacaaaauaacauucgaagcaacuggaaaucuagugguaccgagauaugcauucgcaauggaaagaaaugcuggaucugguauuaucauuucagauacaccaguccacgauugcaauacaacuugucagacacccaagggugcuauaaacaccagccucccauuucagaauauacauccgaucacaauuggaaaauguccaaaauauguaaaaagcacaaaauugagacuggccacaggauugaggaaugucccgucuauucaaucuagaggccuauuuggggccauugccgguuucauugaagggggguggacagggaugguagauggaugguacgguuaucaccaucaaaaugagcaggggucaggauaugcagccgaccugaagagcacacagaaugccauugacgagauuacuaacaaaguaaauucuguuauugaaaagaugaauacacaguucacagcaguagguaaagaguucaaccaccuggaaaaaagaauagagaauuuaaauaaaaaaguugaugaugguuuccuggacauuuggacuuacaaugccgaauuguugguucuauuggaaaaugaaagaacuuuggacuaccacgauucaaaugugaagaacuuauaugaaaagguaagaagccaguuaaaaaacaaugccaaggaaauuggaaacggcugcuuugaauuuuaccacaaaugcgauaacacgugcauggaaagugucaaaaaugggacuuaugacuacccaaaauacucagaggaagcaaaauuaaacagagaagaaauagaugggguaaagcuggaaucaacaaggauuuaccagauuuuggcgaucuauucaacugucgccaguucauugguacugguagucucccugggggcaaucaguuucuggaugugcucuaaugggucucuacaguguagaauauguauuuaa

SEQ ID NO: 39394 - RNA, 1701 nt, Artificial Sequence
  derived and/or modified CDS sequence (wt) from hemagglutinin__InfluenzaA__AEO01288
augaaggcaauacuaguaguucugcuauauacauuugcaaccgcaaaugcagacacauuauguauagguuaucaugcgaacaauucaacagacacuguagacacaguacuagaaaagaauguaacaguaacacacucuguuaaccuucuagaagacaagcauaacgggaaacuaugcaaacuaagagggguagccccauugcauuuggguaaauguaacauugcuggcuggauccugggaaauccagagugugaaucacucuccacagcaagcucaugguccuacauuguggaaacaucuaguucagacaauggaacguguuacccaggagauuucaucgauuaugaggagcuaagagagcaauugagcucagugucaucauuugaaagguuugagauauuccccaagacaaguucauggcccaaucaugacucgaacaaagguguaacggcagcauguccucaugcuggagcaaaaagcuucuacaaaaauuuaauauggcuaguuaaaaaaggaaauucauacccaaagcucagcaaauccuacauuaaugauaaagggaaagaaguccucgugcuauggggcauucaccauccaucuacuagugcugaccaacaaagucucuaucagaaugcagaugcauauguuuuuguggggacaucaagauacagcaagaaguucaagccggaaauagcaauaagacccaaagugagggaacaagaagggagaaugaacuauuacuggacacuaguagagccgggagacaaaauaacauucgaagcaacuggaaaucuagugguaccgagauaugcauucgcaauggaaagaaaugcuggaucugguauuaucauuucagauacaccaguccacgauugcaauacaacuugucagacacccaagggugcuauaaacaccagccucccauuucagaauauacauccgaucacaauuggaaaauguccaaaauauguaaaaagcacaaaauugagacuggccacaggauugaggaaugucccgucuauucaaucuagaggccuauuuggggccauugccgguuucauugaagggggguggacagggaugguagauggaugguacgguuaucaccaucaaaaugagcaggggucaggauaugcagccgaccugaagagcacacagaaugccauugacgagauuacuaacaaaguaaauucuguuauugaaaagaugaauacacaguucacagcaguagguaaagaguucaaccaccuggaaaaaagaauagagaauuuaaauaaaaaaguugaugaugguuuccuggacauuuggacuuacaaugccgaacuguugguucuauuggaaaaugaaagaacuuuggacuaccacgauucaaaugugaagaacuuauaugaaaagguaagaagccaguuaaaaaacaaugccaaggaaauuggaaacggcugcuuugaauuuuaccacaaaugcgauaacacgugcauggaaagugucaaaaaugggacuuaugacuacccaaaauacucagaggaagcaaaauuaaacagagaagaaauagauggaguaaagcuggaaucaacaaggauuuaccagauuuuggcgaucuauucaacugucgccaguucauugguacugguagucucccugggggcaaucaguuucuggaugugcucuaaugggucucuacaguguagaauauguauuuaa

SEQ ID NO: 39395 - RNA, 1701 nt, Artificial Sequence; identical to SEQ ID NO: 39288
  derived and/or modified CDS sequence (wt) from hemagglutinin__InfluenzaA__AEO01289

SEQ ID NO: 39396 - RNA, 1701 nt, Artificial Sequence
  derived and/or modified CDS sequence (wt) from hemagglutinin__InfluenzaA__AEO01290
augaaggcaauacuaguaguucugcuauauacauuugcaaccgcaaaugcagacacauuauguauagguuaucaugcgaacaauucaacagacacuguagacacaguacuagaaaagaauguaacaguaacacacucuguuaaccuucuagaagacaagcauaacgggaaacuaugcaaacuaagagggguagccccauugcauuuggguaaauguaacauugcuggcuggauccugggaaauccagagugugaaucacucuccacagcaagcucaugguccuacauuguggaaacaucuaguucagacaauggaacguguuacccaggagauuucaucgauuaugaggagcuaagagagcaauugagcucagugucaucauuugaaagguuugagauauuccccaagacaaguucauggcccaaucaugacucgaacaaagguguaacggcagcauguccucaugcuggagcaaaaagcuucuacaaaaauuuaauauggcuaguuaaaaaaggaaauucauacccaaagcucagcaaauccuacauuaaugauaaagggaaagaaguccucgugcuauggggcauucaccauccaucuacuagugcugaccaacaaagucucuaucagaaugcagaugcauauguuuuuguggggacaucaagauacagcaagaaguucaagccggaaauagcaauaagacccaaagugagggaucaagaagggagaaugaacuauuacuggacacuaguagagccgggagacaaaauaacauucgaagcaacuggaaaucuagugguaccgagauaugcauucgcaauggagagaaaugcuggaucugguauuaucauuucagauacaccaguccacgauugcaauacaacuugucagacacccaagggugcuauaaacaccagccucucauuucagaauauacauccgaucacaauuggaaaauguccaaaauauguaaaaagcacaaaauugagacuggccacaggauugaggaaugucccgucuauucaaucuagaggccuauuuggggccauugccgguuucauugaagggggguggacagggaugguagauggaugguacgguuaucaccaucaaaaugagcaggggucaggauaugcagccgaccugaagagcacacagaaugccauugacgagauuacuaacaaaguaaauucuguuauugaaaagaugaauacacaguucacagcaguagguaaagaguucaaccaccuggaaaaaagaauagagaauuuaaauaaaaaaguugaugaugguuuccuggacauuuggacuuacaaugccgaacuguugguucuauuggaaaaugaaagaacuuuggacuaccacgauucaaaugugaagaacuuauaugaaaagguaagaagccaguuaaaaaacaaugccaaggaaauuggaaacggcugcuuugaauuuuaccacaaaugcgauaacacgugcauggaaagugucaaaaaugggacuuaugacuacccaaaauacucagaggaagcaaaauuaaacagagaagaaauagaugggguaaagcuggaaucaacaaggauuuaccagauuuuggcgaucuauucaacugucgccaguucauugguacugguagucucccugggggcaaucaguuucuggaugugcucuaaugggucucuacaguguagaauauguauuuaa

SEQ ID NO: 39397 - RNA, 1701 nt, Artificial Sequence
  derived and/or modified CDS sequence (wt) from hemagglutinin__InfluenzaA__AEO01291
augaaggcaauacuaguaguucugcuauauacauuugcaaccgcaaaugcagacacauuauguauagguuaucaugcgaacaauucaacagacacuguagacacaguauuagaaaagaauguaacaguaacacacucuguuaaccuucuagaagacaagcauaacgggaaacuaugcaaacuaagagggguagccccauugcauuuggguaaauguaacauugcuggcuggauccugggaaauccagagugugaaucacucuccacagcaagcucaugguccuacauuguggaaacaucuaguucagacaauggaacguguuacccaggagauuucaucgauuaugaggagcuaagagagcaauugagcucagugucaucauuugaaagguuugagauauuccccaagacaaguucauggcccaaucaugacucgaacaaagguguaacggcagcauguccucaugcuggagcaaaaagcuucuacaaaaauuuaauauggcuaguuaaaaaaggaaauucauacccaaagcucagcaaguccuacauuaaugauaaagggaaagaaguccucgugcuauggggcauucaccauccaucuacuagugcugaccaacaaagucucuaucagaaugcagaugcauauguuuuuguggggacaucaagauacagcaagaaguucaagccggaaauagcaauaagacccaaagugagggaucaagaagggagaaugaacuauuacuggacacuaguagagccgggagacaaaauaacauucgaagcaacuggaaaucuagugguaccgagauaugcauucgcaauggaaagaaaugcuggaucugguauuaucauuucagauacaccaguccacgauugcaauacaacuugucagacacccaagggugcuauaaacaccagccucccauuucagaauauacauccgaucacaauuggaaaguguccaaaauauguaaaaagcacaaaauugagacuggccacaggauugaggaaugucccgucuauucaaucuagaggccuauuuggggccauugccgguuucauugaagggggguggacagggaugguagauggaugguacgguuaucaccaucaaaaugagcaggggucaggauaugcagccgaccugaagagcacacagaaugccauugacgagauuacuaacaaaguaaauucuguuauugaaaagaugaauacacaguucacagcaguagguaaagaguucaaccaccuggaaaaaagaauagagaauuuaaauaaaaagguugaugaugguuuccuggacauuuggacuuacaaugccgaacuguugguucuauuggaaaaugaaagaacuuuggacuaccacgauucaaaugugaagaacuuauaugaaaagguaagaagccaguuaaaaaacaaugccaaggaaauuggaaacggcugcuuugaauuuuaccacaaaugcgauaacacgugcauggaaagugucaaaaaugggacuuaugacuacccaaaauacucagaggaagcaaaauuaaacagagaagaaauagaugggguaaagcuggaaucaacaaggauuuaccagauuuuggcgaucuauucaacugucgccaguucauugguacugguagucucccugggggcaaucaguuucuggaugugcucuaaugggucucuacaguguagaauauguauuuaa

SEQ ID NO: 39398 - RNA, 1701 nt, Artificial Sequence; identical to SEQ ID NO: 39397
  derived and/or modified CDS sequence (wt) from hemagglutinin__InfluenzaA__AEO01292

SEQ ID NO: 39399 - RNA, 1701 nt, Artificial Sequence
  derived and/or modified CDS sequence (wt) from hemagglutinin__InfluenzaA__AEO01294
augaaggcaauacuaguaguucugcuauauacauuugcaaccgcaaaugcagacacauuauguauagguuaucaugcgaacaauucaacagacacuguagacacaguacuagaaaagaauguaacaguaacacacucuguuaaccuucuagaagacaagcauaacgggaaacuaugcaaacuaagagggguagccccauugcauuuggguaaaugugacauugcuggcuggauccugggaaauccagagugugaaucacucuccacagcaagcucaugguccuacauuguggaaacaucuaguucagacaauggaacguguuacccaggagauuucaucgauuaugaggagcuaagagagcaauugagcucagugucaucauuugaaagguuugagauauuccccaagacaaguucauggcccaaucaugacucgaacaaagguguaacggcagcauguccucaugcuggagcaaaaagcuucuacaaaaauuuaauauggcuaguuaaaaaaggaaauucauacccaaagcucagcaaauccuacauuaaugauaaagggaaagaaguccucgugcuauggggaauucaccauccaucuacuagugcugaccaacaaagucucuaucagaaugcagaugcauauguuuuuguggggacaucaagauacagcaagaaguucaagccggaaauagcaauaagacccaaagugagggaucaagaagggagaaugaacuauuacuggacacuaguagagccgggagacaaaauaacauucgaagcaacuggaaaucuagugguaccgagauaugcauucgcaauggaaagaaaugcuggaucugguauuaucauuucagauacaccaguccacgauugcaauacaacuugucagacacccaagggugcuauaaacaccagccucccauuucagaauauacauccgaucacaauuggaaaauguccaaaauauguaaaaagcacaaaauugagacuggccacaggauugaggaaugucccgucuauucaaucuagaggccuauuuggggccauugccgguuucauugaagggggguggacagggaugguagauggaugguacgguuaucaccaucaaaaugagcaggggucaggauaugcagccgaccugaagagcacacagcaugccauugacgagauuacuaacaaaguaaauucuguuauugaaaagaugaauacacaguucacagcaguagguaaagaguucaaccaccuggaaaaaagaauagagaauuuaaauaaaaaaguugaugaugguuuccuggacauuuggacuuacaaugccgaacuguugguucuauuggaaaaugaaagaacuuuggacuaccacgauucaaaugugaagaacuuauaugaaaagguaagaagccaguuaaaaaacaaugccaaggaaauuggaaacggcugcuuugaauuuuaccacaaaugcgauaacacgugcauggaaagugucaaaaaugggacuuaugacuacccaaaauacucagaggaagcaaaauuaaacagagaagaaauagaugggguaaagcuggaaucaacaaggauuuaccagauuuuggcgaucuauucaacugucgccaguucauugguacugguagucucccugggggcaaucaguuucuggaugugcucuaaugggucucuacaguguagaauauguauuuaa

SEQ ID NO: 39400 - RNA, 1701 nt, Artificial Sequence
  derived and/or modified CDS sequence (wt) from hemagglutinin__InfluenzaA__AEO01295
augaaggcaauacuaguaguucugcuauauacauuugcaaccgcaaaugcagacacauuauguauagguuaucaugcgaacaauucaacagacacuguagacacaguacuagaaaagaauguaacaguaacacacucuguuaaccuucuagaagacaagcauaacgggaaacuaugcaaacuaagagggguagccccauugcauuuggguaaauguaacauugcuggcuggauccugggaaauccagagugugaaucacucuccacagcaagcucaugguccuacauuguggaaacaucuaauucagacaauggaacguguuacccaggagauuucaucgauuaugaggagcuaagagagcaauugagcucagugucaucauuugaaagguuugagauauuccccaagacaaguucauggcccaaucaugacucgaacaaagguguaacggcagcauguccucaugcuggagcaaaaagcuucuacaaaaauuuaauauggcuaguuaaaaaaggaaauucauacccaaagcucagcaaauccuacauuaaugauaaagggaaagaaguccucgugcuauggggcauucaccauccaucuacuagugcugaccaacaaagucucuaucagaaugcagaugcauauguuuuuguggggacaucaagauacagcaagaaguucaagccggaaauagcaauaagacccaaagugagggaucaagaagggagaaugaacuauuacuggacacuaguagagccgggagacaaaauaacauucgaagcaacuggaaaucuagugguaccgagauaugcauucgcaauggaaagaaaugcuggaucugguauuaucauuucagauacaccaguccacuauugcaauacaacuugucagacacccaagggugcuauaaacaccagccucccauuucagaauauacauccgaucacaauuggaaaauguccaaaauauguaaaaagcacaaaauugagacuggccacaggauugaggaaugucccgucuauucaaucuagaggccuauuuggggccauugccgguuucauugaagggggguggacagggaugguagauggaugguacgguuaucaccaucaaaaugagcaggggucaggauaugcagccgaccugaagagcacacagaaugccauugacaagauuacuaacaaaguaaauucuguuauugaaaagaugaauacacaguucacagcaguagguaaagaguucaaccaccuggaaaaaagaauagagaauuuaaauaaaaaaguugaugaugguuuccuggacauuuggacuuacaaugccgaacuguugguucuauuggaaaaugaaagaacuuuggacuaccacgauucaaaugugaagaacuuauaugaaaagguaagaagccaguuaaaaaacaaugccaaggaaauuggaaacggcugcuuugaauuuuaccacaagugcgauaacacgugcauggaaagugucaaaaaugggacuuaugacuacccaaaauacucagaggaagcaaaauuaaacagagaagaaauagaugggguaaagcuggaaucaacaaggauuuaccagauuuuggcgaucuauucaacugucgccaguucauugguacugguagucucccugggggcaaucaguuucuggaugugcucuaaugggucucuacaguguagaauauguauuuaa

SEQ ID NO: 39401 - RNA, 1701 nt, Artificial Sequence
  derived and/or modified CDS sequence (wt) from hemagglutinin__InfluenzaA__AEO01296
augaaggcaauacuaguaguucugcuauauacauuugcaaccgcaaaugcagacacauuauguauagguuaucaugcgaacaauucaacagacacuguagacacaguacuagaaaagaauguaacaguaacacacucuguuaaccuucuagaagacaagcauaacgggaaacuaugcaaacuaagagggguagccccauugcauuuggguaaauguaacauugcuggcuggauccugggaaauccagagugugaaucacucuccacagcaagcucaugguccuacauuguggaaacaucuaguucagacaauggaacguguuacccaggagauuucaucgauuaugaggagcuaagagagcaauugagcucagugucaucauuugaaagguuugagauauuccccaagacaaguucauggcccaaucaugacucgaacaaagguguaacggcagcauguccucaugcuggagcaaaaagcuucuacaaaaauuuaauauggcuaguuaaaaaaggaaauucauacccaaagcucagcaaauccuacauuaaugauaaagggaaagaaguccucgugcuauggggcauucaccauccaucuacuagugcugaccaacaaagucucuaucagaaugcagaugcauauguuuuuguggggacaucaagauacagcaagaaguucaagccggaaauagcaauaagacccaaagugagggaucaagaagggagaaugaacuauuacuggacacuaguagagccgggagacaaaauaacauucgaagcaacuggaaaucuagugguaccgagauaugcauucgcaauggaaagaaaugcuggaucugguauuaucauuucagauacaccaguccacgauugcaauacaacuugucagacacccaagggugcuauaaacaccagccucccauuucagaauauacauccgaucacaauuggaaaauguccaaaauauguaaaaagcacaaaauugagacuggccacaggauugaggaaugucccgucuauucaaucuagaggccuauuuggggccauugccgguuucauugaagggggguggacagggaugguagauggaugguaugguuaucaccaucaaaaugagcaggggucaggauaugcagccgaccugaagagcacacagaaugccauugacgagauuacuaacaaaguaaauucuguuauugaaaagaugaauacacaguucacagcaguagguaaagaguucaaccaccuggaaaaaagaauagagaauuuaaauaaaaaaguugaugaugguuuccuggacauuuggacuuacaaugccgaacuguugguucuauuggaaaaugaaagaacuuuggacuaccacgauucaaaugugaagaacuuauaugaaaagguaagaagccaguuaaaaaacaaugccaaggaaauuggaaacggcugcuuugaauuuuaccacaaaugcgauaacacgugcauggaaagugucaaaaaugggacuuaugacuacccaaaauacucagaggaagcaaaauuaaacagagaagaaauagaugggguaaagcuggaaucaacaaggauuuaccagauuuuggcgaucuauucaacugucgccaguucauugguacugguagucucccugggggcaaucaguuucuggaugugcucuaaugggucucuacaguguagaauauguauuuaa

SEQ ID NO: 39402 - RNA, 1701 nt, Artificial Sequence; identical to SEQ ID NO: 37904
  derived and/or modified CDS sequence (wt) from hemagglutinin__InfluenzaA__AEO01297

SEQ ID NO: 39403 - RNA, 1701 nt, Artificial Sequence
  derived and/or modified CDS sequence (wt) from hemagglutinin__InfluenzaA__AEO01298
augaaggcaauacuaguaguucugcuauauacauuugcaaccgcaaaugcagacacauuauguauagguuaucaugcgaacaauucaacagacacuguagacacaguacuagaaaagaauguaacaguaacacacucuguuaaccuucuagaagacaagcauaacgggaaacuaugcaaacuaagagggguagccccauugcauuuggguaaauguaacauugcuggcuggauccugggaaauccagagugugaaucacucuccacagcaagcucaugguccuacauuguggaaacaucuaguucagacaauggaacguguuacccaggagauuucaucgauuaugaggagcuaagagagcaauugagcucagugucaucauuugaaagguuugagauauuccccaagacaaguucauggcccaaucaugacucgaacaaagguguaacggcagcauguccucaugcuggagcaaaaagcuucuacaaaaauuuaauauggcuaguuaaaaaaggaaauucauacccaaagcucagcaaauccuacauuaaugauaaagggaaagaaguccucgugcuauggggcauucaccauccaucuacuagugcugaccaacaaagucucuaucagaaugcagaugcauauguuuuuguggggacaucaagauacagcaagaaguucaagccggaaauagcaauaagacccaaagugagggaucaagaagggagaaugaacuauuacuggacacuaguagagccgggagacaaaauaacauucgaagcaacuggaaaucuagugguaccgagauaugcauucgcaauggaaagaaaugcuggaucugguauuaucauuucagauacaccaguccacgauugcaauacaacuugucagacacccaagggugcuauaaacaccagccucccauuucagaauauacauccgaucacaauuggaaaauguccaaaauauguaaaaagcacaaaauugagacuggccacaggauugaggaaugucccgucuauucaaucuagaggccuauuuggggccauugccgguuucauugaagggggguggacagggaugguagauggaugguacgguuaucaccaucaaaaugagcaggggucaggauaugcagccgaccugaagagcacacagaaugccauugacgagauuacuaacaaaguaaauucuguuauugaaaagaugaauacacaguucacagcaguagguaaagaguucaaccaccuggaaaaaagaauagagaauuuaaauaaaaaaguugaugaugguuuccuggacauuuggacuuacaaugccgaacuguugguucuauuggaaaaugaaagaacuuuggacuaccacgauucaaaugugaagaacuuauaugaaaagguaagaagccaguuaaaaaacaaugccaaggaaauuggaaacggcugcuuugaauuuuaccacaaaugcgauaacacgugcauggaaagugucaaaaaugggacuuaugacuacccaaaauacucagaggaagcaaaauuaaacagagaagaaauagaugggguaaagcuggaaucaacaaggauuuaccagauuuuggcgaucuauucaacugucgccaguucauugguacugguagucucccugggggcagucaguuucuggaugugcucuaaugggucucuacaguguagaauauguauuuaa

SEQ ID NO: 39404 - RNA, 1701 nt, Artificial Sequence; identical to SEQ ID NO: 34681
  derived and/or modified CDS sequence (wt) from hemagglutinin__InfluenzaA__AEO01299

SEQ ID NO: 39405 - RNA, 1701 nt, Artificial Sequence
  derived and/or modified CDS sequence (wt) from hemagglutinin__InfluenzaA__AEO01300
augaaggcaauacuaguaguucugcuauauacauuugcaaccgcaaaugcagacacauuauguauagguuaucaugcgaacaauucaacagacacuguagacacaguacuagaaaagaauguaacaguaacacacucuguuaaccuucuagaagacaagcauaacgggaaacuaugcaaacuaagagggguagccccauugcauuuggguaaauguaacauugcuggcuggauccugggaaauccagagugugaaucacucuccacagcaagcucaugguccuacauuguggaaacaucuaguucagacaauggaacguguuacccaggagauuucaucgauuaugaggagcuaagagagcaauugagcucagugucaucauuugaaagguuugagauauuccccaagacaaguucauggcccaaucaugacucgaacaaagguguaacggcagcauguccucaugcuggagcaaaaagcuucuacaaaaauuuaauauggcuaguuaaaaaaggaaauucauacccaaagcucagcaaguccuacauuaaugauaaagggaaagaaguccucgugcuauggggcauucaccauccaucuacuagugcugaccaacaaagucucuaucagaaugcagaugcauauguuuuuguggggacaucaagauacagcaagaaguucaagccggaaauagcaauaagacccaaagugagggaucaagaagggagaaugaacuauuacuggacacuaguagagccgggagacaaaauaacauucgaagcaacuggaaaucuagugguaccgagauaugcauucgcaauggaaagaaaugcuggaucugguauuaucauuucagauacaccaguccacgauugcaauacaacuugucagacacccaagggugcuauaaacaccagccucccauuucagaauauacauccgaucacaauuggaaaauguccaaaauauguaaaaagcacaaaauugagacuggccacaggauugaggaacgucccgucuauucaaucuagaggccuauuuggggccauugccgguuucauugaagggggguggacagggaugguagauggaugguacgguuaucaccaucaaaaugagcaggggucaggauaugcagccgaccugaagagcacacagaaugccauugacgagauuacuaacaaaguaaauucuguuauugaaaagaugaauacacaguucacagcaguagguaaagaguucaaccaccuggaaaaaagaauagagaauuuaaauaaaaaaguugaugaugguuuccuggacauuuggacuuacaaugccgaacuguugguucuauuggaaaaugaaagaacuuuggacuaccacgauucaaaugugaagaacuuauaugaaaagguaagaagccaguuaaaaaacaaugccaaggaaauuggaaacggcugcuuugaauuuuaccacaaaugcgauaacacgugcauggaaagugucaaaaaugggacuuaugacuacccaaaauacucagaggaagcaaaauuaaacagagaagaaauagaugggguaaagcuggaaucaacaaggauuuaccagauuuuggcgaucuauucaacugucgccaguucauugguacugguagucucccugggggcaaucaguuucuggaugugcucuaaugggucucuacaguguagaauauguauuuaa

SEQ ID NO: 39406 - RNA, 1701 nt, Artificial Sequence; identical to SEQ ID NO: 34714
  derived and/or modified CDS sequence (wt) from hemagglutinin__InfluenzaA__AEO01301

SEQ ID NO: 39407 - RNA, 1701 nt, Artificial Sequence; identical to SEQ ID NO: 34681
  derived and/or modified CDS sequence (wt) from hemagglutinin__InfluenzaA__AEO01302

SEQ ID NO: 39408 - RNA, 1701 nt, Artificial Sequence
  derived and/or modified CDS sequence (wt) from hemagglutinin__InfluenzaA__AEO01303
augaaggcaauacuaguaguucugcuauauacauuugcaaccgcaaaugcagacacauuauguauagguuaucaugcgaacaauucaacagacacuguagacacaguacuagaaaagaauguaacaguaacacacucuguuaacauucuagaagacaagcauaaugggaaacuaugcaaacuaagagggguagccccauugcauuuggguaaauguaacauugcuggcuggauccugggaaauccagagugugaaucacucuccacagcaagcucaugguccuacauuguggaaacaucuaguucagacaauggaacguguuacccaggagauuucaucgauuaugaggagcuaagagagcaauugagcucagugucaucauuugaaagguuugagauauuccccaagacaaguucauggcccaaucaugacucgaacaaagguguaacggcagcauguccucaugcuggagcaaaaagcuucuacaaaaauuuaauauggcuaguuaaaaaaggaaauucauacccaaagcucagcaaauccuacauuaaugauaaagggaaagaaguccucgugcuauggggcauucaccauccaucuacuagugcugaccaacaaagucucuaucagaaugcagaugcauauguuuuuguggggacaucaagauacagcaagaaguucaagccggaaauagcaauaagacccaaagugagggaucaagaagggagaaugaacuauuacuggacacuaguagagccgggagacaaaauaacauucgaagcaacuggaaaucuagugguaccgagauaugcauucgcaauggaaagaaaugcuggaucugguauuaucauuucagauacaccaguccacgauugcaauacaacuugucagacacccaagggugcuauaaacaccagccucccauuucagaauauacauccgaucacaauuggaaaauguccaaaauauguaaaaagcacaaaauugagacuggccacaggauugaggaaugucccgucuauucaaucuagaggccuauuuggggccauugccgguuucauugaagggggguggacagggaugguagauggaugguacgguuaucaccaucaaaaugagcaggggucaggauaugcagccgaccugaagagcacacagaaugccauugacgagauuacuaacaaaguaaauucuguuauugaaaagaugaauacacaguucacagcaguagguaaagaguucaaccaccuggaaaaaagaauagagaauuuaaauaaaaaaguugaugaugguuuccuggacauuuggacuuacaaugccgaacuguugguucuauuggaaaaugaaagaacuuuggacuaccacgauucaaaugugaagaacuuauaugaaaagguaagaagccaguuaaaaaacaaugccaaggaaauuggaaacggcugcuuugaauuuuaccacaaaugcgauaacacgugcauggaaagugucaaaaaugggacuuaugacuaccccaaauacucagaggaagcaaaauuaaacagagaagaaauagaugggguaaagcuggaaucaacaaggauuuaccagauuuuggcgaucuauucaacugucgccaguucauugguacugguagucucccugggggcaaucaguuucuggaugugcucuaaugggucucuacaguguagaauauguauuuaa

SEQ ID NO: 39409 - RNA, 1701 nt, Artificial Sequence
  derived and/or modified CDS sequence (wt) from hemagglutinin__InfluenzaA__AEO01304
augaaggcaauacuaguaguucugcuauauacauuugcaaccgcaaaugcagacacauuauguauagguuaucaugcgaacaauucaacagacacuguagacacaguacuagaaaagaauguaacaguaacacacucuguuaaccuucuagaagacaagcauaacgggaaacuaugcaaacuaagagggguagccccauugcauuuggguaaauguaacauugcuggcuggauccugggaaauccagagugugaaucacucuccacagcaagcucaugguccuacauuguggaaacaucuaguucagacaauggaacguguuacccaggagauuucaucgauuaugaggagcuaagagagcaauugagcucagugucaucauuugaaagguuugagauauuccccaaggcaaguucauggcccaaucaugacucgaacaaagguguaacggcagcauguccucaugcuggagcaaaaagcuucuacaaaaauuuaauauggcuaguuaaaaaaggaaauucauacccaaagcucagcaaauccuacauuaaugauaaagggaaaggaguccucgugcuauggggcauucaccauccaucuacuagugcugaccaacaaagucucuaucagaaugcagaugcauauguuuuuguggggacaucaagauacagcaagaaguucaagccggaaauagcaauaagacccaaagugagggaucaagaagggagaaugaacuauuacuggacacuaguagagccgggagacaaaauaacauucgaagcaacuggaaaucuagugguaccgagauaugcauucgcaauggaaagaaaugcuggaucugguauuaucauuucagauacaccaguccacgauugcaauacaacuugucagacacccaagggugcuauaaacaccagccucccauuucagaauauacauccgaucacaauuggaaaauguccaaaauauguaaaaagcacaaaauugagacuggccacaggauugaggaaugucccgucuauucaaucuagaggccuauuuggggccauugccgguuucauugaagggggguggacagggaugguagauggaugguacgguuaucaccaucaaaaugagcaggggucaggauaugcagccgaccugaagagcacacagaaugccauugacgagauuacuaacaaaguaaauucuguuauugaaaagaugaauacacaguucacagcaguagguaaagaguucaaccaccuggaaaaaagaauagagaauuuaaauaaaaaaguugaugaugguuuccuggacauuuggacuuacaaugccgaacuguugguucuauuggaaaaugaaagaacuuuggacuaccacgauucaaaugugaagaacuuauaugaaaagguaagaagccaguuaaaaaacaaugccaaggaaauuggaaacggcugcuuugaauuuuaccacaaaugcgauaacacgugcauggaaagugucaaaaaugggacuuaugacuacccaaaauacucagaggaagcaaaauuaaacagagaagaaauagaugggguaaagcuggaaucaacaaggauuuaccagauuuuggcgaucuauucaacugucgccaguucauugguacugguagucucccugggggcaaucaguuucuggaugugcucuaaugggucucuacaguguagaauauguauuuaa

SEQ ID NO: 39410 - RNA, 1701 nt, Artificial Sequence
  derived and/or modified CDS sequence (wt) from hemagglutinin__InfluenzaA__AEO01305
augaaggcaauacuaguaguucugcuauauacauuugcaaccgcaagugcagacacauuauguauagguuaucaugcaaacaauucaacagacacuguagacacaguacuagaaaagaauguaacaguaacacacucuguuaaccuucuagaagacaagcauaacgggaaacuaugcaaacuaagagggguagccccauugcauuuggguaaauguaacauugcuggcuggauccugggaaauccagagugugaaucacucuccacagcaagcucaugguccuacauuguggaaacaucuaguucagacaauggaacguguuacccaggagauuucaucgauuaugaggagcuaagagagcaauugagcucagugucaucauuugaaagguuugagauauuccccaagacaaguucauggcccaaucaugacucgaacaaagguguaacggcagcauguccucaugcuggagcaaaaagcuucuacaaaaauuuaauauggcuaguuaaaaaaggaaauucauacccaaagcucagcaaauccuacauuaaugauaaagggaaagaaguccucgugcuauggggcauucaccauccaucuacuagugcugaccaacaaagucucuaucagaaugcagaugcauauguuuuuguggggacaucaagauacagcaagaaguucaagccggaaauagcaauaagacccaaagugagggaucaagaagggagaaugaacuauuacuggacacuaguagaaccgggagacaaaauaacauucgaagcaacuggaaaucuagugguaccgagauaugcauucgcaauggaaagaaaugcuggaucugguauuaucauuucagauacaccaguccacgauugcaauacaacuugucagacacccaagggugcuauaaacaccagccucccauuucagaauauacauccgaucacaauuggaaaauguccaaaauauguaaaaagcacaaaauugagacuggccacaggauugaggaaugucccgucuauucaaucuagaggccuauuuggggccauugccgguuucauugaagggggguggacagggaugguagauggaugguacgguuaucaccaucaaaaugagcaggggucaggauaugcagccgaccugaagagcacacagaaugccauugacgagauuacuaacaaaguaaauucuguuauugaaaagaugaauacacaguucacagcaguagguaaagaguucaaccaccuggaaaaaagaauagagaauuuaaauaaaaagguugaugaugguuuccuggacauuuggacuuacaaugccgaacuguugguucuauuggaaaaugaaagaacuuuggacuaccacgauucaaaugugaagaacuuauaugaaaagguaagaagccaguuaaaaaacaaugccaaggaaauuggaaacggcugcuuugaauuuuaccacaaaugcgauaacacgugcauggaaagugucaaaaaugggacuuaugacuacccaaaauacucagaggaagcaaaauuaaacagagaagaaauagaugggguaaagcuggaaucaacaaggauuuaccagauuuuggcgaucuauucaacugucgccaguucauugguacugguagucucccugggggcaaucaguuucuggaugugcucuaaugggucucuacaguguagaauauguauuuaa

SEQ ID NO: 39411 - RNA, 1701 nt, Artificial Sequence; identical to SEQ ID NO: 34714
  derived and/or modified CDS sequence (wt) from hemagglutinin__InfluenzaA__AEO01306

SEQ ID NO: 39412 - RNA, 1701 nt, Artificial Sequence; identical to SEQ ID NO: 39397
  derived and/or modified CDS sequence (wt) from hemagglutinin__InfluenzaA__AEO01307

SEQ ID NO: 39413 - RNA, 1701 nt, Artificial Sequence; identical to SEQ ID NO: 34714
  derived and/or modified CDS sequence (wt) from hemagglutinin__InfluenzaA__AEO01308

SEQ ID NO: 39414 - RNA, 1701 nt, Artificial Sequence
  derived and/or modified CDS sequence (wt) from hemagglutinin__InfluenzaA__AEO01309
augaaggcaauacuaguaguucugcuauauacauuugcaaucgcaaaugcagacacauuauguauagguuaucaugcgaacaauucaacagacacuguagacacaguacuagaaaagaauguaacaguaacacacucuguuaaccuucuagaagacaagcauaacgggaaacuaugcaaacuaagagggguagccccauugcauuuggguaaauguaacauugcuggcuggauccugggaaauccagagugugaaucacucuccacagcaagcucaugguccuacauuguggaaacaucuaguucagacaauggaacguguuacccaggagauuucaucgauuaugaggagcuaagagagcaauugagcucagugucaucauuugaaagguuugagauauuccccaagacaaguucauggcccaaucaugacucgaacaaagguguaacggcagcauguccucaugcuggagcaaaaagcuucuacaaaaauuuaauauggcuaguuaaaaaaggaaauucauacccaaagcucagcaaauccuacauuaaugauaaagggaaagaaguccucgugcuauggggaauucaccauccaucuacuagugcugaccaacaaagucucuaucagaaugcagaugcauauguuuuuguggggacaucaagauacagcaagaaguucaagccggaaauagcaauaagacccaaagugagggaucaagaagggagaaugaacuauuacuggacacuaguagagccgggagacaaaauaacauucgaagcaacuggaaaucuagugguaccgagauaugcauucgcaauggaaagaaaugcuggaucugguauuaucauuucagauacaccaguccacgauugcaauacaacuugucagacacccaagggugcuauaaacaccagccucccauuucagaauauacauccgaucacaauuggaaaauguccaaaauauguaaaaagcacaaaauugagacuggccacaggauugaggaaugucccgucuauucaaucuagaggccuauuuggggccauugccgguuucauugaagggggguggacagggaugguagauggaugguacgguuaucaccaucaaaaugagcaggggucaggauaugcagccgaccugaagagcacacagcaugccauugacgagauuacuaacaaaguaaauucuguuauugaaaagaugaauacacaguucacagcaguagguaaagaguucaaccaccuggaaaaaagaauagagaauuuaaauaaaaaaguugaugaugguuuccuggacauuuggacuuacaaugccgaacuguugguucuauuggaaaaugaaagaacuuuggacuaccacgauucaaaugugaagaacuuauaugaaaagguaagaagccaguuaaaaaacaaugccaaggaaauuggaaacggcugcuuugaauuuuaccacaaaugcgauaacacgugcauggaaagugucaaaaaugggacuuaugacuacccaaaauacucaaaggaagcaaaauuaaacagagaagaaauaaaugggguaaagcuggaaucaacaaggauuuaccagauuuuggcgaucuauucaacugucgccaguucauugguacugguagucucccugggggcaaucaguuucuggaugugcucuaaugggucucuacaguguagaauauguauuuaa

SEQ ID NO: 39415 - RNA, 1701 nt, Artificial Sequence
  derived and/or modified CDS sequence (wt) from hemagglutinin__InfluenzaA__AEO01310
augaaggcaauacuaguaguucugcuauauacauuugcaaccgcaaaugcagacacauuauguauagguuaucaugcgaacaauucaacagacacuguagacacaguacuagaaaagaauguaacaguaacacacucuguuaaccuucuagaagacaagcauaacgggaaacuaugcaaacuaagagggguagccccauugcauuuggguaaauguaacauugcuggcuggauccugggaaauccagagugugaaucacucuccacagcaagcucaugguccuacauuguggaaacaucuaguucagacaauggaacguguuacccaggagauuucaucgauuaugaggagcuaagagagcaauugagcucagugucaucauuugaaagguuugagauauuccccaagacaaguucauggcccaaucaugacucgaacaaagguguaacggcagcauguccucaugcuggagcaaaaagcuucuacaaaaauuuaauauggcuaguuaaaaaaggaaauucauacccaaagcucagcaaauccuacauuaaugauagagggaaagaaguccucgugcuauggggcauucaccauccaucuacuagugcugaccaacaaagucucuaucagaaugcagaugcauauguuuuuguggggacaucaagauacagcaagaaguucaagccggaaauagcaauaagacccaaagugagggaucaagaagggagaaugaacuauuacuggacacuaguagagccgggagacaaaauaacauucgaagcaacuggaaaucuagugguaccgagauaugcauucgcaauggaaagaaaugcuggaucugguauuaucauuucagauacaccaguccacgauugcaauacaacuugucagacacccaagggugcuauaaacaccagccucccauuucagaauauacauccgaucacaauuggaaaauguccaaaauauguaaaaagcacaaaauugagacuggccacaggauugaggaaugucccaucuauucaaucuagaggccuauuuggggccauugccgguuucauugaagggggguggacagggaugguagauggaugguacgguuaucaccaucaaaaugagcaggggucaggauaugcagccgaccugaagagcacacagaaugccauugacgagauuacuaacaaaguaaauucuguuauugaaaagaugaauacacaguucacagcaguagguaaagaguucaaccaccuggaaaaaagaauagagaauuuaaauaaaaagguugaugaugguuuccuggacauuuggacuuacaaugccgaacuguugguucuauuggaaaaugaaagaacuuuggacuaccacgauucaaaugugaagaacuuauaugaaaagguaagaagccaguuaaaaaacaaugccaaggaaauuggaaacggcugcuuugaauuuuaccacaaaugcgauaacacgugcauggaaagugucaaaaaugggacuuaugacuacccaaaauacucagaggaagcaaaauuaaacagagaagaaauagaugggguaaagcuggaaucaacaaggauuuaccagauuuuggcgaucuauucaacugucgccaguucauugguacugguagucucccugggggcaaucaguuucuggaugugcucuaaugggucucuacaguguagaauauguauuuaa

SEQ ID NO: 39416 - RNA, 1701 nt, Artificial Sequence; identical to SEQ ID NO: 34681
  derived and/or modified CDS sequence (wt) from hemagglutinin__InfluenzaA__AEO01311

SEQ ID NO: 39417 - RNA, 1701 nt, Artificial Sequence
  derived and/or modified CDS sequence (wt) from hemagglutinin__InfluenzaA__AEO01312
augaaggcaauacuaguaguucugcuauauacauuugcaaccgcaaaugcagacacauuauguauagguuaucaugcgaacaauucaacagacacuguagacacaguacuagaaaagaauguaacaguaacacacucuguuaaccuucuagaagacaagcauaacgggaaacuaugcaaacuaagagggguagccccauugcauuuggguaaauguaacauugcuggcuggauccugggaaauccagagugugaaucacucuccacagcaagcucaugguccuacauuguggaaacaucuaguucagacaauggaacguguuacccaggagauuucaucgauuaugaggagcuaagagagcaauugagcucagugucaucauuugaaagguuugagauauuccccaagacaaguucauggcccaaucaugacucgaacaaagguguaacggcagcauguccucaugcuggagcaaaaagcuucuacaaaaauuuaauauggcuaguuaaaaaaggaaauucauacccaaagcucagcaaauccuacauuaaugauaaagggaaagaaguccucgugcuauggggcauucaccauccaucuacuagugcugaccaacaaagucucuaucagaaugcagaugcauauguuuuuguggggacaucaagauacagcaagaaguucaagccggaaauagcaauaagacccaaagugagggaucaagaagggagaaugaacuauuacuggacacuaguagagccgggagacaaaauaacauucgaagcaacuggaaaucuagugguaccgagauaugcauucgcaauggaaagaaaugcuggaucugguauuaucauuucagauacaccaguccacgauugcaauacaacuugucagacacccaagggugcuauaaacaccagccucccauuucagaauauacauccgaucacaauuggaaaauguccaaaauauguaaaaagcacaaaauugagacuggccacaggauugaggaaugucccgucuauucaaucuagaggccuauuuggggccauugccgguuucauugaagggggguggacagggauaguagauggaugguacgguuaucaccaucaaaaugagcaggggucaggauaugcagccgaccugaagagcacacagaaugccauugacgagauuacuaacaaaguaaauucuguuauugaaaagaugaauacacaguucacagcaguagguaaagaguucaaccaccuggaaaaaagaauagagaauuuaaauaaaaagguugaugaugguuuccuggacauuuggacuuacaaugccgaacuguugguucuauuggaaaaugaaagaacuuuggacuaccacgauucaaaugugaagaacuuauaugaaaagguaagaagccaguuaaaaaacaaugccaaggaaauuggaaacggcugcuuugaauuuuaccacaaaugcgauaacacgugcauggaaagugucaaaaaugggacuuaugacuacccaaaauacucagaggaagcaaaauuaaacagagaagaaauagaugggguaaagcuggaaucaacaaggauuuaccagauuuuggcgaucuauucaacugucgccaguucauugguacugguagucucccugggggcaaucaguuucuggaugugcucuaaugggucucuacaguguagaauauguauuuaa

SEQ ID NO: 39418 - RNA, 1701 nt, Artificial Sequence; identical to SEQ ID NO: 37243
  derived and/or modified CDS sequence (wt) from hemagglutinin__InfluenzaA__AEO01313

SEQ ID NO: 39419 - RNA, 1701 nt, Artificial Sequence
  derived and/or modified CDS sequence (wt) from hemagglutinin__InfluenzaA__AEO01314
augaaggcaauacuaguaguucugcuauauacauuugcaaccgcaaaugcagacacauuauguauagguuaucaugcgaacaauucaacagacacuguagacacaguacuagaaaagaauguaacaguaacacacucuguuaaccuucuagaagacaagcauaacgggaaacuaugcaaacuaagagggguagccccauugcauuuggguaaauguaacauugcuggcuggauccugggaaauccagagugugaaucacucuccacagcaagcucaugguccuacauuguggaaacaucuaguucagacaauggaacguguuacccaggagauuucaucgauuaugaggagcuaagagagcaauugagcucagugucaucauuugaaagguuugagauauuccccaagacaaguucauggcccaaucaugacucgaacaaagguguaacggcagcauguccucaugcuggagcaaaaagcuucuacaaaaauuuaauauggcuaguuaaaaaaggaaauucauacccaaagcucagcaaauccuacauuaaugauaaagggaaagaaguccucgugcuauggggcauucaccaucccucuacuagugcugaccaacaaagucucuaucagaaugcagaugcauauguuuuuguggggacaucaagauacagcaagaaguucaagccggaaauagcaauaagacccaaagugagggaucaagaagggagaaugaacuauuacuggacacuaguagagccgggagacaaaauaacauucgaagcaacuggaaaucuagugguaccgagauaugcauucgcaauggaaagaaaugcuggaucugguauuaucauuucagauacaccaguccacgauugcaauacaacuugucagacacccaagggugcuauaaacaccagccucccauuucagaauauacauccgaucacaauuggaaaauguccaaaauauguaaaaagcacaaaauugagacuggccacaggauugaggaaugucccgucuauucaaucuagaggccuauuuggggccauugccgguuucauugaagggggguggacagggaugguagauggaugguacgguuaucaccaucaaaaugagcaggggucaggauaugcagccgaccugaagagcacacagaaugccauugacaagauuacuaacaaaguaaauucuguuauugaaaagaugaauacacaguucacagcaguagguaaagaguucaaccaccuggaaaaaagaauagagaauuuaaauaaaaaaguugaugaugguuuccuggacauuuggacuuacaaugccgaacuguugguucuauuggaaaaugaaagaacuuuggacuaccacgauucaaaugugaagaacuuauaugaaaagguaagaagccaguuaaaaaacaaugccaaggaaauuggaaacggcugcuuugaauuuuaccacaaaugcgauaacacgugcauggaaagugucaaaaaugggacuuaugacuacccaaaauacucagaggaagcaaaauuaaacagagaagaaauagaugggguaaagcuggaaucaacaaggauuuaccagauuuuggcgaucuauucaacugucgccaguucauugguacugguagucucccugggggcaaucaguuucuggaugugcucuaaugggucucuacaguguagaauauguauuuaa

SEQ ID NO: 39420 - RNA, 1701 nt, Artificial Sequence
  derived and/or modified CDS sequence (wt) from hemagglutinin__InfluenzaA__AEO01315
augaaggcaauacuaguaguucugcuauauacauuugcaaccgcaaaugcagacacauuauguauagguuaucaugcgaacaauucaacagacacuguagacacaguacuagaaaagaauguaacaguaacacacucuguuaaccuucuagaagacaagcauaacaggaaacuaugcaaacuaagagggguagccccauugcauuuggguaaauguaacauugcuggcuggauccugggaaauccagagugugaaucacucuccacagcaagcucaugguccuacauuguggaaacaucuaguucagacaauggaacguguuacccaggagauuucaucgauuaugaggagcuaagagagcaauugagcucagugucaucauuugaaagguuugagauauuccccaagacaagcucauggcccaaucaugacucgaacaaagguguaacggcagcauguccucaugcuggagcaaaaagcuucuacaaaaauuuaauauggcugguuaaaaaaggaaauucauacccaaagcucagcaaauccuacauuaaugauaaagggaaagaaguccucgugcuauggggcauucaccauccaucuacuagugcugaccaacaaagucucuaucagaaugcagaugcauauguuuuuguggggacaucaagauacagcaagaaguucaagccggaaauagcaauaagacccaaagugagggaucaagaagggagaaugaacuauuacuggacacuaguagagccgggagacaaaauaacauucgaagcaacuggaaaucuagugguaccgagauaugcauucgcaauggaaagaaaugcuggaucugguauuaucauuucagauacaccaguccacgauugcaauacaacuugucagacacccaagggugcuauaaacaccagccucccauuucagaauauacauccgaucacaauuggaaaauguccaaaauauguaaaaagcacaaaauugagacuggccacaggauugaggaaugucccgucuauucaaucuagaggccuauuuggggccauugccgguuucauugaagggggguggacagggaugguagauggaugguacgguuaucaccaucaaaaugagcaggggucaggauaugcagccgaccugaagagcacacagaaugccauugacgagauuacuaacaaaguaaauucuguuauugaaaagaugaauacacaguucacagcaguagguaaagaguucaaccaccuggaaaaaagaauagagaauuuaaauaaaaagguugaugaugguuuccuggacauuuggacuuacaaugccgaacuguugguucuauuggaaaaugaaagaacuuuggacuaccacgauucaaaugugaagaacuuauaugaaaagguaagaagccaguuaaaaaacaaugccaaggaaauuggaaacggcugcuuugaauuuuaccacaaaugcgauaacacgugcauggaaagugucaaaaaugggacuuaugacuacccaaaauacucagaggaagcaaaauuaaacagagaagaaauagaugggguaaagcuggaaucaacaaggauuuaccagauuuuggcgaucuauucaacugucgccaguucauugguacugguagucucccugggggcaaucaguuucuggaugugcucuaaugggucucuacaguguagaauauguauuuaa

SEQ ID NO: 39421 - RNA, 1701 nt, Artificial Sequence; identical to SEQ ID NO: 34681
  derived and/or modified CDS sequence (wt) from hemagglutinin__InfluenzaA__AEO01316

SEQ ID NO: 39422 - RNA, 1701 nt, Artificial Sequence; identical to SEQ ID NO: 34714
  derived and/or modified CDS sequence (wt) from hemagglutinin__InfluenzaA__AEO01317

SEQ ID NO: 39423 - RNA, 1701 nt, Artificial Sequence; identical to SEQ ID NO: 34714
  derived and/or modified CDS sequence (wt) from hemagglutinin__InfluenzaA__AEO01318

SEQ ID NO: 39424 - RNA, 1701 nt, Artificial Sequence; identical to SEQ ID NO: 34681
  derived and/or modified CDS sequence (wt) from hemagglutinin__InfluenzaA__AEO01319

SEQ ID NO: 39425 - RNA, 1701 nt, Artificial Sequence
  derived and/or modified CDS sequence (wt) from hemagglutinin__InfluenzaA__AEO01321
augaaggcaauacuaguaguucugcuauauacauuugcaaccgcaaaugcagacacauuauguauagguuaucaugcgaacaauucaacagacacuguagacacaguacuagaaaagaauguaacaguaacacacucuguuaacauucuagaagacaagcauaacgggaaacuaugcaaacuaagagggguagccccauugcauuuggguaaauguaacauugcuggcuggauccugggaaauccagagugugaaucacucuccacagcaagcucaugguccuacauuguggaaacaucuaguucagacaauggaacguguuacccaggagauuucaucgauuaugaggagcuaagagagcaauugagcucagugucaucauuugaaagguuugagauauuccccaagacaaguucauggcccaaucaugacucgaacaaagguguaacggcagcauguccucaugcuggagcaaaaagcuucuacaaaaauuuaauauggcuaguuaaaaaaggaaauucauacccaaagcucagcaaauccuacauuaaugauaaagggaaagaaguccucgugcuauggggcauucaccauccaucuacuagugcugaccaacaaagucucuaucagaaugcagaugcauauguuuuuguggggacaucaagauacagcaagaaguucaagccggaaauagcaauaagacccaaagugagggaucaagaagggagaaugaacuauuacuggacacuaguagagccgggagacaaaauaacauucgaagcaacuggaaaucuagugguaccgagauaugcauucgcaauggaaagaaaugcuggaucugguauuaucauuucagauacaccaguccacgauugcaauacaacuugucagacacccaagggugcuauaaacaccagccucccauuucagaauauacauccgaucacaauuggaaaauguccaaaauauguaaaaagcacaaaauugagacuggccacaggauugaggaaugucccgucuauucaaucuagaggccuauuuggggccauugccgguuucauugaagggggguggacagggaugguagauggaugguacgguuaucaccaucaaaaugagcaggggucaggauaugcagccgaccugaagagcacacagaaugccauugacgagauuacuaacaaaguaaauucuguuauugaaaagaugaauacacaguucacagcaguagguaaagaguucaaccaccuggaaaaaagaauagagaauuuaaauaaaaaaguugaugaugguuuccuggacauuuggacuuacaaugccgaacuguuggcucuauuggaaaaugaaagaacuuuggacuaccacgauucaaaugugaagaacuuauaugaaaagguaagaagccaguuaaaaaacaaugccaaggaaauuggaaacggcugcuuugaauuuuaccacaaaugcgauaacacgugcauggaaagugucaaaaaugggacuuaugacuaccccaaauacucagaggaagcaaaauuaaacagagaagaaauagaugggguaaagcuggaaucaacaaggauuuaccagauuuuggcgaucuauucaacugucgccaguucauugguacugguagucucccugggggcaaucaguuucuggaugugcucuaaugggucucuacaguguagaauauguauuuaa

SEQ ID NO: 39426 - RNA, 1701 nt, Artificial Sequence; identical to SEQ ID NO: 36870
  derived and/or modified CDS sequence (wt) from hemagglutinin__InfluenzaA__AEO01322

SEQ ID NO: 39427 - RNA, 1701 nt, Artificial Sequence; identical to SEQ ID NO: 37904
  derived and/or modified CDS sequence (wt) from hemagglutinin__InfluenzaA__AEO01323

SEQ ID NO: 39428 - RNA, 1701 nt, Artificial Sequence; identical to SEQ ID NO: 36866
  derived and/or modified CDS sequence (wt) from hemagglutinin__InfluenzaA__AEO01324

SEQ ID NO: 39429 - RNA, 1701 nt, Artificial Sequence; identical to SEQ ID NO: 34681
  derived and/or modified CDS sequence (wt) from hemagglutinin__InfluenzaA__AEO01325

SEQ ID NO: 39430 - RNA, 1701 nt, Artificial Sequence
  derived and/or modified CDS sequence (wt) from hemagglutinin__InfluenzaA__AEO01326
augaaggcaauacuaguaguucugcuauauacauuugcaaccgcaaaugcagacacauuauguauagguuaucaugcgaacaauucaacagacacuguagacacaguacuagaaaagaauguaacaguaacacacucuguuaaccuucuagaagacaagcauaacgggaaacuaugcaaacuaagagggguagccccauugcauuuggguaaauguaacauugcuggcuggauccugggaaauccagagugugaaucacucuccacagcaagcucaugguccuacauuguggaaacaucuaguucagacaauggaacguguuacccaggagauuucaucgauuaugaggagcuaagagagcaauugagcucagugucaucauuugaaagguuugagauauuccccaagacaaguucauggcccaaucaugacucgaacaaagguguaacggcagcauguccucaugcuggagcaaaaagcuucuacaaaaauuuaauauggcuaguuaaaaaaggaaauucauacccaaagcucagcaaauccuacauuaaugauaaagggaaagaaguccucgugcuauggggcauucaccauccaucuacuagugcugaccaacaaagucucuaucaggaugcagaugcauauguuuuuguggggacaucaagauacagcaagaaguucaagccggaaauagcaauaagacccaaagugagggaucaagaagggagaaugaacuauuacuggacacuaguagagccgggagacaaaauaacauucgaagcaacuggaaaucuagugguaccgagauaugcauucgcaauggaaagaaaugcuggaucugguauuaucauuucagauacaccaguccacgauugcaauacaacuugucagacacccaagggugcuauaaacaccagccucccauuucagaauauacauccgaucacaauuggaaaauguccaaaauauguaaaaagcacaaaauugagacuggccacaggauugaggaaugucccgucuauucaaucuagaggccuauuuggggccauugccgguuucauugaagggggguggacagggaugguagauggaugguacgguuaucaccaucaaaaugagcaggggucaggauaugcagccgaccugaagagcacacagaaugccauugacgagauuacuaacaaaguaaauucuguuauugaaaagaugaauacacaguucacagcaguagguaaagaguucaaccaccuggaaaaaagaauagagaauuuaaauaaaaaaguugaugaugguuuccuggacauuuggacuuacaaugccgaacuguugguucuauuggaaaaugaaagaacuuuggacuaccacgauucaaaugugaagaacuuauaugaaaagguaagaagccaguuaaaaaacaaugccaaggaaauuggaaacggcugcuuugaauuuuaccacaaaugcgauaacacgugcauggaaagugucaaaaaugggacuuaugacuacccaaaauacucagaggaagcaaaauuaaacagagaagaaauagaugggguaaagcuggaaucaacaaggauuuaccagauuuuggcgaucuauucaacugucgccaguucauugguacugguagucucccugggggcaaucaguuucuggaugugcucuaaugggucucuacaguguagaauauguauuuaa

SEQ ID NO: 39431 - RNA, 1701 nt, Artificial Sequence
  derived and/or modified CDS sequence (wt) from hemagglutinin__InfluenzaA__AEO01327
augaaggcaauacuaguaguucugcuauauacauuugcaaccgcaaaugcagacacauuauguauagguuaucaugcgaacaauucaacagacacuguagacacaguacuagaaaagaauguaacaguaacacacucuguuaaccuucuagaagacaagcauaacgggaaacuaugcaaacuaagagggguggccccauugcauuuggguaaauguaacauugcuggcuggauccugggaaauccagagugugaaucacucuccacagcaagcucaugguccuacauuguggaaacaucuaguucagacaauggaacguguuacccaggagauuucaucgauuaugaggagcuaagagagcaauugagcucagugucaucauuugaaagguuugagauauuccccaagacaaguucauggcccaaucaugacucgaacaaagguguaacggcagcauguccucaugcuggagcaaaaagcuucuacaaaaauuuaauauggcuaguuaaaaaaggaaauucauacccaaagcucagcaaauccuacauuaaugauaaagggaaagaaguccucgugcuauggggcauucaccauccaucuacuagugcugaccaacaaagucucuaucagaaugcagaugcauauguuuuuguggggacaucaagauacagcaagaaguucaagccggaaauagcaauaagacccaaagugagggaucaagaagggagaaugaacuauuacuggacacuaguagagccgggagacaaaauaacauucgaagcaacuggaaaucuagugguaccgagauaugcauucgcaauggaaagaaaugcuggaucugguauuaucauuucagauacaccaguccacgauugcaauacaacuugucagacacccaagggugcuauaaacaccagccucccauuucagaauauacauccgaucacaauuggaaaauguccaaaauauguaaaaagcacaaaauugagacuggccacaggauugaggaaugucccgucuauucaaucuagaggccuauuuggggccauugccgguuucauugaagggggguggacagggaugguagauggaugguacgguuaucaccaucaaaaugagcaggggucaggauaugcagccgaccugaagagcacacagaaugccauugacgagauuacuaacaaaguaaauucuguuauugaaaagaugaauacacaguucacagcaguagguaaagaguucaaccaccuggaaaaaagaauagagaauuuaaauaaaaaaguugaugaugguuuccuggacauuuggacuuacaaugccgaacuguugguucuauuggaaaaugaaagaacuuuggacuaccacgauucaaaugugaagaacuuauaugaaaagguaagaagccaguuaaaaaacaaugccaaggaaauuggaaacggcugcuuugaauuuuaccacaaaugcgauaacacgugcauggaaagugucaaaaaugggacuuaugacuacccaaaauacucagaggaagcaaaauuaaacagagaagaaauagaugggguaaagcuggaaucaacaaggauuuaccagauuuuggcgaucuauucaacugucgccaguucauugguacugguagucucccugggggcaaucaguuucuggaugugcucuaaugggucucuacaguguagaauauguauuuaa

SEQ ID NO: 39432 - RNA, 1701 nt, Artificial Sequence; identical to SEQ ID NO: 39390
  derived and/or modified CDS sequence (wt) from hemagglutinin__InfluenzaA__AEO01328

SEQ ID NO: 39433 - RNA, 1701 nt, Artificial Sequence; identical to SEQ ID NO: 34681
  derived and/or modified CDS sequence (wt) from hemagglutinin__InfluenzaA__AEO01330

SEQ ID NO: 39434 - RNA, 1701 nt, Artificial Sequence
  derived and/or modified CDS sequence (wt) from hemagglutinin__InfluenzaA__AEO01331
augaaggcaauacuaguaguucugcuauauacauuugcaaccgcaaaugcagacacauuauguauagguuaucaugcgaacaauucaacagacacuguagacacauuacuagaaaagaauguaacaguaacacacucuguuaaccuucuagaagacaagcauaacgggaagcuaugcaaacuaagggggguagccccauugcauuuggguaaauguaacauugcuggcuggauccugggaaauccagagugugaaucacucuccacagcaagcucaugguccuacauuguggaaacaucuaguucagacaauggaacguguuacccaggagauuucaucgauuaugaggagcuaagagagcaauugagcucagugucaucauuugaaagguuugagauauuccccaagacaaguucauggcccaaucaugacucgaacaaagguguaacggcagcauguccucaugcuggagcaaaaagcuucuacaaaaauuuaauauggcuaguuaaaaagggaaauucauacccaaagcucagcaaauccuacauuaaugauaaagggaaagaaguccucgugcuauggggcauucaccauccaucuacuagugcugaccaacaaagucucuaucagaaugcagaugcauauguuuuuguggggacaucaagauacagcaagaaguucaagccggaaauagcaauaagacccaaagugagggaucaagaagggagaaugaacuauuacuggacacuaguagagccgggagacaaaauaacauucgaagcaacuggaaaucuagugguaccgagauaugcauucgcaauggaaagaaaugcuggaucugguauuaucauuucagauacaccaguccacgauugcaauacaacuugucagacacccaagggugcuauaaacaccagccucccauuucagaauauacauccgaucacaauuggaaaauguccaaaauauguaaaaagcacaaaauugagacuggccacaggauugaggaaugucccgucuauucaaucuagaggccuauuuggggccauugccgguuucauugaagggggguggacagggaugguagauggaugguacgguuaucaccaucaaaaugagcaggggucaggauaugcagccgaccugaagagcacacagaaugccauugacgagauuacuaacaaaguaaauucuguuauugaaaagaugaauacacaguucacagcaguagguaaagaguucaaccaccuggaaaaaagaauagagaauuuaaauaaaaaaguugaugaugguuuccuggacauuuggacuuacaaugccgaacuguugguucuauuggaaaaugaaagaacuuuggacuaccacgauucaaaugugaagaacuuauaugaaaagguaagaagccaguuaaaaaacaaugccaaggaaauuggaaacggcugcuuugaauuuuaccacaaaugcgauaacacgugcauggaaagugucaaaaaugggacuuaugauuacccaaaauacucagaggaagcaaaguuaaacagagaagaaauagaugggguaaagcuggaaucaacaaggauuuaccagauuuuggcgaucuauucaacugucgccaguucauugguacugguagucucccugggggcaaucaguuucuggaugugcucuaaugggucucuacaguguagaauauguauuuaa

SEQ ID NO: 39435 - RNA, 1701 nt, Artificial Sequence
  derived and/or modified CDS sequence (wt) from hemagglutinin__InfluenzaA__AEO01332
augaaggcaauacuaguaguucugcuauauacauuugcaaccgcaaaugcagacacauuauguauagguuaucaugcgaacaauucaacagacacuguagacacaguacuagaaaagaauguaacaguaacacacucuguuaaccuucuagaagacaagcauaacgggaaacuaugcaaacuaagagggguagccccauugcauuuggguaaauguaacauugcuggcuggauccugggaaauccagagugugaaucacucuccacagcaagcucaugguccuacauuguggaaacaucuaguucagacaauggaacguguuacccaggagauuucaucgauuaugaggagcuaagagagcaauugagcucagugucaucauuugaaagguuugagauauuccccaagacaaguucauggcccaaucaugacucgaacaaagguguaacggcagcauguccucaugcuggagcaaaaagcuucuacaaaaauuuaauauggcuaguuaaaaaaggaaauucauacccaaagcucagcaaauccuacauuaaugauaaagggaaagaaguccucgugcuauggggcauucaccauccaucuacuagugcugaccaacaaagucucuaucagaaugcagaugcauauguuuuugugggguuaucaagauacagcaagaaguucaagccggaaauagcaauaagacccaaagugagggaacaagaagggagaaugaacuauuacuggacacuaguagagccgggagacaaaauaacauucgaagcaacuggaaaucuagugguaccgagauaugcauucgcaauggaaagaaaugcuggaucugguauugucauuucagauacaccaguccaugauugcaauacaacuugucagacacccaagggugcuauaaacaccagccucccauuucagaauauacauccgaucacaauuggaaaauguccaaaauauguaaaaagcacaaaauugagacuggccacaggauugaggaaugucccgucuauucaaucuagaggccuauuuggggccauugccgguuucauugaagggggguggacagggaugguagauggaugguacgguuaucaccaucaaaaugagcaggggucaggauaugcagccgaccugaagagcacacagaaugccauugacgagauuacuaacaaaguaaauucuguuauugaaaagaugaauacacaguucacagcaguagguaaagaguucaaccaccuggaaaaaagaauggagaauuuaaauaaaaaaguugaugaugguuuccuggacauuuggacuuacaaugccgaacuguugguuuuauuggaaaaugaaagaacuuuggacuaccacgauucaaaugugaagaacuuauaugaaaagguaagaagccaguuaaaaaccaaugccaaggaaauuggaaacggcugcuuugaauuuuaccacaaaugcgauaacacgugcauggaaagugucaaaaaugggacuuaugacuacccaaaauacucagaggaagcaaaauuaaacagagaagaaauagaugggguaaagcuggaaucaacaaggauuuaccagauuuuggcgaucuauucaacugucgccaguucauugguacugguagucucccugggggcaaucaguuucuggaugugcucuaaugggucucuacaguguagaauauguauuuaa

SEQ ID NO: 39436 - RNA, 1701 nt, Artificial Sequence; identical to SEQ ID NO: 39383
  derived and/or modified CDS sequence (wt) from hemagglutinin__InfluenzaA__AEO01333

SEQ ID NO: 39437 - RNA, 1701 nt, Artificial Sequence
  derived and/or modified CDS sequence (wt) from hemagglutinin__InfluenzaA__AEO01334
augaaggcaauacuaguaguucugcuauauacauuugcaaccgcaaaugcagacacauuauguauagguuaucaugcgaacaauucaacagacacuguagacacaauacuagaaaagaauguaacaguaacacacucuguuaaccuucuagaagacaagcauaacgggaaacuaugcaaacuaagagggguagccccauugcauuuggguaaauguaacauugcuggcuggauccugggaaauccagagugugaaucacucuccacagcaagcucaugguccuacauuguggaaacaucuaguucagacaauggaacguguuacccaggagauuucaucgauuaugaggagcuaagagagcaauugagcucagugucaucauuugaaagguuugagauauuccccaagacaaguucauggcccaaucaugacucgaacaaagguguaacagcagcauguccucaugcuggagcaaaaagcuucuacaaaaauuuaauauggcuaguuaaaaaaggaaauucauacccaaagcucagcaaauccuacauuaaugauaaagggaaagaaguccucgugcuauggggcauucaccauccaucuacuagugcugaccaacaaagucucuaucagaaugcagaugcauauguuuuuguggggacaucaagauacagcaagaaguucaagccggaaauagcaauaagacccaaagugagggaucaagaagggagaaugaacuauuacuggacacuaguagagccgggagacaaaauaacauucgaagcaacuggaaaucuagugguaccgagauaugcauucgcaauggaaagaaaugcuggaucugguauuaucauuucagauacaccaguccacgauugcaauacaacuugucagacacccaagggugcuauaaacaccagccucccauuucagaauauacauccgaucacaauuggaaaauguccaaaauauguaaaaagcacaaaauugagacuggccacaggauugaggaaugucccgucuauucaaucuagaggccuauuuggggccauugccgguuucauugaagggggguggacagggaugguagauggaugguacgguuaucaccaucaaaaugagcaggggucaggauaugcagccgaccugaagagcacacagaaugccauugacgagauuacuaacaaaguaaauucuguuauugaaaagaugaauacacaguucacagcaguagguaaagaguucaaccaccuggaaaaaagaauagagaauuuaaauaaaaaaguugaugaugguuuccuggacauuuggacuuacaaugccgaacuguugguucuauuggaaaaugaaagaacuuuggacuaccacgauucaaaugugaagaacuuauaugaaaagguaagaagccaguuaaaaaacaaugccaaggaaauuggaaacggcugcuuugaauuuuaccacaaaugcgauaacacgugcauggaaagugucaaaaaugggacuuaugacuacccaaaauacucagaggaagcaaaauuaaacagagaagaaauagaugggguaaagcuggaaucaacaaggauuuaccagauuuuggcgaucuauucaacugucgccaguucauugguacugguagucucccugggggcaaucaguuucuggaugugcucuaaugggucucuacaguguagaauauguauuuaa

SEQ ID NO: 39438 - RNA, 1701 nt, Artificial Sequence; identical to SEQ ID NO: 39408
  derived and/or modified CDS sequence (wt) from hemagglutinin__InfluenzaA__AEO01335

SEQ ID NO: 39439 - RNA, 1701 nt, Artificial Sequence
  derived and/or modified CDS sequence (wt) from hemagglutinin__InfluenzaA__AEO01336
augaaggcaauacuaguaguucugcuauauacauuugcaaccgcaaaugcagacacauuauguauagguuaucaugcgaacaauucaacagacacuguagacacaguacuagaaaagaauguaacaguaacacacucuguuaaccuucuagaagacaagcauaacgggaaacuaugcaaacuaagagggguagccccauugcauuuggguaaauguaacauugcuggcuggauccugggaaauccagagugugaaucacucuccacagcaagcucaugguccuacauuguggaaacaucuaguucagacaauggaacguguuacccaggagauuucaucgauuaugaggagcuaagagagcaauugagcucagugucaucauuugaaagguuugagauauuccccaagacaaguucauggcccaaucaugacucgaacaaagguguaacggcagcauguccucaugcuggagcaaaaagcuucuacaaaaauuuaauauggcuaguuaaaaaaggaaauucauacccaaagcucaacaaauccuacauuaaugauaaagggaaagaaguccucgugcuauggggcauucaccauccaucuacuagugcugaccaacaaagucucuaucagaaugcagaugcauauguuuuuguggggacaucaagauacagcaagaaguucaagccggaaauagcaauaagacccaaagugagggaucaagaagggagaaugaacuauuacuggacacuaguagagccgggagacaaaauaacauucgaagcaacuggaaaucuagugguaccgagauaugcauucgcaauggaaagaaaugcuggaucugguauuaucauuucagauacaccaguccacgauugcaauacaacuugucagacacccaagggugcuauaaacaccagccucccauuucagaauauacauccgaucacaauuggagaauguccaaaauauguaaaaagcacaaaauugagacuggccacaggauugaggaaugucccgucuauucaaucuagaggccuauuuggggccauugccgguuucauugaagggggguggacagggaugguagauggaugguacgguuaucaccaucaaaaugagcaggggucaggauaugcagccgaccugaagagcacacagaaugccauugacaagauuacuaacaaaguaaauucuguuauugaaaagaugaauacacaguucacagcaguagguaaagaguucaaccaccuggaaaaaagaauagagaauuuaaauaaaaaaguugaugaugguuuccuggacauuuggacuuacaaugccgaacuguugguucuauuggaaaaugaaagaacuuuggacuaccacgauucaaaugugaagaacuuauaugaaaagguaagaagccaguuaaaaaacaaugccaaggaaauuggaaacggcugcuuugaauuuuaccacaaaugcgauaacacgugcauggaaagugucaaaaaugggacuuaugacuacccaaaauacucagaggaagcaaaauuaaacagagaagaaauagaugggguaaagcuggaaucaacaaggauuuaccagauuuuggcgaucuauucaacugucgccaguucauugguacugguagucucccugggggcaaucaguuucuggaugugcucuaaugggucucuacaguguagaauauguauuuaa

SEQ ID NO: 39440 - RNA, 1701 nt, Artificial Sequence
  derived and/or modified CDS sequence (wt) from hemagglutinin__InfluenzaA__AEO01337
augaaggcaauacuaguaguucugcuauauacauuugcaaccgcaaaugcagacacauuauguauagguuaucaugcgaacaauucaacagacacuguagacacaguacuagaaaagaauguaacaguaacacacucuguuaaccuucuagaagacaagcauaacgggaaacuaugcaaacuaagagggguagccccauugcauuuggguaaauguaacauugcuggcuggauccugggaaauccagagugugaaucacucuccacagcaagcucaugguccuacauuguggaaacaucuaguucagacaauggaacguguuacccaggagauuucaucgauuaugaggagcuaagagagcaauugagcucagugucaucauuugaaagguuugagauauuccccaagacaaguucauggcccaaucaugacucgaacaaagguguaacggcagcauguccucaugcuggagcaaaaagcuucuacaaaaauuuaauauggcuaguuaaaaaaggaaauucauacccaaagcucagcaaauccuacauuaaugauaaagggaaagaaguccucgugcuauggggcauucaccauccaucuacuagugcugaccaacaaagucucuaucagaaugcagaugcauauguuuuuguggggacaucaagauacagcaagaaguucaagccggaaauagcaauaagacccaaagugagggaucaagaagggagaaugaacuaucacuggacacuaguagagccgggagacaaaauaacauucgaagcaacuggaaaucuagugguaccgagauaugcauucgcaauggaaagaaaugcuggaucugguauuaucauuucagauacaccaguccacgauugcaauacaacuugucagacacccaagggugcuauaaacaccagccucccauuucagaauauacauccgaucacaauuggaaaauguccaaaauauguaaaaagcacaaaauugagacuggccacaggauugaggaaugucccgucuauucaaucuagaggccuauuuggggccauugccgguuucauugaagggggguggacagggaugguagauggaugguacgguuaucaccaucaaaaugagcaggggucaggauaugcagccgaccugaagagcacacagcaugccauugacgagauuacuaacaaaguaaauucuguuauugaaaagaugaauacacaguucacagcaguagguaaagaguucaaccaccuggaaaaaagaauagagaauuuaaauaaaaaaguugaugaugguuuccuggacauuuggacuuacaaugccgaacuguugguucuauuggaaaaugaaagaacuuuggacuaccacgauucaaaugugaagaacuuauaugaaaagguaagaagccaguuaaaaaacaaugccaaggaaauuggaaacggcugcuuugaauuuuaccacaaaugcgauaacacgugcauggaaagugucaaaaaugggacuuaugacuacccaaaauacucagaggaagcaaaauuaaacagagaagaaauagaugggguaaagcuggaaucaacaaggauuuaccagauuuuggcgaucuauucaacugucgccaguucauugguacugguagucucccugggggcaaucaguuucuggaugugcucuaaugggucucuacaguguagaauauguauuuaa

SEQ ID NO: 39441 - RNA, 1701 nt, Artificial Sequence; identical to SEQ ID NO: 34714
  derived and/or modified CDS sequence (wt) from hemagglutinin__InfluenzaA__AEO01338

SEQ ID NO: 39442 - RNA, 1701 nt, Artificial Sequence
  derived and/or modified CDS sequence (wt) from hemagglutinin__InfluenzaA__AEO01339
augaaggcaauacuaguaguucugcuauauacauuugcaaccgcaaaugcagacacauuauguauagguuaucaugcgaacaauucaacagacacuguagacacaguacuagaaaagaauguaacaguaacacacucuguuaaccuucuagaagacaagcacaacgggaaacuaugcaaacuaagagggguagccccauugcauuuggguaaauguaacauugcuggcuggauccugggaaauccagagugugaaucacucuccacagcaagcucaugguccuacauuguggaaacaucuaguucagacaauggaacguguuacccaggagauuucaucgauuaugaggagcuaagagagcaauugagcucagugucaucauuugaaagguuugagauauuccccaagacaaguucauggcccaaucaugacucgaacaaagguguaacggcagcauguccucaugcuggagcaaaaagcuucuacaaaaauuuaauauggcuaguuaaaaaaggaaauucauacccaaagcucagcaaauccuacauuaaugauaaagggaaagaaguccucgugcuauggggcauucaccauccaucuacuagugcugaccaacaaagucucuaucagaaugcagaugcauauguuuuuguggggacaucaagauacagcaagaaguucaagccggaaauagcaauaagacccaaagugagggaucaagaagggagaaugaacuacuacuggacacuaguagagccgggagacaaaauaacauucgaagcaacuggaaaucuagugguaccgagauaugcauucgcaauggaaagaaaugcuggaucugguauuaucauuucagauacaccaguccacgauugcaauacaacuugucagacacccaagggugcuauaaacaccagccucccauuucagaauauacauccgaucacaauuggaaaauguccaaaauauguaaaaagcacaaaauugagacuggccacaggauugaggaaugucccgucuauucaaucuagaggccuauuuggggccauugccgguuucauugaagggggguggacagggaugguagauggaugguacgguuaucaccaucaaaaugagcaggggucaggauaugcagccgaccugaagagcacacagaaugccauugacgagauuacuaacaaaguaaauucuauuauugaaaagaugaauacacaguucacagcaguagguaaagaguucaaccaccuggaaaaaagaauagagaauuuaaauaaaaaaguugaugaugguuuccuggacauuuggacuuacaaugccgaacuguugguucuauuggaaaaugaaagaacuuuggacuaccaugauucaaaugugaagaacuuauaugaaaagguaagaagccaguuaaaaaacaaugccaaggaaauuggaaacggcugcuuugaauuuuaccacaaaugcgauaacacgugcauggaaagugucaaaaaugggacuuaugacuacccaaaauacucagaggaagcaaaauuaaacagagaagaaauagaugggguaaagcuggaaucaacaaggauuuaccagauuuuggcgaucuauucaacugucgccaguucauugguacugguagucucccugggggcaaucaguuucuggaugugcucuaaugggucucuacaguguagaauauguauuuaa

SEQ ID NO: 39443 - RNA, 1701 nt, Artificial Sequence; identical to SEQ ID NO: 39399
  derived and/or modified CDS sequence (wt) from hemagglutinin__InfluenzaA__AEO01340

SEQ ID NO: 39444 - RNA, 1701 nt, Artificial Sequence; identical to SEQ ID NO: 39399
  derived and/or modified CDS sequence (wt) from hemagglutinin__InfluenzaA__AEO01341

SEQ ID NO: 39445 - RNA, 1701 nt, Artificial Sequence
  derived and/or modified CDS sequence (wt) from hemagglutinin__InfluenzaA__AEO01342
augaaggcaauacuaguaguucugcuauauacauuugcaaccgcaaaugcagacacauuauguauagguuaucaugcgaacaauucaacagacacuguagacacaguacuagaaaagaauguaacaguaacacacucuguuaaccuucuagaagacaagcauaacgggaaacuaugcaaacuaagagggguagccccauugcauuuggguaaauguaacauugcuggcuggauccugggaaauccagagugugaaucacucuccacagcaagcucaugguccuacauuguggaaacaucuaguucagacaauggaacguguuacccaggagauuucaucgauuaugaggagcuaagagagcaauugagcucagugucaucauuugaaagguuugagauauuccccaagacaaguucauggcccaaucaugacucgaacaaagguguaacggcagcauguccucaugcuggagcaaaaagcuucuacaaaaauuuaauauggcuaguuaaaaaaggaaauucauacccaaagcucagcaaauccuacauuaaugauaaagggaaagaaguccuugugcuauggggcauucaccauccaucuacuagugcugaccaacaaagucucuaucagaaugcagaugcauauguuuuuguggggacaucaagauacagcaagaaguucaagccggaaauagcaauaagacccaaagugagggaucaagaagggagaaugaacuauuacuggacacuaguagagccgggagacaaaauaacauucgaagcaacuggaaaucuagugguaccgagauaugcauucgcaauggaaagaaaugcuggaucugguauuaucauuucagauacaccaguccacgauugcaauacaacuugucagacacccaagggugcuauaaacaccagccucccauuucagaauauacauccgaucacaauuggaaaauguccaaaauauguaaaaagcacaaaauugagacuggccacaggauugaggaaugucccgucuauucaaucuagaggccuauuuggggccauugccgguuucauugaagggggguggacagggaugguagauggaugguacgguuaucaccaucaaaaugagcaggggucaggauaugcagccgaccugaagagcacacagaaugccauugacgagauuacuaacaaaguaaauucuguuauugaaaagaugaauacacaguucacagcaguagguaaagaguucaaccaccuggaaaaaagaauagagaauuuaaauaaaaaaguugaugaugguuuccuggacauuuggacuuacaaugccgaauuguugguucuauuggaaaaugaaagaacuuuggacuaccacgauucaaaugugaagaacuuauaugaaaagguaagaagccaguuaaaaaacaaugccaaggaaauuggaaacggcugcuuugaauuuuaccacaaaugcgauaacacgugcauggaaagugucaaaaaugggacuuaugacuacccaaaauacucagaggaagcaaaauuaaacagagaagaaauagaugggguaaagcuggaaucaacaaggauuuaccagauuuuggcgaucuauucaacugucgccaguucauugguacugguagucucccugggggcaaucaguuucuggaugugcucuaaugggucucuacaguguagaauauguauuuaa

SEQ ID NO: 39446 - RNA, 1701 nt, Artificial Sequence
  derived and/or modified CDS sequence (wt) from hemagglutinin__InfluenzaA__AEO01343
augaaggcaauacuaguaguucugcuauauacauuugcaaccgcaaaugcagacacauuauguauagguuaucaugcgaacaauucaacagacacuguagacacaguacuagaaaagaauguaacaguaacacacucuguuaaccuucuagaagacaagcauaacgggaaacuaugcaaacuaagagggguagccccauugcauuuggguaaauguaacauugcuggcuggauccugggaaauccagagugugaaucacucuccacagcaagcucaugguccuacauuguggaaacaucuaauucagacaauggaacguguuacccaggagauuucaucgauuaugaggagcuaagagagcaauugagcucagugucaucauuugaaagguuugagauauuccccaagacaaguucauggcccaaucaugacucgaacaaagguguaacggcagcauguccucaugcuggagcaaaaagcuucuacaaaaauuuaauauggcuaguuaaaaaaggaaauucauacccaaagcucagcaaauccuacauuaaugauaaagggaaagaaguccucgugcuauggggcauucaccauccaucuacuagugcugaccaacaaagucucuaucagaaugcagaugcauauguuuuuguggggacaucaagauacagcaagaaguucaagccggaaauagcaauaagacccaaagugagggaucaagaagggagaaugaacuauuacuggacacuaguagagccgggagacaaaauaacauucgaagcaacuggaaaucuagugguaccgagauaugcauucgcaauggaaagaaaugcuggaucugguauuaucauuucagauacaccaguccacgauugcaauacaacuugucagacacccaagggugcuauaaacaccagccucccauuucagaauauacauccgaucacaauuggaaaauguccaaaauauguaaaaagcacaaaauugagacuggccacaggauugaggaaugucccgucuauucaaucuagaggccuauuuggggccauugccgguuucauugaagggggguggacagggaugguagauggaugguacgguuaucaccaucaaaaugagcaggggucaggauaugcagccgaccugaagagcacacagaaugccauugacaagauuacuaacaaaguaaauucuguuauugaaaagaugaauacacaguucacagcaguagguaaagaguucaaccaccuggaaaaaagaauagagaauuuaaauaaaaaaguugaugaugguuuccuggacauuuggacuuacaaugccgaacuguugguucuauuggaaaaugaaagaacuuuggacuaccacgauucaaaugugaagaacuuauaugaaaagguaagaagccaguuaaaaaacaaugccaaggaaauuggaaacggcugcuuugaauuuuaccacaaaugcgauaacacgugcauggaaagugucaaaaaugggacuuaugacuacccaaaauacucagaggaagcaaaauuaaacagagaagaaauagaugggguaaagcuggaaucaacaaggauuuaccagauuuuggcgaucuauucaacugucgccaguucauugguacugguagucucccugggggcaaucaguuucuggaugugcucuaaugggucucuacaguguagaauauguauuuaa

SEQ ID NO: 39447 - RNA, 1701 nt, Artificial Sequence
  derived and/or modified CDS sequence (wt) from hemagglutinin__InfluenzaA__AEO01344
augaaggcaauacuaguaguucugcuauauacauuugcaaccgcaaaugcagacacauuauguauagguuaucaugcgaacaauucaacagacacuguagacacaguacuagaaaagaauguaacaguaacacacucuguuaacauucuagaagacaagcauaacgggaaacuaugcaaacuaagagggguagccccauugcauuuggguaaauguaacauugcuggcuggauccugggaaauccagagugugaaucacucuccacagcaagcucaugguccuacauuguggaaacaucuaguucagacaauggaacguguuacccaggagauuucaucgauuaugaggagcuaagagagcaauugagcucagugucaucauuugaaagguuugagauauuccccaagacaaguucauggcccaaucaugacucgaacaaagguguaacggcagcauguccucaugcuggagcaaaaagcuucuacaaaaauuuaauauggcuaguuaaaaaaggaaauucauacccaaagcucagcaaauccuacauuaaugauaaagggaaagaaguccucgugcuauggggcauucaccauccaucuacuagugcugaccaacaaagucucuaucagaaugcagaugcauauguuuuuguggggacaucaaaauacagcaagaaguucaagccggaaauagcaauaagacccaaagugagggaucaagaagggagaaugaacuauuacuggacacuaguagagccgggagacaaaauaacauucgaagcaacuggaaaucuagugguaccgagauaugcauucgcaauggaaagaaaugcuggaucugguauuaucauuucagauacaccaguccacgauugcaauacaacuugucagacacccaagggugcuauaaacaccagccucccauuucagaauauacauccgaucacaauuggaaaauguccaaaauauguaaaaagcacaaaauugagacuggccacaggauugaggaaugucccgucuauucaaucuagaggccuauuuggggccauugccgguuucauugaagggggguggacagggaugguagauggaugguacgguuaucaccaucaaaaugagcaggggucaggauaugcagccgaccugaagagcacacagaaugccauugacgagauuacuaacaaaguaaauucuguuauugaaaagaugaauacacaguucacagcaguagguaaagaguucaaccaccuggaaaaaagaauagagaauuuaaauaaaaaaguugaugaugguuuccuggacauuuggacuuacaaugccgaacuguugguucuauuggaaaaugaaagaacuuuggacuaccacgauucaaaugugaagaacuuauaugaaaagguaagaagccaguuaaaaaacaaugccaaggaaauuggaaacggcugcuuugaauuuuaccacaaaugcgauaacacgugcauggaaagugucaaaaaugggacuuaugacuaccccaaauacucagaggaagcaaaauuaaacagagaagaaauagaugggguaaagcuggaaucaacaaggauuuaccagauuuuggcgaucuauucaacugucgccaguucauugguacugguagucucccugggggcaaucaguuucuggaugugcucuaaugggucucuacaguguagaauauguauuuaa

SEQ ID NO: 39448 - RNA, 1701 nt, Artificial Sequence
  derived and/or modified CDS sequence (wt) from hemagglutinin__InfluenzaA__AEO01345
augaaggcaauacuaguaguucugcuauauacauuugcaaccgcaaaugcagacacauuauguauagguuaucaugcgaacaauucaacagacacuguagacacaguauuagaaaagaauguaacaguaacacacucuguuaaccuucuagaagacaagcauaacgggaaacuaugcaaacuaagagggguagccccauugcauuuggguaaauguaacauugcuggcuggauccugggaaauccagagugugaaucacucuccacagcaagcucaugguccuacauuguggaaacaucuaguucagacaauggaacguguuacccaggagauuucaucgauuaugaggagcuaagagagcaauugagcucagugucaucauuugaaagguuugagauauuccccaagacaaguucauggcccaaucaugacucgaacaaagguguaacggcagcauguccucaugcuggagcaaaaagcuucuacaaaaauuuaauauggcuaguuaaaaaaggaaauucauacccaaagcucagcaaguccuacauuaaugauaaagggaaagaaguccucgugcuauggggcauucaccauccaucuacuagugcugaccaacaaagucucuaucagaaugcagaugcauauguuuuuguggggacaucaagauacagcaagaaguucaagccggaaauagcaauaagacccaaagugagggaucaagaagggagaaugaacuauuacuggacacuaguagagccgggagacaaaauaacauucgaagcaacuggaaaucuagugguaccgagauaugcauucgcaauggaaagaaaugcuggaucugguauuaucauuucagauacaccaguccacgauugcaauacaacuugucagacacccaagggugcuauaaacaccagccucccauuucagaauauacauccgaucacaauuggaaaguguccaaaauauguaaaaagcacaaaauugagacuggccacaggauugaggaaugucccgucuauucaaucuagaggccuauuuggggccauugccgguuucauugaagggggguggacagggaugguagauggaugguacgguuaucaccaucaaaaugagcaggggucaggauaugcagccgaccugaagagcacacagaaugccauugacgagauuacuaacaaaguaaauucuauuauugaaaagaugaauacacaguucacagcaguagguaaagaguucaaccaccuggaaaaaagaauagagaauuuaaauaaaaagguugaugaugguuuccuggacauuuggacuuacaaugccgaacuguugguucuauuggaaaaugaaagaacuuuggacuaccacgauucaaaugugaagaacuuauaugaaaagguaagaagccaguuaaaaaacaaugccaaggaaauuggaaacggcugcuuugaauuuuaccacaaaugcgauaacacgugcauggaaagugucaaaaaugggacuuaugacuacccaaaauacucagaggaagcaaaauuaaacagagaagaaauagaugggguaaagcuggaaucaacaaggauuuaccagauuuuggcgaucuauucaacugucgccaguucauugguacugguagucucccugggggcaaucaguuucuggaugugcucuaaugggucucuacaguguagaauauguauuuaa

SEQ ID NO: 39449 - RNA, 1701 nt, Artificial Sequence; identical to SEQ ID NO: 34681
  derived and/or modified CDS sequence (wt) from hemagglutinin__InfluenzaA__AEO01346

SEQ ID NO: 39450 - RNA, 1701 nt, Artificial Sequence
  derived and/or modified CDS sequence (wt) from hemagglutinin__InfluenzaA__AEO01347
augaaggcaauacuaguaguucugcuauauacauuugcaaccgcaaaugcagacacauuauguauagguuaucaugcgaacaauucaacagacacuguagacacaguacuagaaaagaauguaacaguaacacacucuguuaaccuucuagaagacaagcauaacgggaaacuaugcaaacuaagagggguagccccauugcauuuggguaaauguaacauugcuggcuggauccugggaaauccagagugugaaucacucuccacagcaagcucaugguccuacauuguggaaacaucuaguucagacaauggaacguguuacccaggagauuucaucgauuaugaggagcuaagagagcaauugagcucagugucaucauuugaaagguuugagauauuccccaagacaaguucauggcccaaucaugacucgaacaaagguguaacggcagcauguccucaugcuggagcaaaaagcuucuacaaaaauuuaauauggcuaguuaaaaaaggaaauucauacccaaagcucagcaaauccuacauuaaugauaaagggaaagaaguccucgugcuauggggcauucaccauccaucuacuagugcugaccaacaaagucucuaucagaaugcagaugcauauguuuuuguggggacaucaagauacagcaagaaguucaagccggaaauagcaauaagacccaaagugagggaucaagaagggagaaugaacuauuacuggacacuaguagagccgggagacaaaauaacauucgaagcaacuggaaaucuagugguaccgagauaugcauucgcaauggaaagaaaugcuggaucugguauuaucauuucagauacaccaguccacgauugcaauacaacuugucagacacccaagggugcuauaaacaccagccucccauuucagaauauacauccgaucacaauuggagaauguccaaaauauguaaaaagcacaaaauugagacuggccacaggauugaggaaugucccgucuauucaaucuagaggccuauuuggggccauugccgguuucauugaagggggguggacagggaugguagauggaugguacgguuaucaccaucaaaaugagcaggggucaggauaugcagccgaccugaagagcacacagaaugccauugacaagauuacuaacaaaguaaauucuguuauugaaaagaugaauacacaguucacagcaguagguaaagaguucaaccaccuggaaaaaagaauagagaauuuaaauaaaaaaguugaugaugguuuccuggacauuuggacuuacaaugccgaacuguugguucuauuggaaaaugaaagaacuuuggacuaccacgauucaaaugugaagaacuuauaugaaaagguaagaagccaguuaaaaaacaaugccaaggaaauuggaaacggcugcuuugaauuuuaccacaaaugcgauaacacgugcauggaaagugucaaaaaugggacuuaugacuacccaaaauacucagaggaagcaaaauuaaacagagaagaaauagaugggguaaagcuggaaucaacaaggauuuaccagauuuuggcgaucuauucaacugucgccaguucauugguacugguagucucccugggggcaaucaguuucuggaugugcucuaaugggucucuacaguguagaauauguauuuaa

SEQ ID NO: 39451 - RNA, 1701 nt, Artificial Sequence
  derived and/or modified CDS sequence (wt) from hemagglutinin__InfluenzaA__AEO01348
augaaggcaauacuaguaguucugcuauauacauuugcaaucgcaaaugcagacacauuauguauagguuaucaugcgaacaauucaacagacacuguagacacaguacuagaaaagaauguaacaguaacacacucuguuaaccuucuagaagacaagcauaacgggaaacuaugcaaacuaagagggguagccccauugcauuuggguaaauguaacauugcuggcuggauccugggaaauccagagugugaaucacucuccacagcaagcucaugguccuacauuguggaaacaucuaguucagacaauggaacguguuacccaggagauuucaucgauuaugaggagcuaagagagcaauugagcucagugucaucauuugaaagguuugagauauuccccaaaacaaguucauggcccaaucaugacucgaacaaagguguaacggcagcauguccucaugcuggagcaaaaagcuucuacaaaaauuuaauauggcuaguuaaaaaaggaaauucauacccaaagcucagcaaauccuacauuaaugauaaagggaaagaaguccucgugcuauggggcauucaccauccaucuacuagugcugaccaacaaagucucuaucagaaugcagaugcauauguuuuuguggggacaucaagauacagcaagaaguucaagccggaaauagcaauaagacccaaagugagggaacaagaagggagaaugaacuauuacuggacacuaguagagccgggagacaaaauaacauucgaagcaacuggaaaucuagugguaccgagauaugcauucgcaauggaaagaaaugcuggaucugguauuaucauuucagauacaccaguccacgauugcaauacaacuugucagacacccaagggugcuauaaacaccagccucccauuucagaauauacauccgaucacaauuggaaaauguccaaaauauguaaaaagcacaaaauugagacuggccacaggauugaggaaugucccgucuauucaaucuagaggccuauuuggggccauugccgguuucauugaagggggguggacagggaugguagauggaugguacgguuaucaccaucaaaaugagcaggggucaggauaugcagccgaccugaagagcacacagaaugccauugacgagauuacuaacaaaguaaauucuguuauugaaaagaugaauacacaguucacagcaguagguaaagaguucaaccaccuggaaaaaagaauagagaauuuaaauaaaaaaguugaugaugguuuccuggacauuuggacuuacaaugccgaacuguugguucuauuggaaaaugaaagaacuuuggacuaccacgauucaaaugugaagaacuuauaugaaaagguaagaagccaguuaaaaaacaaugccaaggaaauuggaaacggcugcuuugaauuuuaccacaaaugcgauaacacgugcauggaaagugucaaaaaugggacuuaugacuacccaaaauacucagaggaagcaaaauuaaacagagaagaaauagaugggguaaagcuggaaucaacaaggauuuaccagauuuuggcgaucuauucaacugucgccaguucauugguacugguagucucccugggggcaaucaguuucuggaugugcucuaaugggucucuacaguguagaauauguauuuaa

SEQ ID NO: 39452 - RNA, 1701 nt, Artificial Sequence
  derived and/or modified CDS sequence (wt) from hemagglutinin__InfluenzaA__AEO01349
augaaggcaauacuaguaguucugcuauauacauuugcaaccgcaaaugcagacacauuauguauagguuaucaugcgaacaauucaacagacacuguagacacaguacuagaaaagaauguaacaguaacacacucuguuaaccuucuagaagacaagcauaacgggaaacuaugcaaacuaagagggguagccccauugcauuuggguaaauguaacauugcuggcuggauccugggaaauccagagugugaaucacucuccacagcaagcucaugguccuacauuguggaaacaucuaguucagaaaauggaacguguuacccaggagauuucaucgauuaugaggagcuaagagagcaauugagcucagugucaucauuugaaagguuugagauauuccccaagacaaguucauggcccaaucaugacucgaacaaagguguaacggcagcauguccucaugcuggagcaaaaagcuucuacaaaaauuuaauauggcuaguuaaaaaaggaaauucauacccaaagcucagcaaauccuacauuaaugauaaagggaaagaaguccucgugcuauggggcauucaccauccaucuacuagugcugaccaacaaagucucuaucagaaugcagaugcauauguuuuuguggggacaucaagauacagcaagaaguucaagccggaaauagcaauaagacccaaagugagggaucaagaagggagaaugaacuauuacuggacacuaguagagccgggagacaaaauaacauucgaagcaacuggaaaucuagugguaccgagauaugcauucgcaauggaaagaaaugcuggaucugguauuaucauuucagauacaccaguccacgauugcaauacaacuugucagacacccaagggugcuauaaacaccagccucccauuucagaauauacauccgaucacaauuggaaaauguccaaaauauguaaaaagcacaaaauugagacuggccacaggauugaggaaugucccgucuauucaaucuagaggccuauuuggggccauugccgguuucauugaagggggguggacagggaugguagauggaugguacgguuaucaccaucaaaaugagcaggggucaggauaugcagccgaccugaagagcacccagaaugccauugacgagauuacuaacaaaguaaauucuguuauugaaaagaugaauacacaguuuacagcaguagguaaagaguucaaccaccuggaaaaaagaauagagaauuuaaauaaaaaaguugaugaugguuuccuggacauuuggacuuacaaugccgaacuguugguucuauuggaaaaugaaagaacuuuggacuaccacgauucaaaugugaagaacuuauaugaaaagguaagaagccaguuaaaaaacaaugccaaggaaauuggaaacggcugcuuugaauuuuaccacaaaugcgauaacacgugcauggaaagugucaaaaaugggacuuaugacuauccaaaauacucaaaggaagcaaaacuaaacagagaagaaauagaugggguaaagcuggaaucaacaaggauuuaccagauuuuggcgaucuauucaacugucgccaguucauugguacugguagucucccugggggcaaucaguuucuggaugugcucuaaugggucucuacaguguagaauauguauuuaa

SEQ ID NO: 39453 - RNA, 1701 nt, Artificial Sequence
  derived and/or modified CDS sequence (wt) from hemagglutinin__InfluenzaA__AEO01350
augaaggcaauacuaguaguucugcuauauacauuugcaaccacaaaugcagacacauuauguauagguuaucaugcgaacaauucaacagacacuguagacacaguacuagaaaagaauguaacaguaacacacucuguuaaccuucuagaagacaagcauaacgggaaacuaugcaaacuaagagggguagccccauugcauuuggguaaauguaacauugcuggcuggauccugggaaauccagagugugaaucacucuccacagcaagcucaugguccuacauuguggaaacaucuaguucagacaauggaacguguuacccaggagauuucaucgauuaugaggagcuaagagagcaauugagcucagugucaucauuugaaagguuugagauauuccccaagacaaguucauggcccaaucaugacucaaacaaagguguaacggcagcauguccucaugcuggagcaaaaagcuucuacaaaaauuuaauauggcuaguuaaaaaaggaaauucauacccaaagcucagcaaauccuacauuaaugauaaagggaaagaaguccucgugcuauggggaauucaccauccaucuacuagugcugaccaacaaagucucuaucagaaugcagaugcauauguuuuuguggggacaucaagauacagcaagaaguucaagccggaaauagcaauaagacccaaagugagggaucaagaagggagaaugaacuauuacuggacacuaguagagccgggagacaaaauaacauucgaagcaacuggaaaucuagugguaccgagauaugcauucgcaauggaaagaaaugcuggaucugguauuaucauuucagauacaccaguccacgauugcaauacaacuugucagacacccaagggugcuauaaacaccagccucccauuucagaauauacauccgaucacaauuggaaaauguccaaaauauguaaaaagcacaaaauugagacuggccacaggauugaggaaugucccgucuauucaaucuagaggccuauuuggggccauugccgguuucauugaagggggguggacagggaugguagauggaugguacgguuaucaccaucaaaaugagcaggggucaggauaugcagccgaccugaagagcacacagcaugccauugacgagauuacuaacaaaguaaauucuguuauugaaaagaugaauacacaguucacagcaguagguaaagaguucaaccaccuggaaaaaagaauagagaauuuaaauaaaaaaguugaugaugguuuccuggacauuuggacuuacaaugccgaacuguugguucuauuggaaaaugaaagaacuuuggacuaccacgauucaaaugugaagaacuuauaugaaaagguaagaagccaguuaaaaaacaaugccaaggaaauuggaaacggcugcuuugaauuuuaccacaaaugcgauaacacgugcauggaaagugucaaaaaugggacuuaugacuacccaaaauacucagaggaagcaaaauuaaacagagaagaaauagaugggguaaagcuggaaucaacaaggauuuaccagauuuuggcgaucuauucaacugucgccaguucauugguacugguagucucccugggggcaaucaguuucuggaugugcucuaaugggucucuacaauguagaauauguauuuaa

SEQ ID NO: 39454 - RNA, 1701 nt, Artificial Sequence; identical to SEQ ID NO: 35521
  derived and/or modified CDS sequence (wt) from hemagglutinin__InfluenzaA__AEO01351

SEQ ID NO: 39455 - RNA, 1701 nt, Artificial Sequence; identical to SEQ ID NO: 35845
  derived and/or modified CDS sequence (wt) from hemagglutinin__InfluenzaA__AEO01352

SEQ ID NO: 39456 - RNA, 1701 nt, Artificial Sequence
  derived and/or modified CDS sequence (wt) from hemagglutinin__InfluenzaA__AEO01353
augaaggcaauacuaguaguucugcuauauacauuugcaaccgcaaaugcagacacauuauguauagguuaucaugcgaacaauucaacagacacuguagacacaguacuagaaaagaauguaacaguaacacacucuguuaaccuucuagaagacaagcauaacgggaaacuaugcaaacuaagagggguagccccauugcauuuggguaaauguaacauugcuggcuggauccugggaaauccagagugugaaucacucuccacagcaagcucaugguccuacauuguggaaacaucuaguucagacaauggaacguguuacccaggagauuucaucgauuaugaggagcuaagagagcaauugagcucagugucaucauuugaaagguuugagauauuccccaagacaaguucauggcccaaucaugacucgaacaaagguguaacggcagcauguccucaugcuggagcaaaaagcuucuacaaaaauuuaauauggcuaguuaaaaaaggaaauucauacccaaagcucagcaaauccuacauuaaugauaaagggaaagaaguccucgugcuauggggcauucaccauccaucuacuagugcugaccaacaaagucucuaucagaaugcagaugcauauguuuuuguggggacaucaagauacagcaagaaguucaagccggaaauagcaauaagacccaaagugagggaucaagaagggagaaugaacuauuacuggacacuaguagagccgggagacaaaauaacauucgaagcaacuggaaaucuagugguaccgagauaugcauucgcaauggaaagaaaugcuggaucugguauuaucauuucagauacaccaguccacgauugcaauacaacuugucagacacccaagggugcuauaaacaccagccucccauuucagaauauacauccgaucacaauuggaaaauguccaaaauauguaaaaagcacaaaauugagacuggccacaggauugaggaaugucccgucuauucaaucuagaggccuauuuggggccauugccgguuucauugaagggggguggacagggaugguagauggaugguacgguuaucaccaucaaaaugagcaggggucaggauaugcagccgaccugaagagcacacagaaugccauugacgagauuacuaacaaaguaaauucuguuauugaaaagaugaauacacaguucacagcaguagguaaagaguucaaccaccuggaaaaaagaauagagaauuuaaauaaaaagguugaugaugguuuccuggacauuuggacuuacaaugccgaacuguugguucuauuggaaaaugaaagaacuuuggacuaccacgauucaaaugugaagaacuuauaugaaaagguaagaagccaguuaaaaaacaaugccaaggaaauuggaaacggcugcuuugaauuuuaccacaaaugcgauaacacgugcauggaaagugucaaaaaugggacuuaugacuacccaaaauacucagaggaagcaaaauuaaacagagaagaaauagaugggguaaagcuggaaucaacaaggauuuaccagauuuuggcgaucuauucaacugucgccaguucauugguacugguagucuuccugggggcaaucaguuucuggaugugcucuaaugggucucuacaguguagaauauguauuuaa

SEQ ID NO: 39457 - RNA, 1701 nt, Artificial Sequence
  derived and/or modified CDS sequence (wt) from hemagglutinin__InfluenzaA__AEO01354
augaaggcaauacuaguaguucugcuauauaaauuugcaaccgcaaaugcagacacauuauguauagguuaucaugcgaacaauucaacagacacuguagacacaguacuagaaaagaauguaacaguaacacacucuguuaaccuucuagaagacaagcauaacgggaaacuaugcaaacuaagagggguagccccauugcauuuggguaaauguaacauugcuggcuggauccugggaaauccagagugugaaucacucuccacagcaagcucaugguccuacauuguggaaacaucuaguucagacaauggaacguguuacccaggagauuucaucgauuaugaggagcuaagagagcaauugagcucagugucaucauuugaaagguuugagauauuccccaagacaaguucauggcccaaucaugacucgaacaaagguguaacggcagcauguccucaugcuggagcaaaaagcuucuacaaaaauuuaauauggcuaguuaaaaaaggaaauucauacccaaagcucagcaaauccuacauuaaugauaaagggaaagaaguccucgugcuauggggcauucaccauccaucuacuagugcugaccaacaaagccucuaucagaaugcagaugcauauguuuuuguggggacaucaagauacagcaagaaguucaagccggaaauagcaauaagacccaaagugagggaucaagaagggagaaugaauuauuacuggacacuaguagagccgggagacaaaauaacauucgaagcaacuggaaaucuagugguaccgagauaugcauucgcaauggaaagaaaugcuggaucugguauuaucauuucagauacaccaguccacgauugcaauacaacuugucagacacccaagggugcuauaaacaccagccucccauuucagaauauacauccgaucacaauuggaaaauguccaaaauauguaaaaagcacaaaauugagacuggccacaggauugaggaaugucccgucuauucaaucuagaggccuauuuggggccauugccgguuucauugaagggggguggacagggaugguagauggaugguacgguuaucaccaucaaaaugagcaggggucaggauaugcagccgaccugaagagcacacagaaugccauugacgagauuacuaacaaaguaaauucuguuauugaaaagaugaauacacaguucacagcaguagguaaagaguucaaccaccuggaaaaaagaauagagaauuuaaauaaaaaaguugaugaugguuuccuagacauuuggacuuacaaugccgaacuguugguucuauuggaaaaugaaagaacuuuggacuaccacgauucaaaugugaagaacuuauaugaaaagguaagaagccaguuaaaaaacaaugccaaggaaauuggaaacggcugcuuugaauuuuaccacaaaugcgauaacacgugcauggaaagugucaaaaaugggacuuaugacuacccaaaauacucagaggaagcaaaauuaaacagagaagaaauagaugggguaaagcuggagucaacaaggauuuaccagauuuuggcgaucuauucaacugucgccaguucauugguacugguagucucccugggggcaaucaguuucuggaugugcucuaaugggucucuacaguguagaauauguauuuaa

SEQ ID NO: 39458 - RNA, 1701 nt, Artificial Sequence
  derived and/or modified CDS sequence (wt) from hemagglutinin__InfluenzaA__AEO01355
augaaggcaauacuaguaguucugcuauauacauuugcaaccgcaaaugcagacacauuauguauagguuaucaugcgaacaauucaacagacacuguagacacaguacuagaaaagaauguaacaguaacacacucuguuaaccuucuagaagacaagcauaacgggaaacuaugcaaacuaagagggguagccccauugcauuuggguaaauguaacauugcuggcuggauccugggaaauccagagugugaaucacucuccacagcaagcucaugguccuacauuguggaaacaucuaguucagacaauggaacguguuacccaggagauuucaucgauuaugaggagcuaagagagcaauugagcucagugucaucauuugaaagguuugagauauuccccaagacaaguucauggcccaaucaugacucgaacaaagguguaacggcagcauguccucaugcuggagcaaaaagcuucuacaaaaauuuaauauggcuaguuaaaaaaggaaauucauacccaaagcucagcaaauccuacauuaaugauaaagggaaagaaguccucgugcuauggggaauucaccauccaucuacuagugcugaccaacaaagucucuaucagaaugcagaugcauauguuuuuguggggacaucaagauacagcaagaaguucaagccggaaauagcaauaagacccaaagugagggaucaagaagggagaaugaacuauuacuggacacuaguagagccgggagacaaaauaacauucgaagcaacuggaaaucuagugguaccgagauaugcauucgcaauggaaagaaaugcuggaucugguauuaucauuucagauacaccaguccacgauugcaauacaacuugucagacacccaagggugcuauaaacaccagccucccauuucagaauauacauccgaucacaauuggaaaauguccaaaauauguaaaaagcacaaaauugagacuggccacaggauugaggaaugucccgucuauucaaucuagaggccuauuuggggccauugccgguuucauugaagggggguggacagggaugguagauggaugguacgguuaucaccaucaaaaugagcaggggucaggauaugcagccgaccugaagagcacacagcaugccauugacgagauuacuaacaaaguaaauucuguuauugaaaagaugaauacacaguucacagcaguagguaaagaguucaaccaccuggaaaaaagaauagagaauuuaaauaaaaaaguugaugaugguuuccuggauauuuggacuuacaaugccgaacuguugguucuauuggaaaaugaaagaacuuuggacuaccacgauucaaaugugaagaacuuauaugaaaagguaagaagccaguuaaaaaacaaugccaaggaaauuggaaacggcugcuuugaauuuuaccacaaaugcgauaacacgugcauggaaagugucaaaaaugggacuuaugacuacccaaaauacucagaggaagcaaaauuaaacagagaagaaauagaugggguaaagcuggaaucaacaaggauuuaccagauuuuggcgaucuauucaacugucgccaguucauugguacugguagucucccugggggcaaucaguuucuggaugugcucuaaugggucucuacaguguagaauauguauuuaa

SEQ ID NO: 39459 - RNA, 1701 nt, Artificial Sequence
  derived and/or modified CDS sequence (wt) from hemagglutinin__InfluenzaA__AEO01356
augaaggcaauacuaguaguucugcuauauacauuugcaaccgcaaaugcagacacauuauguauagguuaucaugcgaacaauucaacagacacuguagacacaguacuagaaaagaauguaacaguaacacacucuguuaaccuucuagaagacaagcauaacgggaaacuaugcaaacuaagagggguagccccauugcauuuggguaaauguaacauugcuggcuggauccugggaaauccagagugugaaucacucuccacagcaagcucaugguccuacauuguggaaacaucuaguucagacaauggaacguguuacccaggagauuucaucgauuaugaggagcuaagagagcaauugagcucagugucaucauuugaaagguuugagauauuccccaagacaaguucauggcccaaucaugacucgaacaaagguguaacggcagcauguccucaugcuggagcaaaaagcuucuacaaaaauuuaauauggcuaguuaaaaaaggaaauucauacccaaagcucagcaaauccuacauuaaugauaaagggaaagaaguccucgugcuauggggcauucaccauccaucuacuagugcugaccaacaaagucucuaucagaaugcagaugcauauguuuuuguggggacaucaagauacagcaagaaguucaagccggaaauagcaauaagacccaaagugagggaucaagaagggagaaugaacuauuacuggacacuaguagagccgggagacaaaauaacauucgaagcaacuggaaaucuagugguaccgagauaugcauucgcaauggaaagaaaugcuggaucugguauuaucauuucagauacaccaguccacgauugcaauacaacuugucagacacccaagggugcuauaaacaccagccucccauuucagaauauacauccgaucacaauuggaaaauguccaaaauauguaaaaagcacaaaauugagacuggccacaggauugaggaaugucccgucuauucaaucuagaggccuauuuggggccauugccgguuucauugaagggggguggacagggaugguagauggaugguacgguuaucaccaucaaaaugagcaggggucaggauaugcagccgaccugaagagcacacagaaugccauugacgagauuacuaacaaaguaaauucuguuauugaaaagaugaauacacaguucacagcaguagguaaagaguucaaccaccuggaaaaaagaauagagaauuuaaauaaaaaaguugaugaugguuuccuggacauuuggacuuacaaugccgaacuguugguucuauuggaaaaugaaagaacuuuggacuaccacgauucaaaugugaagaacuuauaugaaaagguaagaagccaguuaaaaaacaaugccaaggaaauuggaaacggcugcuuugaauuuuaccacaaaugcgauaacacgugcauggaaagugucaaaaaugggacuuaugacuacccaaaguacucagaggaagcaaaauuaaacagagaagaaauagaugggguaaagcuggaaucaacaaggauuuaccagauuuuggcgaucuauucaacugucgccaguucauugguacugguagucucccugggggcaaucaguuucuggaugugcucuaaugggucucuacaguguagaauauguauuuaa

SEQ ID NO: 39460 - RNA, 1701 nt, Artificial Sequence
  derived and/or modified CDS sequence (wt) from hemagglutinin__InfluenzaA__AEO01358
augaaggcaauacuaguaguucugcuauauacauuugcaaccgcaaaugcagacacauuauguguagguuaucaugcgaacaauucaacagacacuguagacacaguacuagaaaagaauguaacaguaacacacucuguuaaccuucuagaagacaagcauaacgggaaacuaugcaaacuaagagggguagccccauugcauuuggguaaauguaacauugcuggcuggauccugggaaauccagagugugaaucacucuccacagcaagcucaugguccuacauuguggaaacaucuaguucagacaauggaacguguuacccaggagauuucaucgauuaugaggagcuaagagagcaauugagcucagugucaucauuugaaagguuugagauauuccccaagacaaguucauggcccaaucaugacucgaacaaagguguaacggcagcauguccucaugcuggagcaaaaagcuucuacaaaaauuuaauauggcuaguuaaaaaaggaaauucauacccaaagcucagcaaauccuacauuaaugauaaagggaaagaaguccucgugcuauggggcauucaccauccaucuacuagugcugaccaacaaagucucuaucagaaugcagaugcauauguuuuuguggggacaucaagguacagcaagaaguucaagccggaaauagcaauaagacccaaagugagggaucaagaagggagaaugaacuauuacuggacacuaguagagccgggagacaaaauaacauucgaagcaacuggaaaucuagugguaccgagauaugcauucgcaauggaaagaaaugcuggaucugguauuaucauuucagauacaccagcccacgauugcaauacaacuugucagacacccaagggugcuauaaacaccagccucccauuucagaauauacauccgaucacaauuggaaaauguccaaaauauguaaaaagcacaaaauugagacuggccacaggauugaggaaugucccgucuauucaaucuagaggccuauuuggggccauugccgguuucauugaagggggguggacagggaugguagauggaugguacgguuaucaccaucaaaaugagcaggggucaggauaugcagccgaccugaagagcacacagaaugccauugacgagauuacuaacaaaguaaauucuguuauugaaaagaugaauacacaguucacagcaguagguaaagaguucaaccaccuggaaaaaagaauagagaauuuaaauaaaaaaguugaugaugguuuccuggacauuuggacuuacaaugccgaacuguugguucuauuggaaaaugaaagaacuuuggacuaccacgauucaaaugugaagaacuuauaugaaaagguaagaagccaguuaaaaaacaaugccaaggaaauuggaaacggcugcuuugaauuuuaccacaaaugcgauaacacgugcauggaaagugucaaaaaugggacuuaugacuacccaaaauacucagaggaagcaaaauuaaacagagaagaaauagaugggguaaagcuggaaucaacaaggauuuaccagauuuuggcgaucuauucaacugucgccaguucauugguacugguagucucccugggggcaaucaguuucuggaugugcucuaaugggucucuacaguguagaauauguauuuaa

SEQ ID NO: 39461 - RNA, 1701 nt, Artificial Sequence; identical to SEQ ID NO: 37294
  derived and/or modified CDS sequence (wt) from hemagglutinin__InfluenzaA__AEO01359

SEQ ID NO: 39462 - RNA, 1701 nt, Artificial Sequence
  derived and/or modified CDS sequence (wt) from hemagglutinin__InfluenzaA__AEO01360
augaaggcaauacuaguaguucugcuauauacauuugcaaccgcaaaugcagacacauuauguauagguuaucaugcgaacaauucaacagacacuguagacacauuacuagaaaagaauguaacaguaacacacucuguuaaccuucuagaagacaagcauaacgggaagcuaugcaaacuaagagggguagccccauugcauuuggguaaauguaacauugcuggcuggauccugggaaauccagagugugaaucacucuccacagcaagcucaugguccuacauuguggaaacaucuaguucagacaauggaacguguuacccaggagauuucaucgauuaugaggagcuaagagagcaauugagcucagugucaucauuugaaagguuugagauauuccccaagacaaguucauggcccaaucaugacucgaacaaagguguaacggcagcauguccucaugcuggagcaaaaagcuucuacaaaaauuuaauauggcuaguuaaaaaaggaaauucauacccaaagcucagcaaauccuacauuaaugauaaagggaaagaaguccucgugcuauggggcauucaccauccaucuacuagugcugaccaacaaagucucuaucagaaugcagaugcauauguuuuuguggggacaucaagauacagcaagaaguucaagccggaaauagcaauaagacccaaagugagggaucaagaagggagaaugaacuauuacuggacacuaguagagccgggagacaaaauaacauucgaagcaacuggaaaucuagugguaccgagauaugcauucgcaauggaaagaaaugcuggaucugguauuaucauuucagauacaccaguccacgauugcaauacaacuugucagacacccaagggugcuauaaacaccagccucccauuucagaauauacauccgaucacaauuggaaaauguccaaaauauguaaaaagcacaaaauugagacuggccacaggauugaggaaugucccgucuauucaaucuagaggccuauuuggggccauugccgguuucauugaagggggguggacagggaugguagauggaugguacgguuaucaccaucaaaaugagcaggggucaggauaugcagccgaccugaagagcacacagaaugccauugacgagauuacuaacaaaguaaauucuguuauugaaaagaugaauacacaguucacagcaguagguaaagaguucaaccaccuggaaaaaagaauagagaauuuaaauaaaaaaguugaugaugguuuccuggacauuuggacuuacaaugccgaacuguugguucuauuggaaaaugaaagaacuuuggacuaccacgauucaaaugugaagaacuuauaugaaaagguaagaagccaguuaaaaaacaaugccaaggaaauuggaaacggcugcuuugaauuuuaccacaaaugcgauaacacgugcauggaaagugucaaaaaugggacuuaugauuacccaaaauacucagaggaagcaaaauuaaacagagaagaaauagaugggguaaagcuggaaucaacaaggauuuaccagauuuuggcgaucuauucaacugucgccaguucauugguacugguagucucccugggggcaaucaguuucuggaugugcucuaaugggucucuacaguguagaauauguauuuaa

SEQ ID NO: 39463 - RNA, 1701 nt, Artificial Sequence
  derived and/or modified CDS sequence (wt) from hemagglutinin__InfluenzaA__AEO01361
augaaggcaauacuaguaguucugcuauauacauuugcaaccgcaaaugcagacacauuauguauagguuaucaugcgaacaauucaacagacacuguagacacaguacuagaaaagaauguaacaguaacacacucuguuaaccuucuagaagacaagcauaacgggaaacuaugcaaacuaagagggguagccccauugcauuuggguaaauguaacauugcuggcuggauccugggaaauccagagugugaaucacucuccacagcaagcucaugguccuacauuguggaaacaucuaguucagacaauggaacguguuacccgggagauuucaucgauuaugaggagcuaagagagcaauugagcucagugucaucauuugaaagguuugagauauuccccaagacaaguucauggcccaaucaugacucgaacaaagguguaacggcagcauguccucaugcuggagcaaaaagcuucuacaaaaauuuaauauggcuaguuaaaaaaggaaauucauacccaaagcucagcaaauccuacauuaaugauaaagggaaagaaguccucgugcuauggggcauucaccauccaucuacuagugcugaccaacaaagucucuaucagaaugcagaugcauauguuuuuguggggacaucaagauacagcaagaaguucaagccggaaauagcaauaagacccaaagugagggaacaagaagggagaaugaacuauuacuggacacuaguagagccgggagacaaaauaacauucgaagcaacuggaaaucuagugguaccgagauaugcauucgcaauggaaagaaaugcuggaucugguauuaucauuucagauacaccaguccaugauugcaauacaacuugucagacacccaagggugcuauaaacaccagccucccauuucagaauauacauccgaucacaauuggaaaauguccaaaauauguaaaaagcacaaaauugagacuggccacaggauugaggaaugucccgucuauucaaucuagaggccuauuuggggccauugccgguuucauugaagggggguggacagggaugguagauggaugguacgguuaucaccaucaaaaugagcaggggucaggauaugcagccgaccugaagagcacacagaaugccauugacgagauuacuaacaaaguaaauucuguuauugaaaagaugaauacacaguucacagcaguagguaaagaguucaaccaccuggaaaaaagaauagagaauuuaaauaaaaaaguugaugaugguuuccuggacauuuggacuuacaaugccgaacuguugguucuauuggaaaaugaaagaacuuuggacuaccacgauucaaaugugaagaacuuauaugaaaagguaagaagccaguuaaaaaacaaugccaaggaaauuggaaacggcugcuuugaauuuuaccacaaaugcgauaacacgugcauggaaagugucaaaaaugggacuuaugacuacccaaaauacucagaggaagcaaaauuaaacagagaagaaauagaugggguaaagcuggaaucaacaaggauuuaccagauuuuggcgaucuauucaacugucgccaguucauugguacugguagucucccugggggcaaucaguuucuggaugugcucuaaugggucucuacaguguagaauauguauuuaa

SEQ ID NO: 39464 - RNA, 1701 nt, Artificial Sequence
  derived and/or modified CDS sequence (wt) from hemagglutinin__InfluenzaA__AEO01362
augaaggcaauacuaguaguucugcuauauacauuugcaaccgcaaaugcagacacauuauguauagguuaucaugcgaacaauucaacagacacuguagacacauuacuagaaaagaauguaacaguaacacacucuguuaaccuucuagaagacaagcauaacgggaagcuaugcaaacuaagagggguagccccauugcauuuggguaaauguaacauugcuggcuggauccugggaaauccagagugugaaucacucuccacagcaagcucaugguccuacauuguggaaacaucuaguucagacaauggaacguguuacccaggagauuucaucgauuaugaggagcuaagagagcaauugagcucagugucaucauuugaaagguuugagauauuccccaagacaaguucauggcccaaucaugacucgaacaaagguguaacggcagcauguccucaugcuggagcaaaaagcuucuacaaaaauuuaauauggcuaguuaagaaaggaaauucauacccaaagcucagcaaauccuacauuaaugauaaagggaaagaaguccucgugcuauggggcauucaccauccaucuacuagugcugaccaacaaagucucuaucagaaugcagaugcauauguuuuuguggggacaucaagauacagcaagaaguucaagccggaaauagcaauaagacccaaagugagggaucaagaagggagaaugaacuauuacuggacacuaguagagccgggagacaaaauaacauucgaagcaacuggaaaucuagugguaccgagauaugcauucgcaauggaaagaaaugcuggaucugguauuaucauuucagauacaccaguccacgauugcaauacaacuugucagacacccaagggugcuauaaacaccagccucccauuucagaauauacauccgaucacaauuggaaaauguccaaaauauguaaaaagcacaaaauugagacuggccacaggauugaggaaugucccgucuauucaaucuagaggccuauuuggggccauugccgguuucauugaagggggguggacagggaugguagauggaugguacgguuaucaccaucaaaaugagcaggggucaggauaugcagccgaccugaagagcacacagaaugccauugacgagauuacuaacaaaguaaauucuguuauugaaaagaugaauacacaguucacagcaguagguaaagaguucaaccaccuggaaaaaagaauagagaauuuaaauaaaaaaguugaugaugguuuccuggacauuuggacuuacaaugccgaacuguugguucuauuggaaaaugaaagaacuuuggacuaccacgauucaaaugugaagaacuuauaugaaaagguaagaagccaguuaaaaaacaaugccaaggaaauuggaaacggcugcuuugaauuuuaccacaaaugcgauaacacgugcauggaaagugucaaaaaugggacuuaugauuacccaaaauacucagaggaagcaaaauuaaacagagaagaaauagaugggguaaagcuggaaucaacaaggauuuaccagauuuuggcgaucuauucaacugucgccaguucauugguacugguagucucccugggggcaaucaguuucuggaugugcucuaaugggucucuacaguguagaauauguauuuaa

SEQ ID NO: 39465 - RNA, 1701 nt, Artificial Sequence; identical to SEQ ID NO: 36071
  derived and/or modified CDS sequence (wt) from hemagglutinin__InfluenzaA__AEO01363

SEQ ID NO: 39466 - RNA, 1701 nt, Artificial Sequence
  derived and/or modified CDS sequence (wt) from hemagglutinin__InfluenzaA__AEO01365
augaaggcaauacuaguaguucugcuauauacauuugcaaccgcaaaugcagacacauuauguauagguuaucaugcgaacaauucaacagacacuguagacacaguacuaaaaaagaauguaacaguaacacacucuguuaacauucuagaagacaagcauaacgggaaacuaugcaaacuaagagggguagccccauugcauuuggguaaauguaacauugcuggcuggauccugggaaauccagagugugaaucacucuccacagcaagcucaugguccuacauuguggaaacaucuaguucagacaauggaacguguuacccaggagauuucaucgauuaugaggagcuaagagagcaauugagcucagugucaucauuugaaagguuugagauauuccccaagacaaguucauggcccaaucaugacucgaacaaagguguaacggcagcauguccucaugcuggagcaaaaagcuucuacaaaaauuuaauauggcuaguuaaaaaaggaaauucauacccaaagcucagcaaauccuacauuaaugauaaagggaaagaaguccucgugcuauggggcauucaccauccaucuacuagugcugaccaacaaagucucuaucagaaugcagaugcauauguuuuuguggggacaucaagauacagcaagaaguucaagccggaaauagcaauaagacccaaagugagggaucaagaagggagaaugaacuauuacuggacacuaguagagccgggagacaaaauaacauucgaagcaacuggaaaucuagugguaccgagauaugcauucgcaauggaaagaagugcuggaucugguauuaucauuucagauacaccaguccacgauugcaauacaacuugucagacacccaagggugcuauaaacaccagccucccauuucagaauauacauccgaucacaauuggaaaauguccaaaauauguaaaaagcacaaaauugagacuggccacaggauugaggaaugucccgucuauucaaucuagaggccuauuuggggccauugccgguuucauugaagggggguggacagggaugguagauggaugguacgguuaucaccaucaaaaugagcaggggucaggauaugcagccgaccugaagagcacacagaaugccauugacgagauuacuaacaaaguaaauucuguuauugaaaagaugaauacacaguucacagcaguagguaaagaguucaaccaccuggaaaaaagaauagagaauuuaaauaaaaaaguugaugaugguuuccuggacauuuggacuuacaaugccgaacuguugguucuauuggaaaaugaaagaacuuuggacuaccacgauucaaaugugaagaacuuauaugaaaagguaagaagccaguuaaaaaacaaugccaaggaaauuggaaacggcugcuuugaauuuuaccacaaaugcgauaacacgugcauggaaagugucaaaaaugggacuuaugacuaccccaaauacucagaggaagcaaaauuaaacagagaagaaauagaugggguaaagcuggaaucaacaaggauuuaccagauuuuggcgaucuauucaacugucgccaguucauugguacugguagucucccugggggcaaucaguuucuggaugugcucuaaugggucucuacaguguagaauauguauuuaa

SEQ ID NO: 39467 - RNA, 1701 nt, Artificial Sequence
  derived and/or modified CDS sequence (wt) from hemagglutinin__InfluenzaA__AEO01366
augaaggcaauacuaguaguucugcuauauacauuugcaaccgcaaaugcagacacauuauguauagguuaucaugcgaacaauucaacagacacuguagacacaguacuagaaaagaauguaacaguaacacacucuguuaaccuucuagaagacaagcauaacgggaaacuaugcaaacuaagagggguagccccauugcauuuggguaaauguaacauugcuggcuggauccugggaaauccagagugugaaucacucuccacagcaagcucaugguccuacauuguggaaacaucuaguucagacaauggaacguguuacccaggagauuucaucgauuaugaggagcuaagagagcaauugagcucagugucaucauuugaaagguuugagauauuccccaagacaaguucauggcccaaucaugacucgaacaaagguguaacggcagcauguccucaugcuggagcaaaaagcuucuacaaaaauuuaauauggcuaguuaaaaaaggaaauucauacccaaagcucagcaaauccuacauuaaugauaaagggaaagaaguccucgugcuauggggcauucaccauccaucuacuagugcugaccaacaaagucucuaucagaaugcagaugcauauguuuuuguggggacaucaagauacagcaagaaguucaagccggaaauagcaauaagacccaaagugagggaucaagaagggagaaugaacuauuacuggacacuaguagagccgggagacaaaauaacauucgaagcaacuggaaaucuagugguaccgagauaugcauucgcaauggaaagaaaugcuggaucugguauuaucauuucagauacaccaguccacgauugcaguacaacuugucagacacccaagggugcuauaaacaccagccucccauuucagaauguacauccgaucacaauuggaaaauguccaaaauauguaaaaagcacaaaauugagacuggccacaggauugaggaaugucccgucuauucaaucuagaggccuauuuggggccauugccgguuucauugaagggggguggacagggaugguagauggaugguacgguuaucaccaucaaaaugagcaggggucaggauaugcagccgaccugaagagcacacagaaugccauugacgagauuacuaacaaaguaaauucuguuauugaaaagaugaauacacaguucacagcaguagguaaagaguucaaccaccuggaaaaaagaauagagaauuuaaauaaaaagguugaugaugguuuccuagacauuuggacuuacaaugccgaacuguugguucuauuggaaaaugaaagaacuuuggacuaccacgauucaaaugugaagaacuuauaugaaaagguaagaagccaguuaaaaaacaaugccaaggaaauuggaaacggcugcuuugaauuuuaccacaaaugcgauaacacgugcauggaaagugucaaaaaugggacuuaugacuacccaaaauacucagaggaagcaaaauuaaacagagaagaaauagaugggguaaagcuggaaucaacaaggauuuaccagauuuuggcgaucuauucaacugucgccaguucauugguacugguagucucccugggggcaaucaguuucuggaugugcucuaaugggucucuacaguguagaauauguauuuaa

SEQ ID NO: 39468 - RNA, 1701 nt, Artificial Sequence
  derived and/or modified CDS sequence (wt) from hemagglutinin__InfluenzaA__AEO01367
augaaggcaauacuaguaguucugcuauauacauuugcaaccgcaaaugcagacacauuauguauagguuaucaugcgaacaauucaacagacacuguagacacaguacuagaaaagaauguaacaguaacacacucuguuaaccuucuagaagacaagcauaacgggaaacuaugcaaacuaagagggguagccccauugcauuuggguaaauguaacauugcuggcuggauccugggaaauccagagugugaaucacucuccacagcaagcucaugguccuacauuguggaaacaucuaguucagacaauggaacguguuacccaggagauuucaucgauuaugaggagcuaagagagcaauugagcucagugucaucauuugaaagguuugagauauuccccaagacaaguucauggcccaaucaugacucgaacaaagguguaacggcagcauguccucaugcuggagcaaaaagcuucuacaaaaauuuaauauggcuaguuaaaaaaggaaauucauacccaaagcucaacaaauccuacauuaaugauaaagggaaagaaguccucgugcuauggggcauucaccauccaucuacuagugcugaccaacaaagucucuaucagaaugcagaugcauauguuuuuguggggacaucaagauacagcaagaaguucaagccggaaauagcaauaagacccaaagugagggaucaagaagggagaaugaacuauuacuggacacuaguagagccgggagacaaaauaacauucgaagcaacuggaaaucuagugguaccgagauaugcauucgcaauggaaagaaaugcuggaucugguauuaucauuucagauacaccaguccacgauugcaauacaacuugucagacacccaagggugcuauaaacaccagccucccauuucagaauauacauccgaucacaauuggagaauguccaaaauauguaaaaagcacaaaauugagacuggccacaggauugaggaaugucccgucuauucaaucuagaggccuauuuggggccauugccgguuucauugaagggggguggacagggaugguagauggaugguacgguuaucaccaucaaaaugagcaggggucaggauaugcagccgaccugaagagcacacagaaugccauugacaagauuacuaacaaaguaaauucuguuauugaaaagaugaauacacaguucacagcaguagguaaagaguucaaccaccuggaaaaaagaauagagaauuuaaauaaaaaaguugaugaugguuuccuggacauuuggacuuacaaugccgaacuguugguucuauuggaaaaugaaagaacuuuggacuaccacgauucaaaugugaagaacuuauaugaaaagguaagaagccaguuaaaaaacaaugccaaggaaauuggaaacggcugcuuugaauuuuaccacaaaugcgauaacacgugcauggaaagugucaaaaaugggacuuaugacuacccaaaauacucagaggaagcaaaacuaaacagagaagaaauagaugggguaaagcuggaaucaacaaggauuuaccagauuuuggcgaucuauucaacugucgccaguucauugguacugguagucucccugggggcaaucaguuucuggaugugcucuaaugggucucuacaguguagaauauguauuuaa

SEQ ID NO: 39469 - RNA, 1701 nt, Artificial Sequence
  derived and/or modified CDS sequence (wt) from hemagglutinin__InfluenzaA__AEO01368
augaaggcaauacuaguaguucugcuauauacauuugcaaccgcaaaugcagacacauuauguauagguuaucaugcgaacaauucaacagacacuguagacacaguacuagaaaagaauguaacaguaacacacucuguuaaccuucuagaagacaagcauaaugggaaacuaugcaaacuaagagggguagccccauugcauuuggguaaauguaacauugcuggcuggauccugggaaauccagagugugaaucacucuccacagcaagcucaugguccuacauuguggaaacaucuaguucagacaauggaacguguuacccaggagauuucaucgauuaugaggagcuaagagagcaauugagcucagugucaucauuugaaagguuugagauauuccccaauacaaguucauggcccaaucaugacucgaacaaagguguaacggcagcauguccucaugcuggagcaaaaagcuucuacaaaaauuuaauauggcuaguuaaaaaaggaaauucauacccaaagcucagcaaauccuacauuaaugauaaagggaaagaaguccucgugcuauggggcauucaccauccaucuacuagugcugaccaacaaagucucuaucagaaugcagaugcauauguuuuuguggggacaucaagauacagcaagaaguucaagccggaaauagcaauaagacccaaagugagggaucaagaagggagaaugaacuauuacuggacacuaguagagccgggagacaaaauaacauucgaagcaacuggaaaucuagugguaccgagauaugcauucgcaauggaaagaaaugcuggaucugguauuaucauuucagauacaccaguccacgauugcaauacaacuugucagacacccaagggugcuauaaacaccagccucccauuucagaauauacauccgaucacaauuggaaaguguccaaaauauguaaaaagcacaaaauugagacuggccacaggauugaggaaugucccgucuauucaaucuagaggccuauuuggggccauugccgguuucauugaagggggguggacagggaugguagauggaugguacgguuaucaccaucaaaaugagcaggggucaggauaugcagccgaccugaagagcacacagaaugccauugacaagauuacuaacaaaguaaauucuguuauugaaaagaugaauacacaguucacagcaguagguaaagaguucaaccaccuggaaaaaagaauagagaauuuaaauaaaaaaguugaugaugguuuccuggacauuuggacuuacaaugccgaacuguuaguuuuauuggaaaaugaaagaacuuuggacuaccacgauucaaaugugaagaacuuauaugaaaagguaagaagccaguuaaaaaacaaugccaaggaaauuggaaacggcugcuuugaauuuuaccacaaaugcgauaacacgugcauggaaagugucaaaaaugggacuuaugacuacccaaaauacucagaggaagcaaaauuaaacagagaagaaauagaugggguaaagcuggaaucaacaaggauuuaccagauuuuggcgaucuauucaacugucgccaguucauugguacugguagucucccugggggcaaucaguuucuggaugugcucuaaugggucucuacaguguagaauauguauuuaa

SEQ ID NO: 39470 - RNA, 1701 nt, Artificial Sequence; identical to SEQ ID NO: 34681
  derived and/or modified CDS sequence (wt) from hemagglutinin__InfluenzaA__AEO01369

SEQ ID NO: 39471 - RNA, 1701 nt, Artificial Sequence; identical to SEQ ID NO: 39399
  derived and/or modified CDS sequence (wt) from hemagglutinin__InfluenzaA__AEO01370

SEQ ID NO: 39472 - RNA, 1701 nt, Artificial Sequence
  derived and/or modified CDS sequence (wt) from hemagglutinin__InfluenzaA__AEO01371
augaaggcaauacuaguaguucugcuauauacauuugcaaccgcaaaugcagacacauuauguauagguuaucaugcgaacaauucaacagacacuguagacacaguacuagaaaagaauguaacaguaacacacucuguuaaccuucuagaagacaagcauaacgggaaacuaugcaaacuaagagggguagccccauugcauuuggguaaauguaacauugcuggcuggauccugggaaauccagagugugaaucacucuccacagcaagcucaugguccuacauuguggaaacaucuaauucagacaauggaacguguuacccaggagauuucaucgauuaugaggagcuaagagagcaauugagcucagugucaucauuugaaagguuugagauauuccccaagacaaguucauggcccaaucaugacucgaacaaagguguaacggcagcauguccucaugcuggagcaaaaagcuucuacaaaaauuuaauauggcuaguuaaaaaaggaaauucauacccaaagcucagcaaauccuacauuaaugauaaagggaaagaaguccucgugcuauggggcauucaccauccaucuacuagugcugaccaacaaagucucuaucagaaugcagaugcauauguuuuuguggggacaucaagauacagcaagaaguucaagccggaaauagcaauaagacccaaagugagggaucaagaagggagaaugaacuauuacuggacacuaguagagccgggagacaaaauaacauucgaagcaacuggaaaucuagugguaccgagauaugcauucgcaauggaaagaaaugcuggaucugguauuaucauuucagauacaccaguccacgauugcaauacaacuugucagacacccaagggugcuauaaacaccagccucccauuucagaauauacauccgaucacaauuggaaaauguccaaaauauguaaaaagcacaaaauugagacuggccacaggauugaggaaugucccgucuauucaaucuagaggccuauuuggggccauugccgguuucauugaagggggguggacagggaugguagauggaugguacgguuaucaccaucaaaaugagcaggggucaggauaugcagccgaccugaagagcacacagaaugccauugacaagauuacuaacaaaguaaauucuguuauugaaaagaugaauacacaguucacagcaguagguaaagaguucaaccaccuggaaaaaagaauagagaauuuaaauaaaaaaguugaugaugguuuccuggacauuuggacuuacaaugccgaacuguugguucuauuggaaaaugaaagaacuuuggacuaccacgauucaaaugugaagaacuuauaugaaaagguaagaagccaguuaaaaaacaaugccaaggaaauuggaaacggcugcuuugaauuuuaccacaagugcgauaacacgugcauggaaagugucaaaaaugggacuuaugacuacccaaaauacucagaggaagcaaaauuaaacagagaagaaauagaugggguaaagcuggaaucaacaaggauuuaccagauuuuggcgaucuauucaacugucgccaguucauugguacugguagucucccugggggcaaucaguuucuggaugugcucuaaugggucucuacaguguagaauauguauuuaa

SEQ ID NO: 39473 - RNA, 1701 nt, Artificial Sequence; identical to SEQ ID NO: 36866
  derived and/or modified CDS sequence (wt) from hemagglutinin__InfluenzaA__AEO01372

SEQ ID NO: 39474 - RNA, 1701 nt, Artificial Sequence; identical to SEQ ID NO: 36866
  derived and/or modified CDS sequence (wt) from hemagglutinin__InfluenzaA__AEO01373

SEQ ID NO: 39475 - RNA, 1701 nt, Artificial Sequence
  derived and/or modified CDS sequence (wt) from hemagglutinin__InfluenzaA__AEO01374
augaaggcaauacuaguaguucugcuauauacauuugcaaccgcaaaugcagacacauuauguauagguuaucaugcgaacaauucaacagacacuguagacacaguacuagaaaagaauguaacaguaacacacucuguuaaccuucuagaagacaagcauaacgggaaacuaugcaaacuaagagggguagccccauugcauuuggguaaaugugacauugcuggcuggauccugggaaauccagagugugaaucacucuccacagcaagcucaugguccuacauuguggaaacaucuaguucagacaauggaacguguuacccaggagauuucaucgauuaugaggagcuaagagagcaauugagcucagugucaucauuugaaagguuugagauauuccccaagacaaguucauggcccaaucaugacucgaacaaagguguaacggcagcauguccucaugcuggagcaaaaagcuucuacaaaaauuuaauauggcuaguuaaaaaaggaaauucauacccaaagcucagcaaauccuacauuaaugauaaagggaaagaaguccucgugcuauggggaauucaccauccaucuacuagugcugaccaacaaagucucuaucagaaugcagaugcauauguuuuuguggggacaucaagauacagcaagaaguucaagccggaaauagcaauaagacccaaagugagggaucaagaagggagaaugaacuauuacuggacacuaguagagccgggagacaaaauaacauucgaagcaacuggaaaucuagugguaccgagauaugcauucgcaauggaaagaaaugcuggaucugguauuaucauuucagauacaccaguccacgauugcaauacaacuugucagacacccaagggugcuauaaacaccagccucccauuucagaauauacauccgaucacaauuggaaaauguccaaaauauauaaaaagcacaaaauugagacuggccacaggauugaggaaugucccgucuauucaaucuagaggccuauuuggggccauugccgguuucauugaagggggguggacagggaugguagauggaugguacgguuaucaccaucaaaaugagcaggggucaggauaugcagccgaccugaagagcacacagcaugccauugacgagauuacuaacaaaguaaauucuguuauugaaaagaugaauacacaguucacagcaguagguaaagaguucaaccaccuggaaaaaagaauagagaauuuaaauaaaaaaguugaugaugguuuccuggacauuuggacuuacaaugccgaacuguugguucuauuggaaaaugaaagaacuuuggacuaccacgauucaaaugugaagaacuuauaugaaaagguaagaagccaguuaaaaaacaaugccaaggaaauuggaaacggcugcuuugaauuuuaccacaaaugcgauaacacgugcauggaaagugucaaaaaugggacuuaugacuacccaaaauacucagaggaagcaaaauuaaacagagaagaaauagaugggguaaagcuggaaucaacaaggauuuaccagauuuuggcgaucuauucaacugucgccaguucauugguacugguagucucccugggggcaaucaguuucuggaugugcucuaaugggucucuacaguguagaauauguauuuaa

SEQ ID NO: 39476 - RNA, 1701 nt, Artificial Sequence
  derived and/or modified CDS sequence (wt) from hemagglutinin__InfluenzaA__AEO01375
augaaggcaauacuaguaguucugcuauauacauuugcaaccgcaaaugcagacacauuauguauagguuaucaugcgaacaauucaacagacacuguagacacaguacuagaaaagaauguaacaguaacacacucuguuaaccuucuagaagacaagcauaacgggaaacuaugcaaacuaagagggguagccccauugcauuuggguaaauguaacauugcaggcuggauccugggaaauccagagugugaaucacucuccacagcaagcucaugguccuacauuguggaaacaucuaguucagacaauggaacguguuacccaggagauuucaucgauuaugaggagcuaagagagcaauugagcucagugucaucauuugaaagguuugagauauuccccaagacaaguucauggcccaaucaugacucgaacaaagguguaacggcagcauguccucaugcuggagcaaaaagcuucuacaaaaauuuaauauggcuaguuaaaaaaggaaauucauacccaaagcucagcaaauccuacauuaaugauaaagggaaagaaguccucgugcuauggggcauucaccauccaucuacuagugcugaccaacaaagucucuaucagaaugcagaugcauauguuuuuguggggacaucaagauacagcaagaaguucaagccggaaauagcaauaagacccaaagugagggaucaagaagggagaaugaacuauuacuggacacuaguagagccgggagacaaaauaacauucgaagcaacuggaaaucuagugguaccgagauaugcauucgcaauggaaagaaaugcuggaucugguauuaucauuucagauacaccaguccacgauugcaauacaacuugucagacacccaagggugcuauaaacaccagccucccauuucagaauauacauccgaucacaauuggagaauguccaaaauauguaaaaagcacaaaauugagacuggccacaggauugaggaaugucccgucuauucaaucuagaggccuauuuggggccauugccgguuucauugaagggggguggacagggaugguagauggaugguacgguuaucaccaucaaaaugagcaggggucaggauaugcagccgaccugaagagcacacagaaugccauugacaagauuacuaacaaaguaaauucuguuauugaaaagaugaauacacaguucacagcaguagguaaagaguucaaccaccuggaaaaaagaauagagaauuuaaauaaaaaaguugaugaugguuuccuggacauuuggacuuacaaugccgaacuguugguucuauuggaaaaugaaagaacuuuggacuaccacgauucaaaugugaagaacuuauaugaaaagguaagaagccaguuaaaaaacaaugccaaggaaauuggaaacggcugcuuugaauuuuaccacaaaugcgauaacacgugcauggaaagugucaaaaaugggacuuaugacuacccaaaauacucagaggaagcaaaauuaaacagagaagaaauagaugggguaaagcuggaaucaacaaggauuuaccagauuuuggcgaucuauucaacugucgccaguucauugguacugguagucucccugggggcaaucaguuucuggaugugcucuaaugggucucuacaguguagaauauguauuuaa

SEQ ID NO: 39477 - RNA, 1701 nt, Artificial Sequence; identical to SEQ ID NO: 34681
  derived and/or modified CDS sequence (wt) from hemagglutinin__InfluenzaA__AEO01376

SEQ ID NO: 39478 - RNA, 1701 nt, Artificial Sequence
  derived and/or modified CDS sequence (wt) from hemagglutinin__InfluenzaA__AEO01377
augaaggcaauacuaguaguucugcuauauacauuugcaaccgcaaaugcagacacauuauguauagguuaucaugcgaacaauucaacagacacuguagacacaguacuagaaaagaauguaacaguaacacacucuguuaaccuucuagaagacaagcauaacgggaaacuaugcaaacuaagagggguagccccauugcauuuggguaaauguaacauugcuggcuggauccugggaaauccagagugugaaucacucuccacagcaagcucaugguccuacauuguggaaacaucuaguucagacaauggaacguguuacccaggagauuucaucgauuaugaggagcuaagagagcaguugagcucagugucaucauuugaaagguuugagauauuucccaagacaaguucauggcccaaucaugacucgaacaaagguguaacggcagcauguccucaugcuggagcaaaaagcuucuacaaaaauuuaauauggcuaguuaaaaaaggaaauucauacccaaagcucagcaaauccuacauuaaugauaaagggaaagaaguccucgugcuauggggcauucaccauccaucuacuagugcugaccaacaaagucucuaucagaaugcagaugcauauguuuuuguggggacaucaagauacagcaagaaguucaagccggaaauagcaauaagacccaaagugagggaucaagaagggagaaugaacuauuacuggacacuaguagagccgggagacaaaauaacauucgaagcaacuggaaaucuagugguaccgagauaugcauucgcaauggaaagaaaugcuggaucugguauuaucauuucagauacaccaguccacgauugcaauacaacuugucagacacccaagggugcuauaaacaccagccucccauuucagaauauacauccgaucacaauuggaaaauguccaaaauauguaaaaagcacaaaauugagacuggccacaggauugaggaaugucccgucuauucaaucuagaggucuauuuggggccauugccgguuucauugaagggggguggacagggaugguagauggaugguacgguuaucaccaucaaaaugagcaggggucaggauaugcagccgaccugaagagcacacagaaugccauugacgagauuacuaacaaaguaaauucuguuauugaaaagaugaauacacaguucacagcaguagguaaagaguucaaccaccuggaaaaaagaauagagaauuuaaauaaaaagguugaugaugguuuccuggacauuuggacuuacaaugccgaacuguugguucuauuggaaaaugaaagaacuuuggacuaccacgauucaaaugugaagaacuuauaugaaaagguaagaaaccaguuaaaaaacaaugccaaggaaauuggaaacggcugcuuugaauuuuaccacaaaugcgauaacacgugcauggaaagugucaaaaaugggacuuaugacuacccaaaauacucagaggaagcaaaauuaaacagagaagaaauagaugggguaaagcuggaaucaacaaggauuuaccagauuuuggcgaucuauucaacugucgccaguucauugguacugguagucucccugggggcaaucaguuucuggaugugcucuaaugggucucuacaguguagaauauguauuuaa

SEQ ID NO: 39479 - RNA, 1701 nt, Artificial Sequence
  derived and/or modified CDS sequence (wt) from hemagglutinin__InfluenzaA__AEO01378
augaaggcaauacuaguaguucugcuauauacauuugcaaccgcaaaugcagacacauuauguauagguuaucaugcgaacaauucaacagacacuguagacacaguacuagaaaagaauguaacaguaacacacucuguuaaccuucuagaagacaagcauaacgggaaacuaugcaaacuaagagggguagccccauugcauuuggguaaauguaacauugcuggcuggauccugggaaauccagagugugaaucacucuccacagcaagcucaugguccuacauuguggaaacaccuaguucagacaauggaacguguuacccaggagauuucaucgauuaugaggagcuaagagagcaauugagcucagugucaucauuugaaagguuugagauauuccccaagacaaguucauggcccaaucaugacucgaacaaagguguaacggcagcauguccucaugcuggagcaaaaagcuucuacaaaaauuuaauauggcuaguuaaaaaaggaaauucauacccaaagcucagcaaauccuacauuaaugauaaagggaaagaaguccucgugcuauggggcauucaccauccaucuacuagugcugaccaacaaagucucuaucagaaugcagaugcauauguuuuugugggaacaucaagauacagcaagaaguucaagccggaaauagcaauaagacccaaagugagggaucaagaagggagaaugaacuauuacuggacacuaguagagccgggagacaaaauaacauucgaagcaacuggaaaucuagugguaccgagauaugcauucgcaauggaaagaaaugcuggaucugguauuaucauuucagauacaccaguccacgauugcaauacaacuugucagacacccaagggugcuauaaacaccagccucccauuucagaauauacauccgaucacaauuggaaaauguccaaaauauguaaaaagcacaaaauugagacuggccacaggauugaggaaugucccgucuauucaaucuagaggccuauuuggggccauugccgguuucauugaagggggguggacagggaugguagauggaugguacgguuaucaccaucaaaaugagcaggggucaggauaugcagccgaccugaagagcacacagaaugccauugacgagauuacuaacaaaguaaauucuguuauugaaaagaugaauacacaguucacagcaguagguaaagaguucaaccaccuggaaaaaagaauagagaauuuaaauaaaaaaguugaugaugguuuccuggacauuuggacuuacaaugccgaacuguugguucuauuggaaaaugaaagaacuuuggacuaccacgauucaaaugugaagaacuuauaugaaaagguaagaagccaguuaaaaaacaaugccaaggaaauuggaaacggcugcuuugaauuuuaccacaaaugcgauaacacgugcauggaaagugucaaaaaugggacuuaugacuacccaaaauacucagaggaagcaaaauuaaacagagaagaaauagaugggguaaagcuggaaucaacaaggauuuaccagauuuuggcgaucuauucaacugucgccaguucauugguacugguagucucccugggggcaaucaguuucuggaugugcucuaaugggucucuacaguguagaauauguauuuaa

SEQ ID NO: 39480 - RNA, 1701 nt, Artificial Sequence
  derived and/or modified CDS sequence (wt) from hemagglutinin__InfluenzaA__AEO01379
augaaggcaauacuaguaguucugcuauauacauuugcaaccgcaaaugcagacacauuauguauagguuaucaugcgaacaauucaacagacacuguagacacaguacuagaaaagaaugugacaguaacacacucuguuaaccuucuagaagacaagcauaacgggaaacuaugcaaacuaagagggguagccccauugcauuuggguaaauguaacauugcuggcuggauccugggaaauccagagugugaaucacucuccacagcaagcucaugguccuacauuguggaaacaucuaguucagacaauggaacguguuacccaggagauuucaucgauuaugaggagcuaagagagcaauugagcucagugucaucauuugaaagguuugagauauuccccaagacaaguucauggcccaaucaugacucgaacaaagguguaacggcagcauguccucaugcuggagcaaaaagcuucuacaaaaauuuaauauggcuaguuaaaaaaggaaauucauacccaaagcucagcaaauccuacauuaaugauaaagggaaagaaguccucgugcuauggggcauucaccauccaucuacuagugcugaccaacaaagucucuaucagaaugcagaugcauauguuuuuguggggacaucaagauacagcaagaaguucaagccggaaauagcaauaagacccaaagugagggaucaagaagggagaaugaacuauuacuggacacuaguagagccgggagacaaaauaacauucgaagcaacuggaaaucuagugguaccgagauaugcauucgcaauggaaagaaaugcuggaucugguauuaucauuucagauacaccaguccacgauugcaauacaacuugucagacacccaagggugcuauaaacaccagccucccauuucagaauauacauccgaucacaauuggaaaauguccaaaauauguaaaaagcacaaaauugagacuggccacaggauugaggaaugucccgucuauucaaucuagaggccuauuuggggccauugccgguuucauugaagggggguggacagggaugguagauggaugguacgguuaucaccaucaaaaugagcaggggucaggauaugcagccgaccugaagagcacacagaaugccauugacaagauuacuaacaaaguaaauucuguuauugaaaagaugaauacacaguucacagcaguagguaaagaguucaaccaccuggaaaaaagaauagagaauuuaaauaaaaaaguugaugaugguuuccuggacauuuggacuuacaaugccgaacuguugguucuauuggaaaaugaaagaacuuuggacuaccacgauucaaaugugaagaacuuauaugaaaagguaagaagccaguuaaaaaacaaugccaaggaaauuggaaacggcugcuuugaauuuuaccacaaaugcgauaacacgugcauggaaagugucaaaaaugggacuuaugacuacccaaaauacucagaggaagcaaaauuaaacagagaagaaauagauggggugaagcuggaaucaacaaggauuuaccagauuuuggcgaucuauucaacugucgccaguucauugguacugguagucucccugggggcaaucaguuucuggaugugcucuaaugggucucuacaguguagaauauguauuuaa

SEQ ID NO: 39481 - RNA, 1701 nt, Artificial Sequence; identical to SEQ ID NO: 39450
  derived and/or modified CDS sequence (wt) from hemagglutinin__InfluenzaA__AEO01380

SEQ ID NO: 39482 - RNA, 1701 nt, Artificial Sequence; identical to SEQ ID NO: 39476
  derived and/or modified CDS sequence (wt) from hemagglutinin__InfluenzaA__AEO01381

SEQ ID NO: 39483 - RNA, 1701 nt, Artificial Sequence; identical to SEQ ID NO: 39480
  derived and/or modified CDS sequence (wt) from hemagglutinin__InfluenzaA__AEO01382

SEQ ID NO: 39484 - RNA, 1701 nt, Artificial Sequence
  derived and/or modified CDS sequence (wt) from hemagglutinin__InfluenzaA__AEO01383
augaaggcaauacuaguaguucugcuauauacauuugcaaccgcaaaugcagacacauuauguauagguuaucaugcgaacaauucaacagacacuguagacacaguacuagaaaagaauguaacaguaacacacucuguuaacauucuagaagacaagcauaacgggaaacuaugcaaacuaagagggguagccccauugcauuuggguaaauguaacauugcuggcuggauccugggaaauccagagugugagucacucuccacagcaagcucaugguccuacauuguggaaacaucuaguucagacaauggaacguguuacccaggagauuucaucgauuaugaggagcuaagagagcaauugagcucagugucaucauuugaaagguuugagauauuccccaagacaaguucauggcccaaucaugacucgaacaaagguguaacggcagcauguccucaugcuggagcaaaaagcuucuacaaaaauuuaauauggcuaguuaaaaaaggaaauucauacccaaagcucagcaaauccuacauuaaugauaaagggaaagaaguccucgugcuauggggcauucaccauccaucuacuagugcugaccaacaaagucucuaucagaaugcagaugcauauguuuuuguggggacaucaagauacagcaagaaguucaagccggaaauagcaauaagacccaaagugagggaucaagaagggagaaugaacuauuacuggacacuaguagagccgggagacaaaauaacauucgaagcaacuggaaaucuagugguaccgagauaugcauucgcaauggaaagaaaugcuggaucugguauuaucauuucagauacaccaguccacgauugcaauacaacuugucagacacccaagggugcuauaaacaccagccucccauuucagaauauacauccgaucacaauuggaaaauguccaaaauauguaaaaagcacaaaauugagacuggccacaggauugaggaaugucccgucuauucaaucuagaggccuauuuggggccauugccgguuucauugaagggggguggacagggaugguagauggaugguacgguuaucaccaucaaaaugagcaggggucaggauaugcagccgaccugaagagcacacagaaugccauugacgagauuacuaacaaaguaaauucuguuauugaaaagaugaauacacaguucacagcaguagguaaagaguucaaccaccuggaaaaaagaauagagaauuuaaauaaaaaaguugaugaugguuuccuggacauuuggacuuacaaugccgaacuguugguucuauuggaaaaugaaagaacuuuggacuaccacgauucaaaugugaagaacuuauaugaaaagguaagaagccaguuaaaaaacaaugccaaggaaauuggaaacggcugcuuugaauuuuaccacaaaugcgauaacacgugcauggaaagugucaaaaaugggacuuaugacuaccccaaauacucagaggaagcaaaauuaaacagagaagaaauagaugggguaaagcuggaaucaacaaggauuuaccagauuuuggcgaucuauucaacugucgccaguucauugguacugguagucucccugggggcaaucaguuucuggaugugcucuaaugggucucuacaguguagaauauguauuuaa

SEQ ID NO: 39485 - RNA, 1701 nt, Artificial Sequence
  derived and/or modified CDS sequence (wt) from hemagglutinin__InfluenzaA__AEO01384
augaaggcaauacuaguaguucugcuauauacauuugcaaccgcaaaugcagacacauuauguauagguuaucaugcgaacaauucaacagacacuguagacacaguacuagaaaagaauguaacaguaacacacucuguuaaccuucuagaagacaagcauaacgggaaacuaugcaaacuaagagggguauccccauugcauuuggguaaauguaacauugcuggcuggauccugggaaauccagagugugaaucacucuccacagcaagcucaugguccuacauuguggaaacaucuaguucagacaauggaacguguuacccaggagauuucaucgauuaugaggagcuaagagagcaauugagcucagugucaucauuugaaagguuugagauauuccccaagacaaguucauggcccaaucaugacucgaacaaagguguaacggcagcauguccucaugcuggagcaaaaagcuucuacaaaaauuuaauauggcuaguuaaaaaaggaaauucauacccaaagcucagcaaauccuacauuaaugauaaagggaaagaaguccucgugcuauggggcauucaccauccaucuacuagugcugaccaacaaagucucuaucagaaugcagaugcauauguuuuuguggggacaucaagauacagcaagaaguucaagccagaaauagcaauaagacccaaagugagggaucaagaagggagaaugaacuauuacuggacacuaguagagccgggagacaaaauaacauucgaagcaacuggaaaucuagugguaccgagauaugcauucgcaauggaaagaaaugcuggaucugguauuaucauuucagauacaccaguccacgauugcaauacaacuugucaaacacccaagggugcuauaaacaccagccucccauuucagaauauacauccgaucacaauuggaaaauguccaaaauauguaaaaagcacaaaauugagacuggccacaggauugaggaaugucccgucuauucaaucuagaggccuauuuggggccauugccgguuucauugaagggggguggacagggaugguagauggaugguacgguuaucaccaucaaaaugagcaggggucaggauaugcagccgaccugaaaagcacacagaaugccauugacgagauuacuaacaaaguaaauucuguuauugaaaagaugaauacacaguucacagcaguagguaaagaguucaaccaccuggaaaaaagaauagagaauuuaaauaaaaaaguugaugaugguuuccuggacauuuggacuuacaaugccgaacuguugguucuauuggaaaaugaaagaacuuuggacuaccacgauucaaaugugaagaacuuauaugaaaagguaagaagccaguuaaaaaacaaugccaaggaaauuggaaacggcugcuuugaauuuuaccacaaaugcgauaacacgugcauggaaagugucaaaaaugggacuuaugacuacccaaaauacucagaggaagcaaaauuaaacagagaagaaauagaugggguaaagcuggaaucaacaaggauuuaccagauuuuggcgaucuauucaacugucgccaguucauugguacugguagucucccugggggcaaucaguuucuggaugugcucuaaugggucucuacaguguagaauauguauuuaa

SEQ ID NO: 39486 - RNA, 1701 nt, Artificial Sequence
  derived and/or modified CDS sequence (wt) from hemagglutinin__InfluenzaA__AEO01385
augaaggcaauacuaguaguucugcuauauacauuugcaaccgcaaaugcagacacauuauguauagguuaucaugcgaacaauucaacagacacuguagacacaguacuagaaaagaauguaacaguaacacacucuguuaacauucuagaagacaagcauaacgggaaacuaugcaaacuaagagggguagccccauugcauuuggguaaauguaacauugcuggcuggauccugggaaauccagagugugaaucacucuccacagcaagcucaugguccuacauuguggaaacaucuaguucagacaauggaacguguuacccaggagauuucaucgauuaugaggagcuaagagagcaauugagcucagugucaucauuugaaagguuugagauauuccccaagacaaguucauggcccaaucaugacucgaacaaagguguaacggcagcauguccucaugcuggagcaaaaagcuucuacaaaaauuuaauauggcuaguuaaaaaaggaaauucauacccaaagcucagcaaauccuacauuaaugauaaagggaaagaaguccucgugcuauggggcauucaccauccaucuacuagugcugaccaacaaagucucuaucagaaugcaaaugcauauguuuuuguggggacaucaagauacagcaagaaguucaagccggaaauagcaauaagacccaaagugagggaucaagaagggagaaugaacuauuacuggacacuaguagagccgggagacaaaauaacauucgaagcaacuggaaaucuagugguaccgagauaugcauucgcaauggaaagaaaugcuggaucugguauuaucauuucagauacaccaguccacgauugcaauacaacuugucagacacccaagggugcuauaaacaccagccucccauuucagaauauacauccgaucacaauuggaaaauguccaaaauauguaaaaagcacaaaauugagacuggccacaggauugaggaaugucccgucuauucaaucuagaggccuauuuggggccauugccgguuucauugaagggggguggacagggaugguagauggaugguacgguuaucaccaucaaaaugagcaggggucaggauaugcagccgaccugaagagcacacagaaugccauugacgagauuacuaacaaaguaaauucuguuauugaaaagaugaauacacaguucacagcaguagguaaagaguucaaccaccuggaaaaaagaauagagaauuuaaauaaaaaaguugaugaugguuuccuggacauuuggacuuacaaugccgaacuguugguucuauuggaaaaugaaagaacuuuggacuaccacgauucaaaugugaagaacuuauaugaaaagguaagaagccaguuaaaaaacaaugccaaggaaauuggaaacggcugcuuugaauuuuaccacaaaugcgauaacacgugcauggaaagugucaaaaaugggacuuaugacuaccccaaauacucagaggaagcaaaauuaaacagagaagaaauagaugggguaaagcuggaaucaacaaggauuuaccagauuuuggcgaucuauucaacugucgccaguucauugguacugguagucucccugggggcaaucaguuucuggaugugcucuaaugggucucuacaguguagaauauguauuuaa

SEQ ID NO: 39487 - RNA, 1701 nt, Artificial Sequence
  derived and/or modified CDS sequence (wt) from hemagglutinin__InfluenzaA__AEO01386
augaaggcaauacuaguaguucugcuauauacauuugcaauugcaaaugcagacacauuauguauagguuaucaugcgaacaauucaacagacacuguagacacaguacuagaaaagaauguaacaguaacacacucuguuaaccuucuagaagacaagcauaacgggaaacuaugcaaacuaagagggguagccccauugcauuuggguaaauguaacauugcuggcuggauccugggaaauccagagugugaaucacucuccacagcaagcucaugguccuacauuguggaaacaucuaguucagacaauggaacguguuacccaggagauuucaucgauuaugaggagcuaagagagcaauugagcucagugucaucauuugaaagguuugagauauuccccaagacaaguucauggcccaaucaugacucgaacaaagguguaacggcagcauguccucaugcuggagcaaaaagcuucuacaaaaauuuaauauggcuaguuaaaaaaggaaauucauacccaaagcucagcaaauccuacauuaaugauaaagggaaagaaguccucgugcuauggggaauucaccauccaucuacuagugcugaccaacaaagucucuaucagaaugcagaugcauauguuuuuguggggacaucaagauacagcaagaaguucaagccggaaauagcaauaagacccaaagugagggaucaagaagggagaaugaacuauuacuggacacuaguagagccgggagacaaaauaacauucgaagcaacuggaaaucuagugguaccgagauaugcauucgcaauggaaagaaaugcuggaucugguauuaucauuucagauacaccaguccacgauugcaauacaacuugucagacacccaagggugcuauaaacaccagccucccauuucagaauauacauccgaucacaauuggaaaauguccaaaauauguaaaaagcacaaaauugagacuggccacaggauugaggaaugucccgucuauucaaucuagaggccuauuuggggccauugccgguuucauugaagggggguggacagggaugguagauggaugguacgguuaucaccaucaaaaugagcaggggucaggauaugcagccgaccugaagagcacacagcaugccauugacgagauuacuaacaaaguaaauucuguuauugaaaagaugaauacacaguucacagcaguagguaaagaguucaaccaccuggaaaaaagaauagagaauuuaaauaaaaaaguugaugaugguuuccuggacauuuggacuuacaaugcagaacuguugguucuauuggaaaaugaaagaacuuuggacuaccacgauucaaaugugaagaacuuauaugaaaagguaagaagccaguuaaaaaacaaugccaaggaaauuggaaacggcugcuuugaauuuuaccacaaaugcgauaacacgugcauggaaagugucaaaaaugggacuuaugacuacccaaaauacucagaggaagcaaaauuaaacagagaagaaauaaaugggguaaagcuggaaucaacaaggauuuaccagauuuuggcgaucuauucaacugucgccaguucauugguacugguagucucccugggggcaaucaguuucuggaugugcucuaaugggucucuacaguguagaauauguauuuaa

SEQ ID NO: 39488 - RNA, 1701 nt, Artificial Sequence
  derived and/or modified CDS sequence (wt) from hemagglutinin__InfluenzaA__AEO01387
augaaggcaauacuaguaguucugcuauauacauuugcaaccgcaaaugcagacacauuauguauagguuaucaugcgaacaauucaacagacacuguagacacaguacuagaaaagaauguaacaguaacacacucuguuaacauucuagaagacaagcauaacgggaaacuaugcaaacuaagagggguagccccauugcauuuggguaaauguaacauugcuggcuggauccugggaaauccagagugugaaucacucuccacagcaagcucaugguccuacauuguggaaacaucuaguucagacaauggaacguguuacccaggagauuucaucgauuaugaggagcuaagagagcaauugagcucagugucaucauuugaaagguuugagauauuucccaagacaaguucauggcccaaucaugacucgaacaaagguguaacggcagcauguccucaugcuggagcaaaaagcuucuacaaaaauuuaauauggcuaguuaaaaaaggaaauucauacccaaagcucagcaaauccuacauuaaugauaaagggaaagaaguccucgugcuauggggcauucaccauccaucuacuagugcugaccaacaaagucucuaucagaaugcagaugcauauguuuuuguggggacaucaagauacagcaagaaguucaagccggaaauagcaauaagacccaaagugagggaucaagaagggagaaugaacuauuacuggacacuaguagagccgggagacaaaauaacauucgaagcaacuggaaaucuagugguaccgagauaugcauucgcaauggaaagaaaugcuggaucugguauuaucauuucagauacaccaguccacgauugcaauacaacuugucaaacacccaagggugcuauaaacaccagccucccauuucagaauauacauccgaucacaauuggaaaauguccaaaauauguaaaaagcacaaaauugagacuggccacaggauugaggaaugucccgucuauucaaucuagaggccuauuuggggccauugccgguuucauugaagggggguggacagggaugguagauggaugguacgguuaucaccaucaaaaugagcaggggucaggauaugcagccgaccugaagagcacacagaaugccauugacgagauuacuaacaaaguaaauucuguuauugaaaagaugaauauacaguucacagcaguagguaaagaguucaaccaccuggaaaaaagaauagagaauuuaaauaaaaaaguugaugaugguuuccuggacauuuggacuuacaaugccgaacuguugguucuauuggaaaaugaaagaacuuuggacuaccacgauucaaaugugaagaacuuauaugaaaagguaagaagccaguuaaaaaacaaugccaaggaaauuggaaacggcugcuuugaauuuuaccacaaaugcgauaacacgugcauggaaagugucaaaaaugggacuuaugacuaccccaaauacucagaggaagcaaaauuaaacagagaagaaauagaugggguaaagcuggaaucaacaaggauuuaccagauuuuggcgaucuauucaacugucgccaguucauugguacugguagucucccugggggcaaucaguuucuggaugugcucuaaugggucucuacaguguagaauauguauuuaa

SEQ ID NO: 39489 - RNA, 1701 nt, Artificial Sequence
  derived and/or modified CDS sequence (wt) from hemagglutinin__InfluenzaA__AEO01388
augaaggcaauacuaguaguucugcuauauacauuugcaaccgcaaaugcagacacauuauguauagguuaucaugcgaacaauucaacagacacuguagacacaguacuagaaaagaauguaacaguaacacacucuguuaaccuucuagaagacaagcauaacgggaaacuaugcaaacuaagagggguagccccauugcauuuggguaaauguaacauugcuggcuggauccugggaaauccagagugugaaucacucuccacagcaagcucaugguccuacauuguggaaacaucuaguucagacaauggaacguguuacccaggagauuucaucgauuaugaggagcuaagagagcaauugagcucagugucaucauuugaaaaguuugagauauuccccaagacaaguucauggcccaaucaugacucgaacaaagguguaacggcagcauguccucaugcuggagcaaaaagcuucuacaaaaauuuaauauggcuaguuaaaaaaggaaauucauacccaaagcucagcaaauccuacauuaaugauaaagggaaagaaguccucgugcuauggggcauucaccauccaucuacuagugcugaccaacaaagucucuaucagaaugcagaugcauauguuuuuguggggacaucaagauacagcaagaaguucaagccggaaauagcaauaagacccaaagugagggaucaagaagggagaaugaacuauuacuggacacuaguagagccgggagacaaaauaacauucgaagcaacuggaaaucuagugguaccgagauaugcauucgcaauggaaagaaaugcuggaucugguauuaucauuucagauacaccaguccacgauugcaauacaacuugucagacacccaagggugcuauaaacaccagccucccauuucagaauauacauccgaucacaauuggaaaauguccaaaauauguaaaaagcacaaaauugagacuggccacaggauugaggaaugucccgucuauucaaucuagaggccuauuuggggccauugccgguuucauugaagggggguggacagggaugguagauggaugguacgguuaucaccaucaaaaugagcaggggucaggauaugcagccgaccugaagagcacacagaaugccauugacaagauuacuaacaaaguaaauucuguuauugaaaagaugaauacacaguucacagcaguagguaaagaguucaaccaccuggaaaaaagaauagagaauuuaaauaaaaaaguugaugaugguuuccuggacauuuggacuuacaaugccgaacuguugguucuauuggaaaaugaaagaacuuuggacuaccacgauucaaaugugaagaacuuauaugaaaagguaagaagccaguuaaaaaccaaugccaaggaaauuggaaacggcugcuuugaauuuuaccacaaaugcgauaacacgugcauggaaagugucaaaaaugggacuuaugacuacccaaaauacucagaggaagcaaaauuaaacagagaagaaauagaugggguaaagcuggaaucaacaaggauuuaccagauuuuggcgaucuauucaacugucgccaguucauugguacugguagucucccugggggcaaucaguuucuggaugugcucuaaugggucucuacaguguagaauauguauuuaa

SEQ ID NO: 39490 - RNA, 1701 nt, Artificial Sequence
  derived and/or modified CDS sequence (wt) from hemagglutinin__InfluenzaA__AEO01389
augaaggcaauacuaguaguucugcuauauacauuugcaaccgcaaaugcagacacauuauguauagguuaucaugcgaacaauucaacagacacuguagacacaguacuagaaaagaauguaacaguaacacacucuguuaaccuucuagaagacaagcauaacgggaaacuaugcaaacuaagagggguagccccauugcauuuggguaaauguaacauugcuggcuggauccugggaaauccagagugugaaucacucuccacagcaagcucaugguccuacauuguggaaacaucuaguucagacaauggaacguguuacccaggagauuucaucgauuaugaggagcuaagagagcaauugagcucagugucaucauuugaaagguuugagauauuccccaagacaaguucauggcccaaucaugacucgaacaaagguguaacggcagcauguccucaugcuggaacaaaaagcuucuacaaaaauuuaauauggcuaguuaaaaaaggaaauucauacccaaagcucagcaaauccuacauuaaugauaaagggaaagaaguccucgugcuauggggcauucaccauccaucuacuagugcugaccaacaaagucucuaucagaaugcagaugcauauguuuuuguggggacaucaagauacagcaagaaguucaagccggaaauagcaauaagacccaaagugagggaucaagaagggagaaugaacuauuacuggacacuaguagagccgggagacaaaauaacauucgaagcaacuggaaaucuagugguaccgagauaugcauucgcaauggaaagaaaugcuggaucugguauuaucauuucagauacaccaguccacgauugcaauacaacuugucagacacccaagggugcuauaaacaccagccucccauuucagaauauacauccgaucacaauuggaaaauguccaaaauauguaaaaagcacaaaauugagacuggccacaggauugaggaaugucccgucuauucaaucuagaggccuauuuggggccauugccgguuucauugaagggggguggacagggaugguagauggaugguacgguuaucaccaucaaaaugagcaggggucaggauaugcagccgaccugaagagcacacagaaugccauugacaagauuacuaacaaaguaaauucuguuauugaaaagaugaauacacaguucacagcaguagguaaagaguucaaccaccuggaaaaaagaauagagaauuuaaauaaaaaaguugaugaugguuuccuggacauuuggacuuacaaugccgaacuguugguucuauuggaaaaugaaagaacuuuggacuaccacgauucaaaugugaagaacuuauaugaaaagguaagaagccaguuaaaaaacaaugccaaggaaauuggaaacggcugcuuugaauuuuaccacaaaugcgauaacacgugcauggaaagugucaaaaaugggacuuaugacuacccaaaauacucagaggaagcaaaauuaaacagagaagaaauagaugggguaaagcuggaaucaacaaggauuuaccagauuuuggcgaucuauucaacugucgccaguucauugguacugguagucucccugggggcaaucaguuucuggaugugcucuaaugggucucuacaguguagaauauguauuuaa

SEQ ID NO: 39491 - RNA, 1701 nt, Artificial Sequence
  derived and/or modified CDS sequence (wt) from hemagglutinin__InfluenzaA__AEO01390
augaaggcaauacuaguaguucugcuauauacauuugcaaucgcaaaugcagacacauuauguauagguuaucaugcgaacaauucaacagacacuguagacacaguacuagaaaagaauguaacaguaacacacucuguuaaccuucuagaagacaagcauaacgggaaacuaugcaaacuaagagggguagccccauugcauuuggguaaauguaacauugcuggcuggauccugggaaauccagagugugaaucacucuccacagcaagcucaugguccuacauuguggaaacaucuaguucagacaauggaacguguuacccaggagauuucaucgauuaugaggagcuaagagagcaauugagcucagugucaucauuugaaagguuugagauauuccccaagacaaguucauggcccaaucaugacucgaacaaagguguaacggcagcauguccucaugcuggagcaaaaagcuucuacaaaaauuuaauauggcuaguuaaaaaaggaaauucauacccaaagcucagcaaauccuacauuaaugauaaagggaaagaaguccucgugcuauggggaauucaccauccaucuacuagugcugaccaacaaagucucuaucagaaugcagaugcauauguuuuuguggagacaucaagauacagcaagaaggucaagccggaaauagcaauaagacccagagugagggaucaagaagggagaaugaacuauuacuggacacuaguagagccgggagacaaaauaacauucgaagcaacuggaaaucuagugguaccgagauaugcauucgcaauggaaagaaaugcuggaucugguauuaucauuucagauacaccaguccacgauugcaauacaacuugucagacacccaagggugcuauaaacaccagccucccauuucagaauauacauccgaucacaauuggaaaauguccaaaauauguaaaaagcacaaaauugagacuggccacaggauugaggaaugucccgucuauucaaucuagaggccuauuuggggccauugccgguuucauugaagggggguggacagggaugguagauggaugguacgguuaucaccaucaaaaugagcaggggucaggauaugcagccgaccugaagagcacacagcaugccauugacgagauuacuaacaaaguaaauucuguuauugaaaagaugaauacacaguucacagcaguagguaaagaguucaaccaccuggaaaaaagaauagagaauuuaaauaaaaaaguugaugaugguuuccuggacauuuggacuuacaaugccgaacuguugguucuauuggaaaaugaaagaacuuuggacuaccacgauucaaaugugaagaacuuauaugaaaagguaagaagccaguuaaaaaacaaugccaaggaaauuggaaacggcugcuuugaauuuuaccacaaaugcgauaacacgugcauggaaagugucaaaaaugggacuuaugacuacccaaaauacucagagguagcaaaauuaaacagagaagaaauaaaugggguaaagcuggaaucaacaaggauuuaccagauuuuggcgaucuauucaacugucgccaguucauugguacugguagucucccugggggcaaucaguuucuggaugugcucuaaugggucucuacaguguagaauauguauuuaa

SEQ ID NO: 39492 - RNA, 1701 nt, Artificial Sequence
  derived and/or modified CDS sequence (wt) from hemagglutinin__InfluenzaA__AEO01391
augaaggcaauacuaguaguucugcuauauacauuugcaaucgcaaaugcagacacauuauguauagguuaucaugcgaacaauucaacagacacuguagacacaguacuagaaaagaauguaacuguaacacacucuguuaaccuucuagaagacaagcauaacgggaaacuaugcaaacuaagagggguagccccauugcauuuggguaaauguaacauugcuggcuggauccugggaaauccagagugugaaucacucuccacagcaagcucaugguccuacauuguggaaacaucuaguucagacaauggaacguguuacccaggagauuucaucgauuaugaggagcuaagagagcaauugagcucagugucaucauuugaaagguuugagauauuccccaagacaaguucauggcccaaucaugacucgaacaaagguguaacggcagcauguccucaugcuggagcaaaaagcuucuacaaaaauuuaauauggcuaguuaaaaaaggaaauucauacccaaagcucagcaaauccuacauuaaugauaaagggaaagaaguccucgugcuauggggaauucaccauccaucuacuagugcugaccaacaaagucucuaucagaaugcagaugcauauguuuuuguggggacaucaagauacagcaagaaguucaagccggaaauagcaauaagacccaaagugagggaucaagaagggagaaugaacuauuacuggacacuaguagagccgggagacaaaauaacauucgaagcaacuggaaaucuagugguaccgagauaugcauucgcaauggaaagaaaugcuggaucugguauuaucauuucagauacaccaguccacgauugcaauacaacuugucagacacccaagggugcuauaaacaccagccucccauuucagaauauacauccgaucacaauuggaaaauguccaaaauauguaaaaagcacaaaauugagacuggccacaggauugaggaaugucccgucuauucaaucuagaggccuauuuggggccauugccgguuucauugaagggggguggacagggaugguagauggaugguacgguuaucaccaucaaaaugagcaggggucaggauaugcagccgaccugaagagcacacagcaugccauugacgagauuacuaacaaaguaaauucuguuauugaaaagaugaauacacaguucacagcaguagguaaagaguucaaccaccuggaaaaaagaauagagaauuuaaauaaaaaaguugaugaugguuuccuggacauuuggacuuacaaugccgaacuguugguucuauuggaaaaugaaagaacuuuggacuaccacgauucaaaugugaagaacuuauaugaaaagguaagaagccaguuaaaaaacaaugccaaggaaauuggaaacggcugcuuugaauuuuaccacaaaugcgauaacacgugcauggaaagugucaaaaaugggacuuaugacuacccaaaauacucagaggaagcaaaauuaaacagagaagaaauaaaugggguaaagcuggaaucaacaaggauuuaccagauuuuggcgaucuauucaacugucgccaguucauugguacugguagucucccugggggcaaucaguuucuggaugugcucuaaugggucucuacaguguagaauauguauuuaa

SEQ ID NO: 39493 - RNA, 1701 nt, Artificial Sequence; identical to SEQ ID NO: 39399
  derived and/or modified CDS sequence (wt) from hemagglutinin__InfluenzaA__AEO01392

SEQ ID NO: 39494 - RNA, 1701 nt, Artificial Sequence
  derived and/or modified CDS sequence (wt) from hemagglutinin__InfluenzaA__AEO01393
augaaggcaauacuaguaguucugcuauauacauuugcaaccgcaaaugcagacacauuauguauagguuaucaugcgaacaauucaacagacacuguagacacaguacuagaaaagaauguaacaguaacacacucuguuaacauucuagaagacaagcauaacgggaaacuaugcaaacuaagagggguagccccauugcauuuggguaaauguaacauugcuggcuggauccugggaaauccagagugugaaucacucuccacagcaagcucaugguccuacauuguggaaacaucuaguucagacaauggaacguguuacccaggagauuucaucgauuaugaggagcuaagagagcaauugagcucagugucaucauuugaaagguuugagauauuccccaagacaaguucauggcccaaucaugacucgaacaaagguguaacggcagcauguccucaugcuggagcaaaaagcuucuacaaaaauuuaauauggcuaguuaaaaaaggaaauucauacccaaagcucagcaaauccuacauuaaugauaaagggaaagaaguccuagugcuauggggcauucaccauccaucuacuagugcugaccaacaaagucucuaucagaaugcagaugcauauguuuuuguggggacaucaagauacagcaagaaguucaagccggaaauagcaauaagacccaaagugagggaucaagaagggagaaugaacuauuacuggacacuaguagagccgggagacaaaauaacauucgaagcaacuggaaaucuagugguaccgagauaugcauucgcaauggaaagaaaugcuggaucugguauuaucauuucagauacaccaguccacgauugcaauacaacuugucagacacccaagggugcuauaaacaccagccucccauuucagaauauacauccgaucacaauuggaaaauguccaaaauauguaaaaagcacaaaauugagacuggccacaggauugaggaaugucccgucuauucaaucuagaggccuauuuggggccauugccgguuucauugaagggggguggacagggaugguagauggaugguacgguuaucaccaucaaaaugagcaggggucaggauaugcagccgaccugaagagcacacagaaugccauugacgagauuacuaacaaaguaaauucuguuauugaaaagaugaauacacaguucacagcaguagguaaagaguucaaccaccuggaaaaaagaauagagaauuuaaauaaaaaaguugaugaugguuuccuggacauuuggacuuacaaugccgaacuguugguucuauuggaaaaugaaagaacuuuggacuaccacgauucaaaugugaagaacuuauaugaaaagguaagaagccaguuaaaaaacaaugccaaggaaauuggaaacggcugcuuugaauuuuaccacaaaugcgauaacacgugcauggaaagugucaaaaaugggacuuaugacuaccccaaauacucagaggaagcaaaauuaaacagagaagaaauagaugggguaaagcuggaaucaacaaggauuuaccagauuuuggcgaucuauucaacugucgccaguucauugguacugguagucucccugggggcaaucaguuucuggaugugcucuaaugggucucuacaguguagaauauguauuuaa

SEQ ID NO: 39495 - RNA, 1701 nt, Artificial Sequence; identical to SEQ ID NO: 35782
  derived and/or modified CDS sequence (wt) from hemagglutinin__InfluenzaA__AEO01394

SEQ ID NO: 39496 - RNA, 1701 nt, Artificial Sequence
  derived and/or modified CDS sequence (wt) from hemagglutinin__InfluenzaA__AEO01395
augaaggcaauacuaguaguucugcuauauacauuugcaaccgcaaaugcagacacauuauguauagguuaucaugcgaacaauucaacagacacuguagacacaguacuagaaaagaauguaacaguaacacacucuguuaaccuucuagaagacaagcauaacgggaaacuaugcaaacuaagagggguagccccauugcauuuggguaaauguaacauugcuggcuggauccugggaaauccagagugugaaucacucuccacagcaagcucaugguccuacauuguggaaacaucuaguucagacaauggaacguguuacccaggagauuuccucgauuaugaggagcuaagagagcaauugagcucagugucaucauuugaaagguuugagauauuccccaagacaaguucauggcccaaucaugacucgaacaaagguguaacggcagcauguccucaugcuggagcaaaaagcuucuacaaaaauuuaauauggcuaguuaaaaaaggaaauucauacccaaagcucagcaaauccuacauuaaugauaaagggaaagaaguccucgugcuauggggcauucaccauccaucuacuagugcugaccaacaaagucucuaucagaaugcagaugcauauguuuuuguggggacaucaagauacagcaagaaguucaagccggaaauagcaauaagacccaaagugagggaacaagaagggagaaugaacuauuacuggacacuaguagagccgggagacaaaauaacauucgaagcaacuggaaaucuagugguaccgagauaugcauucgcaauggaaagaaaugcuggaucugguauuaucauuucagauacaccaguccacgauugcaauacaacuugucagacacccaagggugcuauaaacaccagccucccauuucagaauauacauccgaucacaauuggaaaauguccaaaauauguaaaaagcacaaaauugagacuggccacaggauugaggaaugucccgucuauucaaucuagaggccuauuuggggccauugccgguuucauugaagggggguggacagggaugguagauggaugguacgguuaucaccaucaaaaugagcaggggucaggauaugcagccgaccugaagagcacacagaaugccauugacgagauuacuaacaaaguaaauucuguuauugaaaagaugaauacacaguucacagcaguagguaaagaguucaaccaccuggaaaaaagaauagagaauuuaaauaaaaaaguugaugaugguuuccuggacauuuggacuuacaaugccgaacuguugguucuauuggaaaaugaaagaacuuuggacuaccacgauucaaaugugaagaacuuauaugaaaagguaagaagccaguuaaaaaacaaugccaaggaaauuggaaacggcugcuuugaauuuuaccacaaaugcgauaacacgugcauggaaagugucaaaaaugggacuuaugacuacccaaaauacucagaggaagcaaaauuaaacagagaagaaauagaugggguaaagcuggaaucaacaaggauuuaccagauuuuggcgaucuauucaacugucgccaguucauugguacugguagucucccugggggcaaucaguuucuggaugugcucuaaugggucucuacaguguagaauauguauuuaa

SEQ ID NO: 39497 - RNA, 1701 nt, Artificial Sequence; identical to SEQ ID NO: 35782
  derived and/or modified CDS sequence (wt) from hemagglutinin__InfluenzaA__AEO01396

SEQ ID NO: 39498 - RNA, 1701 nt, Artificial Sequence
  derived and/or modified CDS sequence (wt) from hemagglutinin__InfluenzaA__AEO01397
augaaggcaauacuaguaguucugcuauauacauuugcaaccgcaaaugcagacacauuauguauagguuaucaugcgaacaauucaacagacacuguagacacaguacuagaaaagaauguaacaguaacacacucuguuaacauucuagaagacaagcauaacgggaaacuaugcaaacuaagagggguagccccauugcauuuggguaaauguaacauugcuggcuggauccugggaaauccagagugugaaucacucuccacagcaagcucaugguccuacauuguggaaacaucuaguucagacaauggaacguguuacccaggagauuucaucgauuaugaggagcuaagagagcaauugagcucagugucaucauuugaaagguuugagauauuccccaagacaaguucauggcccaaucaugacucgaacaaagguguaacggcagcauguccucaugcuggagcaaaaagcuucuacaaaaauuuaauauggcuaguuaaaaaaggaaacucauacccaaagcucagcaaauccuacauuaaugauaaagggaaagaaguccucgugcuauggggcauucaccauccaucuacuagugcugaccaacaaagucucuaucagaauacagaugcauauguuuuuguggggacaucaagauacagcaagaaguucaagccggaaauagcaauaagacccaaagugagggaucaagaagggagaaugaacuauuacuggacacuaguagagccgggagacaaaauaacauucgaagcaacuggaaaucuagugguaccgagauaugcauucgcaauggaaagaaaugcuggaucugguauuaucauuucagauacaccaguccacgauugcaauacaacuugucagacacccaagggugcuauaaacaccagccucccauuucagaauauacauccgaucacaauuggaaaauguccaaaauauguaaaaagcacaaaauugagacuggccacaggauugaggaaugucccgucuauucaaucuagaggccuauuuggggccauugccgguuucauugaagggggguggacagggaugguagauggaugguacgguuaucaccaucaaaaugagcaggggucaggauaugcagccgaccugaagagcacacagaaugccauugacgagauuacuaacaaaguaaauucuguuauugaaaagaugaauacacaguucacagcaguagguaaagaguucaaccaccuggaaaaaagaauagagaauuuaaauaaaaagguugaugaugguuuccuggacauuuggacuuacaaugccgaacuguugguucuauuggaaaaugaaagaacuuuggacuaccaugauucaaaugugaagaacuuauaugaaaagguaagaagccaguuaaaaaacaaugccaaggaaauuggaaacggcugcuuugaauuuuaccacaaaugcgauaacacgugcauggaaagugucaaaaaugggacuuaugacuacccaaaauacucagaggaagcaaaauuaaacagagaagaaauagaugggguaaagcuggaaucaacaaggauuuaccagauuuuggcgaucuauucaacugucgccaguucauugguacugguagucucccugggggcaaucaguuucuggaugugcucuaaugggucucuacaguguagaauauguauuuaa

SEQ ID NO: 39499 - RNA, 1701 nt, Artificial Sequence
  derived and/or modified CDS sequence (wt) from hemagglutinin__InfluenzaA__AEO01398
augaaggcaauacuaguaguucugcuauauacauuugcaaccgcaaaugcagacacauuauguauagguuaucaugcgaacaauucaacagacacuguagacacaguacuagaaaagaauguaacaguaacacacucuguuaaccuucuagaagacaagcauaacgggaaacuaugcaaacuaagagggguagccccauugcauuuggguaaauguaacauugcuggcuggauccugggaaauccagagugugaaucacucuccacagcaagcucaugguccuacauuguggaaacaucuaguucagacaauggaacguguuacccaggagauuucaucgauuaugaggagcuaagagagcaguugagcucagugucaucauuugaaagguuugagauauuucccaagacaaguucauggcccaaucaugacucgaacaaagguguaacggcagcauguccucaugcuggagcaaaaagcuucuacaaaaauuuaauauggcuaguuaaaaaaggaaauucauacccaaagcucagcaaauccuacauuaaugauaaagggaaagaaguccucgugcuauggggcauucaccauccaucuacuagugcugaccaacaaagucucuaucagaaugcagaugcaaauguuuuuguggggacaucaagauacagcaagaaguucaagccggaaauagcaauaagacccaaagugaggggucaagaagggagaaugaacuauuacuggacacuaguagagccgggagacaaaauaacauucgaagcaacuggaaaucuagugguaccgagauaugcauucgcaauggaaagaaaugcuggaucugguauuaucauuucagauacaccaguccacgauugcaauacaacuugucagacacccaagggugcuauaaacaccagccucccauuucagaauauacauccgaucacaauuggaaaauguccaaaauauguaaaaagcacaaaauugagacuggccacaggauugaggaaugucccgucuauucaaucuagaggccuauuuggggccauugccgguuucauugaagggggguggacagggaugguagauggaugguacgguuaucaccaucaaaaugagcaggggucaggauaugcagccgaccugaagagcacacagaaugccauugacgagauuacuaacaaaguaaauucuguuauugaaaagaugaauacacaguucacagcaguagguaaagaguucaaccaccuggaaaaaagaauagagaauuuaaauaaaaagguugaugaugguuuccuggacauuuggacuuacaaugccgaacuguugguucuauuggaaaaugaaagaacuuuggacuaccacgauucaaaugugaagaacuuauaugaaaagguaagaaaccaguuaaaaaacaaugccaaggaaauuggaaacggcugcuuugaauuuuaccacaaaugcgauaacacgugcauggaaagugucaaaaaugggacuuaugacuacccaaaauacucagaggaagcaaaauuaaacagagaagaaauagaugggguaaagcuggaaucaacaaggauuuaccagauuuuggcgaucuauucaacugucgccaguucauugguacugguagucucccugggggcaaucaguuucuggaugugcucuaaugggucucuacaguguagaauauguauuuaa

SEQ ID NO: 39500 - RNA, 1701 nt, Artificial Sequence; identical to SEQ ID NO: 39399
  derived and/or modified CDS sequence (wt) from hemagglutinin__InfluenzaA__AEO01399

SEQ ID NO: 39501 - RNA, 1701 nt, Artificial Sequence; identical to SEQ ID NO: 34681
  derived and/or modified CDS sequence (wt) from hemagglutinin__InfluenzaA__AEO01402

SEQ ID NO: 39502 - RNA, 1701 nt, Artificial Sequence; identical to SEQ ID NO: 35845
  derived and/or modified CDS sequence (wt) from hemagglutinin__InfluenzaA__AEO01403

SEQ ID NO: 39503 - RNA, 1701 nt, Artificial Sequence
  derived and/or modified CDS sequence (wt) from hemagglutinin__InfluenzaA__AEO01404
augaaggcaauacuaguaguucugcuauauacauuugcaaccgcaaaugcagacacauuauguauagguuaucaugcgaacaauucaacagacacuguagacacaguacuagaaaagaauguaacaguaacacacucuguuaaccuucuagaagacaagcauaacgggaaacuaugcaaacuaagagggguagccccauugcauuuggguaaauguaacauugcuggcuggaucuugggaaauccagagugugaaucacucuccacagcaagcucaugguccuacauuguggaaacaucuaguucagacaauggaacguguuacccaggagauuucaucgauuaugaggagcuaagagagcaauugagcucagugucaucauuugaaagguuugagauauuccccaagacaaguucauggcccaaucaugacucgaacaaagguguaacggcagcauguccucaugcuggagcaaaaagcuucuacaaaaauuuaauauggcuaguuaaaaaaggaaauucauacccaaagcucagcaaauccuacauuaaugauaaagggaaagaaguccucgugcuauggggcauucaccauccaucuacuagugcugaccaacaaagucucuaucagaaugcagaugcauauguuuuuguggggacaucaagauacagcaagaaguucaagccggaaauagcaauaagacccaaagugagggaucaagaagggagaaugaacuauuacuggacacuaguagagccgggagacaaaauaacauucgaagcaacuggaaaucuagugguaccgagauaugcauucgcaauggaaagaaaugcuggaucugguauuaucauuucagauacaccaguccacgauugcaauacaacuugucagacacccaagggugcuauaaacaccagccucccauuucagaauauacauccgaucacaauuggaaaauguccaaaauauguaaaaagcacaaaauugagacuggccacaggauugaggaaugucccgucuauucaaucuagaggccuauuuggggccauugccgguuucauugaagggggguggacagggaugguagauggaugguacgguuaucaccaucaaaaugagcaggggucaggauaugcagccgaccugaagagcacacagaaugccauugacgagauuacuaacaaaguaaauucuguuauugaaaagaugaauacacaguucacagcaguagguaaagaguucaaccaccuggaaaaaagaauagagaauuuaaauaaaaagguugaugaugguuuccuggacauuuggacuuacaaugccgaacuguugguucuauuggaaaaugaaagaacuuuggacuaccacgauucaaaugugaagaacuuauaugaaaagguaagaagccaguuaaaaaacaaugccaaggaaauuggaaacggcugcuuugaauuuuaccacaaaugcgauaacacguguauggaaagugucaaaaaugggacuuaugacuacccaaaauacucagaggaagcaaaauuaaacagagaagaaauagaugggguaaagcuggaaucaacaaggauuuaccagauuuuggcgaucuauucaacugucgccaguucauugguacugguagucucccugggggcaaucaguuucuggaugugcucuaaugggucucuacaguguagaauauguauuuaa

SEQ ID NO: 39504 - RNA, 1701 nt, Artificial Sequence
  derived and/or modified CDS sequence (wt) from hemagglutinin__InfluenzaA__AEO01405
augaaggcaauacuaguaguucugcuauauacauuugcaaccgcaaaugcagacacauuauguauagguuaucaugcgaacaauucaacagacacuguagacacaguacuagaaaagaauguaacaguaacacacucuguuaaccuucuagaagacaagcauaacgggaaacuaugcaaacuaagagggguagccccauugcauuuggguaaauguaacauugcuggcuggauccugggaaauccagagugugaaucacucuccacagcaagcucaugguccuacauuguggaaacaucuaguucagacaauggaacguguuacccaggagauuucaucgauuaugaggagcuaagagagcaauugagcucagugucaucauuugaaagguuugagauauuccccaagacaaguucauggcccaaucaugacucgaacaaagguguaacggcagcauguccucaugcuggagcaaaaagcuucuacaaaaauuuaauauggcuaguuaaaaaaggaaauucauacccaaagcucagcaaauccuacauuaaugauaaagggaaagaaguccucgugcuauggggcauucaccauccaucuacuagugcugaccaacaaagucucuaucagaaugcagaugcauauguuuuuguggggacaucaagauacagcaagaaguucaagccggaaauagcaauaagacccaaagugagggaucaagaagggagaaugaacuauuacuggacacuaguagagccgggagacaaaauaacauucgaagcaacuggaaaucuagugguaccgagauaugcauucgcaauggaaagaaaugcuggaucugguauuaucauuucagauacaccaguccacgauugcaauacaacuugucagacacccaagggugcuauaaacaccagccucccauuucagaauauacauccgaucacaauuggaaaauguccaaaauauguaaaaagcacaaaauugagacuggccacaggauugaggaaugucccgucuauucaaucuagaggccuauuuggggccauugccgguuucauugaagggggguggacagggaugguagauggaugguacgguuaucaccaucaaaaugagcaggggucaggauaugcagccgaccugaagagcacacagaaugccauugacgagauuacuaacaaaguaaauucuguuauugaaaagaugaauacacaguucacagcaguagguaaagaguucaaccaccuggaaaaaagaauagagaauuuaaauaaaaaaguugaugaugguuuccuggacauuuggacuuacaaugccgaauuguugguucuauuggaaaaugaaagaacuuuggacuaccacgauucaaaugugaagaacuuauaugaaaagguaagaagccaguuaaaaaacaaugccaaggaaauuggaaacggcugcuuugaauuuuaccacaaaugcgauaacacgugcauggaaagugucaaaaaugggacuuaugacuacccaaaauacucagaggaagcaaaauuaaacagagaagaaauagaugggguaaagcuggaaucaacaaugauuuaccagauuuuggcgaucuauucaacugucgccaguucauugguacugguagucucccugggggcaaucaguuucuggaugugcucuaaugggucucuacaguguagaauauguauuuaa

SEQ ID NO: 39505 - RNA, 1701 nt, Artificial Sequence
  derived and/or modified CDS sequence (wt) from hemagglutinin__InfluenzaA__AEO01407
augaaggcaauacuaguaguucugcuauauacauuugcaaccgcaaaugcagacacauuauguauagguuaucaugcgaacaauucaacagacacuguagacacaguacuagaaaagaauguaacaguaacacacucuguuaaccuucuagaagacaagcauaacgggaaacuaugcaaacuaagagggguagccccauugcauuuggguaaauguaacauugcuggcuggauccugggaaauccagagugugaaucacucuccacagcaagcucaugguccuacauuguggaaacaucuaguucagacaauggaacguguuacccaggagauuucaucgauuaugaggagcuaagagagcaauugagcucagugucaucauuugaaagguuugagauauuccccaagacaaguucauggcccaaucaugacucgaacaaagguguaacggcagcauguccucaugcuggagcaaaaagcuucuacaaaaauuuaauauggcuaguuaaaaaaggaaauucauacccaaagcucagcaaauccuacauuaaugauaaagggaaagaaguccucgugcuauggggaauucaccauccaucuacuagugcugaccaacaaagucucuaucagaaugcagaugcauauguuuuuguggggacaucaagauacagcaagaaguucaagccggaaauagcaauaagacccaaagugagggaucaagaagggagaaugaacuauuacuggacacuaguagagccgggagacaaaauaacauucgaagcaacuggaaaucuagugguaccgagauaugcauucgcaauggaaagaaaugcuggaucugguauuaucauuucagauacaccaguccacgauugcaauacaacuugucagacacccaaaggugcuauaaacaccagccucccauuucagaauauacauccgaucacaauuggaaaauguccaaaauauguaaaaagcacaaaauugagacuggccacaggauugaggaaugucccgucuauucaaucuagaggccuauuuggggccauugccgguuucauugaagggggguggacagggaugguagauggaugguacgguuaucaccaucaaaaugagcaggggucaggauaugcagccgaccugaagagcacacagcaugccauugacgagauuacuaacaaaguaaauucuguuauugaaaagaugaauacacaguucacagcaguagguaaagaguucaaccaccuggaaaaaagaauagagaauuuaaauaaaaaaguugaugaugguuuccuggacauuuggacuuacaaugccgaacuguugguucuauuggaaaaugaaagaacuuuggacuaccacgauucaaaugugaagaacuuauaugaaaagguaagaagccaguuaaaaaacaaugccaaggaaauuggaaacggcugcuuugaauuuuaccacaaaugcgauaacacgugcauggaaagugucaaaaaugggacuuaugacuacccaaaauacucagaggaggcaaaauuaaacagagaagaaauaaaugggguaaagcuggaaucaacaaggauuuaccagauuuuggcgaucuauucaacugucgccaguucauugguacugguagucucccugggggcaaucaguuucuggaugugcucuaaugggucucuacaguguagaauauguauuuaa

SEQ ID NO: 39506 - RNA, 1701 nt, Artificial Sequence
  derived and/or modified CDS sequence (wt) from hemagglutinin__InfluenzaA__AEO01408
augaaggcaauacuaguaguucugcuauauacauuugcaaccgcaaaugcagacacauuauguauagguuaucaugcgaacaauucaacagacacuguagacacaguacuagaaaagaauguaacaguaacacacucuguuaaccuucuagaagacaagcauaacgggaaacuaugcaaacuaagagggguagccccauugcauuuggguaaauguaacauugcuggcuggauccugggaaauccagagugugaaucacucuccacagcaagcucaugguccuacauuguggaaacaucuaguucagacaauggaacguguuacccaggagauuucaucgauuaugaggagcuaagagagcaauugagcucagugucaucauuugaaagguuugagauauuccccaagacaaguucauggcccaaucaugacucgaacaaagguguaacagcagcauguccucaugcuggagcaaaaagcuucuacaaaaauuuaauauggcuaguuaaaaaaggaaauucauacccaaagcucagcaaauccuacauuaaugauaaaggaaaagaaguucucgugcuauggggcauucaccauccaucuacuagugcugaccaacaaagucucuaucagaaugcagaugcauauguuuuuguggggacaucaagauacagcaagaaguucaagccggaaauagcaauaagacccaaagugagggaacaagaagggagaaugaacuauuacuggacacuaguagagccgggagacaaaauaacauucgaagcaacuggaaaucuagugguaccgagauaugcauucgcaauggaaagaaaugcuggaucugguauuaucauuucagauacaccaguccacgauugcaauacaacuugucagacacccaagggugcuauaaacaccagccucccauuucagaauauacauccgaucacaauuggaaaauguccaaaauauguaaaaagcacaaaauugagacuggccacaggauugaggaaugucccgucuauucaaucuagaggccuauuuggggccauugccgguuucauugaagggggguggacagggaugguagauggaugguacgguuaucaccaucaaaaugagcaggggucaggauaugcagccgaccugaagagcacacagaaugccauugacgagauuacuaacaaaguaaauucuguuauugaaaagaugaauacacaguucacagcaguagguaaagaguucaaccaccuggaaaaaagaauagagaauuuaaauaaaaaaauugaugaugguuuccuggacauuuggacuuacaaugccgagcuguugguucuauuggaaaaugaaagaacuuuggacuaccacgauucaaaugugaagaacuuauaugaaaagguaagaagccaguuaaaaaacaaugccaaggaaauuggaaacggcugcuuugaauuuuaccacaaaugcgauaacacgugcauggaaagugucaaaaaugggacuuaugacuacccaaaauacucagaggaagcaaaauuaaacagagaagaaauagaugggguaaagcuggaaucaacaaggauuuaccagauuuuggcgaucuauucaacugucgccaguucauugguacugguagucucccugggggcaaucaguuucuggaugugcucuaaugggucucuacaguguagaauauguauuuaa

SEQ ID NO: 39507 - RNA, 1701 nt, Artificial Sequence; identical to SEQ ID NO: 36187
  derived and/or modified CDS sequence (wt) from hemagglutinin__InfluenzaA__AEO01409

SEQ ID NO: 39508 - RNA, 1701 nt, Artificial Sequence; identical to SEQ ID NO: 39399
  derived and/or modified CDS sequence (wt) from hemagglutinin__InfluenzaA__AEO01410

SEQ ID NO: 39509 - RNA, 1701 nt, Artificial Sequence; identical to SEQ ID NO: 38100
  derived and/or modified CDS sequence (wt) from hemagglutinin__InfluenzaA__AEO01411

SEQ ID NO: 39510 - RNA, 1701 nt, Artificial Sequence; identical to SEQ ID NO: 35772
  derived and/or modified CDS sequence (wt) from hemagglutinin__InfluenzaA__AEO01412

SEQ ID NO: 39511 - RNA, 1701 nt, Artificial Sequence
  derived and/or modified CDS sequence (wt) from hemagglutinin__InfluenzaA__AEO01413
augaaggcaauacuaguaguucugcuauauacauuugcaaccgcaaaugcagacacauuauguauagguuaucaugcgaacaauucaacagacacuguagacacaguacuagaaaagaauguaacaguaacacacucuguuaaccuucuagaagacaagcauaacgggaaacuaugcaaacuaagagggguagccccauugcauuuggguaaauguaacauugcuggcuggauccugggaaauccagagugugaaucacucuccacagcaagcucaugguccuacauuguggaaacaucuaguucagacaauggaacguguuacccaggagauuucaucgauuaugaggagcuaagagagcaauugagcucagugucaucauuugaaagguuugagauauuccccaagacaaguucauggcccaaucaugacucgaacaaagguguaacggcagcauguccucaugcuggagcaaaaagcuucuacaaaaauuuaauauggcuaguuaaaaaaggaaauucauacccaaagcucagcaaauccuacauuaaugauaaagggaaagaaguccucgugcuauggggcauucaccauccaucuacuagugcugaccaacaaagucucuaucagaaugcagaugcauauguuuuuguggggacaucaagauacagcaagaaguucaagccggaaauagcaauaagacccaaagugagggaucaagaagggagaaugaacuauuacuggacacuaguagagccgggagacaaaauaacauucgaagcaacuggaaaucuagugguaccgagauaugcauucgcaauggaaagaaaugcuggaucugguauuaucauuucagauacaccaguccacgauugcaauacaacuugucagacacccaagggugcuauaaacaccagccucccauuucagaauauacauccgaucacaauuggaaaauguccaaaauauguaaaaagcacaaaauugagacuggccacaggauugaggaaugucccgucuauucaaucuagaggccuauuuggggccauugccgguuucauugaagggggguggacagggaugguagauggaugguacgguuaucaccaucaaaaugagcaggggucaggauaugcagccgaccugaagagcacacagaaugccauugacaagauuacuaacaaaguaaauucuguuauugaaaagaugaauacacaguucacagcaguagguaaagaguucaaccaccuggaaaaaagaauagagaauuuaaauaaaaaaguugaugaugguuuccuggacauuuggacuuacaaugccgaacuguugguucuauuggaaaaugaaagaacuuuggacuaccacgauucaaaugugaagaacuuauaugaaaagguaagaagccaguuaaaaagcaaugccaaggaaauuggaaacggcugcuuugaauuuuaccacaaaugcgauaacacgugcauggaaagugucaaaaaugggacuuaugacuacccaaaauacucagaggaagcaaaauuaaacagagaagaaauagaugggguaaagcuggaaucaacaaggauuuaccagauuuuggcgaucuauucaacugucgccaguucauugguacugguagucucccugggggcaaucaguuucuggaugugcucuaaugggucucuacaguguagaauauguauuuaa

SEQ ID NO: 39512 - RNA, 1701 nt, Artificial Sequence
  derived and/or modified CDS sequence (wt) from hemagglutinin__InfluenzaA__AEO01414
augaaggcaauacuaguaguucugcuauauacauuugcaaccgcaaaugcagacacauuauguauagguuaucaugcgaacaauucaacagacacuguagacacaguacuagaaaagaauguaacaguaacacacucuguuaaccuucuagaagacaagcauaacgggaaacuaugcaaacuaagagggguagccccauugcauuuggguaaauguaacauugcuggcuggauccugggaaauccagagugugaaucacucuccacagcaagcucaugguccuacauuguggaaacaucuaguucagacaauggaacguguuacccaggagauuucaucgauuaugaggagcuaagagagcaauugagcucagugucaucauuugaaagguuugagauauuccccaagacaaguucauggcccaaucaugacucgaacaaagguguaacggcagcauguccucaugcuggagcaaaaagcuucuacaaaaauuuaauauggcuaguuaaaaaaggaaauucauacccaaagcucagcaaauccuacauuaaugauaaagggaaagaaguccucgugcuauggggcauucaccauccaucuacuagugcugaccaacaaagucucuaucagaaugcagaugcauauguuuuuguggggacaucaagauacagcaagaaguucaagccggaaauagcaauaagacccaaagugagggaucaagaagggagaaugaacuauuacuggacacuaguagagccgggagacaaaauaacauucgaagcaacuggaaaucuagugguaccgagauaugcauucgcaauggaaagaaauacuggaucugguauuaucauuucagauacaccaguccacgauugcaguacaacuugucagacacccaagggugcuauaaacaccagccucccauuucagaauguacauccgaucacaauuggaaaauguccaaaauauguaaaaagcacaaaauugagacuggccacaggauugaggaaugucccgucuauucaaucuagaggccuauuuggggccauugccgguuucauugaagggggguggacagggaugguagauggaugguacgguuaucaccaucaaaaugagcaggggucaggauaugcagccgaccugaagagcacacagaaugccauugacgagauuacuaacaaaguaaauucuguuauugaaaagaugaauacacaguucacagcaguagguaaagaguucaaccaccuggaaaaaagaauagagaauuuaaauaaaaagguugaugaugguuuccuagacauuuggacuuacaaugccgaacuguugguucuauuggaaaaugaaagaacuuuggacuaccacgauucaaaugugaagaacuuauaugaaaagguaagaagccaguuaaaaaacaaugccaaggaaauuggaaacggcugcuuugaauuuuaccacaaaugcgauaacacgugcauggaaagugucaaaaaugggacuuaugacuacccaaaauacucagaggaagcaaaauuaaacagagaagaaauagaugggguaaagcuggaaucaacaaggauuuaccagauuuuggcgaucuauucaacugucgccaguucauugguacugguagucucccugggggcaaucaguuucuggaugugcucuaaugggucucuacaguguagaauauguauuuaa

SEQ ID NO: 39513 - RNA, 1701 nt, Artificial Sequence
  derived and/or modified CDS sequence (wt) from hemagglutinin__InfluenzaA__AEO01416
augaaggcaauacuaguaguucugcuauauacauuugcaaccgcaaaugcagacacauuauguauagguuaucaugcgaacaauucaacagacacuguagacacaguacuagaaaagaauguaacaguaacacacucuguuaaccuucuagaagacaagcauaacgggaaacuaugcaaacuaagagggguagccccauugcauuuggguaaauguaacauugcuggcuggauccugggaaauccagagugugaaucacucuccacagcaagcucaugguccuacauuguagaaacaucuaguucagacaauggaacguguuacccaggagauuucaucgauuaugaggagcuaagagagcaauugagcucagugucaucauuugaaagguuugagauauuccccaagacaaguucauggcccaaucaugacucgaacaaagguguaacggcagcauguccucaugcuggagcaaaaagcuucuacaaaaauuuaauauggcuaguuaaaaaaggaaauucauacccaaagcucagcaaauccuacauuaaugauaaagggaaagaaguccucgugcuauggggcauucaccauccaucuacuagugcugaccaacaaagucucuaucagaaugcagaugcauauguuuuuguggggacaucaagauacagcaagaaguucaagccggaaauagcaauaagacccaaagugagggaacaagaagggagaaugaacuauuacuggacacuaguagagccgggagacaaaauaacauucgaagcaacuggaaaucuagugguaccgagauaugcauucgcaauggaaagaaaugcuggaucugguauuaucauuucagauacaccaguccacgauugcaauacaacuugucagacacccaagggugcuauaaacaccagccucccauuucagaauauacauccgaucacaauuggaaaauguccaaaauauguaaaaagcacaaaauugagacuggccacuggauugaggaaugucccgucuauucaaucuagaggccuauuuggggccauugccgguuucauugaagggggguggacagggaugguagauggaugguacgguuaucaccaucaaaaugagcaggggucaggauaugcagccgaccugaagagcacacagaaugccauugacaagauuacuaacaaaguaaauucuguuauugaaaagaugaauacacaguucacagcaguggguaaagaguucaaccaccuggaaaaaagaauagagaauuuaaauaaaaaaguugaugaugguuuccuggacauuuggacuuacaaugccgaacuguugguucuauuggaaaaugaaagaacuuuggacuaccacgauucaaaugugaagaacuuauaugaaaagguaagaagccaguuaaaaaacaaugccaaggaaauuggaaacggcugcuuugaauuuuaccacaaaugcgauaacacgugcauggaaagugucaaaaaugggacuuaugacuacccaaaauacucagaggaagcaaaauuaaacagagaagaaauagaugggguaaagcuggaaucaacaaggauuuaccagauuuuggcgaucuauucaacugucgccaguucauugguacugguagucucccugggggcaaucaguuucuggaugugcucuaaugggucucuacaguguagaauauguauuuaa

SEQ ID NO: 39514 - RNA, 1701 nt, Artificial Sequence; identical to SEQ ID NO: 35845
  derived and/or modified CDS sequence (wt) from hemagglutinin__InfluenzaA__AEO01418

SEQ ID NO: 39515 - RNA, 1701 nt, Artificial Sequence; identical to SEQ ID NO: 35845
  derived and/or modified CDS sequence (wt) from hemagglutinin__InfluenzaA__AEO01419

SEQ ID NO: 39516 - RNA, 1701 nt, Artificial Sequence
  derived and/or modified CDS sequence (wt) from hemagglutinin__InfluenzaA__AEO01420
augaaggcaauacuaguaguucugcuauauacauuugcaaccgcaaaugcagacacauuauguauagguuaucaugcgaacaauucaacagacacuguagacacaguacuagaaaagaauguaacaguaacacacucuguuaaccuucuagaauacaagcauaacgggaaacuaugcaaacuaagagggguagccccauugcauuuggguaaauguaacauugcuggcuggauccugggaaauccagagugugaaucacucuccacagcaagcucaugguccuacauuguggaaacaucuaauucagacaauggaacguguuacccaggagauuucaucgauuaugaggagcuaagagagcaauugagcucagugucaucauuugaaagguuugagauauuccccaagacaaguucauggcccaaucaugacucgaacaaagguguaacggcagcauguccucaugcuggagcaaaaaguuucuacaaaaauuuaauauggcuaguuaaaaaaggaaauucauacccaaagcucagcaaauccuacauuaaugauaaagggaaagaaguccucgugcuauggggcauucaccauccaucuacuagugcugaccaacaaagucucuaucagaaugcagaugcauauguuuuuguggggacaucaagauacagcaagaaguucaagccggaaauagcaauaagacccaaagugagggaucaagaagggagaaugaacuauuacuggacacuaguagagccgggagacaaaauaacauucgaagcaacuggaaaucuagugguaccgagauaugcauucgcaauggaaagaaaugcuggaucugguauuaucauuucagauacaccaguccacgauugcaauacaacuugucagacacccaagggugcuauaaacaccagccucccauuucagaauauacauccgaucacaauuggaaaauguccaaaauauguaaaaagcacaaaauugagacuggccacaggauugaggaaugucccgucuauucaaucuagaggccuauuuggggccauugccgguuucauugaagggggguggacagggaugguagauggaugguacgguuaucaccaucaaaaugagcaggggucaggauaugcagccgaccugaagagcacacagaaugccauugacgagauuacuaacaaaguaaauucuguuauugaaaagaugaauacacaguucacagcaguagguaaagaguucaaccaccuagaaaaaagaauagagaauuuaaauaaaaaaguugaugaugguuuccuggacauuuggacuuacaaugccgaauuguugguucuauuggaaaaugaaagaacuuuggacuaccacgauucaaaugugaagaacuuauaugaaaagguaagaagccaguuaaaaaacaaugccaaggaaauuggaaacggcugcuuugaauuuuaccacaaaugcgauaacacgugcauggaaagugucaaaaaugggacuuaugacuacccaaaauacucagaggaagcaaaauuaaacagagaagaaauagaugggguaaagcuggaaucaacaaggauuuaccagauuuuggcgaucuauucaacugucgccaguucauugguacugguagucucccugggggcaaucaguuucuggaugugcucuaaugggucucuacaguguagaauauguauuuaa

SEQ ID NO: 39517 - RNA, 1701 nt, Artificial Sequence
  derived and/or modified CDS sequence (wt) from hemagglutinin__InfluenzaA__AEO01421
augaaggcaauacuaguaguucugcuauauacauuugcaaccgcaaaugcagacacauuauguauagguuaucaugcgaacaauucaacagacacuguagacacaguacuagaaaagaauguaacaguaacacacucuguuaaccuucuagaagacaagcauaacgggaaacuaugcaaacuaagagggguagccccauugcauuuggguaaauguaacauugcuggcuggauccugggaaauccagagugugaaucacucuccacagcaagcucaugguccuacauuguggaaacaucuaguucagacaauggaacguguuacccaggagauuucaucgauuaugaggagcuaagagagcaauugagcucagugucaucauuugaaaaguuugagauauuccccaagacaaguucauggcccaaucaugacucgaacaaagguguaacggcagcauguccucaugcuggagcaaaaagcuucuacaaaaauuuaauauggcuaguuaaaaaaggaaauucauacccaaagcucagcaaauccuacauuaaugauaaagggaaagaaguccucgugcuauggggcauucaccauccaucuacuagugcugaccaacaaagucucuaucagaaugcagaugcauauguuuuuguggggacaucaagauacagcaagaaguucaagccggaaauagcaauaagacccaaagugagggaucaagaagggagaaugaauuauuacuggacacuaguagagccgggagacaaaauaacauucgaagcaacuggaaaucuagugguaccgagauaugcauucgcaauggaaagaaaugcuggaucugguauuaucauuucagauacaccaguccacgauugcaauacaacuugucagacacccaagggugcuauaaacaccagccucccauuucagaauauacauccgaucacaauuggaaaauguccaaaauauguaaaaagcacaaaauugagacuggccacaggauugaggaaugucccgucuauucaaucuagaggccuauuuggggccauugccgguuucauugaagggggguggacagggaugguagauggaugguacgguuaucaccaucaaaaugagcaggggucaggauaugcagccgaccugaagagcacacagaaugccauugacaagauuacuaacaaaguaaauucuguuauugaaaagaugaauacacaguucacagcaguagguaaagaguucaaccaccuggaaaaaagaauagagaauuuaaauaaaaaaguugaugaugguuuccuggacauuuggacuuacaaugccgaacuguugguucuauuggaaaaugaaagaacuuuggacuaccacgauucaaaugugaagaacuuauaugaaaagguaagaagccaguuaaaaaacaaugccaaggaaauuggaaacggcugcuuugaauuuuaccacaaaugcgauaacacgugcauggaaagugucaaaaaugggacuuaugacuacccaaaauacucagaggaagcaaaauuaaacagagaagaaauagaugggguaaagcuggaaucaacaaggauuuaccagauuuuggcgaucuauucaacugucgccaguucauugguacugguagucucccugggggcaaucaguuucuggaugugcucuaaugggucucuacaguguagaauauguauuuaa

SEQ ID NO: 39518 - RNA, 1701 nt, Artificial Sequence
  derived and/or modified CDS sequence (wt) from hemagglutinin__InfluenzaA__AEO01422
augaaggcaauacuaguaguucugcuauauacauuugcaaucgcaaaugcagacacauuauguauagguuaucaugcgaacaauucaacagacacuguagacacaguacuagaaaagaauguaacaguaacacacucuguuaaccuucuagaagacaagcauaacgggaaacuaugcaaacuaagagggguagccccauugcauuuggguaaauguaacauugcuggcuggauccugggaaauccagagugugaaucacucuccacagcaagcucaugguccuacauuguggaaacaucuaguucagacaauggaacguguuacccaggagauuucaucgauuaugaggagcuaagagagcaauugagcucagugucaucauuugaaagguuugagauauuccccaagacaaguucauggcccaaucaugacucgaacaaagguguaacggcagcauguccucaugcuggagcaaaaagcuucuacaaaaauuuaauauggcuaguuaaaaaaggaaauuuauacccaaagcucagcaaauccuacauuaaugauaaagggaaagaaguccucgugcuauggggaauucaccauccaucuacuagugcugaccaacaaagucucuaucagaaugcagaugcauauguuuuuguggggacaucaagauacagcaagaaguucaagccggaaauagcaauaagacccaaagugagggaucaagaagggagaaugaacuauuacuggacacuaguagagccgggagacaaaauaacauucgaagcaacuggaaaucuagugguaccgagauaugcauucgcaauggaaagaaaugcuggaucugguauuaucauuucagauacaccaguccacgauugcaauacaacuugucagacacccaagggugcuauaaacaccagccucccauuucagaauauacauccgaucacaauuggaaaauguccaaaauauguaaaaagcacaaaauugagacuggccacaggauugaggaaugucccgucuauucaaucuagaggccuauuuggggccauugccgguuucauugaagggggguggacagggaugguagauggaugguacgguuaucaccaucaaaaugagcaggggucaggauaugcagccgaccugaagagcacacagcaugccauugacgagauuacuaacaaaguaaauucuguuauugaaaagaugaauacacaguucacagcaguagguaaagaguucaaccaccuggaaaaaagaauagagaauuuaaauaaaaaaguugaugaugguuuccuggacauuuggacuuacaaugccgaacuguugguucuauuggaaaaugaaagaacuuuggacuaccacgauucaaaugugaagaacuuauaugaaaagguaagaagccaguuaaaaaacaaugccaaggaaauuggaaacggcugcuuugaauuuuaccacaaaugcgauaacacgugcauggaaagugucaaaaaugggacuuaugacuacccaaaauacucagaggaagcaaaauuaaacagagaagaaauaaaugggguaaagcuggaaucaacaaggauuuaccagauuuuggcgaucuauucaacugucgccaguucauugguacugguagucucccugggggcaaucaguuucuggaugugcucuaaugggucucuacaguguagaauauguauuuaa

SEQ ID NO: 39519 - RNA, 1701 nt, Artificial Sequence
  derived and/or modified CDS sequence (wt) from hemagglutinin__InfluenzaA__AEO01423
augaaggcaauacuaauaguucugcuauauacauuugcaaccgcaaaugcagacacauuauguauagguuaucaugcgaacaauucaacagacacuguagacacaguacuagaaaagaauguaacaguaacacacucuguuaaccuucuagaagacaagcauaacgggaaacuaugcaaacuaagagggguagccccauugcauuuggguaaauguaacauugcuggcuggauccugggaaauccagagugugaaucacucuccacagcaagcucaugguccuacauuguggaaacaucuaguucagacaauggaacguguuacccaggagauuucaucgauuaugaggagcuaagagagcaauugagcucagugucaucauuugaaagguuugagauauuccccaagacaaguucauggcccaaucaugacucgaacaaagguguaacggcagcauguccucaugcuggagcaaaaagcuucuacaaaaauuuaauauggcuaguuaaaaaaggaaauucauacccaaagcucagcaaauccuacauuaaugauaaagggaaagaaguccucgugcuauggggcauucaccauccaucuacuagugcugaccaacaaagucucuaucagaaugcagaugcauauguuuuuguggggacaucaagauacagcaagaaguucaagccggaaauaacuauaagacccaaagugagggaucaagaagggagaaugaacuauuacuggacacuaguagagccgggagacaaaauaacauucgaagcaacuggaaaucuagugguaccgagauaugcauucgcaauggaaagaaaugcuggaucugguauuaucauuucagauacaccaguccacgauugcaauacaacuugucagacacccaagggugcuauaaacaccagccucccauuucagaauauacauccgaucacaauuggaaaauguccaaaauauguaaaaagcacaaaauugagacuggccacaggauugaggaaugucccgucuauucaaucuagaggccuauuuggggccauugccgguuucauugaagggggguggacagggaugguagauggaugguacgguuaucaccaucaaaaugagcaggggucaggauaugcagccgaccugaagagcacacagaaugccauugacgagauuacuaacaaaguaaauucuguaauugaaaagaugaauacacaguucacagcaguagguaaagaguucaaccaccuggaaaaaagaauagagaauuuaaauaaaaagguugaugaugguuuccuggacauuuggacuuacaaugccgaacuguugguucuauuggaaaaugaaagaacuuuggacuaccacgauucaaaugugaagaacuuauaugaaaagguaagaagccaguuaaaaaacaaugccaaggaaauuggaaacggcugcuuugaauuuuaccacaaaugcgauaacacgugcauggaaagugucaaaaaugggacuuaugacuacccaaaauacucagaggaagcaaaauuaaacagagaagaaauagaugggguaaagcuggaaucaacaaggauuuaccagauuuuggcgaucuauucaacugucgccaguucauugguacugguagucucccugggggcaaucaguuucuggaugugcucuaaugggucucuacaguguagaauauguauuuaa

SEQ ID NO: 39520 - RNA, 1701 nt, Artificial Sequence; identical to SEQ ID NO: 39517
  derived and/or modified CDS sequence (wt) from hemagglutinin__InfluenzaA__AEO01424

SEQ ID NO: 39521 - RNA, 1701 nt, Artificial Sequence
  derived and/or modified CDS sequence (wt) from hemagglutinin__InfluenzaA__AEO01425
augaaggcaauacuaguaguucugcuauauacauuugcaaccgcaaaugcagacacauuauguauagguuaucaugcgaacaauucaacagacacuguagacacaguacuagaaaagaauguaacaguaacacacucuguuaaccuucuagaagacaagcauaacgggaaacuaugcaaacuaagagggguagccccauugcauuuggguaaauguaacauugcuggcuggauccugggaaauccagagugugaaucacucuccacagcaagcucaugguccuacauuguggaaacaucuaguucagacaauggaacguguuacccaggagauuucaucgauuaugaggagcuaagagagcaauugagcucagugucaucauuugaaaaguuugagauauuccccaagacaaguucauggcccaaucaugacucgaacaaagguguaacggcagcauguccucaugcuggagcaaaaagcuucuacaaaaauuuaauauggcuaguuaaaaaaggaaauucauacccaaagcucagcaaauccuacauuaaugauaaagggaaagaaguccucgugcuauggggcauucaccauccaucuacuagugcugaccaacaaagucucuaucagaaugcagaugcauauguuuuuguggggacaucaagauacagcaagaaguucaagccggaaauagcaauaagacccaaagugagggaucaagaagggagaaugaacuauuacuggacacuaguagagccgggagacaaaauaacauucgaagcaacuggaaaucuagugguaccgagauaugcauucgcaauggaaagaaaugcuggaucugguauuaucauuucagauacaccaguccacgauugcaauacaacuugucagacacccaagggugcuauaaacaccagccucccauuucagaauauacauccgaucacaauuggaaaauguccaaaauauguaaaaagcacaaaauugagacuggccacaggauugaggaaugucccgucuauucaaucuagaggccuauuuggggccauugccgguuucauugaagggggguggacagggaugguagauggaugguacgguuaucaccaucaaaaugagcaggggucaggauaugcagccgaccugaagagcacacagaaugccauugacaagauuacuaacaaaguaaauucuguuauugaaaagaugaauacacaguucacagcaguagguaaagaguucaaccaccuggaaaaaagaauagagaauuuaaauaaaaaaguugaugaugguuuccuggacauuuggacuuacaaugccgaacuguugguucuauuggaaaaugaaagaacuuuggacuaccacgauucaaaugugaagaacuuauaugaaaagguaagaagccaguuaaaaaacaaugccaaggaaauuggaaacggcugcuuugaauuuuaccacaaaugcgauaacacgugcauggaaagugucaaaaaugggacuuaugacuacccaaaauacucagaggaagcaaaauuaaacagagaagaaauagaugggguaaagcuggaaucaacaaggauuuaccagauuuuggcgaucuauucaacugucgccaguucauugguacugguagucucccugggggcaaucaguuucuggaugugcucuaaugggucucuacaguguagaauauguauuuaa

SEQ ID NO: 39522 - RNA, 1701 nt, Artificial Sequence; identical to SEQ ID NO: 34714
  derived and/or modified CDS sequence (wt) from hemagglutinin__InfluenzaA__AEO01426

SEQ ID NO: 39523 - RNA, 1701 nt, Artificial Sequence
  derived and/or modified CDS sequence (wt) from hemagglutinin__InfluenzaA__AEO01427
augaaggcaauacuaguaguucugcuauauacauuugcaaccgcaaauucagacacauuauguauagguuaucaugcgaacaauucaacagacacuguagacacaguacuagaaaagaauguaacaguaacacacucuguuaaccuucuagaagacaagcauaacgggaaacuaugcaaacuaagagggguagccccauugcauuuggguaaauguaacauugcuggcuggauccugggaaauccagagugugaaucacucuccacagcaagcucaugguccuacauuguggaaacaucuaguucagacaauggaacguguuacccaggagauuucaucgauuaugaggagcuaagagagcaauugagcucagugucaucauuugaaagguuugagauauuccccaagacaaguucauggcccaaucaugacucgaacaaagguguaacggcagcauguccucaugcuggagcaaaaagcuucuacaaaaauuuaauauggcuaguuaaaaaaggaaauucauacccaaagcucagcaaauccuacauuaaugauaaagggaaagaaguccucgugcuauggggcauucaccauccaucuacuagugcugaccaacaaagucucuaucagaaugcagaugcauauguuuuuguggggacaucaagauacagcaagaaguucaagccggaaauagcaauaagacccaaagugagggaucaagaagggagaaugaacuauuacuggacacuaguagagccgggagacaaaauaacauucgaagcaacuggaaaucuagugguaccgagauaugcauucgcaauggaaagaaaugcuggaucugguauuaucauuucagauacaccaguccacgauugcaauacaacuugucagacacccaagggugcuauaaacaccagccucccauuucagaauauacauccgaucacaauuggaaaauguccaaaauauguaaaaagcacaaaauugagacuggccacaggauugaggaaugucccgucuauucaaucuagaggccuauuuggggccauugccgguuucauugaagggggguggacagggaugguagauggaugguacgguuaucaccaucaaaaugagcaggggucaggauaugcagccgaccugaagagcacacagaaugccauugacaagauuacuaacaaaguaaauucuguuauugaaaagaugaauacacaguucacagcaguagguaaagaguucaaccaccuggaaaaaagaauagagaauuuaaauaaaaaaguugaugaugguuuccuggacauuuggacuuacaaugccgaacuguugguucuauuggaaaaugaaagaacuuuggacuaccacgauucaaaugugaagaacuuauaugaaaagguaagaagccaguuaaaaaacaaugccaaggaaauuggaaacggcugcuuugaauuuuaccacaaaugcgauaacacgugcauggaaagugucaaaaaugggacuuaugacuacccaaaauauucagaggaagcaaaauuaaacagagaagaaauagaugggguaaagcuggaaucaacaaggauuuaccagauuuuggcgaucuauucaacugucgccaguucauugguacugguagucucccugggggcaaucaguuucuggaugugcucuaaugggucucuacaguguagaauauguauuuaa

SEQ ID NO: 39524 - RNA, 1701 nt, Artificial Sequence
  derived and/or modified CDS sequence (wt) from hemagglutinin__InfluenzaA__AEO01428
augaaggcaauacuaguaguucugcuauauacauuugcaaccgcaaaugcagacacauuauguauagguuaucaugcgaacaauucaacagacacuguagacacaguacuagaaaagaauguaacaguaacacacucuguuaaccuucuagaagacaagcauaacgggaaacuaugcaaacuaagagggguagccccauugcauuuggguaaauguaacauugcuggcuggauccugggaaauccagagugugaaucacucuccacagcaagcucaugguccuacauuguggaaacaucuaguucagacaauggaacguguuacccaggagauuucaucgauuaugaggagcuaagagagcaauugagcucagugucaucauuugaaagguuugagauauuucccaagacaaguucauggcccgaucaugacucgaacaaagguguaacggcagcauguccucaugcuggagcaaaaagcuucuacaaaaauuuaauauggcuaguuaaaaaaggaaauucauacccaaagcucagcaaauccuacauuaaugauaaagggaaagaaguccucgugcuauggggcauucaccauccaucuacuagugcugaccaacaaagucucuaucagaaugcagaugcauauguuuuuguggggacaucaagauacagcaagaaguucaagccggaaauagcaauaagacccaaagugagggaucaagaagggagaaugaacuauuacuggacacuaguagagccgggagacaaaauaacauucgaagcaacuggaaaucuagugguaccgagauaugcauucgcaauggaaagaaaugcuggaucugguauuaucauuucagauacaccaguccacgauugcaauacaacuugucagacacccaagggugcuauaaacaccagccucccauuucagaauauacauccgaucacaauuggaaaauguccaaaauauguaaaaagcacaaaauugagaauggccacaggauugaggaaugucccgucuauucaaucuagaggccuauuuggggccauugccgguuucauugaagggggguggacagggaugguagauggaugguacgguuaucaccaucaaaaugagcaggggucaggauaugcagccgaccugaagagcacacagaaugccauugacgagauuacuaacaaaguaaauucuguuauugaaaagaugaauacacaguucacagcaguagguaaagaguucaaccaccuggaaaaaagaauagagaauuuaaauaaaaaaguugaugaugguuuccuggacauuuggacuuacaaugccgaacuguugguucuauuggaaaaugaaagaacuuuggacuaccacgauucaaaugugaagaacuuauaugaaaagguaagaagccaguuaaaaaacaaugccaaggaaauuggaaacggcugcuuugaauuuuaccacaaaugcgauaacacgugcauggaaagugucaaaaaugggacuuaugacuacccaaaauacucagaggaagcaaaauuaaacagagaagaaauagaugggguaaagcuggaaucaacaaggauuuaccagauuuuggcgaucuauucaacugucgccaguucauugguacugguagucucccugggggcaaucaguuucuggaugugcucuaaugggucucuacaguguagaauauguauuuaa

SEQ ID NO: 39525 - RNA, 1701 nt, Artificial Sequence; identical to SEQ ID NO: 35845
  derived and/or modified CDS sequence (wt) from hemagglutinin__InfluenzaA__AEO01429

SEQ ID NO: 39526 - RNA, 1701 nt, Artificial Sequence
  derived and/or modified CDS sequence (wt) from hemagglutinin__InfluenzaA__AEO01430
augaaggcaauacuaguaguucugcuauauacauuugcaaccgcaaaugcagacacauuauguaucgguuaucaugcgaacaauucaacagacacuguagacacaguacuagaaaagaauguaacaguaacacacucuguuaaccuucuagaagacaagcauaacgggaaacuaugcaaacuaagagggguagccccauugcauuuggguaaauguaacauugcuggcuggauccugggaaauccagagugugaaucacucuccacagcaagcucaugguccuacauuguggaaacaucuaguucagacaauggaacguguuacccaggagauuucaucgauuaugaggagcuaagagagcaauugagcucagugucaucauuugaaagguuugagauauuccccaagacaaguucauggcccaaucaugacucgaacaaagguguaacggcagcauguccucaugauggagcaaaaagcuucuacaaaaauuuaauauggcuaguuaaaaaaggaaauucauacccaaagcucagcaaauccuacauuaaugauaaagggaaagaaguccucgugcuauggggcauucaccauccaucuacuagugcugaccaacaaagucucuaucagaaugcagaugcauauguuuuuguggggacaucaagauacagcaagaaguucaagccggaaauagcaauaagacccaaagugagggaucaagaagggagaaugaacuauuacuggacacuaguagagccgggagacaaaauaacauucgaagcaacuggaaaucuagugguaccgagauaugcauucgcaauggaaagaaaugcuggaucugguauuaucauuucagauacaccaguccacgauugcaauacaacuugucagacacccaagggugcuauaaacaccagccucccauuucagaauauacauccgaucacaauuggaaaauguccaaaauauguaaaaagcacaaaauugagacuggccacaggauugaggaaugucccgucuauucaaucuagaggccuauuuggggccauugccgguuucauugaagggggguggacagggaugguagauggaugguacgguuaucaccaucaaaaugagcaggggucaggauaugcagccgaccugaagagcacacagaaugccauugacgagauuacuaacaaaguaaauucuguuauugaaaagaugaauacacaguucacagcaguagguaaagaguucaaccaccuggaaaaaagaauagagaauuuaaauaaaaaaguugaugaugguuuccuggacauuuggacuuacaaugccgaauuguugguucuauuggaaaaugaaagaacuuuggacuaccacgauucaaaugugaagaacuuauaugaaaagguaagaagccaguuaaaaaacaaugccaaggaaauuggaaacggcugcuuugaauuuuaccacaaaugcgauaacacgugcauggaaagugucaaaaaugggacuuaugacuacccaaaauacucagaggaagcaaaauuaaacagagaagaaauagaugggguaaagcuggaaucaacaaggauuuaccagauuuuggcgaucuauucaacugucgccaguucauugguacugguagucucccugggggcaaucaguuucuggaugugcucuaaugggucucuacaguguagaauauguauuuaa

SEQ ID NO: 39527 - RNA, 1701 nt, Artificial Sequence; identical to SEQ ID NO: 39399
  derived and/or modified CDS sequence (wt) from hemagglutinin__InfluenzaA__AEO01431

SEQ ID NO: 39528 - RNA, 1701 nt, Artificial Sequence; identical to SEQ ID NO: 35308
  derived and/or modified CDS sequence (wt) from hemagglutinin__InfluenzaA__AEO01432

SEQ ID NO: 39529 - RNA, 1701 nt, Artificial Sequence
  derived and/or modified CDS sequence (wt) from hemagglutinin__InfluenzaA__AEO01434
augaaggcaauacuaguaguucugcuauauacauuugcaaccgcaaaugcagacacauuauguauagguuaucaugcgaacaauucaacagacacuguagacacaguacuagaaaagaauguaacaguaacacacucuguuaaccuucuagaagacaagcauaacgggaaacuaugcaaacuaagagggguagccccauugcauuugggugaauguaacauugcuggcuggauccugggaaauccagagugugaaucacucuccacagcaagcucaugguccuacauuguggaaacaucuaguucagacaauggaacguguuacccaggagauuucaucgauuaugaggagcuaagagagcaauugagcucagugucaucauuugaaagguuugagauauuccccaagacaaguucauggcccaaucaugacucgaacaaagguguaacggcagcauguccucaugcuggagcaaaaagcuucuacaaaaauuuaauauggcuaguuaaaaaaggaaauucauacccaaagcucaacaaauccuacauuaaugauaaagggaaagaaguccucgugcuauggggcauucaccauccaucuacuagugcugaccaacaaagucucuaucagaaugcagaugcauauguuuuuguggggacaucaagauacagcaagaaguucaagccggaaauagcaauaagacccaaagugagggaucaagaagggagaaugaacuauuacuggacacuaguagagccgggagacaaaauaacauucgaagcaacuggaaaucuagugguaccgagauaugcauucgcaauggaaagaaaugcuggaucugguauuaucauuucagauacaccaguccacgauugcaauacaacuugucagacacccaagggugcuauaaacaccagccucccauuucagaauauacauccgaucacaauuggagaauguccaaaauauguaaaaagcacaaaauugagacuggccacaggauugaggaaugucccgucuauucaaucuagaggccuauuuggggccauugccgguuucauugaagggggguggacagggaugguagauggaugguacgguuaucaccaucaaaaugagcaggggucaggauaugcagccgaccugaagagcacacagaaugccauugacaagauuacuaacaaaguaaauucuguuauugaaaagaugaauacacaguucacagcaguagguaaagaguucaaccaccuggaaaaaagaauagagaauuuaaauaaaaaaguugaugaugguuuccuggacauuuggacuuacaaugccgaacuguugguucuauuggaaaaugaaagaacuuuggacuaccacgauucaaaugugaagaacuuauaugaaaagguaagaagccaguuaaaaaacaaugccaaggaaauuggaaacggcugcuuugaauuuuaccacaaaugcgauaacacgugcauggaaagugucaaaaaugggacuuaugacuacccaaaauacucagaggaagcaaaauuaaacagagaagaaauagaugggguaaagcuggaaucaacaaggauuuaccagauuuuggcgaucuauucaacugucgccaguucauugguacugguagucucccugggggcaaucaguuucuggaugugcucuaaugggucucuacaguguagaauauguauuuaa

SEQ ID NO: 39530 - RNA, 1701 nt, Artificial Sequence
  derived and/or modified CDS sequence (wt) from hemagglutinin__InfluenzaA__AEO01435
augaaggcaauacuaguaguucugcuauauacauuugcaaccgcaaaugcagacacauuauguauagguuaucaugcgaacaauucaacagacacuguagacacaguacuagaaaagaauguaacaguaacacacucuguuaaccuucuagaagacaagcauaacgggaaacuaugcaaacuaagagggguagccccauugcauuuggguaaauguaacauugcuggcuggauccugggaaauccagagugugaaucacucuccacagcaagcucaugguccuacauuguggaaacaucuaguucagacaauggaacguguuacccaggagauuucaucgauuaugaggagcuaagagagcaauugagcucagugucaucauuugaaagguuugagauauuccccaagacaaguucauggcccaaucaugacucgaacaaagguguaacggcagcauguccucaugcuggagcaaaaagcuucuacaaaaauuuaauauggcuaguuaaaaaaggaaauucauacccaaagcucagcaaauccuacauuaaugauaaagggaaagaaguccucgugcuauggggcauucaccauccaucuacuagugcugaccaacaaagucucuaucagaaugcagaugcauauguuuuuguggggacaucaagauacagcaagaaguucaagccggaaauagcaauaagacccaaagugagggaucaagaagggagaaugaacuauuacuggacacuaguagagccgggagacaaaauaacauucgaagcaacuggaaaucuagugguaccgagauaugcauucgcaauggaaagaaaugcuggaucugguauuaucauuucagauacaccagucuacgauugcaauacaacuugucagacacccaagggugcuauaaacaccagccucccauuucagaauauacauccgaucacaauuggaaaauguccaaaauauguaaaaagcacaaaauugagacuggccacaggauugaggaaugucccgucuauucaaucuagaggccuauuuggggccauugccgguuucauugaagggggguggacagggaugguagauggaugguacgguuaucaccaucaaaaugagcaggggucaggauaugcagccgaccugaagagcacacagaaugccauugacaagauuacuaacaaaguaaauucuguuauugaaaagaugaauacacaguucacagcaguagguaaagaguucaaccaccuggaaaaaagaauagagaauuuaaauaaaaagguugaugaugguuuccuggacauuuggacuuacaaugccgaacuguugguucuauuggaaaaugaaagaacuuuggacuaccacgauucaaaugugaagaacuuauaugaaaagguaagaaaccaguuaaaaaacaaugccaaggaaauuggaaacggcugcuuugaauuuuaccacaaaugcgauaacacgugcauggaaagugucaaaaaugggacuuaugacuacccaaaauacucagaggaagcaaaauuaaacagagaagaaauagaugggguaaagcuggaaucaacaaggauuuaccagauuuuggcgaucuauucaacugucgccaguucauugguacugguagucucccugggggcaaucaguuucuggaugugcucuaaugggucucuacaguguagaauauguauuuaa

SEQ ID NO: 39531 - RNA, 1701 nt, Artificial Sequence; identical to SEQ ID NO: 39521
  derived and/or modified CDS sequence (wt) from hemagglutinin__InfluenzaA__AEO01436

SEQ ID NO: 39532 - RNA, 1701 nt, Artificial Sequence; identical to SEQ ID NO: 39399
  derived and/or modified CDS sequence (wt) from hemagglutinin__InfluenzaA__AEO01437

SEQ ID NO: 39533 - RNA, 1701 nt, Artificial Sequence
  derived and/or modified CDS sequence (wt) from hemagglutinin__InfluenzaA__AEO01438
augaaggcaauacuaguaguucugcuauauacauuugcaaccgcaaaugcagacacauuauguauagguuaucaugcgaacaauucaacagacacuguagacacaguacuagaaaagaauguaacaguaacacacucuguuaaccuucuagaagacaagcauaacgggaaacuaugcaaacuaagagggguagccccauugcauuuggguaaauguaacauugcuggcuggauccugggaaauccagagugugaaucacucuccacagcaagcucaugguccuacauuguggaaacaucuaguucagacaauggaacguguuacccaggagauuucaucgauuaugaggagcuaagagagcaauugagcucagugucaucauuugaaagguuugagauauuccccaagacaaguucauggcccaaucaugacucgaacaaagguguaacggcagcauguccucaugcuggagcaaaaagcuucuacaaaaauuuaauauggcuaguuaaaaaaggaaauucauacccaaagcucagcaaauccuacauuaaugauaaagggaaagaaguccucgugcuauggggcauucaccauccaucuacuagugcugaccaacaaagucucuaucagaaugcagaugcauauguuuuuguggggacaucaagauacagcaagaaguucaagccagaaauagcaauaagacccaaagugagggaucaagaagggagaaugaacuauuacuggacacuaguagagccgggagacaaaauaacauucgaagcaacuggaaaucuagugguaccgagauaugcauucgcaauggaaagaaaugcuggaucugguauuaucauuucagauacaccaguccacgauugcaauacaacuugucagacacccaagggugcuauaaacaccagccucccauuucagaacauacauccgaucacaauuggagaauguccaaaauauguaaaaagcacaaaauugagacuggccacaggauugaggaaugucccgucuauucaaucuagaggccuauuuggggccauugccgguuucauugaagggggguggacagggaugguagauggaugguacgguuaucaccaucaaaaugagcaggggucaggauaugcagccgaccugaagagcacacagaaugccauugacaagauuacuaacaaaguaaauucuguuauugaaaagaugaauacacaguucacagcaguagguaaagaguucaaccaccuggaaaaaagaauagagaauuuaaauaaaaaaguugaugaugguuuccuggacauuuggacuuacaaugccgaacuguugguucuauuggaaaaugaaagaacuuuggacuaccacgauucaaaugugaagaacuuauaugaaaagguaagaagccaguuaaaaaacaaugccaaggaaauuggaaacggcugcuuugaauuuuaccacaaaugcgauaacacgugcauggaaagugucaaaaaugggacuuaugacuacccaaaauacucagaggaagcaaaauuaaacagagaagaaauagaugggguaaagcuggaaucaacaaggauuuaccagauuuuggcgaucuauucaacugucgccaguucauugguacugguagucucccugggggcaaucaguuucuggaugugcucuaaugggucucuacaguguagaauauguauuuaa

SEQ ID NO: 39534 - RNA, 1701 nt, Artificial Sequence
  derived and/or modified CDS sequence (wt) from hemagglutinin__InfluenzaA__AEO01440
augaaggcaauacuaguaguucugcuauauacauuugcaaccgcaaaugcagacacauuauguauagguuaucaugcgaacaauucaacagacacuguagacacaguacuagaaaagaauguaacaguaacacacucuguuaaccuucuagaagacaagcauaacgggaaacuaugcaaacuaagagggguagccccauugcauuuggguaaauguaacauugcuggcuggauccugggaaauccagagugugaaucacucuccacagcaagcucaugguccuacauuguggaaacaucuaguucagacaauggaacguguuacccaggagauuucaucgauuaugaggagcuaagagagcaauugagcucagugucaucauuugaaagguuugagauauuccccaagacaaguucauggcccaaucaugacucgaacaaagguguaacggcagcauguccucaugcuggagcaaaaagcuucuacaaaaauuuaauauggcuaguuaaaaaaggaaauucauacccaaagcucagcaaauccuacauuaaugauaaagggaaagaaguccucgugcuauggggcauucaccauccaucuacuagugcugaccaacaaagucucuaucagaaugcagaugcauauguuuuuguggggacaucaagauacagcaagaaguucaagccggaaauagcaauaagacccaaagugagggaacaagaagggagaaugaacuauuacuggacacuaguagagccgggagacaaaauaacauucgaagcaacuggaaaucuagugguaccgagauaugcauucgcaauggaaagaaaugcuggaucugguauuaucauuucagauacaccaguccacgauugcaauacaacuugucagacacccaaaggugcuauaaacaccagccucccauuucagaauauacauccgaucacaauugggaaauguccaaaauauguaaaaagcacaaaauugagacuggccacaggauugaggaaugucccgucuauucaaucuagaggccuauuuggggccauugccgguuucauugaagggggguggacagggaugguagauggaugguacgguuaucaccaucaaaaugagcaggggucaggauaugcagccgaccugaagagcacacagaaugccauugacgagauuacuaacaaaguaaauucuguuauugaaaagaugaauacacaguucacagcaguagguaaagaguucaaccaccuggaaaaaagaauagagaauuuaaauaaaaaaguugaugaugguuuccuggacauuuggacuuacaaugccgaacuguugguucuauuggaaaaugaaagaacuuuggacuaccacgauucaaaugugaagaacuuauaugaaaagguaagaagccaguuaaaaaacaaugccaaggaaauuggaaacggcugcuuugaauuuuaccacaaaugcgauaacacgugcauggaaagugucaaaaaugggacuuaugacuacccaaaauacucagaggaagcaaaauuaaacagagaagaaauagaugggguaaagcuggaaucaacaaggauuuaccagauuuuggcgaucuauucaacugucgccaguucauugguacugguagucucccugggggcaaucaguuucuggaugugcucuaaugggucucuacaguguaggauauguauuuaa

SEQ ID NO: 39535 - RNA, 1701 nt, Artificial Sequence
  derived and/or modified CDS sequence (wt) from hemagglutinin__InfluenzaA__AEO01441
augaaggcaauacuaguaguucugcuauauacauuugcaaccgcaaaugcagacacauuauguauagguuaucaugcgaacaauucaacagacacuguagacacaguacuagaaaagaauguaacaguaacacacucuguuaaccuucuagaagacaagcauaacgggaaacuaugcaaacuaagagggguagccccauugcauuuggguaaauguaacauugcuggcuggauccugggaaauccagagugugaaucacucuccacagcaagcucaugguccuacauuguggaaacaucuaguucagacaauggaacguguuacccaggagauuucaucgauuaugaggagcuaagagagcaauugagcucagugucaucauuugaaagguuugagauauuccccaagacaaguucauggcccaaucaugacucgaacaaagguguaacggcagcauguccucaugcuggagcaaaaagcuucuacaaaaauuuaauauggcuaguuaaaaaaggaaauucauacccaaagcucagcaaauccuacauuaaugauaaagggaaagaaguccucgugcuauggggcauucaccauccaucuacuagugcugaccaacaaagucucuaucagaaugcagaugcauauguuuuuguggggacaucaagauacagcaagaaguucaagccggaaauagcaauaagacccaaagugagggaucaagaagggagaaugaacuauuacuggacacuaguagagccgggagacaaaauaacauucgaagcaacuggaaaucuagugguaccgagauaugcauucgcaauggaaagaaaugauggaucugguauuaucauuucagauacaccaguccacgauugcaauacaacuugucagacacccaagggugcuauaaacaccagccucccauuucagaauauacauccgaucacaauuggaaaauguccaaaauauguaaaaagcacaaaauugagacuggccacaggauugaggaaugucccgucuauucaaucuagaggccuauuuggggccauugccgguuucauugaagggggguggacagggaugguagauggaugguacgguuaucaccaucaaaaugagcaggggucaggauaugcagccgaccugaagagcacacagaaugccauugacaagauuacuaacaaaguaaauucuguuauugaaaagaugaauacacaguucacagcaguagguaaagaguucaaccaccuggaaaaaagaauagagaauuuaaauaaaaaaguugaugaugguuuccuggacauuuggacuuacaaugccgaacuguugguucuauuggaaaaugaaagaacuuuggacuaccacgauucaaaugugaagaacuuauaugaaaagguaagaagccaguuaaaaaacaaugccaaggaaauuggaaacggcugcuuugaauuuuaccacaaaugcgauaacacgugcauggaaagugucaaaaaugggacuuaugacuacccaaaauacucagaggaagcaaaauuaaacagagaagaaauagaugggguaaagcuggaaucaacaaggauuuaccagauuuuggcgaucuauucaacugucgccaguucauugguacugguagucucccugggggcaaucaguuucuggaugugcucuaaugggucucuacaguguagaauauguauuuaa

SEQ ID NO: 39536 - RNA, 1701 nt, Artificial Sequence
  derived and/or modified CDS sequence (wt) from hemagglutinin__InfluenzaA__AEO01442
augaaggcaauacuaguaguucugcuauauacauuugcaaccgcaaaugcagacacauuauguauagguuaucaugcgaacaauucaacagacacuguagacacaguacuagaaaagaauguaacaguaacacacucuguuaaccuucuagaagacaagcauaacgggaaacuaugcaaacuaagagggguagccccauugcauuuggguaaauguaacauugcuggcuggauccugggaaauccagagugugaaucacucuccacagcaagcucaugguccuacauuguggaaacaucuaguucagacaauggaacguguuacccaggagauuucaucgauuaugaggagcuaagagagcaauugagcucagugucaucauuugaaagguuugagauauuccccaagacaaguucauggcccaaucaugacucgaacaaagguguaacggcagcauguccucaugcuggagcaaaaagcuucuacaaaaauuuaauauggcuaguuaaaaaaggaaauucauacccaaagcucagcaaauccuacauuaaugauaaagggaaagaaguccucgugcuauggggaauucaccauccaucuacuagugcugaccaacaaagucucuaucagaaugcagaugcauauguuuuuguggggacaucaagauacagcaagaaguucaagccggaaauagcaauaagacccaaagugagggaucaagaagggagaaugaacuauuacuggacacuaguagagccgggagacaaaauaacauucgaagcaacuggaaaucuagugguaccgagauaugcauucgcaauggaaagaaaugcuggaucugguauuaucauuucagauacaccaguccacgauugcaauacaacuugucagacacccaagggugcuauaaacaccagccucccauuucagaauauacauccgaucacaauuggaaaauguccaaaauauguaaaaagcacaaaauugagacuggccacaggauugaggaaugucccgucuauucaaucuagaggccuauuuggggccauugccgguuucauugaagggggguggacagggaugguagauggaugguacgguuaucaccaucaaaaugagcaggggucaggauaugcagccgaccugaagagcacacagcaugccauugacgagauuacuaacaaaguaaauucuguuauugaaaagaugaauacacaguucacagcaguagguaaagaguucaaccaccuggaaaaaagaauagagaauuuaaauaaaaaaguugaugaugguuuccuggacauuuggacuuacaaugccgaacuguugguucuauuggaaaaugaaagaacuuuggacuaccacgauucaaaugugaagaacuuauaugaaaagguaagaagccaguuaaaaaacaaugccaaggaaauuggaaacggcugcuuugaauuuuaccacaagugcgauaacacgugcauggaaagugucaaaaaugggacuuaugacuacccaaaauacucagaggaagcaaaauuaaacagagaagaaauagaugggguaaagcuggaaucaacaaggauuuaccagauuuuggcgaucuauucaacugucgccaguucauugguacugguagucucccugggggcaaucaguuucuggaugugcucuaaugggucucuacaguguagaauauguauuuaa

SEQ ID NO: 39537 - RNA, 1701 nt, Artificial Sequence
  derived and/or modified CDS sequence (wt) from hemagglutinin__InfluenzaA__AEO01443
augaaggcaauacuaguaguucugcuauauacauuugcaaccgcaaaugcagacacauuauguauagguuaucaugcgaacaauucaacagacacuguagacacaguacuagaaaagaauguaacaguaacacacucuguuaaccuucuagaagacaagcauaacgggaaacuaugcaaacuaagagggguagccccauugcauuuggguaaauguaacauugcuggcuggauccugggaaauccagagugugaaucacucuccacagcaagcucaugguccuacauuguggaaacaucuaguucagacaauggaacguguuacccaggagauuucaucgauuaugaggagcuaagagagcaauugagcucagugucaucauuugaaagguuugagauauuccccaagacaaguucauggcccaaucaugacucgaacaaagguguaacggcagcauguccucaugcuggagcaaaaagcuucuacaaaaauuuaauauggcuaguuaaaaaagaaaauucauacccaaagcucagcaaauccuacauuaaugauaaagggaaagaaguccucgugcuauggggcauucaccauccaucuacuagugcugaccaacaaagucucuaucagaaugcagaugcauauguuuuuguggggacaucaagauacagcaagaaguucaagccggaaauagcaauaagacccaaagugagggaucaagaagggagaaugaacuauuacuggacacuaguagagccgggagacaaaauaacauucgaagcaacuggaaaucuagugguaccgagauaugcauucgcaauggaaagaaaugcuggaucugguauuaucauuucagauacaccaguccacgauugcaauacaacuugucagacacccaagggugcuauaaacaccagccucccauuucagaauauacauccgaucacaauuggaaaauguccaaaauauguaaaaagcacaaaauugagacuggccacaggauugaggaaugucccgucuauucaaucuagaggccuauuuggggccauugccgguuucauugaagggggguggacagggaugguagauggaugguacgguuaucaccaucaaaaugagcaggggucaggauaugcagccgaccugaagagcacacagaaugccauugacaagauuacuaacaaaguaaauucuguuauugaaaagaugaauacacaguucacagcaguagguaaagaguucaaccaccuggaaaaaagaauagagaauuuaaauaaaaagguugaugaugguuuccuggacauuuggacuuacaaugccgaacuguugguucuauuggaaaaugaaagaacuuuggacuaccacgauucaaaugugaagaacuuauaugaaaagguaagaagccaguuaaaaaacaaugccaaggaaauuggaaacggcugcuuugaauuuuaccacaaaugcgauaacacgugcauggaaagugucaaaaaugggacuuaugacuacccaaaauacucagaggaagcaaaauuaaacagagaagaaauagaugggguaaagcuggaaucaacaaggauuuaccagauuuuggcgaucuauucaacugucgccaguucauugguacugguagucucccugggggcaaucaguuucuggaugugcucuaaugggucucuacaguguagaauauguauuuaa

SEQ ID NO: 39538 - RNA, 1701 nt, Artificial Sequence
  derived and/or modified CDS sequence (wt) from hemagglutinin__InfluenzaA__AEO01444
augaaggcaauacuaguaguucugcuauauacauuugcaaccgcaaaugcagacacauuauguauagguuaucaugcgaacaauucaacagacacuguagacacaguacuagaaaagaauguaacaguaacacacucuguuaaccuucuagaagacaagcauaacgggaaacuaugcaaacuaagagggguagccccauugcauuuggguaaauguaacauugcuggcuggauccugggaaauccagagugugaaucacucuccacagcaagcucaugguccuacauuguggaaacaucuaauucagacaauggaacguguuacccaggagauuucaucgauuaugaggagcuaagagagcaauugagcucagugucaucauuugaaagguuugagauauuccccaagacaaguucauggcccaaucaugacucggacaaagguguaacggcagcauguccucaugcuggagcaaaaagcuucuacaaaaauuuaauauggcuaguuaaaaaaggaaauucauacccaaagcucagcaaauccuacauuaaugauaaagggaaagaaguccucgugcuauggggcauucaccauccaucuacuagugcugaccaacaaagucucuaucagaaugcagaugcauauguuuuuguggggacaucaagauacagcaagaaguucaagccggaaauagcaauaagacccaaagugagggaucaagaagggagaaugaacuauuacuggacacuaguagagccgggagacaaaauaacauucgaagcaacuggaaaucuagugguaccgagauaugcauucgcaauggaaagaaaugcuggaucugguauuaucauuucagauacaccaguccacgauugcaauacaacuugucagacacccaagggugcuauaaacaccagccucccauuucagaauauacauccgaucacaauuggaaaauguccaaaauauguaaaaagcacaaaauugagacuggccacaggauuaaggaaugucccgucuauucaaucuagaggccuauuuggggccauugccgguuucauugaagggggguggacagggaugguagauggaugguacgguuaucaccaucaaaaugagcaggggucaggauaugcagccgaccugaagagcacacagaaugccauugacaagauuacuaacaaaguaaauucuguuauugaaaagaugaauacacaguucacagcaguagguaaagaguucaaccaccuggaaaaaagaauagagaauuuaaauaaaaaaguugaugaugguuuccuggacauuuggacuuacaaugccgaacuguugguucuauuggaaaaugaaagaacuuuggacuaccacgauucaaaugugaagaacuuauaugaaaagguaagaagccaguuaaaaaacaaugccaaggaaauuggaaacggcugcuuugaauuuuaccacaaaugcgauaacacgugcauggaaagugucaaaaaugggacuuaugacuacccaaaauacucagaggaagcaaaauuaaacagagaagaaauagaugggguaaagcuggaaucaacaaggauuuaccagauuuuggcgaucuauucaacugucgccaguucauugguacugguagucucccugggggcaaucaguuucuggaugugcucuaaugggucucuacaguguagaauauguauuuaa

SEQ ID NO: 39539 - RNA, 1701 nt, Artificial Sequence
  derived and/or modified CDS sequence (wt) from hemagglutinin__InfluenzaA__AEO01445
augaaggcaauacuaguaguucugcuauauacauuugcaaccgcaaaugcagacacauuauguauagguuaucaugcgaacaauucaacagacacuguagacacaguacuagaaaagaauguaacaguaacacacucuguuaaccuucuagaagacaagcauaacgggaaacuaugcaaacuaagagggguagccccauugcauuuggguaaauguaacauugcuggcuggauccugggaaauccagagugugaaucacucuccacagcaagcucaugguccuacauuguggaaacaucuaguucagacaauggaacguguuacccaggagauuucaucgauuaugaggagcuaagagagcaauugagcucagugucaucauuugaaagguuugagauauuccccaagacaaguucauggcccaaucaugacucgaacaaagguguaacggcagcauguccucaugcuggagcaaaaagcuucuacaaaaauuuaauauggcuaguuaaaaaaggaaauucauacccaaagcucagcaaauccuacauuaaugauaaagggaaagaaguccucgugcuauggggcauucaccauccaucuacuagugcugaccaacaaagucucuaucagaaugcagaugcauauguuuuuguggggacaucaagauacagcaagaaguucaagccggaaauagcaauaagacccaaagugagggaucaagaagggagaaugaacuauuacuggacacuaguagagccgggagacaaaauaacauucgaagcaacuggaaaucuagugguaccgagauaugcauucgcaauggaaagaaaugcuggaucugguauuaucauuucagauacaccaguccacgauugcaauacaacuugucagacacccaagggugcuauaaacaccagccucccauuucagaauauacauccgaucacaauuggaaaauguccaaaauauguaaaaagcacaaaauugagacuggccacaggauugaggaaugucccgucuauucaaucuagaggccuauuuggggccauugccgguuucauugaagggggguggacagggaugguagauggaugguacgguuaucaccaucaaaaugagcaggggucaggauaugcagccgaccugaagagcacacagaaugccauugacgagauuacuaacaaaguaaauucuguuauugaaaagaugaauacacaguucacagcaguagguaaagaguucaaccaccuggaaaaaagaauagagaauuuaaauaaaaagguugaugaugguuuccuggacauuuggacuuacaaugccgaacuguugguucuauuggaaaaugaaagaacuuuggacuaccacgauucaaaugugaagaacuuauaugaaaagguaagaaaccaguuaaaaaacaaugccaaggaaauuggaaacggcugcuuugaauuuuaccacaaaugcgauaacacgugcauggaaagugucaaaaaugggacuuaugacuacccaaaauacucagaggaagcaaaauuaaacagagaagaaauagaugggguaaagcuggaaucaacaaggauuuaccagauuuuggcgaucuauucaacugucgccaguucauugguacugguagucucccugggggcaaucaguuucuggaugugcucuaaugggucucuacaguguagaauauguauuuaa

SEQ ID NO: 39540 - RNA, 1701 nt, Artificial Sequence; identical to SEQ ID NO: 39399
  derived and/or modified CDS sequence (wt) from hemagglutinin__InfluenzaA__AEO01446

SEQ ID NO: 39541 - RNA, 1701 nt, Artificial Sequence
  derived and/or modified CDS sequence (wt) from hemagglutinin__InfluenzaA__AEO01447
augaaggcaauacuaguaguucugcuauauacauuugcuaccgcaaaugcagacacauuauguauagguuaucaugcgaacaauucaacagacacuguagacacaguacuagaaaagaauguaacaguaacacacucuguuaaccuucuagaagacaagcauaacgggaaacuaugcaaacuaagagggguagccccauugcauuuggguaaaugcaacauugcuggcuggauccugggaaauccagagugugaaucacucuccacagcaagcucaugguccuacauuguagaaacaucuaguucagacaauggaacguguuacccaggagauuucaucgauuaugaggagcuaagagagcaauugagcucagugucaucauuugaaagguuugagauauuccccaagacaaguucauggcccaaucaugacucgaacaaagguguaacggcagcauguccucaugcuggagcaaaaagcuucuacaaaaauuuaauauggcuaguuaaaaaaggaaauucauacccaaagcucagcaaauccuacauuaaugauaaagggaaagaaguccucgugcuauggggcauucaccauccaucuacuagugcugaccaacaaagucucuaucagaaugcagaugcauauguuuuuguggggacaucaagauacagcaagaaguucaagccggaaauagcaauaagacccaaagugagggaucaagaagggagaaugaacuauuacuggacacuaguagagccgggagacaaaauaacauucgaagcaacuggaaaucuagugguaccgagauaugcauucgcaauggaaagaaaugcuggaucugguauuaucauuucagauacaccaguccacgauugcaauacaacuugucagacacccaagggugcuauaaacaccagccucccauuucagaauauacauccgaucacaauuggaaaauguccaaaauauguaaaaagcacaaaauugagacuggccacaggauugaggaaugucccgucuauucaaucuagaggccuauuuggggccauugccgguuucauugaagggggguggacagggaugguagauggaugguacgguuaucaccaucaaaaugagcaggggucaggauaugcagccgaccugaagagcacacagaaugccauugacgagauuacuaacaaaguaaauucuguuauugaaaagaugaauacacaguucacagcaguagguaaagaguucaaccaccuggaaaaaagaauagagaauuuaaauaaaaaaguugaugaugguuuccuggacauuuggacuuacaaugccgaauuguugguucuauuggaaaaugaaagaacuuuggacuaccacgauucaaaugugaagaacuuauaugaaaagguaagaagccaguuaaaaaacaaugccaaggaaauuggaaacggcugcuuugaauuuuaccacaaaugcgauaacacgugcauggaaagugucaaaaaugggacuuaugacuacccaaaauacucagaggaagcaaaauuaaacagagaagaaauagaugggguaaagcuggaaucaacaaggauuuaccagauuuuggcgaucuauucaacuaucgccaguucauugguacugguagucucccugggggcaaucaguuucuggaugugcucuaaugggucucuacaguguagaauauguauuuaa

SEQ ID NO: 39542 - RNA, 1701 nt, Artificial Sequence
  derived and/or modified CDS sequence (wt) from hemagglutinin__InfluenzaA__AEO01448
augaaggcaauacuaguaguucugcuauauacauuugcaaccgcaaaugcagacacauuauguauagguuaucaugcgaacaauucaacagacacuguagacacagugcuagaaaagaauguaacaguaacacacucuguuaaccuucuagaagacaagcauaacgggaaacuaugcaaacuaagagggguagccccauugcauuuggguaaauguaacauugcuggcuggauccugggaaauccagagugugaaucacucuccacagcaagcucaugguccuacauuguggaaacaucuaguucagacaauggaacguguuacccaggagauuucaucgauuaugaggagcuaagagagcaauugagcucagugucaucauuugaaagguuugagauauuccccaagacaaguucauggcccaaucaugacucgaacaaagguguaacggcagcauguccucaugcuggagcaaaaagcuucuacaaaaauuuaauauggcuaguuaaaaaaggaaauucauacccaaagcucagcaaauccuacauuaaugauaaagggaaagaaguccucgugcuauggggcauucaccauccaucuacuagugcugaccaacaaagucucuaucagaaugcagaugcauauguuuuuguggggacaucaagauacagcaagaaguucaagccggaaauagcaauaagacccaaagugagggaacaagaagggagaaugaacuauuacuggacacuaguagagccgggagacaaaauaacauucgaagcaacuggaaaucuagugguaccgagauaugcauucgcaauggaaagaaaugcuggaucugguauuaucauuucagauacaccaguccacgauugcaauacaacuugucagacacccaagggugcuauaaacaccagccucccauuucagaauauacauccgaucacaauuggaaaauguccaaaauauguaaaaagcacaaaauugagacuggccacaggauugaggaaugucccgucuauucaaucuagaggccuauuuggggccauugccgguuucauugaagggggguggacagggaugguagauggaugguacgguuaucaccaucaaaaugagcaggggucaggauaugcagccgaccugaagagcacacagaaugccauugacgagauuacuaacaaaguaaauucuguuauugaaaagaugaauacacaguucacagcaguagguaaagaguucaaccaccuggaaaaaagaauagagaauuuaaauaaaaaaguugaugaugguuuccuggacauuuggacuuacaaugccgaacuguugguucuacuggaaaaugaaagaacuuuggacuaccacgauucaaaugugaagaacuuauaugaaaagguaagaagccaguuaaaaaacaaugccaaggaaauuggaaacggcugcuuugaauuuuaccacaaaugcgauaacacgugcauggaaagugucaaaaaugggacuuaugacuacccaaaauacucagaggaagcaaaauuaaacagagaagaaauagaugggguaaagcuggaaucaacaaggauuuaccagauuuuggcgaucuauucaacugucgccaguucauugguacugguagucucccugggggcaaucaguuucuggaugugcucuaaugggucucuacaguguagaauauguauuuaa

SEQ ID NO: 39543 - RNA, 1701 nt, Artificial Sequence; identical to SEQ ID NO: 39521
  derived and/or modified CDS sequence (wt) from hemagglutinin__InfluenzaA__AEO01449

SEQ ID NO: 39544 - RNA, 1701 nt, Artificial Sequence
  derived and/or modified CDS sequence (wt) from hemagglutinin__InfluenzaA__AEO01450
augaaggcaauacuaguaguucugcuauauacauuugcaaccgcaaaugcagacacauuauguauagguuaucaugcgaacaauucaacagacacuguagacacaguacuagaaaagaauguaacaguaacacacucuguuaaccuucuagaagacaagcauaacgggaaacuaugcaaacuaagagggguagccccauugcauuuggguaaaugcaacauugcuggcuggauccugggaaauccagagugugaaucacucuccacagcaagcucaugguccuacauuguggaaacaucuaguucagacaauggaacguguuacccaggagauuucaucgauuaugaggagcuaagagagcaauugagcucagugucaucauuugaaagguuugagauauuccccaagacaaguucauggcccaaucaugacucgaacaaagguguaacggcagcauguccucaugcuggagcaaaaagcuucuacaaaaauuuaauauggcuaguuaaaaaaggaaauucauacccaaagcucagcaaauccuacauuaaugauaaagggaaagaaguccucgugcuauggggaauucaccauccaucuacuaguacugaccaacaaagucucuaucagaaugcagaugcauauguuuuuguggggacaucaagauacagcaagaaguucaagccggaaauagcaauaagacccaaagugagggaucaagaagggagaaugaacuauuacuggacacuaguagagccgggagacaaaauaacauucgaagcaacuggaaaucuagugguaccgagauaugcauucgcaauggaaagaaaugcuggaucugguauuaucauuucagauacaccaguccacgauugcaauacaacuugucagacacccaagggugcuauaaacaccagccucccauuucagaauauacauccgaucacaauuggaaaauguccaaaauauguaaaaagcacaaaauugagacuggccacaggauugaggaaugucccgucuauucaaucuagaggccuauuuggggccauugccgguuucauugaagggggguggacagggaugguagauggaugguacgguuaucaccaucaaaaugagcaggggucaggauaugcagccgaccugaagagcacacagcaugccauugacgagauuacuaacaaaguaaauucuguuauugaaaagaugaauacacaguucacagcaguagguaaagaguucaaccaccuggaaaaaagaauagagaauuuaaauaaaaaaguugaugaugguuuccuggacauuuggacuuacaaugccgaacuguugguucuauuggaaaaugaaagaacuuuggacuaccacgauucaaaugugaagaacuuauaugaaaagguaagaagccaguuaaaaaacaaugccaaggaaauuggaaacggcugcuuugaauuuuaccacaaaugcgauaacacgugcauggaaagugucaaaaaugggacuuaugacuacccaaaauacucagaggaagcaaaauuaaacagagaagaaauagaugggguaaagcuggaaucaacaaggauuuaccagauuuuggcgaucuauucaacugucgccaguucauugguacugguagucucccugggggcaaucaguuucuggaugugcucuaaugggucucuacaauguagaauauguauuuaa

SEQ ID NO: 39545 - RNA, 1701 nt, Artificial Sequence; identical to SEQ ID NO: 36870
  derived and/or modified CDS sequence (wt) from hemagglutinin__InfluenzaA__AEO01451

SEQ ID NO: 39546 - RNA, 1701 nt, Artificial Sequence
  derived and/or modified CDS sequence (wt) from hemagglutinin__InfluenzaA__AEO01452
augaaggcaauacuaguaguucugcuauauacauuugcaaccgcaaaugcagacacauuauguauagguuaucaugcgaacaauucaacagacacuguagacacaguacuagaaaagaauguaacaguaacacacucuguuaaccuucuagaagacaagcauaacgggaaacuaugcaaacuaagagggguagccccauugcauuuggguaaauguaacauugcuggcuggauccugggaaauccagagugugaaucacucuccacagcaagcucaugguccuacauuguggaaacaucuaguucagacaauggaacguguuacccaggagauuucaucgauuaugaggagcuaagagagcaauugagcucagugucaucauuugaaagguuugagauauuccccaagacaaguucauggcccaaucaugacucgaacaaagguguaacggcagcaugcccucaugcugaagcaaaaagcuucuacaaaaauuuaauauggcuaguuaaaaaaggaaauucauacccaaagcucagcaaauccuacauuaaugauaaagggaaagaaguccucgugcuauggggcauucaccauccaucuacuagugcugaccaacaaagucucuaucagaaugcagaugcauauguuuuugugggaacaucaagauacagcaagaaguucaagccggaaauagcaauaagacccaaagugagggaucaagaagggagaaugaacuauuacuggacacuaguagagccgggagacaaaauaacauucgaagcaacuggaaaucuagugguaccgagauaugcauucgcaauggaaagaaaugcuggaucugguauuaucauuucagauacaccagcccacgauugcaauacaacuugucagacacccaagggugcuauaaacaccagccucccauuucagaauauacauccgaucacaauuggaaaauguccaaaauauguaaaaagcacaaaauugagacuggccacaggauugaggaaugucccgucuauucaaucuagaggccuauuuggggccauugccgguuucauugaagggggguggacagggaugguagauggaugguacgguuaucaccaucaaaaugagcaggggucaggauaugcagccgaccugaagagcacacagaaugccauugacgagauuacuaacaaaguaaauucuguuauugaaaagaugaauacacaguucacagcaguagguaaagaguucaaccaccuggaaaaaagaauagagaauuuaaauaaaaaaguugaugaugguuuccuggacauuuggacuuacaaugccgaacuguugguucuauuggaaaaugaaagaacuuuggacuaccacgauucaaaugugaagaaauuauaugaaaagguaagaagccaguuaaaaaacaaugccaaggaaauuggaaacggcugcuuugaauuuuaccacaaaugcgauaacacgugcauggaaagugucaaaaaugggacuuaugacuacccaaaauacucagaggaagcaaaauuaaacagagaagaaauagauggaguaaagcuggaaucaacaaggauuuaccagauuuuggcgaucuauucaacugucgccaguucauugguacugguagucucccugggggcaaucaguuucuggaugugcucuaaugggucucuacaguguagaauauguauuuaa

SEQ ID NO: 39547 - RNA, 1701 nt, Artificial Sequence
  derived and/or modified CDS sequence (wt) from hemagglutinin__InfluenzaA__AEO01453
augaaggcaauacuaguaguucugcuauauacauuugcaaucgcaaaugcagacacauuauguauagguuaucaugcgaacaauucaacagacacuguagacacaguacuagaaaagaauguaacaguaacacacucuguuaaccuucuagaagacaagcauaacgggaaacuaugcaaacuaagagggguagccccauugcauuuggguaaauguaacauugcuggcuggauccugggaaauccagagugugaaucacucuccacagcaagcucaugguccuacauuguggaaacauccaguucagacaauggaacguguuacccaggagauuucaucgauuaugaggagcuaagagagcaauugagcucagugucaucauuugaaagguuugagauauuccccaagacaaguucauggcccaaucaugacucgaacaaagguguaacggcagcauguccucaugcuggagcaaaaagcuucuacaaaaauuuaauauggcuaguuaaaaaaggaaauucauacccaaagcucagcaaauccuacauuaaugauaaagggaaagaaguccucgugcuauggggaguucaccauccaucuacuagugcugaccaacaaagucucuaucagaaugcagaugcauauguuuuuguggggacaucaagauacagcaagaaguucaagcgggaaauagcaauaagacccaaagugagggaucaagaagggagaaugaacuauuacuggacacuaguagagccgggagacaaaauaacauucgaagcaacuggaaaucuagugguaccgagauaugcauucgcaauggaaagaaaugcuggaucugguauuaucauuucagauacaccaguccacgauugcaauacaacuugucagacacccaagggugcuauaaacaccagccucccauuucagaauauacauccgaucacaauuggaaaauguccaaaauauguaaaaagcacaaaauugagacuggccacaggauugaggaaugucccgucuauucaaucuagaggccuauuuggggccauugccgguuucauugaagggggguggacagggaugguagauggaugguacgguuaucaccaucaaaaugagcaggggucaggauaugcagccgaccugaagagcacacagcaugccauugacgagauuacuaacaaaguaaauucuguuauugaaaagaugaauacacaguucacagcaguagguaaagaguucaaccaccuggaaaaaagaauagagaauuuaaauaaaaaaguugaugaugguuuccuggacauuuggacuuacaaugccgaacuguugguucuauuggaaaaugaaagaacuuuggacuaccacgauucaaaugugaagaacuuauaugaaaagguaagaagccaguuaaaaaacaaugccaaggaaauuggaaacggcugcuuugaauuuuaccacaaaugcgauaacacgugcauggaaagugucaaaaaugggacuuaugacuacccaaaauacucagaggaagcaaaauuaaacagagaagaaauaaaugggguaaagcuggaaucaacaaggauuuaccagauuuuggcgaucuauucaacugucgccaguucauugguacugguagucucccugggggcaaucaguuucuggaugugcucuaaugggucucuacaguguagaauauguauuuaa

SEQ ID NO: 39548 - RNA, 1701 nt, Artificial Sequence
  derived and/or modified CDS sequence (wt) from hemagglutinin__InfluenzaA__AEO01454
augaaggcaauacuaguaguucugcuauauacauuugcaaccgcaaaugcagacacauuauguauagguuaucaugcgaacaauucaacagacacuguagacacaguacuagaaaagaauguaacaguaacacacucuguuaacauucuagaagacaagcauaacgggaaacuaugcaaacuaagagggguagccccauugcauuuggguaaauguaacauugcuggcuggauccugggaaauccagagugugaaucacucuccacagcaagcucauggucauacauuguggaaacaucuaguucagacaauggaacguguuacccaggagauuucaucgauuaugaggagcuaagagagcaauugagcucagugucaucauuugaaagguuugagauauuccccaagacaaguucauggcccaaucaugacucgaacaaagguguaacggcagcauguccucaugcuggagcaaaaagcuucuacaaaaauuuaauauggcuaguuaaaaaaggaaauucauacccaaagcucagcaaauccuacauuaaugauaaagggaaagaaguccucgugcuauggggcauucaccauccaucuacuagugcugaccaacaaagucucuaucagaaugcagaugcauauguuuuuguggggacaucaagauacagcaagaaguucaagccggaaauagcaauaagacccaaagugagggaucaagaagggagaaugaacuauuacuggacacuaguagagccgggagacaaaauaacauucgaagcaacuggaaaucuagugguaccgagauaugcauucgcaauggaaagaaaugcuggaucugguauuaucauuucagauacaccaguccacgauugcaauacaacuugucagacacccaagggugcuauaaacaccagccucccauuucagaauauacauccgaccacaauuggaaaauguccaaaauauguaaaaagcacaaaauugagacuggccacaggauugaggaaugucccgucuauucaaucuagaggccuauuuggggccauugccgguuucauugaagggggguggacagggaugguagauggaugguacgguuaucaccaucaaaaugagcaggggucaggauaugcagccgaccugaagagcacacagaaugccauugacgagauuacuaacaaaguaaauucuguuauugaaaagaugaauacacaguucacagcaguagguaaagaguucaaccaccuggaaaaaagaauagagaauuuaaauaaaaaaguugaugaugguuuccuggacauuuggacuuacaaugccgaacuguugguucuauuggaaaaugaaagaacuuuggacuaccacgauucaaaugugaagaacuuauaugaaaagguaagaagccaguuaaaaaacaaugccaaggaaauuggaaacggcugcuuugaauuuuaccacaaaugcgauaacacgugcauggaaagugucaaaaaugggacuuaugacuaccccaaauacucagaggaagcaaaauuaaacagagaagaaauagaugggguaaagcuggaaucaacaaggauuuaccagauuuuggcgaucuauucaacugucgccaguucauugguacugguagucucccugggggcaaucaguuucuggaugugcucuaaugggucucuacaguguagaauauguauuuaa

SEQ ID NO: 39549 - RNA, 1701 nt, Artificial Sequence
  derived and/or modified CDS sequence (wt) from hemagglutinin__InfluenzaA__AEO01455
augaaggcaauacuaguaguucugcuauauacauuugcaaccgcaaaugcagacacauuauguauagguuaucaugcgaacaauucaacagacacuguagacacaguacuagaaaagaauguaacaguaacacacucuguuaaccuucuagaagacaagcauaacgggaaacuaugcaaacuaagagggguagccccauugcauuuggguaaauguaacauugcuggcuggauccugggaaauccagagugugaaucacucuccacagcaagcucaugguccuacauuguggaaacaucuaguucagacaauggaacguguuacccaggagauuucaucgauuaugaggagcuaagagagcaauugagcucagugucaucauuugaaagguuugagauauuccccaagacaaguucauggcccaaucaugacucgaacaaagguguaacggcagcauguccucaugcgggagcaaaaagcuucuacaaaaauuuaauauggcuaguuaaaaaaggaaauucauacccaaagcucagcaaauccuacauuaaugauaaagggaaagaaguccucgugcuauggggcauucaccauccaucuacuagugcugaccaacaaagucucuaucagaaugcagaugcauauguuuuuguggggacaucaagauacagcaagaaguucaagccggaaauagcaauaagacccaaagugagggaacaagaagggagaaugaacuauuacuggacacuaguagagccgggagacaaaauaacauucgaagcaacuggaaaucuagugguaccgagauaugcauucgcaauggaaagaaaugcuggaucugguauuaucauuucagauacaccaguccacgauugcaauacaacuugucagacacccaagggugcuauaaacaccagccucccauuucagaauauacauccgaucacaauuggaaaauguccaaaauauguaaaaagcacaaaauugagacuggccacaggauugaggaauaucccgucuauucaaucuagaggccuauuuggggccauugccgguuucauugaagggggguggacagggaugguagauggaugguacgguuaucaccaucaaaaugagcagggaucaggauaugcagccgaccugaagagcacacagaaugccauugacgagauuacuaacaaaguaaauucuguuauugaaaagaugaauacacaguucacagcaguagguaaagaguucaaccaccuggaaaaaagaauagagaauuuaaauaaaaaaguugaugaugguuuccuggacauuuggacuuacaaugccgaacuguugguucuauuggaaaaugaaagaacuuuggacuaccacgauucaaaugugaagaacuuauaugaaaagguaagaagccaguuaaaaaacaaugccaaggaaauuggaaacggcugcuuugaauuuuaccacaaaugcgauaacacgugcauggaaagugucaaaaaugggacuuaugacuacccaaaauacucagaggaagcaaaauuaaacagagaagaaauagaugggguaaagcuggaaucaacaaggauuuaccagauuuuggcgaucuauucaacugucgccaguucauugguacugguagucucccugggggcaaucaguuucuggaugugcucuaaugggucucuacaguguagaauauguauuuaa

SEQ ID NO: 39550 - RNA, 1701 nt, Artificial Sequence
  derived and/or modified CDS sequence (wt) from hemagglutinin__InfluenzaA__AEO01456
augaaggcaauacuaauaguucugcuauauacauuugcaaccgcaaaugcagacacauuauguauagguuaucaugcgaacaauucaacagacacuguagacacauuacuagaaaagaauguaacaguaacacacucuguuaaccuucuagaagacaagcauaacgggaagcuaugcaaacuaagagggguagccccauugcauuuggguaaauguaacauugcuggcuggauccugggaaauccagagugugaaucacucuccacagcaagcucaugguccuacauuguggaaacaucuaguucagacaauggaacguguuacccaggagauuucaucgauuaugaggagcuaagagagcaauugagcucagugucaucauuugaaagguuugagauauuucccaagacaaguucauggcccaaucaugacucgaacaaagguguaacggcagcauguccucaugcuggagcaaaaagcuucuacaaaaauuuaauauggcuaguuaaaaaaggaaauucauacccaaagcucagcaaauccuacauuaaugauaaagggaaagaaguccucgugcuauggggcauucaccauccaucuacuagugcugaccaacaaagucucuaucagaaugcagaugcauauguuuuuguggggacaucaagauacagcaagaaguucaagccggaaauagcaauaagacccaaagugagggaucaagaagggagaaugaacuauuacuggacacuaguagagccgggagacaaaauaacauuugaagcaacuggaaaucuagugguaccgagauaugcauucgcaauggacagaaaugcuggaucugguauuaucauuucagaugcaccaguccacgauugcaauacaacuugucagacacccaagggugcuauaaacaccagccucccauuucagaauauacauccgaucacaauuggaaaauguccaaaauauguaaaaagcacaaaauugagacuggccacgggauugaggaaugucccgucuauucaaucuagaggccuauuuggggccauugccgguuucauugaagggggguggacagggaugguagauggaugguacgguuaucaccaucaaaaugagcaggggucaggauaugcagccgaccugaagagcacacagaaugccauugacgagauuacuaacaaaguaaauucuguuauugaaaagaugaauacacaauucacagcaguagguaaagaguucaaccaccuggaaaaaagaauagagaauuuaaauaaaaaaguugaugaugguuuccuggacauuuggacuuacaaugccgaacuguugguucuauuggaaaaugaaagaacuuuggacuaccacgauucaaaugugaagaacuuauaugaaaagguaagaagccaguuaaaaaacaaugccaaggaaauuggaaacggcugcuuugaauuuuaccacaaaugcgauaacacgugcauggaaagugucaaaaaugggacuuaugauuacccaaaauacucagaggaagcaaaauuaaacagagaagaaauagaugggguaaagcuggaaucaacaaggauuuaccagauuuuggcgaucuauucaacugucgccaguucauugguacugguagucucccugggggcaaucaguuucuggaugugcucuaaugggucucuacaguguagaauauguauuuaa

SEQ ID NO: 39551 - RNA, 1701 nt, Artificial Sequence; identical to SEQ ID NO: 39450
  derived and/or modified CDS sequence (wt) from hemagglutinin__InfluenzaA__AEO01457

SEQ ID NO: 39552 - RNA, 1701 nt, Artificial Sequence
  derived and/or modified CDS sequence (wt) from hemagglutinin__InfluenzaA__AEO01458
augaaggcaauacuaguaguucugcuauauacauuugcaaccgcaaaugcagacacauuauguauagguuaucaugcgaacaauucaacagacacuguagacacaguacuagaaaagaauguaacaguaacacacucuguuaaccuucuagaagacaagcauaacgggaaacuaugcaaacuaagagggguagccccauugcauuuggguaaauguaacauugcuggcuggauccugggaaauccagagugugaaucacucuccacagcaagcucaugguccuacauuguggaaacaucuaauucagacaauggaacguguuacccaggagauuucaucgauuaugaggagcuaagagagcaauugagcucagugucaucauuugaaagguuugagauauuccccaagacaaguucauggcccaaucaugacucgaacaaagguguaacggcagcauguccucaugcuggagcaaaaagcuucuacaaaaauuuaauauggcuaguuaaaaaaggaaauucauacccaaagcucagcaaauccuacauuaaugauaaagggaaagaaguccucgugcuauggggcauucaccauccaucuacuagugcugaccaacaaagucucuaucagaaugcagaugcauauguuuuuguggggacaucaagauacagcaagaaguucaagccggaaauagcaauaagacccaaagugagggaucaagaagggagaaugaacuauuacuggacacuaguagagccgggagacaaaauaacauucgaagcaacuggaaaucuagugguaccgagauaugcauucgcaauggaaagaaaugcuggaucugguauuaucauuucagauacaccaguccacgauugcaauacaacuugucagacacccaagggugcuauaaacaccagccucccauuucagaacauacauccgaucacaauuggaaaauguccaaaauauguaaaaagcacaaaauugagacuggccacaggauugaggaaugucccgucuauucaaucuagaggccuauuuggggccauugccgguuucauugaagggggguggacagggaugguagauggaugguacgguuaucaccaucaaaaugagcaggggucaggauaugcagccgaccugaagagcacacagaaugccauugacaagauuacuaacaaaguaaauucuguuauugaaaagaugaauacacaguucacagcaguagguaaagaguucaaccaccuggaaaaaagaauagagaauuuaaauaaaaaaguugaugaugguuuccuggacauuuggacuuacaaugccgaacuguugguucuauuggaaaaugaaagaacuuuggacuaccacgauucaaaugugaagaacuuauaugaaaagguaagaagccaguuaaaaaacaaugccaaggaaauuggaaacggcugcuuugaauuuuaccacaagugcgauaacacgugcauggaaagugucaaaaaugggacuuaugacuacccaaaauacucagaggaagcaaaauuaaacagagaagaaauagaugggguaaagcuggaaucaacaaggauuuaccagauuuuggcgaucuauucaacugucgccaguucauugguacugguagucucccugggggcaaucaguuucuggaugugcucuaaugggucucuacaguguagaauauguauuuaa

SEQ ID NO: 39553 - RNA, 1701 nt, Artificial Sequence
  derived and/or modified CDS sequence (wt) from hemagglutinin__InfluenzaA__AEO01459
augaaggcaauacuaguaguucugcuauauacauuugcaaccgcaaaugcagacacauuauguauagguuaucaugcgaacaauucaacagacacuguagacacaguacuagaaaagaauguaacaguaacacacucuguuaaccuucuagaagacaagcauaacgggaaacuaugcaaacuaagagggguagccccauugcauuuggguaaauguaacauugcuggcuggauccugggaaauccagagugugaaucacucuccacagcaagcucaugguccuacauuguggaaacaucuaauucagacaauggaacguguuacccaggagauuucaucgauuaugaggagcuaagagagcaauugagcucagugucaucauuugaaagguuugagauauuccccaagacaaguucauggcccaaucaugacucgaacaaagguguaacggcagcauguccucaugcuggagcaaaaagcuucuacaaaaauuuaauauggcuaguuaaaaaaggaaauucauacccaaagcucagcaaauccuacauuaaugauaaagggaaagaaguccucgugcuauggggcauucaccauccaucuacuagugcugaccaacaaagucucuaucagaaugcagaugcauauguuuuuguggggacaucaagauacagcaagaaguucaagccggaaauagcaauaagacccaaagugagggaucaagaagggagaaugaacuauuacuggacacuaguagagccgggagacaaaauaacauucgaagcaacuggaaaucuagugguaccgagauaugcauucgcaauggaaagaaaugcuggaucugguauuaucauuucagauacaccaguccacgauugcaauacaacuugucagacacccaagggugcuauaaacaccagccucccauuucagaauauacauccgaucacaauuggaaaauguccaaaauauguaaaaagcacaaaauugagacuggccacaggauugaggaaugucccgucuauucaaucuagaggccuauuuggggccauugccgguuucauugaagggggguggacagggaugguagauggaugguacgguuaucaccaucaaaaugagcaggggucaggauaugcagccgaccugaagagcacacagaaugccauugacaagauuacuaacaaaguaaauucuguuauugaaaagaugaauacacaguucacagcaguagguaaagaguucaaccaccuggaaaaaagaauagagaauuuaaauaaaaaaguugaugaugguuuccuggacauuuggacuuacaaugccgaacuguugguucuauuggaaaaugaaagaacuuuggacuaccacgauucaaaugugaagaacuuauaugaaaagguaagaagccaguuaaaaaacaaugccaaggaaauuggaaacggcugcuuugaauuuuaccacaaaugcgauaacacgugcauggaaagugucaaaaaugggacuuaugacuacccaaaauacucagaggaagcaaaauuaaacagagaagaaauagaugggguaaagcuggaaucaacaaggauuuaccagauuuuggcgaucuauucaacugucgccaguucauugguacugguagucucccugggggcaaucagcuucuggaugugcucuaaugggucucuacaguguagaauauguauuuaa

SEQ ID NO: 39554 - RNA, 1701 nt, Artificial Sequence
  derived and/or modified CDS sequence (wt) from hemagglutinin__InfluenzaA__AEO01461
augaaggcaauacuaguaguucugcuauauacauuugcaaccgcaaaugcagacacauuauguauagguuaucaugcgaacaauucaacagacacuguagacacaguacuagaaaagaauguaacaguaacacacucuguuaaccuucuagaagacaagcauaacgggaaacuaugcaaacuaagagggguagccccauugcauuuggguaaauguaacauugcuggcuggauccugggaaauccagagugugaaucacucuccacagcaagcucaugguccuacauuguggaaacaucuaguucagacaauggaacguguuacccaggagauuucaucgauuaugaggagcuaagagagcaauugagcucagugucaucauuugaaagguuugagauauuccccaagacaaguucauggcccaaucaugacucgaacaaagguguaacggcagcauguccucaugcuggagcaaaaagcuucuacaaaaauuuaauauggcuaguuaaaaaaggaaauucauacccaaagcucagcaaauccuacauuaaugauaaagggaaagaaguccucgugcuauggggaauucaccauccaucuacuagugcugaccaacaaagucucuaucagaaugcagaugcauauguuuuuguggggacaucaagauacagcaagaaguucaagccggaaauagcaauaagacccaaagugagggaucaagaagggagaaugaacuauuacuggacacuaguagagccgggagacaaaauaacauucgaagcaacuggaaaucuagugguaccgagauaugcauucgcaauggaaagaaaugcuggaucugguauuaucauuucagauacaccaguccacgauugcaauacaacuugucagacacccaagggugcuauaaacacuagccucccauuucagaauauacauccgaucacaauuggaaaauguccaaaauauguaaaaagcacaaaauugagacuggccacaggauugaggaaugucccgucuauucaaucuagaggccuauuuggggccauugccgguuucauugaagggggguggacagggaugguagauggaugguacgguuaucaccaucaaaaugagcaggggucaggauaugcagccgaccugaagagcacacagcaugccauugacgagauuacuaacaaaguaaauucuguuauugaaaagaugaauacacaguucacagcaguagguaaagaguucaaccaccuggaaaaaagaauagagaauuuaaauaaaaaaguugaugaugguuuccuggacauuuggacuuacaaugccgaacuguugguucuauuggaaaaugaaagaacuuuggacuaccacgauucaaaugugaagaacuuauaugaaaagguaagaagccaguuaaaaaacaaugccaaggaaauuggaaacggcugcuuugaauuuuaccacaaaugcgauaacacgugcauggaaagugucaaaaaugggacuuaugacuacccaaaauacucagaggaagcaaaauuaaacagagaagaaauagaugggguaaagcuggaaucaacaaggauuuaccagauuuuggcgaucuauucaacugucgccaguucauugguacugguagucucccugggggcaaucaguuucuggaugugcucuaaugggucucuacaguguagaauaugcauuuaa

SEQ ID NO: 39555 - RNA, 1701 nt, Artificial Sequence; identical to SEQ ID NO: 39391
  derived and/or modified CDS sequence (wt) from hemagglutinin__InfluenzaA__AEO01462

SEQ ID NO: 39556 - RNA, 1701 nt, Artificial Sequence
  derived and/or modified CDS sequence (wt) from hemagglutinin__InfluenzaA__AEO01463
augaaggcaauacuaguaguucugcuauauacauuugcaaccgcaaaugcagacacauuauguauagguuaucaugcgaacaauucaacagacacuguagacacaguacuagaaaagaauguaacaguaacacacucuguuaaccuucuagaagacaagcauaacgggaaacuaugcaaacuaagagggguagccccauugcauuuggguaaauguaacauugcuggcuggauccugggaaauccagagugugaaucacucuccacagcaagcucaugguccuacauuguggaaacaucuaguucagacaauggaacguguuacccgggagauuucaucgauuaugaggagcuaagagagcaauugagcucagugucaucauuugaaagguuugagauauuccccaagacaaguucauggcccaaucaugacucgaacaaagguguaacggcagcauguccucaugcuggagcaaaaagcuucuacaaaaauuuaauauggcuaguuaaaaaaggaaauucauacccaaagcucagcaaauccuacauuaaugauaaagggaaagaaguccucgugcuauggggcauucaccauccaucuacuagugcugaccaacaaagucucuaucagaaugcagaugcauauguuuuuguggggacaucaagauacagcaagaaguucaagccggaaauagcaauaagacccaaagugagggaacaagaagggagaaugaacuauuacuggacacuaguagagccgggagacaaaauaacauucgaagcaacuggaaaucuagugguaccgagauaugcauucgcaauggaaagaaaugcuggaucugguauuaucauuucagauacaccaguccaugauugcaauacaacuugucagacacccaagggugcuauaaacaccagccucccauuucagaauauacauccgaucacaauuggaaaauguccaaaauauguaaaaagcacaaaauugagacuggccacaggauugaggaaugucccgucuauucaaucuagaggccuauuuggggccauugccgguuucauugaagggggguggacagggaugguagauggaugguacgguuaucaccaucaaaaugagcaggggucaggauaugcagccgaccugaagagcacacagaaugccauugacgagauuacuaacaaaguaaauucuguuauugaaaagaugaauacacaguucacagcaguagguaaagaguucaaccaccuggaaaaaagaauagagaauuuaaauaaaaaaguugaugaugguuuccuggacauuuggacuuacaaugccgaacuguugguucuauuggaaaaugaaagaacuuuggacuaccacgauucaaaugugaaaaacuuauaugaaaagguaagaagccaguuaaaaaacaaugccaaggaaauuggaaacggcugcuuugaauuuuaccacaaaugcgauaacacgugcauggaaagugucaaaaaugggacuuaugacuacccaaaauacucagaggaagcaaaauuaaacagagaagaaauagaugggguaaagcuggaaucaacaaggauuuaccagauuuuggcgaucuauucaacugucgccaguucauugguacugguagucucccugggggcaaucaguuucuggaugugcucuaaugggucucuacaguguagaauauguauuuaa

SEQ ID NO: 39557 - RNA, 1701 nt, Artificial Sequence
  derived and/or modified CDS sequence (wt) from hemagglutinin__InfluenzaA__AEO01464
augaaggcaauacuaguaguucugcuauauacauuugcaaccgcaaaugcagacacauuauguauagguuaucaugcgaacaauucaacagacacuguagacacauuacuagaaaagaauguaacaguaacacacucuguuaaccuucuagaagacaagcauaacgggaagcuaugcaaacuaagagggguagccccauugcauuuggguaaauguaacauugcuggcuggauccugggaaauccagagugugaaucacucuccacagcaagcucaugguccuacauuguggaaacaucuaguucagacaauggaacguguuacccaggagauuucaucgauuaugaggagcuaagagagcaauugagcucagugucaucauuugaaagguuugagauauuccccaagacaaguucauggcccaaucaugacucgaacaaagguguaacggcagcauguccucaugcuggagcaaaaagcuucuacaaaaauuuaauauggcuaguuaaaaaaggaaauucauacccaaagcucagcaaauccuacauuaaugauaaagggaaagaaguccucgugcuauggggcauucaccauccaucuacuagugcugaccaacaaagucucuaucagaaugcagaugcauauguuuuuguggggacaucaagauacagcaagaaguucaagccggaaauagcaauaagacccaaggugagggaucaagaagggagaaugaacuauuacuggacauuaguagagccgggagacaaaauaacauucgaagcaacuggaaaucuagugguaccgagauaugcauucgcaauggacagaaaugcuggaucugguauuaucauuucagauacaucaguccacgauugcaauacaacuugucagacacccaagggugcuauaaacaccagccucccauuucagaauauacauccgaucacaauuggaaaauguccaaaauauguaaaaagcacaaaauugagacuggccacaggauugaggaaugucccgucuauucaaucuagaggccuauuuggggccauugccgguuucauugaagggggguggacagggaugguagauggaugguacgguuaucaccaucaaaaugagcaggggucaggauaugcagccgaccugaagagcacacagaaugccauugacgagauuacuaacaaaguaaauucuguuauugaaaagaugaauacacaauucacagcaguagguaaagaguucaaccaccuggaaaaaagaauagagaauuuaaauaaaaaaguugaugaugguuuccuggacauuuggacuuacaaugccgaacuguugguucuauuggaaaaugaaagaacuuuggacuaccacgauucaaaugugaagaacuuauaugaaaagguaagaagccaguuaaaaaacaaugccaaggaaauuggaaacggcugcuuugaauuuuaccacaaaugcgauaacacgugcauggaaagugucaaaaaugggacuuaugauuacccaaaauacucagaggaagcaaaauuaaacagagaagaaauagaugggguaaagcuggaaucaacaaggauuuaccagauuuuggcgaucuauucaacugucgccaguucauugguacugguagucucccugggggcaaucaguuucuggaugugcucuaaugggucucuacaguguagaauauguauuuaa

SEQ ID NO: 39558 - RNA, 1701 nt, Artificial Sequence; identical to SEQ ID NO: 39537
  derived and/or modified CDS sequence (wt) from hemagglutinin__InfluenzaA__AEO01465

SEQ ID NO: 39559 - RNA, 1701 nt, Artificial Sequence; identical to SEQ ID NO: 36570
  derived and/or modified CDS sequence (wt) from hemagglutinin__InfluenzaA__AEO01466

SEQ ID NO: 39560 - RNA, 1701 nt, Artificial Sequence; identical to SEQ ID NO: 39463
  derived and/or modified CDS sequence (wt) from hemagglutinin__InfluenzaA__AEO01467

SEQ ID NO: 39561 - RNA, 1701 nt, Artificial Sequence
  derived and/or modified CDS sequence (wt) from hemagglutinin__InfluenzaA__AEO01468
augaaggcaauacuaguaguucugcuauauacauuugcaaccgcaaaugcagacacauuauguauagguuaucaugcgaacaauucaacagacacuguagacacaguacuagaaaagaauguaacaguaacacacucuguuaaccuucuagaagacaagcauaacgggaaacuaugcaaacuaagagggguagccccauugcauuuggguaaauguaacauugcuggcuggauccugggaaauccagagugugaaucacucuccacagcaagcucaugguccuacauuguggaaacgucuaguucagacaauggaacguguuacccaggagauuucaucgauuaugaggagcuaagagagcaauugagcucagugucaucauuugaaagguuugagauauuccccaagacaaguucauggcccaaucaugacucgaacaaagguguaacggcagcauguccucaugcuggagcaaaaagcuucuacaaaaauuuaauauggcuaguuaaaaaaggaaauucauacccaaagcucagcaaauccuacauuaaugauaaagggaaagaaguccucgugcuauggggcauucaccauccaucuacuagugcugaccaacaaagucucuaucagaaugcagaugcauauguuuuuguggggacaucaagauacagcaagaaguucaagccggaaauagcaauaagacccaaagugagggaucaagaagggagaaugaacuauuacuggacacuaguagagccgggagacaaaauaacauucgaagcaacuggaaaucuagugguaccgagauaugcauucgcaauggaaagaaaugcuggaucugguauuaucauuucagauacaccaguccacgauugcaauacaacuugucagacacccaagggugcuauaaacaccagccucccauuucagaauauacauccgaucacaauuggaaaauguccaaaauauguaaaaagcacaaaauugagacuggccacaggauugaggaaugucccgucuauucaaucuagaggccuauuuggggccauugccgguuucauugaagggggguggacagggaugguagauggaugguacgguuaucaccaucaaaaugagcaggggucaggauaugcagccgaccugaagagcacacagaaugccauugacaagauuacuaacaaaguaaauucuguuauugaaaagaugaauacacaguucacagcaguagguaaagaguucaaccaccuggaaaaaagaauagagaauuuaaauaaaaagguugaugaugguuuccuggacauuuggacuuacaaugccgaacuguugguucuauuggaaaaugaaagaacuuuggacuaccacgauucaaaugugaagaacuuauaugaaaagguaagaagccaguuaaaaaacaaugccaaggaaauuggaaacggcugcuuugaauuuuaccacaaaugcgauaacacgugcauggaaagugucaaaaaugggacuuaugacuacccaaaauacucagaggaagcaaaauuaaacagagaagaaauagaugggguaaagcuggaaucaacaaggauuuaccagauuuuggcgaucuauucaacugucgccaguucauugguacugguagucucccugggggcaaucaguuucuggaugugcucuaaugggucucuacaguguagaauauguauuuaa

SEQ ID NO: 39562 - RNA, 1701 nt, Artificial Sequence
  derived and/or modified CDS sequence (wt) from hemagglutinin__InfluenzaA__AEO01469
augaaggcaauacuaguaguucugcuauauacauuugcaaccgcaaaugcagacacauuauguauagguuaucaugcgaacaauucaacagacacuguagacacaguacuagaaaagaauguaacaguaacacacucuguuaaccuucuagaagacaagcauaacgggaaacuaugcaaacuaagagggguagccccauugcauuuggguaaauguaacauugcuggcuggauccugggaaauccagagugugaaucacucuccacagcaagcucaugguccuacauuguggaaacaucuaguucagacaauggaacguguuacccaggagauuucaucgauuaugaggagcuaagagagcaauugagcucagugucaucauuugaaagguuugagauauuccccaagacaaguucauggcccaaucaugacucgaacaaagguguaacggcagcauguccucaugcuggagcaaaaagcuucuacaaaaauuuaauauggcuaguuaaaaaaggaaauucauacccaaagcucagcaaauccuacauuaaugauaaagggaaagaaguccucgugcuauggggcauucaccauccaucuacuagugcugaccaacaaagucucuaucagaaugcagaugcauauguuuuuguggggacaucaagauacagcaagaaguucaagccggaaauagcaauaagacccaaagugagggaucaagaagggagaaugaacuauuacuggacacuaguagagccgggagacaaaauaacauucgaagcaacuggaaaucuagugguaccgagauaugcauucgcaauggaaagaaaugcuggaucugguauuaucauuucagauacaccaguccacgauugcaauacaacuugucagacacccaagggugcuauaaacaccagccucccauuucagaauauacauccgaucacaauuggaaaauguccaaaauauguaaaaagcacaaaauugagacuggccacaggauugaggaaugucccgucuauucaaucuagaggccuauuuggggccauugccgguuucauugaagggggguggacagggaugguagauggaugguacgguuaucaccaucaaaaugagcaggggucaggauaugcagccgaccugaagagcacacagaaugccauugacgagauuacuaacaaaguaaauucuguuauugaaaagaugaauacacaguucacagcaguagguaaagaguucaaccaccuggaaaaaagaauagagaauuuaaauaaaaaaguugaugaugguuuccuggacauuuggacuuacaaugccgaauuguugguucuauuggaaaaugaaagaacuuuggacuaccacgauucaaaugugaagaacuuauaugaaaagguaagaagccaguuaaaaaacaaugccaaggaaauuggaaacggcugcuuugaauuuuaccacaaaugcgauaacacgugcauggaaagugucaaaaaugggacuuaugacuacccaaaauacucagaggaagcaaaauuaaacagagaagaaauagaugggguaaagcuggaaucaacaagaauuuaccagauuuuggcgaucuauucaacugucgccaguucauugguacugguagucucccugggggcaaucaguuucuggaugugcucuaauggaucucuacaguguagaauauguauuuaa

SEQ ID NO: 39563 - RNA, 1701 nt, Artificial Sequence
  derived and/or modified CDS sequence (wt) from hemagglutinin__InfluenzaA__AEO01470
augaaggcaauacuaguaguucugcuauauacauuugcaaccgcaaaugcagacacauuauguauagguuaucaugcgaacaauucaacagacacuguagacacaguacuagaaaagaauguaacaguaacacacucuguuaaccuucuagaagacaagcauaacgggaaacuaugcaaacuaagagggguagccccauugcauuuggguaaauguaacauugcuggcuggauccugggaaauccagagugugaaucacucuccacagcaagcucaugguccuacauuguggaaacaucuaguucagacaauggaacguguuacccaggagauuucaucgauuaugaggagcuaagagagcaauugagcucagugucaucauuugaaagguuugagauauuccccaagacaaguucauggcccaaucaugacucgaacaaagguguaacggcagcauguccucaugcuggagcaaaaagcuucuacaaaaauuuaauauggcuaguuaaaaaaggaaauucauacccaaagcucagcaaauccuacauuaaugauaaagggaaagaaguccucgugcuauggggcauucaccauccaucuacuagugcugaccaacaaagucucuaucagaaugcagaugcauauguuuuuguggggacaucaagauacagcaagaaguucaagccggaaauagcaauaagacccaaagugagggaucaagaagggagaaugaacuauuacuggacacuaguagagccgggagacaaaauaacauucgaagcaacuggaaaucuagugauaccgagauaugcauucgcaauggaaagaaaugcuggaucugguauuaucauuucagauacaccaguccacgauugcaauacaacuugucagacacccaagggugcuauaaacaccagccucccauuucagaauauacauccgaucacaauuggaaaauguccaaaauauguaaaaagcacaaaauugagacuggccacaggauugaggaaugucccgucuauucaaucuagaggccuauuuggggccauugccgguuucauugaagggggguggacagggaugguagauggaugguacgguuaucaccaucaaaaugagcaggggucaggauaugcagccgaccugaagagcacacagaaugccauugacgagauuacuaacaaaguaaauucuguuauugaaaagaugaauacacaguucacagcaguagguaaagaguucaaccaccuggaaaaaagaauagagaauuuaaauaaaaaaguugaugaugguuuccuggacauuuggacuuacaaugccgaauuguugguucuauuggaaaaugaaagaacuuuggacuaccacgauucaaaugugaagaacuuauaugaaaagguaagaagccaguuaaaaaacaaugccaaggaaauuggaaacggcugcuuugaauuuuaccacaaaugcgauaacacgugcauggaaagugucaaaaaugggacuuaugacuacccaaaauacucagaggaagcaaaauuaaacagagaagaaauagaugggguaaagcuggaaucaacaagaauuuaccagauuuuggcgaucuauucaacugucgccaguucauugguacugguagucucccugggggcaaucaguuucuggaugugcucuaaugggucucuacaguguagaauauguauuuaa

SEQ ID NO: 39564 - RNA, 1701 nt, Artificial Sequence; identical to SEQ ID NO: 39390
  derived and/or modified CDS sequence (wt) from hemagglutinin__InfluenzaA__AEO01471

SEQ ID NO: 39565 - RNA, 1701 nt, Artificial Sequence
  derived and/or modified CDS sequence (wt) from hemagglutinin__InfluenzaA__AEO01472
augaaggcaauacuaguaguucugcuauauacauuugcaaccgcaaaugcagacacauuauguauagguuaucaugcgaacaauucaacagacacuguagacacaguacuagaaaagaauguaacaguaacacacucuguuaacauucuagaagacaagcauaacgggaaacuaugcaagcuaagagggguagccccauugcauuuggguaaauguaacauugcuggcuggauccugggaaauccagagugugaaucacucuccacagcaagcucaugguccuacauuguggaaacaucuaguucagacaauggaacguguuacccaggagauuucaucgauuaugaggagcuaagagagcaauugagcucagugucaucauuugaaagguuugagauauuccccaagacaaguucauggcccaaucaugacucgaacaaagguguaacggcagcauguccucaugcuggagcaaaaagcuucuacaaaaauuuaauuuggcuaguuaaaaaaggaaauucauacccaaagcucagcaaauccuacauuaaugauaaagggaaagaaguccucgugcuauggggcauucaccauccaucuacuagugcugaccaacaaagucucuaucagaaugcagaugcauauguuuuuguggggucaucaagauacagcaagaaguucaagccggaaauagcaauuagacccaaagugagggaucaagaagggagaaugaacuauuacuggacacuaguagagccgggagacaaaauaacauucgaagcaacuggaaaucuagugguaccaagauaugcauucgcaauggaaagaaaugcuggaucugguauuaucauuucagauacaccaguccaugauugcaauacaacuugucagacacccaagggugcuauaaacaccagccucccauuucagaauauacauccgaucacaauuggaaaauguccaaaauauguaaaaagcacaaaauugagacuggccacaggauugaggaaugucccgucuauucaaucuagaggccuauuuggggccauugccgguuucauugaagggggguggacagggaugguagauggaugguacgguuaucaccaucaaaaugagcaggggucaggauaugcagccgaccugaagagcacacagaaugccauugacgagauuacuaacaaaguaaauucuguuauugaaaagaugaauacacaguucacagcaguagguaaagaguucaaccaccuggaaaaaagaauagagaauuuaaauaaaaaaguugaugaugguuuccuggacauuuggacuuacaaugccgaacuguugguucuauuggaaaaugaaagaacuuuggacuaccacgauucaaaugugaagaacuuauaugaaaagguaagaagccagcuaaaaaacaaugccaaggaaguuggaaacggcugcuuugaauuuuaccacaaaugcgauaacacgugcauggaaagugucaaaaaugggacuuaugacuacccaaaauacucagaggaagcaaaauuaaacagagaagaaauagaugggguaaagcuggaaucaacaaggauuuaccagauuuuggcgaucuauucaacugccgccaguucauugguacugguagucucccugggggcaaucaguuucuggaugugcucuaaugggucucuacaguguagaauauguauuuaa

SEQ ID NO: 39566 - RNA, 1701 nt, Artificial Sequence
  derived and/or modified CDS sequence (wt) from hemagglutinin__InfluenzaA__AEO01473
augaaggcaauacuaguaguucugcuauauacauuugcaaccgcaaaugcagacacauuauguauagguuaucaugcgaacaauucaacagacacuguagacacaguacuagaaaagaauguaacaguaacacacucuguuaaccuucuagaagacaagcauaacgggaaacuaugcaaacuaagagggguagccccauugcauuuggguaaauguaacauugcuggcuggauccugggaaauccagagugugaaucacucuccacagcaagcucaugguccuacauuguggaaacaucuaguucagacaauggaacguguuacccaggagauuucaucgauuaugaggagcuaagagagcaauugagcucagugucaucauuugaaagguuugagauauuccccaagacaaguucauggcccaaucaugacucgaacaaagguguaacggcagcauguccucaugcuggagcaaaaagcuucuacaaaaauuuaauauggcuaguuaaaaaaggaaauucauacccaaagcucaacaaauccuacauuaaugauaaagggaaagaaguccucgugcuauggggcauucaccauccaucuacuagugcugaccaacaaagucucuaucagaaugcagaugcauauguuuuuguggggacaucaagauacagcaagaaguucaagccggaaauagcaauaagacccaaagugagggaucaagaagggagaaugaacuauuacuggacacuaguagagccgggagacaaaauaacauucgaagcaacuggaaaucuagugguaccgagauaugcauucgcaauggaaagaaaugcuggaucugguauuaucauuucagauacaccaguccacgauugcaauacaacuugucagacacccgagggugcuauaaacaccagccucccauuucagaauauacauccgaucacaauuggagaauguccaaaauauguaaaaagcacaaaauugagacuggccacaggauugaggaaugucccgucuauucaaucuagaggccuauuuggggccauugccgguuucauugaagggggguggacagggaugguagauggaugguacgguuaucaccaucaaaaugagcaggggucaggauaugcagccgaccugaagagcacacagaaugccauugacaagauuacuaacaaaguaaauucuguuauugaaaagaugaauacacaguucacagcaguagguaaagaguucaaccaccuggaaaaaagaauagagaauuuaaauaaaaaaguugaugaugguuuccuggacauuuggacuuacaaugccgaacuguugguucuauuggaaaaugaaagaacuuuggacuaccacgauucaaaugugaagaacuuauaugaaaagguaagaagccaguuaaaaaacaaugccaaggaaauuggaaacggcugcuuugaauuuuaccacaaaugcgauaacacgugcauggaaagugucaaaaaugggacuuaugacuacccaaaauacucagaggaagcaaaauuaaacagagaagaaauagaugggguaaagcuggaaucaacaaggauuuaccagauuuuggcgaucuauucaacugucgccaguucauugguacugguagucucccugggggcaaucaguuucuggaugugcucuaaugggucucuacaguguagaauauguauuuaa

SEQ ID NO: 39567 - RNA, 1701 nt, Artificial Sequence
  derived and/or modified CDS sequence (wt) from hemagglutinin__InfluenzaA__AEO01474
augaaggcaauacuaguaguucugcuauauacauuugcaaccgcaaaugcagacacauuauguauagguuaucaugcgaacaauucaacagacacuguagacacaguacuagaaaagaauguaacaguaacacacucuguuaaccuucuagaagacaagcauaacgggaaacuaugcaaacuaagagggguagccccauugcauuuggguaaauguaacauugcuggcuggauccugggaaauccagagugugaaucacucuccacagcaagcucaugguccuacauuguggaaacaucuaguucagacaauggaacguguuacccaggagauuucaucgauuaugaggagcuaagagagcaauugagcucagugucaucauuugaaagguuugagauauuccccaagacaaguucauggcccaaucaugacucggacaaagguguaacggcagcauguccucaugcuggagcaaaaagcuucuacaaaaauuuaauauggcuaguuaaaaaaggaaauucauacccaaagcucagcaaauccuacauuaaugauaaagggaaagaaguccucgugcuauggggcauucaccauccaucuacuagugcugaccaacaaagucucuaucagaaugcagaugcauauguuuuuguggggacaucaagauacagcaagaaguucaagccggaaauagcaauaagacccaaagugagggaucaagaagggagaaugaacuauuacuggacacuaguagagccgggagacaaaauaacauucgaagcaacuggaaaucuagugguaccgagauaugcauucgcaauggaaagaaaugcuggaucugguauuaucauuucagauacaccaguccacgauugcaauacaacuugucagacacccaagggugcuauaaacaccagccucccauuucagaauauacauccgaucacaauuggaaaauguccaaaauauguaaaaagcacaaaauugagacuggccacaggauugaggaaugucccgucuauucaaucuagaggccuauuuggggccauugccgguuucauugaagggggguggacagggaugguagauggaugguacgguuaucaccaucaaaaugagcaggggucaggauaugcagccgaccugaagagcacacagaaugccauugacaagauuacuaacaaaguaaauucuguuauugaaaagaugaauacacaguucacagcaguagguaaagaguucaaccaccuggaaaaaagaauagagaauuuaaauaaaaaaguugaugaugguuuccuggacauuuggacuuacaaugccgaacuguugguucuauuggaaaaugaaagaacuuuggacuaccacgauucaaaugugaagaacuuauaugaaaagguaagaagccaguuaaaaaacaaugccaaggaaauuggaaacggcugcuuugaauuuuaccacaaaugcgauaacacgugcauggaaagugucaaaaaugggacuuaugacuacccaaaauacucagaggaagcaaaauuaaacagagaagaaauagaugggguaaagcuggaaucaacaaggauuuaccagauuuuggcgaucuauucaacugucgccaguucauugguacugguagucucccugggggcaaucaguuucuggaugugcucuaaugggucucuacaguguagaauauguauuuaa

SEQ ID NO: 39568 - RNA, 1701 nt, Artificial Sequence
  derived and/or modified CDS sequence (wt) from hemagglutinin__InfluenzaA__AEO01475
augaaggcaauacuaguaguucugcuauauacauuugcaaccgcaaaugcagacacauuauguauagguuaucaugcgaacaauucaacagacacuguagacacaguacuagaaaagaauguaacaguaacacacucuguuaaccuucuagaagacaagcauaacgggaaacuaugcaaacuaagagggguagccccauugcauuuggguaaauguaacauugcuggcuggauccugggaaauccagagugugaaucacucuccacagcaagcucaugguccuacauuguggaaacaucuaauucagacaauggaacguguuacccaggagauuucaucgauuaugaggagcuaagagagcaauugagcucagugucaucauuugaaagguuugagauauuccccaagacaaguucauggcccaaucaugacucgaacaaagguguaacggcagcauguccucaugcuggagcaaaaagcuucuacaaaaauuuaauauggcuaguuaaaaaaggaaauucauacccaaagcucagcaaauccuacauuaaugauaaagggaaagaaguccucgugcuauggggcauucaccauccaucuacuagugcugaccaacaaagucucuaucagaaugcagaugcauauguuuuuguggggacaucaagauacagcaagaaguucaagccggaaauagcaauaagacccaaagugagggaucaagaagggagaaugaacuauuacuggacacuaguagagccgggagacaaaauaacauucgaagcaacuggaaaucuagugguaccgagauaugcauucgcaauggaaagaaaugcuggaucugguauuaucauuucagauacaccaguccacgauugcaauacaacuugucagacacccaagggugcuauaaacaccagccucccauuucagaauauacauccgaucacaauuggaaaauguccaaaauauguaaaaagcacaaaauugagacuggccacaggauugaggaaugucccgucuauucaaucuagaggccuauuuggggccauugccgguuucauugaagggggguggacagggaugguagauggaugguacgguuaucaccaucaaaaugagcaggggucaggauaugcagccgaccugaagagcacacagcaugccauugacgagauuacuaacaaaguaaauucaguuauugaaaagaugaauacacaguucacagcaguagguaaagaguucaaccaccuggaaaaaagaauagagaauuuaaauaaaaaaguugaugaugguuuccuggacauuuggacuuacaaugccgaacuguugguucuauuggaaaaugaaagaacuuuggacuaccacgauucaaaugugaagaacuuauaugaaaagguaagaagccaguuaaaaaacaaugccaaggaaauuggaaacggcugcuuugaauuuuaccacaaaugcgauaacacgugcauggaaagugucaaaaaugggacuuaugacuacccaaaauacucagaggaagcaaaauuaaacagagaagaaauagaugggguaaagcuggaaucaacaaggauuuaccagauuuuggcgaucuauucaacugucgccaguucauugguacugguagucucccugggggcaaucaguuucuggaugugcucuaaugggucucuacaguguagaauauguauuuaa

SEQ ID NO: 39569 - RNA, 1701 nt, Artificial Sequence
  derived and/or modified CDS sequence (wt) from hemagglutinin__InfluenzaA__AEO01476
augaaggcaauacuaguaguucugcuauauacauuuucaaccgcaaaugcagacacauuauguauagguuaucaugcgaacaauucaacagacacuguagacacaguacuagaaaagaauguaacaguaacacacucuguuaaccuucuagaagacaagcauaacgggaaacuaugcaaacuaagagggguagccccauugcauuuggguaaauguaacauugcuggcuggauccugggaaauccagagugugaaucacucuccacagcaagcucaugguccuacauuguggaaacaucuaguucagacaauggaacguguuacccaggagauuucaucgauuaugaggagcuaagagagcaauugagcucagugucaucauuugaaagguuugagauauuccccaagacaaguucauggcccaaucaugacucgaacaaagguguaacggcagcauguccucaugcuggagcaaaaagcuucuacaaaaauuuaauauggcuaguuaaaaaaggaaauucauacccaaagcucagcaaauccuacauuaaugauaaagggaaagaaguccucgugcuauggggcauucaccauccaucuacuagugcugaccaacaaagucucuaucagaaugcagaugcauauguuuuuguggggacaucaagauacagcaagaaguucaagccggaaauagcaauaagacccaaagugagggaucaagaagggagaaugaacuauuacuggacacuaguagagccgggagacaaaauaacauucgaagcaacuggaaaucuagugguaccgagauaugcauucgcaauggaaagaaaugcuggaucugguauuaucauuucagauacaccaguccacgauugcaauacaacuugucagacacccaagggugcuauaaacaccagccucccauuucagaauauacauccgaucacaauuggaaaauguccaaaauauguaaaaagcacaaaauugagacuggccacaggauugaggaaugucccgucuauucaaucuagaggccuauuuggggccauugccgguuucauugaagggggguggacagggaugguagauggaugguacgguuaucaccaucaaaaugagcaggggucaggauaugcagccgacuugaagagcacacagaaugccauugacgagauuacuaacaaaguaaauucuguuauugaaaagaugaauacacaguucacagcaguagguaaagaguucaaccaccuggaaaaaagaauagagaauuuaaauaaaaagguugaugaugguuuccuggacauuuggacuuacaaugccgaacuguugguucuauuggaaaaugaaagaacuuuggacuaccacgauucaaaugugaagaacuuauaugaaaagguaagaagccaguuaaaaaacaaugccaaggaaauuggaaacggcugcuuugaauuuuaccacaaaugcgauaacacgugcauggaaagugucaaaaaugggacuuaugacuacccaaaauacucagaggaagcaaaauuaaacagagaagaaauagaugggguaaagcuggaaucaacaaggauuuaccagauuuuggcgaucuauucaacugucgccaguucauugguacugguagucucccugggggcaaucaguuucuggaugugcucuaaugggucucuacaguguagaauauguauuuaa

SEQ ID NO: 39570 - RNA, 1701 nt, Artificial Sequence
  derived and/or modified CDS sequence (wt) from hemagglutinin__InfluenzaA__AEO01477
augaaggcaauacuaguaguucugcuauauacauuugcaaccgcaaaugcagacacauuauguauagguuaucaugcgaacaauucaacagacacuguagacacaguacuagaaaagaauguaacaguaacacacucuguuaaccuucuagaagacaagcauaacgggaaacuaugcaaacuaagagggguagccccauugcauuuggguaaauguaacauugcuggcuggauccugggaaauccagagugugaaucacucuccacagcaagcucaugguccuacauuguggaaacaucuaguucagacaauggaacguguuacccaggagauuucaucgauuaugaggagcuaagagagcaauugagcucagugucaucauuugaaagguuugagauauuccccaagacaaguucauggcccaaucaugacucgaacaaagguguaacggcagcauguccucaugcuggagcaaaaagcuucuacaaaaauuuaauauggcuaguuaaaaaaggaaauucauacccaaagcucagcaaauccuacauuaaugauaaagggaaagaaguccucgugcuauggggcauucaccauccaucuacuagugcugaccaacaaagucucuaucagaaugcagaugcauaugcuuuuguggggacaucaagauacagcaagaaguucaagccggaaauagcaauaagacccaaagugagggaacaagaagggagaaugaacuauuacuggacacuaguagagccgggagacaaaauaacauucgaagcaacuggaaaucuagugguaccgagauaugcauucgcaauggaaagaaaugcuggaucugguauuaucauuucagauacaccaguccacgauugcaauacaacuugucagacacccaagggugcuauaaacaccagccucccauuucagaauauacauccgaucacaauuggaaaauguccaaaauauguaaaaagcacaaaauugagacuggccacaggauugaggaaugucccgucuauucaaucuagaggccuauuuggggccauugccgguuucauugaagggggguggacagggaugguagauggaugguacgguuaucaccaucaaaaugagcaggggucaggauaugcagccgaccugaagagcacacagaaugccauugacgagauuacuaacaaaguaaauucuguuauugaaaagaugaauacacaguucacagcaguagguaaagaguucaaccacuuggaaaaaagaauagagaauuuaaauaaaaaaguugaugaugguuuccuggacauuuggacuuacaaugccgaacuguugguucuauuggaaaaugaaagaacuuuggacuaccacgauucaaaugugaagaacuuauaugaaaagguaagaagccaguuaaaaaacaaugccaaggaaauuggaaacggcugcuuugaauuuuaccacaaaugcgauaacacgugcauggaaagugucaaaaaugggacuuaugacuacccaaaauacucagaggaagcaaaauuaaacagagaagaaauagaugggguaaagcuggaaucaacaaggauuuaccagauuuuggcgaucuauucaacugucgccaguucauugguacugguagucucccugggggcaaucaguuucuggaugugcucuaaugggucucuacaguguagaauauguauuuaa

SEQ ID NO: 39571 - RNA, 1701 nt, Artificial Sequence
  derived and/or modified CDS sequence (wt) from hemagglutinin__InfluenzaA__AEO01478
augaaggcaauacuaguaguucugcuauauacauuugcaaccgcaaaugcagacacauuauguauagguuaucaugcgaacaauucaacagacacuguagacacaguacuagaaaagaauguaacaguaacacacucuguuaaccuucuagaagacaagcauaacgggaaacuaugcaaacuaagagggguagccccauugcauuuggguaaauguaacauugcuggcuggauccugggaaauccagagugugaaucacucuccacagcaagcucaugguccuacauuguggaaacaucuaguucagacaauggaacguguuacccaggagauuucaucaauuaugaggagcuaagagagcaauugagcucagugucaucauuugaaagguuugagauauuccccaagacaaguucauggcccaaucaugacucgaacaaagguguaacggcagcauguccucaugcuggagcaaaaagcuucuacaaaaauuuaauauggcuaguuaaaaaaggaaauucauacccaaagcucagcaaauccuacauuaaugauaaagggaaagaaguccucgugcuauggggcauucaccauccaucuacuagugcugaccaacaaagucucuaucagaaugcagaugcauauguuuuuguggggacaucaagauacagcaagaaguucaagccggaaauagcaauaagacccaaagugagggaucaagaagggagaaugaacuauuacuggacacuaguagagccgggagacaaaauaacauucgaagcaacuggaaaucuagugguaccgagauaugcauucgcaauggaaagaaaugcuggaucugguauuaucaucucagauacaccaguccacgauugcaauacaacuugucagacacccaauggugcuauaaacaccagccucccauuucagaauauacauccgaucacaauuggaaaauguccaaaauauguaaaaagcacaaaauugagacuggccacaggauugaggaaugucccgucuauucaaucuagaggccuauuuggggccauugccgguuucauugaagggggguggacagggaugguagauggaugguacgguuaucaccaucaaaaugagcaggggucaggauaugcagccgaccugaagagcacacagaaugccauugacaagauuacuaacaaaguaaauucuguuauugaaaagaugaauacacaguucacagcaguagguaaagaguucaaccaccuggaaaaaagaauagagaauuuaaauaaaaaaguugaugaugguuuccuggacauuuggacuuacaaugccgaacuguugguucuauuggaaaaugaaagaacuuuggauuaccacgauucaaaugugaagaacuuauaugaaaagguaagaagccaguuaaaaaacaaugccaaggaaauuggaaacggcugcuuugaauuuuaccacaaaugcgauaacacgugcauggaaagugucaaaaaugggacuuaugacuacccaaaauacucagaggaagcaaaauuaaacagagaagaaauagaugggguaaagcuggaaucaacaaggauuuaccagauuuuggcgaucuauucaacugucgccaguucauugguacugguagucucccugggggcaaucaguuucuggaugugcucuaaugggucucuacaguguagaauauguauuuaa

SEQ ID NO: 39572 - RNA, 1701 nt, Artificial Sequence
  derived and/or modified CDS sequence (wt) from hemagglutinin__InfluenzaA__AEO01479
augaaggcaauacuaguaguucugcuauauacauuugcaaccgcaaaugcagacacauuauguauagguuaucaugcgaacaauucaacagacacuguagacacaguacuagaaaagaauguaacaguaacacacucuguuaaccuucuagaagacaagcauaacgggaaacuaugcaaacuaagagggguagccccauugcauuuggguaaaugugacauugcuggcuggauccugggaaauccagagugugaaucacucuccacagcaagcucaugguccuacauuguggaaacaucuaguucagacaauggaacguguuacccaggagauuucaucgauuaugaggagcuaagagagcaauugagcucagugucaucauuugaaagguuugagauauuccccaagacaaguucauggcccaaucaugacucgaacaaagguguaacggcagcauguccucaugcuggagcaaaaagcuucuacaaaaauuuaauauggcuaguuaaaaaaggaaauucauacccaaagcucagcaaauccuacauuaaugauaaagggaaagaaguccucgugcuauggggaauucaccauccaucuacuagugcugaccaacaaagucucuaucagaaugcagaugcauauguuuuuguggggacaucaagauacagcaagaaguucaagccggaaauagcaauaagacccaaagugagggaucaagaagggagaaugaacuauuacuggacacuaguagagccgggagacaaaauaacauucgaagcaacuggaaaucuagugguaccgagauaugcauucgcaauggaaagaaaugcuggaucugguauuaucauuucagauacaccaguccacgauugcaauacaacuugucagacacccaagggugcuauaaacaccagccucccauuucagaauauacauccgaucacaauuggaaaauguccaaaauauguaaaaagcacaaaauugagacuggccacaggauugaggaaugucccgucuauucaaucuagaggccuauuuggggccauugccgguuucauugaagggggguggacagggaugguagauggaugguacgguuaucaccaucaaaaugagcaggggucaggauaugcagccgaccugaagagcacacagcaugccauugacgagauuacuaacaaaguaaauucuguuauugaaaagaugaauacacaguucacagcaguagguaaagaguucaaccaccuggaaaaaagaauagagaauuuaaauaaaaaaguugaugaugguuuccuggacauuuggacuuacaaugccgaacuguugguucuauuggaaaaugaaagaacuuuggacuaccacgauucaaaugugaagaacuuauaugaaaagguaagaagccaguuaaaaaacaaugccaaggaaauuggaaacggcugcuuugaauuuuaccacaaaugcgauaacacgugcauggaaagugucaaaaaugggacuuaugacuacccaaaauacucagaggaagcaaaauuaaacagggaagaaauagaugggguaaagcuggaaucaacaaggauuuaccagauuuuggcgaucuauucaacugucgccaguucauugguacugguagucucccugggggcaaucaguuucuggaugugcucuaaugggucucuacaguguagaauauguauuuaa

SEQ ID NO: 39573 - RNA, 1701 nt, Artificial Sequence; identical to SEQ ID NO: 39472
  derived and/or modified CDS sequence (wt) from hemagglutinin__InfluenzaA__AEO01480

SEQ ID NO: 39574 - RNA, 1701 nt, Artificial Sequence
  derived and/or modified CDS sequence (wt) from hemagglutinin__InfluenzaA__AEO01482
augaaggcaauacuaguaguucugcuauauacauuugcaaccgcaaaugcagacacauuauguauagguuaucaugcgaacaauucaacagacacuguagacacaguacuagaaaagaauguaacaguaacacacucuguuaaccuucuagaagacaagcauaacgggaaacuaugcaaacuaagagggguagccccauugcauuuggguaaauguaacauugcuggcuggauccugggaaauccagagugugaaucacucuccacagcaagcucaugguccuacauuguggaaacaucuaguucagacaauggaacguguuacccaggagauuucaucgauuaugaggagcuaagagagcaauugagcucagugucaucauuugaaagguuugagauauuccccaagacaaguucauggcccaaucaugacucgaacaaagguguaacggcagcauguccucaugcuggagcaaaaagcuucuacaaaaauuuaauauggcuaguuaaaaaaggaaauucauacccaaagcucagcaaauccuacauuaaugauaaagggaaagaaguccucgugcuauggggcauucaccauccaucuacuagugcugaccaacaaagucucuaucagaaugcagaugcauauguuuuuguggggacaucaagauacagcaagaaguucaagccggaaauagcaauaagacccaaagugagggaucaagaagggagaaugaacuauuacuggacacuaguagagccgggagacaaaauaacauucgaagcaacuggaaaucuagugguaccgagauaugcauucgcaauggaaagaaaugcuggaucugguauuaucauuucagauacaccaguccacgauugcaauacaacuugucagacacccaagggugcuauaaacaccagccucccauuucagaauauacauccgaucacaauuggaaaauguccaaaauauguaaaaagcacaaaauugagacuggccacaggauugaggaaugucccgucuauucaaucuagaggccuauuuggggccauugccgguuucauugaagggggguggacagggaugguagauggaugguacgguuaucaccaucaaaaugagcaggggucaggauaugcagccgaccugaagagcacacagaaugccauugacaagauuacuaacaaaguaaauucuguuauugaaaagaugaauacacaguucacagcaguagguaaagaguucaaccaccuggaaaaaagaauagagaauuuaaauaaaaaaguugaugaugguuuccuggacauuuggacuuacaaugccgaacuguugguucuauuggaaaaugaaagaacuuuggacuaccacgauucaaaugugaagaacuuauaugaaaagguaagaagccaguuaaaaaacaaugccaaggaaauuggaaacggcugcuuugaauuuuaccacaaaugcaauaacacgugcauggaaagugucaaaaaugggacuuaugacuacccaaaauacucagaggaagcaaaauuaaacagagaagaaauagaugggguaaagcuggaaucaacaaggauuuaccagauuuuggcgaucuauucaacugucgccaguucauugguacugguagucucccugggggcaaucaguuucuggaugugcucuaaugggucucuacaguguagaauauguauuuaa

SEQ ID NO: 39575 - RNA, 1701 nt, Artificial Sequence
  derived and/or modified CDS sequence (wt) from hemagglutinin__InfluenzaA__AEO01483
augaaggcaauacuaguaguucugcuauauacauuugcaaccgcaaaugcagacacauuauguauagguuaucaugcgaacaauucaacagacacuguagacacaguacuagaaaagaauguaacaguaacacacucuguuaaccuucuagaagacaagcauaacgggaaacuaugcaaacuaagagggguagccccauugcauuuggguaaauguaacauugcuggcuggauccugggaaauccagagugugaaucacucuccacagcaagcucaugguccuacauuguggaaacaucuaauucagacaauggaacguguuacccaggagauuucaucgauuaugaggagcuaagagagcaauugagcucagugucaucauuugaaagguuugagauauuccccaagacaaguucauggcccaaucaugacucgaacaaagguguaacggcagcauguccucaugcuggagcaaaaagcuucuacaaaaauuuaauauggcuaguuaaaaagggaaauucauacccaaagcucagcaaauccuacauuaaugauaaagggaaagaaguccucgugcuauggggcauucaccauccaucuacuagugcugaccaacaaagucucuaucagaaugcagaugcauauguuuuuguggggacaucaagauacagcaagaaguucaagccggaaauagcaauaagacccaaagugagggaucaagaagggagaaugaacuauuacuggacacuaguagagccgggagacaaaauaacauucgaagcaacuggaaaucuagugguaccgagauaugcauucgcaauggaaagaaaugcuggaucugguauuaucauuucagauacaccaguccacgauugcaauacaacuugucagacacccaagggugcuauaaacaccagccucccauuucagaauauacauccgaucacaauuggaaaauguccaaaauauguaaaaagcacaaaauugagacuggccacaggauugaggaaugucccgucuauucaaucuagaggccuauuuggggccauugccgguuucauugaagggggguggacagggaugguagauggaugguacgguuaucaccaucaaaaugagcaggggucaggauaugcagccgaccugaagagcacacagaaugccauugacaagauuacuaacaaaguaaauucuguuauugaaaagaugaauacacaguucacagcaguagguaaagaguucaaccaccuggaaaaaagaauagagaauuuaaauaaaaaaguugaugaugguuuccuggacauuuggacuuacaaugccgaacuguugguucuauuggaaaaugaaagaacuuuggacuaccacgauucaaaugugaagaacuuauaugaaaagguaagaagccaguuaaaaaacaaugccaaggaaauuggaaacggcugcuuugaauuuuaccacaaaugcgauaacacgugcauggaaagugucaaaaaugggacuuaugacuacccaaaauacucagaggaagcaaaauuaaacagagaagaaauagaugggguaaagcuggaaucaacaaggauuuaccagauuuuggcgaucuauucaacugccgccaguucauugguacugguagucucccugggggcaaucaguuucuggaugugcucuaaugggucucuacaguguagaauauguauuuaa

SEQ ID NO: 39576 - RNA, 1701 nt, Artificial Sequence
  derived and/or modified CDS sequence (wt) from hemagglutinin__InfluenzaA__AEO01484
augaaggcaauacuaguaguucugcuauauacauuugcaaccgcaaaugcagacacauuauguauagguuaucaugcgaacaauucaacagacacuguagacacaguacuagaaaagaauguaacaguaacacacucuguuaaccuucuagaagacaagcauaacgggaaacuaugcaaacuaaaagggguagccccauugcauuuggguaaaugugacauugcuggcuggauccugggaaauccagagugugaaucacucuccacagcaagcucaugguccuacauuguggaaacaucuaguucagacaauggaacguguuacccaggagauuucaucgauuaugaggagcuaagagagcaauugagcucagugucaucauuugaaagguuugagauauuccccaagacaaguucauggcccaaucaugacucgaacaaagguguaacggcagcauguccucaugcuggagcaaaaagcuucuacaaaaauuuaauauggcuaguuaaaaaaggaaauucauacccaaagcucagcaaauccuacauuaaugauaaagggaaagaaguccucgugcuauggggaauucaccauccaucuacuagugcugaccaacaaagucucuaucagaaugcagaugcauauguuuuuguggggacaucaagauacagcaagaaguucaagccggaaauagcaauaagacccaaagugagggaucaagaagggagaaugaacuauuacuggacacuaguagagccgggagacaaaauaacauucgaagcaacuggaaaucuagugguaccgagauaugcauucgcaauggaaagaaaugcuggaucugguauuaucauuucagauacaccaguccacgauugcaauacaacuugucagacacccaagggugcuauaaacaccagccucccauuucagaauauacauccgaucacaauuggaaaauguccaaaauauguaaaaagcacaaaauugagacuggccacaggauugaggaaugucccgucuauucaaucuagaggccuauuuggggccauugccgguuucauugaagggggguggacagggaugguagauggaugguacgguuaucaccaucaaaaugagcaggggucaggauaugcagccgaccugaagagcacacagcaugccauugacgagauuacuaacaaaguaaauucuguuauugaaaagaugaauacacaguucacagcaguagguaaagaguucaaccaccuggaaaaaagaauagagaauuuaaauaaaaaaguugaugaugguuuccuggacauuuggacuuacaaugccgaacuguugguucuauuggaaaaugaaagaacuuuggacuaccacgauucaaaugugaagaacuuauaugaaaagguaagaagccaguuaaaaaacaaugccaaggaaauuggaaacggcugcuuugaauuuuaccacaaaugcgauaacacgugcauggaaagugucaaaaaugggacuuaugacuacccaaaauacucagaggaagcaaaauuaaacagagaagaaauagaugggguaaagcuggaaucaacaaggauuuaccagauuuuggcgaucuauucaacugucgccaguucauugguacugguagucucccugggggcaaucaguuucuggaugugcucuaaugggucucuacaguguagaauauguauuuaa

SEQ ID NO: 39577 - RNA, 1701 nt, Artificial Sequence
  derived and/or modified CDS sequence (wt) from hemagglutinin__InfluenzaA__AEO01485
augaaggcaauacuaguaguucugcuauauacauuugcaaccgcaaaugcagacacauuauguauagguuaucaugcgaacaauucaacagacacuguagacacaguacuagaaaagaauguaacaguaacacacucuguuaaccuucuagaagacaagcauaacgggaaacuaugcaaacuaagagggguagccccauugcauuuggguaaauguaacauugcuggcuggauccugggaaauccagagugugaaucacucuccacagcaagcucaugguccuacauuguggaaacaucuaguucagacaauggaacguguuacccaggagauuucaucgauuaugaggagcuaagagagcaauugagcucagugucaucauuugaaagguuugagauauuccccaagacaaguucauggcccaaucaugacucgaacaaagguguaacggcagcauguccucaugcuggagcaaaaagcuucuacaaaaauuuaauauggcuaguuaaaaaaggaaauucauacccaaagcucagcaaauccuacauuaaugauaaagggaaagaaguccucgugcuauggggcauucaccauccaucuacuagugcugaccaacaaagucucuaucagaaugcagaugcauauguuuuuguggggacaucaagauacagcaagaaguucaagccggaaauaacaauaagacccaaagugagggaucaagaagggagaaugaacuauuacuggacacuaguagagccgggagacaaaauaacauucgaagcaacuggaaaucuagugguaccgagauaugcauucgcaauggaaagaaaugcuggaucugguauuaucauuucagauacaccaguccacgauugcaauacaacuugucagacacccaagggugcuauaaacaccagccucccauuucagaauauacauccgaucacaauuggaaaauguccaaaauauguaaaaagcacaaaauugagacuggccacaggauugaggaaugucccgucuauucaaucuagaggccuauuuggggccauugccgguuucauugaagggggguggacagggaugguagauggaugguacgguuaucaccaucaaaaugagcaggggucaggauaugcagccgaccugaagagcacacagaaugccauugacgagauuacuaacaaaguaaauucuguuauugaaaagaugaauacacaguucacagcaguagguaaagaguucaaccaccuggaaaaaagaauagagaauuuaaauaaaaaaguugaugaugguuuccuggacauuuggacuuacaaugccgaauuguugguucuauuggaaaaugaaagaacuuuggacuaccacgauucaaaugugaagaacuuauaugaaaagguaagaagccaguuaaaaaacaaugccaaggaaauuggaaacggcugcuuugaauuuuaccacaaaugcgauaacacgugcauggaaagugucaaaaaugggacuuaugacuacccaaaauacucagaggaagcaaaauuaaacagagaagaaauagaugggguaaagcuggaaucaacaaggauuuaccagauuuuggcgaucuauucaacugucgccaguucauugguacugguagucucccugggggcaaucaguuucuggaugugcucuaaugggucucuacaguguagaauauguauuuaa

SEQ ID NO: 39578 - RNA, 1701 nt, Artificial Sequence
  derived and/or modified CDS sequence (wt) from hemagglutinin__InfluenzaA__AEO01487
augaaggcaauacuaguaguucugcuauauacauuugcaaccgcaaaugcagacacauuauguauagguuaucaugcgaacaauucaacagacacuguagacacaguacuagaaaagaauguaacaguaacacacucuguuaaccuucuagaagacaagcauaacgggaaacuaugcaaacuaagagggguagccccauugcauuuggguaaauguaacauugcuggcuggauccugggaaauccagagugugaaucacucuccacagcaagcucaugguccuacauuguggaaacaucuaguucagacaauggaacguguuacccaggagauuucaucgauuaugaggagcuaagagagcaauugagcucagugucaucauuugaaagguuugagauauuccccaagacaaguucauggcccaaucaugacucgaacaaagguguaacggcagcauguccucaugcuggagcaaaaagcuucuacaaaaauuuaauauggcuaguuaaaaaaggaaauucauacccaaagcucagcaaauccuacauuaaugauaaagggaaagaaguccucgugcuauggggcauucaccauccaucuacuagugcugaccaacaaagucucuaucagaaugcagaugcauauguuuuuguggggacaucaagauacagcaagaaguucaagccggaaauagcaauaagacccaaagugagggaucaagaagggagaaugaacuauuacuggacacuaguagagccaggagacaaaauaacauucgaagcaacuggaaaucuagugguaccgagauaugcauucgcaauggaaagaaaugcuggaucugguauuaucauuucagauacaccaguccacgauugcaauacaacuugucagacacccaagggugcuauaaacaccagccucccauuucagaauauacauccgaucacaauuggaaaauguccaaaauauguaaaaagcacaaaauugagacuggccacaggauugaggaaugucccgucuauucaaucuagaggccuauuuggggccauugccgguuucauugaagggggguggacagggaugguagauggaugguacgguuaucaccaucaaaaugagcaggggucaggauaugcagccgaccugaagagcacacagaaugccauugacgagauuacuaacaaaguaaauucuguuauugaaaagaugaauacacaguucacagcaguagguaaagaguucaaccaccuggaaaaaagaauagagaauuuaaauaaaaaaguugaugaugguuuccuggacauuuggacuuacaaugccgaacuguugguucuauuggaaaaugaaagaacuuuggacuaccacgauucaaaugugaagaacuuauaugaaaagguaagaagccaguuaaaaaacaaugccaaggaaauuggaaacggcuguuuugaauuuuaccacaaaugcgauaacacgugcauggaaagugucaaaaaugggacuuaugacuacccaaaauacucagaggaagcaaaauuaaacagagaagaaauagaugggguaacgcuggaaucaacaaggauuuaccagauuuuggcgaucuauucaacugucgccaguucauugguacugguagucucccugggggcaaucaguuucuggaugugcucuaaugggucucuacaguguagaauauguauuuaa

SEQ ID NO: 39579 - RNA, 1701 nt, Artificial Sequence
  derived and/or modified CDS sequence (wt) from hemagglutinin__InfluenzaA__AEO01488
augaaggcaauacuaguaguucugcuauauacauuugcaaccgcaaaugcagacacauuauguauagguuaucaugcgaacaauucaacagacacuguagacacaguacuagaaaagaauguaacaguaacacacucuguuaaccuucuagaagacaagcauaacgggaaacuaugcaaacuaagagggguagccccauugcauuuggguaaauguaacauugcuggcuggauccugggaaauccagagugugaaucacucuccacagcaagcucaugguccuacauuguggaaacaucuaguucagacaauggaacguguuacccaggagauuucaucgauuaugaggagcuaagagagcaauugagcucagugucaucauuugaaagguuugagauauuccccaagacaaguucauggcccaaucaugacucaaacaaagguguaacggcagcauguccucaugcuggagcaaaaagcuucuacaaaaauuuaauauggcuaguuaaaaaaggaaauucauacccaaagcucagcaaauccuacauuaaugauaaagggaaagaaguccucgugcuauggggcauucaccauccaucuacuagugcugaccaacaaagucucuaucagaaugcagaugcauauguuuuuguggggacaucaagauacagcaagaaguucaagccggaaauagcaauaagacccaaagugagggaucaagaagggagaaugaacuauuacuggacacuaguagagccgggagacaaaauaacauucgaagcaacuggaaaucuagugguaccgagauaugcauucacaauggaaagaaaugcuggaucugguauuaucauuucagauacaccaguccacgauugcaauacaacuugucagacacccaagggugcuauaaacaccagccucccauuucagaauauacauccgaucacaauuggaaaauguccaaaauauguaaaaagcacaaaauugagacuggccacaggauugaggaaugucccgucuauucaaucuagaggccuauuuggggccauugccgguuucauugaagggggguggacagggaugguagauggaugguacgguuaucaccaucaaaaugagcaggggucaggauaugcagccgaccugaagagcacacagaaugccauugacgggauuacuaacaaaguaaauucuguuauugaaaagaugaauacacaguucacagcaguagguaaagaguucaaccaccuggaaaaaagaauagagaauuuaaauaaaaagguugaugaugguuuccuggacauuuggacuuacaaugccgaacuguugguucuauuggaaaaugaaagaacuuuggacuaccacgauucaaaugugaagaacuuauaugaaaagguaagaagccaguuaaaaaacaaugccaaggaaauuggaaacggcugcuuugaauuuuaccacaaaugcgauaacacgugcauggaaagugucaaaaaugggacuuaugacuacccaaaauacucagaggaagcaaaauuaaacagagaagaaauagaugggguaaagcuggaaucaacaaggauuuaccagauuuuggcgaucuauucaacugucgccaguucauugguacugguagucucccugggggcaaucaguuucuggaugugcucuaaugggucucuacaguguagaauauguauuuaa

SEQ ID NO: 39580 - RNA, 1701 nt, Artificial Sequence
  derived and/or modified CDS sequence (wt) from hemagglutinin__InfluenzaA__AEO01489
augaaggcaauacuaguaguucugcuauauacauuugcaaccgcaaaugcagacacauuauguauagguuaucaugcgaacaauucaacagacacuguagacacaguacuagaaaagaauguaacaguaacacacucuguuaaccuucuagaagacaagcauaacgggaaacuaugcaaacuaagagggguggccccauugcauuuggguaaauguaacauugcuggcuggauccugggaaauccagagugugaaucacucuccacagcaagcucaugguccuacauuguggaaacaucuaguucagacaauggaacguguuacccaggagauuucaucgauuaugaggagcuaagagagcaauugagcucagugucaucauuugaaagguuugagauauuccccaagacaaguucauggcccaaucaugacucgaacaaagguguaacggcagcauguccucaugcuggagcaaaaagcuucuacaaaaauuuaauauggcuaguuaaaaaaggaaauucauacccaaagcucagcaaauccuacauuaaugauaaagggaaagaaguccucgugcuauggggcauucaccauccaucuacuagugcugaccaacaaagucucuaucagaaugcagaugcauauguuuuuguggggacaucaagauacagcaagaaguucaggccggaaauagcaauaagacccaaagugagggaucaagaagggagaaugaacuauuacuggacacuaguagagccgggagacaaaauaacauucgaagcaacuggaaaucuagugguaccgagauaugcauucgcaauggaaagaaaugcuggaucugguauuaucauuucagauacaccaguccacgauugcaauacaacuugucagacacccaagggugcuauaaacaccagccucccauuucagaauauacauccgaucacaauuggaaaauguccaaaauauguaaaaagcacaaaauugagacuggccacaggauugaggaaugucccgucuauucaaucuagaggccuauuuggggccauugccgguuucauugaagggggguggacagggaugguagauggaugguacgguuaucaccaucaaaaugagcaggggucaggauaugcagccgaccugaagagcacacagaaugccauugacgagauuacuaacaaaguaaauucuguuauugaaaagaugaauacacaguucacagcaguagguaaagaguucaaccaccuggaaaaaagaauagagaauuuaaauaaaaaaguugaugaugguuuccuggacauuuggacuuacaaugccgaauuguugguucuauuggaaaaugaaagaacuuuggacuaccacgauucaaaugugaagaacuuauaugaaaagguaagaagccaguuaaaaaacaaugccaaggaaauuggaaacggcugcuuugaauuuuaccacaaaugcgauaacacgugcauggaaagugucaaaaaugggacuuaugacuacccaaaauacucagaggaagcaaaauuaaacagagaagaaauagaugggguaaagcuggaaucaacaaggauuuaccagauuuuggcgaucuauucaacugucgccaguucauugguacugguagucucccugggggcaaucaguuucuggaugugcucuaaugggucucuacaguguagaauauguauuuaa

SEQ ID NO: 39581 - RNA, 1701 nt, Artificial Sequence
  derived and/or modified CDS sequence (wt) from hemagglutinin__InfluenzaA__AEO01490
augaaggcaauacuaguaguucugcuauauacauuugcaaccgcaaaugcagacacauuauguauagguuaucaugcgaacaauucaacagacacuguagacacaguacuagaaaagaauguaacaguaacacacucuguuaaccuucuagaagacaagcauaacgggaaacuaugcaaacuaagagggguagccccauugcauuuggguaaauguaacauugcuggcuggauccugggaaauccagagugugaaucacucuccacagcaagcucaugguccuacauuguggaaacaucuaguucagacaauggaacguguuacccaggagauuucaucgauuaugaggagcuaagagagcaauugagcucagugucaucauuugaaagguuugagauauuucccaagacaaguucauggcccaaucaugacucgaacaaagguguaacggcagcauguccucaugcuggagcaaaaagcuucuacaaaaauuuaauauggcuaguuaaaaaaggaaauucauacccaaagcucagcaaauccuacauuaaugauaaagggaaagaaguccucgugcuauggggcauucaccauccaucuacuagugcugaccaacaaagucucuaucagaaugcagaugcauauguuuuuguggggacaucaagauacagcaagaaguucaagccggaaauagcaauaagacccaaagugagggaucaagaagggagaaugaacuauuacuggacacuaguagagccgggagacaaaauaacauucgaagcaacuggaaaucuagugguaccgagauaugcauucgcaauggaaagaaaugcuggaucugguauuaucauuucagauacaccaguccacgauugcaauacaacuugucagacacccaagggugcuauaaacaccagccucccauuucagaauauacauccgaucacaauuggaaaauguccaaaauauguaaaaagcacaaaauugagaauggccacaggauugaggaaugucccgucuauucaaucuagaggccuauuuggggccauugccgguuucauugaagggggguggacagggaugguagauggaugguacgguuaucaccaucaaaaugagcaggggucaggauaugcagccgaccugaagagcacacagaaugccauugacgagauuacuaacaaaguaaauucuguuauugaaaagaugaauacacaguucacagcaguagguaaagaguucaaccaccuggaaaaaagaauagagaauuuaaauaaaaaaguugaugaugguuuccuggacauuuggacuuacaaugccgaacuguugguucuauuggaaaaugaaagaacuuuggacuaccacgauucaaaugugaagaacuuauaugaaaagguaagaaaccaguuaaaaaacaaugccaaggaaauuggaaacggcugcuuugaauuuuaccacaaaugcgauaacacgugcauggaaagugucaaaaaugggacuuaugacuacccaaaauacucagaggaagcaaaauuaaacagagaagaaauagaugggguaaagcuggaaucaacaaggauuuaccagauuuuggcgaucuauucaacugucgccaguucauugguacugguagucucccugggggcaaucaguuucuggaugugcucuaaugggucucuacaguguagaauauguauuuaa

SEQ ID NO: 39582 - RNA, 1701 nt, Artificial Sequence
  derived and/or modified CDS sequence (wt) from hemagglutinin__InfluenzaA__AEO01491
augaaggcaauacuaguaguucugcuauauacauuugcaaccgcaaaugcagacacauuauguauagguuaucaugcgaacaauucaacagacacuguagacacaguacuagaaaagaauguaacaguaacacacucuguuaaccuucuagaagacaaguauaacgggaaacuaugcaaacuaagagggguagccccauugcauuuggguaaauguaacauugcuggcuggauccugggaaauccagagugugaaucacucuccacagcaagcucaugguccuacauuguggaaacaucuaguucagacaauggaacguguuacccaggagauuucaucgauuaugaggagcuaagagagcaauugagcucagugucaucauuugaaagguuugagauauuccccaagacaaguucauggcccaaucaugacucgaacaaagguguaacggcagcauguccucaugcuggagcaaaaagcuucuacaaaaauuuaauauggcuaguuaaaaaaggaaauucauacccaaagcucagcaaauccuacauuaaugauaaagggaaagaaguccucgugcuauggggcauucaccauccaucuacuagugcugaccaacaaagucucuaucagaaugcagaugcauauguuuuuguggggacaucaagauacagcaagaaguucaagccggaaauagcaauaagacccaaagugagggaucaagaagggagaaugaacuaucacuggacacuaguagagccgggagacaaaauaacauucgaagcaacuggaaaucuagugguaccgagauaugcauucgcaauggaaagaaaugcuggaucugguauuaucauuucagauacaccaguccacgauugcaauacaacuugucagacacccaagggugcuauaaacaccagccucccauuucagaauauacauccgaucacaauuggaaaauguccaaaauauguaaaaagcacaaaauugagacuggccacaggauugaggaaugucccgucuauucaaucuagaggccuauuuggggccauugccgguuucauugaagggggguggacagggaugguagauggaugguacgguuaucaccaucaaaaugagcaggggucaggauaugcagccgaccuaaagagcacacagaaugccauugacgagauuacuaacaaaguaaauucuguuauugaaaagaugaauacacaguucacagcaguagguaaagaguucaaccaccuggaaaaaagaauagagaauuuaaauaaaaagguugaugaugguuuccuggacauuuggacuuacaaugccgaacuguugguucuauuggaaaaugaaagaacuuuggacuaccacgauucaaaugugaagaacuuauaugaaaagguaagaagccaguuaaaaaacaaugccaaggaaauuggaaacggcugcuuugaauuuuaccacaaaugcgauaacacgugcauggaaagugucaaaaaugggacuuaugacuacccaaaauacucagaggaagcaaaauuaaacagagaagaaauagaugggguaaagcuggaaucaacaaggauuuaccagauuuuggcgaucuauucaacugucgccaguucauugguacugguagucucccugggggcaaucaguuucuggaugugcucuaaugggucucuacaguguagaauauguauuuaa

SEQ ID NO: 39583 - RNA, 1701 nt, Artificial Sequence
  derived and/or modified CDS sequence (wt) from hemagglutinin__InfluenzaA__AEO01492
augaaggcaauacuaguaguucugcuauauacauuugcaaccgcaaaugcagacacauuauguauagguuaucaugcgaacaauucaacagacacuguagacacaguacuagaaaagaauguaacaguaacacacucuguuaaccuucuagaagacaagcauaacgggaaacuaugcaaacuaagagggguagccccauugcauuuggguaaauguaacauugcuggcuggauccugggaaauccagagugugaaucacucuccacagcaagcucaugguccuacauuguggaaacaucuaguucagacaauggaacguguuacccaggagauuucaucgauuaugaggagcuaagagagcaauugagcucagugucaucauuugaaagguuugagauauuccccaagacaaguucauggcccaaucaugacucgaacaaagguguaacggcagcauguccucaugcuggagcaaaaagcuucuacaaaaauuuaauauggcuaguuaaaaaaggaaauucauacccaaagcucagcaaauccuacauuaaugauaaagggaaagaaguccucguguuauggggcauucaccauccaucuacuagugcugaccaacaaagucucuaucagaaugcagaugcauauguuuuuguggggacaucaagauacagcaagaaguucaagccggaaauagcaauaagacccaaagugagggaucaagaagggagaaugaacuauuacuggacacuaguagagccgggagacaaaauaacauucgaagcaacuggaaaucuagugguaccgagauaugcauucgcaauggaaagaaaugcuggaucugguauuaucauuucagauacaccaguccacgauugcaauacaacuugucagacacccaagggugcuauaaacaccagccucccauuucagaauauacauccgaucacaauuggagaauguccaaaauauguaaaaagcacaaaauugagacuggccacaggauugaggaaugucccgucuauucaaucuagaggccuauuuggggccauugccgguuucauugaagggggguggacagggaugguagauggaugguacgguuaucaccaucaaaaugagcaggggucaggauaugcagccgaccugaagagcacacagaaugccauugacaagauuacuaacaaaguaaauucuguuauugaaaagaugaauacacaguucacagcaguagguaaagaguucaaccaccuggaaaaaagaauagagaauuuaaauaaaaaaguugaugaugguuuccuggacauuuggacuuacaaugccgaacuguugguucuauuggaaaaugaaagaacuuuggacuaccacgauucaaaugugaagaacuuauaugaaaagguaagaagccaguuaaaaaacaaugccaaggaaauuggaaacggcugcuuugaauuuuaccacaaaugcgauaacacgugcauggaaagugucaaaaaugggacuuaugacuacccaaaauacucagaggaagcaaaauuaaacagagaagaaauagaugggguaaagcuggaaucaacaaggauuuaccagauuuuggcgaucuauucaacugucgccaguucauugguacugguagucucccugggggcaaucaguuucuggaugugcucuaaugggucucuacaguguagaauauguauuuaa

SEQ ID NO: 39584 - RNA, 1701 nt, Artificial Sequence
  derived and/or modified CDS sequence (wt) from hemagglutinin__InfluenzaA__AEO01493
augaaggcaauacuaguaguucugcuauauacauucgcaaccgcaaaugcagacacauuauguauagguuaucaugcgaacaauucaacagacacuguagacacaguacuagaaaagaauguaacaguaacacacucuguuaacauucuagaagacaagcauaacgggaaacuaugcaaacuaagagggguagccccacugcauuuggguaaauguaacauugcuggcuggauccugggaaauccagagugugaaucacucuccacagcaagcucaugguccuacauuguggaaacaucuaguucagacaauggaacguguuacccaggagauuucaucgauuaugaggagcuaagagagcaauugagcucagugucaucauuugaaagguuugagauauuccccaagacaaguucauggcccaaucaugacucgaacaaagguguaacggcagcauguccucaugcuggagcaaaaagcuucuacaaaaauuuaauauggcuaguuaaaaaaggaaauucauacccaaagcucagcaaauccuacauuaaugauaaagggaaagaaguccucgugcuauggggcauucaccauccaucuacuagugcugaccaacaaagucucuaucagaaugcagaugcauauguuuuuguggggacaucaagauacagcaagaaguucaagccggaaauagcaauaagacccaaagugagggaucaagaagggagaaugaacuauuacuggacacuaguagagccgggagacaaaauaacauucgaagcaacuggaaaucuagugguaccgagauaugcauucgcaauggaaagaagugcuggaucugguauuaucauuucagauacaccaguccacgauugcaauacaacuugucagacacccaagggugcuauaaacaccagccucccauuucagaauauacauccgaucacaauuggaaaauguccaaaauauguaaaaagcacaaaauugagacuggccacaggauugaggaaugucccgucuauucaaucuagaggccuauuuggggccauugccgguuucauugaagggggguggacagggaugguagauggaugguacgguuaucaccaucaaaaugagcaggggucaggauaugcagccgaccugaagagcacacagaaugccauugacgagauuacuaacaaaguaaauucuguuauugaaaagaugaauacacaguucacagcaguagguaaagaguucaaccaccuggaaaaaagaauagagaauuuaaauaaaaaaguugaugaugguuuccuggacauuuggacuuacaaugccgaacuguugguucuauuggaaaaugaaagaacuuuggacuaccacgauucaaaugugaagaacuuauaugaaaagguaagaagccaguuaaaaaacaaugccaaggaaauuggaaacggcugcuuugaauuuuaccacaaaugcgauaacacgugcauggaaagugucaaaaaugggacuuaugacuaccccaaauacucagaggaagcaaaauuaaacagagaagaaauagaugggguaaagcuggaaucaacaaggauuuaccagauuuuggcgaucuauucaacugucgccaguucauugguacugguagucucccugggggcaaucaguuucuggaugugcucuaaugggucucuacaguguagaauauguauuuaa

SEQ ID NO: 39585 - RNA, 1701 nt, Artificial Sequence
  derived and/or modified CDS sequence (wt) from hemagglutinin__InfluenzaA__AEO01494
augaaggcaauacuaguaguucugcuauauacauuugcaaccgcaaaugcagacacacuaugcacagguuaucaugcgaacaauucaacagacacuguagacacaguacuagaaaagaauguaacaguaacacacucuguuaaccuucuagaagacaagcauaacgggaaacuaugcaaacuaagagggguagccccauugcauuuggguaaauguaacauugcuggcuggauccugggaaauccagagugugaaucacucuccacagcaagcucaugguccuacauuguggaaacaucuaguucagacaauggaacguguuacccaggagauuucaucgauuaugaggagcuaagagagcaguugagcucagugucaucauuugaaagguuugagauauuucccaagacaaguucauggcccaaucaugacucgaacaaagguguaacggcagcauguccucaugcuggagcaaaaagcuucuacaaaaauuuaauauggcuaguuaaaaaaggaaauucauacccaaagcucagcaaauccuacauuaaugauaaagggaaagaaguccucgugcuauggggcauucaccauccaucuacuagugcugaccaacaaagucucuaucagaaugcagaugcauauguuuuuguggggacaucaagauacagcaagaaguucaagccggaaauagcaauaagacccaaagugagggaucaagaagggagaaugaacuauuacuggacacuaguagagccgggagacaaaauaacauucgaagcaacuggaaaucuagugguaccgagauaugcauucgcaauggaaagaaaugcuggaucugguauuaucauuucagauacaccaguccacgauugcaauacaacuugucagacacccaagggugcuauaaacaccagccucccauuucagaauauacauccgaucacaauuggaaaauguccaaaauauguaaaaagcacaaaauugagacuggccacaggauugaggaaugucccgucuauucaaucuagaggccuauuuggggccauugccgguuucauugaagggggguggacagggaugguagauggaugguacgguuaucaccaucaaaaugagcaggggucaggauaugcagccgaccugaagagcacacagaaugccauugacgagauuacuaacaaaguaaauucuguuauugaaaagaugaauacacaguucacagcaguagguaaagaguucaaccaccuggaaaaaagaauagagaauuuaaauaaaaagguugaugaugguuuccuggacauuuggacuuacaaugccgaacuguugguucuauuggaaaaugaaagaacuuuggacuaccacgauucaaaugugaagaacuuauaugaaaagguaagaaaccaguuaaaaaacaaugccaaggaaauuggaaacggcugcuuugaauuuuaccacaaaugcgauaacacgugcauggaaagugucaaaaaugggacuuaugacuacccaaaauacucagaggaagcaaaauuaaacagagaagaaauagaugggguaaagcuggaaucaacaaggauuuaccagauuuuggcgaucuauucaacugucgccaguucauugguacugguagucucccugggggcaaucaguuucuggaugugcucuaaugggucucuacaguguagaauauguauuuaa

SEQ ID NO: 39586 - RNA, 1701 nt, Artificial Sequence; identical to SEQ ID NO: 36278
  derived and/or modified CDS sequence (wt) from hemagglutinin__InfluenzaA__AEO01496

SEQ ID NO: 39587 - RNA, 1701 nt, Artificial Sequence
  derived and/or modified CDS sequence (wt) from hemagglutinin__InfluenzaA__AEO01497
augaaggcaauacuaguaguucugcuauauacauuugcaaccgcaaaugcagacacauuauguauagguuaucaugcgaacaauucaacagacacuguagacacaguacuagaaaagaauguaacaguaacacacucuguuaaccuucuagaagacaagcauaacgggaaacuaugcaaacuaagagggguagccccauugcauuuggguaaauguaacauugcuggcuggauccugggaaauccagagugugaaucacucuccacagcaagcucaugguccuacauuguggaaacaucuaguucagacaauggaacguguuacccgggagauuucaucgauuaugaggagcuaagagagcaauugagcucagugucaucauuugaaagguuugagauauuccccaagacaaguucauggcccaaucaugacucgaacaaagguguaacggcagcauguccucaugcuggagcaaaaagcuucuacaaaaauuuaauauggcuaguuaaaaaaggaaauucauacccaaagcucagcaaauccuacauuaaugauaaagggaaagaaguccucgugcuauggggcauucaccauccaucuacuagugcugaccaacaaagucucuaucagaaugcagaugcauauguuuuuguggggacaucaagauacagcaagaaguucaagccggaaauagcaauaagacccaaagugagggaacaagaagggagaaugaacuauuacuggacacuaguagagccgggagacaaaauaacauucgaagcaacuggaaaucuagugguaccgagauaugcauucgcaauggaaagaaaugcuggaucugguauuaucauuucagauacaccaguccaugauugcaauacaacuugucagacacccaagggugcuauaaacaccagccucccauuucagaauauacauccgaucacaauuggaaaauguccaaaauauguaaaaagcacaaaauugagacuggccacaggauugaggaaugucccgucuauucaaucuagaggccuauuuggggccauugccgguuucauugaagggggguggacagggaugguagauggaugguacgguuaucaccaucaaaaugagcaggggucaggauaugcagccgaccugaagagcacacagaaugccauugacgagauuacuaacaaaguaaauucuguuauugaaaagaugaauacacaguucacagcaguagguaaagaguucaaccaccuggaaaaaagaauagagaauuuaaauaaaaaaguugaugaugguuuccuggacauuuggacuuacaaugccgaacuguugguucuauuggaaaaugaaagaacuuuggacuaccacgauucaaaugugaagaacuuauaugaaaagguaagaagccaguuaaaaaacaaugccaaggaaauuggaaacggcugcuuugaauuuuaccacaaaugcgauaauacgugcauggaaagugucaaaaaugggacuuaugacuacccaaaauacucagaggaagcaaaauuaaacagagaagaaauagaugggguaaagcuggaaucaacaaggauuuaccagauuuuggcgaucuauucaacugucgccaguucauugguacugguagucucccugggggcaaucaguuucuggaugugcucuaaugggucucuacaguguagaauauguauuuaa

SEQ ID NO: 39588 - RNA, 1701 nt, Artificial Sequence; identical to SEQ ID NO: 36866
  derived and/or modified CDS sequence (wt) from hemagglutinin__InfluenzaA__AEO01498

SEQ ID NO: 39589 - RNA, 1701 nt, Artificial Sequence
  derived and/or modified CDS sequence (wt) from hemagglutinin__InfluenzaA__AEO01499
augaaggcaauacuaguaguucugcuauauacauuugcaaucgcaaaugcagacacauuauguauagguuaucaugcgaacaauucaacagacacuguagacacaguacuagaaaagaauguaacaguaacacacucuguuaaccuucuagaagacaagcauaacgggaaacuaugcaaacuaagagggguagccccauugcauuuggguaaauguaacauugcuggcuggauccugggaaauccagagugugaaucacucuccacagcaagcucaugguccuacauuguggaaacaucuaguucagacaauggaacguguuacccaggagauuucaucgauuaugaggagcuaagagagcaauugagcucagugucaucauuugaaagguuugagauauuccccaagacaaguucauggcccaaucaugacucgaacaaagguguaacggcagcauguccucaugcuggagcaaaaagcuucuacaaaaauuuaauauggcuaguuaaaaaaggaaauucauacccaaagcucagcaaauccuacauuaaugauaaagggaaagaaguccucgugcuauggggaauucaccauccauauacuagugcugaccaacaaagucucuaucagaaugcagaugcauauguuuuuguggggacaucaagauacagcaagaaguucaagccggaaauagcaauaagacccaaagugagggaucaagaagggagaaugaacuauuacuggacacuaguagagccgggagacaaaauaacauucgaagcaacuggaaaucuagugguaccgagauaugcauucgcaauggaaagaaaugcuggaucugguauuaucauuucagauacaccaguccacgauugcaauacaacuugucagacacccaagggugcuauaaacaccagccucccauuucagaauauacauccgaucacaauuggaaaauguccaaaauauguaaaaagcacaaaauugagacuggccacaggauugaggaaugucccgucuauucaaucuagaggccuauuuggggccauugccgguuucauugaagggggguggacagggaugguagauggaugguacgguuaucaccaucaaaaugagcaggggucaggauaugcagccgaccugaagagcacacagcaugccauugacgagauuacuaacaaaguaaauucuguuauugaaaagaugaauacacaguucacagcaguagguaaagaguucaaccaccuggaaaaaagaauagagaauuuaaauaaaaaaguugaugaugguuuccuggacauuuggacuuacaaugccgaacuguugguucuauuggaaaaugaaagaacuuuggacuaccacgauucaaaugugaagaacuuauaugaaaagguaagaagccaguuaaaaaacaaugccaaggaaauuggaaacggcugcuuugaauuuuaccacaaaugcgauaacacgugcauggaaagugucaaaaaugggacuuaugacuacccaaaauacucagaggaagcaaaauuaaacagagaagaaauaaaugggguaaagcuggaaucaacaaggauuuaccagauuuuggcgaucuauucaacugucgccaguucauugguacugguagucucccugggggcaaucaguuucuggaugugcucuaaugggucucuacaguguagaauauguauuuaa

SEQ ID NO: 39590 - RNA, 1701 nt, Artificial Sequence; identical to SEQ ID NO: 39391
  derived and/or modified CDS sequence (wt) from hemagglutinin__InfluenzaA__AEO01500

SEQ ID NO: 39591 - RNA, 1701 nt, Artificial Sequence; identical to SEQ ID NO: 35845
  derived and/or modified CDS sequence (wt) from hemagglutinin__InfluenzaA__AEO01501

SEQ ID NO: 39592 - RNA, 1701 nt, Artificial Sequence
  derived and/or modified CDS sequence (wt) from hemagglutinin__InfluenzaA__AEO01502
augaaggcaauacuaguaguucugcuauauacauuugcaaccgcaaaugcagacacauuauguauagguuaucaugcgaacaauucaacagacacuguagacacaguacuagaaaagaauguaacaguaacacacucuguuaaccuucuagaagacaagcauaacgggaaacuaugcaaacuaagagggguagccccauugcauuuggguaaauguaacauugcuggcuggauccugggaaauccagagugugaaucacucuccacagcaagcucaugguccuacauuguggaaacaucuaguucagacaauggaacguguuacccaggagauuucaucgauuaugaggagcuaagagagcaauugagcucagugucaucauuugaaagguuugagauauuccccaagacaaguucauggcccaaucaugacucgaacaaagguguaacggcagcauguccucaugcuggagcaaaaagcuucuacaaaaauuuaauauggcuaguuaaaaaaggaaauucauacccaaagcucagcaaauccuacauuaaugauaaagggaaagaaguccucgugcuauggggcauucaccauccaucuacuagugcugaccaacaaagucucuaucagaaugcagaugcauauguuuuuguggggacaucaagauacagcaagaaguucaagccggaaauagcaauaagacccaaagugagggaucaagaagggagaaugaacuauuacuggacacuaguagagccgggagacaaaauaacauucgaagcaacuggaaaucuagugguaccgagauaugcauucgcaauggaaagaaaugcuggaucugguauuaucauuucagauacaccaguccacgauugcaauacaacuugucagacacccaagggugcuauaaacaccagccucccauuucagaauauacauccgaucacaauuggaaaauguccaaaauauguaaaaagcacaaaauugagacuggccacaggauugaggaaugucccgucuauucaaucuagaggccuauuuggggccauugccgguuucauugaagggggguggacagggaugguagauggaugguacgguuaucaccaucaaaaugagcaggggucaggauaugcagccgaccugaagagcacacagaaugccauugacaagauuacuaacaaaguaaauucuguuauugaaaagaugaauacacaguucacagcaguagguaaagaguucaaccaccuggaaaaaagaauagagaauuuaaauaaaaaaguugaugaugguuuccuggacauuuggacuuacaaugccgaauuguugguucuauuggaaaaugaaagaacuuuggacuaccacgauucaaaugugaagaacuuauaugaaaagguaagaagccaguuaaaaaacaaugccaaggaaauuggaaacggcugcuuugaauuuuaccacaaaugcgauaacacgugcauggaaagugucaaaaaugggacuuaugacuacccaaaauacucagaggaagcaaaauuaaacagagaagaaauagaugggguaaagcuggaaucaacaaggauuuaccagauuuuggcgaucuauucaacugucgccaguucauugguacugguagucucccugggggcaaucaguuucuggaugugcucuaaugggucucuacaguguagaauauguauuuaa

SEQ ID NO: 39593 - RNA, 1701 nt, Artificial Sequence
  derived and/or modified CDS sequence (wt) from hemagglutinin__InfluenzaA__AEO01503
augaaggcaauacuaguaguucugcuauauacauuugcaaccgcaaaugcagacacauuauguauagguuaucaugcgaacaauucaacagacacuguagacacaguacuagaaaagaauguaacaguaacacacucuguuaaccuucuagaagacaagcauaacgggaaacuaugcaaacuaagagggguagccccauugcauuuggguaaauguaacauugcuggcuggauccugggaaauccagagugugaaucacucuccacagcaagcucaugguccuacauuguggaaacaucuaguucagacaauggaacguguuacccaggagauuucaucgauuaugaggagcuaagagagcaauugagcucagugucaucauuugaaagguuugagauauuccccaagacaaguucauggcccaaucaugacucgaacaaagguguaacggcagcauguccucaugcuggagcaaaaagcuucuacaaaaauuuaauauggcuaguuaaaaaaggaaauucauacccaaagcucagcaaauccuacauuaaugauaaagggaaagaaguccucgugcuauggggcauucaccauccaucuacuagugcugaccaacaaagucucuaucagaaugcagaugcauauguuuuuguggggacaucaagauacagcaagaaguucaagccggaaauagcaauaagacccaaagugagggaucaagaagggagaaugaacuauuacuggacacuaguagagccgggagacaaaauaacauucgaagcaacuggaaaucuagugguaccgagauaugcauucgcaauggaaagaaaugcuggaucugguauuaucauuucagauacaccaguccacgauugcaauacaacuugucagacacccaagggugcuauaaacaccagccucccauuucagaauauacauccgaucacaauuggaaaauguccaaaauauguaaaaagcacaaaauugagacuggccacaggauugaggaaugucccgucuauucaaucuagaggccuauuuggggccauugccgguuucauugaagggggguggacagggaugguagauggaugguacgguuaucaccaucaaaaugagcaggggucaggauaugcagccgaccugaagaguacacagcaugccauugacgagauuacuaacaaaguaaauucuguuauugaaaagaugaauacacaguucacagcaguagguaaagaguucaaccaccuggaaaaaagaauagagaauuuaaauaaaaaaguugaugaugguuuccuggacauuuggacuuacaaugccgaacuguugguucuauuggaaaaugaaagaacuuuggacuaccacgauucaaaugugaagaacuuauaugaaaagguaagaagccaguuaaaaaacaaugccaaggaaauuggaaacggcugcuuugaauuuuaccacaaaugcgauaacacgugcauggaaagugucaaaaaugggacuuaugacuacccaaaauacucagaggaagcaaaauuaaacagagaagaaauagaugggguaaagcuggaaucaacaaggauuuaccagauuuuggcgaucuauucaacugucgccaguucauugguacugguagucucccugggggcaaucaguuucuggaugugcucuaaugggucucuacaguguagaauauguauuuaa

SEQ ID NO: 39594 - RNA, 1701 nt, Artificial Sequence; identical to SEQ ID NO: 36866
  derived and/or modified CDS sequence (wt) from hemagglutinin__InfluenzaA__AEO01505

SEQ ID NO: 39595 - RNA, 1701 nt, Artificial Sequence; identical to SEQ ID NO: 39391
  derived and/or modified CDS sequence (wt) from hemagglutinin__InfluenzaA__AEO01506

SEQ ID NO: 39596 - RNA, 1701 nt, Artificial Sequence; identical to SEQ ID NO: 39390
  derived and/or modified CDS sequence (wt) from hemagglutinin__InfluenzaA__AEO01507

SEQ ID NO: 39597 - RNA, 1701 nt, Artificial Sequence; identical to SEQ ID NO: 36866
  derived and/or modified CDS sequence (wt) from hemagglutinin__InfluenzaA__AEO01508

SEQ ID NO: 39598 - RNA, 1701 nt, Artificial Sequence; identical to SEQ ID NO: 36009
  derived and/or modified CDS sequence (wt) from hemagglutinin__InfluenzaA__AEO01510

SEQ ID NO: 39599 - RNA, 1701 nt, Artificial Sequence
  derived and/or modified CDS sequence (wt) from hemagglutinin__InfluenzaA__AEO01511
augaaggcaauacuaguaguucugcuauauacauuugcaaccgcaaaugcagacacauuauguauagguuaucaugcgaacaauucaacagacacuguagacacaguacuagaaaagaauguaacaguaacacacucuguuaaccuucuagaagacaagcauaacgggaaacuaugcaaacuaagagggguaaccccauugcauuuggguaaauguaacauugcuggcuggauccugggaaauccagagugugaaucacucuccacaacaagcucaugguccuacauuguggaaacaucuaguucagacaauggaacguguuacccaggagauuucaucgauuaugaggagcuaagagagcaauugagcucagugucaucauuugaaagguuugagauauuccccaagacaaguucauggcccaaucaugacucgaacaaagguguaacggcagcauguccucaugcuggagcaaaaagcuucuacaaaaauuuaauauggcuaguuaaaaaaggaaauucauacccaaagcucagcaaauccuacauuaaugauaaagggaaagaaguccucgugcuauggggcauucaccauccaucuacuagugcugaccaacaaagucucuaucagaaugcagaugcauauguuuuuguggggacaucaagauacagcaagaaguucaagccggaaauagcaauaagacccaaagugagggaacaagaagggagaaugaacuauuacuggacacuaguagagccgggagacaaaauaacauucgaagcaacuggaaaucuagugguaccgagauaugcauucgcaauggaaagaaaugcuggaucugguauuaucauuucagauacaccaguccacgauugcaauacaacuugucagacacccaagggugcuauaaacaccagccucccauuucagaauauacauccgaucacaauuggaaaauguccaaaauauguaaaaagcacaaaauugagacuggccacuggauugaggaaugucccgucuauucaaucuagaggccuauuuggggccauugccgguuucauugaagggggguggacagggaugguagauggaugguacgguuaucaccaucaaaaugagcaggggucaggauaugcagccgaccugaagagcacacagaaugccauugacaagauuacuaacaaaguaaauucuguuauugaaaagaugaauacacaguucacagcaguggguaaagaguucaaccaccuggaaaaaagaauagagaauuuaaauaaaaaaguugaugaugguuuccuggacauuuggacuuacaaugccgaacuguugguucuauuggaaaaugaaagaacuuuggacuaccacgauucaaaugugaagaacuuauaugaaaagguaagaagccaguuaaaaaacaaugccaaggaaauuggaaacggcugcuuugaauuuuaccacaaaugcgauaacacgugcauggaaagugucaaaaaugggacuuaugacuacccaaaauacucagaggaagcaaaauuaaacagagaagaaauagaugggguaaagcuggaaucaacaaggauuuaccagauuuuggcgaucuauucaacugucgccaguucauugguacugguagucucccugggggcaaucaguuucuggaugugcucuaaugggucucuacaguguagaauauguauuuaa

SEQ ID NO: 39600 - RNA, 1701 nt, Artificial Sequence
  derived and/or modified CDS sequence (wt) from hemagglutinin__InfluenzaA__AEO01512
augaaggcaauacuaguaguucugcuauauacauuugcaaccgcaaaugcagacacauuauguauagguuaucaugcgaacaauucaacagacacuguagacacaguacuagaaaagaauguaacaguaacacacucuguuaaccuucuagaagacaagcauaacgggaaacuaugcaaacuaagagggguagccccauugcauuuggguaaauguaacauugcuggcuggauccugggaaauccagagugugaaucacucuccacagcaagcucaugguccuacauuguggaaacaucuaguucagacaauggaacguguuacccgggagauuucaucgauuaugaggagcuaagagagcaauugagcucagugucaucauuugaaagguuugagauauuccccaagacaaguucauggcccaaucaugacucgaacaaagguguaacggcagcauguccucaugcuggagcaaaaagcuucuacaaaaauuuaauauggcuaguuaaaaaaggaaauucauacccaaagcucagcaaauccuacauuaaugauaaagggaaagaaguccucgugcuauggggcauucaccauccaucuacuagugcugaccaacaaagucucuaucagaaugcagaugcauauguuuuuguggggacaucaagauacagcaagaaguucaagccggaaauagcaauaagacccaaagugagggaacaagaagggagaaugaacuauuacuggacacuaguagagccgggagacaaaauaacauucgaagcaacuggaaaucuagugguaccgagauaugcauucgcaauggaaagaaaugcuggaucugguauuaucauuucagauacaccaguccaugauugcaauacaacuugucagacacccaagggugcuauaaacaccagccucccauuucagaauauacauccgaucacaauuggaaaauguccaaaauauguaaaaagcacaaaauugagacuggccacaggauugaggaaugucccgucuauucaaucuagaggccuauuuggggccauugccgguuucauugaagggggguggacagggaugguagauggaugguacgguuaucaccaucaaaaugagcaggggucaggauaugcagccgaccugaagagcacacagaaugccauugacgagauuacuaacaaaguaaauucuguuauugaaaagaugaauacacaguucacagcaguagguaaagaguucaaccaccuggaaaaaagaauagagaauuuaaauaaaaaaguugaugaugguuuccuggacauuuggacuuacaaugccgaacuguugguucuauuggaaaaugaaagaacuuuggacuaccacgauucaaaugugaagaacuuauaugaaaagguaagaagccaguuaaaaaacaaugccaaggaaauuggaaacggcugcuuugaauuuuaccacaaaugcgauaacaagugcauggaaagugucaaaaaugggacuuaugacuacccaaaauacucagaggaagcaaaauuaaacagagaagaaauagaugggguaaagcuggaaucaacaaggauuuaccagauuuuggcgaucuauucaacugucgccaguucauugguacugguagucucccugggggcaaucaguuucuggaugugcucuaaugggucucuacaguguagaauauguauuuaa

SEQ ID NO: 39601 - RNA, 1701 nt, Artificial Sequence
  derived and/or modified CDS sequence (wt) from hemagglutinin__InfluenzaA__AEO01513
augaaggcaauacuagcaguucugcuauauacauuugcaaccgcaaaugcagacacauuauguauagguuaucaugcgaacaauucaacagacacuguagacacaguacuagaaaagaauguaacaguaacacacucuguuaacauucuagaagacaagcauaacgggaaacuaugcaaacuaagagggguagccccauugcauuuggguaaauguaacauugcuggcuggauccugggaaauccagagugugaaucacucuccacagcaagcucaugguccuacauuguggaaacaucuaguucagacaauggaacguguuacccaggagauuucaucgauuaugaggagcuaagagagcaauugagcucagugucaucauuugaaagguuugagauauuccccaagacaaguucauggcccaaucaugacucgaacaaagguguaacggcagcauguccucaugcuggagcaaaaagcuucuacaaaaauuuaauauggcuaguuaaaaaaggaaauucauacccaaagcucagcaaauccuacauuaaugauaaagggaaagaaguccucgugcuauggggcauucaccauccaucuacuagugcugaccaacaaagucucuaucagaaugcagaugcauauguuuuuguggggucaucaagauacagcaagaaguucaagccggaaauagcaauaagacccaaagugagggaucaagaagggagaaugaacuauuacuggacacuaguagagccgggagacaaaauaacauucgaagcaacuggaaaucuagugguaccgagauaugcauucgcaauggaaagaaaugcuggaucugguauuaucauuucagauacaccaguccacgauugcaauacaacuugucagacacccaagggugcuauaaacaccagccucccauuucagaauauacauccggucacaauuggaaaauguccaaaauauguaaaaagcacaaaauugagacuggccacaggauugaggaaugucccgucuauucaaucuagaggccuauuuggggccauugccgguuucauugaagggggguggacagggaugguagauggaugguacgguuaucaccaucaaaaugagcaggggucaggauaugcagccgaccugaagagcacacagaaugccauugacgagauuacuaacaaaguaaauucuguuauugaaaagaugaauacacaguucacagcaguagguaaagaguucaaccaccuggaaaaaagaauagagaauuuaaauaaaaaaguugaugaugguuuccuggacauuuggacuuacaaugccgaacuguugguucuauuggaaaaugaaagaacuuuggacuaccacgauucaaaugugaagaacuuauaugaaaagguaagaagccagcuaaaaaacaaugccaaggaaauuggaaacggcugcuuugaauuuuaccacaaaugcgauaacacgugcauggaaagugucaaaaaugggacuuaugacuacccaaaauacucagaggaagcaaaauuaaacagagaagaaauagaugggguaaagcuggaaucaacaaggauuuaccagauuuuggcgaucuauucaacugucgccaguucauugguacugguagucucccugggggcaaucaguuucuggaugugcucuaaugggucucuacaguguagaauauguauuuaa

SEQ ID NO: 39602 - RNA, 1701 nt, Artificial Sequence
  derived and/or modified CDS sequence (wt) from hemagglutinin__InfluenzaA__AEO01514
augaaggcaauacuaguaguucugcuauauacauuugcaaccgcaaaugcagacacauuauguauagguuaucaugcaaacaauucaacagacacuguagacacaguacuagaaaagaauguaacaguaacacacucuguuaaccuucuagaagacaugcauaacgggaaacuaugcaaacuaagagggguagccccauugcauuuggguaaauguaacauugcuggcuggauccugggaaauccagagugugaaucacucuccacagcaagcucaugguccuacauuguggaaacaucuaguucagacaauggaacguguuacccaggagauuucaucgauuaugaggagcuaagagagcaauugagcucagugucaucauuugaaagguuugagauauuccccaagacaaguucauggcccaaucaugacucgaacaaagguguaacggcagcauguccucaugcuggagcaaaaagcuucuacaaaaauuuaauauggcuaguuaaaaaaggaaauucauacccaaagcucagcaaauccuacauuaaugauaaagggaaagaaguccucgugcuauggggcauucaccauccaucuacuagugcugaccaacaaagucucuaucagaaugcagaugcauauguuuuuguggggacaucaagauacagcaagaaguucaaaccggaaauagcaauaagacccaaagugagggaacaagaagggagaaugaacuauuacuggacacuaguagagccgggagacaaaauaacauucgaagcaacuggaaaucuagugguaccgagauaugcauucgcaauggaaagaaaugcuggaucugguauuaucauuucagauacaccaguccacgauugcaauacaacuugucagacacccaagggugcuauaaacaccagccucccauuucagaauauacauccgaucacaauuggaaaauguccaaaauauguaaaaagcacaaaauugagacuggccacuggauugaggaaugucccgucuauucaaucuagaggccuauuuggggccauugccgguuucauugaagggggguggacagggaugguagauggaugguacgguuaucaccaucaaaaugagcaggggucaggauaugcagccgaccugaagagcacacagaaugccauugacaagauuacuaacaaaguaaauucuguuauugaaaagaugaauacacaguucacagcaguggguaaagaguucaaccaccuggaaaaaagaauagagaauuuaaauaaaaaaguugaugaugguuuccuggacauuuggacuuacaaugccgaacuguugguucuauuggaaaaugaaagaacuuuggacuaccacgauucaaaugugaagaacuuauaugaaaagguaagaagccaguuaaaaaacaaugccaaggaaauuggaaacggcugcuuugaauuuuaccacaaaugcgauaacacgugcauggaaagugucaaaaaugggacuuaugacuacccaaaauacucugaggaagcaaaauuaaacagagaagaaauagaugggguaaagcuggaaucaacaaggauuuaccagauuuuggcgaucuauucaacugucgccaguucauugguacugguagucucccugggggcaaucaguuucuggaugugcucuaaugggucucuacaguguagaauauguauuuaa

SEQ ID NO: 39603 - RNA, 1701 nt, Artificial Sequence
  derived and/or modified CDS sequence (wt) from hemagglutinin__InfluenzaA__AEO01515
augaaggcaauacuaguaguucugcuauauacauuugcaaccgcaaaugcagacacauuauguauagguuaucaugcgaacaauucaacagacacuguagacacaguacuagaaaagaauguaacaguaacacacucuguuaacauucuagaagacaagcauaacgggaaacuaugcaaacuaagagggguagccccauugcauuuggguaaauguaacauugcuggcuggauccugggaaauccagagugugaaucacucuccacagcaagcucaugguccuacauuguggaaacaucuaguucagacaauggaacguguuacccaggagauuucaucgauuaugaggagcuaagagagcaauugagcucagugucaucauuugaaagguuugagauauuccccaagacaaguucauggcccaaucaugacucgaacaaagguguaacggcagcauguccucaugcuggagcaaaaagcuucuacaaaaauuuaauauggcuaguuaaaaaaggaaauucauacccaaagcucagcaaauccuacauuaaugauaaagggaaagaaguccucgugcuauggggcauucaccauccaucuacuagugcugaccaacaaagucucuaucagaaugcagaugcauauguuuuuguggggacaucaagauacagcaagaaguucaagccggaaauagcaauaagacccaaagugagggaucaagaagggagaaugaacuauuacuggacacuaguagagccgggagacaaaauaacguucgaagcaacuggaaaucuagugguaccgagauaugcauucgcaauggaaagaaaugcuggaucugguauuaucauuucagauacaccaguccacgauugcaauacaacuugucagacacccaagggugcuauaaacaccagccucccauuucagaauauacauccgaucacaauuggaaaauguccaaaauauguaaaaagcacaaaauugagacuggccacaggauugaggaaugucccgucuauucaaucuagaggccuauuuggggccauugccgguuucauugaagggggguggacagggaugguagauggaugguacgguuaucaccaucaaaaugagcaggggucaggauaugcagccgaccugaagagcacacagaaugccauugacgagauuacuaacaaaguaaauucuguuauugaaaagaugaauacacaguucacagcaguagguaaagaguucaaccaccuggaaaaaagaauagagaauuuaaauaaaaaaguugaugaugguuuccuggacauuuggacuuacaaugccgaacuguugguucuauuggaaaaugaaagaacuuuggacuaccacgauucaaaugugaagaacuuauaugaaaagguaagaagccaguuaaaaaacaaugccaaggaaauuggaaacggcugcuuugaauuuuaccacaaaugcgauaacacgugcauggaaagugucaaaaaugggacuuaugacuaccccaaauacucagaggaagcaaaauuaaacagagaaaaaauagaugggguaaagcuggaaucaacaaggauuuaccagauuuuggcgaucuauucaacugucgccaguucauugguacugguagucucccugggggcaaucaguuucuggaugugcucuaaugggucucuacaguguagaauauguauuuaa

SEQ ID NO: 39604 - RNA, 1701 nt, Artificial Sequence; identical to SEQ ID NO: 39450
  derived and/or modified CDS sequence (wt) from hemagglutinin__InfluenzaA__AEO01516

SEQ ID NO: 39605 - RNA, 1701 nt, Artificial Sequence
  derived and/or modified CDS sequence (wt) from hemagglutinin__InfluenzaA__AEO01517
augaaggcaauacuaguaguucugcuauauacauuugcaaccgcaaaugcagacacauuauguauagguuaucaugcgaacaauucaacagacacuguagacacaguacuagaaaagaauguaacaguaacacacucuguuaaccuucuagaagacaagcauaacgggaaacuaugcaaacuaagagggguagccccauugcauuuggguaaauguaacauugcuggcuggauccugggaaauccagagugugaaucacucuccacagcaagcucaugguccuacauuguggaaacaucuaguucagacaauggaacguguuacccaggagauuucaucgauuaugaggagcuaagagagcaauugagcucagugucaucauuugaaagguuugagauauuccccaagacaaguucauggcccaaucaugacucgaacaaagguguaacggcagcauguccucaugcuggagcaaaaagcuucuacaaaaauuuaauauggcuaguuaaaaaagaaaauucauacccaaagcucagcaaauccuacauuaaugauaaagggaaagaaguccucgugcuauggggcauucaccauccaucuacuagugcugaccaacaaagucucuaucagaaugcagaugcauauguuuuuguggggacaucaagauacagcaagaaguucaagccggaaauagcaauaagacccaaagugagggaucaagaagggagaaugaacuauuacuggacacuaguagagccgggagacaaaauaacauucgaagcaacuggaaaucuagugguaccgagauaugcauucgcaauggaaagaaaugcuggaucugguauuaucauuucagauacaccaguccacgauugcaauacaacuugucagacacccgagggugcuauaaacaccagccucccauuucagaauauacauccgaucacaauuggaaaauguccaaaauauguaaaaagcacaaaauugagacuggccacaggauugaggaaugucccgucuauucaaucuagaggccuauuuggggccauugccgguuucauugaagggggguggacagggaugguagauggaugguacgguuaucaccaucaaaaugagcaggggucaggauaugcagccgaccugaagagcacacagaaugccauugacgagauuacuaacaaaguaaauucuguuauugaaaagaugaauacacaguucacagcaguagguaaagaguucaaccaccuggaaaaaagaauagagaauuuaaauaaaaaaguugaugaugguuuccuggacauuuggacuuacaaugccgaacuguugguucuauuggaaaaugaaagaacuuuggacuaccacgauucaaaugugaagaacuuauaugaaaagguaagaagccaguuaaaaaacaaugccaaggaaauuggaaacggcugcuuugaauuuuaccacaaaugcgauaacacgugcauggaaagugucaaaaaugggacuuaugacuacccaaaauacucagaggaggcaaaauuaaacagagaagaaauagaugggguaaagcuggaaucaacaaggauuuaccagauuuuggcgaucuacucaacugucgccaguucauugguacugguagucucccugggggcaaucaguuucuggaugugcucuaaugggucucuacaguguagaauauguauuuaa

SEQ ID NO: 39606 - RNA, 1701 nt, Artificial Sequence
  derived and/or modified CDS sequence (wt) from hemagglutinin__InfluenzaA__AEO01518
augaaggcaauacuaguaguucugcuauauacauuugcaaccgcaaaugcagacacauuauguauagguuaucaugcgaacaauucaacagacacuguagacacaguacuagaaaagaauguaacaguaacacacucuguuaaccuucuagaagacaagcauaacgggaaacuaugcaaacuaagagggguagccccauugcauuuggguaaauguaacauugcuggcuggauccugggaaauccagagugugaaucacucuccacagcaagcucaugguccuacauuguggaaacaucuaguucagacaauggaacguguuacccaggagauuucaucgauuaugaggagcuaagagagcaauugagcucagugucaucauuugaaagguuugagauauuccccaagacaaguucauggcccaaucaugacucgaacaaagguguaacggcagcauguccucaugcuggagcaaaaagcuucuacaaaaauuuaauauggauaguuaaaaaaggaaauucauacccaaagcucaacaaauccuacauuaaugauaaagggaaagaaguccucgugcuauggggcauucaccauccaucuacuagugcugaccaacaaagucucuaucagaaugcagaugcauauguuuuuguggggacaucaagauacagcaagaaguucaagccggaaauagcaauaagacccaaagugagggaucaagaagggagaaugaacuauuacuggacacuaguagagccgggagacaaaauaacauucgaagcaacuggaaaucuagugguaccgagauaugcauucgcaauggaaagaaaugcuggaucugguauuaucauuucagauacaccaguccacgauugcaauacaacuugucagacacccaagggugcuauaaacaccagccucccauuucagaauauacacccgaucacaauuggagaauguccaaaauauguaaaaagcacaaaauugagacuggccacaggauugaggaaugucccgucuauucaaucuagaggccuauuuggggccauugccgguuucauugaagggggguggacagggaugguagauggaugguacgguuaucaccaucaaaaugagcaggggucaggauaugcagccgaccugaagagcacacagaaugccauugacaagauuacuaacaaaguaaauucuguuauugaaaagaugaauacacaguucacagcaguagguaaagaguucaaccaccuggaaaaaagaauagagaauuuaaauaaaaaaguugaugaugguuuccuggacauuuggacuuacaaugccgaacuguugguucuauuggaaaaugaaagaacuuuggacuaccacgauucaaaugugaagaacuuauaugaaaagguaagaagccaguuaaaaaacaaugccaaggaaauuggaaacggcugcuuugaauuuuaccacaaaugcgauaacacgugcauggaaagugucaaaaaugggacuuaugacuacccaaaauacucagaggaagcaaaauuaaacagagaagaaauagaugggguaaagcuggaaucaacaaggauuuaccagauuuuggcgaucuauucaacugucgccaguucauugguacugguagucucccugggggcaaucaguuucuggaugugcucuaaugggucucuacaguguagaauauguauuuaa

SEQ ID NO: 39607 - RNA, 1701 nt, Artificial Sequence
  derived and/or modified CDS sequence (wt) from hemagglutinin__InfluenzaA__AEO01519
augaaggcaauacuaguaguucugcuauauacauuugcaaccgcaaaugcagacacauuauguauagguuaucaugcgaacaauucaacagacacuguagacacaguacuagaaaagaauguaacaguaacacacucuguuaaccuucuagaagacaagcauaacgggaaacuaugcaaacuaagagggguagccccauugcauuuggguaaauguaacauugcuggcuggauccugggaaauccagagugugaaucacucuccacagcaagcucaugguccuacauuguggaaacaucuaguucagacaauggaacguguuacccaggagauuucaucgauuaugaggagcuaagagagcaauugagcucagugucaucauuugaaagguuugagauauuccccaagacaaguucauggcccaaucaugacucgaacaaagguguaacggcagcauguccucaugcuggagcaaaaagcuucuacaaaaauuuaauauggcuaguuaaaaaaggaaauucauacccaaagcucagcaaauccuacauuaaugauaaagggaaagaaguccucgugcuauggggcauucaccauccaucuacuagugcugaccaacaaagucucuaucagaaugcagaugcauauguuuuuguggggacaucaagauacagcaagaaguucaggccggaaauagcaauaagacccaaagugagggaacaagaagggagaaugaacuauuacuggacacuaguagagccgggagacaaaauaacauucgaagcaacuggaaaucuagugguaccgagauaugcauucgcaauggaaagaaaugcuggaucugguauuaucauuucagauacaccaguccacgauugcaauacaacuugucagacacccaagggugcuauaaacaccagccucccauuucagaauauacauccgaucacaauuggaaaauguccaaaauauguaaaaagcacaaaauugagacuggccacaggauugaggaauaucccgucuauucaaucuagaggccuauuuggggccauugccgguuucauugaagggggguggacagggaugguagauggaugguacgguuaucaccaucaaaaugagcaggggucaggauaugcagccgaccugaagagcacacagaaugccauugacgagauuacuaacaaaguaaauucuguuauugaaaagaugaauacacaguucacagcaguagguaaagaguucaaccaccuggaaaaaagaauagagaauuuaaauaaaaaaguugaugaugguuuccuggacauuuggacuuacaaugccgaacuguugguucuauuggaaaaugaaagaacuuuggacuaccacgauucaaaugugaagaacuuauaugaaaagguaagaagccaguuaaaaaacaaugccaaggaaauuggaaacggcugcuuugaauuuuaccacaaaugcgauaacacgugcauggaaagugucaaaaaugggacuuaugacuacccaaaauacucagaggaagcaaaauuaaacagagaagaaauagaugggguaaagcuggaaucaacaaggauuuaccagauuuuggcgaucuauucaacugucgccaguucauugguacugguagucucccugggggcaaucaguuucuggaugugcucuaaugggucucuacaguguagaauauguauuuaa

SEQ ID NO: 39608 - RNA, 1701 nt, Artificial Sequence
  derived and/or modified CDS sequence (wt) from hemagglutinin__InfluenzaA__AEO01520
augaaggcaauacuaguaguucugcuauauacauuugaaaccgcaaaugcagacacauuauguauagguuaucaugcgaacaauucaacagacacuguagacacaguacuagaaaagaauguaacaguaacacacucuguuaaccuucuagaagacaagcauaacgggaaacuaugcaaacuaagagggguagccccauugcauuuggguaaauguaacauugcuggcuggauccugggaaauccagagugugaaucacucuccacagcaagcucaugguccuacauuguggaaacaucuaguucagacaauggaacguguuacccaggagauuucaucaauuaugaggagcuaagagagcaauugagcucagugucaucauuugaaagguuugagauauuccccaagacaaguucauggcccaaucaugacucgaacaaagguguaacggcagcauguccucaugcuggagcaaaaagcuucuacaaaaauuuaauauggcuaguuaaaaaaggaaauucauacccaaagcucagcaaauccuacauuaaugauaaagggaaagaaguccucgugcuauggggcauucaccauccaucuacuagugcugaccaacaaagucucuaucagaaugcagaugcauauguuuuuguggggacaucaagauacagcaagaaguucaagccggaaauagcaauaagacccaaagugagggaucaagaagggagaaugaacuauuacuggacacuaguagagccgggagacaaaauaacauucgaagcaacuggaaaucuagugguaccgagauaugcauucgcaauggaaagaaaugcuggaucugguauuaucaucucagauacaccaguccacgauugcaauacaacuugucagacacccaauggugcuauaaacaccagccucccauuucagaauauacauccgaucacaauuggaaaauguccaaaauauguaaaaagcacaaaauugagacuggccacaggauugaggaaugucccgucuauucagucuagaggccuauuuggggccauugccgguuucauugaagggggguggacagggaugguagauggaugguacgguuaucaccaucaaaaugagcaggggucaggauaugcagccgaccugaagagcacacagaaugccauugacaagauuacuaacaaaguaaauucuguuauugaaaagaugaauacacaguucacagcaguagguaaagaguucaaccaccuggaaaaaagaauagagaauuuaaauaaaaaaguugaugaugguuuccuggacauuuggacuuacaaugccgaacuguugguucuauuggaaaaugaaagaacuuuggacuaccacgauucaaaugugaagaacuuauaugaaaagguaagaagccaguuaaaaaacaaugccaaggaaauuggaaacggcugcuuugaauuuuaccacaaaugcgauaacacgugcauggaaagugucaaaaaugggacuuaugacuacccaaaauacucagaggaagcaaaauuaaacagagaagaaauagaugggguaaagcuggaaucaacaaggauuuaccagauuuuggcgaucuauucaacugucgccaguucauugguacugguagucucccugggggcaaucaguuucuggaugugcucuaaugggucucuacaguguagaauauguauuuaa

SEQ ID NO: 39609 - RNA, 1701 nt, Artificial Sequence
  derived and/or modified CDS sequence (wt) from hemagglutinin__InfluenzaA__AEO01521
augaaggcaauacuaguaguucugcuauauacauuugcaaccgcaaaugcagacacauuauguauagguuaucaugcgaacaauucaacagacacuguagacacaguacuagaaaagaauguaacaguaacacacucuguuaacauucuagaagacaagcauaacgggaaacuaugcaaacuaagagggguagccccauugcauuuggguaaauguaacauugcuggcuggauccugggaaauccagagugugaaucacucuccacagcaagcucaugguccuacauuguggaaacaucuaguucagacaauggaacguguuacccaggagauuucaucgauuaugaggagcuaagagagcaauugagcucagugucaucauuugaaagguuugagauauuccccaagacaaguucauggcccaaucaugacucgaacaaagguguaacggcagcauguccucaugcuggagcaaaaagcuucuacaaaaauuuaauuuggcuaguuaaaaaaggaaauucauacccaaagcucagcaaauccuacauuaaugauaaagggaaagaaguccucgugcuauggggcauucaccauccaucuacuagugcugaccaacaaagucucuaucagaaugcagaugcauauguuuuuguggggucaucaagauacagcaagaaguucaagccggaaauagcaauuagacccaaagugagggaucaagaagggagaaugaacuauuacuggacacuaguagagccgggagacaaaauaacauucgaagcaacuggaaaucuagugguaccaagauaugcauucgcaauggaaagaaaugcuggaucugguauuaucauuucagauacaccaguccaugauugcaauacaacuugucagacacccaagggugcuauaaacaccagccucccauuucagaauauacauccgaucacaauuggaaaauguccaaaauauguaaaaagcacaaaauugagacuggccacaggauugaggaaugucccgucuauucaaucuagaggccuauuuggggccauugccgguuucauugaagggggguggacagggaugguagauggaugguacgguuaucaccaucaaaaugagcaggggucaggauaugcagccgaccugaagagcacacagaaugccauugacgagauuacuaacaaaguaaauucuguuauugaaaagaugaauacacaguucacagcaguagguaaagaguucaaccaccuggaaaaaagaauagagaauuuaaauaaaaaaguugaugaugguuuccuggacauuuggacuuacaaugccgaacuguugguucuauuggaaaaugaaagaacuuuggacuaccacgauucaaaugugaagaacuuauaugaaaagguaagaagccagcuaaaaaacaaugccaaggaaguuggaaacggcugcuuugaauuuuaccacaaaugcgauaacacgugcauggaaagugucaaaaaugggacuuaugacuacccaaaauacucagaggaagcaaaauuaaacagagaagaaauagaugggguaaagcuggaaucaacaaggauuuaccagauuuuggcgaucuauucaacugccgccaguucauugguacugguagucucccugggggcaaucaguuucuggaugugcucuaaugggucucuacaguguagaauauguauuuaa

SEQ ID NO: 39610 - RNA, 1701 nt, Artificial Sequence
  derived and/or modified CDS sequence (wt) from hemagglutinin__InfluenzaA__AEO01522
augaaggcaauacuaguaguucugcuauauacauuugcaaccgcaaaugcagacacauuauguauagguuaucaugcgaacaauucaacagacacuguagacacaguacuagaaaagaauguaacaguaacacacucuguuaaccuucuagaagacaagcauaacgggaaacuaugcaaacuaagagggguagccccauugcauuuggguaaauguaacauugcuggcuggauccugggaaauccagagugugaaucacucuccacagcaagcucaugguccuacauuguggaaacaucuaguucagacaauggaacguguuacccaggagauuucaucgauuaugaggagcuaagagagcaauugagcucagugucaucauuugaaagguuugagauauuccccaagacaaguucauggcccaaucaugacucgaacaaagguguaacggcagcauguccucaugcuggagcaaaaagcuucuacaaaaauuuaauauggcuaguuaaaaaaggaaauucauacccaaagcucagcaaauccuacauuaaugauaaagggaaagaaguccucgugcuauggggcauucaccauccaucuacuagugcugaccaacagagucucuaucagaaugcagaugcauauguuuuuguggggacaucaagauacagcaagaaguucaagccggaaauagcaauaagacccaaagugagggaucaagaagggagaaugaacuauuacuggacacuaguagagccgggagacaaaauaacauucgaagcaacuggaaaucuagugguaccgagauaugcauucgcaauggaaagaaaugcuggaucugguauuaucauuucagauacaccaguccacgauugcaauacaacuugucagacacccaagggugcuauaaauaccagccucccauuucagaauguacauccgaucacaauuggaaaauguccaaaauauguaaaaagcacaaaauugagacuggccacaggauugaggaaugucccgucuauucaaucuagaggccuauuuggggccauugccgguuucauugaagggggguggacagggaugguagauggaugguacgguuaucaccaucaaaaugagcaggggucaggauaugcagccgaccugaagagcacacagaaugccauugacgagauuacuaacaaaguaaauucuguuauugaaaagaugaauacacaguucacagcaguagguaaagaguucaaccaccuggaaaaaagaauagagaauuuaaauaaaaaaguugaugaugguuuccuggacauuuggacuuacaaugccgaacuguugguucuauuggaaaaugaaagaacuuuggacuaccacgauucaaaugugaagaacuuauaugaaaagguaagaagccaguuaaaaaacaaugccaaggaaauuggaaacggcugcuuugaauuuuaccacaaaugcgauaacacgugcauggaaagugucaaaaaugggacuuaugacuacccaaaauacucagaggaagcaaaauuaaacagagaagaaauagaugggguaaagcuggaaucaacaaggauuuaccagauuuuggcgaucuauucaacugucgccaguucauugguacugguagucucccugggggcaaucaguuucuggaugugcucuaaugggucucuacaguguagaauauguauuuaa

SEQ ID NO: 39611 - RNA, 1701 nt, Artificial Sequence; identical to SEQ ID NO: 35845
  derived and/or modified CDS sequence (wt) from hemagglutinin__InfluenzaA__AEO01523

SEQ ID NO: 39612 - RNA, 1701 nt, Artificial Sequence; identical to SEQ ID NO: 39439
  derived and/or modified CDS sequence (wt) from hemagglutinin__InfluenzaA__AEO01524

SEQ ID NO: 39613 - RNA, 1701 nt, Artificial Sequence
  derived and/or modified CDS sequence (wt) from hemagglutinin__InfluenzaA__AEO01525
augaaggcaauacuaguaguucugcuauauacauuugcaaccgcaaaugcagacacauuauguauagguuaucaugcgaacaauucaacagacacuguagacacaguacuagaaaagaauguaacaguaacacacucuguuaaccuucuagaagacaagcauaacgggaaacuaugcaaacuaagagggguagccccauugcauuuggguaaauguaacauugcuggcuggauccugggaaauccagagugugaaucacucuccacagcaagcucaugguccuacauuguggaaacaucuaguucaggcaauggaacguguuacccaggagauuucaucgauuaugaggagcuaagagagcaauugagcucagugucaucauuugaaagguuugagauauuccccaagacaaguucauggcccaaucaugacucgaacaaagguguaacggcagcauguccucaugcuggagcaaaaagcuucuacaaaaauuuaauauggcuaguuaaaaaaggaaacucauacccaaggcucagcaaauccuacauuaaugauaaagggaaagaaguccucgugcuauggggcauucaccauccaucuacuagugcugaccaacaaagucucuaucagaaugcagaugcauauguuuuuguggggacaucaagauacagcaagaaguucaagccggaaauagcaauaagacccaaagugagggaucaagaagggaggaugaacuauuacuggacacuaguagagccgggagacaaaauaacauucgaagcaacuggaaaccuagugguaccgagauaugcauucgcaauggaaagaaaugcuggaucugguauuaucauuucagauacaccaguccacgacugcaauacaacuugucagacacccaagggugcuauaaacaccagccucccauuucagaauauacauccgaucacaauuggaaaauguccaaaauauguaaaaagcacaaaauugagacuggccacaggauugaggaaugucccgucuauucaaucuagaggccuauuuggggccauugccgguuucauugaagggggguggacagggaugguagauggaugguacgguuaucaccaucaaaaugagcaggggucaggauaugcagccgaccugaaaagcacacagaaugccauugacgagauuacuaacaaaguaaauucuguuauugaaaagaugaauacacaguucacagcaguagguaaagaguucaaccaccuggaaaaaagaauagagaauuuaaauaaaaaaguugaugaugguuuccuggacauuuggacuuacaaugccgaacuguugguucuauuggaaaaugaaagaacuuuggacuaccacgauucaaaugugaagaauuuauaugaaaagguaagaagccaguuaaaaaacaaugccaaggaaauuggaaacggcugcuuugaauuuuaccacaaaugcgauaacacgugcauggaaagugucaaaaaugggacuuaugacuacccaaaauacucagaggaagcaaaauuaaacagagaagaaauagaugggguaaagcuggaaucgacaaggauuuaccagauuuuggcgaucuauucaacugucgccaguucauugguacugguagucucccugggggcaaucaguuucuggaugugcucuaaugggucucuacaguguagaauauguauuuaa

SEQ ID NO: 39614 - RNA, 1701 nt, Artificial Sequence
  derived and/or modified CDS sequence (wt) from hemagglutinin__InfluenzaA__AEO01526
augaaggcaauacuaguaguucugcuauauacauuugcaaccgcaaaugcagacacauuauguauagguuaucaugcgaacaauucaacagacacuguagacacaguacuagaaaagaauguaacaguaacacacucuguuaaccuucuagaagacaagcauaacgggaaacuaugcaaacuaagagggguagccccauugcauuuggguaaauguaacauugcuggcuggauccugggaaauccagagugugaaucacucuccacagcaagcucaugguccuacauuguggaaacaucuaguucagacaauggaacguguuacccaggagauuucaucgauuaugaggagcuaagagagcaauugagcucagugucaucauuugaaagguuugagauauuccccaagacaaguucauggcccaaucaugacucgaacaaagguguaacggcagcauguccucaugcuggagcaaaaagcuucuacaaaaauuugauauggcuaguuaaaaaaggaaauucauacccaaagcucagcaaauccuacauuaaugauaaagggaaagaaguccucgugcuauggggcauucaccauccaucuacuagugcugaccaacaaagucucuaucagaaugcagaugcauauguuuuuguggggacaucaagauacagcaagaaguucaagccggaaauagcaauaagacccaaagugagggaucaagaagggagaaugaacuauuacuggacacuaguagagccgggagacaaaauaacauucgaagcaacuggaaaucuagugguaccgagauaugcauucgcaauggaaagaaaugcuggaucugguauuaucauuucagauacaccaguccacgauugcaauacaacuugucagacacccaagggugcuauaaacaccagccucccauuucagaauauacauccgaucacaauuggaaaauguccaaaauauguaaaaagcacgaaauugagacuggccacaggauugaggaaugucccgucuauucaaucuagaggccuauuuggggccauugccgguuucauugaagggggguggacagggaugguagauggaugguacgguuaucaccaucaaaaugagcaggggucaggauaugcagccgaccugaagagcacacagaaugccauugacaagauuacuaacaaaguaaauucuguuauugaaaagaugaauacacaguucacagcaguagguaaagaguucaaccaccuggaaaaaagaauagagaauuuaaauaaaaaaguugaugaugguuuccuggacauuuggacuuacaaugccgaacuguugguucuauuggaaaaugaaagaacuuuggacuaccacgauucaaaugugaagaacuuauaugaaaagguaagaagccaguuaaaaaacaaugccaaggaaauuggaaacggcugcuuugaauuuuaccacaaaugcgauaacacgugcauggaaagugucaaaaaugggacuuaugacuacccaaaauacucagaggaagcaaaauuaaacagagaagaaauagaugggguaaagcuggaaucaacaaggauuuaccagauuuuggcgaucuauucaacugucgccaguucauugguacugguagucucccugggggcaaucaguuucuggaugugcucuaaugggucucuacaguguagaauauguauuuaa

SEQ ID NO: 39615 - RNA, 1701 nt, Artificial Sequence
  derived and/or modified CDS sequence (wt) from hemagglutinin__InfluenzaA__AEO01527
augaaggcaauacuaauaguucugcuauauacauuugcaaccgcaaaugcagacacauuauguauagguuaucaugcgaacaauucaacagacacuguagacacaguacuagaaaagaauguaacaguaacacacucuguuaaccuucuagaagacaagcauaacgggaaacuaugcaaacuaagagggguagccccauugcauuuggguaaauguaacauugcuggcuggauccugggaaauccagagugugaaucacucuccacagcaagcucaugguccuacauuguggaaacaucuaguucagacaauggaacguguuacccaggagauuucaucgauuaugaggagcuaagagaacaauugagcucagugucaucauuugaaagguuugagauauuccccaagacaaguucauggcccaaucaugacucgaacaaagguguaacggcagcauguccucaugcuggagcaaaaagcuucuacaaaaauuuaauauggcuaguuaaaaaaggaaauucauacccaaagcucagcaaauccuacauuaaugauaaagggaaagaaguccucgugcuauggggcauucaccauccaucuacuagugcugaccaacaaagucucuaucagaaugcagaugcauauguuuuuguggggacaucaagauacagcaagaaguucaagccggaaauagcaauaagacccaaagugagggaucaagaagggagaaugaacuauuacuggacacuaguagagccgggagacaaaauaacauucgaagcaacuggaaaucuagugguaccgagauaugcauucgcaauggaaagaaaugcuggaucugguauuaucauuucagauacaccaguccacgauugcaauacaacuugucagacacccaagggugcuauaaacaccagccucccauuucagaauauacauccgaucacaauuggaaaauguccaaaauauguaaaaagcacaaaauugagacuggccacaggauugaggaaugucccgucuauucaaucuagaggccuauuuggagccauugccgguuucauugaagggggguggacagggaugguagauggaugguacgguuaucaccaucaaaaugagcaggggucaggauaugcagccgaccugaagagcacacagaaugccauugacaagauuacuaacaaaguaaauucuguuauugaaaagaugaauacacaguucacagcaguagguaaagaguucaaccaccuggaaaaaagaauagagaauuuaaauaaaaaaguugaugaugguuuccuggacauuuggacuuacaaugccgaacuguugguucuauuggaaaaugaaagaacuuuggacuaccacgauucaaaugugaagaacuuauaugaaaagguaagaagccaguuaaaaaacaaugccaaggaaauuggaaacggcugcuuugaauuuuaccacaaaugcgauaacacgugcauggaaagugucaaaaaugggacuuaugacuacccaaaauacucagaggaagcaaaauuaaacagagaagaaauagaugggguaaagcuggaaucaacaaggauuuaccagauuuuggcgaucuauucaacugucgccaguucauugguacugguagucucccugggggcaaucaguuucuggaugugcucuaaugggucucuacaguguagaauauguauuuaa

SEQ ID NO: 39616 - RNA, 1701 nt, Artificial Sequence
  derived and/or modified CDS sequence (wt) from hemagglutinin__InfluenzaA__AEO01529
augaaggcaauacuaguaguucugcuauauacauuugcaaccgcaaaugcagacacauuauguauagguuaccaugcgaacaauucaacagacacuguagacacaguacuagaaaagaauguaacaguaacacacucuguuaacauucuagaagacaagcauaacgggaaacuaugcaaacuaagagggguagccccauugcauuuggguaaauguaacauugcuggcuggauccugggaaauccagagugugaaucacucuccacagcaagcucaugguccuacauuguggaaacaucuaguucagacaauggaacguguuacccaggagauuucaucgauuaugaggagcuaagagagcaauugagcucagugucaucauuugaaagguuugagauauuccccaagacaaguucauggcccaaucaugacucgaacaaagguguaacggcagcauguccucaugcuggagcaaaaagcuucuacaaaaauuuaauuuggcuaguuaaaaaaggaaauucauacccaaagcucagcaaauccuacauuaaugauaaagggaaagaaguccucgugcuauggggcauucaccauccaucuacuagugcugaccaacaaagucucuaucagaaugcagaugcauauguuuuuguggggucaucaagauacagcaagaaguucaagccggaaauagcaauuagacccaaagugagggaucaagaagggagaaugaacuauuacuggacacuaguagagccgggagacaaaauaacauucgaagcaacuggaaaucuagugguaccaagauaugcauucgcaauggaaagaaaugcuggaucugguauuaucauuucagauacaccaguccaugauugcaauacaacuugucagacacccaagggugcuauaaacaccagccucccauuucagaauauacauccgaucacaauuggaaaauguccaaaauauguaaaaagcacaaaauugagacuggccacaggauugaggaaugucccgucuauucaaucuagaggccuauuuggggccauugccgguuucauugaagggggguggacagggaugguagauggaugguacgguuaucaccaucaaaaugagcaggggucaggauaugcagccgaccugaagagcacacagaaugccauugacgagauuacuaacaaaguaaauucuguuauugaaaagaugaauacacaguucacagcaguagguaaagaguucaaccaccuggaaaaaagaauagagaauuuaaauaaaaaaguugaugaugguuuccuggacauuuggacuuacaaugccgaacuguugguucuauuggaaaaugaaagaacuuuggacuaccacgauucaaaugugaagaacuuauaugaaaagguaagaagccagcuaaaaaacaaugccaaggaaguuggaaacggcugcuuugaauuuuaccacaaaugcgauaacacgugcauggaaagugucaaaaaugggacuuaugacuacccaaaauacucagaggaagcaaaauuaaacagagaaaaaauagaugggguaaagcuggaaucaacaaggauuuaccagauuuuggcgaucuauucaacugccgccaguucauugguacugguagucucccugggggcaaucaguuucuggaugugcucuaaugggucucuacaguguagaauauguauuuaa

SEQ ID NO: 39617 - RNA, 1701 nt, Artificial Sequence
  derived and/or modified CDS sequence (wt) from hemagglutinin__InfluenzaA__AEO01530
augaaggcaauacuaguaguucugcuauauacauuugcaaccgcaaaugcagacacauuauguauagguuaucaugcgaacaauucaacagacacuguagacacaguacuagaaaagaauguaacaguaacacacucuguuaaccuucuagaagacaagcauaacgggaaacuaugcaaacuaagagggguagccccauugcauuuggguaaauguaacauugcuggcuggauccugggaaauccagagugugaaucacucuccacagcaagcucaugguccuacauuguggaaacaucuaguucagacaauggaacguguuacccaggagauuucaucgauuaugaggagcuaagagagcaauugagcucagugucaucauuugaaagguuugagauauuccccaagacaaguucauggcccaaucaugacucgaacaaagguguaacggcagcauguccucaugcuggagcaaaaagcuucuacaaaaauuuaauauggcuaguuaaaaaaggaaauucauacccaaagcucagcaaauccuacauuaaugauaaagggaaagaaguccucgugcuauggggcauucaccauccaucuacuagugcugaccaacaaagucucuaucagaaugcagaugcauauguuuuuguggggacaucaagauacagcaagaaguucaagccggagauagcaauaagacccaaagugagggaucaagaagggagaaugaacuauuacuggacacuaguagagccgggagacaaaauaacauucgaagcaacuggaaaucuagugguaccgagauaugcauucgcaauggaaagaaaugcuggaucugguauuaucauuucagauacaccaguccacgauugcaauacaacuugucagacacccaagggugcuauaaacaccagccucccauuucagaauauacauccgaucacaauuggaaaauguccaaaauauguaaaaagcacaaaauugagacuggccacaggauugaggaaugucccgucuauucaaucuagaggccuauuuggggccauugccgguuucauugaagggggguggacagggaugguagauggaugguacgguuaucaccaucaaaaugagcaggggucaggauaugcagccgaccugaagagcacacagaaugccauugacaagauuacuaacaaaguaaauucuguuauugaaaagaugaauacacaguucacagcaguagguaaagaguucaaccaccuggaaaaaagaauagagaauuuaaauaaaaaaguugaugaugguuuccuggacauuuggacuuacaaugccgaauuguugguucuauuggaaaaugaaagaacuuuggacuaccacgauucaaaugugaagaacuuauaugaaaagguaagaagccaguuaaaaaacaaugccaaggaaauuggaaacggcugcuuugaauuuuaccacaaaugcgauaacacgugcauggaaagugucaaaaaugggacuuaugacuacccaaaauacucagaggaagcaaaauuaaacagagaagaaauagaugggguaaagcuggaaucaacaaggauuuaccagauuuuggcgaucuauucaacugucgccaguucauugguacugguagucucccugggggcaaucaguuucuggaugugcucuaaugggucucuacaguguagaauauguauuuaa

SEQ ID NO: 39618 - RNA, 1701 nt, Artificial Sequence
  derived and/or modified CDS sequence (wt) from hemagglutinin__InfluenzaA__AEO01531
augaaggcaauacuaguaguucugcuauauacauuugcaaccgcaaauacagacacauuauguauagguuaucaugcgaacaauucaacagacacuguagacacaguacuagaaaagaauguaacaguaacacacucuguuaaccuucuagaagacaagcauaacgggaaacuaugcaaacuaagagggguagccccauugcauuuggguaaauguaacauugcuggcuggauccugggaaauccagagugugaaucacucuccacagcaagcucaugguccuacauuguggaaacaucuaguucagacaauggaacguguuacccaggagauuucaucgauuaugaggagcuaagagagcaauugagcucagugucaucauuugaaagguuugagauauuccccaagacaaguucauggcccaaucaugacucgaacaaagguguaacggcagcauguccucaugcuggagcaaaaagcuucuacaaaaauuuaauauggcuaguuaaaaaaggaaauucauacccaaagcucagcaaauccuacauuaaugauaaagggaaagaaguccucgugcuauggggcauucaccauccaucuacuagugcugaccaacaaagucucuaucagaaugcagaugcauauguuuuuguggggacaucaagauacagcaagaaguucaagccggaaauagcaauaagacccaaagugagggaacaagaagggagaaugaacuauuacuggacacuaguagagccgggagacaaaauaacauucgaagcaacuggaaaucuagugguaccgagauaugcauucgcaauggaaagaaaugcuggaucugguauuaucauuucagauacaccaguccacgauugcaauacaacuugucagacacccaagggugcuauaaacaccagccucccauuucagaauauacauccgaucacaauuggaaaauguccaaaauauguaaaaagcacaaaauugagacuggccacuggauugaggaaugucccgucuauucaaucuagaggccuauuuggggccauugccgguuucauugaagggggguggacagggaugguagauggaugguacgguuaucaccaucaaaaugagcaggggucaggauaugcagccgaccugaagagcacacagaaugccauugacaagauuacuaacaaaguaaauucuguuauugaaaagaugaauacacaguucacagcaguggguaaagaguucaaccaccuggaaaaaagaauagagaauuuaaauaaaaaaguugaugaugguuuccuggacauuuggacuuacaaugccgaacuguugguucuauuggaaaaugaaagaacuuuggacuaccacgauucaaaugugaagaacuuauaugaaaagguaagaagccaguuaaaaaacaaugccaaggaaauuggaaacggcugcuuugaauuuuaccacaaaugcgauaacacgugcauggaaagugucaaaaaugggacuuaugacuacccaaaauacucagaggaagcaaaauuaaacagagaagaaauagaugggguaaagcuggaaucaacaaggguuuaccagauuuuggcgaucuauucaacugucgccaguucauugguacugguagucucccugggggcaaucaguuucuggaugugcucuaaugggucucuacaguguagaauauguauuuaa

SEQ ID NO: 39619 - RNA, 1701 nt, Artificial Sequence; identical to SEQ ID NO: 39450
  derived and/or modified CDS sequence (wt) from hemagglutinin__InfluenzaA__AEO01532

SEQ ID NO: 39620 - RNA, 1701 nt, Artificial Sequence
  derived and/or modified CDS sequence (wt) from hemagglutinin__InfluenzaA__AEO01533
augaaggcaauacuaguaguucugcuauauacauuugcaaccgcaaaugcagacacauuauguauagguuaucaugcgaacaauucaacagacacuguagacacaguacuagaaaagaauguaacaguaacacacucuguugaccuucuagaagacaagcauaacgggaaacuaugcaaacuaagagggguagccccauugcauuuggguaaauguaacauugcuggcuggauccugggaaauccagagugugaaucacucuccacagcaagcucaugguccuacauuguggaaacaucuaguucagacaauggaacguguuacccaggagauuucaucgauuaugaggagcuaagagagcaauugagcucagugucaucauuugaaagguuugagauauuccccaagacaaguucauggcccaaucaugacucgaacaaagguguaacggcagcauguccucaugcuggagcaaaaagcuucuacaaaaauuuaauauggcuaguuaaaaaaggaaauucauacccaaagcucagcaaauccuacauuaaugauaaagggaaagaaguccucgugcuauggggcauucaccauccaucuacuagugcugaccaacaaagucucuaucagaaugcagaugcauauguuuuuguggggacaucaagauacagcaagaaguucaagccggaaauagcaauaagacccaaagugagggaucaagaagggagaaugaacuauuacuggacacuaguagagccgggagacaaaauaacauucgaagcaacuggaaaucuagugguaccgagauaugcauucgcaauggaaagaaaugcuggaucugguauuaucauuucagauacaccaguccacgauugcaauacaacuugucagacacccaagggugcuauaaacaccagccucccauuucagaauauacauccgaucacaauuggaaaauguccaaaauauguaaaaagcacaaaauugagacuggccacaggauugaggaaugucccgucuauucaaucuagaggccuauuuggggccauugccggcuucauugaagggggguggacagggaugguagauggaugguacgguuaucaccaucaaaaugagcaggggucaggauaugcagccgaccugaagagcacacagaaugccauugacgagauuacuaacaaaguaaauucuguuauugaaaagaugaauacacaguucacagcaguagguaaagaguucaaccaccuggaaaaaagaauagagaauuuaaauaaaaaaguugaugaugguuuccuggacauuuggacuuacaaugccgaacuguugguucuauuggaaaaugaaagaacuuuggacuaccacgauucaaaugugaagaacuuauaugaaaagguaagaagccaguuaaaaaacaaugccaaggaaauuggaaacggcugcuuugaauuuuaccacaaaugcgauaacacguguauggaaagugucaaaaaugggacuuaugacuacccaaaauacucagaggaagcaaaauuaaacagagaagaaauagaugggguaaagcuggaaucaacaaggauuuaccagauuuuggcgaucuauucaacugucgccaguucauugguacugguagucucccugggggcaaucaguuucuggaugugcucuaaugggucucuacaguguagaauauguauuuaa

SEQ ID NO: 39621 - RNA, 1701 nt, Artificial Sequence
  derived and/or modified CDS sequence (wt) from hemagglutinin__InfluenzaA__AEO01534
augaaggcaauacuaguaguucugcuauauacauuugcaaccgcaaaugcagacacauuauguauagguuaucaugcgaacaauucaacagacacuguagacacaguacuagaaaagaauguaacaguaacacacucuguuaaccuucuagaagacaagcauaacgggaaacuaugcaaacuaagagggguagccccauugcauuuggguaaauguaacauugcuggcuggauccugggaaauccagagugugaaucacucuccacagcaagaucaugguccuacauuguggaaacaucuaguucagacaauggaacguguuacccaggagauuucaucgauuaugaggagcuaagagagcaauugagcucagugucaucauuugaaagguuugagauauuccccaagacaaguucauggcccaaucaugacucgaacaaagguguaacggcagcauguccucaugcuggagcaaaaagcuucuacaaaaauuuaauauggcuaguuaaaaaaggaaauucauacccaaagcucagcaaauccuacauuaaugauaaagggaaagaaguccucgugcuauggggaauucaccauccaucuacuagugcugaccaacaaagucucuaucagaaugcagaugcauauguuuuuguggggacaucaagauacagcaagaaguucaagccggaaauagcaauaagacccaaagugagggaucaagaagggagaaugaacuauuacuggacacuaguagagccgggagacaaaauaacauucgaagcaacuggaaaucuagugguaccgagauaugcauucgcaauggaaagaaaugcuggaucugguauuaucauuucagauacaccaguccacgauugcaauacaacuugucagacacccaagggugcuauaaacaccagccucccauuucagaauauacauccgaucacaauuggaaaauguccaaaauauguaaaaagcacaaaauugagacuggccacaggauugaggaaugucccgucuauucaaucuagaggccuauuuggggccauugccgguuucauugaagggggguggacagggaugguagauggaugguacgguuaucaccaucaaaaugagcaggggucaggauaugcagccgaccugaagagcacacagcaugccauugacgagauuacuaacaaaguaaauucuguuauugaaaagaugaauacacaguucacagcaguagguaaagaguucaaccaccuggaaaaaagaauagagaauuuaaauaaaaaaguugaugaugguuuccuggacauuuggacuuacaaugccgaacuguugguucuauuggaaaaugaaagaacuuuggacuaccacgauucaaaugugaagaacuuauaugaaaagguaagaagccaguuaaaaaacaaugccaaggaaauuggaaacggcugcuuugaauuuuaccacaaaugcgauaacacgugcauggaaagugucaaaaaugggacuuaugacuacccaaaauacucagaggaagcaaaauuaaacagagaagaaauagaugggguaaagcuggaaucaacaaggauuuaccagauuuuggcgaucuauucaacugucgccaguucauugguccugguagucucccugggggcaaucaguuucuggaugugcucuaaugggucucuacaauguagaauauguauuuaa

SEQ ID NO: 39622 - RNA, 1701 nt, Artificial Sequence
  derived and/or modified CDS sequence (wt) from hemagglutinin__InfluenzaA__AEO01535
augaaggcaauacuaguaguucugcuauauacauuugcaaccgcaaaugcagacacauuauguauagguuaucaugcgaacaauucaacagacacuguagacacaguacuagaaaagaauguaacaguaacacacucuguuaaccuucuagaagacaagcauaacgggaaacuaugcaaacuaagagggguagccccauugcauuuggguaaauguaacauugcuggcuggauccugggaaauccagagugugaaucacucuccacagcaagcucaugguccuacauuguggaaacaucuaguucagacaauggaacguguuacccaggagauuucaucgauuaugaggagcuaagagagcaauugagcucagugucaucauuugaaagguuugagauauuccccaagacaaguucauggcccaaucaugacucgaacaaagguguaacggcagcauguccucaugcuggagcaaaaagcuucuacaaaaauuuaauauggcuaguuaaaaaaggaaauucauacccaaagcucagcaaauccuacauuaaugauaaagggaaagaaguccucgugcuauggggcauucaccauccaucuacuagugcugaccaacaaagucucuaucagaaugcagaugcauauguuuuuguggggacaucaagauacagcaagaaguucaagccggaaauagcaauaagacccaaagugagggaucaagaagggagaaugaacuauuacuggacacuaguagagccgggagacaaaauaacauucgaagcaacuggaaaucuagugguaccgagauaugcauucgcaauggaaagaaaugcuggaucugguauuaucauuucagauacaccaguccacgauugcaauacaacuugucagacacccaagggugcuauaaacaccagccucccauuucagaauauacauccgaucacaauuggaaaauguccaaaauauguaaaaagcacaaaauugagacuggccacaggauugaggaauaucccgucuauucaaucuagaggccuauuuggggccauugccgguuucauugaagggggguggacagggaugguagauggaugguacgguuaucaccaucaaaaugagcaggggucaggauaugcagccgaccugaagagcacacagaaugccauugacaagauuacuaacaaaguaaauucuguuauugaaaagaugaauacacaguucacagcaguagguaaagaguucaaccaccuggaaaaaagaauagagaauuuaaauaaaaaaguugaugaugguuuccuggacauuuggacuuacaaugccgaacucuugguucuauuggaaaaugaaagaacuuuggacuaccacgauucaaaugugaagaacuuauaugaaaagguaagaagccaguuaaaaaacaaugccaaggaaauuggaaacggcugcuuugaauuuuaccacaaaugcgauaacacgugcauggaaagugucaaaaaugggacuuaugacuacccaaaauacucagaggaagcaaaauuaaacagagaagaaauagaugggguaaagcuggaaucaacaaggauuuaccaaauuuuggcgaucuauucaacugucgccaguucauugguacugguagucucccugggggcaaucaguuucuggaugugcucuaaugggucucuacaguguagaauauguauuuaa

SEQ ID NO: 39623 - RNA, 1701 nt, Artificial Sequence
  derived and/or modified CDS sequence (wt) from hemagglutinin__InfluenzaA__AEO01536
augaaggcaauacuaguaguucugcuauauacauuugcaaccgcaaaugcagacacauuauguauagguuaucaugcgaacaauucaacagacacuguagacacaguacuagaaaagaauguaacaguaacacacucuguuaaccuucuagaagacaagcauaacgggaaacuaugcaaacuaagagggguagccccauugcauuuggguaaaugcaacauugcuggcuggauccugggaaauccagagugugaaucacucuccacagcaagcucaugguccuacauuguggaaacaucuaguucagacaauggaacguguuacccaggagauuucaucgauuaugaggagcuaagagagcaauugagcucagugucaucauuugaaagguuugagauauuccccaagacaaguucauggcccaaucaugacucgaacaaagguguaacggcagcauguccucaugcuggagcaaaaagcuucuacaaaaauuuaauauggcuaguuaaaaaaggaaauucauacccaaagcucagcaaauccuacauuaaugauaaagggaaagaaguccucgugcuauggggcauucaccauccaucuacuagugcugaccaacaaagucucuaucagaaugcagaugcauauguuuuuguggggacaucaagauacagcaagaaguucaagccggaaauagcaauaagacccaaagugagggaucaagaagggagaaugaacuauuacuggacacuaguagagccgggagacaaaauaacauucgaagcaacuggaaaucuagugguaccgagauaugcauucgcaauggaaagaaaugcuggaucugguauuaucauuucagauacaccaguccacgauugcaauacaacuugucagacacccaagggugcuauaaacaccagccucccauuucagaauauacauccgaucacaauuggaaaauguccaaaauauguaaaaagcacaaaauugagacuggccacaggauugaggaaugucccgucuauucaaucuagaggccuauuuggggccauugccgguuucauugaagggggguggacagggaugguagauggaugguacgguuaucaccaucaaaaugagcaggggucaggauaugcagccgaccugaagagcacacagaaugccauugacaagauuacuaacaaaguaaauucuguuauugaaaagaugaauacacaguucacagcaguagguaaagaguucaaccaccuggaaaaaagaauagagaauuuaaauaaaaaaguugaugaugguuuccuggacauuuggacuuacaaugccgaacuguugguucuauuggaaaaugaaagaacuuuggacuaccacgauucaaaugugaagaacuuauaugaaaagguaagaagccaguuaaaaaacaaugccaaggaaauuggaaacggcugcuuugaauuuuaccacaaaugcgauaacacgugcauggaaagugucaaaaaugggacuuaugacuacccaaaauacucagaggaagcaaaauuaaacagagaagaaauagaugggguaaagcuggaaucaacaaggauuuaccagauuuuggcgaucuauucaacugucgccaguucauugguacugguagucucccugggggcaaucaguuucuggaugugcucuaaugggucucuacaguguagaauauguauuuaa

SEQ ID NO: 39624 - RNA, 1701 nt, Artificial Sequence; identical to SEQ ID NO: 39608
  derived and/or modified CDS sequence (wt) from hemagglutinin__InfluenzaA__AEO01537

SEQ ID NO: 39625 - RNA, 1701 nt, Artificial Sequence
  derived and/or modified CDS sequence (wt) from hemagglutinin__InfluenzaA__AEO01538
augaaggcaauacuaguaguucugcuauauacauuugcaaccgcaaaugcagacacauuauguauagguuaucaugcgaacaauucaacagacacuguagacacaguacuagaaaagaauguaacaguaacacacucuguuaaccuucuagaagacaagcauaacgggaaacuaugcaaacuaggagggguagccccauugcauuuggguaaauguaacauugcuggcuggauccugggaaauccagagugugaaucacucuccacagcaagcucaugguccuacauuguggaaacaucuaguucagacaauggaacguguuacccaggagauuucaucgauuaugaggagcuaagagagcaauugagcucagugucaucauuugaaagguuugagauauuccccaagacaaguucauggcccaaucaugacucgaacaaggguguaacggcagcauguccucaugcuggagcaaaaagcuucuacaaaaauuuaauauggcuaguuaaaaaaggaaauucauacccaaagcucagcaaauccuacauuaaugauaaagggaaagaaguccucgugcuauggggcauucaccauccaucuacuagugcugaccaacaaagucucuaucagaaugcagaugcauauguuuuuguggggacaucaagauacagcaagaaguucaagccggaaauagcaauaagacccaaagugagggaucaagaagggagaaugaacuauuacuggacacuaguagagccgggagacaaaauaacauucgaagcaacuggaaaucuagugguaccgagauaugcauucgcaauggaaagaaaugcuggaucugguauuaucauuucagauacaccaguucacgauugcaauacaacuugucagacacccaagggugcuauaaacaccagccucccauuucagaauauacauccgaucacaauuggaaaauguccaaaauauguaaaaagcacaaaauugagacuggccacaggauugaggaaugucccgucuauucaaucuagaggccuauuuggggccauugccgguuucauugaagggggguggacagggaugguagauggaugguacgguuaucaccaucaaaaugagcaggggucaggauaugcagccgaccugaagagcacacagaaugccauugacgagauuacuaacaaaguaaauucuguuauugaaaagaugaauacacaguucacagcaguagguaaagaguucaaccaccuggaaaaaagaauagagaauuuaaauaaaaagguugaugaugguuuucuggacauuuggacuuacaaugccgaacuguugguucuauuggaaaaugaaagaacuuuggacuaccacgauucaaaugugaagaacuuauaugaaaagguaagaagccaguuaaaaaacaaugccaaggaaauuggaaacggcugcuuugaauuuuaccacaaaugcgauaacacgugcauggaaagugucaaaaaugggacuuaugacuacccaaaauacucagaggaagcaaaauuaaacagagaagaaauagaugggguaaagcuggaaucaacaaggauuuaccagauuuuggcgaucuauucaacugucgccaguucauugguacugguagucucccugggggcaaucaguuucuggaugugcucuaaugggucucuacaguguagaauauguauuuaa

SEQ ID NO: 39626 - RNA, 1701 nt, Artificial Sequence; identical to SEQ ID NO: 39609
  derived and/or modified CDS sequence (wt) from hemagglutinin__InfluenzaA__AEO01539

SEQ ID NO: 39627 - RNA, 1701 nt, Artificial Sequence
  derived and/or modified CDS sequence (wt) from hemagglutinin__InfluenzaA__AEO01540
augaaggcaauacuaguaguucugcuauauacauuugcaauugcaaaugcagacacauuauguauagguuaucaugcgaacaauucaacagacacuguagacacaguacuagaaaagaauguaacaguaacacacucuguuaaccuucuagaagacaagcauaacgagaaacuaugcaaacuaagagggguagccccauugcauuuggguaaauguaacauugcuggcuggauccugggaaauccagagugugaaucacucuccacagcaagcucaugguccuacauuguggaaacaucuaguucagacaauggaacguguuacccaggagauuucaucgauuaugaggagcuaagagagcaauugagcucagugucaucauuugaaagguuugagauauuccccaagacaaguucauggcccaaucaugacucgaacaaagguguaacggcagcauguccucaugcuggagcaaaaagcuucuacaaaaauuuaauauggcuaguuaaaaaaggaaauucauacccaaagcucagcaaauccuacauuaaugauaaagggaaagaaguccucgugcuauggggaauucaccauccaucuacuagugcugaccaacaaagucucuaucagaaugcagaugcauauguuuuuguggggacaucaagauacagcaagaaguucaagccggaaauagcaauaagacccaaagugagggaucaagaagggagaaugaacuauuacuggacacuaguagagccgggagacaaaauaacauucgaagcaacuggaaaucuagugguaccgagauaugcauucgcaauggaaagaaaugcuggaucugguauuaucauuucagauacaccaguccacgauugcaauacaacuugucagacacccaagggugcuauaaacaccagccucccauuucagaauauacauccgaucacaauuggaaaauguccaaaauauguaaaaagcacaaaauugagacuagccacaggauugaggaaugucccgucuauucaaucuagaggccuauuuggggccauugccgguuucauugaagggggguggacagggaugguagauggaugguacgguuaucaccaucaaaaugagcaggggucaggauaugcagccgaccugaagagcacacagcaugccauugacgagauuacuaacaaaguaaauucuguuauugaaaagaugaauacacaguucacagcaguagguaaagaguucaaccaccuggaaaaaagaauagagaauuuaaauaaaaaaguugaugaugguuuccuggacauuuggacuuacaaugccgaacuguugguucuauuggaaaaugaaagaacuuuggacuaccacgauucaaaugugaagaacuuauaugaaaagguaagaagccaguuaaaaaacaaugccaaggaaauuggaaacggcugcuuugaauuuuaccacaaaugcgauaacacgugcauggaaagugucaaaaaugggacuuaugacuacccaaaauacucagaggaagcaaaauuaaacagagaagaaauaaaugggguaaagcuggaaucaacaaggauuuaccagauuuuggcgaucuauucaacugucgccaguucauugguacugguagucucccugggggcaaucaguuucuggaugugcucuaaugggucucuacaguguagaauauguauuuaa

SEQ ID NO: 39628 - RNA, 1701 nt, Artificial Sequence
  derived and/or modified CDS sequence (wt) from hemagglutinin__InfluenzaA__AEO01541
augaaggcaauacuaguaguucugcuauauacauuugcaaccgcaaaugcagacacauuauguauagguuaccaugcgaacaauucaacagacacuguagacacaguacuagaaaagaauguaacaguaacacacucuguuaaccuucuagaagacaagcauaacgggaaacuaugcaaacuaagaggaguagccccauugcauuuggguaaauguaacauugcuggcuggauccugggaaauccagagugugaaucacucuccacagcaagcucaugguccuacauuguggaaacaucuaguucagacaauggaacguguuacccaggagauuucaucgauuaugaggagcuaagagagcaauugagcucagugucaucauuugaaagguuugagauauuccccaagacaaguucauggcccaaucaugacucgaacaaagguguaacggcagcauguccucaugcuggagcaaaaagcuucuacaaaaauuuaauauggcuaguuaaaaaaggaaauucauacccaaagcucagcaaauccuacauuaaugauaaagggaaagaaguccucgugcuauggggcauucaccauccaucuacuagugcugaccaacaaagucucuaucagaaugcagaugcauauguuuuuguggggacaucaagauacagcaagaaguucaagccggaaauagcaauaagacccaaagugagggaucaagaagggagaaugaacuauuacuggacacuaguagagccgggagacaaaauaacauucgaagcaacuggaaaucuagugguaccgagauaugcauucgcaauggaaagaaaugcuggaucugguauuaucauuucagauacaccaguccacgauugcaauacaacuugucagacacccaagggugcuauaaacaccagccucccauuucagaauauacauccgaucacaauuggaaaauguccaaaauauguaaaaagcacaaaauugagacuggccacaggauugaggaaugucccgucuauucaaucuagaggccuauuuggggccauugccgguuucauugaagggggguggacagggaugguagauggaugguacgguuaucaccaucaaaaugagcaggggucaggauaugcagccgaccugaagagcacacagcaugccauugacgagauuacuaacaaaguaaauucuguuauugaaaagaugaauacacaguucacagcaguagguaaagaguucaaccaccuggaaaaaagaauagagaauuuaaauaaaaaaguugaugaugguuuccuggacauuuggacuuacaaugccgaacuguugguucuauuggaaaaugaaagaacuuuggacuaccacgauucaaaugugaagaacuuauaugaaaagguaagaagccaguuaaaaaacaaugccaaggaaauuggaaacggcugcuuugaauuuuaccacaaaugcgauaacacgugcauggaaagugucaaaaaugggacuuaugacuacccaaaauacucagaggaagcaaaauuaaacagagaagaaauagaugggguaaagcuggaaucaacaaggauuuaccagauuuuggcgaucuauucaacugucgccaguucauugguacugguagucucccugggggcaaucaguuucuggaugugcucuaaugggucucuacaguguagaauauguauuuaa

SEQ ID NO: 39629 - RNA, 1701 nt, Artificial Sequence
  derived and/or modified CDS sequence (wt) from hemagglutinin__InfluenzaA__AEO01542
augaaggcaauacuaguaguucugcuauauacauuugcaaccgcaaaugcagacacauuauguauagguuaucaugcgaacaauucaacagacacuguagacacaguacuagaaaagaauguaacaguaacacacucuguuaaccuucuagaagacaagcauaacgggaaacuaugcaaacuaagagggguagccccauugcauuuggguaaauguaacauugcuggcuggauccugggaaauccagagugugaaucacucuccacagcaagcucaugguccuacauuguggaaacaucuaguucagacaauggaacguguuacccaggagauuucaucgauuaugaggagcuaagagagcaauugagcucagugucaucauuugaaagguuugagauauuccccaagacaaguucauggcccaaucaugacucgaacaaagguguaacggcagcauguccucaugcuggagcaaaaagcuucuacaaaaauuuaauauggcuaguuaaaaaaggaaauucauacccaaagcucagcaaauccuacauuaaugauaaagggaaagaaguccucgugcuauggggcauucaccauccaucuacuagugcugaccaacaaagucucuaucagaaugcagaugcauauguuuuuguggggacaucaagauacagcaagaaguucaagccggaaauagcaauaagacccaaagugagggaucaagaagggagaaugaacuauuacuggacacuaguagagccgggagacaaaauaacauucgaagcaacuggaaaucuagugguaccgagauaugcauucgcaauggaaagaaaugcuggaucugguauuaucauuucagauacaccaguccacgauugcaauacaacuugucagacacccaagggugcuauaaacaccagccucccauuucagaauauacauccgaucacaauuggaaaauguccaaaauauguaaaaagcacaaaauugagacuggccacaggauugaggaaugucccgucuauucaaucuagaggccuauuuggggccauugccgguuucauugaagggggguggacagggaugguagauggaugguacgguuaucaccaucaaaaugagcaggggucaggauaugcagccgaccugaagagcacacagaaugccauugacaagauuacuaacaaaguaaauucuguuauugaaaagaugaauacacaguucacagcaguagguaaagaguucaaccaccuggaaaaaagaauagagaauuuaaauaaaaaaguugaugaugguuuccuggacauuuggacuuacaaugccgaacuguugguucuauuggaaaaugaaagaacuuuggacuaccacgauucaaaugugaagaacuuauaugaaaagguaagaagccaguuaaaaaacaaugccaaggaaauuggaaacgguugcuuugaauuuuaccacaaaugcgauaacacgugcauggaaagugucaaaaaugggacuuaugacuacccaaaauacucagaggaagcaaaauuaaacagagaagaaauagaugggguaaagcuggaaucaacaaggauuuaccagauuuuggcgaucuauucaacugucgccaguucauugguacugguagucucccugggggcaaucaguuucuggaugugcucuaaugggucucuacaguguagaauauguauuuaa

SEQ ID NO: 39630 - RNA, 1701 nt, Artificial Sequence
  derived and/or modified CDS sequence (wt) from hemagglutinin__InfluenzaA__AEO01543
augaaggcaauacuaguaguucugcuauauacauuugcaaccgcaaaugcagacacauuauguauagguuaucaugcgaacaauucaacagacacuguagacacaguacuagaaaagaauguaacaguaacacacucuguuaaccuucuagaagacaagcauaacgggaaacuaugcaaacuaagagggguagccccauugcauuuggguaaauguaacauugcuggcuggauccuggggaauccagagugugaaucacucuccacagcaagcucaugguccuacauuguggaaacaucuaguucagacaauggaacguguuacccaggagauuucaucgauuaugaggagcuaagagagcaauugagcucagugucaucauuugaaagauuugagauauuccccaagacaaguucauggcccaaucaugacucgaacaaagguguaacggcagcauguccucaugcuggagcaaaaagcuucuacaaaaauuuaauauggcuaguuaaaaaaggaaauucauacccaaagcucagcaaauccuacauuaaugauaaagggaaagaaguccucgugcuauggggcauucaccauccaucuacuagugcugaccaacaaagucuuuaucagaaugcagaugcauauguuuuuguggggacaucaagauacagcaagaaguucaagccggaaauagcaauaagacccaaagugagggaucaagaagggagaaugaacuauuacuggacacuaguagagccgggagacaaaauaacauucgaagcaacuggaaaucuagugguaccgagauaugcauucgcaauggaaagaaaugcuggaucugguauuaucauuucagauacaccaguccacgauugcaauacaacuugucagacacccaagggugcuauaaacaccagccucccauuucagaauauacauccgaucacaauuggaaaauguccaaaauauguaaaaagcacaaaauugagacuggccacaggauugaggaauaucccgucuauucaaucuagaggccuauuuggggccauugccgguuucauugaagggggguggacagggaugguagauggaugguacgguuaucaccaucaaaaugagcaggggucaggauaugcagccgaccugaagagcacacagaaugccauugacgagauuacuaacaaaguaaauucuguuauugaaaagaugaauacacaguucacagcaguagguaaagaguucaaccaccuggaaaaaagaauagagaauuuaaauaaaaaaguugaugaugguuuccuggacauuuggacuuacaaugccgaacuguugguucuauuggaaaaugaaagaacuuuggacuaccacgauucaaaugugaagaacuuauaugaaaagguaagaagccaguuaaaaaacaaugccaaggaaauuggaaacggcugcuuugaauuuuaccacaaaugcgauaacacgugcauggaaagugucaaaaaugggacuuaugacuacccaaaauacucagaggaagcaaaauuaaacagagaagaaauagaugggguaaagcuggaaucaacaaggauuuaccagauuuuggcgaucuauucaacugucgccaguucauugguacugguagucucccugggggcaaucaguuucuggaugugcucuaaugggucucuacaguguagaauauguauuuaa

SEQ ID NO: 39631 - RNA, 1701 nt, Artificial Sequence; identical to SEQ ID NO: 39391
  derived and/or modified CDS sequence (wt) from hemagglutinin__InfluenzaA__AEO01544

SEQ ID NO: 39632 - RNA, 1701 nt, Artificial Sequence
  derived and/or modified CDS sequence (wt) from hemagglutinin__InfluenzaA__AEO01545
augaaggcaauacuaguaguucugcuauauacauuugcaaccgcaaaugcagacacauuauguauagguuaucaugcgaacaauucaacagacacuguagacacaguacuagaaaagaauguaacaguaacacacucuguuaaccuucuagaagacaagcauagcgggaaacuaugcaaacuaagagggguagccccauugcauuuggguaaauguaacauugcuggcuggauccugggaaauccagagugugaaucacucuccacagcaagcucaugguccuacauuguggaaacaucuaguucagacaauggaacguguuacccaggagauuucgucgauuaugaggagcuaagagagcaauugagcucagugucaucauuugaaagguuugagauauuccccaagacaaguucauggcccaaucaugacucgaacaaagguguaacggcagcauguccucaugcuggagcaaaaagcuucuacaaaaauuuaauauggcuaguuaaaaaaggaaauucauacccaaagcucagcaaauccuacauuaaugauaaagggaaagaaguccucgugcuauggggcauucaccauccaucuacuagugcugaccaacaaagucucuaucagaaugcagaugcauauguuuuuguggggacaucaagauacagcaagaaguucaagccggaaauagcaauaagacccaaagugagggaucaagaagggagaaugaacuauuacuggacacuaguagagccgggagacaaaauaacauucgaagcaacuggaaaucuagugguaccgagauaugcauucgcaauggaaagaaaugcuggaucugguauuaucauuucagauacaccaguccacgauugcaauacaacuugucagacacccaagggugcuauaaacaccagccucccauuucagaauauacauccgaucacaauuggaaaauguccaaaauauguaaaaagcacaaaauugagacuggccacaggauugaggaaugucccgucuauucaaucuagaggccuauuuggggccauugccgguuucauugaagggggguggacagggaugguagauggaugguacgguuaucaccaucaaaaugagcaggggucaggauaugcagccgaccugaagagcacacagaaugccauugacaagauuacuaacaaaguaaauucuguuauugaaaagaugaauacacaguucacagcaguagguaaagaguucaaccaccuggaaaaaagaauagagaauuuaaauaaaaaaguugaugaugguuuccuggacauuuggacuuacaaugccgaacuguugguucuauuggaaaaugaaagaacuuuggacuaccacgauucaaaugugaagaacuuauaugaaaagguaagaagccaguuaaaaaacaaugccaaggaaauuggaaacggcugcuuugaauuuuaccacaaaugcgauaacacgugcauggaaagugucaaaaaugggacuuaugacuacccaaaauacucagaggaagcaaaauuaaacagagaagaaauagaugggguaaagcuggaaucaacaaggauuuaccagauuuuggcgaucuauucaacugucgccaguucauugguacugguagucucccugggggcaaucaguuucuggaugugcucuaaugggucucuacaguguagaauauguauuuaa

SEQ ID NO: 39633 - RNA, 1701 nt, Artificial Sequence; identical to SEQ ID NO: 34676
  derived and/or modified CDS sequence (wt) from hemagglutinin__InfluenzaA__AEO01546

SEQ ID NO: 39634 - RNA, 1701 nt, Artificial Sequence
  derived and/or modified CDS sequence (wt) from hemagglutinin__InfluenzaA__AEO01547
augaaggcaauacuaguaguucugcuauauacauuugcaaccgcaaaugcagacacauuauguauagguuaucaugcgaacaauucaacagacacuguagacacaguacuagaaaagaauguaacaguaacacacucuguuaaccuucuagaagacaagcauaacgggaaacuaugcaaacuaagagggguagccccauugcauuuggguaaauguaacauugcuggcuggauccugggaaauccagagugugaaucacucuccacagcaagcucaugguccuacauuguggaaacaucuaguucagacaauggaacguguuacccaggagauuucaucgauuaugaggagcuaagagagcaauugagcucagugucaucauuugaaagguuugagauauuccccaagacaaguucauggcccaaucaugacucgaacaaagguguaacagcagcauguccucaugcuggagcaaaaagcuucuacaaaaauuuaauauggcuaguuaaaaaaggaaauucauacccaaagcucagcaaauccuacauuaaugauaaagggaaagaaguccucgugcuauggggcauucaccauccaucuacuagugcugaccaacaaagucucuaucagaaugcagaugcauauguuuuuguggggucaucaagauacagcaagaaguucaagccggaaauagcaauaagacccaaagugagggaucaagaagggagaaugaacuauuacuggacacuaguagagccgggagacaaaauaacauucgaagcaacuggaaaucuagugguaccgagauaugcauucgcaauggaaagaaaugcuggaucugguauuaucauuucagauacaccaguccacgauugcaauacaacuugucagacacccaagggugcuauaaacaccagccucccauuucagaauauacauccgaucacaauuggaaaauguccaaaauauguaaaaagcacaaaauugagacuggccacaggauugaggaaugucccgucuauucaaucuagaggccuauuuggggccauugccgguuucauugaagggggguggacagggaugguagauggaugguacgguuaucaccaucaaaaugagcaggggucaggauaugcagccgaccugaagagcacacagaaugccauugacgagauuacuaacaaaguaaauucuguuauugaaaagaugaauacacaguucacagcaguagguaaagaguucaaccaccuggaaaaaagaauagagaauuuaaauaaaaaaguugaugaugguuuccuggacauuuggacuuacaaugccgaacuguugguucuauuggaaaaugaaagaacuuuggacuaccacgauucaaaugugaagaacuuauaugaaaagguaagaagccagcuaaaaaacaaugccaaggaaauuggaaacggcugcuuugaauuuuaccacaaaugcgauaacacgugcauggaaagugucaaaaaugggacuuaugacuacccaaaauacucagaggaagcaaaauuaaacagagaagaaauagaugggguaaagcuggaaucaacaaggauuuaccagauuuuggcgaucuauucaacugucgccaguucauugguacugguagucucccugggggcaaucaguuucuggaugugcucuaaugggucucuacaguguagaauauguauuuaa

SEQ ID NO: 39635 - RNA, 1701 nt, Artificial Sequence; identical to SEQ ID NO: 34898
  derived and/or modified CDS sequence (wt) from hemagglutinin__InfluenzaA__AEO01548

SEQ ID NO: 39636 - RNA, 1701 nt, Artificial Sequence; identical to SEQ ID NO: 34772
  derived and/or modified CDS sequence (wt) from hemagglutinin__InfluenzaA__AEO01549

SEQ ID NO: 39637 - RNA, 1701 nt, Artificial Sequence; identical to SEQ ID NO: 34681
  derived and/or modified CDS sequence (wt) from hemagglutinin__InfluenzaA__AEO01550

SEQ ID NO: 39638 - RNA, 1701 nt, Artificial Sequence; identical to SEQ ID NO: 34681
  derived and/or modified CDS sequence (wt) from hemagglutinin__InfluenzaA__AEO01551

SEQ ID NO: 39639 - RNA, 1701 nt, Artificial Sequence; identical to SEQ ID NO: 34681
  derived and/or modified CDS sequence (wt) from hemagglutinin__InfluenzaA__AEO01552

SEQ ID NO: 39640 - RNA, 1701 nt, Artificial Sequence; identical to SEQ ID NO: 34681
  derived and/or modified CDS sequence (wt) from hemagglutinin__InfluenzaA__AEO01553

SEQ ID NO: 39641 - RNA, 1701 nt, Artificial Sequence; identical to SEQ ID NO: 34681
  derived and/or modified CDS sequence (wt) from hemagglutinin__InfluenzaA__AEO01554

SEQ ID NO: 39642 - RNA, 1701 nt, Artificial Sequence; identical to SEQ ID NO: 34898
  derived and/or modified CDS sequence (wt) from hemagglutinin__InfluenzaA__AEO01555

SEQ ID NO: 39643 - RNA, 1701 nt, Artificial Sequence; identical to SEQ ID NO: 34681
  derived and/or modified CDS sequence (wt) from hemagglutinin__InfluenzaA__AEO01557

SEQ ID NO: 39644 - RNA, 1701 nt, Artificial Sequence; identical to SEQ ID NO: 34681
  derived and/or modified CDS sequence (wt) from hemagglutinin__InfluenzaA__AEO01558

SEQ ID NO: 39645 - RNA, 1701 nt, Artificial Sequence
  derived and/or modified CDS sequence (wt) from hemagglutinin__InfluenzaA__AEO01559
augaaggcaauacuaguaguucugcuauauacauuugcaaccgcaaaugcagacacauuauguauagguuaucaugcgaacaauucaacagacacuguagacacaguacuagaaaagaauguaacaguaacacacucuguuaaccuucuagaagacaagcauaacgggaaacuaugcaaacuaagagggguagccccauugcauuuggguaaauguaacauugcuggcuggauccugggaaauccagagugugaaucacucuccacagcaagcucaugguccuacauuguggaaacaucuaguucagacaauggaacguguuacccaggagauuucaucgauuaugaggagcuaagagagcaauugagcucagugucaucauuugaaagguuugagauauuccccaagacaaguucauggcccaaucaugacucgaacaaagguguaacggcagcauguccucaugcuggagcaaaaagcuucuacaaaaauuuaauauggcuaguuaaaaaaggaaauucauacccaaagcucagcaaauccuacauuaaugauaaagggaaagaaguccucgugcuauggggcauucaccauccaucuacuagugcugaccaacaaagucucuaucagaaugcagaugcauauguuuuuguggggacaucaagauacagcaagaaguucaagccggaaauagcaauaagacccaaagugagggaucaagaagggagaaugaacuauuacuggacacuaguagagccgggagacaaaauaacauucgaagcaacuggaaaucuagugguaccgagauaugcauucgcaauggaaagaaaugcuggaucugguauuaucauuucagauacaccaguccaagauugcaauacaacuugucagacacccaagggugcuauaaacaccagccucccauuucagaauauacauccgaucacaauuggaaaauguccaaaauauguaaaaagcacaaaauugagacuggccacaggauugaggaaugucccgucuauucaaucuagaggccuauuuggggccauugccgguuucauugaagggggguggacagggaugguagauggaugguacgguuaucaccaucaaaaugagcaggggucaggauaugcagccgaccugaagagcacacagaaugccauugacgagauuacuaacaaaguaaauucuguuauugaaaagaugaauacacaguucacagcaguagguaaagaguucaaccaccuggaaaaaagaauagagaauuuaaauaaaaaaguugaugaugguuuccuggacauuuggacuuacaaugccgaacuguugguucuauuggaaaaugaaagaacuuuggacuaccacgauucaaaugugaagaacuuauaugaaaagguaagaagccaguuaaaaaacaaugccaaggaaauuggaaacggcugcuuugaauuuuaccacaaaugcgauaacacgugcauggaaagugucaaaaaugggacuuaugacuacccaaaauacucagaggaagcaaaauuaaacagagaagaaauagaugggguaaagcuggaaucaacaaggauuuaccagauuuuggcgaucuauucaacugucgccaguucauugguacugguagucucccugggggcaaucaguuucuggaugugcucuaaugggucucuacaguguagaauauguauuuaa

SEQ ID NO: 39646 - RNA, 1701 nt, Artificial Sequence; identical to SEQ ID NO: 34681
  derived and/or modified CDS sequence (wt) from hemagglutinin__InfluenzaA__AEO01560

SEQ ID NO: 39647 - RNA, 1701 nt, Artificial Sequence; identical to SEQ ID NO: 34681
  derived and/or modified CDS sequence (wt) from hemagglutinin__InfluenzaA__AEO01561

SEQ ID NO: 39648 - RNA, 1701 nt, Artificial Sequence; identical to SEQ ID NO: 34681
  derived and/or modified CDS sequence (wt) from hemagglutinin__InfluenzaA__AEO01562

SEQ ID NO: 39649 - RNA, 1701 nt, Artificial Sequence; identical to SEQ ID NO: 34681
  derived and/or modified CDS sequence (wt) from hemagglutinin__InfluenzaA__AEO01563

SEQ ID NO: 39650 - RNA, 1701 nt, Artificial Sequence; identical to SEQ ID NO: 34681
  derived and/or modified CDS sequence (wt) from hemagglutinin__InfluenzaA__AEO01564

SEQ ID NO: 39651 - RNA, 1701 nt, Artificial Sequence; identical to SEQ ID NO: 34681
  derived and/or modified CDS sequence (wt) from hemagglutinin__InfluenzaA__AEO01565

SEQ ID NO: 39652 - RNA, 1701 nt, Artificial Sequence
  derived and/or modified CDS sequence (wt) from hemagglutinin__InfluenzaA__AEO01566
augaaggcaauacuaguaguucugcuauauacauuugcaaccgcaaaugcagacacauuauguauagguuaucaugcgaacaauucaacagacacuguagacacaguacuagaaaagaauguaacaguaacacacucuguuaaccuucuagaagacaagcauaacgggaaacuaugcaaacuaagagggguagccccauugcauuuggguaaauguaacauugcuggcuggauccugggaaauccagagugugaaucacucuccacagcaagcucaugguccuacauuguggaaacaucuaguucagacaauggaacguguuacccaggagauuucaucgauuaugaggagcuaagagagcaauugagcucagugucaucauuugaaagguuugagauauuccccaagacaaguucauggcccaaucaugacucgaacaaagguguaacggcagcauguccucaugcuggagcaaaaagcuucuacaaaaauuuaauauggcuaguuaaaaaaggaaauucauacccaaagcucagcaaauccuacauuaaugauaaagggaaagaaguccucgugcuauggggcauucaccauccaucuacuagugcugaccaacaaagucucuaucagaaugcagaugcauauguuuuuguggggucaucaagauacagcaagaaguucaagccggaaauagcaauaagacccaaagugagggaucaagaagggagaaugaacuauuacuggacacuaguagagccgggagacaaaauaacauucgaagcaacuggaaaucuagugguaccgagauaugcauucgcaauggaaagaaaugcuggaucugguauuaucauuucagauacaccaguccacgauugcaauacaacuugucagacacccaagggugcuauaaacaccagccucccauuucagaauauacauccgaucacaauuggaaaauguccaaaauauguaaaaagcacaaaauugagacuggccacaggauugaggaaugucccgucuauucaaucuagaggccuauuuggggccauugccgguuucauugaagggggguggacagggaugguagauggaugguacgguuaucaccaucaaaaugagcagggaucaggauaugcagccgaccugaagagcacacagaaugccauugacgagauuacuaacaaaguaaauucuguuauugaaaagaugaauacacaguucacagcaguagguaaagaguucaaccaccuggaaaaaagaauagagaauuuaaauaaaaaaguugaugaugguuuccuggacauuuggacuuacaaugccgaacuguugguucuauuggaaaaugaaagaacuuuggacuaccacgauucaaaugugaagaacuuauaugaaaagguaagaagccagcuaaaaaacaaugccaaggaaauuggaaacggcugcuuugaauuuuaccacaaaugcgauaacacgugcauggaaagugucaaaaaugggacuuaugacuacccaaaauacucagaggaagcaaaauuaaacagagaagaaauagaugggguaaagcuggaaucaacaaggauuuaccagauuuuggcgaucuauucaacugucgccaguucauugguacugguagucucccugggggcaaucaguuucuggaugugcucuaaugggucucuacaguguagaauauguauuuaa

SEQ ID NO: 39653 - RNA, 1701 nt, Artificial Sequence; identical to SEQ ID NO: 34965
  derived and/or modified CDS sequence (wt) from hemagglutinin__InfluenzaA__AEO01567

SEQ ID NO: 39654 - RNA, 1701 nt, Artificial Sequence; identical to SEQ ID NO: 34863
  derived and/or modified CDS sequence (wt) from hemagglutinin__InfluenzaA__AEO01568

SEQ ID NO: 39655 - RNA, 1701 nt, Artificial Sequence; identical to SEQ ID NO: 34863
  derived and/or modified CDS sequence (wt) from hemagglutinin__InfluenzaA__AEO01569

SEQ ID NO: 39656 - RNA, 1701 nt, Artificial Sequence; identical to SEQ ID NO: 34965
  derived and/or modified CDS sequence (wt) from hemagglutinin__InfluenzaA__AEO01570

SEQ ID NO: 39657 - RNA, 1701 nt, Artificial Sequence; identical to SEQ ID NO: 34863
  derived and/or modified CDS sequence (wt) from hemagglutinin__InfluenzaA__AEO01571

SEQ ID NO: 39658 - RNA, 1701 nt, Artificial Sequence; identical to SEQ ID NO: 34965
  derived and/or modified CDS sequence (wt) from hemagglutinin__InfluenzaA__AEO01572

SEQ ID NO: 39659 - RNA, 1701 nt, Artificial Sequence; identical to SEQ ID NO: 34676
  derived and/or modified CDS sequence (wt) from hemagglutinin__InfluenzaA__AEO01573

SEQ ID NO: 39660 - RNA, 1701 nt, Artificial Sequence
  derived and/or modified CDS sequence (wt) from hemagglutinin__InfluenzaA__AEO01574
augaaggcaauacuaguaguucugcuauauacauuugcaaccgcaaaugcagacacauuauguauagguuaucaugcgaacaauucaacagacacuguagacacaguacuagaaaagaauguaacaguaacacacucuguuaaccuucuagaagacaagcauaacgggaaacuaugcaaacuaagagggguagccccauugcauuuggguaaauguaacauugcuggcuggauccugggaaauccagagugugaaucacucuccacagcaagcucaugguccuacauuguggaaacaucuaguucagacaauggaacguguuacccaggagauuucaucgauuaugaggagcuaagagagcaauugagcucagugucaucauuugaaagguuugagauauuccccaagacaaguucauggcccaaucaugacucgaacaaagguguaacggcagcauguccucaugcuggagcaaaaagcuucuacaaaaauuuaauauggcuaguuaaaaaaggaaauucauacccaaagcucagcaaauccuacauuaaugauaaagggaaagaaguccucgugcuauggggcauucaccauccaucuacuagugcugaccaacaaagucucuaucagaaugcagaugcauauguuuuuguggggacaucaagauacagcaagaaguucaagccggaaauagcaauaagacccaaagugagggaucaagaagggagaaugaacuauuacuggacacuaguagagccgggagacaaaauaacauucgaagcaacuggaaaucuagugguaccgagauaugcauucgcaauggaaagaaaugcuggaucugguauuaucauuucagauacaccaguccacgauugcaauacaacuugucagacacccaagggugcuauaaacaccagccucccauuucagaauauacauccgaucacaauuggaaaauguccaaaauauguaaaaagcacaaaauugagacuggccacaggauugaggaaugucccgucuauucaaucuagaggccuauuuggggccauugccgguuucauugaagggggguggacagggaugguagauggaugguacgguuaucaccaucaaaaugagcaggggucaggauaugcagccgaccugaagagcacacagaaugccauugacgagauuacuaacaaaguaaauucuguuauugaaaagaugaauacacaguucacagcaguagguaaagaguucaaccaccuggaaaaaagaauagagaauuuaaauaaaaaaguugaugaugguuuccuggacauuuggacuuacaaugccgaacuguugguucuauuggaaaaugaaagaacuuuggauuaccacgauucaaaugugaagaacuuauaugaaaagguaagaagccaguuaaaaaacaaugccaaggaaauuggaaacggcugcuuugaauuuuaccacaaaugcgauaacacgugcauggaaagugucaaaaaugggacuuaugacuacccaaaauacucagaggaagcaaaauuaaacagagaagaaauagaugggguaaagcuggaaucaacaaggauuuaccagauuuuggcgaucuauucaacugucgccaguucauugguacugguagucucccugggggcaaucaguuucuggaugugcucuaaugggucucuacaguguagaauauguauuuaa

SEQ ID NO: 39661 - RNA, 1701 nt, Artificial Sequence; identical to SEQ ID NO: 34676
  derived and/or modified CDS sequence (wt) from hemagglutinin__InfluenzaA__AEO01575

SEQ ID NO: 39662 - RNA, 1701 nt, Artificial Sequence; identical to SEQ ID NO: 34676
  derived and/or modified CDS sequence (wt) from hemagglutinin__InfluenzaA__AEO01576

SEQ ID NO: 39663 - RNA, 1701 nt, Artificial Sequence; identical to SEQ ID NO: 34676
  derived and/or modified CDS sequence (wt) from hemagglutinin__InfluenzaA__AEO01577

SEQ ID NO: 39664 - RNA, 1701 nt, Artificial Sequence; identical to SEQ ID NO: 34965
  derived and/or modified CDS sequence (wt) from hemagglutinin__InfluenzaA__AEO01578

SEQ ID NO: 39665 - RNA, 1701 nt, Artificial Sequence; identical to SEQ ID NO: 34965
  derived and/or modified CDS sequence (wt) from hemagglutinin__InfluenzaA__AEO01579

SEQ ID NO: 39666 - RNA, 1701 nt, Artificial Sequence; identical to SEQ ID NO: 34676
  derived and/or modified CDS sequence (wt) from hemagglutinin__InfluenzaA__AEO01581

SEQ ID NO: 39667 - RNA, 1701 nt, Artificial Sequence; identical to SEQ ID NO: 34676
  derived and/or modified CDS sequence (wt) from hemagglutinin__InfluenzaA__AEO01582

SEQ ID NO: 39668 - RNA, 1701 nt, Artificial Sequence; identical to SEQ ID NO: 34676
  derived and/or modified CDS sequence (wt) from hemagglutinin__InfluenzaA__AEO01583

SEQ ID NO: 39669 - RNA, 1701 nt, Artificial Sequence; identical to SEQ ID NO: 34676
  derived and/or modified CDS sequence (wt) from hemagglutinin__InfluenzaA__AEO01584

SEQ ID NO: 39670 - RNA, 1701 nt, Artificial Sequence; identical to SEQ ID NO: 34676
  derived and/or modified CDS sequence (wt) from hemagglutinin__InfluenzaA__AEO01585

SEQ ID NO: 39671 - RNA, 1701 nt, Artificial Sequence; identical to SEQ ID NO: 34676
  derived and/or modified CDS sequence (wt) from hemagglutinin__InfluenzaA__AEO01586

SEQ ID NO: 39672 - RNA, 1701 nt, Artificial Sequence; identical to SEQ ID NO: 34676
  derived and/or modified CDS sequence (wt) from hemagglutinin__InfluenzaA__AEO01587

SEQ ID NO: 39673 - RNA, 1701 nt, Artificial Sequence; identical to SEQ ID NO: 34676
  derived and/or modified CDS sequence (wt) from hemagglutinin__InfluenzaA__AEO01588

SEQ ID NO: 39674 - RNA, 1701 nt, Artificial Sequence; identical to SEQ ID NO: 34681
  derived and/or modified CDS sequence (wt) from hemagglutinin__InfluenzaA__AEO01589

SEQ ID NO: 39675 - RNA, 1701 nt, Artificial Sequence; identical to SEQ ID NO: 34681
  derived and/or modified CDS sequence (wt) from hemagglutinin__InfluenzaA__AEO01590

SEQ ID NO: 39676 - RNA, 1701 nt, Artificial Sequence; identical to SEQ ID NO: 34681
  derived and/or modified CDS sequence (wt) from hemagglutinin__InfluenzaA__AEO01591

SEQ ID NO: 39677 - RNA, 1701 nt, Artificial Sequence; identical to SEQ ID NO: 34676
  derived and/or modified CDS sequence (wt) from hemagglutinin__InfluenzaA__AEO01592

SEQ ID NO: 39678 - RNA, 1701 nt, Artificial Sequence
  derived and/or modified CDS sequence (wt) from hemagglutinin__InfluenzaA__AEO01593
augaaggcaauacuaguaguucugcuauauacauuugcaaccgcaaaugcagacacauuauguauagguuaucaugcgaacaauucaacagacacuguagacacaguacuagaaaagaauguaacaguaacacacucuguuaaccuucuagaagacaagcauaacgggaaacuaugcaaacuaagagggguagccccauugcauuuggguaaauguaacauugcuggcuggauacugggaaauccagagugugaaucacucuccacagcaagcucaugguccuacauuguggaaacaucuaguucagacaauggaacguguuacccaggagauuucaucgauuaugaggagcuaagagagcaauugagcucagugucaucauuugaaagguuugagauauuccccaagacaaguucauggcccaaucaugacucgaacaaagguguaacggcagcauguccucaugcuggagcaaaaagcuucuacaaaaauuuaauauggcuaguuaaaaaaggaaauucauacccaaagcucagcaaauccuacauuaaugauaaagggaaagaaguccucgugcuauggggcauucaccauccaucuacuagugcugaccaacaaagucucuaucagaaugcagaugcauauguuuuuguggggacaucaagauacagcaagaaguucaagccggaaauagcaauaagacccaaagugagggaucaagaagggagaaugaacuauuacuggacacuaguagagccgggagacaaaauaacauucgaagcaacuggaaaucuagugguaccgagauaugcauucgcaauggaaagaaaugcuggaucugguauuaucauuucagauacaccaguccacgauugcaauacaacuugucagacacccaagggugcuauaaacaccagccucccauuucagaauauacauccgaucacaauuggaaaauguccaaaauauguaaaaagcacaaaauugagacuggccacaggauugaggaaugucccgucuauucaaucuagaggccuauuuggggccauugccgguuucauugaagggggguggacagggaugguagauggaugguacgguuaucaccaucaaaaugagcaggggucaggauaugcagccgaccugaagagcacacagaaugccauugacgagauuacuaacaaaguaaauucuguuauugaaaagaugaauacacaguucacagcaguagguaaagaguucaaccaccuggaaaaaagaauagagaauuuaaauaaaaaaguugaugaugguuuccuggacauuuggacuuacaaugccgaacuguugguucuauuggaaaaugaaagaacuuuggacuaccacgauucaaaugugaagaacuuauaugaaaagguaagaagccaguuaaaaaacaaugccaaggaaauuggaaacggcugcuuugaauuuuaccacaaaugcgauaacacgugcauggaaagugucaaaaaugggacuuaugacuacccaaaauacucagaggaagcaaaauuaaacagagaagaaauagaugggguaaagcuggaaucaacaaggauuuaccagauuuuggcgaucuauucaacugucgccaguucauugguacugguagucucccugggggcaaucaguuucuggaugugcucuaaugggucucuacaguguagaauauguauuuaa

SEQ ID NO: 39679 - RNA, 1701 nt, Artificial Sequence
  derived and/or modified CDS sequence (wt) from hemagglutinin__InfluenzaA__AEO01594
augaaggcaauacuaguaguucugcuauauacauuugcaaccgcaaaugcagacacauuauguauagguuaucaugcgaacaauucaacagacacuguagacacaguacuagaaaagaauguaacaguaacacacucuguuaaccuucuagaagacaagcauaacgggaaacuaugcaaacuaagagggguagccccauugcauuuggguaaauguaacauugcuggcuggauccugggaaauccagagugugaaucacucuccacagcaagcucaugguccuacauuguggaaacaucuaguucagacaauggaacguguuacccaggagauuucaucgauuaugaggagcuaagagagcaauugagcucagugucaucauuugaaagguuugagauauuccccaagacaaguucauggcccaaucaugacucgaacaaagguguaacggcagcauguccucaugcuggagcaaaaagcuucuacaaaaauuuaauauggcuaguuaaaaaaggaaauucauacccaaagcucagcaaauccuacauuaaugauaaagggaaagaaguccucgugcuauggggcauucaccauccaucuacuagugcugaccaacaaagucucuaucagaaugcagaugcauauguuuuuguggggucaucaagauacagcaagaaguucaagccggaaauagcaauaagacccaaagugagggaucaagaagggagaaugaacuauuacuggacacuaguagagccgggagacaaaauaacauucgaagcaacuggaaaucuagugguaccgagauaugcauucgcaauggaaagaaaugcuggaucugguauuaucauuucagauacaccaguccacgauugcaauacaacuugucagacacccaagggugcuauaaacaccagccucccauuucagaauauacauccgaucacaauuggaaaauguccaaaauauguaaaaagcacaaaauugagacuggccacaggauugaggaaugucccgucuauucaaucuagaggccuauuuggggccauugccgguuucauugaagggggguggacagggaugguagauggaugguacgguuaucaccaucaaaaugagcaggggucaggauaugcagccgaccugaagagcacacagaaugccauugacgagauuacuaacaaaguaaauucuguuauugaaaagaugaauacgcaguucacagcaguagguaaagaguucaaccaccuggaaaaaagaauagagaauuuaaauaaaaaaguugaugaugguuuccuggacauuuggacuuacaaugccgaacuguugguucuauuggaaaaugaaagaacuuuggacuaccacgauucaaaugugaagaacuuauaugaaaagguaagaagccagcuaaaaaacaaugccaaggaaauuggaaacggcugcuuugaauuuuaccacaaaugcgauaacacgugcauggaaagugucaaaaaugggacuuaugacuacccaaaauacucagaggaagcaaaauuaaacagagaagaaauagaugggguaaagcuggaaucaacaaggauuuaccagauuuuggcgaucuauucaacugucgccaguucauugguacugguagucucccugggggcaaucaguuucuggaugugcucuaaugggucucuacaguguagaauauguauuuaa

SEQ ID NO: 39680 - RNA, 1701 nt, Artificial Sequence; identical to SEQ ID NO: 34676
  derived and/or modified CDS sequence (wt) from hemagglutinin__InfluenzaA__AEO01595

SEQ ID NO: 39681 - RNA, 1701 nt, Artificial Sequence; identical to SEQ ID NO: 39261
  derived and/or modified CDS sequence (wt) from hemagglutinin__InfluenzaA__AEO01596

SEQ ID NO: 39682 - RNA, 1701 nt, Artificial Sequence; identical to SEQ ID NO: 34681
  derived and/or modified CDS sequence (wt) from hemagglutinin__InfluenzaA__AEO01597

SEQ ID NO: 39683 - RNA, 1701 nt, Artificial Sequence
  derived and/or modified CDS sequence (wt) from hemagglutinin__InfluenzaA__AEO01598
augaaggcaauacuaguaguucugcuauauacauuugcaaccgcaaaugcagacacauuauguauagguuaucaugcgaacaauucaacagacacuguagacacaguacuagaaaagaauguaacaguaacacacucuguuaaccuucuagaagacaagcauaacgggaaacuaugcaaacuaagagggguagccccauugcauuuggguaaauguaacauugcuggcuggauccugggaaauccagagugugaaucacucuccacagcaagcucaugguccuacauuguggaaacaucuaguucagacaauggaacguguuacccaggagauuucaucgauuaugaggagcuaagagagcaauugagcucagugucaucauuugaaagguuugagauguuccccaagacaaguucauggcccaaucaugacucgaacaacgguguaacggcagcauguccucaugcuggagcaaaaagcuucuacaaaaauuuaauauggcuaguuaaaaaaggaaauucauacccaaagcucagcaaauccuacauuaaugauaaagggaaagaaguccucgugcuauggggcauucaccauccaucuacuagugcugaccaacaaagucucuaucagaaugcagaugcauauguuuuuguggggucaucaagauacagcaagaaguucaagccggaaauagcaauaagacccaaagugagggaucaagaagggagaaugaacuauuacuggacacuaguagagccgggagacaaaauaacauucgaagcaacuggaaaucuagugguaccgagauaugcauucgcaauggaaagaaaugcuggaucugguauuaucauuucagauacaccaguccacgauugcaauacaacuugucagacacccaagggugcuauaaacaccagccucccauuucagaauauacauccgaucacaauuggaaaauguccaaaauauguaaaaagcacaaaauugagacuggccacaggauugaggaaugucccgucuauucaaucuagaggccuauuuggggccauugccgguuucauugaagggggguggacagggaugguagauggaugguacgguuaucaccaucaaaaugagcaggggucaggauaugcagccgaccugaagagcacacagaaugccauugacgagauuacuaacaaaguaaauucuguuauugaaaagaugaauacacaguucacagcaguagguaaagaguucaaccaccuggaaaaaagaauagagaauuuaaauaaaaaaguugaugaugguuuccuggacauuuggacuuacaaugccgaacuguugguucuauuggaaaaugaaagaacuuuggacuaccacgauucaaaugugaagaacuuauaugaaaagguaagaagccagcuaaaaaacaaugccaaggaaauuggaaacggcugcuuugaauuuuaccacaaaugcgauaacacgugcauggaaagugucaaaaaugggacuuaugacuacccaaaauacucagaggaagcaaaauuaaacagagaagaaauagaugggguaaagcuggaaucaacaaggauuuaccagauuuuggcgaucuauucaacugucgccaguucauugguacugguagucucccugggggcaaucaguuucuggaugugcucuaaugggucucuacaguguagaauauguauuuaa

SEQ ID NO: 39684 - RNA, 1701 nt, Artificial Sequence; identical to SEQ ID NO: 34681
  derived and/or modified CDS sequence (wt) from hemagglutinin__InfluenzaA__AEO01599

SEQ ID NO: 39685 - RNA, 1701 nt, Artificial Sequence; identical to SEQ ID NO: 39288
  derived and/or modified CDS sequence (wt) from hemagglutinin__InfluenzaA__AEO01600

SEQ ID NO: 39686 - RNA, 1701 nt, Artificial Sequence
  derived and/or modified CDS sequence (wt) from hemagglutinin__InfluenzaA__AEO01601
augaaggcaauacuaguaguucugcuauauacauuugcaaccgcaaaugcagacacauuauguauagguuaucaugcgaacaauucaacagacacuguagacacaguacuagaaaagaauguaacaguaacacacucuguuaaccuucuagaagacaagcauaacgggaaacuaugcaaacuaagagggguagccccauugcauuuggguaaauguaacauugcuggcuggauccugggaaauccagagugugaaucacucuccacagcaagcucaugguccuacauuguggaaacaucuaguucagacaauggaacguguuacccaggagauuucaucgauuaugaggagcuaagagagcaauugagcucagugucaucauuugaaagguuugagauauuccccaagacaaguucauggcccaaucaugacucgaacaaagguguaacggcagcauguccucaugcuggagcaaaaagcuucuacaaaaauuuaauauggcuaguuaaaaaaggaaauucauacccaaagcucagcaaauccuacauuaaugauaaagggaaagaaguccucgugcuauggggcauucaccauccaucuacuagugcugaccaacaaagucucuaccagaaugcagaugcauauguuuuuguggggacaucaagauacagcaagaaguucaagccggaaauagcaauaagacccaaagugagggaucaagaagggagaaugaacuauuacuggacacuaguagagccgggagacaaaauaacauucgaagcaacuggaaaucuagugguaccgagauaugcauucgcaauggaaagaaaugcuggaucugguauuaucauuucagauacaccaguccacgauugcaauacaacuugucagacacccaagggugcuauaaacaccagccucccauuucagaauauacauccgaucacaauuggaaaauguccaaaauauguaaaaagcacaaaauugagacuggccacaggauugaggaaugucccgucuauucaaucuagaggccuauuuggggccauugccgguuucauugaagggggguggacagggaugguagauggaugguacgguuaucaccaucaaaaugagcaggggucaggauaugcagccgaccugaagagcacacagaaugccauugacgagauuacuaacaaaguaaauucuguuauugaaaagaugaauacacaguucacagcaguagguaaagaguucaaccaccuggaaaaaagaauagagaauuuaaauaaaaaaguugaugaugguuuccuggacauuuggacuuacaaugccgaacuguugguucuauuggaaaaugaaagaacuuuggacuaccacgauucaaaugugaagaacuuauaugaaaagguaagaagccaguuaaaaaacaaugccaaggaaauuggaaacggcugcuuugaauuuuaccacaaaugcgauaacacgugcauggaaagugucaaaaaugggacuuaugacuacccaaaauacucagaggaagcaaaauuaaacagagaagaaauagaugggguaaagcuggaaucaacaaggauuuaccagauuuuggcgaucuauucaacugucgccaguucauugguacugguagucucccugggggcaaucaguuucuggaugugcucuaaugggucucuacaguguagaauauguauuuaa

SEQ ID NO: 39687 - RNA, 1701 nt, Artificial Sequence; identical to SEQ ID NO: 34681
  derived and/or modified CDS sequence (wt) from hemagglutinin__InfluenzaA__AEO01602

SEQ ID NO: 39688 - RNA, 1701 nt, Artificial Sequence; identical to SEQ ID NO: 34681
  derived and/or modified CDS sequence (wt) from hemagglutinin__InfluenzaA__AEO01603

SEQ ID NO: 39689 - RNA, 1701 nt, Artificial Sequence; identical to SEQ ID NO: 34681
  derived and/or modified CDS sequence (wt) from hemagglutinin__InfluenzaA__AEO01604

SEQ ID NO: 39690 - RNA, 1701 nt, Artificial Sequence; identical to SEQ ID NO: 39686
  derived and/or modified CDS sequence (wt) from hemagglutinin__InfluenzaA__AEO01605

SEQ ID NO: 39691 - RNA, 1701 nt, Artificial Sequence
  derived and/or modified CDS sequence (wt) from hemagglutinin__InfluenzaA__AEO01606
augaaggcaauacuaguaguucugcuauauacauuugcaaccgcaaaugcagacacauuauguauagguuaucaugcgaacaauucaacagacacuguagacacaguacuagaaaagaauguaacaguaacacacucuguuaaccuucuagaagacaagcauaacgggaaacuaugcaaacuaagagggguagccccauugcauuuggguaaauguaacauugcuggcuggauccugggaaauccagagugugaaucacucuccacagcaagcucaugguccuacauuguggaaacaucuaguucagacaauggaacguguuacccaggagauuucaucgauuaugaggagcuaagagagcaauugagcucagugucaucauuugaaagguuugagauauuccccaagacaaguucauggcccaaucaugacucgaacaaagguguaacggcagcauguccucaugcuggagcaaaaagcuucuacaaaaauuuaauauggcuaguuaaaaaaggaaauucauacccaaagcucagcaaauccuacauuaaugauaaagggaaagaaguccucgugcuauggggcauucaccauccaucuacuagugcugaccaacaaagucucuaucagaaugcagaugcauauguuuuuguggggacaucaagauacagcaagaaguucaagccggaaauagcaauaagacccaaagugagggaucaagaagggagaaugaacuauuacuggacacuaguagagccgggagacaaaauaacauucgaagcaacuggaaaucuagugguaccgagauaugcauucgcaauggaaagaaaugcuggaucugguauuaucauuucagauacaccaguccacgauugcaauacaacuugucagacacccaagggugcuauaaacaccagccucccauuucagaauauacauccgaucacaauuggaaaauguccaaaauauguaaaaagcacaaaauugagacuggccacaggauugaggaaugucccgucuauucaaucuagaggccuauuuggggccauugccgguuucauugaagggggguggacagggaugguagauggaugguacgguuaucaccaucaaaaugagcaggggucaggauaugcagccgaccugaagagcacacagaaugccauugacgagauuacuaacaaaguaaauucuguuauugaaaagaugaauacacaguucacagcaguagguaaagaguucaaccaccuggaaaaaagaauagagaauuuaaauaaaaaaguugaugaugguuuccuggacauuuggacuuacaaugccgaacuguugguucuauuggaaaaugaaagaacuuuggacuaccacgauucaaaugugaagaacuuauaugaaaagguaaaaagccaguuaaaaaacaaugccaaggaaauuggaaacggcugcuuugaauuuuaccacaaaugcgauaacacgugcauggaaagugucaaaaaugggacuuaugacuacccaaaauacucagaggaagcaaaauuaaacagagaagaaauagaugggguaaagcuggaaucaacaaggauuuaccagauuuuggcgaucuauucaacugucgccaguucauugguacugguagucucccugggggcaaucaguuucuggaugugcucuaaugggucucuacaguguagaauauguauuuaa

SEQ ID NO: 39692 - RNA, 1701 nt, Artificial Sequence
  derived and/or modified CDS sequence (wt) from hemagglutinin__InfluenzaA__AEO01607
auggaggcaauacuaguaguucugcuauauacauuugcaaccgcaaaugcagacacauuauguauagguuaucaugcgaacaauucaacagacacuguagacacaguacuagaaaagaauguaacaguaacacacucuguuaaccuucuagaagacaagcauaacgggaaacuaugcaaacuaagagggguagccccauugcauuuggguaaauguaacauugcuggcuggauccugggaaauccagagugugaaucacucuccacagcaagcucaugguccuacauuguggaaacaucuaguucagacaauggaacguguuacccaggagauuucaucgauuaugaggagcuaagagagcaauugagcucagugucaucauuugaaagguuugagauauuccccaagacaaguucauggcccaaucaugacucgaacaaagguguaacggcagcauguccucaugcuggagcaaaaagcuucuacaaaaauuuaauauggcuaguuaaaaaaggaaauucauacccaaagcucagcaaauccuacauuaaugauaaagggaaagaaguccucgugcuauggggcauucaccauccaucuacuagugcugaccaacaaagucucuaucagaaugcagaugcauauguuuuuguggggucaucaagauacagcaagaaguucaagccggaaauagcaauaagacccaaagugagggaucaggaagggagaaugaacuauuacuggacacuaguagagccgggagacaaaauaacauucgaagcaacuggaaaucuagugguaccgagauaugcauucgcaauggaaagaaaugcuggaucugguauuaucauuucagauacaccaguccacgauugcaauacaacuugucagacacccaagggugcuauaaacaccagccucccauuucauaauauacauccgaucacaauuggaaaauguccaaaauauguaaaaagcacaaaauugagacuggccacaggauugaggaaugucccgucuauucaaucuagaggccuauuuggggccauugccgguuucauugaagggggguggacagggaugguagauggaugguacgguuaucaccaucaaaaugagcaggggucaggauaugcagccgaccugaagagcacacagaaugccauugacgagauuacuaacaaaguaaauucuguuauugaaaagaugaauacacaguucacagcaguagguaaagaguucaaccaccuggaaaaaagaauagagaauuuaaauaaaaaaguugaugaugguuuccuggacauuuggacuuacaaugccgaacuguugguucuauuggaaaaugaaagaacuuuggacuaccacgauucaaaugugaagaacuuauaugaaaagguaagaagccaguuaaaaaacaaugccaaggaaauuggaaacggcugcuuugaauuuuaccacaaaugcgauaacacgugcauggaaagugucaaaaaugggacuuaugacuacccaaaauacucagaggaagcaaaauuaaacagagaagaaauagaugggguaaagcuggaaucaacaaggauuuaccagauuuuggcgaucuauucaacugucgccaguucauugguacugguagucucccugggggcaaucaguuucuggaugugcucuaaugggucucuacaguguagaauauguauuuaa

SEQ ID NO: 39693 - RNA, 1701 nt, Artificial Sequence; identical to SEQ ID NO: 39608
  derived and/or modified CDS sequence (wt) from hemagglutinin__InfluenzaA__AEO01608

SEQ ID NO: 39694 - RNA, 1701 nt, Artificial Sequence
  derived and/or modified CDS sequence (wt) from hemagglutinin__InfluenzaA__AEO01609
augaaggcaauacuaguaguucugcuauauacauuugcaaccgcaaaugcagacacauuauguauagguuaucaugcgaacaauucaacagacacuguagacacaguacuagaaaagaauguaacaguaacacacucuguuaaccuucuagaagacaagcauaacgggaaacuaugcaaacuaagagggguagccccauugcauuuggguaaauguaacauugcuggcuggauccugggaaauccagagugugaaucacucuccacagcaagcucaugguccuacauuguggaaacaucuaauucagacaauggaacguguuacccaggagauuucaucgauuaugaggagcuaagagagcaauugagcucagugucaucauuugaaagguuugagauauuccccaagacaaguucauggcccaaucaugacucgaacaaagguguaacggcagcauguccucaugcuggagcaaaaagcuucuacaaaaauuuaauauggcuaguuaaaaaaggaaauucauacccaaagcucagcaaauccuacauuaaugauaaagggaaagaaguccucgugcuauggggcauucaccauccaucuacuagugcugaccaacaaagucucuaucagaaugcagaugcauauguuuuuguggggacaucaagauacagcaagaaguucaagccggaaauagcaauaagacccaaagugagggaucaagaagggagaaugaacuauuacuggacacuaguagagccgggagacaaaauaacauucgaagcaacuggaaaucuagugguaccgagauaugcauucgcaauggaaagaaaugcuggaucugguauuaucauuucagauacaccaguccacgauugcaauacaacuugucagacacccaagggugcuauaaacaccagccucccauuucagaauauacauccgaucacaauuggaaaauguccaaaauauguaaaaagcacaaaauugagacuggccacaggauugaggaaugucccgucuauucaaucuagaggccuauuuggggccauugccgguuucauugaagggggguggacagggaugguagauggaugguacgguuaucaccaucaaaaugagcaggggucaggauaugcagccgaccugaagagcacacagaaugccauugacaagauuacuaacaaaguaaauucuguuauugaaaagaugaauacacaguucacagcaguagguaaagaguucaaccaccuggagaaaagaauagagaauuuaaauaaaaaaguugaugaugguuuccuggacauuuggacuuacaaugccgaacuguugguucuauuggaaaaugaaagaacuuuggacuaccacgauucaaaugugaagaacuuauaugaaaagguaagaagccaguuaaaaaacaaugccaaggaaauuggaaacggcugcuuugaauuuuaccacaagugcgauaacacgugcauggaaagugucaaaaaugggacuuaugacuacccaaaauacucagaggaagcaaaauuaaacagagaagaaauagaugggguaaagcuggaaucaacaaggauuuaccagauuuuggcgaucuauucaacugucgccaguucauugguacugguagucucccugggggcaaucaguuucuggaugugcucuaaugggucucuacaguguagaauauguauuuaa

SEQ ID NO: 39695 - RNA, 1701 nt, Artificial Sequence
  derived and/or modified CDS sequence (wt) from hemagglutinin__InfluenzaA__AEO01610
augaaggcaauacuaguaguucugcuauauacauuugcaaccacaaaugcagacacauuauguauagguuaucaugcgaacaauucaacagacacuguagacacaguacuagaaaagaauguaacaguaacacacucuguuaaccuucuagaagacaagcauaacgggaaacuaugcaaacuaagagggguagccccauugcauuuggguaaauguaacauugcuggcuggauccugggaaauccagagugugaaucacucuccacagcaagcucaugguccuacauuguggaaacaucuaguucagacaauggaacguguuacccaggagauuucaucgauuaugaggagcuaagagagcaauugagcucagugucaucauuugaaagguuugagauauuccccaagacaaguucauggcccaaucaugacucgaacaaagguguaacggcagcauguccucaugcuggagcaaaaagcuucuacaaaaauuuaauauggcuaguuaaaaaaggaaauucauacccaaagcucagcaaauccuacauuaaugauaaagggaaagaaguccucgugcuauggggcauucaccauccaucuacuagugcugaccaacaaagucucuaucagaaugcagaugcauauguuuuuguggggacaucaagauacagcaagaaguucaagccggaaauagcaauaagacccaaagugagggaucaagaagggagaaugaacuauuacuggacacuaguagagccgggagacaaaauaacauucgaagcaacuggaaaucuagugguaccgagauaugcauucgcaauggaaagaaaugcuggaucugguauuaucauuucagauacaccaguccacgauugcaauacaacuugucagacacccaagggugcuauaaacaccagccucccauuucagaauauacauccgaucacaauuggaaaauguccaaaauauguaaaaagcacaaaauugagacuggccacaggauugaggaaugucccgucuauucaaucuagaggccuauuuggggccauugccgguuucauugaagggggguggacagggaugguagauggaugguacgguuaucaccaucaaaaugagcaggggucaggauaugcagccgaccugaagagcacacagcaugccauugacgagauuacuaacaaaguaaauucuguuauugaaaagaugaauacacaguucacagcaguagguaaagaguucaaccaccuggaaaaaagaauagagaauuuaaauaaaaaaguugaugaugguuuccuggacauuuggacuuacaaugccgaacuguugguucuauuggaaaaugaaagaacuuuggacuaccacgauucaaaugugaagaacuuauaugaaaagguaagaagccaguuaaaaaacaaugccaaggaaauuggaaacggcugcuuugaauuuuaccacaaaugcgauaacacgugcauggaaagugucaaaaaugggacuuaugacuacccaaaauacucagaggaagcaaaauuaaacagagaagaaauagaugggguaaagcuggaaucaacaaggauuuaccagauuuuggcgaucuauucaacugucgccaguucauugguacugguagucucccugggggcaaucaguuucuggaugugcucuaaugggucucuacaguguagaguauguauuuaa

SEQ ID NO: 39696 - RNA, 1701 nt, Artificial Sequence
  derived and/or modified CDS sequence (wt) from hemagglutinin__InfluenzaA__AEO01611
augaaggcaauacuaguaguucugcuauauacauuugcaaccgcaaaugcagacacauuauguauagguuaucaugcgaacaauucaacagacacuguagacacaguacuagaaaagaauguaacaguaacacacucuguuaaccuucuagaagacaagcauaacgggaaacuaugcaaacuaagagggguagccccauugcauuuggguaaauguaacauugcuggcuggauccugggaaauccagagugugaaucacucuccacagcaagcucaugguccuacauuguggaaacaucuaguucagacaauggaacguguuacccaggagauuucaucgauuaugaggagcuaagagagcaauugagcucagugucaucauuugaaagguuugagauauuccccaagacaaguucauggcccaaucaugacucgaacaaagguguaacggcagcauguccucaugcuggagcaaaaagcuucuacaaaaauuuaauauggcuaguuaaaaaaggaaauucauacccaaagcucagcaaauccuacauuaaugauaaagggagagaaguccucgugcuauggggcauucaccauccaucuacuagugcugaccaacaaagucucuaucagaaugcagaugcauauguuuuuguggggacaucaagauacagcaagaaguucaagccggaaauagcaauaagacccaaagugagggaucaagaagggagaaugaacuauuacuggacacuaguagagccgggagacaaaauaacauucgaagcaacuggaaaucuagugguaccgagauaugcauucgcaauggaaagaaaugcuggaucugguauuaucauuucagauacaccaguccacgauugcaauacaacuugucagacacccaagggugcuauaaacaccagccucccauuucagaauauacauccgaucacaauuggagaauguccaaaauauguaaaaagcacaaaauugagacuggccacaggauugaggaaugucccgucuauucaaucuagaggccuauuuggggccauugccgguuucauugaagggggguggacagggaugguagauggaugguacgguuaucaccaucaaaaugagcaggggucaggauaugcagccgaccugaagagcacacagaaugccauugacaagauuacuaacaaaguaaauucuguuauugaaaagaugaauacacaguucacagcaguagguaaagaguucaaccaccuggaaaaaagaauagagaauuuaaauaaaaaaguugaugaugguuuccuggacauuuggacuuacaaugccgaacuguugguucuauuggaaaaugaaagaacuuuggacuaccacgauucaaaugugaagaacuuauaugaaaagguaagaagccaguuaaaaaacaaugccaaggaaauuggaaacggcugcuuugaauuuuaccacaaaugcgauaacacgugcauggaaagugucaaaaaugggacuuaugacuacccaaaauacucagaggaagcaaaauuaaacagagaagaaauagaugggguaaagcuggaaucaacaaggauuuaccagauuuuggcgaucuauucaacugccgccaguucauugguacugguagucucccugggggcaaucaguuucuggaugugcucuaaugggucucuacaguguagaauauguauuuaa

SEQ ID NO: 39697 - RNA, 1701 nt, Artificial Sequence
  derived and/or modified CDS sequence (wt) from hemagglutinin__InfluenzaA__AEO01612
augaaggcaauacuaguaguucugcuauauacauuugcaaccgcaaaugcagacacauuauguauagguuaucaugcgaacaauucaacagacacuguagacacaguacuagaaaagaauguaacaguaacacacucuguuaaccuucuagaagacaagcauaacgggaaacuaugcaaacuaagagggguagccccauugcauuuggguaaauguaacauugcuggcuggauccugggaaauccagagugugaaucacucuccacagcaagcucaugguccuacauuguggaaacaucuaguucagacaauggaacguguuacccaggagauuucaucgauuaugaggagcuaagagagcaauugagcucagugucaucauuugaaagguuugagauauuccccaagacaaguucauggcccaaucaugacucgaacaaaggugcaacggcagcauguccucaugcuggagcaaaaagcuucuacaaaaauuuaauauggcuaguuaaaaaaggaaauucauacccaaagcucagcaaauccuacauuaaugauaaagggaaagaaguccucgugcuauggggcauucaccauccaucuacuagugcugaccaacaaagucucuaucagaaugcagaugcauauguuuuuguggggacaucaagauacagcaagaaguucaagccggaaauagcaauaagacccaaagugagggaucaagaagggagaaugaacuauuacuggacacuaguagagccgggagacaaaauaacauucgaagcaacuggaaaucuagugguaccgagauaugcauucgcaauggaaagaaaugcuggaucugguauuaucauuucagauacaccaguccacgauugcaauacaacuugucagacacccaagggugcuauaaacaccagccucccauuucagaauauacauccgaucacaauuggaaaauguccaaaauauguaaaaagcacaaaauugagacuggccacaggauugaggaaugucccgucuauucaaucuagaggccuauuuggggccauugccgguuucauugaagggggguggacagggaugguagauggaugguacgguuaucaccaucaaaaugagcaggggucaggauaugcagccgaccugaagagcacacagaaugccauugacgagauuacuaacaaaguaaauucuguuauugaaaagaugaauacacaguucacagcaguagguaaagaguucaaccaccuggaaaaaagaauagagaauuuaaauaaaaagguugaugaugguuuccuggacauuuggacuuacaaugccgaacuguugguucuauuggaaaaugaaagaacuuuggacuaccacgauucaaaugugaagaacuuauaugaaaagguaagaagccaguuaaaaaacaaugccaaggaaauuggaaacggcugcuuugaauuuuaccacaaaugcgauaacacgugcauggaaagugucaaaaaugggacuuaugacuacccaaaauacucagaggaagcaaaauuaaacagagaagaaauagaugggguaaagcuggaaucaacaaggauuuaccagauuuuggcgaucuauucaacugucgccaguucauugguacugguagucucccugggggcaaucaguuucuggaugugcucuaaugggucucuacaguguagaauauguauuuaa

SEQ ID NO: 39698 - RNA, 1701 nt, Artificial Sequence
  derived and/or modified CDS sequence (wt) from hemagglutinin__InfluenzaA__AEO01613
augaaggcaauacuaguaguucugcuauauacauuugcaaccgcaaaugcagacacauuauguauagguuaucaugcgaacaauucaacagacacuguagacacaguacuagaaaagaauguaacaguaacacacucuguuaaccuucuagaagacaagcauaacgggaaacuaugcaaacuaagagggguagccccauugcauuuggguaaauguaacauugcuggcuggauccugggaaauccagagugugaaucacucuccacagcaagcucaugguccuacauuguggaaacaucuaguucagacaauggaacguguuacccaggagauuucaucgauuaugaggagcuaagagagcaauugagcucagugucaucauuugaaagguuugagauauuccccaagacaaguucauggcccaaucaugacucgaacaaagguguaacggcagcauguccucaugcuggagcaaaaagcuucuacaaaaauuuaauauggcuaguuaaaaaaggaaauucauacccaaagcucagcaaauccuacauuaaugauaaagggaaagaaguccucgugcuauggggcauucaccauccaucuacuagugcugaccaacaaagucucuaucagaaugcagaugcguauguuuuuguggggacaucaagauacagcaagaaguucaagccggaaauagcaauaagacccaaagugagggaucaagaagggagaaugaacuauuacuggacacuaguagagccgggagacaaaauaacauucgaagcaacuggaaaucuagugguaccgagauaugcauucgcaauggaaagaaaugcuggaucugguauuaucauuucagauacaccaguccacgauugcaauacaacuugucagacacccaagggugcuauaaacaccagccucccauuucagaauauacauccgaucacaauuggaaaauguccaaaauauguaaaaagcacaaaauugagacuggccacaggauugaggaaugucccgucuauucaaucuagaggccuauuuggggccauugccgguuucauugaagggggguggacagggaugguagauggaugguacgguuaucaccaucaaaaugagcaggggucaggauaugcagccgaccugaagagcacacagaaugccauugacgagauuacuaacaaaguaaauucuguuauugaaaagaugaauacacaguucacagcaguagguaaagaguucaaccaccuggaaaaaagaauagagaauuuaaauaaaaagguugaugaugguuuccuggacauuuggacuuacaaugccgaacuguugguucuauuggaaaaugaaagaacuuuggacuaccacgauucaaaugugaagaaauuauaugaaaagguaagaagccaguuaaaaaacaaugcuaaggaaauuggaaacggcugcuuugaauuuuaccacaaaugcgauaacacgugcauggaaagugucaaaaaugggacuuaugacuacccaaaauacucagaggaagcaaaauuaaacagagaagaaauagaugggguaaagcuggaaucaacaaggauuuaccagauuuuggcgaucuauucaacugucgccaguucauugguacugguagucucccugggggcaaucaguuucuggaugugcucuaaugggucucuacaguguagaauauguauuuaa

SEQ ID NO: 39699 - RNA, 1701 nt, Artificial Sequence
  derived and/or modified CDS sequence (wt) from hemagglutinin__InfluenzaA__AEO01614
augaaggcaauacuaguaguucugcuauauacauuugcaaccgcaaaugcagacacauuauguauagguuaucaugcgaacaauucaacagacacuguagacacaguacuagaaaagaauguaacaguaacacacucuguuaaccuucuagaagacaagcauaacgggaaacuaugcaaacuaaaagggguagccccauugcauuuggguaaauguaacauugcuggcuggauccugggaaauccagagugugaaucacucuccacagcaagcucaugguccuacauuguggaaacaucuaguucagacaauggaacguguuacccaggagauuucaucgauuaugaggagcuaagagaacaauugagcucagugucaucauuugaaagguuugagauauuccccaagacaaguucauggcccaaucaugacucgaacaaagguguaacggcagcauguccucaugcuggagcaaaaagcuucuacaaaaauuuaauauggcuaguuaaaaaaggaaauucauacccaaagcucagcaaauccuacauuaaugauaaagggaaagaaguccucgugcuauggggcauucaccauccaucuacuagugcugaccaacaaagucucuaucagaaugcagaugcauauguuuuuguggggacaucaagauacagcaagaaguucaagccggagauagcaauaagacccaaagugagggaucaagaagggagaaugaacuauuacuggacacuaguagagccgggagacaaaauaacauucgaagcaacuggaaaucuagugguaccgagauaugcauuugcaauggaaagaaaugcuggaucugguauuaucauuucagauacaccaguccacgauugcaauacaacuugucagacacccaagggugcuauaaacaccagccucccauuucagaauauacauccgaucacaauuggaaaauguccaaaauauguaaaaagcacaaaauugagacuggccacaggauugaggaauaucccgucuauucaaucuagaggccuauuuggggccauugccgguuucauugaagggggguggacagggaugguagauggaugguacgguuaucaccaucaaaaugagcaggggucaggauaugcagccgaccugaagagcacacagaaugccauugacgagauuacuaacaaaguaaauucuguuauugaaaagaugaauacacaguucacagcaguagguaaagaguucaaccaccuggaaaaaagaauagagaauuuaaauaaaaagguugaugaugguuuccuggacauuuggacuuacaaugccgaacuguugguucuauuggaaaaugaaagaacuuuggacuaccacgauucaaaugugaagaacuuauaugaaaagguaagaagccaguuaaaaaacaaugccaaggaaauuggaaacggcugcuuugaauuuuaccacaaaugcgauaacacgugcauggaaagugucaaaaaugggacuuaugacuacccaaaauacucagaggaagcaaaauuaaacagagaagaaauagaugggguaaagcuggaaucaacaaggauuuaccagauuuuggcgaucuauucaacugucgccaguucauugguacugguagucucccugggggcaaucaguuucuggaugugcucuaaugggucucuacaguguagaauauguauuuaa

SEQ ID NO: 39700 - RNA, 1701 nt, Artificial Sequence
  derived and/or modified CDS sequence (wt) from hemagglutinin__InfluenzaA__AEO01615
augaaggcaauacuaguaguucugcuauauacauuugcaaccgcaaaugcagacacauuauguauagguuaucaugcgaacaauucaacagacacuguagacacaguacuagaaaagaauguaacaguaacacacucuguuaaccuucuagaagacaagcauaacgggaaacuaugcaaacuaagagggguagccccauugcauuuggguaaauguaacauugcuggcuggauccugggaaauccagagugugaaucacucuccacagcaagcucaugguccuacauuguggaaacaucuaguucagacaauggaacguguuacccaggagauuucaucgauuaugaggagcuaagagagcaauugagcucagugucaucauuugaaagguuugagauauuccccaagacaaguucauggcccaaucaugacucgaacaaagguguaacggcagcauguccucaugcuggagcaaaaagcuucuacaaaaauuuaauauggcuaguuaaaaaaggaaauucauacccaaagcucagcaaauacuacauuaaugauaaagggaaagaaguccucgugcuauggggcauucaccauccaucuacuagugcugaccaacaaagucucuaucagaaugcagaugcauauguuuuuguggggacaucaagauacagcaagaaguucaagccggaaauagcaauaagacccaaagugagggaacaagaagggagaaugaacuauuacuggacacuaguagagccgggagacaaaauaacauucgaagcaacuggaaaucuagugguaccgagauaugcauucgcaauggaaagaaaugcuggaucugguauuaucauuucagauacaccaguccacgauugcaauacaacuugucagacacccaagggugcuauaaacaccagccucccauuucagaauauacauccgaucacaauuggaaaauguccaaaauauguaaaaagcacaaaauugagacuggccacuggauugaggaaugucccgucuauucaaucuagaggccuauuuggggccauugccgguuucauugaagggggguggacagggaugguagauggaugguacgguuaucaccaucaaaaugagcaggggucaggauaugcagccgaccugaagagcacacagaaugccauugacaagauuacuaacaaaguaaauucuguuauugaaaagaugaauacacaguucacagcaguggguaaagaguucaaccaccuggaaaaaagaauagagaauuuaaauaaaaaaguugaugaugguuuccuggacauuuggacuuacaaugccgaacuguugguucuauuggaaaaugaaagaacuuuggacuaccacgauucaaaugugaagaacuuauaugaaaagguaagaagccaguuaaaaaacaaugccaaggaaauuggaaacggcugcuuugaauuuuaccacaaaugcgauaacacgugcauggaaagugucaaaaaugggacuuaugacuacccaaaauacucagaggaagcaaaauuaaacagagaagaaauagaugggguaaagcuggaaucaacaaggauuuaccagauuuuggcgaucuauucaacugucgccaguucauugguacugguagucucccugggggcaaucaguuucuggaugugcucuaaugggucucuacaguguagaauauguauuuaa

SEQ ID NO: 39701 - RNA, 1701 nt, Artificial Sequence; identical to SEQ ID NO: 39463
  derived and/or modified CDS sequence (wt) from hemagglutinin__InfluenzaA__AEO01616

SEQ ID NO: 39702 - RNA, 1701 nt, Artificial Sequence; identical to SEQ ID NO: 35845
  derived and/or modified CDS sequence (wt) from hemagglutinin__InfluenzaA__AEO01617

SEQ ID NO: 39703 - RNA, 1701 nt, Artificial Sequence; identical to SEQ ID NO: 36866
  derived and/or modified CDS sequence (wt) from hemagglutinin__InfluenzaA__AEO01619

SEQ ID NO: 39704 - RNA, 1701 nt, Artificial Sequence
  derived and/or modified CDS sequence (wt) from hemagglutinin__InfluenzaA__AEO01620
augaaggcaauacuaguaguucugcuauauacauuugcaaucgcaaaugcagacacauuauguauagguuaucaugcgaacaauucaacagacacuguagacacaguacuagaaaagaauguaacaguaacacacucuguuaaccuucuagaagacaagcauaacgggaaacuaugcaaacuaagagggguagccccauugcauuuggguaaauguaacauugcuggcuggauccugggaaauccagagugugaaucacucuccacagcaagcucaugguccuacauuguggaaacaucuaguucagacaauggaacguguuacccaggagauuucaucgauuaugaggagcuaagagagcaauugagcucagugucaucauuugaaagguuugagauauuccccaagacaaguucauggcccaaucaugacucgaacaaagguguaacggcagcauguccucaugcuggagcaaaaagcuucuacaaaaauuuaauauggcuaguuaaaaaaggaaauucauacccaaagcucagcaaauccuacauuaaugauaaagggaaagaaguccucgugcuauggggaauucaccauccaucuacuagugcugaccaacaaagucucuaucagaaugcagaugcauauguuuuuguggggacaucaagauacagcaagaaguucaagccggaaauagcaauaagacccaaagugagggaucaagaagggagaaugaacuauuacuggacacuaguagagccgggagacaaaauaacauucgaagcaacuggaaaucuagugguaccgagauaugcauucgcaauggaaagaaaugcuggaucugguauuaucauuucagauacaccaguccacgauugcaauacaacuugucagacacccaagggugcuauaaacaccagccucccauuucagaauauacauccgaucacaauuggaaaauguccaaaauauguaaaaagcacaaaauugagacuggccacaggauugaggaaugucccgucuauucaaucuagaggccuauuuggggccauugccgguuucauugaagggggguggacagggaugguagauggaugguacgguuaucaccaucaaaaugagcagggaucaggauaugcagccgaccugaagagcacacagcaugccauugacgagauuacuaacaaaguaaauucuguuauugaaaagaugaauacacaguucacagcaguagguaaagaguucaaccaccuggaaaaaagaauagagaauuuaaauaaaaaaguugaugaugguuuccuggacauuuggacuuacaaugccgaacuguugguucuauuggaaaaugaaagaacuuuggacuaccacgauucaaaugugaagaacuuauaugaaaagguaagaagccaguuaaaaaacaaugccaaggaaauuggaaacggcugcuuugaauuuuaccacaaaugcgauaacacgugcauggaaagugucaaaaaugggacuuaugacuacccaaaauacucagaggaagcaaaauuaaacagagaagaaauaaaugggguaaagcuggaaucaacaaggauuuaccagauuuuggcgaucuauucaacugucgccaguucauugguacugguagucucccugggggcaaucaguuucuggaugugcucuaaugggucucuacaguguagaauauguauuuaa

SEQ ID NO: 39705 - RNA, 1701 nt, Artificial Sequence; identical to SEQ ID NO: 39537
  derived and/or modified CDS sequence (wt) from hemagglutinin__InfluenzaA__AEO01621

SEQ ID NO: 39706 - RNA, 1701 nt, Artificial Sequence
  derived and/or modified CDS sequence (wt) from hemagglutinin__InfluenzaA__AEO01625
augaagacuaucauugcuuugagcuacauucuaugucugguuuccgcucaaaaacuuccuggaaaugacaacagcacggcaacacugugccuugggcaccaugcaguaccaaacggaacgauagugaaaacaaucacgaaugaccaaauugaaguuacuaaugcuacugagcugguucagaguuccucaacaggugaaauaugcgacaguccucaucagguccuugauggagaaaacugcacacuaauagaugcucuauugggagacccucagugugauggcuuccaaaauaagaaaugggaccuuuuuguugaacgcagcaaagccuacagcaacuguuacccuuaugaugugccggauuaugccucccuuaggucacuaguugccucaucuggcacacuggaguuuaacaaugaaagcuucaauuggacuggagucacucaaaacggaacaagcucugcuugcauaaggagauccaauaacaguuucuuuaguagacugaauugguugacccacucaaaauucaaauacccagcauugaacgugacuaugccaaacaaugaagaauuugacaaauuguacauuugggggguucaccacccggguacggacaaugaccaaaucuuccuguaugcucaagcaucaggaagaaucacagucucuaccaaaagaagccaacaaacuguaaucccgaauaucggaucuagacccagaguaaggaauauccccagcagaauaagcaucuauuggacaauaguaaaaccgggagacauacuuuugauuaacagcacagggaaucuaauugcuccuagggguuacuucaaaauacgaagugggaaaagcucaauaaugagaucagaugcacccauuggcaaaugcaauucugaaugcaucacuccaaauggaagcauucccaaugacaaaccauuccaaaauguaaacaggaucacauacggggccugucccagauauguuaagcaaaacacucugaaauuggcaacagggaugcgaaauguaccagagaaacaaacuagaggcauauuuggcgcaaucgcggguuucauagaaaaugguugggagggaaugguggauggcugguacgguuucaggcaucaaaauucugagggaauaggacaagcagcagaucucaaaagcacucaagcagcaaucgaucaaaucaaugggaagcugaauagguugaucgggaaaaccaacgagaaauuccaucagauugaaaaagaauucucagaagucgaagggagaauucaggaccuugagaaauauguugaggacaccaaaauagaucucuggucauacaacgcggagcuucuuguugcccuggagaaccaacauacaauugaucuaacugacucagaaaugaacaaacuguuugaaaaaacaaagaagcaacugagggaaaaugcugaggauaugggcaaugguuguuucaaaauauaccacaaaugugacaaugccugcauaggaucaaucagaaauggaacuuaugaccacgagguauacagagaugaagcauuaaacaaccgguuccagaucaagggcguugagcugaagucaggauacaaagauuggauccuauggauuuccuuugccauaucauguuuuuugcuuuguguugcuuuguugggguucaucaugugggccugccaaaaaggcaacauuaggugcaacauuugcauuuga

SEQ ID NO: 39707 - RNA, 1701 nt, Artificial Sequence
  derived and/or modified CDS sequence (wt) from hemagglutinin__InfluenzaA__AEO01636
augaagucuaucauugcuuugagcuacauucuaugucugguuuccgcucaaaaacuuccuggaaaugacaacagcacggcaacgcugugccuugggcaccaugcaguaccaaacggaacgauagugaaaacaaucacgaaugaccaaauugaaguuacuaaugcuacugagcugguucagaguuccucaacaggugaaauaugcgacaguccucaucagguccuugauggagaaaacugcacacuaauagaugcucuauugggagacccucagugugauggcuuccaaaauaagaaaugggaccuuuuuguugaacgcagcaaagccuacagcaacuguuacccuuaugaugugccggauuaugccucccuuaggucacuaguugccucaucuggcacacuggaguuuaacaaugaaagcuucaauuggacuggagucacucaaaacggaacaagcucugcuugcauaaggagaucuaauaacaguuucuuuaguagacugaauugguugacccacucaaaauucaaauacccagcauugaacgugacuaugccaaacaaugaagaauuugacaaauuguacauuugggggguucaccacccggguacggacaaugaccaaaucuuccuguaugcucaagcaucaggaagaaucacagucucuaccaaaagaagccaacaaacuguaaucccgaauaucggaucuagacccagaguaaggaauauccccagcagaauaagcaucuauuggacaauaguaaaaccgggagacauacuuuugauuaacagcacagggaaucuaauugcuccuagggguuacuucaaaauacgaagugggaaaagcucaauaaugagaucagaugcacccauuggcaaaugcaauucugaaugcaucacuccaaauggaagcauucccaaugacaaaccauuccaaaauguaaacaggaucacauacggggccugucccagauauguuaagcaaaacacucugaaauuggcaacagggaugcgaaauguaccagagaaacaaacuagaggcauauuuggcgcaaucgcggguuucauagaaaaugguugggagggaaugguggaugguugguacgguuucaggcaucaaaauucugagggaauaggacaagcagcagaucucaaaagcacucaagcagcaaucgaucaaaucaaugggaagcugaauagguugaucgggaaaaccaacgagaaauuccaucagauugaaaaagaauucucagaagucgaagggagaauucaggaccuugagaaauauguugaggacaccaaaauagaucucuggucauacaacgcggagcuucuuguugcccuggagaaccaacauacaauugaucuaacugacucagaaaugaacaaacuguuugaaaaaacaaagaagcaacugagggaaaaugcugaggauaugggcaaugguuguuucaaaauauaccacaaaugugacaaugccugcauaggaucaaucagaaauggaacuuaugaccacgauguauacagagaugaagcauuaaacaaccgguuccagaucaagggcguugagcugaagucaggauacaaagauuggauccuauggauuuccuuugccauaucauguuuuuugcuuuguguugcuuuguugggguucaucaugugggccugccaaaaaggcaacauuaggugcaacauuugcauuuga

SEQ ID NO: 39708 - RNA, 1701 nt, Artificial Sequence
  derived and/or modified CDS sequence (wt) from hemagglutinin__InfluenzaA__AEO01642
augaagacuaucauugcuuugagcuacauucuaugucugguuuccgcucaaaaacuuccugggaaugacaacagcacggcaacgcugugccuugggcaccaugcaguaccaaacggaacgauagugaaaacaaucacgaaugaccaaauugaaguuacuaaugcuacugagcugguucagaguuccucaacaggugaaauaugcaacaguccucaucagauccuugauggagaaaacugcacacuaauagaugcucuauugggagacccucagugugauggcuuccaaaauaagaaaugggaccuuuuuguugaacgcagcaaagccuacagcaacuguuacccuuaugaugugccggauuaugccucccuuaggucacuaguugccucaucuggcacacuggaguuuaacaaugaaagcuucaauuggacuggagucacucaaaacggaacaagcucugcuugcauaaggagaucuaauaacaguuucuuuaguagacugaauugguugacccacuuaaaauucaaauacccagcauugaacgugacuaugccaaacaaugaagaauuugacaaauuguacauuugggggguucaccacccggguacggacaaugaccaaaucuuccuguaugcucaagcaucaggaagaaucacagucucuaccaaaagaagccaacaaaccguaaucccgaauaucggaucuagacccagaguaaggaauauccccagcagaauaagcaucuauuggacaauaguaaaaccgggagacauacuuuugauuaacagcacagggaaucuaauugcuccuagggguuacuucaaaauacgaagugggaaaagcucaauaaugagaucagaugcacccauuggcaaaugcaauucuaaaugcaucacuccaaauggaagcauucccaaugacaaaccauuccaaaauguaaacagggucacauacggggccugucccagauaugugaagcaaaacacucugaaauuggcaacagggaugcgaaauguaccagagaaacaaacuagaggcauauuuggcgcaaucgcggguuucauagaaaaugguugggagggaaugguggaugguugguacgguuucaggcaucaaaauucugagggaauaggacaagcagcagaucucaaaagcacucaagcagcaaucgaucaaaucaauggaaagcugaauagguugaucgggaaaaccaacgagaaauuccaucagauugaaaaagaauucucagaagucgaagggagaauucaggaccuugagaaauauguugaggacaccaaaauagaucucuggucauacaacgcggagcuucuuguugcccuggagaaccaacauacaauugaucuaacugacucagaaaugaacaaacuguuugaaaaaacaaagaagcaacugagggaaaaugcugaggauaugggcaaugguuguuucaaaauauaccacaaaugugacaaugccugcauaggaucaaucagaaauggaacuuaugaccacgauguauacagagaugaagcauuaaacaaccgguuccagaucaagggcguugagcugaagucaggauacaaagauuggauccuauggauuuccuuugccauaucauguuuuuugcuuuguguugcuuuguugggguucaucaugugggccugccaaaaaggcaacauuaggugcaacauuugcauuuga

SEQ ID NO: 39709 - RNA, 1698 nt, Artificial Sequence
  derived and/or modified CDS sequence (wt) from hemagglutinin__InfluenzaA__AEO01663
augaaaguaaaacuacugguccuguuaugcacauuugcagcuacauaugcagacacaauauguauaggcuaccaugcuaacaacucgaccgacacuguugacacaguacuugaaaagaaugugacagugacacacucugucaaccugcuugagaacagucacaauggaaaacuaugucuauuaaaaggaauagccccacuacaauuggguaauugcagcguugccggguggaucuuaggaaacccagaaugcgaauuacugauuuccaaggagucaugguccuacauuguagaaaaaccaaauccugagaauggaacauguuacccagggcauuucgcugacuaugaggaacugagggagcaauugaguucaguaucuucauuugagagguucgaaauauuccccaaagaaagcucauggcccaaccacaccguaaccggagugucagcaucaugcucccacaauggggaaagcaguuuuuacagaaauuugcuauggcugacggggaagaaugguuuguacccaaaccugagcaaguccuaugcaaacaacaaagaaaaagaaguccuuguacuaugggguguucaucacccgccaaacauaggugaccaaaaggcccucuaucauacagaaaaugcuuauguuucuguagugucuucacauuauagcagaaaauucaccccagaaauagccaaaagacccaaaguaagagaucaagaaggaagaaucaacuacuacuggacucugcuugaacccggggauacaauaauauuugaggcaaauggaaaucuaagagcaccaagauaugcuuucgcacugaguagaggcuuuggaucaggaaucaucaacucaaaugcaccaauggauaaaugugaugcgaagugccaaacaccucagggagcuauaaacagcagucuuccuuuccagaacguacacccagucccaauaggagaguguccaaaguaugucaggagugcaaaauuaaggaugguuacaggacuaaggaacaucccauccauucaauccagagguuuguuuggagccauugccgguuucauugaagggggguggacuggaaugguagaugguugguaugguuaucaucaucagaaugagcaaggaucuggcuaugcugcagaucaaaaaagcacacaaaaugccauuaaugggauuacaaacaaggugaauucuguaauugagaaaaugaacacucaauucacagcagugggcaaagaauucaacaaauuggaaagaaggauggaaaacuugaauaaaaaaguugaugauggguuuauagacauuuggacauauaaugcagaacuguugguucuacuggaaaaugaaaggacuuuggauuuccaugacuccaaugugaagaaucuguaugagaaaguaaaaagccaguuaaagaauaaugcuaaagaaauaggaaauggguguuuugaauucuaucacaaguguaacgaugaaugcauggagaguguaaagaauggaacuuaugacuauccaaaauauuccgaagaaucaaaguuaaacagggagaaaauugauggagugagauuggaaucaaugggagucuaucagauucuagcgaucuacucaacagucgccaguucucugguucuuuuggucucccugggggcaaucagcuucuggauguguuccaaugggucuuugcaguguagaauaugcaucuaa

SEQ ID NO: 39710 - RNA, 1698 nt, Artificial Sequence
  derived and/or modified CDS sequence (wt) from hemagglutinin__InfluenzaA__AEO01674
augaaaguaaaacuacugguccuguuaugcacauuuacagcuacauaugcagacacaauauguauaggcuaccaugcuaacaacucgaccgacacuguugacacaguacuugaaaagaaugugacagugacacacucugucaaccugcuugagaacagucacaauggaaaacuaugucuauuaaaaggaauagccccacuacaauuggguaauugcagcguugccggguggaucuuaggaaacccagaaugcgaauuacugauuuccaaggagucaugguccuacauuguagaaaaaccaaauccugagaauggaacauguuacccagggcauuucgcugacuaugaggaacugagggagcaauugaguucaguaucuucauuugagagguucgaaauauuccccaaagaaagcucauggcccaaccacaccguaaccggagugucagcaucaugcucccacaauggggaaagcaguuuuuacagaaauuugcuauggcugacggggaagaaugguuuguacccaaaccugagcaaguccuaugcaaacaacaaagaaaaagaaguccuuguacuaugggguguucaucacccgccaaacauaggugaccaaaaggcccucuaucauacagaaaaugcuuauguuucuguagugucuucacauuauagcagaaaauucaccccagaaauagccaaaagacccaaaguaagagaucaagaaggaagaaucaacuacuacuggacucugcuugaacccggggauacaauaauauuugaggcaaaugaaaaucuaaaagccccaagauaugcuuucgcacugaguagaggcuuuggaucaggaaucaucaacucaaaggcaccaauggauaaaugugaugcgaagugccaaacaccucagggagcuauaaacagcagucuuccuuuccagaacguacacccagucacaauaggagaguguccaaaguaugucaggagugcaaaauuaaggaugguuacaggacuaaggaacaucccauccauucaauccagagguuuguuuggagccauugccgguuucauugaagggggguggacuggaaugguagaugguugguaugguuaucaucaucagaaugagcaaggaucuggcuaugcugcagaucaaaaaagcacacaaaaugccauuaaugggauuacaaacaaggugaauucuguaauugagaaaaugaacacucaauucacagcagugggcaaagaauucaacaaauuggaaagaaggauggaaaacuugaauaaaaaaguugaugauggguuuauagacauuuggacauauaaugcagaacuguugguucuacuggaaaaugaaaggacuuuggauuuccaugacuccaaugugaagaaucuguaugagaaaguaaaaagccaguuaaagaauaaugcuaaagaaauaggaaauggguguuuugaauucuaucacaaguguaacgaugaaugcauggagaguguaaagaauggaacuuaugacuauccaaaauauuccgaagaaucaaaguuaaacagggagaaaauugauggagugagauuggaaucaaugggagucuaucagauucuagcgauuuacucaacagucgccaguucucugguucuuuuggucucccugggggcaaucagcuucuggauguguuccaaugggucuuugcaguguagaauaugcaucuaa

SEQ ID NO: 39711 - RNA, 1701 nt, Artificial Sequence
  derived and/or modified CDS sequence (wt) from hemagglutinin__InfluenzaA__AEO01691
augaagacuaucauugcuuugagcuacauucuaugucugguuuccgcucaaaaacuuccuggaaaugacaacagcacggcaacacugugccuugggcaccaugcaguaccaaacggaacgauagugaaaacaaucacgaaugaccaaauugaaguuacuaaugcuacugagcugguucagaguuccucaacaggugaaauaugcgacaguccucaucagguccuugauggagaaaacugcacacuaauagaugcucuauugggagacccucagugugauggcuuccaaaauaagaaaugggaccuuuuuguugaacgcagcaaagccuacagcaacuguuacccuuaugaugugccggauuaugccucccuuaggucacuaguugccucaucuggcacacuggaguuuaacaaugaaagcuucaauuggacuggagucacucaaaacggaacaagcucugcuugcauaaggagauccaauaacaguuucuuuaguagacugaauugguugacccacucaaaauucaaauacccagcauugaacgugacuaugccaaacaaugaagaauuugacaaauuguacauuugggggguucaccacccggguacggacaaugaccaaaucuuccuguaugcucaagcaucaggaagaaucacagucucuaccaaaagaagccaacaaacugugaucccgaauaucggaucuagacccagaguaaggaauauccccagcagaauaagcaucuauuggacaauaguaaaaccgggagacauacuuuugauuaacagcacagggaaucuaauugcuccuagggguuacuucaaaauacgaagugggaaaagcucaauaaugagaucagaugcacccauuggcaaaugcaauucugaaugcaucacuccaaauggaagcauucccaaugacaaaccauuccaaaauguaaacaggaucacauacggggccugucccagauauguuaagcaaaacacucuaaaauuggcaacagggaugcgaaauguaccagagaaacaaacuagaggcauauuuggcgcaaucgcggguuucauagaaaaugguugggagggaaugguggaugguugguacgguuucaggcaucaaaauucugagggaauaggacaagcagcagaucucaaaagcacucaagcagcaaucgaucaaaucaaugggaagcugaauagguugauugggaaaaccaacgagaaauuccaucagauugaaaaagaauucucagaagucgaagggagaauucaggaccuugagaaauauguugaggacaccaaaauagaucucuggucauacaacgcggagcuucuuguugcccuggagaaccaacauacaauugaucuaacugacucagaaaugaacaaacuguuugaaaaaacaaagaagcaacugagggaaaaugcugaggauaugggcaaugguuguuucaaaauauaccacaaaugugacaaugccugcauaggaucaaucagaaauggaacuuaugaccacgagguauacagagaugaagcauuaaacaaccgguuccagaucaagggcguugagcugaagucaggauacaaagauuggauccuauggauuuccuuugccauaucauguuuuuugcuuuguguugcuuuguugggguucaucaugugggccugccaaaaaggcaacauuaggugcaacauuugcauuuga

SEQ ID NO: 39712 - RNA, 1698 nt, Artificial Sequence
  derived and/or modified CDS sequence (wt) from hemagglutinin__InfluenzaA__AEO01699
augaaaguaaaacuacugguccuguuaugcacauuuacagcuacauaugcagacacaauauguauaggcuaccaugcuaacaacucgaccgacacuguugacacaguacuugaaaaaaaugugacagugacacacucugucaaccugcuugagaacagucacaauggaaaacuaugucuauuaaaaggaauagccccacuacaauuggguaauugcagcguugccggguggaucuuaggaaacccagaaugcgaauuacugauuuccaaggagucaugguccuacauuguagaaaaaccaaauccugagaauggaacauguuacccagggcauuucgcugacuaugaggaacugagggagcaauugaguucaguaucuucauuugagagguucgaaauauuccccaaagaaagcucauggcccaaccacaccguaaccggagugucagcaucaugcucccauaauggggaaagcaguuuuuacagaaauuugcuauggcugacggggaagaaugguuuguacccaaaccugagcaaguccuaugcaaacaacaaagaaaaagaaguccuuguacuaugggguguucaucacccgccaaacauaggugaccaaaaggcccucuaucauacagaaaaugcuuauguuucuguagugucuucacauuauagcagaaaauucaccccagaaauagccaaaagacccaaaguaagagaucaagaaggaagaaucaacuacuacuggacucugcuugaacccagggauacaauaauauuugaggcaaauggaaaucuaauagcgccaagauaugccuucgcacugaguagaggcuuuggaucaggaaucaucaacucaaaugcaccaauggauaaaugugaugcgaagugccaaacaccucaaggagcuauaaacagcagucuuccuuuccagaacguacacccagucacaauaggagaguguccaaaguaugucaggagugcaaaauuaaggaugguuacaggacuaaggaacaucccauccauuccauccagagguuuguuuggagccauugccgguuucauugaagggggguggacuggaaugguagaugguugguaugguuaucaucaucagaaugagcaaggaucuggcuaugcugcagaucaaaaaagcacacaaaaugccauuaaugggauuacaaacaaggugaauucuguaauugagaaaaugaacacucaauucacagcagugggcaaagaauucaacaaauuggaaagaaggauggaaaacuugaauaaaaaaguugaugauggguuuauagacauuuggacauauaaugcagaacuguugguucuacuggaaaaugaaaggacuuuggauuuccaugacuccaaugugaagaaucuguaugagaaaguaaaaagccaguuaaagaauaaugcuaaagaaauaggaaauggguguuuugaauucuaucacaaguguaacgaugaaugcauggagaguguaaagaauggaacuuaugacuauccaaaauauuccgaagaaucaaaguuaaacagggagaaaauugauggagugaaauuggaaucaaugggagccuaucagauucuggcgaucuacucaacaggcgccaguucucugguccuuuuggucucccugggggcaaucagcuucuggauguguuccaaugggucuuugcagcguagaauaugcaucuaa

SEQ ID NO: 39713 - RNA, 1698 nt, Artificial Sequence
  derived and/or modified CDS sequence (wt) from hemagglutinin__InfluenzaA__AEO01709
augaaaguaaaacuacugguccuguuaugcacauuuacagcuacauaugcagacacaauauguauaggcuaccaugcuaacaacucgaccgacacuguugacacaguacuugaaaagaaugugacagugacacacucugucaaccugcuugagaacagucacaauggaaaacuaugucuauuaaaaggaauagccccacuacaauuggguaauugcagcguugccggguggaucuuaggaaacccagaaugcgaauuacugauuuccaaggagucaugguccuacauuguagaaaaaccaaauccugagaauggaacauguuacccagggcauuucgcugacuaugaggaacugagggagcaauugaguucaguaucuucauuugagagguucgaaauauuccccaaagaaagcucauggcccaaccacacuguaaccggagugucagcaucaugcucccacaauggggaaagcaguuuuuacagaaauuugcuauggcugacggggaagaaugguuuguacccaaaccugagcaaguccuaugcaaacaacaaagaaaaagaaguccuuguacuaugggguguucaucacccgccaaacauaggugaccaaaaggcccucuaucauacagaaaaugcuuauguuucuguagugucuucacauuauagcagaaaauucaccccagaaauagccaaaagacccaaauuaagagaucaagauggaagaaucaacuacuacuggacucugcuugaacccggggauacaacaauauuugaggcaaauggaaaucuaauagcaccaagauaugcuuucgcacugaguagaggcuuuggaucaggaaucaucaacucaaaugcaccaauggauaaaugugaugcgaagugccaaacaccucagggagcuauaaacagcagucuuccuuuccagaacguacacccagucacaauaggagaguguccaaaguaugucaggagugcaaaauuaaggaugguuacaggacuaaggaacaucccauccauucaauccagagguuuguuuggagccauugccgguuucauugaagggggguggacuggaaugguagaugguugguaugguuaucaucaucagaaugagcaaggaucuggcuaugcugcagaucaaaaaagcacacaaaaugccauuaaugggauuacaaacaaggugaauucuguaauugagaaaaugaacacucaauucacagcagugggcaaagaauucaacaaauuggaaagaaggauggaaaacuugaauaaaaaaguugaugauggguuuauagacauuuggacauauaaugcagaacuguugguucuacuggaaaaugaaaggacuuuggauuuccaugacuccaaugugaagaaucuguaugagaaaguaaaaagccaguuaaagaauaaugcuaaagaaauaggaaauggguguuuugaauuauaucucaaguguaacggugaaugcauggagaguguaaagaauggaacuuaugacuauccaaaauauuccgaagaaucaaaguuaaacagggagaaaauugauggagugaaauuggaaucaaugggagucuaucagauucuggcgaucuacucaacagucgccaguucucugguucuuuuggucucccugggggcaaucagcuucuggauguguuccaaugggucucugcaguguagaauaugcaucuaa

SEQ ID NO: 39714 - RNA, 1701 nt, Artificial Sequence
  derived and/or modified CDS sequence (wt) from hemagglutinin__InfluenzaA__AEO37530
augaaggcaauacuaguaguucugcuauauacauuugcaaccgcaaaugcagacacauuauguauagguuaucaugcgaacaauucaacagauacuguagacacaguacuagaaaagaauguaacaguaacacacucuguuaaccuucuagaagacaagcauaacgggaaacuaugcaaacuaagagggguagccccauugcauuuggguaaauguaacaucgcuggcuggauccugggaaauccagagugugaaucacucuccacagcaagcucaugguccuacauuguggaaacaucuaguucagacaauggaacguguuacccaggagauuucaucgauuaugaggagcuaagagagcaauugagcucagugucaucauuugaaagguuugagauauuccccaagacaaguucauggcccaaucaugacucgaacaaagguguaacggcagcauguccucaugcuggagcaaaaagcuucuacaaaaauuuaauauggcuaguuaaaaaaggaaauucauacccaaagcucagcaaauccuacauuaaugauaaagggaaagaaguccucgugcuauggggcauucaccauccaucuacuagugcugaccaacaaagucucuaucagaaugcagaugcauauguuuuuguggggacaucaagauacagcaagaaguucaagccggaaauagcaauaagacccaaagugagggaucaagaagggagaaugaacuauuacuggacacuaguagagccgggagacaaaauaacauucgaagcaacuggaaaucuagugguaccgagauaugcauucgcaauggaaagaaaugcuggaucugguauuaucauuucagauacaccaguccacgauugcaauacaacuugucagacacccaagggugcuauaaacaccagccucccauuucagaauauacauccgaucacaauuggaaaauguccaaaauauguaaaaagcacaaaauugagacuggccacaggauugaggaaugucccgucuauucaaucuagaggccuauuuggggccauugccgguuucauugaagggggguggacagggaugguagauggaugguacgguuaucaccaucaaaaugagcaggggucaggauaugcagccgaccugaagagcacacagaaugccauugacaagauuacuaacaaaguaaauucuguuauugaaaagaugaauacacaguucacagcaguagguaaagaguucaaccaccuggaaaaaagaauagagaauuuaaauaaaaaaguugaugaugguuuccuggacauuuggacuuacaaugccgaacuguugguucuauuggaaaaugaaagaacuuuggacuaccacgauucaaaugugaagaacuuauaugaaaagguaagaagccaguuaaaaaacaaugccaaggaaauuggaaacggcugcuuugaguuuuaccacaaaugcgauaacacgugcauggaaagugucaaaaaugggacuuaugacuacccaaaauacucagaggaagcaaaauuaaacagagaagaaauagaugggguaaagcuggaaucaacaaggauuuaccagauuuuggcgaucuauucaacugucgccaguucauugguacugguagucucccugggggcaaucaguuucuggaugugcucuaaugggucucuacaguguagaauauguauuuaa

SEQ ID NO: 39715 - RNA, 1701 nt, Artificial Sequence
  derived and/or modified CDS sequence (wt) from hemagglutinin__InfluenzaA__AEO72176
augaaggcaauacuaguaguucugcuauauacauuugcaaccgcaaaugcagacacauuauguauagguuaucaugcgaacaauucaacagacacuguagacacaguacuagaaaagaauguaacaguaacacacucuguuaaccuucuagaagacaagcauaacgggaaacuaugcaaacuaagagggguagccccauugcauuuggguaaauguaacauugcuggcuggauccugggaaauccagagugugaaucacucuccacagcaagcucaugguccuacauuguggaaacaucuaguucagacaauggaacguguuacccaggagauuucaucgauuaugaggagcuaagagagcaauugagcucagugucaucauuugaaagguuugagauauuccccaagacaaguucauggccuaaucaugacucgaacaaagguguaacggcagcauguccucaugcuggagcaaaaagcuucuacaaaaauuuaauauggcuaguuaaaaaaggaaauucauacccaaagcucagcaaauccuacauuaaugauaaagggaaagaaguccucgugcuauggggcauucaccauccaucuacuacugcugaccaacaaagucucuaucagaaugcagauacauauguuuuuguggggacaucaagauacagcaagaaguucaagccggaaauagcaauaagacccaaagugagggaucaagaagggagaaugaacuauuacuggacacugguagagccgggagacaaaauaacauucgaagcaacuggaaaucuagugguaccgagauaugcauucgcaauggaaagaaaugcuggaucugguauuaucauuucagauacaccaguccacgauugcaauacaacuugucagacacccaagggugcuauaaacaccagccucccauuucagaauauacauccgaucacaauuggaaaauguccaaaauauguaaaaagcacaaaauugagacuggccacaggauugaggaaugucccgucuauucaaucuagaggccuauuuggggccauugccggcuucauugaagggggguggacagggaugguagauggaugguacgguuaucaccaucaaaaugagcaggggucaggauaugcagccgaccugaagagcacacagaaugccauugacaagauuacuaacaaaguaaauucuguuauugaaaagaugaauacacaguucacagcaguagguaaagaguucaaccaccuggaaaaaagaauagagaauuuaaauaaaaaaguugaugaugguuuccuggacauuuggacuuacaaugccgaacuguugguucuauuggaaaaugaaagaacuuuggacuaccacgauucaaaugugaagaacuuauaugaaaagguaagaaaccaguuaaaaaacaaugccaaggaaauuggaaauggcugcuuugaauuuuaccacaaaugcgauaacacgugcauggaaagugucaaaaaugggacuuaugacuacccaaaauacucagaggaagcaaaauuaaacagagaagaaauagaugggguaaagcuggaaucaacaaggauuuaccagauuuuggcgaucuauucaacugucgccaguucauugguacuggcagucucccugggggcaaucaguuuuuggaugugcucuaaugggucucuacaguguagaauauguauuuaa

SEQ ID NO: 39716 - RNA, 1704 nt, Artificial Sequence
  derived and/or modified CDS sequence (wt) from hemagglutinin__InfluenzaA__AEO88980
auggagaaaauagugcuucuucuugcaauagucagccuuguuaaaagugaucagauuugcauugguuaccaugcaaacaacucgacagagcagguugacacaauaauggaaaagaacguuacuguuacacaugcccaagacauacuggaaaagacacacaacgggaagcucugcgaucuagacggagugaagccucugauuuuaagagauuguaguguagcuggauggcuccuuggaaacccaaugugugacgaauucaucaaugugccggaauggucuuacauaguggagaaggccaacccagccaaugaccucuguuacccaggaaauuucaacgacuaugaagaacugaaacaccuauugagcagaauaaaccauuuugagaaaauucagaucauccccaaaaguucuugguccgaucaugaagccucaucaggggugagcucagcauguccauaccagggaacgcccuccuuuuucagaaaugugguauggcuuaucaaaaagaacaauacauauccaacaauaaagagaagcuacaauaauaccaaccaggaagaucuuuugauacugugggggauucaucauucuaaugaugcggcagagcagacaaagcucuaucaaaacccaaccaccuauauuuccguugggacaucaacacuaaaccagagauugguaccaaaaauagcuacuagauccaaaguaaacgggcaaaguggaaggauggacuucuucuggacaauuuuaaaaccgaaugaugcaaucaacuucgagaguaauggaaauuucauugcuccagaauaugcauacaaaauugucaagaaaggggacucagcaauuaugaaaagugaaguggaauaugguaacugcaacaccaaaugucaaacuccaauaggggcgauaaacucuaguaugccauuccacaacauacacccucucaccaucggggaaugccccaaauaugugaaaucaaacaaauuaguccuugcgacugggcucagaaauaguccucuaagagaaagaagaagaaaaagaggacuauuuggagcuauagcaggguuuauagagggaggauggcagggaaugguagaugguugguauggguaccaccauagcaaugagcaggggaguggguacgcugcagacaaagaauccacucaaaaggcaauagauggagucaccaauaaggucaacucgaucauugacaaaaugaacacucaguuugaggccguuggaagggaauuuaauaacuuagaaaggagaauagagaauuuaaacaagaaaauggaagacggauuccuagaugucuggacuuauaaugcugaacuucugguucucauggaaaaugagagaacucuagacuuccaugacucaaaugucaagaaccuuuacgacaagguccgacuacagcuuagggauaaugcaaaggagcuggguaacgguuguuucgaguucuaucacaaaugugauaaugaauguauggaaaguguaagaaacggaacguaugacuacccgcaguauucagaagaagcaagauuaaaaagagaggaaauaaguggaguaaaauuggaaucaauaggaacuuaccaaauacugucaauuuauucaacaguugcgaguucucuagcacuggcaaucaugguggcuggucuaucuuuguggaugugcuccaaugggucguuacaaugcagaauuugcauuuaa

SEQ ID NO: 39717 - RNA, 1704 nt, Artificial Sequence
  derived and/or modified CDS sequence (wt) from hemagglutinin__InfluenzaA__AEO89021
auggagaaaauagugcuucuucuugcaauagucagccuuguuaaaagugaucagauuugcauugguuaccaugcaaacaacucgacagagcagguugacacaauaauggaaaagaacguuacuguuacacaugcccaagacauacuggaaaagacacacaacgggaagcucugcgaucuagauggagugaagccucugauuuuaagagauuguaguguagcuggauggcuccucggaaacccaaugugugacgaauucaucaaugugccggaauggucuuacauaguggagaaggccaacccagccaaugaccucuguuacccagggaauuucaacgacuaugaagaacugaaacaccuauugagcagaauaaaccauuuugaaaaaauuccgaucauccccaaaaguucuugguccgaucaugaagccucaucaggggugagcucagcauguccauaccagggaacgcccuccuuuuucagaaaugugguauggcuuaucaaaaagaacaauacauacccaacaauaaagagaagcuacaauaauaccaaccaggaagaucuuuugauacuguggggaauucaucauucuaauaaugcggcagagcagacaaagcucuaucaaaacccaaccaccuauauuuccguugggacaucaacacuaaaccugagauugguaccaaaaauagcuacuagauccaaaguaaacgggcaaaguggaaggauggauuucuucuggacaauuuuaaaaccgaaugaugcaaucaacuucgagaguaauggaaauuucauugcuccagaauaugcauacaaaauugucaagaaaggggacucagcaauuaugaaaagugaaguggaauaugguaacugcaacaccaagugucaaacuccaauaggggcgauaaacucuaguaugccauuccacaacauacacccucucaccaucggggaaugccccaaauaugugaaaucaaacaaauuaguccuugcgacugggcucagaaauaguccucuaagagagagaagaagaaaaagaggacuauuuggagcuauagcaggguuuauagagggaggauggcagggaaugguagaugguugguauggguaccaccauagcaaugagcaggggaguggguacgcugcagacaaagaauccacucaaaaggcaauagauggagucaccaauaaggucaacucgaucauugacaaaaugaacacucaguuugaggccguuggaagggaauuuaauaacuuagaaaggagaauagagaauuuaaacaagaaaauggaagacggauuccuagaugucuggacuuauaaugcugaacuucugguucucauggaaaaugagagaacucuagacuuccaugacucaaaugucaagaaccuuuacgacaagguccgacuacagcuuagggauaaugcaaaggaacuggguaacgguuguuucgaguucuaucacaaaugugauaaugaauguauggaaaguguaagaaacggaacguaugacuacccgcaguauucagaagaagcaagauuaaaaagagaggaaauaaguggaguaaaauuggaaucaauaggaacuuaccaaauacugucaauuuauucaacaguugcgaguucucuagcacuggcaaucaugguggcuggucuaucuuuauggaugugcuccaaugggucguuacaaugcagaauuugcauuuaa

SEQ ID NO: 39718 - RNA, 1704 nt, Artificial Sequence
  derived and/or modified CDS sequence (wt) from hemagglutinin__InfluenzaA__AEO89030
auggagaaaauagugcuucuucuugcaauagucagccuuguuaaaagugaucagauuugcauugguuaccaugcaaacaacucgacagagcagguugacacaauaauggaaaagaacguuacuguuacacaugcccaagacauacuggaaaagacacacaacgggaagcucugcgaucuagauggagugaagccucugauuuuaagagauuguaguguagcuggauggcuccuuggaaacccaaugugugacgaauucaucaaugugccagaauggucuuacauaguggagaaggccaacccagccaaugaccucuguuacccagggaauuucaacgacuaugaagaacuaaaacacuuauugagcagaauaaaccauuuugagaaaauucagaucauccccaaaaguucuuggucagaucaugaagccucaucaggggugagcucaguauguccauaccagggaacgcccuccuuuuucagaaaugugguauggcuuaucaaaaagaacaauacauauccaacaauaaagagaagcuacaauaauaccaaccaggaagaucuuuugauacuguggggaauucaccauucuaaugaugcggcagagcagacaaagcucuaucaaaacccaaccaccuauauuuccguugggacaucaacacuaaaccagagauugguaccaaaaauagcuacuagauccaaaguaaacgggcaaaguggaaggauggauuucuucuggacaguuuuaaaaccgaaugaugcaaucaacuucgagaguaauggaaauuucauugcuccagaauaugcauacaaaauugucaagaaaggggacucagcaauuaugaaaagugaaguggaauaugguaacugcaacaccaagugucaaacuccaauaggggcgauaaacucuaguaugccauuccacaacauacacccucucaccaucggggaaugccccaaauaugugaaaucaaacaaauuaguccuugcgacugggcucagaaauaguccucuaagagaaagaagaagaaaaagaggacuauuuggagcuauagcaggguuuauagagggaggauggcagggaaugguagaugguugguauggauaccaccauagcaaugagcaggggaguggguacgcugcagacaaagaauccacucaaaaggcaauagauggagucaccaauaaggucaacucgaucauugacaaaaugaacacucaguuugaggccguuggaagggaauuuaauaacuuagaaaggagaauagagaauuuaaacaagaaaauggaagacggauuccuagaugucuggacuuauaaugcugaacuucugguucucauggaaaaugagagaacucuagacuuccaugacucaaaugucaagaaccuuuacgacaagguccgacuacagcuuagggauaaugcaaaggagcuggguaacgguuguuucgaguucuaucacaaaugugauaaugaauguauggaaaguguaagaaacggaacguaugacuacccgcaguauucagaagaagcaagauuaaaaagagaggaaauaaguggaguaaaauuggaaucaauaggaacuuaccaaauacugucaauuuauucaacaguugcgaguucucuagcacuggcaaucaugguggcuggucuaucuuuguggaugugcuccaaugggucguuacaaugcagaauuugcauuuaa

SEQ ID NO: 39719 - RNA, 1704 nt, Artificial Sequence
  derived and/or modified CDS sequence (wt) from hemagglutinin__InfluenzaA__AEO89048
auggagaaaauaguguuucuucuugcaauagucagccuuguuaaaagugaucagauuugcauugguuaccaugcaaacaacucgacagagcagguugacacaauaauggaaaagaacguuacuguuacacaugcccaagauauacuggaaaagacacacaacgggaagcucugcgaucuagauggagugaagccucugauuuuaagagauuguaguguagcuggauggcuccucggaaacccaaugugugacgaauucaucaaugugccggaauggucuuacauaguggagaaggccaacccagccaaugaccucuguuacccagggaauuucaacgacuaugaagaacugaaacaccuauugagcagaauaaaccauuuugagaaaauucagaucauccccaaaaguucuugguccgaucaugaagccucaucaggggugagcucagcauguccauaccagggaacgcccuccuuuuucagaaaugugauauggcuuaucaaaaagaacaauacauacccaacaauaaagagaagcuacaauaauaccaaccaggaagaucuuuugauacugugggggauucaucauucuaaugaugcggcagagcagacaaagcucuaucaaaacccaaccaccuauauuuccguugggacaucaacacuuaaccagagauugguaccgaaaauagcuacuagauccaaaguaaacgggcaaaguggaaggauggauuucuucuggacaauuuuaaaaccaaaugaugcaaucaacuucgagaguaauggaaauuucauugcuccagaauaugcauacaaaauugucaagaaaggggacucagcaauucugaaaagugaaguggaauaugguaacugcaacaccaagugucaaacuccaauaggggcgauaaacucuaguaugccauuccacaacauacacccucucaccaucggggaaugccccaaauaugugaaaucaaacaaauuaguccuugcgacugggcucagaaauaguccucuaagagaaagaagaagaaaaagaggacuauuuggagcuauagcagguuuuauagagggaggauggcagggaaugguagaugguugguauggguaccaccauagcaaugagcaggggaguggguacgcugcagacaaagaauccacucaaaaggcaauagauggagucaccaauaaggucaacucgaucauugacaaaaugaacacucaguuugaggccguuggaagggaauuuaauaacuuagaaaggagaauagagaauuuaaacaagaaaauggaagacggauuccuagaugucuggaccuauaaugcugaacuucugguucucauggaaaaugagagaacucuagacuuccaugacucaaaugucaagaaccuuuacgacaagguccgacuacagcuuagggauaaugcaaaggagcuggguaacgguuguuucgaguucuaucacaaaugugauaaugaaugcauggaaaguguaagaaacggaacguaugacuacccgcaguauucagaagaagcaagauuaaaaagagaggaaauaaguggaguaaaauuggaaucaauaggaacuuaccaaauacugucaauuuauucaacaguugcgaguucucuagcacuggcaaucaugguggcuggucuaucuuuauggaugugcuccaaugggucguuacaaugcagaauuugcauuuaa

SEQ ID NO: 39720 - RNA, 1704 nt, Artificial Sequence
  derived and/or modified CDS sequence (wt) from hemagglutinin__InfluenzaA__AEO89065
auggagaaaauagugcuucuucuugcaauagucagccuuguuaaaagugaucagauuugcauugguuaccaugcaaacaacucgacagagcagguugacacaauaauggaaaagaacguuacuguuacacaugcccaagacauacuggaaaagacacacaacgggaagcucugcgaucuagauggagugaagccucugauuuuaagagauuguaguguagcuggauggcuccucggaaacccaaugugugacgaauucaucaaugugccggaauggucuuacauaguggagaaggccaacccagccaaugaccucuguuacccagggaauuucaacgacuaugaagaacugaaacaccuauugagcagaauaaaccauuuugagaaaauucagaucauccccaaaaguucuugguccgaucaugaagccucaucaggggugagcucaguauguccauaccagggaacgcccuccuuuuucagaaaugugguauggcuuaucaaaaagaacaauacauacccaacaauaaagagaagcuacaauaauaccaaccaggaagaucuuuugauacuguggggaauucaucauucuaaugaugcggcagagcagacaaagcucuaucaaaacccaaccaccuauauuuccguugggacaucaacacuaaaccugagauugguaccaaaaauagcuacuagauccaaaguaaacgggcaaaguggaaggauggauuucuucuggacaauuuuaaaaccgagugaugcaaucaacuucgagaguaauggaaauuucauugcuccagaauaugcauacaaaauugucaagaaaggggacucagcaauuaugaaaagugaaguggaauaugguaacugcaacaccaagugucaaacuccaauaggggcgauaaacucuaguaugccauuccacaacauacacccucucaccaucggggaaugccccaaauaugugaaaucaaacaaauuaguccuugcgacugggcucagaaauaguccucuaagagagagaagaagaaaaagaggacuauuuggagcuauagcagguuuuauagagggaggauggcagggaaugguagaugguugguauggguaccaccauagcaaugagcaggggaguggguacgcugcagacaaagaauccacucaaaaggcaauagauggagucaccaauaaggucaacucgaucauugacaaaaugaacacucaguuugaggccguuggaagggaauuuaauaacuuagaaaggagaauagagaauuuaaacaagaaaauggaagacggauuccuagaugucuggacuuauaaugcugaacuucugguucucauggaaaaugagagaacucuagacuuccaugacucaaaugucaagaaccuuuacgacaagguccgacuacagcuuagggauaaugcaaaggaacuggguaacgguuguuucgaguucuaucacaaaugugauaaugaauguauggaaaguguaagaaacggaacguaugacuacccgcaguauucagaagaagcaagauuaaaaagagaggaaauaaguggaguaaaauuggaaucaauaggaacuuaccaaauacugucaauuuauucaacaguugcgaguucucuagcacuggcaaucaugguggcuggucuaucuuuauggaugugcuccaaugggucguuacaaugcagaauuugcauuuaa

SEQ ID NO: 39721 - RNA, 1704 nt, Artificial Sequence
  derived and/or modified CDS sequence (wt) from hemagglutinin__InfluenzaA__AEO89082
auggagaaaauagugcuucuucuugcaauagucagccuuguuaaaagugaucagauuugcauugguuaccaugcaaacaacucgacagagcagguugacacaauaauggaaaagaacguuacuguuacacaugcccaagacauacuggaaaagacacacaacgggaagcucugcgaucuagauggagugaagccucugauuuuaagagauuguaguguagcuggauggcuccucggaaacccaaugugugacgaguucaucaaugugccggaauggucuuacauaguggagaaggccaacccggccaaugaccucuguuacccagggaauuucaacgacuaugaagaacugaaacaccuauugagcagaauaaaccauuuugagaaaauucagaucauccccaaaaguucuugguccgaucaugacaccucaucaggggugagcucagcauguccauaccagggaacgcccuccuuuuucagaaaugugguauggcuuaucaaaaagaacaauacauacccaacaauaaagagaagcuacaauaauaccaacaaggaagaucuuuugauacugugggggauucaucauucuaaugaugcggcagagcagacaaagcucuaucaaaauccaaccaccuauauuuccguugggacaucaacacuaaaccagagauugguaccaaaaauagcuacuagauccaaaguaaacgggcaaaguggaaggauggauuucuucuggacaauuuuaaaaccgaaugaugcaaucaacuucgagaguaauggaaauuucauugcuccagaauaugcauacaaaauugucaagaaaggggacucagcaauuaugaaaagugaaguagaauaugguaacugcaauacaaagugucaaacuccaauaggggcgauaaacucuaguaugccauuccacaacauacacccucucaccaucggggaaugccccaaguaugugaaaucaaacaaauuaguccuugcgacugggcucagaaauaguccucuaagagaaagaagaagaaaaagaggacuauuuggagcuauagcaggguuuauagagggaggauggcagggaaugguagaugguugguauggguaccaccauagcaaugagcaggggaguggguacgcugcagacaaagaauccacucaaaaggcaauagauggagucacaaauaaggucaacucgaucauugacaagaugaacacucaguuugaggcuguuggaagggaauuuaauaacuuagaaagaagaauagagaauuuaaauaagaaaauggaagacggauuccuagaugucuggaccuauaaugcugaacuucugguucucauggaaaaugagagaacucuagacuuccaugacucaaaugucaagaaccuuuacgacaagguucgacuacagcuuagggauaaugcaaaggagcuggguaacgguuguuucgaguucuaucacaaaugugauaaugaauguauggaaaguguaagaaacggaacguaugacuacccgcaguauucagaagaagcaagauuaaaaagagaggaaauaaguggaguaaaauuggaaucaauaggaacuuaccaaauacugucaauuuauucaacaguugcgaguucucuagcacuggcaaucaugguggcuggucuaucuuuguggaugugcuccaaugggucguuacaaugcagaauuugcauuuaa

SEQ ID NO: 39722 - RNA, 1704 nt, Artificial Sequence
  derived and/or modified CDS sequence (wt) from hemagglutinin__InfluenzaA__AEO89091
auggagaaaacaguauuucuucuugcaauagucagccuuguuaaaagugaucagauuugcauugguuaccaugcaaacaacucgacagagcagguugacacaauaauggaaaagaacguuacuguuacacaugcccaaaacauacuggaaaagacacauaacgggaagcucugcgauauagauggagugaagccucugauuuuaaaagauuguaguguagcuggauggcuccucggaaauccaaugugugacgaauucaucaaugugccggaauggucuuacauaguggagaaggccaacccagccaaugaucucuguuacccggggaauuucaacgacuaugaagaacugaaacaccuauugagcagaauaaaucauuuugagaaaauucagaucauccccaaaaguucuugguccgaucaugaagccucaucaggggugagcucaacauguccauaccagggaacgcccucuuuuuucagaaaugugguauggcuuaucaaaaagaacaauacauacccaacaauaaagagaagcuacaauaauaccaaccaggaagaucuuuugauacugugggggauucaucauucuaaugaugaggcagagcaggcaaagcucuaccaaaacccaacuaccuauauuucaguugggacaucaacacuaaaccagagguugguuccaaaaauagcuacuagauccaaaguaaacgggcaaaguggaaggauggauuucuucuggacaauuuuaaaaccgaaugaugcaaucaacuucgagaguaauggaaauuucauugcuccagaauaugcauacaaaauugucaagaaaggggacucagcaauuaugaaaagugaaguggaauaugguaacugcaacaccaagugucaaacuccaauaggggcgauaaacucuaguaugccauuccauaacauacacccucucaccaucggggaaugccccaaauaugugaaaucaaacaaauuaguccuugcgacugggcucagaaauaguccucuaagagaaagaagaagaaaaagaggauuauuuggagcuauagcaggguuuauagagggaggauggcagggaaugguagaugguugguauggguaccaccauagcaaugagcaggggaguggguacgcugcagacaaagaauccacucaaaaggcaauagauggagucaccaauaaggucaacucgaucauugacaaaaugaacacucaguuugaggccguuggaagggaauuuaauaacuuagaaaggagaauagagaauuuaaacaagaaaauggaagacggauuccuagaugucuggacuuauaaugcugaacuucugguucucauggaaaaugagagaacucuagauuuccaugacucaaaugucaagaaccuuuacgacaagguccgacuacagcugagggauaaugcaaaggagcuggggaacgguuguuucgaguucuaucacaaaugugaugaugaauguauggaaaguguaagaaacggaacguaugacuacccgcaguauucagaagaagcaagauuaaaaagagaggaaauaaguggaguaaaauuggaaucaauaggaacuuaccaaauacugucaauuuauucaacaguugcgaguucucuagcacuggcaaucaugauggcuggucuaucuuuguggaugugcuccaaugggucguuacaaugcagaauuugcauuuaa

SEQ ID NO: 39723 - RNA, 1704 nt, Artificial Sequence
  derived and/or modified CDS sequence (wt) from hemagglutinin__InfluenzaA__AEO89100
auggagaaaauagugccuuuucuugcaauaaucagccuuguuaaaagugaucagauuugcauugguuaccaugcaaacaacucgacagagcagguugacacaauaauggagaagaacguuacuguuacacaugcucaagauauacuggaaaagacacacaacgggaaacucugugaucuagauggagugaagccucugauuuuaagagauuguaguguagcuggauggcuccucggaaacccaaugugugacgaauucaucaaugugccggaauggucauacauaguggagaaggccaacccagccaaugaccucuguuacccagggaauuucaacgacuaugaagaacugaaacaccuauuaagcaggauaaaccauuuugagaaaauucagaucauccccaaaaauucuugguccgaucaugaggccucaucaggggugagcucagcauguccauaccagggaacgcccuccuuuuucagaaaugugguauggcuuaucaaaaagaacaauacauacccaacaauaaagagaagcuacaauaauaccaaccaggaagaucuuuugauacugugggggauucaucauucuaaugaugcagcagagcagacaaagcucuaucaaaacccaaccaccuauauuuccguugggacaucaacacugaaccagagauugguaccaaaaauagcuacuagauccaaaguaaacgggcaaaguggaaggauggauuucuucuggacaauuuuaaaaccgaaugaugcaaucaacuucgagaguaauggaaauuucauugcuccagaauaugcauacaaaauugucaagaaaggggacucggcaauuaugaaaagugagguggaguaugguaacugcaacaccaagugucaaacgccaauaggggcgauaaacucuaguaugccauuccacaacauacacccucucaccaucggggaaugccccaaauaugugaaaucaaacaaauuaguccuugcgacugggcucagaaauaguccucuaagagaaagaagaagaaaaagaggacuauuuggagcuauagcagguuuuauagagggcggauggcagggaaugguagaugguugguauggguuucaccauagcaaugagcaggggaguggguacgcugcagacaaagaauccacucaaaaggcaauagauggagucaccaauaaggucaacucaaucaucgacaaaaugaacacucaguuugaggccguuggaagggaauuuaauaacuuagagaggagaauagagaauuuaaacaagaaaauggaagacggauuccuagaugucuggacuuauaaugcugagcuucugguucucauggaaaaugagagaacucuagacuuccaugauucaaaugucaagaaccuuuacgacaagguccgacuacagcuuagggauaaugcaaaggagcuggguaacgguuguuucgaguucuaucacaaaugugaugaugaaugcauggaaaguguaaagaacggaacguaugacuacccgcaguauucagaagaagcaagauuaaaaagagaggaaauaaguggaguaaaauuagaaucaauaggaacuuaccaaauacugucaauuuauucaacaguugcgaguucucuagcacuggcaaucaugguggcuggucuaucuuuauggaugugcuccaaugggucguuacaaugcagaauuugcauuuaa

SEQ ID NO: 39724 - RNA, 1704 nt, Artificial Sequence
  derived and/or modified CDS sequence (wt) from hemagglutinin__InfluenzaA__AEO89109
auggagaaaauagugcuucuucuugcaauagucagccuuguuaaaagugaucagauuugcaucgguuaccaugcaaacaacucgacagagcagguugacacaauaauggaaaagaacguuacuguuacacaugcccaagacauacuggagaagacacauaacgggaaacucugcgaucuagauggagugaagccucugauucuacgagauuguaguguagccggauggcuccucggaaacccaaugugugacgaauucaucaaugugccggaauggucuuacauaguggagaaggccaacccagccaaugaccucuguuacccagggaauuucaacgacuaugaagaacugaaacaccuauugagcagaauaaaccauuuugagaaaauucagaucauccccaaaaguucuugguccgaucaugaagccucaucaggggugagcucagcauguccauaccagggaacgcccuccuuuuucagaaaugugguauggcuuaucaaaaagaacaauacauacccaacaauaaagagaagcuacaauaauaccaaccaggaaaaucuuuugauacugugggggauucaucauucuaaugaugcagcagagcagauaaagcucuaucaaaacccaaccaccuauauuuccguugggacaucaacacuaaaccagagguugguaacaaaaauagccacuagacccaaaguaaacgggcaaaguggaaggauggauuucuucuggacaauuuuaaaaccgaaugaugcaaucaacuucgagaguaauggaaauuucauugcuccagaauaugcauacaaaauugucaaggaaggagacucagcaauuaugaaaagugaaguggaauaugguaacugcaacaccaagugucaaacuccaauaggggcgauaaacucuaguaugccauuccacaacauacacccucucaccaucggggaaugccccaaauaugugaaaucaaacaaauuaguccuugcuacugggcucagaaauaguccucuaagagaaagaagaagaaaaagaggacuauuuggagcuauagcaggguuuauagagggaggauggcagggaaugguagaugguugguauggguaccaccauagcaaugagcaggggaguggguacgcugcagacaaagaauccacucaaaaggcaauagauggagucaccaauaaggucaacucgaucauugacaaaaugaacacucaguuugaggccguuggaagggaauuuaauaaccuggaaaggagaauagagaacuugaacaagaaaauggaagacggauuccuagaugucuggacuuauaaugcugaacuucugguucucauggaaaaugagagaacucuagacuuccaugacucaaaugucaagaaccuuuacgacaagguccgacuacagcuuagggauaaugcaaaggagcuggguaacgguuguuucgaguucuaucacaaaugugauaaugaauguauggaaaguguaagaaacggaacguaugacuacccgcaguauucagaagaagcaagauuaaaaagagaggaaauaaguggaguaaaauuggaaucaauaggaacuuaccaaauacugucaauuuauucaacaguugcgaguucucuagcacuggcaaucaugguggcuggucuaucuuuguggaugugcuccaaugggucguuacaaugcagaauuugcauuuaa

SEQ ID NO: 39725 - RNA, 1704 nt, Artificial Sequence
  derived and/or modified CDS sequence (wt) from hemagglutinin__InfluenzaA__AEO89127
auggagaaaauagugcuucuucuugcaauaaucagccuuguuaaaagugaucagauuugcaucgguuaccaugcaaacaacucgacagagcaaguugacacaauaauggaaaagaacguuacuguuacacaugcccaagacauacuggagaagacacauaacgggaaacucugcgaucuagauggagugaagccucugauucugcgagauuguaguguagcuggauggcuccucggaaacccaaugugugacgaauuuaucaaugugccggaauggucuuacauaguggagaaggccaacccagccaaugaccucuguuacccagggaauuucaacgacuaugaagaacugaaacaccuauugagcagaauaaaccauuuugagaaaauucagaucauccccaaaaguucuugguccgaucaugaagccucaucaggggugagcucagcauguccauaccagggaacgcccuccuuuuucagaaaugugguauggcuuaucaaaaagaacaauacauacccaacaauaaagagaagcuacaauaauaccaaccaggaaaaucuuuugauacugugggggauucaucauucuaaugaugcagcagagcagauaaagcucuaucaaaacccaaccaccuauauuuccguugggacaucaacacuaaaccagagauugguaccaaaaauagccacuagauccaaaguaaacgggcaaaguggaaggauggauuucuucuggacaauuuuaaaaccgaaugaugcaaucaacuucgagaguaauggaaauuucauugcuccagaauaugcauacaaaauugucaaggaaggagacucagcaauuaugaaaagugaaguggaauaugguaacugcaacaccaagugucaaacuccaauaggggcgauaaacucuaguaugccauuccacaacauacacccucucaccaucggggaaugccccaaauaugugaaaucaaacaaauuaguccuugcuacugggcucagaaauaguccucuaagagaaagaagaagaagaagaggacuauuuggagcuauagcaggguuuauagagggaggauggcagggaaugguagaugguugguauggguaccaccauagcaaugagcaggggaguggguacgcugcagacaaagaauccacucaaaaggcgauagauggagucaccaauaaggucaacucaaucauugacaaaaugaacacucaguuugaggccguuggaagggaauuuaauaacuuggaaaggagaauagagaacuuaaacaagaaaauggaagacggauuccuagaugucuggacuuauaaugcugaacuucugguucucauggaaaaugagagaacucuagacuuccaugacucaaaugucaagaaccuuuacgacaagguccgacuacagcuuagggauaaugcaaaggagcuggguaacgguuguuucgaguucuaucacaaaugugauaaugaauguauggaaaguguaagaaacggaacguaugacuacccgcaguauucagaagaagcaagauuaaaaagagaggaaauaaguggaauaaaauuggaaucaaugggaacuuaccaaauacugucaauuuauucaacaguugcgaguucucuagcacuggcaaucaugguggcuggucuaucuuuguggaugugcuccaaugggucguuacaaugcagaauuugcauuuaa

SEQ ID NO: 39726 - RNA, 1704 nt, Artificial Sequence
  derived and/or modified CDS sequence (wt) from hemagglutinin__InfluenzaA__AEO89145
auggagaaaauagugcuucuucuugcaauagucagccuuguuaaaagugaucagauuugcauugguuaccaugcaaacaacucgacagagcagguugacacaauaauggaaaagaacguuacuguuacacaugcccaagauauacuggaaaagacacacaacgggaaacucugcgaucuagauggagugaaaccucugauucuaggagauuguaguguagcuggauggcuccucggaaacccaaugugugacaaauucaucaaugugccggaauggucuuacauaguagagaaggccaauccagccaaugaccucuguuacccagggaauuucaacgacuaugaagaacugaaacaccuauugagcagaauaaaccauuuugagaaaauucagaucauccccaaaaguucuugguccgaucaugaagccucaucaggagugagcucagcauguccauaccagggaacgcccuccuuuuucagaaaugugguauggcucaccaaaaagaacaauacauacccaacaauaaagagaagcuacaauaauaccaaccaggaagaucuuuugauacugugggggauucaucauucuaauaaugcggcagagcaggaaaagcuuuaucaaaacccaaccaccuauauuucaguugggacaucaacacuaaaccagagauugguaccaaaaauagcuacuagauccaaaguaaacgggcaaaguggaaggauggauuucuucuggacaauauuaaaaccaaaugaugcaaucaacuucgagaguaauggaaauuucauugcuccagaauaugcauacaaaauugucaagaaaggagacucagcaauuaugaaaaguggaguggaauaugguaacugcaacacaaagugucaaacuccaauaggggcgauaaacucuaguaugccauuccacaacauacacccucucaccaucggggaaugccccaaauaugugaaaucaaacaaauuaguccuugcgacugggcucagaaauaguccucuaagagaaagaagaagaaaaagaggacuauuuggagcuaucgcagguuuuauagagggaggauggcagggaaugguagaugguugguauggguaccaccauagcaaugagcaggggaguggguacgcugcagacaaagaauccacucaaaaggcaauagauggagucaccaauaaggucaacucgaucauugauaaaaugaacacccaguuugaggcuguuggaagggaauuuaauaacuuagaaaggaggauagaaaauuuaaacaagaaaauggaagacggauuccuagaugucuggacuuauaaugcugaacuucugguucucauggaaaaugagagaacucuagacuuccaugacucaaaugucaagaaccuuuaugacaagguccgacuacagcuuagggauaaugcaaaggagcuggguaaugguuguuucgaguucuaucacaaaugugauaaugaaugcauggaaaguguaagaaauggaacguaugacuacccgcaguauucagaagaagcaagauuaaaaagagaggaaauaaguggaguaaaauuggaaucaauaggaacuuaccaaauacugucaauuuauucuacagcugcgaguucucuagcacuggcaaucaugguggcuggucuaucuuuauggaugugcuccaaugggucguuacaaugcagaauuugcauuuaa

SEQ ID NO: 39727 - RNA, 1707 nt, Artificial Sequence
  derived and/or modified CDS sequence (wt) from hemagglutinin__InfluenzaA__AEO89163
auggagaaaauagugcuucuuuuugcaauagucagccuuguuaaaagcgaucacauuugcauugguuaccaugcaaacaacucgacagagcagguugacacaauaauggaaaagaacguuacuguuacacaugcucaagacauacuggaaaagacacacaacgggaagcucugcgaucuaaauggagugaagccucugauuuuaaaagauuguaguguagcaggauggcuccucgggaacccaaugugugacgaauucaucgaugugccagaauggucuuacauaguagagaaggccaauccagccaaugaccucuguuacccagggaauuucaacgauuaugaagaauugaaacaccuauugagcagaauaaaccauuuugagaaaauacagaucauccccaaagauucuuggccagaucaugaagccucauugggggugagcucagcauguccauaccagggaaauuccuccuuuuucagaaaugugguauggcuuaucaaaaagggcaaugcauacccaacaauaaagaaaagcuacaauaauaccaacaaagaagaucucuugauacugugggggauccaccauccuaaugaugaggcagagcagacaaggcucuaccaaaacccaaccaccuauauuuccauugggacaucaacacuaaaccagagauugguaccaagaauagcuacuagauccaaaguaaacgggcaaaguggaaggauagauuucuucuggacaauuuuaaaaccgaaugaugcaaucaacuucgagaguaauggaaauuucauugcuccagaauaugcauacaaaauugucaagaaaggagacucaacaauuaugaaaagugaaguggaauaugguaacugcaacaccaggugucagacuccgaugggggcgauuaacucuaguaugccauuccacaacauacacccucucaccaucggagaaugucccaaauaugugaaaucaaacaaauuaguccuugcgacugggcucagaaauaguccucaaagagagagaagaagaagaaaaagaggacuguuuggagcuauagcagguuuuauagagggaggauggcagggaaugguagaugguugguauggguaccaccacagcaaugagcaggggaguggguaugcugcagacaaagaauccacucaaaaggcaauagauggagucaccaauaaggucaacucgaucauugacaaaaugaacacucaguuugaagcaguaggaagggaauuuaauaacuuagagaggagaauagagaauuuaaacaagaagauggaagacggauuucuagaugucuggacuuauaaugcugaacuccugguucucauggaaaaugagagaacucuagacuuccaugacucaaaugucaagaaccuuuacgacaaggucagacuacagcuuagggauaaugcaaaagagcuggguaacgguuguuucgaguucuaucacaaaugugauaaugaauguauggaaaguguaagaaacggaacguaugacuacccgcaguauucagaagaagcaagauuaaaaagagaggaaauaaguggaguaaaauuggaaucaauaggaacuuaccaaauacugucaauuuauucaacaguggcgaguucccuaguacuggcaaucaugguugcuggucuaucuuuauggauguguuccaacgggucguuacaaugcagaauuugcauuuaa

SEQ ID NO: 39728 - RNA, 1704 nt, Artificial Sequence
  derived and/or modified CDS sequence (wt) from hemagglutinin__InfluenzaA__AEO89172
auggagaaaauagugcuucuucuugcaauagucagccuuguuagaagugaucagauuugcauugguuaccaugcaaacaacucgacagagcagguugacacaauaauggaaaagaacguuacuguuacacaugcccaaaacauacuggaaaagacacacaacgggaagcucugcgaucuagauggagugaagccuuugauuuuaagagauugcaguguagcuggauggcuccucggaaacccaaugugugacgaauuuaucaaugugccagaauggucuuacauaguggagaaggccaacccagccaaugaccucuguuacccagggaauuucaacgacuaugaagaacugaaacaccuauugagcagaauaaaucauuuugagaaaauucagaucauccccaaaaguucuugguccgaucaugaagccucaucaggggugagcucagcauguccguaucagggaacgcccucuuuuuucaggaauguaguauggcuuaucaaaaagaacaauacauacccaacaauaaagagaagcuacaauaacaccaaccaggaagaucuuuugguacugugggggauucaccauucuaaugaugcgacagaacagauaaagcucuaucaaaacccaaccaccuauguuuccguuggaacaucaacacuaaaccagagauugguaccaaaaauagcuacuagauccaaaguaaacgggcaaaguggaaggauggauuucuucuggacaauuuuaaaaucgaaugaugcaaucaacuucgaaaguaaugggaauuucauugcuccagaauaugcauacaaaauugucaagaaaggggacucagcaauuaugaaaagugaaguggaauaugguaacugcagcaccaagugucaaacuccgauaggggcgauaaacucuaguaugccauuccacaauauacacccucucaccaucggggaaugccccaaauaugugaaaucaaacaaauuaguccuugcgacugggcucagaaauaguccucuaagagaaagaagaagaaaaagaggacuauuuggagcuauagcaggguuuauagagggaggauggcagggaaugguagaugguugguauggguaccaccauaguaaugagcaggggaguggguacgcugcagacaaagaauccacccaaaaggcaauagauggagucaccaauaaggucaacucuaucauugacaaaaugaacacucaguuugaggccguuggaagggaauuuaauaacuuagaaaggagaauagagaauuuaaacaagaaaauggaagacggauuccuagaugucuggacuuauaaugcugaacuucugguucucauggaaaaugagaggacucuagacuuccaugacucaaaugucaagaaccuuuacgacaagguccgacuacagcugagggauaaugcaaaggagcuggguaacgguugcuucgaguucuaucacaaaugugauaaugaauguauggaaaguguaagaaacggaacguaugacuacccgcaguauucagaagaagcaagauuaaaaagagaggaaauuagugggguaaaauuggaaucaauaggaacuuaccaaauacugucaauuuauucaacaguugcgaguucucuagcgcuggcaaucaugguggcuggucuaucuuuguggaugugcuccaaugggucguuacaaugcagaauuugcauuuaa

SEQ ID NO: 39729 - RNA, 1704 nt, Artificial Sequence
  derived and/or modified CDS sequence (wt) from hemagglutinin__InfluenzaA__AEO89181
auggagaaaauagugcuucuuuuugcaacaaucagccuuguuaaaagcgaucauauuugcauugguuaucaugcaaauaacucgacagagcagguugacacaauaauggaaaagaacgugacuguuacacaugcccaagacauacuggaaaagacacacaacgguaagcucugcgaucuaaauggagugaagccucugauuuuaaaagauuguaguguagcaggauggcuccucggaaauccaaugugugacgaauucaucaaugugccagaauggucuuacauaguagagaaggccaauccagccaaugaccucuguuacccagggaauuucaacgauuaugaagaauugaaacaccuauugagcaggauaaaccauuuugagaaaauacagaucauccccaaaaauucuuggucagaucaugaagccucguugggggugagugcagcauguccauaccagggaaaauccuccuucuucagaaaugugguauggcuuaucaaaaaggacaaugcauacccaacaauaaagaaaggcuacaauaauaccaaccaagaagaucucuugguacugugggggauucaccauccuaaugaugaggcagagcagacaaggcucuaucaaaacccaaccaccuauauuuccauugggacaucaacacuaaaccagagauugguaccaaaaauagccacuagguccaaaauaaacgggcaaaguggcaggauagauuucuucuggacaauuuuaaaaccgaaugaugcaauccacuucgagaguaauggaaauuucauugcuccagaauaugcauacaaaauugucaagaaaggagacucaacaauuaugaaaagugaaguggaauaugguaacugcaacaccaggugucagacuccaauaggggcgauaaacuccaguaugccauuccacaacauacacccucucaccaucggagaaugucccaaauaugugaaaucaaacaaacuaguccuugcgacugggcucagaaauaguccucaaagagagagaaggagaaaaagaggauuguuuggagcuauagcagguuuuauagagggaggauggcagggaaugguagaugguugguauggguaccaccacagcaaugagcaggggaguggguacgcugcagacaaagaaucuacucaaaaggcaauagacggggucaccaauaaggucaacucgaucauugacaaaaugaacacucaguuugaggccguaggaagggaauuuaauaacuuagagaggagaauagagaauuugaacaagaagauggaagacggauuccuagaugucuggacuuauaaugcugaacuucugguucucauggaaaaugagagaacucuagacuuccaugacucaaaugucaggaaccuuuacgacaaggucagacuacagcuuaaggauaaugcaaaagagcuggguaacgguuguuucgaguucuaucacaaaugugauaaugaauguauggaaaguguaagaaacggaacguaugacuacccgcaguauucagaagaagcaagauuaaaaagagaggaaauaaguggaguaaaauuggaaucaauaggaaucuaccaaauacugucaauuuauucaacaguggcgaguucccuaguacuggcaaucaugauggcuggucuaucuuuauggauguguuccaacgggucguuacagugcagaauuugcauuuaa

SEQ ID NO: 39730 - RNA, 1704 nt, Artificial Sequence
  derived and/or modified CDS sequence (wt) from hemagglutinin__InfluenzaA__AEO89192
auggagaaaauagugcuucuucuugcaauagucagccuuguuaaaagugaucagauuugcaucgguuaccaugcaaacaacucgacagagcagguugacacaauaauggaaaagaacguuacuguuacacaugcccaagacauacuggaaaagacacauaacgggaagcucugcgaucuagauggagugaagccucuaauuuuaagagauuguaguguagcuggauggcuccucggaaacccaaugugugacgaauucaucaaugugccggaauggucuuacauaguggagaaggccaacccagccaaugaccucuguuacccagggaauuucaacgacuaugaagaacugaaacaccuauugagcagaauaaaccauuuugagaaaauucagaucauccccaaaaguucuugguccgaucaugaagccucaucaggggugagcucagcauguccauaccagggaacgcccuccuuuuucagaaaugugguauggcuuaucaaaaagaacaauacauacccaacaauaaagagaagcuacaauaauaccaaccaggaaaaucuuuugauacugugggggauucaucauucuaaugaugcggcagagcagauaaagcucuaucaaaauccaaccaccuauguuuccauugggacaucaacacuaaaccagagauugguaccaaaaauagccacuagauccaaaguaaacgggcaaagugggaggauggauuucuucuggacaauuuuaaaaccgaaugaugcaaucaacuucgagaguaauggaaauuucauugcuccagaauaugcauacaaaauugucaaggaaggagacucagcaauuaugaaaagugaaguggaauaugguaacugcaacaccaagugucaaacuccaauaggggcgauaaacucuaguaugccauuccacaacauacacccucucaccaucggggaaugccccaaauaugugaaaucaaacaaauuaguccuugcuacugggcucagaaauaguccucuaagagaaagaagaagaaaaagaggacuauuuggagcuauagcaggguuuauagagggaggauggcagggaaugguagaugguugguauggguacccccauagcaaugagcaggggaguggguacgcugcagacaaagaauccacucaaaaggcaauagauggagucaccaauaaggucaacucgaucauugacaaaaugaacacucaguuugaggccguuggaagggaauuuaauaacuuagaaaggagaauagagaauuuaaacaagaaaauggaagauggauuccuagaugucuggacuuauaaugcugaacuucugguucucauggaaaaugagagaacucuagacuuccaugacucaaaugucaagaaucuuuacgacaagguccgauuacagcuuagggauaaugcaaaggagcuggguaacgguuguuucgaguucuaucacaaaugugauaaugaauguauggaaaguguaagaaacggaacguaugacuacccgcaguauucagaagaagcaagguuaaagagagaggaaauaaauggaguaaaauuggaaucaauaggaacuuaccaaauacugucaauuuauucaacaguugcgaguucucuagcacuggcaaucaugguggcuggucuaucuuuguggaugugcuccaaugggucguuacaaugcagaauuugcauuuaa

SEQ ID NO: 39731 - RNA, 1704 nt, Artificial Sequence
  derived and/or modified CDS sequence (wt) from hemagglutinin__InfluenzaA__AEO89203
auggagaaaauagugcuucuucuugcaauagucagccuuguuaaaagugaucagauuugcaucgguuaccaugcaaacaacucgacagagcagguugacacaauaauggaaaagaacguuacuguuacacaugcccaagacauacuggaaaagacacauaacgggaagcucugcgaucuagauggagugaagccucuaauuuuaagagauuguaguguagcuggauggcuccucggaaacccaaugugugacgaauucaucaaugugccggaauggucuuacauaguggagaaggccaacccagccaaugaccucuguuacccagggaauuucaacgacuaugaagaacugaaacaccuauugagcagaauaaaccauuuugagaaaauucagaucauccccaaaaguucuugguccgaucaugaagccucaucaggggugagcucagcauguccauaccagggaacgcccuccuuuuucagaaaugugguauggcuuaucaaaaagaacaauacauacccaacaauaaagagaagcuacaauaauaccaaccaggaaaaucuuuugauacugugggggauucaucauucuaaugaugcggcagagcagauaaagcucuaucaaaauccaaccaccuauguuuccauugggacaucaacacuaaaccagagauugguaccaaaaauagccacuagauccaaaguaaacgggcaaagugggaggauggauuucuucuggacaauuuuaaaaccgaaugaugcaaucaacuucgagaguaauggaaauuucauugcuccagaauaugcauacaaaauugucaaggaaggagacucagcaauuaugaaaagugaaguggaauaugguaacugcaacaccaagugucaaacuccaauaggggcgauaaacucuaguaugccauuccacaacauacacccucucaccaucggggaaugccccaaauaugugaaaucaaacaaauuaguccuugcuacugggcucagaaauaguccucuaagagaaagaagaagaaaaagaggacuauuuggagcuauagcaggguuuauagagggaggauggcagggaaugguagaugguugguauggguaccaccauagcaaugagcaggggaguggguacgcugcagacaaagaauccacucaaaaggcaauagauggagucaccaauaaggucaacucgaucauugacaaaaugaacacucaguuugaggccguuggaagggaauuuaauaacuuagaaaggagaauagagaauuuaaacaagaaaauggaagauggauuccuagaugucuggacuuauaaugcugaacuucugguucucauggaaaaugagagaacucuagacuuccaugacucaaaugucaagaaucuuuacgacaagguccgauuacagcuuagggauaaugcaaaggagcuggguaacgguuguuucgaguucuaucacaaaugugauaaugaauguauggaaaguguaagaaacggaacguaugacuacccgcaguauucagaagaagcaagguuaaagagagaggaaauaaauggaguaaaauuggaaucaauaggaacuuaccaaauacugucaauuuauucaacaguugcgaguucucuagcacuggcaaucaugguggcuggucuaucuuuguggaugugcuccaaugggucguuacaaugcagaauuugcauuuaa

SEQ ID NO: 39732 - RNA, 1704 nt, Artificial Sequence; identical to SEQ ID NO: 39731
  derived and/or modified CDS sequence (wt) from hemagglutinin__InfluenzaA__AEO89213

SEQ ID NO: 39733 - RNA, 1704 nt, Artificial Sequence
  derived and/or modified CDS sequence (wt) from hemagglutinin__InfluenzaA__AEO89224
auggagaaaauagugcuucuucuugcaauagucagccuuguuaaaagugaucagauuugcaucgguuaccaugcaaacaacucgacagagcagguugacacaauaauggaaaagaacguuacuguuacacaugcccaagacauacuggaaaagacacauaacgggaagcucugcgaucuagauggagugaagccucuaauuuuaagagauuguaguguagcuggauggcuccucggaaacccaaugugugacgaauucaucaaugugccggaauggucuuacauaguggagaaggccaacccagccaaugaccucuguuacccagggaauuucaacgacuaugaagaacugaaacaccuauugagcagaauaaaccauuuugagaaaauucagaucauccccaaaaguucuugguccgaucaugaagccucaucaggggugagcucagcauguccauaccagggaacgcccuccuuuuucagaaaugugguauggcuuaucaaaaagaacaauacauacccaacaauaaagagaagcuacaauaauaccaaccaggaaaaucuuuugauacugugggggauucaucauucuaaugaugcggcagagcagauaaagcucuaucaaaauccaaccaccuauguuuccauugggacaucaacacuaaaccagagauugguaccaaaaauagccacuagauccaaaguaaacgggcaaagugggaggauggauuucuucuggacaauuuuaaaaccgaaugaugcaaucaacuucgagaguaauggaaauuucauugcuccagaauaugcauacaaaauugucaaggaaggagacucagcaauuaugaaaagugaaguggaauaugguaacugcaacaccaagugucaaacuccaauaggggcgauaaacucuaguaugccauuccacaacauacacccucucaccaucggggaaugccccaaauaugugaaaucaaacaaauuaguccuugcuacugggcucagaaauaguccucuaagagaaagaagaagaaaaagaggacuauuuggagcuauagcaggguuuauagagggaggauggcagggaaugguagaugguugguauggguaccaccauagcaaugagcaggggaguggguacgcugcagacaaagaauccacucaaaaggcaauagauggagucaccaauaaggucaacucgaucauugacaaaaugaacacucaguuugaggccguuggaagggaauuuaauaacuuagaaaggagaauagagaauuuaaacaagaaaauggaagauggauuccuagaugucuggacuuauaaugcugaacuucugguucucauggaaaaugagagaacucuagacuuccaugacucaaaugucaagaaucuuuacgacaagguccgauuacagcuuagggauaaugcaaaggagcuggguaacgguuguuucgaguucuaucacaaaugugauaaugaauguauggaaaguguaagaaacggaacguaugacuacccgcaguauucagaagaagcaagguuaaagagagaggaaauaaauggaguaaaauuggaaucaauaggaacuuaccaaauacugucaauuuauucaacaguugcgaguucucuagcacuggcaaucaugguagcuggucuaucuuuguggaugugcuccaaugggucguuacaaugcagaauuugcauuuaa

SEQ ID NO: 39734 - RNA, 1704 nt, Artificial Sequence
  derived and/or modified CDS sequence (wt) from hemagglutinin__InfluenzaA__AEO89235
auggagaaaauagugcuucuucuugcaauggucagccuuguuagaagugaucagauuugcauugguuaccaugcaaacaacucgacagagcagguugacacaauaauggaaaagaacguuacuguuacacaugcccaagauauacuggaaaagacacacaacgggaagcucugugaucuagauggagugaagccucugauuuuaagagauuguaguguagcuggauggcuccucggaaacccaaugugugacgaauucaucaaugugccggaauggucuuacauaguggagaaggccaacccagccaaugaccucuguuacccagggaaucucaacgacuaugaagaacugaaacaccuauugagcagaauaaaccauuuugagaaaauucaaaucauccccaaaaguucuugguccgaucaugaagccucauuaggggugagcucagcauguccauaccagggaacacccuccuuuuucagaaaugugauauggcuuaucaagaagaacaauacauacccaacaauaaagagaagcuacaauaauaccaaccaggaagaucuuuugauacugugggggauucaucauucuaaugaugaggcagagcagauaaagcucuaucaaaacccaaccaccuauauuuccguugggacaucaacacuaaaucagagauugguaccaaaaauagcuacuagauccaaaguaaacgggcaaaguggaaggauggauuucuucuggacaauuuuaaaaccggacgaugcaaucaacuucgagaguaauggaaauuucauugcuccagaauaugcauacaaaauugucaagaaaggagacucagcaauuaugaaaagugaaguggaauaugguaacugcaacaccaagugucaaacuccaauaggggcgauaaauucuaguaugccauuccacaacauacacccucucacuaucggggaaugccccaaauaugugaaaucaaacaaauuaguccuugcgacugggcucagaaauaguccucuaagagaaaaaagaagaaaaagaggacuauuuggagcuauagcagguuuuauagagggaggauggcagggaaugguagaugguugguauggguaccaccauagcaaugagcaggggaguggguacgcugcagacaaagaauccacucaaaaggcaauagauggagucaccaauaaggucaacucgaucauugacaaaaugaacacucaguuugaggccguuggaagggaauuuaauaacuuagaaaggagaauagagaauuuaaacaagaaaauggaagacggauuccuagaugucuggacuuauaaugcugaacuucugguucucauggaaaaugagagaacucuagacuuccaugacucaaaugucaagaaccuuuacgacaagguccgacuacagcuuagggauaaugcaaaggaacuggguaacgguuguuucgaguucuaucacaaaugugauaaugaaugcauggaaaguguaagaaacggaacguaugacuacccgcaguauucagaagaagcaagauuaaaaagagaggaaauaaguggaguaaaauuggaaucaauaggaacauaccaaauacugucaauuuauucaacaguugcgaguucucuagcacuggcaaucaugguggcuggucuaucuuuauggaugugcuccaaugggucguuacaaugcagaauuugcauuuaa

SEQ ID NO: 39735 - RNA, 1704 nt, Artificial Sequence
  derived and/or modified CDS sequence (wt) from hemagglutinin__InfluenzaA__AEO89246
auggagaaaauagugccucuucuugcaauggucagccuuguuaaaagugaucagauuugcauugguuaccaugcaaacaacucgacagagcagguugacacaauaauggaaaagaacguuacuguuacacaugcccaagauauacuggaaaagacacacaacgggaagcucugcgaucuagauggagugaagccucugauuuuaagagauuguaguguagcuggauggcuccucggaaacccaaugugugacgaauucaucaaugugccggaauggucuuacauaguggagaaagccaacccagccaaugaccucuguuacccagggaaucucaacgacuaugaagaacugaaacaccuauugagcagaauaaaccauuuugagaaaauucagaucauccccaaaaguucuugguccgaucaugaagccucauuaggagugagcucagcauguccauaccagggaacacccuccuuuuucagaaaugugguauggcuuaucaagaagaacaauacauacccaacaauaaagagaagcuacaauaauaccaaccaggaagaucuuuugauacugugggggauucaucauucuaaugaugaggcagagcagauaaagcucuaucaaaauccaaccaccuauauuuccguugggacaucaacacuaaaccagagauugguuccaaaaauagcuacuagauccaaaguaaacgggcaaaguggaaggauggauuucuucuggacaauuuuaaaaccggacgaugcaaucaacuucgagaguaauggaaauuucauugcuccagaauaugcauacaaaauugucaagaaaggagacucugcaauuaugaaaagugaaguggaauacgguaacugcaacaccaagugucaaacuccaauaggggcgauaaacucuaguaugccauuccacaacauacacccucucacuaucggggaaugccccaaauaugugaaaucaaacaaauuaguccuugcgacugggcucagaaauaguccucuaagagaaagaagaagaaaaagaggacuauuuggagcuauagcagguuuuauagagggaggauggcagggaaugguagaugguugguauggguaccaccauagcaaugagcaggggaguggguacgcugcagacaaagaauccacucaaaaggcaauagauggagucaccaauaaggucaacucgauuauugacaaaaugaacacucaguuugaggccguuggaagggaauuuaguaacuuagaaaggagaauagagaauuuaaacaagaaaauggaagacggguuccuagaugucuggacuuauaaugcugaacuucugguucucauggaaaaugagagaacucuagacuuccaugacucaaaugucaagaaccuuuacgacaagguccgacuacagcuuagggauaaugcaaaggaacuggguaacgguuguuucgaguucuaucacaaaugugauaaugaaugcauggaaaguguaagaaacggaacguaugacuacccgcaguauucagaagaagcaagauuaaaaagagaggaaauaaguggaguaaaauuggaaucaauaggaacuuaccaaauacugucaauuuauucaacaguugcgaguucucuagcacuggcaaucaugguggcuggucuaucuuuauggaugugcuccaaugggucguuacaaugcagaauuugcauuuaa

SEQ ID NO: 39736 - RNA, 1704 nt, Artificial Sequence
  derived and/or modified CDS sequence (wt) from hemagglutinin__InfluenzaA__AEO89257
auggagaaaauagugcuucuucuugcaauagucagccuuguuagaagugaucagauuugcauugguuaccaugcaaacaacucgacagagcagguugacacaauaauggaaaagaacguuacuguuacacaugcccaagacauacuggaaaagacacacaacgggaagcucugcgaucuagauggagugaagccuuugauuuuaagagauuguaguguagcuggauggcuccucggaaacccaaugugugacgaauuuaucaaugugccagaauggucuuacauaguggagaaggccaacccagccaaugaccucuguuacccagggaauuucaacgacuaugaagaacugaaacaccuauugagcagaauaaaucauuuugagaaaauucagaucauccccaaaaguucuugguccgaucaugaagccucaucaggggugagcucagcauguccguaucagggaacgcccucuuuuuucaggaauguaguauggcuuaucaaaaagaacaauacauacccaacaauaaagagaagcuacaauaacaccaaccaggaagaucuuuugguacugugggggauucaccauucuaaugaugcggcagaacagauaaagcucuaucaaaacccaaccaccuauguuuccguuggaacaucaacacuaaaccagagauugguaccaaaaauagcuacuagauccaaaguaaacgggcaaaguggaaggauggauuucuucuggacaauuuuaaaaucgaaugaugcaaucaacuucgagaguaaugggaauuucauugcuccagaauaugcauacaaaauugucaagaaaggggacucagcaauuaugaaaagugaaguggaauaugguaacugcagcaccaagugucaaacuccaauaggggcgauaaacucuaguaugccauuccacaauauacacccucucaccaucggggaaugccccaaauaugugaaaucaaacaaauuaguccuugcgacugggcucagaaauaguccucuaagagaaagaagaagaaaaagaggacuauuuggagcuauagcaggguuuauagagggaggauggcagggaaugguagaugguugguauggguaccaccauaguaaugagcaggggaguggguacgcugcagacaaagaauccacccaaaaggcaauagauggagucaccaauaaggucaacucuaucauugacaaaaugaacacucaguuugaggccguuggaagggaauuuaauaacuuagaaaggagaauagagaauuuaaacaagaaaauggaagacggauuccuagaugucuggacuuauaaugcugaacuucugguucucauggaaaaugagaggacucuagacuuccaugacucaaaugucaagaaccuuuacgacaagguccgacuacagcugagggauaaugcaaaggagcuggguaacgguugcuucgaguucuaucacaaaugugauaaugaauguauggaaaguguaagaaacggaacguaugacuacccgcaguauucagaagaagcaagauuaaaaagagaggaaauuaguggaguaaaauuggaaucaauaggaacuuaccaaauacugucaauuuauucaacaguugcgaguucucuagugcuggcaaucaugguggcuggucuaucuuuguggaugugcuccaaugggucguuacaaugcagaauuugcauuuaa

SEQ ID NO: 39737 - RNA, 1704 nt, Artificial Sequence; identical to SEQ ID NO: 39736
  derived and/or modified CDS sequence (wt) from hemagglutinin__InfluenzaA__AEO89268

SEQ ID NO: 39738 - RNA, 1704 nt, Artificial Sequence
  derived and/or modified CDS sequence (wt) from hemagglutinin__InfluenzaA__AEO89279
auggagaaaauagugcuucuucuugcaauagucagccuuguuaaaagugaucagauuugcauugguuaccaugcaaacaacucgacagagcagguugacacaauaauggaaaagaacguuacuguuacacaugcccaagauauacuggaaaagacacacaacgggaaacucugcgaucuagauggagugaaaccucugauucuaggagauuguaguguagcuggauggcuccucggaaacccaaugugugacaaauucaucaaugugccggaauggucuuacauaguagagaaggccaauccagccaaugaccucuguuacccagggaauuucaacgacuaugaagaacugaaacaccuauugagcagaauaaaccauuuugagaaaauucagaucauccccaaaaguucuugguccgaucaugaagccucaucaggagugagcucagcauguccauaccagggaacgcccuccuuuuucagaaaugugguauggcucaucaaaaagaacaauacauacccaacaauaaagagaagcuacaauaauaccaaccaggaagaucuuuugauacugugggggauucaucauucuaauaaugcggcagagcaggaaaagcuuuaucaaaacccaaccaccuauauuucaguugggacaucaacacuaaaccagagauugguaccaaaaauagcuacuagauccaaaguaaacgggcaaaguggaaggauggauuucuucuggacaauauuaaaaccaaaugaugcaaucaacuucgagaguaauggaaauuucauugcuccagaauaugcauacaaaauugucaagaaaggagacucagcaauuaugaaaaguggagugaaauaugguaacugcaacacaaagugucaaacuccaauaggggcgauaaacucuaguaugccauuccacaacauacacccucucaccaucggggaaugccccaaauaugugaaaucaaacaaauuaguccuugcgacugggcucagaaauaguccucuaagagaaagaagaagaaaaagaggacuauuuggagcuaucgcagguuuuauagagggaggauggcagggaaugguagaugguugguauggguaccaccauagcaaugagcaggggaguggguacgcugcagacaaagaauccacucaaaaggcaauagauggagucaccaauaaggucaacucgaucauugauaaaaugaacacccaguuugaggcuguuggaagggaauuuaauaaccuagaaaggaggauagaaaauuuaaacaagaaaauggaagacggauuccuagaugucuggacuuauaaugcugaacuucugguucucauggaaaaugagagaacucuagacuuccaugacucaaaugucaagaaccuuuaugacaagguccgacuacagcuuagggauaaugcaaaggagcuggguaaugguuguuucgaguucuaucacaaaugugauaaugaaugcauggaaaguguaagaaauggaacguaugacuacccgcaguauucagaagaagcaagauuaaaaagagaggaaauaaguggaguaaaauuggaaucaauaggaacuuaccaaauacugucaauuuauucuacagcugcgaguucucuagcacuggcaaucaugguggcuggucuaucuuuauggaugugcuccaaugggucguuacaaugcagaauuugcauuuaa

SEQ ID NO: 39739 - RNA, 1704 nt, Artificial Sequence
  derived and/or modified CDS sequence (wt) from hemagglutinin__InfluenzaA__AEO89289
auggagaaaauagugcuucuucuugcaauagucagccuugcuaaaagugaucagauuugcauugguuaccaugcaaacaacucgacagagcagguugacacaauaauggaaaagaacguuacuguuacacaugcccaggauauacuggaaaagacacacaacgggaaacucugcgaucuagauggagugaaaccucugauuuuaggagauuguaguguagcuggauggcuccuaggaaauccaaugugugacaaauucaucaaugugccggaauggucuuacauaguagagaaggucaauccagccaaugaccucuguuacccagggaauuucaacgacuaugaagaacugaaacaccuauugagcagaauaaaccauuuugagaaaauuaagaucauccccaaaaguucuugguccgaucaugaagccucaucaggagugagcucagcauguccauaccagggaacgcccuccuuuuucagaaaugugguguggcucaucaaaaagaacaauacauacccaacaauaaagagaagcuacaauaauaccaaccaggaagaucuuuugauacugugggggauucaucauucuaauaauguggcagagcaggaaaagcuuuaucaaaacccaaccaccuacauuucaguugggacaucaacacuaaaccagagauugguaccaaaaauagcuacuagauccaaaguaaacgggcaaaguggaaggauggauuucuucuggacaauauuaaaaccaaaugauacaaucaacuucgagaguaauggaaauuucauugcuccagaauaugcauacaaaauugucaagaaaggagacucagcaauuaugaaaaguggaguggaauaugguaacugcaacacaaagugucaaacuccaauaggggcgauaaacucuaguaugccauuccacaacauacacccucucaccaucggggaaugccccaaauaugugaaaucaaacaaauuaguccuugcgacugggcucagaaauaguccucuaagagaaagaagaagaaaaagaggacuauuuggagcuaucgcagguuuuauagagggaggauggcagggaaugguagaugguugguauggguaccaccauagcaaugagcaggggaguggguacgcugcagacaaagaauccacucaaaaggcaauagauggagucaccaauaaggucaacucgaucauugauaaaaugaacacccaguuugaggcuguuggaagggaauuuaauaacuuagaaaggaggauagaaaauuuaaacaagaaaauggaagacggauuccuagaugucuggacuuauaaugcugaacuucugguucucauggaaaaugagagaacucuagacuuccaugacucaaaugucaagaaccuuuaugacaagguccgacuacagcuuagggauaaugcaaaggagcuggguaaugguuguuucgaguucuaucacaaaugugauaaugaaugcauggaaaguguaagaaauggaacguaugacuacccgcgguauucagaagaagcaagauuaaaaagagaggaaauaaguggaguaaaauuggaaucaauaggaacuuaccaaauacugucaauuuauucuacagcugcgaguucucuagcacuggcaaucaugguggcuggucuaucuuuauggaugugcuccaaugggucguuacaaugcagaauuugcauuuaa

SEQ ID NO: 39740 - RNA, 1704 nt, Artificial Sequence
  derived and/or modified CDS sequence (wt) from hemagglutinin__InfluenzaA__AEO89300
auggagaaaauagugcuucuucuugcaauagucagccuuguuaaaagugaucagauuugcaucgguuaccaugcaaacaacucgacagagcagguugacacaauaauggaaaagaacguuacuguuacacaugcccaagacauacuggagaagacacauaacgggaaacucugcgaucuagauggagugaagccucugauucuacgagauuguaguguagcuggauggcuccucggaaacccaaugugugacgaauucaucaaugugccggaauggucuuacauaguggagaaggccaacccagccaaugaccucuguuacccagggaauuucaacgacuaugaagaacugaaacaccuauugagcagaauaaaccauuuugagaaaauucagaucauccccaaaaguucuugguccgaucaugaagccucaucaggggugagcucagcauguccauaccagggaacgcccuccuuuuucagaaaugugguauggcuuaucaaaaagaacaauacauacccaacaauaaagagaagcuacaauaauaccaaccaggaaaaucuuuugauacugugggggauucaucauucuaaugaugcagcagagcagauaaagcucuaucaacacccaaccacuuauauuuccguugggacaucaacacuaaaucagagauugguaccaaaaauagccacuagauccaaaguaaacgggcaaaguggaaggauggauuucuucuggacaauuuuaaagccgaaugaugcaaucaauuucgagaguaauggaaauuucauugcuccagaauaugcauacaaaauugucaaggagggagacucagcaauuaugaaaagugaaguggaauaugguaacugcaacaccaagugucaaacuccaauaggggcgauaaacucuaguaugccauuccacaacauacacccucucaccauuggggaaugccccaaauaugugaaaucaaacaaauuaguccuugcuacugggcucagaaauaguccucuaagagaaagaagaagaaaaagaggacuauuuggagcuauagcaggguuuauagagggaggauggcagggaaugguagaugguugguauggguaccaccauagcaaugagcaagggaguggguacgcugcagacaaagaauccacucaaaaggcaauagauggagucaccaauaaggucaacucaaucauugacaaaaugaacacucaguuugaggccguuggaagggaauuuaauaacuuggaaaggagaauagagaacuuaaacaagaaaauggaagacggauuccuagaugucuggacuuauaaugcugaacuucugguucucauggaaaaugagagaacucuagacuuccaugacucaaaugucaagaaccuuuacgacaagguccgacuacagcuuagggauaaugcaaaggagcuggguaacgguuguuucgaguucuaucacaaaugugauaaugaauguauggaaaguguaagaaacggaacguaugacuacccgcaguauucagaagaagcaagauuaaaaagagaggaaauaaauggaguaaaauuggaaucaaugggaacuuaccaaauacugucaauuuauucaacaguugcgaguucucuagcacuggcaaucaugguggcuggucuaucuuuuuggaugugcuccaaugggucguuacaaugcagaauuugcauuuaa

SEQ ID NO: 39741 - RNA, 1704 nt, Artificial Sequence
  derived and/or modified CDS sequence (wt) from hemagglutinin__InfluenzaA__AEO89311
auggagaaaauagugcuucuuuuugcaauagucagccuuguuaaaagcgaucauauuugcauugguuaucaugcaaacaacucgacagagcagguugacacaauaauggaaaagaacguuacuguuacacacgcccaagacauacuggaaaagacacacaacgggaagcucugcgaucuaaauggagugaagccucugauuuuaaaagauuguaguguagcaggauggcuccucggaaacccaaugugugacgaauucaucaaugugccagaauggucuuacauaguagagaaggccaauccagccaaugaccucuguuacccagggaauuucaacgauuaugaagaauugaaacaccuauugagcaggauaaaccauuuugagaaaauacagaucauccccaaagauucuuggucagaucaugaagccucauugggggugagcgcagcauguccauaccagggaaauuccucauucuucagaaaugugguauggcuuaucaaaaaggacaaugcauacccaacaauaaagaaaagcuacaauaauaccaaccaagaagaucucuugauacugugggggauucaccauccuaaugaugaggcagagcagacaaggcucuaucaaaacccaaccaccuauauuuccauugggacaucaacacuaaaccagagauugguaccaaaaauagccacuagauccaaaguaaacgggcaaaguggaaggauagauuucuucuggacaauuuuaaaaccgaaugaugcaauccacuucgagaguaauggaaauuucauugcuccagaauaugcauacaaaauugucaagaaaggagacucaacaauuaugaaaagugaaguggaauaugguaacugcaacaccaggugucagacuccgaugggggcgauaaacucuaguaugccauuccacaacauacacccucucaccaucggagaaugucccaaauaugugaaaucaaccaaauuaguccuugcgacugggcucagaaauaguccucaaagagagagaagaagaaaaagaggacuguuuggagcuauagcagguuuuauagagggaggauggcagggaaugguagaugguugguauggguaccaccacagcaaugagcaggggaguggguacgcugcagacaaagaauccacucaaaaggcaauagacggagucaccaauaaggucaacucgaucauugacaaaaugaacacucaguuugaggccguaggaagagaauuuaauaaauuagagaggagaauagagaauuuaaacaagaagauggaagacggauuccuagaugucuggacuuauaaugcugaacuucugguucucauggaaaaugagagaacucuagacuuccaugacucaaaugucaagaaccuuuacgacaaggucagacuacagcuuagggauaaugcaaaagagcuggguaacgguuguuucgaguucuaucacaaauguaauaaugaauguauggaaaguguaagaaacggaacguaugacuacccgcaguauucagaagaagcaagauuaaaaagagaggaaauaaguggaguaaaauuggaaucaauaggaauuuaccaaauacugucaauuuauucaacaguggcgaguucccuaguacuggcaaucaugauggcuggucuaucuuuauggauguguuccaacgggucguuacagugcagaauuugcauuuaa

SEQ ID NO: 39742 - RNA, 1701 nt, Artificial Sequence; identical to SEQ ID NO: 33980
  derived and/or modified CDS sequence (wt) from hemagglutinin__InfluenzaA__AEO99215

SEQ ID NO: 39743 - RNA, 1698 nt, Artificial Sequence
  derived and/or modified CDS sequence (wt) from hemagglutinin__InfluenzaA__AEQ38187
augaaaguaaaacuacugguccuguuaugcacauuuacagcuacauaugcagacacaauauguauaggcuaccaugcuaacaacucgaccgacacuguugacacaguacuugaaaagaaugugacagugacacacucugucaaccugcuugagaacagucacaauggaaaacuaugucuauugaaaggaauagccccacuacaauuggguaacugcagcguugccggguggaucuuaggaaacccagaaugcgaauuacugauuuccaaggagucaugguccuacauuguagaaaaaccaaauccugagaauggaacauguuacccagggcauuucgcugacuaugaggaacugagggagcaauugaguucaguaucuucauuugagagguucgaaauauuccccaaagaaagcucauggcccaaccacaccguaaccggagcgucagcaucaugcucccauaauggggaaaacaguuuuuacagaaauuugcuauggcugacggggaagaaugguuuguacccaaaccugagcaaguccuaugcaaacaacaaagaaaaagaaguccuuguacuaugggguguucaucacccgccaaacauagcugaccaaaagacccucuaucauacagaaaaugcuuauguuucuguagugucuucacauuauagcagaaaauucaccccagaaauagccaaaagacccaaaguaagagaucaagaaggaagaaucaacuacuacuggacuuugcuugaacccggggauacaauaauauuugaggcaaauggaaaucuaauagcgccaagauaugcuuucgcacugaguaggggcuuuggaucaggaaucaucaacucaaaugcaccaauggauaaaugugaugcgaagugccaaacaccucaaggagcuauaaacagcagucuuccuuuccagaacgugcacccagucacaauaggagaguguccaaaguaugucaggagugcaaaauuaaggaugguuacaggacuaaggaacaucccauccauucaauccagagguuuguuuggagccauugccgguuucauugaagggggguggacuggaaugguagaugguugguaugguuaucaucaucagaaugagcaaggaucuggcuaugcugcagaucaaaaaagcacacaaaaugccauuaaugggauuacaaacaaggugaauucuguaauugagaaaaugaacacucaauucacagcagugggcaaagaauucaacaaauuggaaagaaggauggaaaacuugaauaaaaaaguugaugauggguuuauagacauuuggacauacaaugcagaacuguugguucuacuggaaaaugaaaggacuuuggauuuccaugacuccaaugugaagaaucuguaugagaaaguaaaaagccaguuaaagaauaaugcuaaagaaauaggaaauggguguuuugaauucuaucacaagugcaacgaugaaugcauggagaguguaaagaauggaacuuaugacuauccaaaauauuccgaagaaucaaaguuaaacagggagaaaauugauggaguuaaauuggaaucaaugggagucuaucagauucuggcgaucuacucaacagucgccaguucucugguucuuuuggucucccugggggcaaucagcuucuggauguguuccaaugggucuuugcaguguagaauaugcaucuaa

SEQ ID NO: 39744 - RNA, 1698 nt, Artificial Sequence
  derived and/or modified CDS sequence (wt) from hemagglutinin__InfluenzaA__AEQ38188
augaaaguaaaacuacugguccuguuaugcacauuuacagcuacauaugcagacacaauauguauaggcuaccaugcuaacaacucgaccgacacuguugacacaguacuugaaaagaaugugacagugacacacucugucaaccugcuugagaacagucacaauggaaaacuaugucuauuaaaaggaauagccccacuacaauuggguaacugcagcguugccggguggaucuuaggaaacccagaaugcgaauuacugauuuccaaggagucaugguccuacauuguagaaaaaccaaauccugagaauggaacauguuacccagggcauuucgcugacuaugaggaacugagggagcaauugaguucaguaucuucauuugagagguucgaaauauuccccaaagaaagcucauggcccaaccacaccguaaccggagcgucagcaucaugcucccauaauggggaaaacaguuuuuacagaaauuugcuauggcugacggggaagaaugguuuguacccaaaccugagcaaguccuaugcaaacaacaaagaaaaagaaguccuuguacuaugggguguucaucacccgccaaacauagcugaccaaaagacccucuaucauacagaaaaugcuuauguuucuguagugucuucacauuauagcagaaaauucaccccagaaauagccaaaagacccaaaguaagagaucaagaaggaagaaucaacuacuacuggacucugcuugaacccggggauacaauaauauuugaggcaaauggaaaucuaauagcgccaagauaugcuuucgcacugaguaggggcuuuggaucaggaaucaucaacucaaaugcaccaauggauaaaugugaugcgaagugccaaacaccucaaggagcuauaaacagcagucuuccuuuccagaacguacacccagucacaauaggagaguguccaaaguaugucaggagugcaaaauuaaggaugguuacaggacuaaggaacaucccauccauucaauccagagguuuguuuggagccauugccgguuucauugaagggggguggacuggaaugguagaugguugguaugguuaucaucaucagaaugagcaaggaucuggcuaugcugcagaucaaaaaagcacacaaaaugccauuaaugggauuacaaacaaggugaauucuguaauugagaaaaugaacacucaauucacagcagugggcaaagaauucaacaaauuggaaagaaggauggaaaacuugaacaaaaaaguugaugauggguuuauagacauuuggacauauaaugcagaacuguugguucuacuggaaaaugaaaggacuuuggauuuccaugacuccaaugugaagaaucuguaugagaaaguaaaaagccaguuaaagaauaaugcuaaagaaauaggaaauggguguuuugaauucuaucacaaguguaacgaugaaugcauggagaguguaaagaauggaacuuaugacuauccaaaauauuccgaagaaucaaaguuaaacagggagaaaauugauggagugaaauuggaaucaaugggagucuaucagauucuggcgaucuacucaacagucgccaguucucugguucuuuuggucucccugggggcaaucagcuucuggauguguuccaaugggucuuugcaguguagaauaugcaucuaa

SEQ ID NO: 39745 - RNA, 1698 nt, Artificial Sequence
  derived and/or modified CDS sequence (wt) from hemagglutinin__InfluenzaA__AEQ38189
augaaaguaaaacuacugguccuguuaugcacauuuacagcuacauaugcagacacaauauguauaggcuaccaugcuaacaacucgaccgacacuguugacacaguacuugaaaagaaugugacagugacacauucugucaaccugcuugagaacagucacaauggaaaacuaugucuauuaaaaggaauagccccacuacaauuggguaacugcagcguugccggguggaucuuaggaaacccagaaugcgaauuacugauuuccaaggagucaugguccuacauuguagaaaaaccaaauccugagaauggaacauguuacccagggcauuucgcugacuaugaggaacugagggagcaauugaguucaguaucuucauuugagagguucgaaauauuccccaaagaaagcucauggcccaaccacaccguaaccggagugucagcaucaugcucccauaauggggaaaacaguuuuuacagaaauuugcuauggcugacggggaagaaugguuuguacccaaaccugagcaaguccuaugcaaacaacaaagaaaaagaaguccuuguacuaugggguguucaucacccgccaaacauagcuaaccaaaagacccucuaucauacagaaaaugcuuauguuucuguagugucuucacauuauagcagaaaauucaccccagaaauagccaaaagacccaaaguaagagaucaagaaggaagaaucaacuacuacuggacucugcuugaacccggggauacaauaauauuugaggcaaauggaaaucuaauagcgccaagauaugcuuucgcacugaguagaggcuuuggaucaggaaucaucaacucaaaugcaccaauggauaaaugugaugcgaagugccaaacaccucaaggagcuauaaacagcagucuuccuuuccagaacguacacccagucacaauaggagaguguccaaaguaugucaggagugcaaaauuaaggaugguuacaggacuaaggaacaucccauccauucaauccagagguuuguuuggagccauugccgguuucauugaagggggguggacuggaaugguagaugguugguaugguuaucaucaucagaaugagcaaggaucuggcuaugcugcagaucaaaaaagcacacaaaaugccauuaaugggauuacaaacaaggugaauucuguaauugaaaaaaugaacacucaauucacagcagugggcaaagaauucaacaaauuggaaagaaggauggaaaacuugaauaaaaaaguugaugauggauuuauagacauuuggacauauaaugcagaacuguugguucuacuggaaaaugaaaggacuuuggauuuccaugacuccaaugugaagaaucuguaugagaaaguaaaaagccaguuaaagaauaaugcuaaagaaauaggaaauggguguuuugaauucuaucacaaguguaacgaugaaugcauggagaguguaaagaauggaacuuaugacuauccaaaauauuccgaagaaucaaaguuaaacagggagaaaauugauggagugaaauuggaaucaaugggagucuaucagauucuggcgaucuacucaacagucgccaguucucugguucucuuggucucccugggggcaaucagcuucuggauguguuccaaugggucuuugcaguguagaauaugcaucuaa

SEQ ID NO: 39746 - RNA, 1698 nt, Artificial Sequence
  derived and/or modified CDS sequence (wt) from hemagglutinin__InfluenzaA__AEQ38190
augaaaguaaaacuacugguccuguuaugcacauuuacagcuacauaugcagacacaauauguauaggcuaccaugcuaacaacucgaccgacacuguugacacaguacuugaaaagaaugugacagugacacacucugucaaccugcuugagaacagucacaauggaaaacuaugucuauuaaaaggaauagccccacuacaauuggguaacugcaguguugccggguggaucuuaggaaacccagaaugcgaauuacugauuuccaaggagucaugguccuacauuguagaaaaaccgaauccugagaauggaacauguuacccagggcauuucgcugacuaugaggaacugagggagcaauugaguucaguaucuucauuugagagguucgaaauauuccccaaagaaagcucauggcccaaccacaccguaaccggagugucagcaucaugcucccauaauggggaaaacaguuucuacagaaauuugcuauggcugacggggaagaaugguuuguacccaaaccugagcaagcccuaugcaaacaacaaagaaaaagaaguccuuguacuaugggguguucaucacccgccaaacauagcuguccaaaagacccucuaucauacagaaaaugcuuauguuucuguagugucuucacauuauagcagaaaauucaccccagaaauagccaaaagacccaaaguaagagaucaagaaggaagaaucaacuacuacuggacucugcuugaacccggggauacaauaauauuugaggcaaauggaaaucuaauagcgccaagauaugcuuucgcacugaguagaggcuuuggaucaggaaucaucaacucaaaugcaccaauggauaaaugugaugcgaagugccaaacaccucaaggagcuauaaacagcagucuuccuuuccagaacguacacccagucacaauaggagaguguccaaaguaugucaggagugcaaaauuaaggaugguuacaggacuaaggaacaucccauccauucaauccagagguuuguuuggagccauugccgguuucauugaagggggguggacuggaaugguagaugguugguaugguuaucaucaucagaaugagcaaggaucuggcuaugcugcagaucaaaaaagcacacaaaaugccauuaaugggauuacaaacaaggugaauucuguaauugagaaaaugaacacucaauucacagcagugggcaaagaauucaacaaauuggaaagaaggauggaaaacuugaauaaaaaaguugaugauggauuuauagacauuuggacauauaaugcagaacuguugguucuacuggaaaaugaaaggacuuuggauuuccaugacuccaaugugaagaaucuguaugagaaaguaaaaagccaguuaaagaauaaugcuaaagaaauaggaaauggguguuuugaauucuaucacaaguguaacgaugaaugcauggagaguguaaagaauggaacuuaugacuauccaaaauauuccgaagaaucaaaguuaaacagggagaaaauugauggagugaaauuggaaucaaugggagucuaucagauucuggcgaucuacucaacagucgccaguucucugguucucuuggucucccugggggcaaucagcuucuggauguguuccaaugggucuuugcaguguagaauaugcaucuaa

SEQ ID NO: 39747 - RNA, 1698 nt, Artificial Sequence
  derived and/or modified CDS sequence (wt) from hemagglutinin__InfluenzaA__AEQ38191
augaaaguaaaacuacugguccuguuaugcacauuuacagcuacauaugcagacacaauauguauaggcuaccaugcuaacaacucgaccgacacuguugacacaguacuugaaaagaaugugacagugacacacucugucaaccugcuugagaacagucacaauggaaaacuaugucuauuaaaaggaauagccccacuacaauuggguaacugcagcguugccggguggaucuuaggaaacccagaaugcgaauuacugauuuccaaggagucaugguccuacauuguagaaaaaccaaauccugagaauggaacauguuacccagggcauuucgcugacuaugaggaacugagggagcaauugaguucaguaucuucauuugagagguucgaaauauuccccaaagaaagcucauggcccaaccacaccguaaccggagugucagcaucaugcucccauaauggggaaaacaguuuuuacagaaauuugcuauggcugacggggaagaaugguuuguacccaaaccugagcaaguccuaugcaaacaacaaagaaaaagaaguccuuguacuaugggguguucaucacccgccaaacauagcugaccaaaagacccucuaucauacagaaaaugcuuauguuucuguagugucuucacauuauagcagaaaauucaccccagaaauagccaaaagacccaaaguaagagaucaagaaggaagaaucaacuacuacuggacucugcuugaacccggggauacaauaauauuugaggcaaauggaaaucuaauagcgccaagauaugcuuucgcacugaguagaggcuuuggaucaggaaucaucaacucaaaugcaccaauggauaaaugugaugcgaagugccaaacaccucaaggagcuauaaacagcagucuuccuuuccagaacguacacccagucacaauaggagaguguccaaaguaugucaggagugcaaaauuaaggaugguuacaggacuaaggaacaucccauccauucaauccagagguuuguuuggagccauugccgguuucauugaagggggguggacuggaaugguagaugguugguaugguuaucaucaucagaaugagcaaggaucuggcuaugcugcagaucaaaaaagcacacaaaaugccauuaaugggauuacaaacaaggugaauucuguaauugagaaaaugaacacucaauucacagcagugggcaaagaauucaacaaauuggaaagaaggauggaaaacuugaauaaaaaaguugaugauggauuuauagacauuuggacauauaaugcagaacuguugguucuacuggaaaaugaaaggacuuuggauuuccaugacuccaaugugaagaaucuguaugagaaaguaaaaagccaguuaaagaauaaugcuaaagaaauaggaaauggguguuuugaauucuaucacaaguguaacgaugaaugcauggagaguguaaagaauggaacuuaugacuauccaaaauauuccgaagaaucaaaguuaaacagggagaaaauugauggagugaaauuggaaucaaugggagucuaucagauucuggcgaucuacucaacagucgccaguucucugguucucuuggucucccugggggcaaucagcuucuggauguguuccaaugggucuuugcaguguagaauaugcaucuaa

SEQ ID NO: 39748 - RNA, 1698 nt, Artificial Sequence
  derived and/or modified CDS sequence (wt) from hemagglutinin__InfluenzaA__AEQ38192
augaaaguaaaacuacugguccuguuaugcacauuuacagcuacauaugcagacacaauauguauaggcuaccaugcuaacaacucgaccgacacuguugacacaguacuugaaaagaaugugacagugacacacucugucaaccugcuugagaacagucacaauggaaaacuaugucuauuaaaaggaauagccccacuacaauuggguaacugcagcguugccggguggaucuuaggaaacccagaaugcgaauuacugauuuccaaggagucaugguccuacauuguagaaaaaccaaauccugagaauggaacauguuacccagggcauuucgcugacuaugaggaacugagggagcaauugaguucaguaucuucauuugagagguucgaaauauuccccaaagaaagcucauggcccaaccacaccguaaccggagugucagcaucaugcucccauaauggggaaagcaguuuuuacagaaauuugcuauggcugacggggaagaaugguuuguacccaaaccugagcaaguccuaugcaaacaacaaagaaaaagaaguccuuguacuaugggguguucaucacccgccaagcauaagugaccaaaagacccucuaucauacagaaaaugcuuauguuucuguagugucuucacauuauagcagaaaauucaccccagaaauaaccaaaagacccaaaguaagagaucaagaaggaagaaucaacuacuacuggacucugcuugaacccggggauacaauaauauuugaggcaaauggaaaucuaauagcgccaagauaugcuuucgcacugaguagaggcuuuggaucaggaaucaucaacucaaauacaccaauggauaaaugugauacgaagugccaaacaccucagggagcuauaaacagcagucuuccuuuccagaacguacacccagucacaauaggagaguguccaaaguaugucaggagugcaaaauuaaggaugguuacaggacuaaggaacaucccauccauucaauccagagguuuguuuggagccauugccgguuucauugaagggggguggacuggaaugguagaugguugguaugguuaucaucaucagaaugagcaaggaucuggcuaugcugcagaucaaaaaagcacacaaaaugccauuaaugggauuacaaacaaggugaauucuguaauugagaaaaugaacacccaauucacagcagugggcaaagaauucaacaaauuggaaagaaggauggaaaacuugaauaaaaaaguugaugauggguuuauagacauuuggacauauaaugcagaacuguugguucuacuggaaaaugaaaggacuuuggauuuccaugacuccaaugugaagaaucuguaugagaaaguaaaaagccaguuaaagaauaaugcuaaagaaauaggaaauggguguuuugaauucuaucacaaguguaacgaugaaugcauggagaguguaaagaauggaacuuaugacuauccaaaauauuccgaagaaucaaaguuaaacagggagaaaauugauggagugaaauuggaaucaaugggagucuaucagauucuggcgaucuacucaacagucgccaguucucugguucuuuuggucucccugggggcaaucagcuucuggauguguuccaaugggucuuugcaguguagaauaugcaucuaa

SEQ ID NO: 39749 - RNA, 1698 nt, Artificial Sequence
  derived and/or modified CDS sequence (wt) from hemagglutinin__InfluenzaA__AEQ38193
augaaaguaaaacuacugauccuguuaugcacauuuacagcuacauaugcagacacaauauguauaggcuaccaugcuaacaacucgaccgacacuguugacacaguacuugaaaagaaugugacagugacacacucugucaaccugcuugagaacagucacaauggaaaacuaugucuauuaaaaggaauagccccacuacaauuggguaacugcagcguugccggguggaucuuaggaaacccagaaugcgaauuacugauuuccaaagagucauggucauacauuguagaaaaaccaaauccugagaauggaacauguuacccagggcauuucgcugacuaugaggaacugagggagcaauugaguucaguaucuucauuugagagguucgaaauauuccccaaagaaagcucauggcccaaccacaccguaaccggagugucagcaucaugcucccauaauggggaaagcaguuuuuacagaaaucugcuauggcugacggggaagaaugguuuguacccaaaccugagcaaguccuaugcaaacaacaaagaaaaagaaguccuuguacuaugggguguucaucacccgccaaacauaguugaccaaaagacccucuaucguacagaaaaugcuuauguuucuguagugucuucacauuauagcagaaaauucaccccagaaauagccaaaagacccaaaguaagagaucaagaaggaagaaucaacuacuacuggacucugcuugaacccggggauacaauaauauuugaggcaaauggaaaucuaauagcgccaagauaugcuuucgcacugaguagaggcuuuggaucaggaaucaucaacucaaaugcaccaauggauaaaugugaugcgaagugccaaacaccucagggagcuauaaacagcagucuuccuuuccagaacguacacccagucacaauaggagaguguccaaaguaugucaggagugcaaaauuaaggaugguuacaggacuaaggaacaucccauccauucaauccagagguuuguuuggagccauugccgguuucauugaagggggguggacuggaaugguagaugguugguaugguuaucaucaucagaaugagcaaggaucuggcuaugcugcagaucaaaaaagcacacaaaaugccauuaaugggauuacaaacaaggugaauucuguaauugagaaaaugaacacucaauucacagcagugggcaaagaauucaacaaauuggaaagaaggauggaaaacuugaauaaaaaaguugaugauggguuuauagacauuuggacauauaaugcagaacuguugguucuacuggaaaaugaaaggacuuuggauuuccaugacuccaaugugaagaaucuguaugagaaaguaaaaagccaguuaaagaauaaugcaaaagaaauaggaaauggguguuuugaauucuaucacaaguguaacgaugaaugcauggagaguguaaagaauggaacuuaugacuauccaaaauauuccgaagaaucaaaguuaaacagggagaaaauugauggagugaaauuggaaucaaugggagucuaucagauucuggcgaucuacucaacagucgccaguucucugguucuuuuggucucccugggggcaaucagcuucuggauguguuccaaugggucuuugcaguguagaauaugcaucuaa

SEQ ID NO: 39750 - RNA, 1698 nt, Artificial Sequence
  derived and/or modified CDS sequence (wt) from hemagglutinin__InfluenzaA__AEQ38194
augaaaguaaaacuacugguccuguuaugcacauuuacagcuacauaugcagacacaauauguauaggcuaccaugcuaacaacucgaccgacacuguugacacaguacuugaaaagaaugugacagugacacacucugucaaccugcuugagaacagucacaauggaaaacuaugucuauuaaaaggaauagccccacuacaauuggguaacugcagcguugccggguggaucuuaggaaacccagaaugcgaauuacugauuuccaaggagucaugguccuacauuguagaaaaaccaaauccugagaauggaacauguuacccagggcauuucgcugacuaugaggaacugagggagcaauugaguucaguaucuucauuugagagguucgaaauauuccccaaagaaagcucauggcccaaccacaccguaaccggagugucagcaucaugcucccauaauggggaaagcaguuuuuacagaaauuugcuauggcugacggggaagaaugguuuguacccaaaccugagcaaguccuaugcaaacaacaaagaaaaagaaguccuuguacuaugggguguucaucacccgccaagcauaagugaccaaaagacccucuaucauacagaaaaugcuuauguuucuguagugucuucacauuauagcagaaaauucaccccagaaauagccaaaagacccaaaguaagagaucaagaaggaagaaucaacuacuauuggacucugcuugaacccggggauacaauaauauuugaggcaaguggaaaucuaauagcgccaagauaugcuuucgcacugaguagaggcuuuggaucaggaaucaucaacucaaaugcaccaauggauaaaugugaugcgaagugccaaacaccucagggagcuauaaacagcagucuuccuuuccagaacguacacccagucacaauaggagaguguccaaaguaugucaggagugcaaaauuaaggaugguuacaggacuaaggaacaucccauccauucaauccagagguuuguuuggagccauugccgguuucauugaagggggguggacuggaaugguagacgguugguaugguuaucaucaucggaaugagcaaggaucuggcuaugcugcagaucaaaaaagcacacaaaaugccauuaaugggauuacaaacaaggugaauucuguaauugagaaaaugaacacucaauucacagcagugggcaaagaauucaauaaauuggaaagaaggauggaaaacuugaauaaaagaguugaugauggguuuauagacauuuggacauauaaugcagaacuguugguucuacuggaaaaugaaaggacuuuggauuuccaugacuccaaugugaagaaucuguaugagaaaguaaaaagccaguuaaagaauaaugcuaaagaaauaggaaauggguguuuugaauucuaucacaaguguaacgaugaaugcauggagaguguaaagaauggaacuuaugacuauccaaaauauuccgaagaaucgaaguuaaacagggagaaaauugauggagugaaauuggaaucaaugggagucuaucagauucuggcgaucuacucaacagucgccaguucucugguucuuuuggucucccugggggcaaucagcuucuggauguguuccaaugggucuuugcaguguagaauaugcaucuaa

SEQ ID NO: 39751 - RNA, 1698 nt, Artificial Sequence
  derived and/or modified CDS sequence (wt) from hemagglutinin__InfluenzaA__AEQ38195
augaaaguaaaacuacugguccuguuaugcacauuuacagcuacauaugcagacacaauauguauaggcuaccaugcuaacaacucgaccgacacuguugacacaguacuugaaaagaaugugacagugacacacucugucaaccugcuugagaacagucacaauggaaaacuaugucuauuaaaagggauagccccacuacaauuggguaacugcagcguugccggguggaucuuaggaaacccagaaugcgaauuacugauuuccaaggagucaugguccuacauuguagaaaaaccaaauccugagaauggaacauguuacccagggcauuucgcugacuaugaggaacugagggagcaauugaguucaguaucuucauuugagagguucgaaauauuccccaaagaaagcucauggcccaaccacaccguaaccggagcgucagcaucaugcucccauaauggggaaaacaguuuuuacagaaauuugcuauggcugacggggaagaaugguuuguacccaaaccugagcaaguccuaugcaaacaacaaagaaaaagaaguccuuguacuaugggguguucaucacccgccaaacauagcuaaccaaaagacccucuaucauacagaaaaugcuuauguuucuguagugucuucacauuauagcagaaaauucaccccagaaauagccaaaagacccaaaguaagagaucaagaaggaagaaucaacuacuacuggacucugcuugaacccggggauacaauaauauuugaagcaaauggaaaucuaauagcgccaagauaugcuuucgcacugaguaggggcuuuggaucaggaaucaucaacucaaaugcaccaauggauaaaugugaugcgaagugccaaacaccucaaggagcuauaaacagcagucuuccuuuccagaacguacacccagucacaauaggagaguguccaaaguaugucaggagugcaaaauuaaggaugguuacaggacuaaggaacaucccauccauucaauccagagguuuguuuggagccauugccgguuucauugaagggggguggacuggaaugguagaugguugguaugguuaucaucaucagaaugagcaaggaucuggcuaugcugcagaucaaaaaagcacacaaaaugccauuaaugggauuacaaacaaggugaauucuguaauugagaaaaugaacacucaauucacagcaaugggcaaagaauucaacaaauuggaaagaaggauggaaaacuugaauaaaaaaguugaugauggguuuauagacauuuggacauauaaugcagaacuguugguucuacuggaaaaugaaaggacuuuggauuuccaugacuccaaugugaagaaucuguaugagaaaguaaaaagccaguuaaagaauaaugcuaaagaaauaggaaauggguguuuugaauucuaucacaagugcaacgaugaaugcauggagaguguaaagaauggaacuuaugacuauccaaaauauuccgaagaaucaaaauuaaacagggagaaaauugauggagugaaauuggaaucaaugggagucuaucagauucuggcgaucuacucaacagucgccaguucucugguucuuuuggucucccugggggcaaucagcuucuggauguguuccaaugggucuuugcaguguagaauaugcaucuaa

SEQ ID NO: 39752 - RNA, 1698 nt, Artificial Sequence
  derived and/or modified CDS sequence (wt) from hemagglutinin__InfluenzaA__AEQ38196
augaaaguaaaacuacugguccuguuaugcacauuuacagcuacauaugcagacacaauauguauaggcuaccaugcuaacaacucgaccgacacuguugacacaguacuugaaaagaaugugacagugacacacucugucaaccugcuugagaacagucacaauggaaaacuaugucuauuaaaaggaauagccccacuacaauuggguaacugcagcguugccggguggaucuuaggaaacccagaaugcgaauuacugauuuccaaggagucaugguccuacauuguagaaaaaccaaauccugagaauggaacauguuacccagggcauuucgcugacuaugaggaacugagggagcaauugaguucaguaucuucauuugagagguucgaaauauuccccaaggaaagcucauggcccaaccacaccguaaccggagcgucagcaucaugcucccauaauggggaaaacaguuuuuacagaaauuugcuauggcugacggggaagaaugguuuguacccaaaccugagcaaguccuaugcaaacaacaaagaaaaagaaguccuuguacuaugggguguucaucacccgccaaacauagcugaccaaaagacccucuaucauacagaaaaugcuuauguuucuguagugucuucacauuauagcagaaaauucaccccagaaauagccaaaagacccaaaguaagagaucaagaaggaagaaucaacuacuacuggacucugcuugaacccggggauacaauaauauuugaggcaaauggaaaucuaauagcgccaagauaugcuuucgcacugaguaggggcuuuggaucaggaaucaucaacucaaaugcaccaauggauaaaugugaugcgaagugccaaacaccucaaggagcuauaaacagcagucuuccuuuccagaacguacacccagucacaauaggagaguguccaaaguaugucaggagugcaaaauuaaggaugguuacaggacuaaggaacaucccauccauucaauccagagguuuguuuggagccauugccgguuucauugaagggggguggacuggaaugguagaugguugguaugguuaucaucaucagaaugagcaaggaucuggcuaugcugcagaucaaaaaagcacacaaaaugccauuaaugggauuacaaacaaggugaauucuguaauugagaaaaugaacacucaauucacagcagugggcaaagaauucaacaaauuggaaagaaggauggaaaacuugaauaaaaaaguugaugauggguuuauagacauuuggacauauaaugcagaacuguugguucuacuggaaaaugaaaggacuuuggauuuccaugacuccaaugugaagaaucuguaugagaaaguaaaaagccaguuaaagaauaaugcuaaagaaauaggaaauggguguuuugaauucuaucacaaguguaacgaugaaugcauggagaguguaaagaauggaacuuaugaauauccaaaauauuccgaagaaucaaaguuaaacagggagaaaauugauggagugaaauuggaaucaaugggagucuaucagauucuggcgaucuacucaacagucgcaaguucucugguucuuuuggucucccugggggcaaucagcuucuggauguguuccaaugggucuuugcaguguagaauaugcaucuaa

SEQ ID NO: 39753 - RNA, 1698 nt, Artificial Sequence
  derived and/or modified CDS sequence (wt) from hemagglutinin__InfluenzaA__AEQ38197
augaaaguaaaacuacugguccuguuaugcacauuuacagcuacauaugcagacacaauauguauaggcuaccaugcuaacaacucgaccgacacuguugacacaguacuugaaaagaaugugacagugacacacucugucaaccugcuugagaacagucacaauggaaaacuaugucuauuaaaagggauagccccacuacaauuggguaacugcagcguugccggguggaucuuaggaaacccagaaugcgaauuacugauuuccaaggagucaugguccuacauuguagaaaaaccaaauccugagaauggaacauguuacccagggcauuucgcugacuaugaggaacugagggagcaauugaguucaguaucuucauuugagagguucgaaauauuccccaaagaaagcucauggcccaaccacaccguaaccggagcgucagcaucaugcucccauaauggggaaaacaguuuuuacagaaauuugcuauggcugacggggaagaaugguuuguacccaaaccugagcaaguccuaugcaaacaacaaagaaaaagaaguccuuguacuaugggguguucaucacccgccaaacauagcugaccaaaagacccucuaucauacagaaaaugcuuauguuucuguagugucuucacauuauagcagaaaauucaccccagaaauagccaaaagacccaaaguaagagaucaagaaggaagaaucaacuacuacuggacucugcuugaacccggggauacaauaauauuugaggcaaauggaaaucuaauagcgccaagauaugcuuucgcacugaguaggggcuuuggaucaggaaucaucaacucaaaugcaccaauggauaaaugugaugcgaagugccaaacaccucaaggagcuauaaacagcagucuuccuuuccagaacguacacccagucacaauaggagaguguccaaaguaugucaggagugcaaaauuaaggaugguuacaggacuaaggaacaucccauccauucaauccagagguuuguuuggagccauugccgguuucauugaagggggguggacuggaaugguagaugguugguaugguuaucaucaucagaaugagcaaggaucuggcuaugcugcagaucaaaaaagcacacaaaaugccauuaaugggauuacaaacaaggugaauucuguaauugagaaaaugaacacucaauucacagcagugggcaaagaauucaacaaauuggaaagaaggauggaaaacuugaauaaaaaaguugaugauggguuuauagacauuuggacauauaaugcagaacuguugguucuacuggaaaaugaaaggacuuuggauuuccaugacuccaaugugaagaaucuguaugagaaaguaaaaagccaguuaaagaauaaugcuaaagaaauaggaaauggguguuuugaauucuaucacaagugcaacgaugaaugcauggagaguguaaagaauggaacuuaugacuauccaaaauauuccgaagaaucaaaauuaaacagggagaaaauugauggagugaaauuggaaucaaugggagucuaucagauucuggcgaucuacucaacagucgccaguucucugguucuuuuggucucccugggggcaaucagcuucuggauguguuccaaugggucuuugcaguguagaauaugcaucuaa

SEQ ID NO: 39754 - RNA, 1698 nt, Artificial Sequence
  derived and/or modified CDS sequence (wt) from hemagglutinin__InfluenzaA__AEQ38198
augaaaguaaaacuacugguccuguuaugcacauuuacagcuacauaugcagacacaauauguauaggcuaccaugcuaacaacucgaccgacacuguugacacaguacuugaaaagaaugugacagugacacacucugucaaccugcuugagaacagucacaauggaaaacuaugucuauuaaaaggaauagccccacuacaauuggguaacugcagcguugccggguggaucuuaggaaacccagaaugcgaauuacugauuuccaaggagucaugguccuacauuguagaaaaaccaaauccugagaauggaacauguuacccagggcauuucgcugacuaugaggaacugagggagcaauugaguucaguaucuucauuugagagguucgaaauauuccccaaagaaagcucauggcccaaccacaccguaaccggagcgucagcaucaugcucccauaauggggaaaacaguuuuuacagaaauuugcuauggcugacggggaagaaugguuuguauccaaaucugagcaaguccuaugcaaacaacaaagaaaaagaaguccuuguacuaugggguguucaucacccgccaaacauagcugaccaaaagacccucuaucauacagaaaaugcuuauguuucuguagugucuucacauuauagcagaaaauucaccccagaaauagccaaaagacccaaaguaagagaucaagaaggaagaaucaacuacuacuggacucugcuugaacccggggauacaauaauauuugaggcaaauggaaaucuaauagcgccaagauaugcuuucgcacugaguaggggcuuuggaucaggaaucaucaacucaaaugcaccaauggauaaaugugaugcgaagugccaaacaccucaaggagcuauaaacagcagucuuccuuuccagaacguacacccagucacaauaggagaguguccaaaguaugucaggagugcaaaauuaaggaugguuacaggacuaaggaacaucccauccauucaauccagagguuuguuuggagccauugccgguuucauugaagggggguggacuggaaugguagaugguugguaugguuaucaucaucagaaugagcaaggaucuggcuaugcugcagaucaaaaaagcacacaaaaugccauuaaugggauuacaaacaaggugaauucuguaauugagaaaaugaacacucaauucacagcagugggcaaagaauucaacaaauuggaaagaaggauggaaaacuugaauaaaaaaguugaugauggguuuauagacauuuggacauauaaugcagaacuguugguucuacuggaaaaugaaaggacuuuggauuuccaugacuccaaugugaagaaucuguaugagaaaguaaaaagccaguuaaagaauaaugcuaaagaaauaggaaauggguguuuugaauucuaucacaaguguaacgaugaaugcauggagaguguaaagaauggaacuuaugacuauccaaaauauuccgaagaaucaaaguuaaacagggagaaaauugauggagugaaauuggaaucaaugggagucuaucagauucuggcgaucuacucaacagucgccaguucucugguucuuuuggucucccugggggcaaucagcuucuggauguguuccaaugggucuuugcaguguagaauaugcaucuaa

SEQ ID NO: 39755 - RNA, 1701 nt, Artificial Sequence
  derived and/or modified CDS sequence (wt) from hemagglutinin__InfluenzaA__AEQ62909
augaaggcaauacuaguaguucugcuauauacauuugcaaccgcaaaugcagacacauuauguauagguuaucaugcgaacaauucaacagacacuguagacacaguacuagaaaagaauguaacaguaacacacucuguuaaccuucuagaagacaagcauaacgggaaacuaugcaaacugagagggguagccccauugcauuuggguaaauguaacauugcuggcuggauccugggaaauccagagugugaaucacucuccacagcaagcucaugguccuacauuguggaaacaucuaguucagacaauggaacguguuacccaggagauuucaucaauuaugaagagcuaagagagcaauugagcucagugucaucauuugaaagguuugagauauucccaaagacaaguucauggcccaaucaugacucgaacaaagguguaacggcagcauguccucaugcuggagcaaaaagcuucuacaaaaauuuaauauggcuaguuaaaaaaggaaauucauacccaaagcucagcaaauccuauauuaacgauaaagggaaagaaguccuagugcuauggggcauucaccauccaucuacuagugcugaccaacaaagucucuaucagaaugcagaugcauauguuuuuguggggacaucaaaauacagcaagaaguucaagccggaaauagcaguaagaccuaaagugagggaucaagaagggagaaugaacuauuacuggacacuaguagagccgggagacaaaauaacauucgaagcaacuggaaaucuauugguaccgagauaugcauucgcaauggaaagaaaugcuggaucugguauuaucauuucagauacaccaguccacgauugcaauacaacuugucagacacccaagggugcuauaaacaccagccucccauuucagaauauacauccgaucacaauuggaaaauguccaaaauauguaaaaagcacaaaauugagacuggccacgggauugaggaaugucccgucuauucaaucuagaggccuauuuggggccauugccgguuucauugaagggggguggacagggaugguagauggaugguacgguuaucaccaucaaaaugagcaggggucaggauaugcagccgaccugaagagcacacagaaugccauugacaagauuacuaacaaaguaaauucuguuauugaaaagaugaauacacaguucacagcaguagguaaagaguucaaccaccuggaaaaaagaauagagaauuuaaauaaaaaaguugaugaugguuuccuggacauuuggacuuacaaugccgaacuguugguucuauuggaaaaugaaagaacuuuggacuaccacgauucaaaugugaaaaacuuauaugaaaagguaagaagccaguuaaaaaacaaugccaaggaaauuggaaacggcugcuuugaauuuuaccacaaaugcgauaacacgugcauggaaagugucaaaaaugggacuuaugacuacccaaaauacucagaggaagcaaaauuaaacagagaagaaauagaugggguaaagcuggaaucaacaaggauuuaccagauuuuggcgaucuauucaacugucgccaguucauugguacugguagucucccugggggcaaucaguuucuggaugugcucuaaugggucucuacaguguagaauauguauuuaa

SEQ ID NO: 39756 - RNA, 1701 nt, Artificial Sequence
  derived and/or modified CDS sequence (wt) from hemagglutinin__InfluenzaA__AEQ62910
augaaggcaauacuaguaguuaugcuauauacauuugcaaccgcaaaugcagacacacuaugcauagguuaucaugcgaacaauucaacagacacuguagacacaguacuagaaaagaauguaacaguaacacacucuguuaaccuucuagaagacaagcauaacgggaaacuaugcaaacuaagagggguagccccauugcauuuggguaaauguaacauugcuggcuggauccugggaaauccagagugugaaucacucuccacagcaagcucaugguccuacauuguggaaacagcuaguccagacaauggaacguguuacccaggagauuucaucgauuaugaggagcuaagagagcaauugagcucagugucaucauuugaaagguuugaaauauuucccaagacaaguucauggcccaaucaugacucgaacaaagguguaacggcagcauguccucaugcgggagcaaaaagcuucuacaaaaauuuaauguggcuaguuaaaaaaggaaauucauacccaaagcucagcaaauccuacauuaaugauaaagggaaagaaguccucgugcuauggggcauucaccauccaccuacuagugcugaccaacaaagucucuaucagaaugcagaugcauauguuuuuguggggacaucaagauacagcaagaaguucaaaccggaaauagcaauaagacccaaagugaggggucaagaagggagaaugaacuauuacuggacacuaguagagccgggagacaaaauaacauucgaagcaacuggaaaucuagugguaccgagauaugcauucgcaauggaaagaaaugcuggaucugguauuaucauuucagauacaccaguccacgauugcaauacaacuugucagucacccaagggugccauaaacaccagccucccauuucagaauauacauccgaucacaauuggagaauguccaaaauauguaaaaagcacaaaauugagacuggccacaggauugaggaaugucccgucuguucaaucuagaggccuauuuggggccauugccgguuucauugaagggggguggacagggaugguagauggaugguacgguuaucaccaucaaaaugaacaggggucaggauaugcagccgaccugaagagcacacagaaugcuauugacgagauuacuaacaaaguaaauucuguuauugaaaagaugaauacacaguucacagcaguagguaaagaguucaaucaacuggaaaaaagaauagagaauuuaaauaaaaaaguugaugaugguuuccuggacauuuggacuuacaaugccgaacuguugguucuauuagaaaaugaaagaacuuuggacuaccacgauucaaaugugaagaacuuauaugaaaagguaagaagccaguuaaaaaacaaugccaaggaaauuggaaacggcugcuuugaauuuuaccacaaaugcgauaacacgugcauggaaagugucaaaaaugggacuuaugacuacccaaaauacucagaggaagcaaaauuaaacagagaagaaauagauggaguaaagcuggaaucaacaaggauuuaccagauuuuggcgaucuauucaacugucgccaguucauugguacugguagucucccugggggcaaucaguuucuggaugugcucuaaugggucucuacaguguagaauauguauuuaa

SEQ ID NO: 39757 - RNA, 1701 nt, Artificial Sequence
  derived and/or modified CDS sequence (wt) from hemagglutinin__InfluenzaA__AEQ62911
augaaggcaauacuaguaguucugcuauauacauuugcaaccgcaaaugcagacacauuauguauagguuaucaugcgaacaauucaacagacacuguagacacaguacuagaaaagaauguaacaguaacacacucuguuaaccuucuagaagacaagcauaacgggaaacuaugcaaacuaagagggguagccccauugcauuuggguaaauguaacauugcuggcuggauccugggaaauccagagugugaaucacucuccacagcaagcucaugguccuacauuguggaaacaucuaguucagacaauggaacguguuacccaggagauuucaucaauuaugaggagcuaagagagcaauugagcucagugucaucauuugaaagguuugagauauuccccaagacaaguucauggcccaaucaugacucgaacaaagguguaacggcagcauguccucaugcuggagcaaaaagcuucuacaaaaauuuaauauggcuaguuaaaaaaggaaauucauacccaaagcucagcaaauccuacauuaaugauaaagggaaagaaguccucgugcuguggggcauucaccauccaucuacuacugcugaccaacaaagucucuaucagaaugcagaugcauauguuuuuguggggacaucaagauacagcaagaaguucaagccggaaauagcaauaagacccaaagugagggaucaagaagggagaaugaacuauuacuggacacuaguagagccgggagacaaaauaacauucgaagcaacuggaaaucuaguggugccgagauaugcauucgcaauggaaagaaaugcuggaucugguauuaucauuucagauacaccaguccacgauugcaauacaacuugucagacacccaagggugccauaaacaccagccucccauuucagaauauacauccgaucacaauuggaaaauguccaaaauauguaaaaagcacaaaauugagacuggccacaggauugaggaaugucccgucuauucaaucuagaggccuauuuggggccauugccggcuucauugaagggggguggacagggaugguagauggaugguacgguuaucaccaucaaaaugagcaggggucaggauaugcagccgaccugaagagcacacagaaugccauugacaagauuacuaacaaaguaaauucuguuauugaaaagaugaauacacaguucacagcaguagguaaagaguucaaccaccuggaaaaaagaauagagaauuuaaauaaaaaaguugaugaugguuuccuggacauuuggacuuacaaugccgaacuguugguucuauuggaaaaugaaagaacuuuggacuaccacgauucaaaugugaagaacuuguaugaaaagguaagaaaccaguuaaaaaacaaugccaaggaaauuggaaacggcugcuuugaauuuuaccacaaaugcgauaacacgugcauggaaagugucaaaaaugggacuuaugacuacccaaaauacucagaggaagcaaaauuaaacagagaagaaauagaugggguaaagcuggaaucaacaaggauuuaccagauuuuggcgaucuauucaacugucgccaguucauugguacugguagucucccugggggcaaucaguuucuggaugugcucuaaugggucucuacaguguagaauauguauuuaa

SEQ ID NO: 39758 - RNA, 1701 nt, Artificial Sequence; identical to SEQ ID NO: 39755
  derived and/or modified CDS sequence (wt) from hemagglutinin__InfluenzaA__AEQ62912

SEQ ID NO: 39759 - RNA, 1701 nt, Artificial Sequence
  derived and/or modified CDS sequence (wt) from hemagglutinin__InfluenzaA__AEQ62915
augaaggcaauacuaguaguucugcuauauacauuugcaaccgcaaaugcagacacauuauguauagguuaucaugcgaacaauucaacagacacuguagacacaguacuagaaaagaauguaacaguaacacacucuguuaaccuucuagaagacaagcauaacgggaaacuaugcaaacuaagagggguagccccauugcauuuggguaaauguaacauugcuggcuggauccugggaaauccagagugugaaucacucuccacagcaagcucaugguccuacauuguggaaacaucuaguucagacaauggaacguguuacccaggagauuucaucaauuaugaggagcuaagagagcaauugagcucagugucaucauuugaaagguuugagauauuccccaagacaaguucauggcccaaucaugacucgaacaaagguguaacggcagcauguccucaugcuggagcaaaaagcuucuacaaaaauuuaauauggcuaguuaaaaaaggaaauucauacccaaagcucagcaaauccuacauuaaugauaaagggaaagaaguccucgugcuguggggcauucaccauccaucuacuacugcugaccaacaaagucucuaucagaaugcagaugcauauguuuuuguggggacaucaagauacagcaagaaguucaagccggaaauagcaauaagacccaaagugagggaucaagaagggagaaugaacuauuacuggacacuaguagagccgggagacaaaauaacauucgaagcaacuggaaaucuaguggugccgagauaugcauucgcaauggaaagaaaugcuggaucugguauuaucauuucagauacaccaguccacgauugcaauacaacuugucagacacccaagggugccauaaacaccagccucccauuucagaauauacauccgaucacaauuggaaaauguccaaaauauguaaaaagcacaaaauugagacuggccacaggauugaggaaugucccgucuauucaaucuagaggccuauuuggggccauugccggcuucauugaagggggguggacagggaugguagauggaugguacgguuaucaccaucaaaaugagcaggggucaggauaugcagccgaccugaagagcacacagaaugccauugacaagauuacuaacaaaguaaauucuguuauugaaaagaugaauacacaguucacagcaguagguaaagaguucaaccaccuggaaaaaagaauagagaauuuaaauaaaaaaguugaugaugguuuccuggacauuuggacuuacaaugccgaacuguugguucuauuggaaaaugaaagaacuuuggacuaccacgauucaaaugugaagaacuuguaugaaaagguaagaaaccaguuaaaaaccaaugccaaggaaauuggaaacggcugcuuugaauuuuaccacaaaugcgauaacacgugcauggaaagugucaaaaaugggacuuaugacuacccaaaauacucagaggaagcaaaauuaaacagagaagaaauagaugggguaaagcuggaaucaacaaggauuuaccagauuuuggcgaucuauucaacugucgccaguucauugguacugguagucucccugggggcaaucaguuucuggaugugcucuaaugggucucuacaguguagaauauguauuuaa

SEQ ID NO: 39760 - RNA, 1701 nt, Artificial Sequence; identical to SEQ ID NO: 35611
  derived and/or modified CDS sequence (wt) from hemagglutinin__InfluenzaA__AER08646

SEQ ID NO: 39761 - RNA, 1701 nt, Artificial Sequence
  derived and/or modified CDS sequence (wt) from hemagglutinin__InfluenzaA__AER08648
augaagacuaucauugcuuugagcuacauucuaugucugguuuucgcucaaaaacuuccuggaaaugacaacagcacggcaacgcugugccuugggcaccaugcaguaccaaacggaacgauagugaaaacaaucacgaaugaccaaauugaaguuacuaaugcuacugagcugguucagaguuccucaacaggugaaauaugcgacaguccucaucagauccuugauggaaaaaacugcacacuaauagaugcucuauugggagacccucagugugauggcuuccaaaauaagaaaugggaccuuuuuguugaacgcagcaaagccuacagcaacuguuacccuuaugaugugccggauuaugccucccuuaggucacuaguugccucauccggcacacuggaguuuaacaaugaaagcuucaauuggacuggagucacccaaaacggaacaagcucugcuugcauaaggagaucuaaaaacaguuucuuuaguagauugaauugguugacccacuuaaacuucaaauacccagcauugaacgugacuaugccaaacaaugaacaauuugacaaauuguacauuugggggguucaccacccggguacggacaaagaccaaaucuuccuguaugcucaagcaucaggaagaaucacagucucuaccaaaagaagccaacaaacuguaaucccgaauaucggaucuagacccagaguaaggaauaucccuagcagaauaagcaucuauuggacaauaguaaaaccgggagacauacuuuugauuaacagcacagggaaucuaauugcuccuagggguuacuucaaaauacgaagugggaaaagcucaauaaugagaucagaugcacccauuggcaaaugcaauucugaaugcaucacuccaaauggaagcauucccaaugacaaaccauuccaaaauguaaacaggaucacauacggggccugucccagauauguuaagcaaaacacucugaaauuggcaacagggaugcgaaauguaccagagaaacaaacuagaggcauauuuggcgcaaucgcggguuucauagaaaaugguugggagggaaugguggaugguugguacgguuucaggcaucaaaacucugagggaagaggacaagcagcagaucucaaaagcacucaagcagcaaucgaucaaaucaaugggaagcugaauagauugaucgggaaaaccaacgagaaauuccaucagauugaaaaagaauucucagaagucgaagggagaauucaggaccuugagaaauauguugaggacacuaaaauagaucucuggucauacaacgcggagcuucuuguugcccuggagaaccaacauacaauugaucuaacugacucagaaaugaacaaacuguuugaaaaaacaaagaagcaacugagggaaaaugcugaggauaugggcaaugguuguuucaaaauauaccacaaaugugacaaugccugcauaggaucaaucagaaauggaacuuaugaccacgauguauacagagaugaagcauuaaacaaccgguuucagaucaaggggguugagcugaagucaggguacaaagauuggauccuauggauuuccuuugccauaucauguuuuuugcuuuguguugcuuuguugggguucaucaugugggccugccaaaaaggcaacauuaggugcaacauuugcauuuga

SEQ ID NO: 39762 - RNA, 1701 nt, Artificial Sequence
  derived and/or modified CDS sequence (wt) from hemagglutinin__InfluenzaA__AER08652
augaagacuaucauugcuuugagcuacauucuaugucugguuuucgcucaaaaacuuccuggaaaugacaacagcacggcaacgcugugccuugggcaccaugcaguaccaaacggaacgauagugaaaacaaucacgaaugaccaaauugaaguuacuaaugcuacugagcugguucagaguuccucaacaggugaaauaugcgacaguccucaucagauccuugauggaaaaaacugcacacuaauagaugcucuauugggagacccucagugugauggcuuccaaaauaagaaaugggaccuuuuuguugaacgcagcaaagccuacagcaacuguuacccuuaugaugugccggauuaugccucccuuaggucacuaguugccucauccggcacacuggaguuuaacaaugaaagcuucaauuggacuggagucacucaaaacggaacaagcucugcuugcauaaggagaucuaaaaacaguuucuuuaguagauugaauugguugacccacuuaaacuucaaauacccagcauugaacgugacuaugccaaacaaugaacaauuugacaaauuguacauuugggggguucaccacccggguacggacaaagaccaaaucuuccuguaugcucaagcaucaggaagaaucacagucucuaccaaaagaagccaacaaacugcaaucccgaauaucggaucuagacccagaguaaggaauaucccuagcaggauaagcaucuauuggacaauaguaaaaccgggagacauacuuuugauuaacagcacagggaaucuaauugcuccuagggguuacuucaaaauacgaagugggaaaagcucaauaaugagaucagaugcacccauuggcaaaugcaauucugaaugcaucacuccaaauggaagcauucccagugacaaaccauuccaaaauguaaacaggaucacauacggggccugucccagauauguuaagcaaaacacucugaaauuggcaacagggaugcgaaauguaccagagaaacaaacuagaggcauauuuggcgcaaucgcggguuucauagaaaaugguugggagggaaugguggaugguugguacgguuucaggcaucaaaauucugagggaagaggacaagcagcagaucucaaaagcacucaagcagcaaucgaucaaaucaaugggaagcugaauagauugaucgggaaaaccaacgagaaauuccaucagauugaaaaggaauucucagaagucgaagggaggauucaggaccuugagaaauauguugaggacacuaaaauagaucucuggucauacaacgcggagcuucuuguugcccuggagaaccaacauacaauugaucuaacugacucagaaaugaacaaacuguuugaaaaaacaaagaagcaacugagggaaaaugcugaggauaugggcaaugguuguuucaaaauauaccacaaaugugacaaugccugcauaggaucaaucagaaauggaacuuaugaccacgauguauacagagaugaagcacuaaacaaccgguuucagaucaagggaguugagcugaagucaggguacaaagauuggauccuauggauuuccuuugccauaucauguuuuuugcuuuguguugcuuuguugggguucaucaugugggccugccaaaaaggcaacauuaggugcaacauuugcauuuga

SEQ ID NO: 39763 - RNA, 1701 nt, Artificial Sequence; identical to SEQ ID NO: 39762
  derived and/or modified CDS sequence (wt) from hemagglutinin__InfluenzaA__AER08654

SEQ ID NO: 39764 - RNA, 1701 nt, Artificial Sequence
  derived and/or modified CDS sequence (wt) from hemagglutinin__InfluenzaA__AER08656
augaagacuaucauugcuuugagcuacauucuaugucugguuuucgcucaaaaacuuccuggaaaugacaacagcacggcaacgcugugccuugggcaccaugcaguaccaaacggaacgauagugaaaacaaucacgaaugaccaaauugaaguuacuaaugcuacugagcuuguucagaguuccucaacaggugaaauaugcgacaguccucaucagauccuugauggaaaaaacugcacacuaauagaugcucuauugggagacccucagugugauggcuuccaaaauaagaaaugggaccuuuuuguugaacgcagcaaagccuacagcaacuguuacccuuaugaugugccggauuaugccucccuuaggucacuaguugccucauccggcacacuggaguuuaacaaugaaagcuucaauuggacuggagucacucaaaacggaacaagcucugcuugcauaaggagaucuaaaaacaguuucuuuaguagauugaauugguugacccacuuaaacuucaaauacccagcauugaacgugacuaugccgaacaaugaacaauuugacaaauuguacauuugggggguucaccacccggguacggacaaagaccaaaucuuccuguaugcucaagcaucaggaagaaucacagucucuaccaaaagaagccaacaaacuguaaucccgaauaucggaucuagaccccgaguaaggaauaucccuagcagaauaagcaucuauuggacaauaguaaaaccgggagacauacuuuugauuaacagcacagggaaucuaauugcuccuagggguuacuucaaaaugcaaagugggaaaagcucaauaaugagaucagaugcacccauuggcaaaugcaauucugaaugcaucacuccaaauggaagcauucccaaugacaaaccauuccaaaauguaaacaggaucacauacggggccugucccagauauguuaagcaaaacacucugaaauuggcaacagggaugcgaaauguaccagagaaacaaacuagaggcauauuuggcgcaaucgcggguuucauagaaaaugguugggagggaaugguggaugguugguacgguuucaggcaucaaaauucugagggaagaggacaagcagcagaucucaaaagcacucaagcagcaaucgaucaaaucaaugggaagcugaauagauugaucgggaaaaccaacgagaaauuccaucagauugaaaaagaauucucagaagucgaagggagaauucaggaccuugagaaauauguugaggacacuaaaauagaucucuggucauacaacgcggagcuucuuguugcccuggagaaccaacauacaauugaucuaacugacucagaaaugaacaaacuguuugaaaaaacaaagaagcaacugagggaaaaugcugaggauaugggcaaugguuguuucaaaauauaccacaaaugugacaaugccugcauaggaucaaucagaaauggaacuuaugaccacgauguauacagagaugaagcauuaaacaaccgguuucagaucaagggaguugagcugaagucaggguacaaagauuggauccuauggauuuccuuugccauaucauguuuuuugcuuuguguugcuuuguugggguucaucaugugggccugccaaaaaggcaacauuaggugcaacauuugcauuuga

SEQ ID NO: 39765 - RNA, 1701 nt, Artificial Sequence
  derived and/or modified CDS sequence (wt) from hemagglutinin__InfluenzaA__AER08660
augaagacuaucauugcuuugagcuacauucuaugucugguuuucgcucaaaaacuuccuggaaaugacaacagcacggcaacgcugugccuugggcaccaugcagugccaaacggaacgauagugaaaacaaucacgaaugaccaaauugaaguuacuaaugcuacugagcugguucagaguuccucaacaggugaaauaugcaacaguccucaucagauccuugauggagaaaacugcacacuaauagaugcucuauugggagacccucagugugauggcuuccaaaauaagaaaugggaccuuuuuguugaacgaagcaaagccuacagcaacuguuacccuuaugaugugccggauuaugccucccuuaggucacuaguugccucauccggcacacuggaguuuaacaaugaaagcuucaauuggacuggagucacucaaaacggaacaagcucugcuugcauaaggagaucuaauaauaguuucuuuaguagauugaauugguugacccacuuaaacuucaaauacccagcauugaacgugacuaugccaaacaaugaacaauuugacaaauuguacauuugggggguucaccacccggguacggacaaggaccaaaucuuccuguaugcucaagcaucaggaagaaucacaguaucuaccaaaagaagccaacaagcuguaauuccgaauaucggaucuagacccagaguaaggaauaucccuagcagaauaagcaucuauuggacaauaguaaaaccgggagacauacuuuugauuaacagcacagggaaucuaauugcuccuagggguuacuucaaaauacgaagugggaaaagcucaauaaugagaucagaugcacccauuggcaaaugcaauucugcaugcaucacuccaaauggaagcauucccaaugacaaaccauuccaaaauguaaacaggaucacauacggggccugucccagauauguuaagcaaaacacucugaaauuggcaacaggaaugcgaaauguaccagagaaacaaacuagaggcauauuuggcgcaauagcggguuucauagaaaaugguugggagggaaugguggaugguugguacgguuucaggcaucaaaauucugagggaaggggacaagcagcagaucucaaaagcacucaagcagcaaucgaucaaaucaaugggaagcugaauagauugaucgggaaaaccaacgagaaauuccaucagauugaaaaagaauucucagaagucgaagggagaauucaggaccuugagaaauauguugaggacacuaaaauagaucucuggucauacaacgcggagcuucuuguugcccuggagaaccaacauacaauugaucuaacugacucagaaaugaacaaacuguuugaaaaaacaaagaagcaacugagggaaaaugcugaggauaugggcaaugguuguuucaaaauauaccacaaaugugacaaugccugcauaggaucaaucagaaauggaacuuaugaccacgauguauacagagaugaagcauuaaacaaccgauuccagaucaagggaguugagcugaagucaggguacaaagauuggauccuauggauuuccuuugccauaucauguuuuuugcuuuguguugcuuuguugggguucaucaugugggccugccaaaaaggcaacauuaggugcaacauuugcauuuga

SEQ ID NO: 39766 - RNA, 1701 nt, Artificial Sequence
  derived and/or modified CDS sequence (wt) from hemagglutinin__InfluenzaA__AER08664
augaagacuaucauugcuuugagcuacauucuaugccugguuuucgcucaaaaacuuccuggaaaugacaacagcacggcaacgcugugccuugggcaccaugcaguaccaaacggaacgauagugaaaacaaucacgaaugaccaaauugaaguuacuaaugcuacugagcugguucagaguuccucaacaggugaaauaugcgacaguccucaucagauccuugauggagaaaacugcacacuaauagaugcucuauugggagacccucagugugauggcuuccaaaauaagaaaugggaccuuuuuguugaacgaagcaaagccuacagcaacuguuacccuuaugaugugccggauuaugccucccuuaggucacuaguugccucauccggcacacuggaguuuaacagugaaagcuucaauuggacuggagucacucaaaacggaacaagcucugcuugcauaaggagaucuaauaauaguuucuuuaguagauugaauugguugacccacuuaaacuucaaauacccagcauugaacgugacuaugccaaacaaugaacaauuugacaaauuguacauuugggggguucaccacccggguacggacaaggaccaaaucuuccuguaugcucaagcaucaggaagaaucacaguaucuaccaaaagaagccaacaagcuguaaucccgaauaucggaucuagacccagaguaaggaauaucccuagcagaauaagcaucuauuggacaauaguaaaaccgggagacauacuuuugauuaacagcacagggaaucuaauugcuccuagggguuacuucaaaauacgaagugggaaaagcucaauaaugagaucagaugcacccauuggcaaaugcaauucugaaugcaucacuccaaauggaagcauucccaaugacaaaccauuccaaaauguaaacaggaucacauacggggccugucccagauauguuaagcaaagcacucugaaauuggcaacaggaaugcgaaauguaccagagaaacaaacuagaggcauauuuggcgcaauagcggguuucauagaaaaugguugggagggaaugguggaugguugguacgguuucaggcaucaaaauucugagggaagaggacaagcagcagaucucaaaagcacucaagcagcaaucgaucaaaucaaugggaagcugaauagauugaucgggaaaaccaacgagaaauuccaucagauugaaaaagaauucucagaagucgaagggagaauucaggaccuugagaaauauguugaggacacuaaaauagaucucuggucauacaacgcggagcuucuuguugcccuugagaaccaacauacaauugaucuaacugacucagaaaugaacaaacuguuugaaaaaacaaagaagcaacugagggaaaaugcugaggauaugggcaaugguuguuucaaaauauaccacaaaugugacaaugccugcauaggaucaaucagaaauggaacuuaugaccacgauguauacagagaugaagcauuaaacaaccgguuccagaucaagggaguugagcugaagucaggguacaaagauuggauccuauggauuuccuuugccauaucauguuuuuugcuuuguguugcuuuguugggguucaucaugugggccugccaaaagggcaacauuaggugcaacauuugcauuuga

SEQ ID NO: 39767 - RNA, 1701 nt, Artificial Sequence
  derived and/or modified CDS sequence (wt) from hemagglutinin__InfluenzaA__AER08668
augaagacuaucauugcuuugagcuacauucuaugucugguuuucgcucaaaaacuuccuggaaaugacaacagcacggcaacgcugugccuugggcaccaugcagugccaaacggaacgauagugaaaacaaucacgaaugaccaaauugaaguuacuaaugcuacugagcugguucagaguuccucaacaggugaaauaugcaacaguccucaucagauccuugauggagaaaacugcacacuaauagaugcucuauugggagacccucagugugauggcuuccaaaacaagaaaugggaccuuuuuguugaacgaagcaaagcccacagcaacuguuacccuuaugaugugccggauuaugccucccuuaggucacuaguugccucauccggcacacuggaguuuaacaaugaaagcuucaauuggacuggagucacucaaaacggaacaagcucugcuugcauaaggagaucuaauaauaguuucuuuaguagauugaauugguugacccacuugaacuucaaauacccagcauugaacgugaccaugccaaacaaugaacaauuugacaaauuguacauuugggggguucaccacccggguacggacaaggaccaaaucuuccuguaugcucaagcaucaggaagaaucacaguaucuaccaaaagaagccaacaagcuguaauuccgaauaucggaucuagacccagaguaaggaauaucccuagcagaguaagcaucuauuggacaauaguaaaaccgggagauauacuuuugauuaacagcacagggaaucuaauugcuccuagggguuacuucaaaauacgaagugggaaaagcucaauaaugagaucagaugcacccauuggcaaaugcaauucugcaugcaucacuccaaauggaagcauucccaaugacaaaccauuccaaaauguaaacaggaucacauacggggccugucccagauauguuaagcaaaacacucugaaauuggcaacaggaaugcgaaauguaccagagaaacaaacuagaggcauauuuggcgcaauagcggguuucauagaaaaugguugggagggaaugguggaugguugguacgguuucaggcaucaaaauucugagggaaggggacaagcagcagaucucaaaagcacucaagcagcaaucgaucaaaucaaugggaagcugaauagauugaucgggaaaaccaacgagaaauuccaucagauugaaaaagaauucucagaagucgaagggagaauucaggaccuugagaaauauguugaggacacuaaaauagaucucuggucauacaacgcggagcuucuuguugcccuggagaaccaacacacaauugaucuaacugacucagaaaugaacaaacuguuugaaaaaacaaagaagcaacugagggaaaaugcugaggauaugggcaaugguuguuucaaaauauaccacaaaugugacaaugccugcauaggaucgaucagaaauggaacuuaugaccacgauguguacagagaugaagcauuaaacaaccgauuccagaucaagggaguugagcugaagucaggguacaaagauuggauccuauggauuuccuuugccauaucauguuuuuugcuuuguguugcucuguugggguucaucaugugggccugccaaaaaggcaacauuaggugcaacauuugcauuuga

SEQ ID NO: 39768 - RNA, 1701 nt, Artificial Sequence
  derived and/or modified CDS sequence (wt) from hemagglutinin__InfluenzaA__AER08670
augaagacuaucauugcuuugagcuacauucuaugucugguuuucgcucaaaaacuuccuggaaaugacaacagcacggcaacgcugugccuugggcaccaugcagugccaaacggaacgauagugaaaacaaucacgaaugaccaaauugaaguuacuaaugcuacugagcugguucagaguuccucaacaggugaaauaugcaacaguccucaucagauccuugauggagaaaacugcacacuaauagaugcucuauugggagacccucagugugauggcuuccaaaacaagaaaugggaccuuuuuguugaacgaagcaaagcccacagcaacuguuacccuuaugaugugccggauuaugccucccuuaggucacuaguugccucauccggcacacuggaguuuaacaaugaaagcuucaauuggacuggagucacucaaaacggaacaagcucugcuugcauaaggagaucuaauaauaguuucuuuaguagauugaauugguugacccacuugaacuucaaauacccagcauugaacgugacuaugccaaacaaugaacaauuugacaaauuguacauuugggggguucaccacccggguacggacaaggaccaaaucuuccuguaugcucaagcaucaggaagaaucacaguaucuaccaaaagaagccaacaagcuguaauuccgaauaucggaucuagacccagaguaaggaauaucccuagcagaguaagcaucuauuggacaauaguaaaaccgggagauauacuuuugauuaacagcacagggaaucuaauugcuccuagggguuacuucaaaauacgaagugggaaaagcucaauaaugaaaucagaugcacccauuggcaaaugcaauucugcaugcaucacuccaaauggaagcauucccaaugacaaaccauuccaaaauguaaacaggaucacauacggggccugucccagauauguuaagcaaaacacucugaaauuggcaacaggaaugcgaaauguaccagagaaacaaacuagaggcauauuuggcgcaauagcggguuucauagaaaaugguugggagggaaugguagaugguugguacgguuucaggcaucaaaauucugagggaaggggacaagcagcagaucucaaaagcacucaagcagcaaucgaucaaaucaaugggaagcugaauagauugaucgggaaaaccaacgagaaauuccaucagauugaaaaagaauucucggaagucgaagggagaauucaggaccuugagaaauauguugaggacacuaaaauagaucucuggucauacaacgcggagcuucuuguugcccuggagaaccaacacacaauugaucuaacugacucagaaaugaacaaacuguuugaaaaaacaaagaagcaacugagggaaaaugcugaggauaugggcaaugguuguuucaaaauauaccacaaaugugacaaugccugcauaggaucgaucagaaauggaacuuaugaccacgauguguacagagaugaagcauuaaacaaccgauuccagaucaagggaguugagcugaagucaggguacaaagauuggauccuauggauuuccuuugccauaucauguuuuuugcuuuguguugcucuguugggguucaucaugugggccugccaaaaaggcaacauuaggugcaacauuugcauuuga

SEQ ID NO: 39769 - RNA, 1701 nt, Artificial Sequence
  derived and/or modified CDS sequence (wt) from hemagglutinin__InfluenzaA__AER08672
augaagacuaucauugcuuugagcuacauucuauguuugguuuucgcucaaaaacuuccuggaaaugacaacagcacggcaacgcugugccuugggcaccaugcaguaccaaacggaacgauagugaaaacaaucacgaaugaccaaauugaaguuacuaaugcuacugagcugguucagaguuccucaacagguggaauaugcgacaguccucaucagauccuugauggaggaaacugcacacuaauagaugcucuauugggagacccucagugugauggcuuccaaaauaagaaaugggaccuuuuuguugaacgaagcaaagccuacagcaacuguuacccuuaugaugugccggauuaugccucccuuaggucacuaguugccucauccggcacacuggaguuuaacagugaaagcuucaauuggacuggagucacucaaaacggaacaagcucugcuugcauaaggagaucuaauaauaguuucuuuaguagauugaauugguugacccacuuaaacuucaaauacccagcauugaacgugacuaugccaaacaaugaacaauuugacaaauuguacauuugggggguucaccacccggguacggacaaggaccaaaucuuccuguaugcucaagcaucaggaagaaucacaguaucuaccaaaagaagccaacaagcuguaaucccgaauaucggaucuagacccagaguaaggaauaucccuagcagaauaagcaucuauuggacaauaguaaaaccgggagacauacuuuugauuaacagcacagggaaucuaauugcuccuagggguuacuucaaaauacgaagugggaaaagcucaauaaugagaucagaugcacccauuggcaaaugcaauucugaaugcaucacuccaaauggaagcauucccaaugacaaaccauuccaaaauguaaacaggaucacauacggggccugucccagauauguuaagcaaagcacucugaaauuggcaacaggaaugcgaaauguaccagagaaacaaacuagaggcauauuuggcgcaauagcggguuucauagaaaaugguugggagggaaugguggaugguugguacgguuucaggcaucaaaauucugagggaagaggacaagcagcagaucucaaaagcacucaagcagcaaucgaucaaaucaaugggaagcugaauagauugaucgggaaaaccaacgagaaauuccaucagauugaaaaagaauucucagaagucgaagggagaauucaggaccuugagaaauauguugaggacacuaaaauagaucucuggucauacaacgcggagcuucuuguugcccuugagaaccaacauacaauugaucuaacugacucagaaaugaacaaacuguuugaaaaaacaaagaaacaacugagggaaaaugcugaggauaugggcaaugguuguuucaaaauauaccacaaaugugacaaugccugcauaggaucaaucagaaauggaacuuaugaccacgauguauacagagaugaagcauuaaacaaccgguuccagaucaagggaguugagcugaagucaggguacaaagauuggauccuauggauuuccuuugccauaucauguuuuuugcuuuguguugcuuuguugggguucaucaugugggccugccaaaaaggcaacauuaggugcaacauuugcauuuga

SEQ ID NO: 39770 - RNA, 1701 nt, Artificial Sequence
  derived and/or modified CDS sequence (wt) from hemagglutinin__InfluenzaA__AER08674
augaagacuaucauugcuuugagcuacauucuaugucugguuuucgcucaaaaacuuccuggaaaugacaacagcacggcaacgcugugccuugggcaccaugcagugccaaacggaacgauggugaaaacaaucacgaaugaccaaauugaaguuacuaaugcuacugagcugguucagaguuccucaacaggugaaauaugcaacaguccucaucagauccuugauggagaaaacugcacacuaauagaugcucuauugggagacccucagugugauggcuuccaaaacaagaaaugggaccuuuuuguugaacgaagcaaagcccacagcaacuguuacccuuaugaugugccggauuaugccucccuuaggucacuaguugccucauccggcacacuggaguuuaacaaugaaagcuucaauuggacuggagucacucaaaacggaacaagcucugcuugcauaaggagaucuaauaauaguuucuuuaguagauugaauugguugacccacuugaacuucaaauacccagcauugaacgugacuaugccaaacaaugaacaauuugacaaauuguacauuugggggguucaccacccggguacggacaaggaccaaaucuuccuguaugcucaagcaucaggaagaaucacaguaucuaccaaaagaagccaacaagcuguaauuccgaauaucggaucuagacccagaguaaggaauaucccuagcagaguaagcaucuauuggacaauaguaaaaccgggagauauacuuuugauuaacagcacagggaaucuaauugcuccuagggguuacuucaaaauacgaagugggaaaagcucaauaaugagaucagaugcacccauuggcaaaugcaauucugcaugcaucacuccaaauggaagcauucccaaugacaaaccauuccaaaauguaaacaggaucacauacggggccugucccagauauguuaagcaaaacacucugaaauuggcaacaggaaugcgaaauguaccagagaaacaaacuagaggcauauuuggcgcaauagcggguuucauagaaaaugguugggagggaaugguggaugguugguacgguuucaggcaucaaaauucugagggaaggggacaagcagcagaucucaaaagcacucaagcagcaaucgaucaaaucaaugggaagcugaauagauugaucgggaaaaccaacgagaaauuucaucagauugaaaaagaauucucagaagucgaagggagaauucaggaccuugagaaauauguugaggacacuaaaauagaucucuggucauacaacgcggagcuucuuguugcccuggagaaccaacacacaauugaucuaacugacucagaaaugaacaaacuguuugaaaaaacaaagaagcaacugagggaaaaugcugaggauaugggcaaugguuguuucaaaauauaccacaaaugugacaaugccugcauaggaucaaucagaaauggaacuuaugaccacgauguguacagagaugaagcauuaaacaaccgauuccagaucaagggaguugagcugaagucaggguacaaagauuggauccuauggauuuccuuugccauaucauguuuuuugcuuuguguugcuuuguugggguucaucaugugggccugccaaaaaggcaacauuaggugcaacauuugcauuuga

SEQ ID NO: 39771 - RNA, 1701 nt, Artificial Sequence
  derived and/or modified CDS sequence (wt) from hemagglutinin__InfluenzaA__AER08676
augaagacuaucauugcuuugagcuacauucuaugucugguuuucgcucaaaaacuuccuggaaaugacaacagcacggcaacgcugugccuugggcaccaugcagugccaaacggaacgauagugaaaacaaucacgaaugaccaaauugaaguuacuaaugcuacugagcugguucagaguuccucaacaggugaaauaugcaacaguccucaucagauccuugauggagaaaacugcacacuaauagaugcucuauugggagacccucagugugauggcuuccaaaacaagaaaugggaccuuuuuguugaacgaagcaaagcccacagcaacuguuacccuuaugaugugccggauuaugccucccuuaggucacuaguugccucauccggcacacuggaguuuaacaaugaaagcuucaauuggacuggagucacucaaaacggaacaagcucugcuugcauaaggagaucuaauaauaguuucuuuaguagauugaauugguugacccacuuaaacuucaaauacccagcauugaacgugacuaugccaaacaaugaacaauuugacaaauuguacauuugggggguucaccacccggguacggacaaggaccaaaucuuccuguaugcucaagcaucaggaagaaucacaguaucuaccaaaagaagccaacaagcuguaauuccgaauaucggaucuagacccagaguaaggaauaucccuagcagaguaagcaucuauuggacaauaguaaaaccgggagacauacuuuugauuaacagcacagggaaucuaauugcuccuagggguuacuucaaaauacgaagugggaaaagcucaauaaugagaucagaugcacccauuggcaaaugcaauucugcaugcaucacuccaaauggaagcauucccaaugacaaaccauuccaaaauguaaacaggaucacauacggggccugucccagauauguuaagcaaaacacucugaaauuggcaacaggaaugagaaauguaccagagaaacaaacuagaggcauauucggcgcaauagcggguuucauagaaaaugguugggagggaaugguggaugguugguacgguuucaggcaucaaaauucugagggaaggggacaagcagcagaucucaaaagcacucaagcagcaaucgaucaaaucaaugggaagcugaauagauugaucgggaaaaccaacgagaaauuccaucagauugaaaaagaauucucagaagucgaagggagaauucaggaccuugagaaauauguugaggacacuaaaauagaucucuggucauacaacgcggagcuucuuguugcccuggagaaccaacacacaauugaucuaacugacucagaaaugaacaaacuguuugaaaaaacaaagaagcaacugagggaaaaugcugaggauaugggcaaugguuguuucaaaauauaccacaaaugugacaaugccugcauaggaucaaucagaaauggaacuuaugaccacgauguguacagagaugaagcauuaaacaaccgauuccagaucaagggaguugagcugaagucaggguacaaagauuggauccuauggauuuccuuugccauaucauguuuuuugcuuuguguugcuuuguugggguucaucaugugggccugccaaaaaggcaacauuaggugcaacauuugcauuuga

SEQ ID NO: 39772 - RNA, 1701 nt, Artificial Sequence
  derived and/or modified CDS sequence (wt) from hemagglutinin__InfluenzaA__AER08678
augaagaccaucauugcuuugagcuacauucuaugucugguuuucgcucaaaaacuuccuggaaaugacaacagcacggcaacgcugugccuugggcaccaugcagugccaaacggaacgauagugaaaacaaucacgaaugaccaaauugaaguuacuaaugcuacugagcugguucagaguuccucaacaggugaaauaugcaacaguccucaucagauccuugauggagaaaacugcacacuaauagaugcucuauugggagacccucagugugauggcuuccaaaacaagaaaugggaccuuuuuguugaacgaagcaaagcccacagcaacuguuacccuuaugaugugccggauuaugccucccuuaggucacuaguugccucauccggcacacuggaguuuaacaaugaaagcuucaauuggacuggagucacucaaaacggaacaagcucugcuugcauaaggagaucuaauaauaguuucuuuaguagauugaauugguugacccacuuaaacuucaaauacccagcauugaacgugacuaugccaaacaaugaacaauuugacaaauuguacauuugggggguucaccacccggguacggacaaggaccaaaucuuccuguaugcucaagcaucaggaagaaucacaguaucuaccaaaagaagccaacaagcuguaauuccgaauaucggaucuagacccagaguaaggaauaucccuagcagaguaagcaucuauuggacaauaguaaaaccgggagacauacuuuugauuaacagcacagggaaucuaauugcuccuagggguuacuucaaaauacgaagugggaaaagcucaauaaugagaucagaugcacccauuggcaaaugcaauucugcaugcaucacuccaaauggaagcauucccaaugacaaaccauuccaaaauguaaacaggaucacauacggggccugucccagauauguuaagcaaaacacucugaaauuggcaacaggaaugagaaauguaccagagaaacaaacuagaggcauauuuggcgcaauagcggguuucauagaaaaugguugggagggaaugguggaugguugguacgguuucaggcaucaaaauucugagggaaggggacaagcagcagaucucaaaagcacucaagcagcaaucgaucaaaucaaugggaagcugaauagauugaucgggaaaaccaacgagaaauuccaucagauugaaaaagaauucucagaagucgaagggagaauucaggaccuugagaaauauguugaggacacuaaaauagaucucuggucauacaacgcggagcuucuuguugcccuggagaaccaacacacaauugaucuaacugacucagaaaugaacaaacuguuugaaaaaacaaagaagcaacugagggaaaaugcugaggauaugggcaaugguuguuucaaaauauaccacaaaugugacaaugccugcauaggaucaaucagaaauggaacuuaugaccacgauguguacagagaugaagcauuaaacaaccgauuccagaucaagggaguugagcugaagucaggguacaaagauuggauccuauggauuuccuuugccauaucauguuuuuugcuuuguguugcuuuguugggguucaucaugugggccugccaaaaaggcaacauuaggugcaacauuugcauuuga

SEQ ID NO: 39773 - RNA, 1701 nt, Artificial Sequence
  derived and/or modified CDS sequence (wt) from hemagglutinin__InfluenzaA__AER08680
augaagacuaucauugcuuugagcuacauucuaugucugguuuucgcccaaaaacuuccuggaaaugacaacagcacggcaacgcugugccuugggcaccaugcaguaccaaacggaacgauagugaaaacaaucacgaaugaccaaauugaaguuacuaaugcuacugagcugguucagaguuccucagcaggugaaauaugcgacaguccucaucagauccuugauggagaaaacugcacacuaauagaugcucuauugggagacccucagugugauggcuuccaaaauaagaaaugggaccuuuuuguugaacgaagcagagcccacagcaacuguuacccuuaugaugugccggauuaugccucccuuaggucacuaguugccucauccggcacacuggaguuuaacaaugaaagcuucaauuggacuggagucacucaaaacggaacaagcucugcuugcauaaggagaucuaauaauaguuucuuuaguagauugaauugguugacccacuuaaacuucaaauacccagcauugaacgugacuaugccaaacaaugaacaauuugacaaauuguacauuugggggguucaccacccggguacggacaaggaccaaaucuuccuguaugcucaagcaucaggaagaaucacaguaucuaccaaaagaagccaacaagcuguaaucccgaauaucggaucuagacccagaguaaggaauaucccuagcagaauaagcaucuauuggacaauaguaaaaccgggagacauacuuuugauuaacagcacagggaaucuaauugcuccuagggguuacuucaaaauacgaagugggaaaagcucaauaaugagaucagaugcacccauuggcaaaugcaauucugaaugcaucacuccaaauggaagcauucccaaugacaaaccauuccaaaauguaaacaggaucacauacggggccugucccagauauguuaagcaaagcacucugaaauuggcaacaggaaugcgaaauguaccagagaaacaaacuagaggcauauuuggcgcaauagcggguuucauagaaaaugguugggagggaaugauggaugguugguacgguuucaggcaucaaaauucugagggaagaggacaagcagcagaucucaaaagcacucaagcagcaaucgaucaaaucaauggaaagcugaauagauugaucgggaaaaccaacgagaaauuccaucagauugaaaaagaauucucagaagucgaagggagaauucaggaucuugagaaauauguugaggacacuaaaauagaucucuggucauacaacgcggagcuucuuguugcccuggagaaccaacauacaauugaucuaacugacucagaaaugaacaaacuguuugaaaaaacaaagaagcaacugagggaaaaugcugaggauaugggcaaugguuguuucaaaauauaccacaaaugugacaaugccugcauaggaucaaucagaaauggaacuuaugaccacgauguauacagagaugaagcauuaaacaaccgguuccagaucaagggaguugagcugaagucaggguacaaagauuggauccuauggauuuccuuugccauaucauguuuuuugcuuuguguugcuuuguugggguucaucaugugggccugccaaaaaggcaacauuaggugcaacauuugcauuuga

SEQ ID NO: 39774 - RNA, 1701 nt, Artificial Sequence
  derived and/or modified CDS sequence (wt) from hemagglutinin__InfluenzaA__AER08682
augaagacugucauugcuuugagcuacauucuaugucugguuuucgcucaaaaacuuccuggaaaugacaacagcacggcaacgcugugccuugggcaccaugcagugccaaacggaacgauagugaaaacaaucacgaaugaccaaauugaaguuacuaaugcuacugagcugguucagaguuccucaacaggugaaauaugcaacaguccucaucagauccuugauggagaaaacugcacacuaauagaugcucuauugggagacccucagugugauggcuuccaaaacaagaaaugggaccuuuuuguugaacgaagcaaagcccacagcaacuguuacccuuaugaugugccggauuaugccucccuuaggucacuaguugccucauccggcacacuggaguuuaacaaugaaagcuucaauuggacuggagucacucaaaacggaacaagcucugcuugcauaaggagaucuaauaauaguuucuuuaguagauugaauugguugacccacuuaaacuucaaauacccagcauugaacgugacuaugccaaacaaugaacaauuugacaaauuguacauuugggggguucaccacccggguacggacaaggaccaaaucuuccuguaugcucaagcaucaggaagaaucacaguaucuaccaaaagaagccaacaagcuguaauuccgaauaucggaucuagacccagaguaaggaauaucccuagcagaguaagcaucuauuggacaauaguaaaaccgggagacauacuuuugauuaacagcacagggaaucuaauugcuccuagggguuacuucaaaauacgaagugggaaaagcucaauaaugagaucagaugcacccauuggcaaaugcaauucugcaugcaucacuccaaauggaagcauucccaaugacaaaccauuccaaaauguaaacaggaucacauacggggccugucccagauauguuaagcaaaacacucugaaauuggcaacaggaaugagaaauguaccagagaaacaaacuagaggcauauuuggcgcaauagcggguuucauagaaaaugguugggagggaaugguggaugguugguacgguuucaggcaucaaaauucugagggaaggggacaagcagcagaucucaaaagcacucaagcagcaaucgaucaaaucaaugggaagcugaauagauugaucgggaaaaccaacgagaaauuccaucagauugaaaaagaauucucagaagucgaagggagaauucaggaccuugagaaauauguugaggacacuaaaauagaucucuggucauacaacgcggagcuucuuguugcccuggagaaccaacacacaauugaucuaacugacucagaaaugaacaaacuguuugaaaaaacaaagaagcaacugagggaaaaugcugaggauaugggcaaugguuguuucaaaauauaccacaaaugugacaaugccugcauaggaucaaucagaaauggaacuuaugaccacgauguguacagagaugaagcauuaaacaaccgauuccagaucaagggaguugagcugaagucaggguacaaagauuggauccuauggauuuccuuugccauaucauguuuuuugcuuuguguugcuuuguugggguucaucaugugggccugccaaaaaggcaacauuaggugcaacauuugcauuuga

SEQ ID NO: 39775 - RNA, 1701 nt, Artificial Sequence
  derived and/or modified CDS sequence (wt) from hemagglutinin__InfluenzaA__AER08684
augaagacuaucauugcuuugagcuacauucuaugucugguuuucgcucaaaaacuuccuggaaaugacaacagcacggcaacgcugugccuugggcaccaugcagugccaaacggaacgauagugaaaacaaucacgaaugaccaaauugaaguuacuaaugcuacugagcugguucagaguuccucaacaggugaaauaugcaacaguccucaucagauccuugauggagaaaacugcacacuaauagaugcucuauugggagacccucagugugauggcuuccaaaacaagaaaugggaccuuuuuguugaacgaagcaaagcccacagcaacuguuacccuuaugaugugccggauuaugccucccuuaggucacuaguugccucauccggcacacuggaguuuaacaaugaaagcuucaauuggacuggagucacucaaaacggaacaagcucugcuugcauaaggagaucuaauaauaguuucuuuaguagauuaaauugguugacccacuuaaacuucaaauacccagcauugaacgugacuaugccaaacaaugaacaauuugacaaauuauacauuugggggguucaccacccggguacggacaaggaccaaaucuuccuguaugcucaagcaucaggaagaaucacaguaucuaccaaaagaagccaacaagcuguaauuccgaauaucggaucuagacccagaguaaggaauaucccuagcagaguaagcaucuauuggacaauaguaaaaccgggagacauacuuuugauuaacagcacagggaaucuaauugcuccuagggguuacuucaaaauacgaagugggaaaagcucaauaaugagaucagaugcacccauuggcaaaugcaauucuacaugcaucacuccaaauggaagcauucccaaugacaaaccauuccaaaauguaaacaggaucacauacggggccugucccagauauguuaagcaaaacacucugaaauuggcaacaggaaugagaaauguaccagagaaacaaacuagaggcauauuuggcgcaauagcggguuucauagaaaaugguugggagggaaugguggaugguugguacgguuucaggcaucaaaauucugagggaaggggacaagcagcagaucucaaaagcacucaagcagcaaucgaucaaaucaaugggaagcugaauagauugaucgggaaaaccaacgagaaauuccaucagauugaaaaagaauucucagaagucgaagggagaauucaggaccuugagaaauauguugaggacacuaaaauagaucucuggucauacaacgcggaacuucuuguugcccuggagaaccaacacacaauugaucuaacugacucagaaaugaacaaacuguuugaaaaaacaaagaagcaacugagggaaaaugcugaggauaugggcaaugguuguuucaaaauauaccacaaaugugacaaugccugcauaggaucaaucagaaauggaacuuaugaccacgauguguacagagaugaagcauuaaacaaccgauuccagaucaagggaguugagcugaagucaggguacaaagauuggauccuauggauuuccuuugccauaucauguuuuuugcuuuguguugcuuuguugggguucaucaugugggccugccaaaaaggcaacauuaggugcaacauuugcauuuga

SEQ ID NO: 39776 - RNA, 1701 nt, Artificial Sequence
  derived and/or modified CDS sequence (wt) from hemagglutinin__InfluenzaA__AER08686
augaagacuaucauugcuuugagcuacauucuaugucugguuuucgcucaaaaacuuccuggaaaugacaacagcacggcaacgcugugccuugggcaccaugcagugccaaacggaacgauagugaaaacaaucacgaaugaccaaauugaaguuacuaaugcuacugagcugguucagaguuccucaacaggugaaauaugcaacaguccucaucagauccuugauggagaaaacugcacacuaauagaugcucuauugggagacccucagugugauggcuuccaaaacaagaaaugggaccuuuuuguugaacgaagcaaagcccacagcaacuguuacccuuaugaugugccggauuaugccucccuuaggucacuaguugccucauccggcacacuggaguuuaacaaugaaagcuucaauuggacuggagucacucaaaacggaacaagcucugcuugcauaaggagaucuaauaauaguuucuuuaguagauugaauugguugacccacuuaaacuucaaauacccagcauugaacgugacuaugccaaacaaugaacaauuugacaaauuauacauuugggggguucaccacccggguacggacaaggaccaaaucuuccuguaugcucaagcaucaggaagaaucacaguaucuaccaaaagaagccaacaagcuguaauuccgaauaucggaucuagacccagaguaaggaauaucccuagcagaguaagcaucuauuggacaauaguaaaaccgggagacauacuuuugauuaacagcacagggaaucuaauugcuccuagggguuacuucaaaauacgaagugggaaaagcucaauaaugagaucagaugcacccauuggcaaaugcaauucuacaugcaucacuccaaauggaagcauucccaaugacaaaccauuccaaaauguaaacaggaucacauacggggccugucccagauauguuaagcaaaacacucugaaauuggcaacaggaaugagaaauguaccagagaaacaaacuagaggcauauuuggcgcaauagcggguuucauagaaaaugguugggagggaaugguggaugguugguacgguuucaggcaucaaaauucugagggaaggggacaagcagcagaucucaaaagcacucaagcagcaaucgaucaaaucaaugggaagcugaauagauugaucgggaaaaccaacgagaaauuccaucagauugaaaaagaauucucagaagucgaagggagaauucaggaccuugagaaauauauugaggacacuaaaauagaucucuggucauacaacgcggagcuucuuguugcccuggagaaccaacacacaauugaucuaacugacucagaaaugaacaaacuguuugaaaaaacaaagaagcaacugagggaaaaugcugaggauaugggcaaugguuguuucaaaauauaccacaaaugugacaaugccugcauaggaucaaucagaaauggaacuuaugaccacgauguguacagagaugaagcauuaaacaaccgauuccagaucaagggaguugagcugaagucaggguacaaagauuggauccuauggauuuccuuugccauaucauguuuuuugcuuuguguugcuuuguugggguucaucaugugggccugccaaaaaggcaacauuaggugcaacauuugcauuuga

SEQ ID NO: 39777 - RNA, 1701 nt, Artificial Sequence
  derived and/or modified CDS sequence (wt) from hemagglutinin__InfluenzaA__AER08688
augaagacuaucauugcuuugagcuacauucuaugucugguuuucgcucaaaaacuuccuggaaaugacaacagcacggcaacgcugugccuugggcaccaugcagugccaaacggaacgauagugaaaacaaucacgaaugaccaaauugaaguuacuaaugcuacugagcugguucagaguuccucaacaggugaaauaugcaacaguccucaucagauccuugauggagaaaacugcacacuaauagaugcucuauugggagacccucagugugauggcuuccaaaacaagaaaugggaccuuuuuguugaacgaagcaaagcccacagcaacuguuacccuuaugaugugccggauuaugccucccuuaggucacuaguugccucauccggcacacuggaguuuaacaaugaaagcuucaauuggacuggagucacucaaaacggaacaagcucugcuugcauaaggagaucuaauaauaguuucuuuaguagauugaauugguugacccacuuaaacuucaaauacccagcauugaacgugacuaugccaaacaaugaacaauuugacaaauuguacauuugggggguucaccacccggguacggacaaggaccaaaucuuccuguaugcucaagcaucaggaagaaucacaguaucuaccaaaagaagccaacaagcuguaauuccgaauaucggaucuagacccagaguaaggaauaucccuagcagaguaagcaucuauuggacaauaguaaaaccgggagacauacuuuugauuaacagcacagggaaucuaauugcuccuagggguuacuucaaaauacgaagugggaaaagcucaauaaugagaucagaugcacccauuggcaaaugcaauucugcaugcaucacuccaaauggaagcauucccaaugacaaaccauuccaaaauguaaacaggaucacauacggggccugucccagauauguuaagcaaaacacucugaaauuggcaacaggaaugagaaauguaccagagaaacaaacuagaggcauauuuggcgcaauagcggguuucauagaaaaugguugggagggaaugguggaugguugguacgguuucaggcaucaaaauucugagggaaggggacaagcagcagaucucaaaagcacucaagcagcaaucgaucaaaucaaugggaagcugaauagauugaucgggaaaaccaacgagaaauuccaucagauugaaaaagaguucucagaagucgaagggagaauucaggaccuugagaaauauguugaggacacuaaaauagaucucuggucauacaacgcggagcuucuuguugcccuggagaaccaacacacaauugaucuaacugacucagaaaugaacaaacuguuugaaaaaacaaagaagcaacugagggaaaaugcugaggauaugggcaaugguuguuucaaaauauaccacaaaugugacaaugccugcauaggaucaaucagaaauggaacuuaugaccacgauguguacagagaugaagcauuaaacaaccgauuccagaucaagggaguugagcugaagucaggguacaaagauuggauccuauggauuuccuuugccauaucauguuuuuugcuuuguguugcuuuguugggguucaucaugugggccugccaaaaaggcaacauuaggugcaacauuugcauuuga

SEQ ID NO: 39778 - RNA, 1701 nt, Artificial Sequence
  derived and/or modified CDS sequence (wt) from hemagglutinin__InfluenzaA__AER08690
augaagacuaucauugcuuugagcuacauucuaugucugguuuucgcucaaaaacuuccugaaaaugacaacagcacggcaacgcugugccuugggcaccaugcagugccaaacggaacgauagugaaaacaaucacgaaugaccaaauugaaguuacuaaugcuacugagcugguucagaguuccucaacaggugaaauaugcaacaguccucaucagauccuugauggagaaaacugcacacuaauagaugcucuauugggagacccucagugugauggcuuccaaaacaagaaaugggaccuuuuuguugaacgaagcaaagcccacagcaacuguuacccuuaugaugugccggauuaugccucccuuaggucacuaguugccucauccggcacacuggaguuuaacaaugaaagcuucaauuggacuggagucacucaaaacggaacaagcucugcuugcauaaggagaucuaauaauaguuucuuuaguagauugaauugguugacccacuuaaacuucaaauacccagcauugaacgugacuaugccaaacaaugaacaauuugacaaauuauacauuugggggguucaccacccggguacggacaaggaccaaaucuuccuguaugcucaagcaucaggaagaaucacaguaucuaccaaaagaagccaacaagcuguaauuccgaauaucggaucuagacccagaguaaggaauaucccuagcagaguaagcaucuauuggacaauaguaaaaccgggagacauacuuuugaucaacagcacagggaaucuaauugcuccuagggguuacuucaaaauacgaagugggaaaagcucaauaaugagaucagaugcacccauuggcaaaugcaauucuacaugcaucacuccaaauggaagcauucccaaugacaaaccauuccaaaauguaaacaggaucacauacggggccugucccagauauguuaagcaaaacacucugaaauuggcaacaggaaugagaaauguaccagagaaacaaacuagaggcauauuuggcgcaauagcggguuucauagaaaaugguugggagggaaugguggaugguugguacgguuucaggcaucaaaauucugagggaaggggacaagcagcagaucucaaaagcacucaagcagcaaucgaucaaaucaaugggaagcugaauagauugaucgggaaaaccaacgagaaauuccaucagauugaaaaagaauucucagaagucgaagggagaauucaggaccuugagaaauauguugaggacacuaaaauagaucucuggucauacaacgcggagcuucuuguugcccuggagaaccaacacacaauugaucuaacugacucagaaaugaacaaacuguuugaaaaaacaaagaagcaacugagggaaaaugcugaggauaugggcaaugguuguuucaaaauauaccacaaaugugacaaugccugcauaggaucaaucagaaauggaaccuaugaccacgauguguacagagaugaagcauuaaacaaccgauuccagaucaagggaguugagcugaagucaggguacaaagauuggauccuauggauuuccuuugccauaucauguuuuuugcuuuguguuguuuuguugggguucaucaugugggccugccaaaaaggcaacauuaggugcaacauuugcauuuga

SEQ ID NO: 39779 - RNA, 1701 nt, Artificial Sequence
  derived and/or modified CDS sequence (wt) from hemagglutinin__InfluenzaA__AER08692
augaagacuaucauugcuuugagcuacauucuaugucugguuuucgcucaaaaacuuccuggaaaugacaacagcacggcaacgcugugccuugggcaccaugcagugccaaacggaacgauagugaaaacaaucacgaaugaccaaauugaaguuacuaaugcuacugagcugguucagaguuccucaacaggugaaauaugcaacaguccccaucagauccuugauggagaaaacugcacacuaauagaugcucuauugggagacccucagugugauggcuuccaaaacaagaaaugggaccuuuuuguugaacgaagcaaagcccacagcaacuguuacccuuaugaugugccggauuaugccucccuuaggucacuaguugccucauccggcacacuggaguuuaacaaugaaagcuucaauuggacuggagucacucaaaacggaacaagcucugcuugcauaaggagaucuaauaauaguuucuuuaguagauugaauugguugacccacuuaaacuucaaauacccagcauugaacgugacuaugccaaacaaugaacaauuugacaaauuguacauuugggggguucaccacccggguacggacaaggaccaaaucuuccuguaugcucaagcaucaggaagaaucacaguaucuaccaaaagaagccaacaagcuguaauuccgaauaucggaucuagacccagaguaaggaauaucccuagcagaguaagcaucuauuggacaauaguaaaaccgggagacauacuuuugauuaacagcacagggaaucuaauugcuccuagggguuacuucaaaauacgaagugggaaaagcucaauaaugagaucagaugcacccauuggcaaaugcaauucugcaugcaucacuccaaauggaagcauucccaaugacaaaccauuccaaaauguaaacaggaucacauacggggcaugucccagauauguuaagcaaaacacucugaaauuggcaacaggaaugagaaauguaccagagaaacaaacuagaggcauauuuggcgcaauagcggguuucauagaaaaugguugggagggaaugguggaugguugguacgguuucaggcaucaaaauucugagggaaggggacaagcagcagaucucaaaagcacucaagcagcaaucgaucaaaucaaugggaagcugaauagauugaucgggaaaaccaacgagaaauuccaucagauugaaaaagaauucucagaagucgaagggagaauucaggaccuugagaaauauguugaggacacuaaaauagaucucuggucauacaacgcggagcuucuuguugcccuggagaaccaacacacaauugaucuaacugacucagaaaugaacaaacuguuugaaaaaacaaagaagcaacugagggaaaaugcugaggauaugggcaaugguuguuucaaaauauaccacaaaugugacaaugccugcauaggaucaaucagaaauggaacuuaugaccacgauguguacagagaugaagcauuaaacaaccgauuccagaucaagggaguugagcugaagucaggguacaaagauuggauccuauggauuuccuuugccauaucauguuuuuugcuuuguguugcuuuguugggguucaucaugugggccugccaaaaaggcaacauuaggugcaacauuugcauuuga

SEQ ID NO: 39780 - RNA, 1701 nt, Artificial Sequence
  derived and/or modified CDS sequence (wt) from hemagglutinin__InfluenzaA__AER08698
augaagacuaccauugcuuugagccacauucuaugucugguuuucgcucaaaaacuuccuggaaaugacaacagcacggcaacgcugugccuugggcaccaugcaguaccaaacggaacgauagugaaaacaaucacgaaugaccaaauugaaguuacuaaugcuacugagcugguucagagcuccucagcaggugaaauaugcgacaguccucaucagauccuugauggagaaaacugcacacuaauagaugcucuauugggagacccucagugugauggcuuccaaaauaagaaaugggaccuuuuuguugaacgaagcagagccuacagcaacuguuacccuuaugaugugccggauuaugccucccuuaggucacuaguugccucauccggcacacuggaguuuaacaaugaaagcuucaauuggacuggagucacucaaaacggaacaagcucugcuugcauaaggagaucuaauaauaguuucuuuaguagauugaauugguugacccacuuaaacuucaaauacccagcauugaacgugacuaugccaaacaaugaacaauuugacaaauuguacauuugggggguucaccacccggguacggacaaggaccaaaucuuccuguaugcucaagcaucaggaagaaucacaguaucuaccaaaagaagccaacaagcuguaaucccgaauaucggaucuagacccagaguaaggaauaucccuagcagaauaagcaucuauuggacaauaguaaaaccgggagacauacuuuugauuaacagcacagggaaucuaauugcuccuagggguuacuucaaaauacgaagugggaaaagcucaauaaugagaucagaugcacccauuggcaaaugcaauucugaaugcaucacuccaaauggaagcauucccaaugacaaaccauuccaaaauguaaacaggaucacauacggggccugucccagauauguuaagcaaagcacucugaaauuggcaacaggaaugcgaaauguaccagagaaacaaacuagaggcauauuuggcgcaauagcggguuucauagaaaaugguugggagggaaugguggaugguugguacgguuucaggcaucaaaauucugagggaagaggacaagcagcagaucucaaaagcacucaagcagcaaucgaucaaaucaauggaaagcugaauagauugaucgggaaaaccaacgagaaauuccaucagauugaaaaagaauucucagaagucgaagggagaauucaggaccuugagaaauauguugaggacacuaaaauagaucucuggucauacaacgcggagcuucuuguugcccuggagaaccaacauacaauugaucuaacugacucagaaaugaacaaacuguuugaaaaaacaaagaagcaacugagggaaaaugcugaggauaugggcaaugguuguuucaaaauauaccacaaaugugacaaugccugcauaggaucaaucagaaauggaacuuaugaccacgauguauacagagaugaagcauuaaacaaccgguuccagaucaagggaguugagcugaagucaggguacaaagauuggauccuauggauuuccuuugccauaucauguuuuuugcuuuguguugcuuuguugggguucaucaugugggccugccaaaaaggcaacauuaggugcaacauuugcauuuga

SEQ ID NO: 39781 - RNA, 1701 nt, Artificial Sequence
  derived and/or modified CDS sequence (wt) from hemagglutinin__InfluenzaA__AER08700
augaagacuaucauugcuuugagcuacauucuaugucugguuuucgcucaaaaacuuccuggaaaugacaacagcacggcaacgcugugccuugggcaccaugcagugccaaacggaacgauagugaaaacaaucacgaaugaccaaauugaaguuacuaaugcuacugagcugguucagaguuccucaacaggugaaauaugcaacaguccucaucagauccuugauggagaaaacugcacacuaauagaugcucuauugggagacccucagugugauggcuuccaaaacaagaaaugggaccuuuuuguugaacgaagcaaagcccacagcaacuguuacccuuaugaugugccggauuaugccucccuuaggucacuaguugccucauccggcacacuggaguuuaacaaugaaagcuucaauuggacuggagucacucaaaacggaacaagcucugcuugcauaaggagaucuaauaauaguuucuuuaguagauugaauuggcugacccacuugaacuucaaauacccagcauugaacgugacuaugccaaacaaugaacaauuugacaaauuguacauuugggggguucaccacccggguacggacaaggaccaaaucuuccuguaugcucaagcaucaggaagaaucacaguaucuaccaaaagaagccaacaagcuguaauuccgaauaucggaucuagacccagaguaaggaauaucccuagcagaguaagcaucuauuggacaauaguaaaaccgggagauauacuuuugauuaacagcacagggaaucuaauugcuccuagggguuacuucaaaauacgaagugggaaaagcucaauaaugagaucagaugcacccauuggcaaaugcaauucugcaugcaucacuccaaauggaagcauucccaaugacaaaccauuccaaaauguaaacaggaucacauacggggccugucccagauauguuaaacaaaacacucugaaauuggcaacaggaaugcgaaauguaccagagaaacaaacuagaggcauauuuggcgcaauagcggguuucauagaaaaugguugggagggaaugguggaugguugguacgguuucaggcaucaaaauucugagggaaggggacaagcagcagaucucaaaagcacucaagcagcaaucgaucaaaucaaugggaagcugaauagauugaucgggaaaaccaacgagaaauuccaucagauugaaaaagaauucucagaagucgaagggagaauucaggaccuugagaaauauguugaggacacuaaaauagaucucuggucauacaacgcggagcuucuuguugcccuggagaaccaacacacaauugaucuaacugacucagaaaugaacaaacuguuugaaaaaacaaagaagcaacugagggaaaaugcugaggauaugggcaaugguuguuucaaaauauaccacaaaugugacaaugccugcauaggaucgaucagaaauggaacuuaugaccacgauguguacagagaugaagcauuaaacaaccgauuccagaucaagggaguugagcugaagucaggguacaaagauuggauccuauggauuuccuuugccauaucauguuuuuugcuuuguguugcucuguugggguucaucaugugggccugccaaaaaggcaacauuaggugcaacauuugcauuuga

SEQ ID NO: 39782 - RNA, 1701 nt, Artificial Sequence
  derived and/or modified CDS sequence (wt) from hemagglutinin__InfluenzaA__AER92712
augaaggcaauacuaguaguucugcuauauacauuugcaaccgcaaaugcagacacauuauguauagguuaucaugcgaacaauucaacagacacuguagacacaguacuagaaaagaauguaacaguaacacacucuguugaccuucuagaagacaagcauaacgggaaacuaugcaaacuaagagggguagccccauugcauuuggguaaauguaacauugcuggcuggauccugggaaauccagagugugaaucacucuccacagcaagcucaugguccuacauuguggaaacaucuaauucagacaauggaacguguuacccaggagauuucaucgauuaugaggagcuaagagagcaauugagcucagugucaucauuugaaagguuugaaauauuccccaagacaaguucauggcccaaucaugacucgaacaaagguguaacggcagcauguccucaugcuggagcaaaaagcuucuacaaaaauuuaauauggcuaguuaaaaaaggaaauucauacccaaagcucaacaaauccuacauuaaugauaaaggaaaagaaguccucgugcuauggggcauucaccauccaucuacuaguacugaccaacaaagucucuaucagaaugcagaugcauauguuuuuguggggacaucaagauacagcaagaaguuuaagccggaaauagcaauaagacccaaagugaggaaucaagaagggagaaugaacuauuacuggacacuaguagagccgggagacaaaauaacauucgaagcaacuggaaaucuagugguaccgagauaugcauucacaauugaaagaaaugcuggaucugguauuaucauuucagauacaccaauccacgauugcaauacaacuugucagacacccaagggggcuauaaacaccagccucccauuucagaauauacauccgaucacaauuggaaaguguccaaaauauguaaaaagcacaaaauugcgacuggccacaggauugaggaaugucccgucuauucaaucuagaggccuauuuggggccauugccgguuucauugaagggggguggacaggaaugguagauggaugguacgguuaucaccaucaaaaugagcaggggucaggauaugcagccgaccugaagagcacacagaaugccauugacgagauuacuaacaaaguaaauucuguuauugaaaagaugaauacacaguucacagcaguaggcaaagaguucaaccaccuggaaaaaagaauagagaauuuaaauaaaaaaguugaugaugguuuccuggacauuuggacuuacaaugccgaacuguugguucuauuggaaaaugaaagaacuuuggacuaccacgauucaaaugugaagaacuuauaugaaaagguaagaagccaguuaaaaaacaaugccaaggaaauuggaaacggcugcuuugaauuuuaccacaaaugcgauaacacgugcauggaaagugucaaaaaugggacuuaugacuacccaaaauacucagaggaagcaaaauuaaacagagaagaaauagaugggguaaagcuggaaucaacaaggauuuaccagauuuuggcgaucuauucaacugucgccaguucauugguacugguagucucccugggggcaaucaguuucuggaugugcucuaaugggucucuacaguguagaauauguauuuaa

SEQ ID NO: 39783 - RNA, 1701 nt, Artificial Sequence
  derived and/or modified CDS sequence (wt) from hemagglutinin__InfluenzaA__AET10090
augaagacuaucauugcuuugagcuacauucuaugucugguuuucgcucaaaaacuuccuggaaaugacaacagcacggcaacgcugugccuugggcaccaugcaguaccaaacggaacgauagugaaaacaaucacgaaugaccaaauugaaguuacuaaugcuacugagcugguccagaguuccucaacaggugaaauaugcgacaguccucaucagauccuugauggagaaaacugcacacuaauagaugcucuauugggagacccucagugugauggcuuccaaaauaagaaaugggaccuuuuuguugaacgaagcaaagccuacagcaacuguuacccuuaugaugugccggauuaugccucccuuaggucacuaguugccucauccggcacacuggaguuuaacaaugaaagcuucaauuggacuggagucacucaaaacggaacaagcucugcuugcauaaggagaucuaauaauaguuucuuuaguagauugaauugguugacccacuuaaacuucaaauacccagcauugaacgugacuaugccaaacaaugaacaauuugacaaauuguacauuugggggguucaccacccggguacggacaaggaccaaaucuuccuguaugcucaagcaucaggaagaaucacaguaucuaccaaaagaagccaacaagcuguaaucccgaauaucggaucuagacccagaguaaggaauaucccuagcagaauaagcaucuauuggacaauaguaaaaccgggagacauacuuuugauuaacagcacagggaaucuaauugcuccuagggguuacuucaaaauacgaagugggaaaagcucaauaaugagaucagaugcacccauuggcaaaugcaauucugaaugcaucacuccaaauggaagcauucccaaugacaaaccauuccaaaauguaaacaggaucacauacggggccugucccagauauguuaagcaaagcacucugaaauuggcaacaggaaugcgaaauguaccagagaaacaaacuagaggcauauuuggcgcaauagcggguuucauagaaaaugguugggagggaaugguggaugguugguacgguuucaggcaucaaaauucugagggaagaggacaagcagcagaucucaaaagcacucaagcagcaaucgaucaaaucaaugggaaacugaauagauugaucgggaaaaccaacgagaaauuccaucagauugaaaaagaauucucagaagucgaagggagaauucaggaccuugagaaauauguugaggacacuaaaauagaucucuggucauacaacgcggagcuucuuguugcccuggagaaccaacauacaauugaucuaacugacucagaaaugaacaaacuguuugaaaaaacaaagaagcaacugagggaaaaugcugaggauaugggcaaugguuguuucacaauauaccacaaaugugacaaugccugcauaggaucaaucagaaauggaacuuaugaccacaauguauacagagaugaagcauuaaacaaccgguuccagaucaagggaguugagcugaagucaggguacaaagauuggauccuauggauuuccuuugccauaucauguuuuuugcuuuguguugcuuuguugggguucaucaugugggccugccaaaaaggcaacauuaggugcaacauuugcauuuga

SEQ ID NO: 39784 - RNA, 1701 nt, Artificial Sequence
  derived and/or modified CDS sequence (wt) from hemagglutinin__InfluenzaA__AET10091
augaagacuaucauugcuuugagcuacauucuaugucugguuuucgcucaaaaacuuccuggaaaugacaacagcacggcaacgcugugccuugggcaccaugcaguaccaaacggaacgauagugaaaacaaucacgaaugaccaaauugaaguuacuaaugcuacugagcugguccagaguuccucaacaggugaaauaugcgacaguccucaucagauccuugauggagaaaacugcacacuaauagaugcucuauugggagacccucagugugauggcuuccaaaauaagaaaugggaccuuuuuguugaacgaagcaaagccuacagcaacuguuacccuuaugaugugccagauuaugccucccuuaggucacuaguugccucauccggcacacuggaguuuaacaaugaaagcuucaauuggacuggagucacucaaaacggaacaagcucugcuugcauaaggagaucuaauaauaguuucuuuaguagauugaauugguugacccacuuaaacuucaaauacccagcauugaacgugacuaugccaaacaaugaacaauuugacaaauuguacauuugggggguucaccacccggguacggacaaggaccaaaucuuccuguaugcucaagcaucaggaagaaucacaguaucuaccaaaagaagccaacaagcuguaaucccgaauaucggaucuagacccagaguaaggaauaucccuagcagaauaagcaucuauuggacaauaguaaaaccgggagacauacuuuugauuaacagcacagggaaucuaauugcuccuagggguuacuucaaaauacgaagugggaaaagcucaauaaugagaucagaugcacccauuggcaaaugcaauucugaaugcaucacuccaaauggaagcauucccaaugacaaaccauuccaaaauguaaacaggaucacauacggggccugucccagauauguuaagcaaagcacucugaaauuggcaacaggaaugcgaaauguaccagagaaacaaacuagaggcauauuuggcgcaauagcggguuucauagaaaaugguugggagggaaugguggaugguugguacgguuucaggcaucaaaauucugagggaagaggacaagcagcagaucucaaaagcacucaagcagcaaucgaucaaaucaaugggaagcugaauagauugaucgggaaaaccaacgagaaauuccaucagauugaaaaagaauucucagaagucgaagggagaauucaggaccuugagaaauauguugaggacacuaaaauagaucucuggucauacaacgcggagcuucuuguugcccuggagaaccaacauacaauugaucuaacugacucagaaaugaacaaacuguuugaaaaaacaaagaagcaacugagggaaaaugcugaggauaugggcaaugguuguuucacaauauaccacaaaugugacaaugccugcauaggaucaaucagaaauggaacuuaugaccacaauguauacagagaugaagcauuaaacaaccgguuccagaucaagggaguugagcugaagucaggguacaaagauuggauccuauggauuuccuuugccauaucauguuuuuugcuuuguguugcuuuguugggguucaucaugugggccugccaaaaaggcaacauuaggugcaacauuugcauuuga

SEQ ID NO: 39785 - RNA, 1701 nt, Artificial Sequence
  derived and/or modified CDS sequence (wt) from hemagglutinin__InfluenzaA__AET10092
augaagacuaucauugcuuugagcuacauucuaugucugguuuucgcucaaaaacuuccuggaaaugacaacagcacggcaacgcugugccuugggcaccaugcaguaccaaacggaacgauagugaaaacaaucacgaaugaccaaauugaaguuacuaaugcuacugagcugguccagaguuccucaacaggugaaauaugcgacaguccucaucagauccuugauggagaaaacugcacacuaauagaugcucuauugggagacccucagugugauggcuuccaaaauaagaaaugggaccuuuuuguugaacgaagcaaagccuacagcaacuguuacccuuaugaugugccggauuaugccucccuuaggucacuaguugccucauccggcacacuggaguuuaacaaugaaagcuucaauuggacuggagucacucaaaacggaacaagcucugcuugcauaaggagaucuaauaauaguuucuuuaguagauugaauugguugacccacuuaaacuucaaauacccagcauugaacgugacuaugccaaacaaugaacaauuugacaaauuguacauuugggggguucaccacccggguacggacaaggaccaaaucuuccuguaugcucaagcaucaggaagaaucacaguaucuaccaaaagaagccaacaagcuguaaucccgaauaucggaucuagacccagaguaaggaauaucccuagcagaauaagcaucuauuggacaauaguaaaaccgggagacauacuuuugauuaacagcacagggaaucuaauugcuccuagggguuacuucaaaauacgaagugggaaaagcucaauaaugagaucagaugcacccauuggcaaaugcaauucugaaugcaucacuccaaauggaagcauucccaaugacaaaccauuccaaaauguaaacaggaucacauacggggccugucccagauauguuaagcaaagcacucugaaauuggcaacaggaaugcgaaauguaccagagaaacaaacuagaggcauauuuggcgcaauagcggguuucauagaaaaugguugggagggaaugguggaugguugguacgguuucaggcaucaaaauucugagggaagaggacaagcagcagaucucaaaagcacucaagcagcaaucgaucaaaucaaugggaagcugaauagauugaucgggaaaaccaacgagaaauuccaucagauugaaaaagaauucucagaagucgaagggagaauucaggaccuugagaaauauguugaggacacuaaaauagaucucuggucauacaacgcggagcuucuuguugcccuggagaaccaacauacaauugaucuaacugacucagaaaugaacaaacuguuugaaaaaacaaagaagcaacugagggaaaaugcugaggauaugggcaaugguuguuucacaauauaccacaaaugugacaaugccugcauaggaucaaucagaaauggaacuuaugaccacaauguauacagagaugaagcauuaaacaaccgguuccagaucaagggaguugagcugaagucaggguacaaagauuggauccuauggauuuccuuugccauaucauguuuuuugcuuuguguugcuuuguugggguucaucaugugggccugccaaaaaggcaacauuaggugcaacauuugcauuuga

SEQ ID NO: 39786 - RNA, 1701 nt, Artificial Sequence
  derived and/or modified CDS sequence (wt) from hemagglutinin__InfluenzaA__AET10094
augaagacuaucauugcuuugagcugcauucuaugucugguuuucgcucaaaagcuuccuggaaaugacaacagcacggcaacgcugugccuugggcaccaugcaguaccaaacggaacgauagugaaaacaaucacgaaugaccaaauugaaguuacuaaugcuacugagcugguccagaguuccucaacaggugaaauaugugacaguccucaucagauccuugauggagaaaacugcacacuaauagaugcucuauugggagacccucagugugauggcuuccaaaauaagaaaugggaccuuuuuguugaacgaagcaaagccuacagcaguuguuacccuuaugaugugccggauuaugccucccuuaggucacuaguugccucauccggcacacuggaguuuaacaaugaaagcuucaauuggacuggagucacucaaaacggaacaagcucugcuugcauaaggagaucuaauaauaguuucuuuaguagauugaauugguugacccacuuaaacuucaaauacccagcauugaacgugacuaugccaaacaaugaacaauuugacaaauuguacauuugggggguucaccacccggguacggacaaggaccaaaucuuccuguaugcucaagcaucaggaagaaucacaguaucuaccaaaagaagccaacaagcuguaaucccgaauaucggaucuagacccagaguaaggaauaucccuagcagaauaagcaucuauuggacaauaguaaaaccgggagacauacuuuugauuaacagcacagggaaucuaauugcuccuagggguuacuucaaaauacgaagugggaaaagcucaauaaugagaucagaugcacccauuggcaaaugcaauucugaaugcaucacuccaaauggaagcauucccaaugacaaaccauuccaaaauguaaacaggaucacauacggggccugucccagauauguuaagcaaagcacucugaaauuggcaacaggaaugcgaaauguaccagagaaacaaacuagaggcauauuuggcgcaauagcggguuucauagaaaaugguugggagggaaugguggaugguugguacgguuucaggcaucaaaauucugagggaagaggacaagcagcagaucucaaaagcacucaagcagcaaucgaucaaaucaaugggaagcugaauagauugaucgggaaaaccaacgagaaauuccaucagauugaaaaagaauucucagaagucgaagggagaauucaggaccuugagaaauauguugaggacacuaaaauagaucucuggucauacaacgcggagcuucuuguugcccuggagaaccaacauacaauugaucuaacugacucagaaaugaacaaacuguuugaaaaaacaaagaagcaacugagggaaaaugcugaggauaugggcaaugguuguuucacaauauaccacaaaugugacaaugccugcauaggaucaaucagaaauggaacuuaugaccacaauguauacagagaugaagcauuaaacaaccgguuccagaucaagggaguugagcugaagucaggguacaaagauuggauccuauggauuuccuuugccauaucauguuuuuugcuuuguguugcuuuguugggguucaucaugugggccugccaaaaaggcaacauuaggugcaacauuugcauuuga
